United States Patent Application Publication US 2007/0134655 A1 - sequence listing, part 9

SEQ ID NO: 320455 - RNA, 19 nt, Human
aggagaaaaauauuuggga

SEQ ID NO: 320456 - RNA, 32 nt, Human
aggagaaaaauuagguuccaugcaaagaaaua

SEQ ID NO: 320457 - RNA, 32 nt, Human
aggagaaaacacaugaggguguggucaggguu

SEQ ID NO: 320458 - RNA, 32 nt, Human
aggagaaaagccuucuagggucacugucauuc

SEQ ID NO: 320459 - RNA, 17 nt, Human
aggagaaaagcugcagg

SEQ ID NO: 320460 - RNA, 32 nt, Human
aggagaaaaggauuuuugcauguuuagaaauc

SEQ ID NO: 320461 - RNA, 18 nt, Human
aggagaaaagggugcgga

SEQ ID NO: 320462 - RNA, 19 nt, Human
aggagaaaaguacgacaga

SEQ ID NO: 320463 - RNA, 20 nt, Human
aggagaaaaguggagguaga

SEQ ID NO: 320464 - RNA, 32 nt, Human
aggagaaaaugaggagaaagacaagaaauuuc

SEQ ID NO: 320465 - RNA, 16 nt, Human
aggagaaacauugcag

SEQ ID NO: 320466 - RNA, 18 nt, Human
aggagaaagaaucucaga

SEQ ID NO: 320467 - RNA, 32 nt, Human
aggagaaagagagguaucaaggaucucagaau

SEQ ID NO: 320468 - RNA, 32 nt, Human
aggagaaagaggaggagagagaaaaagggcac

SEQ ID NO: 320469 - RNA, 32 nt, Human
aggagaaagaggaggaucucgaagagaagaga

SEQ ID NO: 320470 - RNA, 32 nt, Human
aggagaaagagggagggagaugggagagaaau

SEQ ID NO: 320471 - RNA, 32 nt, Human
aggagaaagcaguaggcuuccuuucuaagaua

SEQ ID NO: 320472 - RNA, 32 nt, Human
aggagaaagccaaacuccucuguuugguguac

SEQ ID NO: 320473 - RNA, 32 nt, Human
aggagaaagccuuccucuucucucauaggaua

SEQ ID NO: 320474 - RNA, 32 nt, Human
aggagaaaggaaaggaaggcaggagggagaaa

SEQ ID NO: 320475 - RNA, 32 nt, Human
aggagaaaggaaaugagaaugaagacgagaac

SEQ ID NO: 320476 - RNA, 18 nt, Human
aggagaaaguccugcaga

SEQ ID NO: 320477 - RNA, 32 nt, Human
aggagaaaguggaccagcucccaugaccucac

SEQ ID NO: 320478 - RNA, 18 nt, Human
aggagaaauaucuucaga

SEQ ID NO: 320479 - RNA, 32 nt, Human
aggagaaauaugcgugugucuccguacauauu

SEQ ID NO: 320480 - RNA, 32 nt, Human
aggagaaauguccucauauuugaggaccauga

SEQ ID NO: 320481 - RNA, 18 nt, Human
aggagaaauuaauugaga

SEQ ID NO: 320482 - RNA, 19 nt, Human
aggagaacaaauauucaga

SEQ ID NO: 320483 - RNA, 32 nt, Human
aggagaacaagaugaccugggccccgagaaac

SEQ ID NO: 320484 - RNA, 32 nt, Human
aggagaacagaaguucuaacucaguacuugaa

SEQ ID NO: 320485 - RNA, 32 nt, Human
aggagaacagauaaauguggucucagccagcc

SEQ ID NO: 320486 - RNA, 32 nt, Human
aggagaacaugcacgcagcagagaucaugggg

SEQ ID NO: 320487 - RNA, 32 nt, Human
aggagaaccagagucuggaggggaggcacagu

SEQ ID NO: 320488 - RNA, 32 nt, Human
aggagaaccagcaaaaucugugguguuugaca

SEQ ID NO: 320489 - RNA, 32 nt, Human
aggagaaccagcugcccaagcucuuggcugcu

SEQ ID NO: 320490 - RNA, 32 nt, Human
aggagaacccagcgggagaacauuucaggaua

SEQ ID NO: 320491 - RNA, 16 nt, Human
aggagaacgagaauca

SEQ ID NO: 320492 - RNA, 32 nt, Human
aggagaacgcugggaccuaacucuugcugcag

SEQ ID NO: 320493 - RNA, 32 nt, Human
aggagaacuauccucgacucacggugagggaa

SEQ ID NO: 320494 - RNA, 32 nt, Human
aggagaacugccugaacccaggaggcagaggu

SEQ ID NO: 320495 - RNA, 32 nt, Human
aggagaacugcuugaacccaggaggcagaggu

SEQ ID NO: 320496 - RNA, 32 nt, Human
aggagaagaagcaggugaccauggaggcuggc

SEQ ID NO: 320497 - RNA, 32 nt, Human
aggagaagaaguacauggaggccaggccaaga

SEQ ID NO: 320498 - RNA, 32 nt, Human
aggagaagaauuugcuccaggccaggagcaca

SEQ ID NO: 320499 - RNA, 32 nt, Human
aggagaagaccugccuguggguccccaucgcc

SEQ ID NO: 320500 - RNA, 17 nt, Human
aggagaagacugcauga

SEQ ID NO: 320501 - RNA, 32 nt, Human
aggagaagaggaagguaaugguaaaaauuguc

SEQ ID NO: 320502 - RNA, 32 nt, Human
aggagaagaggaggaggaggagcggggucccc

SEQ ID NO: 320503 - RNA, 32 nt, Human
aggagaagagggagaauggagcaggaggaaaa

SEQ ID NO: 320504 - RNA, 32 nt, Human
aggagaagauaccuucucacacccuaccuccu

SEQ ID NO: 320505 - RNA, 32 nt, Human
aggagaagaugugggagcaggaagugaggcug

SEQ ID NO: 320506 - RNA, 32 nt, Human
aggagaagcaauagcagcaggaguccccagca

SEQ ID NO: 320507 - RNA, 32 nt, Human
aggagaagcagcaaggaauugagccuuguaca

SEQ ID NO: 320508 - RNA, 32 nt, Human
aggagaagcccaugaagagaugguggauucuc

SEQ ID NO: 320509 - RNA, 32 nt, Human
aggagaagcucugcuuucuuucucuccaacuu

SEQ ID NO: 320510 - RNA, 32 nt, Human
aggagaagcugcauccagaggcaaacggaggc

SEQ ID NO: 320511 - RNA, 32 nt, Human
aggagaaggaagaagagagaaggagaaggaag

SEQ ID NO: 320512 - RNA, 32 nt, Human
aggagaaggaagcaaggcagcuugcaaggcca

SEQ ID NO: 320513 - RNA, 32 nt, Human
aggagaaggaagcugcagucaugcgucaucac

SEQ ID NO: 320514 - RNA, 32 nt, Human
aggagaaggaggaggagcaggagguggagauu

SEQ ID NO: 320515 - RNA, 32 nt, Human
aggagaaggaggaggaggaagagagugugaaa

SEQ ID NO: 320516 - RNA, 32 nt, Human
aggagaaggaggaggaggaagaggaggagcgc

SEQ ID NO: 320517 - RNA, 32 nt, Human
aggagaaggaggaggaggaggucggaaagugg

SEQ ID NO: 320518 - RNA, 32 nt, Human
aggagaaggaggaggaggcgaacccagagagg

SEQ ID NO: 320519 - RNA, 32 nt, Human
aggagaaggagggagacaugagcauggcugag

SEQ ID NO: 320520 - RNA, 32 nt, Human
aggagaaggagguuuauggagcaaagaaaugg

SEQ ID NO: 320521 - RNA, 20 nt, Human
aggagaaggauccccagcca

SEQ ID NO: 320522 - RNA, 32 nt, Human
aggagaaggcagaaaugcuggggccuggaaua

SEQ ID NO: 320523 - RNA, 32 nt, Human
aggagaaggcggaguagguggggugaggcgga

SEQ ID NO: 320524 - RNA, 32 nt, Human
aggagaaggcugcaugcaagacuucucuguca

SEQ ID NO: 320525 - RNA, 32 nt, Human
aggagaagggaaagguggagggcuaaaggggc

SEQ ID NO: 320526 - RNA, 32 nt, Human
aggagaagggacgcuuuucuuccuucugccca

SEQ ID NO: 320527 - RNA, 32 nt, Human
aggagaagggagggaagagagcagaagggaag

SEQ ID NO: 320528 - RNA, 32 nt, Human
aggagaagggagggucuagaagaggcagcccu

SEQ ID NO: 320529 - RNA, 32 nt, Human
aggagaaggggcuucgaagcagccaggacucu

SEQ ID NO: 320530 - RNA, 18 nt, Human
aggagaagguugcaguga

SEQ ID NO: 320531 - RNA, 32 nt, Human
aggagaagguuguaggcauggaagagagccag

SEQ ID NO: 320532 - RNA, 32 nt, Human
aggagaagucucuaggggucaggaucaagccu

SEQ ID NO: 320533 - RNA, 32 nt, Human
aggagaauagcuugaacccaggagacagaggu

SEQ ID NO: 320534 - RNA, 32 nt, Human
aggagaauaguugugguauggugacuucugug

SEQ ID NO: 320535 - RNA, 32 nt, Human
aggagaauauagaaauacaugagaaucaggaa

SEQ ID NO: 320536 - RNA, 32 nt, Human
aggagaauauggaacucaggaggcggaggcug

SEQ ID NO: 320537 - RNA, 32 nt, Human
aggagaauauugccccacagggcuuagugggu

SEQ ID NO: 320538 - RNA, 32 nt, Human
aggagaaucccuugaacccgggaggcggaggu

SEQ ID NO: 320539 - RNA, 32 nt, Human
aggagaaucccuugaaccugggaggcggaggu

SEQ ID NO: 320540 - RNA, 32 nt, Human
aggagaauggccagaacccaggaggcagagcu

SEQ ID NO: 320541 - RNA, 32 nt, Human
aggagaauggcgugaacccaggaggaggagcu

SEQ ID NO: 320542 - RNA, 32 nt, Human
aggagaauggcuugaacccaggagacagaggu

SEQ ID NO: 320543 - RNA, 32 nt, Human
aggagaaugggauuuuucuuuugaggcaugca

SEQ ID NO: 320544 - RNA, 32 nt, Human
aggagaaugggcagaugcucagcuggaagcuu

SEQ ID NO: 320545 - RNA, 32 nt, Human
aggagaauggugcggagcuugcagugagccga

SEQ ID NO: 320546 - RNA, 32 nt, Human
aggagaaugguguggacccaggaggcagagcu

SEQ ID NO: 320547 - RNA, 32 nt, Human
aggagaauuaagagccucccucccucccucua

SEQ ID NO: 320548 - RNA, 16 nt, Human
aggagaauugccugaa

SEQ ID NO: 320549 - RNA, 32 nt, Human
aggagaauugccugaacccaggaagaggaggu

SEQ ID NO: 320550 - RNA, 16 nt, Human
aggagaauugccugag

SEQ ID NO: 320551 - RNA, 32 nt, Human
aggagaauugcuugaacccaggaggaggugga

SEQ ID NO: 320552 - RNA, 32 nt, Human
aggagacaacuugcaccaguuugaccuuuucu

SEQ ID NO: 320553 - RNA, 16 nt, Human
aggagacaaggaguuu

SEQ ID NO: 320554 - RNA, 32 nt, Human
aggagacaaggcagaagcaacuucuggccgac

SEQ ID NO: 320555 - RNA, 32 nt, Human
aggagacacaaugcuaaugacuccggcuccac

SEQ ID NO: 320556 - RNA, 32 nt, Human
aggagacacaucugggaccagaggaaacaaaa

SEQ ID NO: 320557 - RNA, 32 nt, Human
aggagacacuacugcccccaccccugacagcc

SEQ ID NO: 320558 - RNA, 32 nt, Human
aggagacacuaggagcuugcaggacucggagu

SEQ ID NO: 320559 - RNA, 32 nt, Human
aggagacagacucacccagcacgccuggcaag

SEQ ID NO: 320560 - RNA, 32 nt, Human
aggagacagcacaccaccaggcuccacacgug

SEQ ID NO: 320561 - RNA, 32 nt, Human
aggagacagcauggcagaaacgcacgugugug

SEQ ID NO: 320562 - RNA, 23 nt, Human
aggagacaggagucaccagggca

SEQ ID NO: 320563 - RNA, 32 nt, Human
aggagacaggugauuuacauccccuuugcugu

SEQ ID NO: 320564 - RNA, 32 nt, Human
aggagacauucugcauugaugaccuaccugac

SEQ ID NO: 320565 - RNA, 32 nt, Human
aggagacauugucuccccaguugguucugucc

SEQ ID NO: 320566 - RNA, 19 nt, Human
aggagaccaaggagaguuu

SEQ ID NO: 320567 - RNA, 17 nt, Human
aggagaccacagggauu

SEQ ID NO: 320568 - RNA, 32 nt, Human
aggagaccaguguucaugcaguuguaguaaug

SEQ ID NO: 320569 - RNA, 32 nt, Human
aggagacccagacaucccgaggaaguucccag

SEQ ID NO: 320570 - RNA, 32 nt, Human
aggagacccaggagggagcuuguggggcaggu

SEQ ID NO: 320571 - RNA, 32 nt, Human
aggagacccaggagucaacuuguuuuaauuaa

SEQ ID NO: 320572 - RNA, 32 nt, Human
aggagaccccaaauuugacaccacagaaagca

SEQ ID NO: 320573 - RNA, 32 nt, Human
aggagaccccaggcccuggaggcugcaacaua

SEQ ID NO: 320574 - RNA, 23 nt, Human
aggagaccccguugccacggggg

SEQ ID NO: 320575 - RNA, 18 nt, Human
aggagacccuggaggggc

SEQ ID NO: 320576 - RNA, 22 nt, Human
aggagaccgacguuguuaggga

SEQ ID NO: 320577 - RNA, 17 nt, Human
aggagaccuauagugac

SEQ ID NO: 320578 - RNA, 32 nt, Human
aggagaccucgaggcuucuggacuuaggaggu

SEQ ID NO: 320579 - RNA, 32 nt, Human
aggagaccugacuuagaaaauuggacaaauaa

SEQ ID NO: 320580 - RNA, 32 nt, Human
aggagaccugcaggaggcaagggcugcaacag

SEQ ID NO: 320581 - RNA, 32 nt, Human
aggagaccugggaggagaagguuggaauggcg

SEQ ID NO: 320582 - RNA, 32 nt, Human
aggagacggacgaagggagggagcaagggagg

SEQ ID NO: 320583 - RNA, 32 nt, Human
aggagacggaggcggacucggagccagggaac

SEQ ID NO: 320584 - RNA, 32 nt, Human
aggagacggaguuucacuguuguugcccaggc

SEQ ID NO: 320585 - RNA, 32 nt, Human
aggagacggccacgaagagaggaggcagugag

SEQ ID NO: 320586 - RNA, 32 nt, Human
aggagacgguaggggcaagggaagagagcuga

SEQ ID NO: 320587 - RNA, 32 nt, Human
aggagacuacaaggauaggcccaggaguaaug

SEQ ID NO: 320588 - RNA, 32 nt, Human
aggagacuauuggcauaugauuccaaggacuc

SEQ ID NO: 320589 - RNA, 19 nt, Human
aggagacucaccucugccu

SEQ ID NO: 320590 - RNA, 16 nt, Human
aggagacucagaaaca

SEQ ID NO: 320591 - RNA, 32 nt, Human
aggagacucagggccugccaguucucaccagc

SEQ ID NO: 320592 - RNA, 32 nt, Human
aggagacuccaggacacccucugaguccuuga

SEQ ID NO: 320593 - RNA, 15 nt, Human
aggagacugguagga

SEQ ID NO: 320594 - RNA, 32 nt, Human
aggagacuggugccccacagggauuaagugcc

SEQ ID NO: 320595 - RNA, 32 nt, Human
aggagacuguagucccagcuacucgggagguu

SEQ ID NO: 320596 - RNA, 32 nt, Human
aggagacuguggcgauggugaaugaagguccc

SEQ ID NO: 320597 - RNA, 32 nt, Human
aggagacuguuggcuucugcucuugggugaau

SEQ ID NO: 320598 - RNA, 16 nt, Human
aggagacuuccaggac

SEQ ID NO: 320599 - RNA, 32 nt, Human
aggagagaaagaaaaagagagugggaacagua

SEQ ID NO: 320600 - RNA, 32 nt, Human
aggagagaaagguggaaggaagggaaggagga

SEQ ID NO: 320601 - RNA, 32 nt, Human
aggagagaaauguauuugcagagagagcauga

SEQ ID NO: 320602 - RNA, 31 nt, Human
aggagagaacaauaugucaaccauuugcaug

SEQ ID NO: 320603 - RNA, 32 nt, Human
aggagagaacagugucuuggggaugcugaugg

SEQ ID NO: 320604 - RNA, 32 nt, Human
aggagagaacgcuuccucuaggggaaacaaua

SEQ ID NO: 320605 - RNA, 32 nt, Human
aggagagaagaaaggaaggaagaaaaggauaa

SEQ ID NO: 320606 - RNA, 32 nt, Human
aggagagaagaaauugaaaagcaggcacuuga

SEQ ID NO: 320607 - RNA, 32 nt, Human
aggagagaagcucugugaauguaagcauugug

SEQ ID NO: 320608 - RNA, 32 nt, Human
aggagagaaggggaguggaggaagcacgggac

SEQ ID NO: 320609 - RNA, 32 nt, Human
aggagagaccagccuggccagcauagugaaac

SEQ ID NO: 320610 - RNA, 32 nt, Human
aggagagacuggccuagccucccagccuacau

SEQ ID NO: 320611 - RNA, 32 nt, Human
aggagagagaaggaaaggagugagguauuucc

SEQ ID NO: 320612 - RNA, 32 nt, Human
aggagagagacacauucagcagccaaaggacu

SEQ ID NO: 320613 - RNA, 32 nt, Human
aggagagagacacucuccaugaacacuucucc

SEQ ID NO: 320614 - RNA, 32 nt, Human
aggagagagaggcaauggcuccuucacaaacc

SEQ ID NO: 320615 - RNA, 32 nt, Human
aggagagagagugaacagggagcggggcuuuu

SEQ ID NO: 320616 - RNA, 32 nt, Human
aggagagagauggauucccaagggaugaaagg

SEQ ID NO: 320617 - RNA, 20 nt, Human
aggagagaggaagaggagca

SEQ ID NO: 320618 - RNA, 32 nt, Human
aggagagaggagaaaugcuggaaaggucgaca

SEQ ID NO: 320619 - RNA, 32 nt, Human
aggagagaggaggaggaggaggcugagagagg

SEQ ID NO: 320620 - RNA, 32 nt, Human
aggagagaggcaggccaugccagcaguguggg

SEQ ID NO: 320621 - RNA, 32 nt, Human
aggagagaggcgggaggaagaaguaacaagag

SEQ ID NO: 320622 - RNA, 32 nt, Human
aggagagagggagggcggagggcggaggggcg

SEQ ID NO: 320623 - RNA, 32 nt, Human
aggagagagggcacaucuccagaaaaaugaaa

SEQ ID NO: 320624 - RNA, 32 nt, Human
aggagagaugcuggaggugggggugcuguguu

SEQ ID NO: 320625 - RNA, 32 nt, Human
aggagagauggccaggguggcagcccucaugc

SEQ ID NO: 320626 - RNA, 32 nt, Human
aggagagcaaaugucacaaaagacugagcaau

SEQ ID NO: 320627 - RNA, 32 nt, Human
aggagagcaagucccuguugggguaaugcagg

SEQ ID NO: 320628 - RNA, 32 nt, Human
aggagagcaccaggacgaggaugggaagcgac

SEQ ID NO: 320629 - RNA, 32 nt, Human
aggagagcagguuucagauccuuacuugccga

SEQ ID NO: 320630 - RNA, 32 nt, Human
aggagagccaggccugcccugcccugcuggcu

SEQ ID NO: 320631 - RNA, 32 nt, Human
aggagagcccucugcugcuuuccaacacacaa

SEQ ID NO: 320632 - RNA, 32 nt, Human
aggagagccuccauccugucuucauccucaag

SEQ ID NO: 320633 - RNA, 32 nt, Human
aggagagccugugaguuugaggcugcaaugag

SEQ ID NO: 320634 - RNA, 32 nt, Human
aggagagccuuggcccaagucuggaccaauga

SEQ ID NO: 320635 - RNA, 32 nt, Human
aggagagcgagagagagugaggacaccgaacu

SEQ ID NO: 320636 - RNA, 20 nt, Human
aggagagcgcggcccaccca

SEQ ID NO: 320637 - RNA, 32 nt, Human
aggagagcggcuggcaguccugccuggugccc

SEQ ID NO: 320638 - RNA, 32 nt, Human
aggagagcgggccgccccacagcccgagccgg

SEQ ID NO: 320639 - RNA, 32 nt, Human
aggagagcucgccgggcucugaggcgcaggaa

SEQ ID NO: 320640 - RNA, 18 nt, Human
aggagagcucuucuucaa

SEQ ID NO: 320641 - RNA, 32 nt, Human
aggagagcugcgagcccagcugcugagcaggg

SEQ ID NO: 320642 - RNA, 32 nt, Human
aggagagcuugugggagccaaggagcaccuug

SEQ ID NO: 320643 - RNA, 32 nt, Human
aggagaggaaaagguguaggccugccuuaccg

SEQ ID NO: 320644 - RNA, 32 nt, Human
aggagaggaagagagaccugcccuguagcgug

SEQ ID NO: 320645 - RNA, 32 nt, Human
aggagaggaagaggaggaagacagugggaguc

SEQ ID NO: 320646 - RNA, 32 nt, Human
aggagaggaagugggagaaggaaggggaggac

SEQ ID NO: 320647 - RNA, 32 nt, Human
aggagaggagaaagggaggaagcugggcugug

SEQ ID NO: 320648 - RNA, 32 nt, Human
aggagaggagagggaggauccuggaggacugg

SEQ ID NO: 320649 - RNA, 32 nt, Human
aggagaggagcguggggucagcuccagcaggg

SEQ ID NO: 320650 - RNA, 32 nt, Human
aggagaggagcugccuuuccacccccuucaag

SEQ ID NO: 320651 - RNA, 32 nt, Human
aggagaggaggagaaagccagguugauguuag

SEQ ID NO: 320652 - RNA, 32 nt, Human
aggagaggagggaggaagagcugggcgagagg

SEQ ID NO: 320653 - RNA, 32 nt, Human
aggagaggagucaggccgcgacugugcaggag

SEQ ID NO: 320654 - RNA, 32 nt, Human
aggagaggcaagaaaauuaugcuguccauaga

SEQ ID NO: 320655 - RNA, 32 nt, Human
aggagaggcaccugacauauguucucuaggcc

SEQ ID NO: 320656 - RNA, 32 nt, Human
aggagaggccagggaggguucuccccacgaca

SEQ ID NO: 320657 - RNA, 32 nt, Human
aggagaggccaugaaagaaccuguccuucugg

SEQ ID NO: 320658 - RNA, 32 nt, Human
aggagaggccucgggaugucucuggcagauga

SEQ ID NO: 320659 - RNA, 32 nt, Human
aggagaggcuacgugaacaggagaagcugcca

SEQ ID NO: 320660 - RNA, 32 nt, Human
aggagaggcucugaaagcugcuucugggggau

SEQ ID NO: 320661 - RNA, 32 nt, Human
aggagaggcugcaggaacaggagaggcugcug

SEQ ID NO: 320662 - RNA, 32 nt, Human
aggagaggcugcuggagagggagaggcugcug

SEQ ID NO: 320663 - RNA, 32 nt, Human
aggagaggcuguaggcugugccugucgccccc

SEQ ID NO: 320664 - RNA, 32 nt, Human
aggagaggcugugugaacaggagaagcugcca

SEQ ID NO: 320665 - RNA, 32 nt, Human
aggagaggcuucaggagcaggaugagaggcug

SEQ ID NO: 320666 - RNA, 32 nt, Human
aggagagggaagagguagaggaugagaggaug

SEQ ID NO: 320667 - RNA, 32 nt, Human
aggagagggagaaaggcccgagccccugccuu

SEQ ID NO: 320668 - RNA, 32 nt, Human
aggagagggagaaagggaagucccagggcccg

SEQ ID NO: 320669 - RNA, 32 nt, Human
aggagagggaggucacggcguaaaggugcagc

SEQ ID NO: 320670 - RNA, 32 nt, Human
aggagagggcaauagagggaagacugaggcug

SEQ ID NO: 320671 - RNA, 32 nt, Human
aggagagggccuggggcucuugcuucccgaga

SEQ ID NO: 320672 - RNA, 32 nt, Human
aggagagggccugugggcuugcuuuuggaagg

SEQ ID NO: 320673 - RNA, 32 nt, Human
aggagagggcuggggcgcuccgcugagccacu

SEQ ID NO: 320674 - RNA, 32 nt, Human
aggagagggggaggaaaaggagagggaagagg

SEQ ID NO: 320675 - RNA, 32 nt, Human
aggagagggucugaggggugggauggggguca

SEQ ID NO: 320676 - RNA, 32 nt, Human
aggagagggugaggaagaaagagaggaauacu

SEQ ID NO: 320677 - RNA, 32 nt, Human
aggagaggguuucuuuuuaagguaucuucuug

SEQ ID NO: 320678 - RNA, 32 nt, Human
aggagagguaugagcagccucucaccugugag

SEQ ID NO: 320679 - RNA, 32 nt, Human
aggagagguggauggcaugagcagcaaggggg

SEQ ID NO: 320680 - RNA, 32 nt, Human
aggagagguucagaggacaggaggagccuccc

SEQ ID NO: 320681 - RNA, 32 nt, Human
aggagaguaaaggagagcaggagcaauuggcu

SEQ ID NO: 320682 - RNA, 32 nt, Human
aggagaguacuguggcuuagaggaaagaaaug

SEQ ID NO: 320683 - RNA, 32 nt, Human
aggagagugaaagucagccugccccucucacg

SEQ ID NO: 320684 - RNA, 24 nt, Human
aggagagugaugauggagcauaua

SEQ ID NO: 320685 - RNA, 24 nt, Human
aggagagugaugauucugugaaua

SEQ ID NO: 320686 - RNA, 17 nt, Human
aggagagugauggggag

SEQ ID NO: 320687 - RNA, 32 nt, Human
aggagagugauugauuuucuuccuccaauagu

SEQ ID NO: 320688 - RNA, 20 nt, Human
aggagaguggugggggccug

SEQ ID NO: 320689 - RNA, 32 nt, Human
aggagauaccagcagagagggaguaggagaga

SEQ ID NO: 320690 - RNA, 32 nt, Human
aggagauauggaaggcagaagugaagaaagca

SEQ ID NO: 320691 - RNA, 32 nt, Human
aggagauauugcuaggaaucucuaggcuguua

SEQ ID NO: 320692 - RNA, 32 nt, Human
aggagaucaaaaccauccuggcuaacauggug

SEQ ID NO: 320693 - RNA, 32 nt, Human
aggagaucaagaccagccuggccaacauagug

SEQ ID NO: 320694 - RNA, 32 nt, Human
aggagaucacacacuaagagaacguugauugc

SEQ ID NO: 320695 - RNA, 32 nt, Human
aggagaucacaccucuguccagccugcaccgg

SEQ ID NO: 320696 - RNA, 22 nt, Human
aggagaucagcaggacgcugcg

SEQ ID NO: 320697 - RNA, 32 nt, Human
aggagauccuccugcaggagcuggagccgguc

SEQ ID NO: 320698 - RNA, 32 nt, Human
aggagaucgagaccagccugaccaacauggug

SEQ ID NO: 320699 - RNA, 32 nt, Human
aggagaucgagaccagccuggccaacauggcg

SEQ ID NO: 320700 - RNA, 32 nt, Human
aggagaucgagaccagccuggcuaacacagug

SEQ ID NO: 320701 - RNA, 32 nt, Human
aggagaucgagaccagccuggcuaacacggug

SEQ ID NO: 320702 - RNA, 32 nt, Human
aggagaucugucagcugcuuaauuauugaaac

SEQ ID NO: 320703 - RNA, 32 nt, Human
aggagaucugucucccugugccuggagaguua

SEQ ID NO: 320704 - RNA, 32 nt, Human
aggagaucuuguuaccuccucaucuacaugug

SEQ ID NO: 320705 - RNA, 32 nt, Human
aggagaucuuuccuuguggugguuucugugag

SEQ ID NO: 320706 - RNA, 18 nt, Human
aggagaugcccaaagcca

SEQ ID NO: 320707 - RNA, 32 nt, Human
aggagaugcccagguucagguguaucgugcau

SEQ ID NO: 320708 - RNA, 21 nt, Human
aggagaugccuggccucguua

SEQ ID NO: 320709 - RNA, 32 nt, Human
aggagaugcucaauagauguuuguugaaugaa

SEQ ID NO: 320710 - RNA, 32 nt, Human
aggagauggaaagaaaaagaagaaaaagaagg

SEQ ID NO: 320711 - RNA, 32 nt, Human
aggagauggaaaugacuucaaggaagacuccg

SEQ ID NO: 320712 - RNA, 32 nt, Human
aggagauggaguuucacugugucagccaggau

SEQ ID NO: 320713 - RNA, 32 nt, Human
aggagauggcaggacacagcaaacaggacaca

SEQ ID NO: 320714 - RNA, 24 nt, Human
aggagaugggguuuugccauguug

SEQ ID NO: 320715 - RNA, 32 nt, Human
aggagaugguaaguucaagaagacugauugca

SEQ ID NO: 320716 - RNA, 32 nt, Human
aggagaugucagcugagcucauucuggggcag

SEQ ID NO: 320717 - RNA, 32 nt, Human
aggagauguccagccaaugaugcccggcuucu

SEQ ID NO: 320718 - RNA, 32 nt, Human
aggagauguccaggcugaagguggugauuuga

SEQ ID NO: 320719 - RNA, 32 nt, Human
aggagaugugugagcaauuucuguaccuucua

SEQ ID NO: 320720 - RNA, 32 nt, Human
aggagauuaggucacagacaugugcgauuaca

SEQ ID NO: 320721 - RNA, 32 nt, Human
aggagauuaucgcauagaguucagagacugga

SEQ ID NO: 320722 - RNA, 32 nt, Human
aggagauucaggcagacugguggcaguggagu

SEQ ID NO: 320723 - RNA, 32 nt, Human
aggagauucccccaaacaacaauauuuaauuu

SEQ ID NO: 320724 - RNA, 32 nt, Human
aggagauugagaccagccuggccaacauggug

SEQ ID NO: 320725 - RNA, 32 nt, Human
aggagauugagaccagccugggcaacauagua

SEQ ID NO: 320726 - RNA, 32 nt, Human
aggagauugcccaggaucaagggugcgguguu

SEQ ID NO: 320727 - RNA, 32 nt, Human
aggagauugggaaccuagagcuugccugggau

SEQ ID NO: 320728 - RNA, 32 nt, Human
aggagcaaaagaugcuccauggcacaggacaa

SEQ ID NO: 320729 - RNA, 18 nt, Human
aggagcaaaaugaagcau

SEQ ID NO: 320730 - RNA, 32 nt, Human
aggagcaaacuugcaucugucugaccucaaag

SEQ ID NO: 320731 - RNA, 32 nt, Human
aggagcaaaggcugagaacacugugaaaacau

SEQ ID NO: 320732 - RNA, 32 nt, Human
aggagcaacaucaccuguguagucugguuccu

SEQ ID NO: 320733 - RNA, 17 nt, Human
aggagcaacccagaagc

SEQ ID NO: 320734 - RNA, 32 nt, Human
aggagcaagagcuucagccugaagacaaggga

SEQ ID NO: 320735 - RNA, 20 nt, Human
aggagcaagccaggaagcca

SEQ ID NO: 320736 - RNA, 32 nt, Human
aggagcaaugaccauugugcacaugcgugugg

SEQ ID NO: 320737 - RNA, 21 nt, Human
aggagcaauggcaccugggca

SEQ ID NO: 320738 - RNA, 32 nt, Human
aggagcaauugaagaaagggaggagccagauu

SEQ ID NO: 320739 - RNA, 32 nt, Human
aggagcacaagccacaagucuuccagaggaug

SEQ ID NO: 320740 - RNA, 18 nt, Human
aggagcacaccgaggcca

SEQ ID NO: 320741 - RNA, 15 nt, Human
aggagcacagaauuu

SEQ ID NO: 320742 - RNA, 32 nt, Human
aggagcacagccacaucugccucuggcugccu

SEQ ID NO: 320743 - RNA, 23 nt, Human
aggagcacagcggcccgcccucu

SEQ ID NO: 320744 - RNA, 32 nt, Human
aggagcacaggcaccagcucugacgggaguga

SEQ ID NO: 320745 - RNA, 32 nt, Human
aggagcacaggcaggucccagcucaggugagc

SEQ ID NO: 320746 - RNA, 32 nt, Human
aggagcacccagugccccaggccuugcacugu

SEQ ID NO: 320747 - RNA, 32 nt, Human
aggagcaccgccgcggacuccagcacaccgag

SEQ ID NO: 320748 - RNA, 32 nt, Human
aggagcaccggcugccccucuggguggcacua

SEQ ID NO: 320749 - RNA, 21 nt, Human
aggagcaccugguucuucucu

SEQ ID NO: 320750 - RNA, 32 nt, Human
aggagcacggcucuguccccagccugggaaag

SEQ ID NO: 320751 - RNA, 32 nt, Human
aggagcacugccucagccuuugcacaugguaa

SEQ ID NO: 320752 - RNA, 32 nt, Human
aggagcacugccuuucaguggaccgggugggg

SEQ ID NO: 320753 - RNA, 32 nt, Human
aggagcacugugagagaaaucacaaaguauua

SEQ ID NO: 320754 - RNA, 21 nt, Human
aggagcagaaggcagaggcca

SEQ ID NO: 320755 - RNA, 32 nt, Human
aggagcagaaggcaucuucucacugugcugca

SEQ ID NO: 320756 - RNA, 16 nt, Human
aggagcagaauaggac

SEQ ID NO: 320757 - RNA, 32 nt, Human
aggagcagaauccaguucaggcgcccaucucc

SEQ ID NO: 320758 - RNA, 32 nt, Human
aggagcagagaaaggaggccaagagcuggauc

SEQ ID NO: 320759 - RNA, 19 nt, Human
aggagcagaggccagacca

SEQ ID NO: 320760 - RNA, 32 nt, Human
aggagcagauggcagaaacagagagaaacgac

SEQ ID NO: 320761 - RNA, 21 nt, Human
aggagcagcacaggcagaggc

SEQ ID NO: 320762 - RNA, 32 nt, Human
aggagcagcaggaccccggaaaccacuggagg

SEQ ID NO: 320763 - RNA, 20 nt, Human
aggagcagccagcuguggca

SEQ ID NO: 320764 - RNA, 20 nt, Human
aggagcagcuucaggagcca

SEQ ID NO: 320765 - RNA, 30 nt, Human
aggagcagcuugcaaggggagccgguggag

SEQ ID NO: 320766 - RNA, 32 nt, Human
aggagcaggaaggggaaggaggccugggaccc

SEQ ID NO: 320767 - RNA, 32 nt, Human
aggagcaggagaaggagcaggucaugcucgug

SEQ ID NO: 320768 - RNA, 32 nt, Human
aggagcaggagagaaaggaggguggguggucu

SEQ ID NO: 320769 - RNA, 32 nt, Human
aggagcaggauguccuuccagggcaagaaaag

SEQ ID NO: 320770 - RNA, 32 nt, Human
aggagcaggcaacugaaccccagccuggaccc

SEQ ID NO: 320771 - RNA, 18 nt, Human
aggagcagggagaggcca

SEQ ID NO: 320772 - RNA, 32 nt, Human
aggagcagggaggagggggagcaggggcccuc

SEQ ID NO: 320773 - RNA, 32 nt, Human
aggagcagggcaacagcaccugccccacccug

SEQ ID NO: 320774 - RNA, 32 nt, Human
aggagcaggggugggaggcagguggacuccug

SEQ ID NO: 320775 - RNA, 32 nt, Human
aggagcaguacaccgagcgccuccaggccagc

SEQ ID NO: 320776 - RNA, 32 nt, Human
aggagcaguaugugcugauugccaaacagauc

SEQ ID NO: 320777 - RNA, 32 nt, Human
aggagcagugacccugcugccucccagagcca

SEQ ID NO: 320778 - RNA, 32 nt, Human
aggagcagugccugugucagccauggggcccu

SEQ ID NO: 320779 - RNA, 32 nt, Human
aggagcauaacuuggaauguacaggaauauuu

SEQ ID NO: 320780 - RNA, 32 nt, Human
aggagcauaccccaaaccagacauaugcuuag

SEQ ID NO: 320781 - RNA, 32 nt, Human
aggagcaucaccagcuccucagagccacuccg

SEQ ID NO: 320782 - RNA, 32 nt, Human
aggagcaucacuaugccugugugaaaguauau

SEQ ID NO: 320783 - RNA, 32 nt, Human
aggagcauccaccuccuucucugucucaugug

SEQ ID NO: 320784 - RNA, 24 nt, Human
aggagcauccgugaugcucagugu

SEQ ID NO: 320785 - RNA, 32 nt, Human
aggagcaucugugauuuguccucugcuuaugg

SEQ ID NO: 320786 - RNA, 20 nt, Human
aggagcaugcgcagaggcca

SEQ ID NO: 320787 - RNA, 32 nt, Human
aggagcauuaagccaggcucuagcuagagccc

SEQ ID NO: 320788 - RNA, 32 nt, Human
aggagcauuagccuggugugguggcucaugcc

SEQ ID NO: 320789 - RNA, 16 nt, Human
aggagcauugcuugaa

SEQ ID NO: 320790 - RNA, 21 nt, Human
aggagcauuucuggggggcag

SEQ ID NO: 320791 - RNA, 32 nt, Human
aggagccaacaguaaugucuuucuggaaacau

SEQ ID NO: 320792 - RNA, 20 nt, Human
aggagccaagaacuggcggg

SEQ ID NO: 320793 - RNA, 15 nt, Human
aggagccaauaggac

SEQ ID NO: 320794 - RNA, 32 nt, Human
aggagccacacagacucuucugagcccccuca

SEQ ID NO: 320795 - RNA, 32 nt, Human
aggagccacccaggugauuccaaugauaggug

SEQ ID NO: 320796 - RNA, 32 nt, Human
aggagccaccuugccacccauucuucccguuc

SEQ ID NO: 320797 - RNA, 19 nt, Human
aggagccacgugacacugc

SEQ ID NO: 320798 - RNA, 32 nt, Human
aggagccacugcacuccagccugggugacaga

SEQ ID NO: 320799 - RNA, 32 nt, Human
aggagccacugcucagugcacuucucccuucc

SEQ ID NO: 320800 - RNA, 16 nt, Human
aggagccacuguggca

SEQ ID NO: 320801 - RNA, 32 nt, Human
aggagccagaagccccggagauguaacgcccc

SEQ ID NO: 320802 - RNA, 32 nt, Human
aggagccagaaguaaggacugaaggagaaggg

SEQ ID NO: 320803 - RNA, 22 nt, Human
aggagccagaggaaccagggca

SEQ ID NO: 320804 - RNA, 32 nt, Human
aggagccagaguugaugagcagaucuguggaa

SEQ ID NO: 320805 - RNA, 32 nt, Human
aggagccagcacucagggcucucugccuucua

SEQ ID NO: 320806 - RNA, 32 nt, Human
aggagccagccuugugagugccaagucccccu

SEQ ID NO: 320807 - RNA, 18 nt, Human
aggagccagcgcugggca

SEQ ID NO: 320808 - RNA, 32 nt, Human
aggagccagcggccgacaaagcagaaacaccc

SEQ ID NO: 320809 - RNA, 21 nt, Human
aggagccagcggugggcagcg

SEQ ID NO: 320810 - RNA, 32 nt, Human
aggagccaggaagagagcugugaccagcagcg

SEQ ID NO: 320811 - RNA, 32 nt, Human
aggagccaggagaguagcuacaaugacuucac

SEQ ID NO: 320812 - RNA, 32 nt, Human
aggagccaggcagaguccagggauucuuggaa

SEQ ID NO: 320813 - RNA, 24 nt, Human
aggagccaggcugcccagaaacgu

SEQ ID NO: 320814 - RNA, 32 nt, Human
aggagccagugcaaaggccccgagguggcagu

SEQ ID NO: 320815 - RNA, 21 nt, Human
aggagccauaugccugggcug

SEQ ID NO: 320816 - RNA, 32 nt, Human
aggagccaucgcugugggaggcagcaggcccc

SEQ ID NO: 320817 - RNA, 32 nt, Human
aggagcccaacacauggugaccugagcaaaca

SEQ ID NO: 320818 - RNA, 20 nt, Human
aggagcccacuucuguggca

SEQ ID NO: 320819 - RNA, 32 nt, Human
aggagcccagaagagacacugaggacaagaga

SEQ ID NO: 320820 - RNA, 32 nt, Human
aggagcccagacaaagcccaggccugucaaga

SEQ ID NO: 320821 - RNA, 22 nt, Human
aggagcccaugcagacacuggu

SEQ ID NO: 320822 - RNA, 32 nt, Human
aggagccccaccucagcaucacugccuuaauc

SEQ ID NO: 320823 - RNA, 32 nt, Human
aggagccccacugcuuccagccucuggugcca

SEQ ID NO: 320824 - RNA, 32 nt, Human
aggagccccaggaagguggagcgccacaggaa

SEQ ID NO: 320825 - RNA, 32 nt, Human
aggagccccgggagggggcugcaguuuccuuc

SEQ ID NO: 320826 - RNA, 32 nt, Human
aggagccccugcccucccucccuguccugugc

SEQ ID NO: 320827 - RNA, 32 nt, Human
aggagccccuggcagaguccacgcugccucag

SEQ ID NO: 320828 - RNA, 32 nt, Human
aggagcccgcagcaaucuccacagccuccugg

SEQ ID NO: 320829 - RNA, 22 nt, Human
aggagcccgggccccgcggcgg

SEQ ID NO: 320830 - RNA, 32 nt, Human
aggagcccguagucccagcuacucaggaggcu

SEQ ID NO: 320831 - RNA, 19 nt, Human
aggagcccgugggcugcug

SEQ ID NO: 320832 - RNA, 32 nt, Human
aggagcccuaaaugucagugcagcagcccuaa

SEQ ID NO: 320833 - RNA, 32 nt, Human
aggagcccucaucugcugugcugaguccagga

SEQ ID NO: 320834 - RNA, 25 nt, Human
aggagcccuccucaccgcucuuccu

SEQ ID NO: 320835 - RNA, 32 nt, Human
aggagcccuccugccugggagcuuguucuuug

SEQ ID NO: 320836 - RNA, 32 nt, Human
aggagcccucugcaaacuacagaaggauggau

SEQ ID NO: 320837 - RNA, 17 nt, Human
aggagcccucuguggca

SEQ ID NO: 320838 - RNA, 21 nt, Human
aggagcccuggcccagagcca

SEQ ID NO: 320839 - RNA, 32 nt, Human
aggagcccuugaggaagcagucucguguccuc

SEQ ID NO: 320840 - RNA, 32 nt, Human
aggagccgacagcagagggggaagcugaaaag

SEQ ID NO: 320841 - RNA, 20 nt, Human
aggagccgaccuggggcugc

SEQ ID NO: 320842 - RNA, 24 nt, Human
aggagccgagagagcugagcagcg

SEQ ID NO: 320843 - RNA, 32 nt, Human
aggagccgagucaggcucucuccacugccugc

SEQ ID NO: 320844 - RNA, 20 nt, Human
aggagccgcgcggggcgcug

SEQ ID NO: 320845 - RNA, 32 nt, Human
aggagccgcggaggaggacagugagggaggaa

SEQ ID NO: 320846 - RNA, 22 nt, Human
aggagccgcggcgcgggcagcg

SEQ ID NO: 320847 - RNA, 31 nt, Human
aggagccgcggugaaagaugggggaugcugc

SEQ ID NO: 320848 - RNA, 22 nt, Human
aggagccgcugcugagcugcgu

SEQ ID NO: 320849 - RNA, 27 nt, Human
aggagccggaagggcacgcgggcagcg

SEQ ID NO: 320850 - RNA, 32 nt, Human
aggagccggaggaggaggaggaggaggaggca

SEQ ID NO: 320851 - RNA, 32 nt, Human
aggagccggcccaagcccagggucccugcuug

SEQ ID NO: 320852 - RNA, 24 nt, Human
aggagccggcccugcuggccacgc

SEQ ID NO: 320853 - RNA, 18 nt, Human
aggagccggccucgggca

SEQ ID NO: 320854 - RNA, 24 nt, Human
aggagccggccugcugggcagcgu

SEQ ID NO: 320855 - RNA, 32 nt, Human
aggagccgggacccaggagagggcugcuauuu

SEQ ID NO: 320856 - RNA, 32 nt, Human
aggagccgggagagccgagugggaggggccgc

SEQ ID NO: 320857 - RNA, 23 nt, Human
aggagccggguccugggcaaggc

SEQ ID NO: 320858 - RNA, 32 nt, Human
aggagccggucaccccagaguaucccuuucac

SEQ ID NO: 320859 - RNA, 19 nt, Human
aggagccucaccccugccu

SEQ ID NO: 320860 - RNA, 32 nt, Human
aggagccucagauaaguauuuguacuugagac

SEQ ID NO: 320861 - RNA, 32 nt, Human
aggagccuccagggaguucucuuugaggcugg

SEQ ID NO: 320862 - RNA, 31 nt, Human
aggagccuccuguuugggccugggucugggc

SEQ ID NO: 320863 - RNA, 32 nt, Human
aggagccuccuugugucugaugcacagaugug

SEQ ID NO: 320864 - RNA, 32 nt, Human
aggagccugagaacuccuccuccugggacucu

SEQ ID NO: 320865 - RNA, 32 nt, Human
aggagccugagccucaggcuguuggagaagca

SEQ ID NO: 320866 - RNA, 32 nt, Human
aggagccugccuggggccugccucugccagaa

SEQ ID NO: 320867 - RNA, 19 nt, Human
aggagccugcucuaaggca

SEQ ID NO: 320868 - RNA, 32 nt, Human
aggagccugcuggucacagccuccucugucug

SEQ ID NO: 320869 - RNA, 21 nt, Human
aggagccuggacuucugugca

SEQ ID NO: 320870 - RNA, 32 nt, Human
aggagccuggaugcuaaugucucuccaaagug

SEQ ID NO: 320871 - RNA, 23 nt, Human
aggagccugggaaagccagggca

SEQ ID NO: 320872 - RNA, 22 nt, Human
aggagccugggaccaggagcca

SEQ ID NO: 320873 - RNA, 18 nt, Human
aggagccugggcugagca

SEQ ID NO: 320874 - RNA, 22 nt, Human
aggagccugggcuuggaucuau

SEQ ID NO: 320875 - RNA, 32 nt, Human
aggagccugggguccccugggguggggugguc

SEQ ID NO: 320876 - RNA, 20 nt, Human
aggagccugggucugaagca

SEQ ID NO: 320877 - RNA, 32 nt, Human
aggagccugguucacaggcuuagugauggaga

SEQ ID NO: 320878 - RNA, 32 nt, Human
aggagccuguaaucccagcuacacaggaggcu

SEQ ID NO: 320879 - RNA, 32 nt, Human
aggagccuguaaucccagcuguucgggaggcu

SEQ ID NO: 320880 - RNA, 32 nt, Human
aggagccuguaauccuagcuacucaggaggcu

SEQ ID NO: 320881 - RNA, 32 nt, Human
aggagccugugcagauggccaugcccaaccaa

SEQ ID NO: 320882 - RNA, 32 nt, Human
aggagccuugcaggcuggagggcggcuggaga

SEQ ID NO: 320883 - RNA, 21 nt, Human
aggagccuugggcugggcagc

SEQ ID NO: 320884 - RNA, 32 nt, Human
aggagccuuguuucuuuugcuuccugaccuuc

SEQ ID NO: 320885 - RNA, 32 nt, Human
aggagcgagagggacgcgagcaagagagcgag

SEQ ID NO: 320886 - RNA, 32 nt, Human
aggagcgaguaggagagagggagcgagagcca

SEQ ID NO: 320887 - RNA, 32 nt, Human
aggagcgcccaguucauggaggcugcugcugu

SEQ ID NO: 320888 - RNA, 32 nt, Human
aggagcgcuaaguuguugggaggccugggucc

SEQ ID NO: 320889 - RNA, 32 nt, Human
aggagcgcuggacugugguggacagugagggc

SEQ ID NO: 320890 - RNA, 32 nt, Human
aggagcggaaggcagugggugugaccaaaagu

SEQ ID NO: 320891 - RNA, 32 nt, Human
aggagcggagggagccugguggcuggggcugg

SEQ ID NO: 320892 - RNA, 32 nt, Human
aggagcggagggcccuguuggggaagguuggg

SEQ ID NO: 320893 - RNA, 32 nt, Human
aggagcggaugcccuuuauccaguacugagga

SEQ ID NO: 320894 - RNA, 24 nt, Human
aggagcggcacaggcgccagggca

SEQ ID NO: 320895 - RNA, 21 nt, Human
aggagcggcagcggcaaggca

SEQ ID NO: 320896 - RNA, 32 nt, Human
aggagcggcaggccuugaggcugucgucgagg

SEQ ID NO: 320897 - RNA, 32 nt, Human
aggagcggccagggaggguucuccccaugaca

SEQ ID NO: 320898 - RNA, 22 nt, Human
aggagcggccgggagcccgccg

SEQ ID NO: 320899 - RNA, 23 nt, Human
aggagcggccuccacggaagcca

SEQ ID NO: 320900 - RNA, 32 nt, Human
aggagcggcggaaccucccuccccagcucuga

SEQ ID NO: 320901 - RNA, 32 nt, Human
aggagcggcugcggaagcaggagcagcacaug

SEQ ID NO: 320902 - RNA, 32 nt, Human
aggagcgggcccuguacccaccugcugaccug

SEQ ID NO: 320903 - RNA, 32 nt, Human
aggagcgggccgcggcgcugaggcggcggagc

SEQ ID NO: 320904 - RNA, 18 nt, Human
aggagcgggcgccuggga

SEQ ID NO: 320905 - RNA, 32 nt, Human
aggagcgggggugggagauagcaaggaaacac

SEQ ID NO: 320906 - RNA, 24 nt, Human
aggagcggggucugcagcagggca

SEQ ID NO: 320907 - RNA, 32 nt, Human
aggagcguacucacucagccuggucagccugg

SEQ ID NO: 320908 - RNA, 21 nt, Human
aggagcguaggcagggcagcg

SEQ ID NO: 320909 - RNA, 32 nt, Human
aggagcgucacccaagcuucagaagagaauuc

SEQ ID NO: 320910 - RNA, 32 nt, Human
aggagcgugaguugugcuguccuggcucgaga

SEQ ID NO: 320911 - RNA, 32 nt, Human
aggagcgugcgugcgucugguauagggaggac

SEQ ID NO: 320912 - RNA, 32 nt, Human
aggagcgugguggaggagcugcaggugggggc

SEQ ID NO: 320913 - RNA, 32 nt, Human
aggagcuaaggacuugcauuuucaguuuguuc

SEQ ID NO: 320914 - RNA, 32 nt, Human
aggagcuacaacugugagggggcugcuagagu

SEQ ID NO: 320915 - RNA, 32 nt, Human
aggagcuacccacuccaaggucucugcugaga

SEQ ID NO: 320916 - RNA, 32 nt, Human
aggagcuacccacuuccgguauccuugacucu

SEQ ID NO: 320917 - RNA, 32 nt, Human
aggagcuacugggcuggcgucccaggcauaga

SEQ ID NO: 320918 - RNA, 32 nt, Human
aggagcuagagaccagccuggucaacauggug

SEQ ID NO: 320919 - RNA, 32 nt, Human
aggagcuagcccagucccuggagcuguccuuc

SEQ ID NO: 320920 - RNA, 32 nt, Human
aggagcuaguuuaccagccugugacaacugag

SEQ ID NO: 320921 - RNA, 32 nt, Human
aggagcucaagaccagccugaccaacauggug

SEQ ID NO: 320922 - RNA, 32 nt, Human
aggagcucaagaccagccugaccaauauagug

SEQ ID NO: 320923 - RNA, 32 nt, Human
aggagcucaagaccagccuggacaacauggca

SEQ ID NO: 320924 - RNA, 32 nt, Human
aggagcucaagaccagccuggcuaacauggug

SEQ ID NO: 320925 - RNA, 32 nt, Human
aggagcucaagaccagccuggguaacaaagug

SEQ ID NO: 320926 - RNA, 32 nt, Human
aggagcucaagaccagccuggucaacauggug

SEQ ID NO: 320927 - RNA, 32 nt, Human
aggagcucacgcagccccuccaugggacagga

SEQ ID NO: 320928 - RNA, 32 nt, Human
aggagcucagcggucuucaggcauuuuuguaa

SEQ ID NO: 320929 - RNA, 32 nt, Human
aggagcucaggaagaagagaugcacuauaugu

SEQ ID NO: 320930 - RNA, 24 nt, Human
aggagcucaggaccagucuucucu

SEQ ID NO: 320931 - RNA, 32 nt, Human
aggagcucaggaggaggaccccaggggagagg

SEQ ID NO: 320932 - RNA, 32 nt, Human
aggagcucaggccacagacacagagaccacgg

SEQ ID NO: 320933 - RNA, 18 nt, Human
aggagcuccagacaggac

SEQ ID NO: 320934 - RNA, 32 nt, Human
aggagcuccagaccagccuggccaacauggcg

SEQ ID NO: 320935 - RNA, 32 nt, Human
aggagcuccagugcagccccaucccaggaugg

SEQ ID NO: 320936 - RNA, 32 nt, Human
aggagcucccagagagacugccuucccuacac

SEQ ID NO: 320937 - RNA, 32 nt, Human
aggagcuccgcgcggcugcagcgcgggcggga

SEQ ID NO: 320938 - RNA, 32 nt, Human
aggagcuccugcaccccuccccaaauguccau

SEQ ID NO: 320939 - RNA, 32 nt, Human
aggagcucgagaccagccuggccaacauggug

SEQ ID NO: 320940 - RNA, 32 nt, Human
aggagcucgagaccagccuggccgacauggcg

SEQ ID NO: 320941 - RNA, 32 nt, Human
aggagcucucgcuggcccagacgugggcccag

SEQ ID NO: 320942 - RNA, 32 nt, Human
aggagcucugagaacagucuccuucaacaguu

SEQ ID NO: 320943 - RNA, 32 nt, Human
aggagcucugcucuccccuccagaguuaauua

SEQ ID NO: 320944 - RNA, 32 nt, Human
aggagcucugcugggccaccucuugggcaaca

SEQ ID NO: 320945 - RNA, 32 nt, Human
aggagcucugggcucccaguucaggaugggcc

SEQ ID NO: 320946 - RNA, 32 nt, Human
aggagcucuggguacagggcagcaacccagag

SEQ ID NO: 320947 - RNA, 32 nt, Human
aggagcucuguaagucccugcuccuccucuuc

SEQ ID NO: 320948 - RNA, 32 nt, Human
aggagcugaaaagauugcaggauuaagccaga

SEQ ID NO: 320949 - RNA, 32 nt, Human
aggagcugaacuguuccaaccugaguauucug

SEQ ID NO: 320950 - RNA, 32 nt, Human
aggagcugaagagcgagaaggagcagcgccgg

SEQ ID NO: 320951 - RNA, 20 nt, Human
aggagcugaagccucuggga

SEQ ID NO: 320952 - RNA, 32 nt, Human
aggagcugaccgugccagagcuuguuuguacc

SEQ ID NO: 320953 - RNA, 32 nt, Human
aggagcugagaaaccgagucacugugaaaaga

SEQ ID NO: 320954 - RNA, 32 nt, Human
aggagcugaggaagaagacagacugaaggagc

SEQ ID NO: 320955 - RNA, 32 nt, Human
aggagcugaggcaggagaauugcuugaacccg

SEQ ID NO: 320956 - RNA, 32 nt, Human
aggagcugaggccggagaaucgcuugaaccug

SEQ ID NO: 320957 - RNA, 32 nt, Human
aggagcugagggcaccacccagcaaccugggc

SEQ ID NO: 320958 - RNA, 32 nt, Human
aggagcugaugugcccugaggcccagcugccu

SEQ ID NO: 320959 - RNA, 32 nt, Human
aggagcugcagacgacgagggagcugccucgc

SEQ ID NO: 320960 - RNA, 32 nt, Human
aggagcugcaggacugagguacagaggccagg

SEQ ID NO: 320961 - RNA, 32 nt, Human
aggagcugccucaacguagggguggguagucu

SEQ ID NO: 320962 - RNA, 32 nt, Human
aggagcugccuccagccccuuucuugcugagu

SEQ ID NO: 320963 - RNA, 32 nt, Human
aggagcugcuacugcugcuaccgaggcugugg

SEQ ID NO: 320964 - RNA, 32 nt, Human
aggagcugcucaauaaauguuuguugaacgaa

SEQ ID NO: 320965 - RNA, 32 nt, Human
aggagcugcuggcugucccuguggacccgcca

SEQ ID NO: 320966 - RNA, 32 nt, Human
aggagcugcugucaccuggaaaacacguggca

SEQ ID NO: 320967 - RNA, 22 nt, Human
aggagcugcuucucucuucucc

SEQ ID NO: 320968 - RNA, 32 nt, Human
aggagcuggaaccuguuaauggaaagcaguca

SEQ ID NO: 320969 - RNA, 20 nt, Human
aggagcuggagaagcuccac

SEQ ID NO: 320970 - RNA, 32 nt, Human
aggagcuggcuggaggcuaugggugcggggcg

SEQ ID NO: 320971 - RNA, 32 nt, Human
aggagcugggagaggcaggaaggacccucccc

SEQ ID NO: 320972 - RNA, 32 nt, Human
aggagcugggagaggcaggaaggauccucccc

SEQ ID NO: 320973 - RNA, 32 nt, Human
aggagcugggauuacaggcacccaccauccca

SEQ ID NO: 320974 - RNA, 32 nt, Human
aggagcugggauuacaggcacgcaccaccaug

SEQ ID NO: 320975 - RNA, 20 nt, Human
aggagcugggauuacaggcg

SEQ ID NO: 320976 - RNA, 32 nt, Human
aggagcugggauuacaggcgcccaccgccaug

SEQ ID NO: 320977 - RNA, 18 nt, Human
aggagcugggcccagaga

SEQ ID NO: 320978 - RNA, 32 nt, Human
aggagcugggcuggacccucccuaccugagca

SEQ ID NO: 320979 - RNA, 32 nt, Human
aggagcugggguggccccugagcuccaacggc

SEQ ID NO: 320980 - RNA, 32 nt, Human
aggagcugggucagccucugcagcugccucag

SEQ ID NO: 320981 - RNA, 32 nt, Human
aggagcugguaccauuccuucugaaacuauuc

SEQ ID NO: 320982 - RNA, 32 nt, Human
aggagcugguggagcucuucaaagggaccacg

SEQ ID NO: 320983 - RNA, 32 nt, Human
aggagcugguggugggagaaugacggcaggga

SEQ ID NO: 320984 - RNA, 32 nt, Human
aggagcuguaaacauucaccccuagacccugc

SEQ ID NO: 320985 - RNA, 32 nt, Human
aggagcugucuccucucuaccuggcuaguaag

SEQ ID NO: 320986 - RNA, 20 nt, Human
aggagcugugaagaggcuga

SEQ ID NO: 320987 - RNA, 32 nt, Human
aggagcugugcccggugccugcagccuucaua

SEQ ID NO: 320988 - RNA, 18 nt, Human
aggagcugugcugggaga

SEQ ID NO: 320989 - RNA, 32 nt, Human
aggagcugugguccagccugcgcggcgggaag

SEQ ID NO: 320990 - RNA, 32 nt, Human
aggagcuuaagaccagccugggcaacauaaua

SEQ ID NO: 320991 - RNA, 32 nt, Human
aggagcuuaagaccagccugggcaacauaaug

SEQ ID NO: 320992 - RNA, 25 nt, Human
aggagcuuagcuugucuucuuggca

SEQ ID NO: 320993 - RNA, 32 nt, Human
aggagcuuaggacaaaccucucugaugaaggu

SEQ ID NO: 320994 - RNA, 32 nt, Human
aggagcuuauggucuagugagggagacagagg

SEQ ID NO: 320995 - RNA, 32 nt, Human
aggagcuucaaaagagucaacuuugggacucu

SEQ ID NO: 320996 - RNA, 32 nt, Human
aggagcuuccuccuccaggccucagcccuguu

SEQ ID NO: 320997 - RNA, 32 nt, Human
aggagcuugaaaccagccuggccaacguggug

SEQ ID NO: 320998 - RNA, 32 nt, Human
aggagcuugagaccagccugagcaacacagca

SEQ ID NO: 320999 - RNA, 32 nt, Human
aggagcuugagaccagccugggcaacauggca

SEQ ID NO: 321000 - RNA, 32 nt, Human
aggagcuugagaccagccugggcaacauggug

SEQ ID NO: 321001 - RNA, 32 nt, Human
aggagcuuggacugcucuggcuaggaccccag

SEQ ID NO: 321002 - RNA, 32 nt, Human
aggagcuuggaggugagcacaggaagccccac

SEQ ID NO: 321003 - RNA, 32 nt, Human
aggagcuuguaccacagucuugcacauaagug

SEQ ID NO: 321004 - RNA, 32 nt, Human
aggagcuuuaaaagcauaccacuguggguugc

SEQ ID NO: 321005 - RNA, 32 nt, Human
aggagcuuuccaggauagcuuugaggauaagc

SEQ ID NO: 321006 - RNA, 32 nt, Human
aggagcuuucuggauagaggcagcagcgugug

SEQ ID NO: 321007 - RNA, 32 nt, Human
aggagcuuugcaggaaguuugcaaaagucuuu

SEQ ID NO: 321008 - RNA, 32 nt, Human
aggaggaaaagaacaggcagaacagcgaaaag

SEQ ID NO: 321009 - RNA, 32 nt, Human
aggaggaaaaggaggaagaggaggacaaaaag

SEQ ID NO: 321010 - RNA, 32 nt, Human
aggaggaaacaguaccggcuggaggccggucu

SEQ ID NO: 321011 - RNA, 21 nt, Human
aggaggaaacugugacugaac

SEQ ID NO: 321012 - RNA, 32 nt, Human
aggaggaaagaauugcuccaaaaaucugcacg

SEQ ID NO: 321013 - RNA, 32 nt, Human
aggaggaaagcugugauggggugcaggagugg

SEQ ID NO: 321014 - RNA, 32 nt, Human
aggaggaaagggacccucccaucauucauggg

SEQ ID NO: 321015 - RNA, 32 nt, Human
aggaggaaauaacagcuugcucucuccacccu

SEQ ID NO: 321016 - RNA, 32 nt, Human
aggaggaagaacagguuuaaaagggaagaaga

SEQ ID NO: 321017 - RNA, 32 nt, Human
aggaggaagaagaagaugaugacuagcaguac

SEQ ID NO: 321018 - RNA, 32 nt, Human
aggaggaagaauuggcaggcuaaagaagauga

SEQ ID NO: 321019 - RNA, 32 nt, Human
aggaggaagagacacaggaacacagauggagg

SEQ ID NO: 321020 - RNA, 32 nt, Human
aggaggaagaggagaauaaggaggagcaggag

SEQ ID NO: 321021 - RNA, 32 nt, Human
aggaggaagaggagaggaggaagcaaagaauc

SEQ ID NO: 321022 - RNA, 32 nt, Human
aggaggaagaggaggaagaaggaaagaaaaag

SEQ ID NO: 321023 - RNA, 32 nt, Human
aggaggaagaggaggaagaggaugaccugagu

SEQ ID NO: 321024 - RNA, 32 nt, Human
aggaggaagaggaggaggaagaggaggaagag

SEQ ID NO: 321025 - RNA, 32 nt, Human
aggaggaagaggaggaggacagcggcccucug

SEQ ID NO: 321026 - RNA, 32 nt, Human
aggaggaagaggaggaggaggaagaggggagc

SEQ ID NO: 321027 - RNA, 32 nt, Human
aggaggaagaggaggaggaggaagggagcacc

SEQ ID NO: 321028 - RNA, 32 nt, Human
aggaggaagagggagaagggagaguggcagag

SEQ ID NO: 321029 - RNA, 32 nt, Human
aggaggaagagggagucugagcaugagcugca

SEQ ID NO: 321030 - RNA, 32 nt, Human
aggaggaagagggagucuggcaugaguugcag

SEQ ID NO: 321031 - RNA, 32 nt, Human
aggaggaagauaagcuacuaauugaaaauggu

SEQ ID NO: 321032 - RNA, 32 nt, Human
aggaggaagaugaagacgaggaggaggcggcg

SEQ ID NO: 321033 - RNA, 32 nt, Human
aggaggaagauguccugaagucauaaugucuu

SEQ ID NO: 321034 - RNA, 32 nt, Human
aggaggaagcggaggaaggugaaguaggaccg

SEQ ID NO: 321035 - RNA, 32 nt, Human
aggaggaaggaagaagguaaaggguggauggc

SEQ ID NO: 321036 - RNA, 32 nt, Human
aggaggaaggcugaggaaugacuuggcuccag

SEQ ID NO: 321037 - RNA, 32 nt, Human
aggaggaaggcuuggcuccugucuucccagac

SEQ ID NO: 321038 - RNA, 32 nt, Human
aggaggaagggagggcagagggggcuguggcc

SEQ ID NO: 321039 - RNA, 32 nt, Human
aggaggaagggcaugagccgagcuugaggaau

SEQ ID NO: 321040 - RNA, 32 nt, Human
aggaggaagggccggccagaagaccuggaguu

SEQ ID NO: 321041 - RNA, 32 nt, Human
aggaggaauaaggggaaggaagagagagggag

SEQ ID NO: 321042 - RNA, 32 nt, Human
aggaggaauggacagaagcauccagcaugggg

SEQ ID NO: 321043 - RNA, 32 nt, Human
aggaggaauggucuucagcagagaagccguca

SEQ ID NO: 321044 - RNA, 32 nt, Human
aggaggaauucaaagaagaaagacugacagag

SEQ ID NO: 321045 - RNA, 32 nt, Human
aggaggaauucuuaaauuagcuguaauguuag

SEQ ID NO: 321046 - RNA, 32 nt, Human
aggaggaauuucagugggucucugugugugua

SEQ ID NO: 321047 - RNA, 32 nt, Human
aggaggacaagaggagcaugaaaguggacaag

SEQ ID NO: 321048 - RNA, 32 nt, Human
aggaggacaagcuguggggaccccaaacugug

SEQ ID NO: 321049 - RNA, 32 nt, Human
aggaggacacgcaggaugggcagucaugcugg

SEQ ID NO: 321050 - RNA, 32 nt, Human
aggaggacacguggagacagaggcagacugga

SEQ ID NO: 321051 - RNA, 32 nt, Human
aggaggacagaccggacacagagggacggagc

SEQ ID NO: 321052 - RNA, 32 nt, Human
aggaggacagagcagacagcagagaccaugga

SEQ ID NO: 321053 - RNA, 32 nt, Human
aggaggacaucgucaggcuggcccaggaccag

SEQ ID NO: 321054 - RNA, 32 nt, Human
aggaggaccagagacccacuggcuucugcucu

SEQ ID NO: 321055 - RNA, 15 nt, Human
aggaggacccgugcg

SEQ ID NO: 321056 - RNA, 32 nt, Human
aggaggaccgaagaggaggaggaggggagggg

SEQ ID NO: 321057 - RNA, 32 nt, Human
aggaggaccgccugcccugccugggccuuggc

SEQ ID NO: 321058 - RNA, 32 nt, Human
aggaggacgaggaggaagaggaggaggacagc

SEQ ID NO: 321059 - RNA, 32 nt, Human
aggaggacgcugugccuggccugggaccuccg

SEQ ID NO: 321060 - RNA, 32 nt, Human
aggaggacuacugucuagcaucagcuuauggg

SEQ ID NO: 321061 - RNA, 32 nt, Human
aggaggacuccaucucauucagaaagaaggcu

SEQ ID NO: 321062 - RNA, 17 nt, Human
aggaggacugagaauuu

SEQ ID NO: 321063 - RNA, 23 nt, Human
aggaggagaaacagggugaguca

SEQ ID NO: 321064 - RNA, 32 nt, Human
aggaggagaagcaggggcaggagcggugagga

SEQ ID NO: 321065 - RNA, 32 nt, Human
aggaggagaaggaggagagagaggggaagaga

SEQ ID NO: 321066 - RNA, 32 nt, Human
aggaggagaaggaggaggagcaggagguggag

SEQ ID NO: 321067 - RNA, 32 nt, Human
aggaggagacugaggagcaggauggcggccuc

SEQ ID NO: 321068 - RNA, 32 nt, Human
aggaggagagaaggaaggagaggugaucucca

SEQ ID NO: 321069 - RNA, 32 nt, Human
aggaggagagaagggagcaggaauccuccuuc

SEQ ID NO: 321070 - RNA, 32 nt, Human
aggaggagagagagcugggcucagcuucuuuu

SEQ ID NO: 321071 - RNA, 32 nt, Human
aggaggagagagaggggaagagacaaaguggg

SEQ ID NO: 321072 - RNA, 32 nt, Human
aggaggagagaggaaagagcggagcagccauu

SEQ ID NO: 321073 - RNA, 32 nt, Human
aggaggagaggcauuaugaggagcagugaccg

SEQ ID NO: 321074 - RNA, 32 nt, Human
aggaggagaggcugucucagcugcagaggggu

SEQ ID NO: 321075 - RNA, 32 nt, Human
aggaggagagggagaauucuguucucccagag

SEQ ID NO: 321076 - RNA, 32 nt, Human
aggaggagagguggauggcaaugugauuggug

SEQ ID NO: 321077 - RNA, 32 nt, Human
aggaggagagguggggacagcaagaagccaca

SEQ ID NO: 321078 - RNA, 32 nt, Human
aggaggagagugaaguagaggggugaggaagg

SEQ ID NO: 321079 - RNA, 16 nt, Human
aggaggagauagugac

SEQ ID NO: 321080 - RNA, 21 nt, Human
aggaggagauggggugacuca

SEQ ID NO: 321081 - RNA, 32 nt, Human
aggaggagauuagccauuuuccccagcuggcc

SEQ ID NO: 321082 - RNA, 32 nt, Human
aggaggagcaggaggaagagggggaggagaag

SEQ ID NO: 321083 - RNA, 32 nt, Human
aggaggagccuucuggaugccuuccaggcuug

SEQ ID NO: 321084 - RNA, 32 nt, Human
aggaggagcgggccguggaggcuucgccgccu

SEQ ID NO: 321085 - RNA, 32 nt, Human
aggaggagcugcagugcuaguccagccagcgu

SEQ ID NO: 321086 - RNA, 32 nt, Human
aggaggagcuggagcuauccuaccucaucagu

SEQ ID NO: 321087 - RNA, 32 nt, Human
aggaggagcuggccuaccugaagaagaaccac

SEQ ID NO: 321088 - RNA, 32 nt, Human
aggaggagcugugcauuccagcagguuuagag

SEQ ID NO: 321089 - RNA, 32 nt, Human
aggaggaggaaacugugguguuccuuucuucc

SEQ ID NO: 321090 - RNA, 32 nt, Human
aggaggaggaagaggaggaagaggaugaccug

SEQ ID NO: 321091 - RNA, 32 nt, Human
aggaggaggaagaggaggagcgcagucggagc

SEQ ID NO: 321092 - RNA, 32 nt, Human
aggaggaggaagagguauggcaugggaggaga

SEQ ID NO: 321093 - RNA, 32 nt, Human
aggaggaggaagagguauggcaugggaggagg

SEQ ID NO: 321094 - RNA, 32 nt, Human
aggaggaggaagagucugcagcauuuguucuc

SEQ ID NO: 321095 - RNA, 32 nt, Human
aggaggaggacugagcuuaucugacuccagag

SEQ ID NO: 321096 - RNA, 32 nt, Human
aggaggaggagaaaauucccccagauucgggc

SEQ ID NO: 321097 - RNA, 32 nt, Human
aggaggaggagaaggaggagagagaggggaag

SEQ ID NO: 321098 - RNA, 32 nt, Human
aggaggaggagaaggaggaggaggaagaggag

SEQ ID NO: 321099 - RNA, 32 nt, Human
aggaggaggagaagguggagaggaagagacgc

SEQ ID NO: 321100 - RNA, 32 nt, Human
aggaggaggagacacaguuggagcagcuccgu

SEQ ID NO: 321101 - RNA, 32 nt, Human
aggaggaggagagaggaaagagcggagcagcc

SEQ ID NO: 321102 - RNA, 32 nt, Human
aggaggaggagaggaggaggggaggagaagga

SEQ ID NO: 321103 - RNA, 32 nt, Human
aggaggaggaggaagagagugugaaacaggag

SEQ ID NO: 321104 - RNA, 32 nt, Human
aggaggaggaggacauugaugugcuuggugug

SEQ ID NO: 321105 - RNA, 32 nt, Human
aggaggaggaggagcuggaggaggaggucgac

SEQ ID NO: 321106 - RNA, 32 nt, Human
aggaggaggaggaggaagaagaaagaugguga

SEQ ID NO: 321107 - RNA, 32 nt, Human
aggaggaggaggaggaagaagagguagcggca

SEQ ID NO: 321108 - RNA, 32 nt, Human
aggaggaggaggaggaagaauaggaggaaaac

SEQ ID NO: 321109 - RNA, 32 nt, Human
aggaggaggaggaggaagaggaggagaaggua

SEQ ID NO: 321110 - RNA, 32 nt, Human
aggaggaggaggaggaagagggcaguggggaa

SEQ ID NO: 321111 - RNA, 32 nt, Human
aggaggaggaggaggaagaggggauggagcag

SEQ ID NO: 321112 - RNA, 32 nt, Human
aggaggaggaggaggaagagguggaggaggag

SEQ ID NO: 321113 - RNA, 32 nt, Human
aggaggaggaggaggaagcugaagacgaggag

SEQ ID NO: 321114 - RNA, 32 nt, Human
aggaggaggaggaggaaggggcuuggagcgac

SEQ ID NO: 321115 - RNA, 32 nt, Human
aggaggaggaggaggacaugggguuugauuuu

SEQ ID NO: 321116 - RNA, 32 nt, Human
aggaggaggaggaggagaaggaggagagagag

SEQ ID NO: 321117 - RNA, 32 nt, Human
aggaggaggaggaggagaaggaggaggaggaa

SEQ ID NO: 321118 - RNA, 32 nt, Human
aggaggaggaggaggagcaaagguguuggaga

SEQ ID NO: 321119 - RNA, 32 nt, Human
aggaggaggaggaggagcuggaggaggagguc

SEQ ID NO: 321120 - RNA, 32 nt, Human
aggaggaggaggaggaggaagaagagguagcg

SEQ ID NO: 321121 - RNA, 32 nt, Human
aggaggaggaggaggaggaagagggcaguggg

SEQ ID NO: 321122 - RNA, 32 nt, Human
aggaggaggaggaggaggaagagguggaggag

SEQ ID NO: 321123 - RNA, 32 nt, Human
aggaggaggaggaggaggaaggggcuuggagc

SEQ ID NO: 321124 - RNA, 32 nt, Human
aggaggaggaggaggaggagaaggcucugggc

SEQ ID NO: 321125 - RNA, 32 nt, Human
aggaggaggaggaggaggagaggggccucggg

SEQ ID NO: 321126 - RNA, 32 nt, Human
aggaggaggaggaggaggaggaagagggcagu

SEQ ID NO: 321127 - RNA, 32 nt, Human
aggaggaggaggaggaggaggacgcgggccug

SEQ ID NO: 321128 - RNA, 32 nt, Human
aggaggaggaggaggaggaggagagcgcgggc

SEQ ID NO: 321129 - RNA, 32 nt, Human
aggaggaggaggaggaggaggaggagagcgcg

SEQ ID NO: 321130 - RNA, 32 nt, Human
aggaggaggaggaggaggaggaggaggaggag

SEQ ID NO: 321131 - RNA, 32 nt, Human
aggaggaggaggaggaggaggaggaggaggcc

SEQ ID NO: 321132 - RNA, 32 nt, Human
aggaggaggaggaggaggaggaggaggccagg

SEQ ID NO: 321133 - RNA, 32 nt, Human
aggaggaggaggaggaggaggaggaggcggcg

SEQ ID NO: 321134 - RNA, 32 nt, Human
aggaggaggaggaggaggaggaggagggggcc

SEQ ID NO: 321135 - RNA, 32 nt, Human
aggaggaggaggaggaggaggaggagggggcg

SEQ ID NO: 321136 - RNA, 32 nt, Human
aggaggaggaggaggaggaggaggccaggucc

SEQ ID NO: 321137 - RNA, 32 nt, Human
aggaggaggaggaggaggaggagggggccgag

SEQ ID NO: 321138 - RNA, 32 nt, Human
aggaggaggaggaggaggaggagguggcggcg

SEQ ID NO: 321139 - RNA, 32 nt, Human
aggaggaggaggaggaggaggcaaaguuagag

SEQ ID NO: 321140 - RNA, 32 nt, Human
aggaggaggaggaggaggagggggccgagaag

SEQ ID NO: 321141 - RNA, 32 nt, Human
aggaggaggaggaggaggagggggcggccaug

SEQ ID NO: 321142 - RNA, 32 nt, Human
aggaggaggaggaggaggagguggcggcgaga

SEQ ID NO: 321143 - RNA, 32 nt, Human
aggaggaggaggaggaggaugaauaagaaacu

SEQ ID NO: 321144 - RNA, 32 nt, Human
aggaggaggaggaggaggcgagggcgagcgag

SEQ ID NO: 321145 - RNA, 32 nt, Human
aggaggaggaggaggagggaggaggggagaag

SEQ ID NO: 321146 - RNA, 32 nt, Human
aggaggaggaggaggagggggcggccaugggg

SEQ ID NO: 321147 - RNA, 32 nt, Human
aggaggaggaggaggagguggcggcgagaaga

SEQ ID NO: 321148 - RNA, 32 nt, Human
aggaggaggaggaggaggugguggaggaggag

SEQ ID NO: 321149 - RNA, 32 nt, Human
aggaggaggaggaggaugugaagauggcggag

SEQ ID NO: 321150 - RNA, 32 nt, Human
aggaggaggaggaggcugagagagggagggcg

SEQ ID NO: 321151 - RNA, 32 nt, Human
aggaggaggaggagguugcagugagccgagau

SEQ ID NO: 321152 - RNA, 32 nt, Human
aggaggaggaggcggaggaggcgguggagggg

SEQ ID NO: 321153 - RNA, 32 nt, Human
aggaggaggaggcggcggcggcggugggcccc

SEQ ID NO: 321154 - RNA, 32 nt, Human
aggaggaggagggaugcaagcuucgcuccucu

SEQ ID NO: 321155 - RNA, 32 nt, Human
aggaggaggagggugagagagaagcugggaga

SEQ ID NO: 321156 - RNA, 32 nt, Human
aggaggaggagguggcggcgagaagauggcga

SEQ ID NO: 321157 - RNA, 32 nt, Human
aggaggaggaggugggcagaggaaggaggguc

SEQ ID NO: 321158 - RNA, 32 nt, Human
aggaggaggcagcagcgagguccugcgguacc

SEQ ID NO: 321159 - RNA, 32 nt, Human
aggaggaggcaggagagagggaaaaagaaaag

SEQ ID NO: 321160 - RNA, 32 nt, Human
aggaggaggcaucuaccccuggccuugacgcu

SEQ ID NO: 321161 - RNA, 32 nt, Human
aggaggaggccucugcuccacccuccauuccu

SEQ ID NO: 321162 - RNA, 32 nt, Human
aggaggaggcgagggcgagcgagcccagcggg

SEQ ID NO: 321163 - RNA, 32 nt, Human
aggaggaggcgcccgccaugcccggccugcgg

SEQ ID NO: 321164 - RNA, 32 nt, Human
aggaggaggcggagguggagcuggcggagagc

SEQ ID NO: 321165 - RNA, 32 nt, Human
aggaggaggcuauggugguggaggugguggca

SEQ ID NO: 321166 - RNA, 32 nt, Human
aggaggaggcucggggacagcaggagcacggg

SEQ ID NO: 321167 - RNA, 32 nt, Human
aggaggaggcugaaagagccugagcugugccc

SEQ ID NO: 321168 - RNA, 19 nt, Human
aggaggaggcuguggauga

SEQ ID NO: 321169 - RNA, 32 nt, Human
aggaggagggccugagagccaggcuccaguuu

SEQ ID NO: 321170 - RNA, 32 nt, Human
aggaggagggcguucccaggaggagggaguga

SEQ ID NO: 321171 - RNA, 32 nt, Human
aggaggaggggaggagaaggaggaggaagcca

SEQ ID NO: 321172 - RNA, 32 nt, Human
aggaggaggggcuguccucuccgcaggcagcc

SEQ ID NO: 321173 - RNA, 32 nt, Human
aggaggagggggaggaagaggagguggagaag

SEQ ID NO: 321174 - RNA, 32 nt, Human
aggaggagguaguggccagggaagaggaggaa

SEQ ID NO: 321175 - RNA, 32 nt, Human
aggaggagguggagaucgcagugagcugagau

SEQ ID NO: 321176 - RNA, 32 nt, Human
aggaggaggugggggcuggaggugcugguagc

SEQ ID NO: 321177 - RNA, 32 nt, Human
aggaggaguaggaggaggcagggccucuccau

SEQ ID NO: 321178 - RNA, 32 nt, Human
aggaggagucugcagcccugugggcuucaaca

SEQ ID NO: 321179 - RNA, 32 nt, Human
aggaggaguucuucccuuugaaaauugcaaaa

SEQ ID NO: 321180 - RNA, 32 nt, Human
aggaggaguugcaucccagcaggcucagcucc

SEQ ID NO: 321181 - RNA, 32 nt, Human
aggaggaucacuugaggccaaaaguuugagac

SEQ ID NO: 321182 - RNA, 32 nt, Human
aggaggaucacuugaguccaggaguuugaaac

SEQ ID NO: 321183 - RNA, 20 nt, Human
aggaggaucgcuugaggcca

SEQ ID NO: 321184 - RNA, 19 nt, Human
aggaggaugaguccuggga

SEQ ID NO: 321185 - RNA, 32 nt, Human
aggaggaugcugggugaccaaagcuuuugaag

SEQ ID NO: 321186 - RNA, 22 nt, Human
aggaggaugggcucgcccacca

SEQ ID NO: 321187 - RNA, 32 nt, Human
aggaggaugggcuguaggggcccugaggaggu

SEQ ID NO: 321188 - RNA, 32 nt, Human
aggaggauggggaccaggaaggcuguggaccc

SEQ ID NO: 321189 - RNA, 21 nt, Human
aggaggaugguuguguaguca

SEQ ID NO: 321190 - RNA, 32 nt, Human
aggaggauuccuccuccccagaauaagacaag

SEQ ID NO: 321191 - RNA, 32 nt, Human
aggaggauucugccuuuccuccagugccauga

SEQ ID NO: 321192 - RNA, 32 nt, Human
aggaggauuggaaaggaggaguaaaggauucu

SEQ ID NO: 321193 - RNA, 17 nt, Human
aggaggcaaaagaauuu

SEQ ID NO: 321194 - RNA, 32 nt, Human
aggaggcaaaggcaggagaguugcuugaacug

SEQ ID NO: 321195 - RNA, 32 nt, Human
aggaggcaaaggggagagaggcuuccaagggg

SEQ ID NO: 321196 - RNA, 17 nt, Human
aggaggcaaaguaauuu

SEQ ID NO: 321197 - RNA, 32 nt, Human
aggaggcaaagucaccaaugcagggagguaaa

SEQ ID NO: 321198 - RNA, 17 nt, Human
aggaggcaacuguggca

SEQ ID NO: 321199 - RNA, 22 nt, Human
aggaggcaaugccaggaagcug

SEQ ID NO: 321200 - RNA, 32 nt, Human
aggaggcaccaaugcucugaggcugucgcgug

SEQ ID NO: 321201 - RNA, 32 nt, Human
aggaggcaccacugucacuggccaagggcugg

SEQ ID NO: 321202 - RNA, 32 nt, Human
aggaggcaccaugcaggagcugcaucugcucu

SEQ ID NO: 321203 - RNA, 32 nt, Human
aggaggcaccugggagcugagcuuaagaguua

SEQ ID NO: 321204 - RNA, 32 nt, Human
aggaggcacugggcucagccugggcauuaaag

SEQ ID NO: 321205 - RNA, 19 nt, Human
aggaggcagacgcccugcg

SEQ ID NO: 321206 - RNA, 32 nt, Human
aggaggcagagaagaaagaacggaagaagaga

SEQ ID NO: 321207 - RNA, 32 nt, Human
aggaggcagaggagcagauggagcagcugcug

SEQ ID NO: 321208 - RNA, 32 nt, Human
aggaggcagaggcugcagugagccgagaucgu

SEQ ID NO: 321209 - RNA, 32 nt, Human
aggaggcagagguugcagugagccaaaauugc

SEQ ID NO: 321210 - RNA, 32 nt, Human
aggaggcagaucuuuccaagguggaaagguaa

SEQ ID NO: 321211 - RNA, 32 nt, Human
aggaggcagcagaaccccaugggcuguuuugg

SEQ ID NO: 321212 - RNA, 32 nt, Human
aggaggcagcagccagaugagaaauugagucu

SEQ ID NO: 321213 - RNA, 32 nt, Human
aggaggcagcagcggcggaggacgaggaucuc

SEQ ID NO: 321214 - RNA, 32 nt, Human
aggaggcagccccuaggagcacgcacguucug

SEQ ID NO: 321215 - RNA, 32 nt, Human
aggaggcagcgcccaucucagcagcaccagga

SEQ ID NO: 321216 - RNA, 32 nt, Human
aggaggcagcuggguugcauggagagguccag

SEQ ID NO: 321217 - RNA, 32 nt, Human
aggaggcaggaaaaugugacccagaugggggu

SEQ ID NO: 321218 - RNA, 22 nt, Human
aggaggcaggaccuucgggcug

SEQ ID NO: 321219 - RNA, 32 nt, Human
aggaggcaggcccugcccugcccucuccucac

SEQ ID NO: 321220 - RNA, 32 nt, Human
aggaggcagggaggugagaggaagcacagggg

SEQ ID NO: 321221 - RNA, 32 nt, Human
aggaggcaggugcaccgggaaaaugugucuga

SEQ ID NO: 321222 - RNA, 32 nt, Human
aggaggcagguggggagggaacccgaggaccc

SEQ ID NO: 321223 - RNA, 32 nt, Human
aggaggcagugcagggcauucuggacccggag

SEQ ID NO: 321224 - RNA, 32 nt, Human
aggaggcaugucgggccccaggccuguggugc

SEQ ID NO: 321225 - RNA, 32 nt, Human
aggaggccaaccagcccgacagugccaucccc

SEQ ID NO: 321226 - RNA, 32 nt, Human
aggaggccaagccugaaaacagaggggaggga

SEQ ID NO: 321227 - RNA, 32 nt, Human
aggaggccaccaaccagacggugcugauccgc

SEQ ID NO: 321228 - RNA, 32 nt, Human
aggaggccaccugcagccuccacccggcucuc

SEQ ID NO: 321229 - RNA, 32 nt, Human
aggaggccagagaggaguauugcucaaugcgu

SEQ ID NO: 321230 - RNA, 32 nt, Human
aggaggccagggaggcaggggaggcaggagag

SEQ ID NO: 321231 - RNA, 32 nt, Human
aggaggccagggaggcaguggaggcaggagag

SEQ ID NO: 321232 - RNA, 32 nt, Human
aggaggccaguucugaaaggcgagcagaacuc

SEQ ID NO: 321233 - RNA, 32 nt, Human
aggaggcccagccuguguggcccugugaccug

SEQ ID NO: 321234 - RNA, 32 nt, Human
aggaggcccaggaguagaggcugcagcgcccg

SEQ ID NO: 321235 - RNA, 32 nt, Human
aggaggcccaggcuggagugagguggcacgau

SEQ ID NO: 321236 - RNA, 18 nt, Human
aggaggcccagggaacug

SEQ ID NO: 321237 - RNA, 32 nt, Human
aggaggcccaguuaaagcggcucgaggugaca

SEQ ID NO: 321238 - RNA, 32 nt, Human
aggaggcccgggagguggcugagggguccagg

SEQ ID NO: 321239 - RNA, 32 nt, Human
aggaggcccgggggcuccggcugagugaccug

SEQ ID NO: 321240 - RNA, 32 nt, Human
aggaggcccguggaacuuggagggcucugugu

SEQ ID NO: 321241 - RNA, 32 nt, Human
aggaggcccuccauuccugguuucuguagcuu

SEQ ID NO: 321242 - RNA, 32 nt, Human
aggaggcccugaccguggaaggggagaggaac

SEQ ID NO: 321243 - RNA, 32 nt, Human
aggaggcccuggaauaaggaagaggcuucuuu

SEQ ID NO: 321244 - RNA, 32 nt, Human
aggaggcccuggagggcuggacgggcuuccug

SEQ ID NO: 321245 - RNA, 20 nt, Human
aggaggcccugucccagcca

SEQ ID NO: 321246 - RNA, 32 nt, Human
aggaggcccuuaagggaagcuacugaauuaua

SEQ ID NO: 321247 - RNA, 22 nt, Human
aggaggccgaggcgccggagca

SEQ ID NO: 321248 - RNA, 32 nt, Human
aggaggccgccccagaggcaggagacugaccg

SEQ ID NO: 321249 - RNA, 32 nt, Human
aggaggccgugugaagacagaggcagagauug

SEQ ID NO: 321250 - RNA, 32 nt, Human
aggaggccuccaggggcaccuccagccaggcu

SEQ ID NO: 321251 - RNA, 20 nt, Human
aggaggccuccccaccuacc

SEQ ID NO: 321252 - RNA, 32 nt, Human
aggaggccuggguguccugcaaguggagcagc

SEQ ID NO: 321253 - RNA, 32 nt, Human
aggaggccuggugucuggucuuggagucaaga

SEQ ID NO: 321254 - RNA, 32 nt, Human
aggaggccugugagagcugccucugccucagu

SEQ ID NO: 321255 - RNA, 32 nt, Human
aggaggccuucaaccagacccuguccaugccc

SEQ ID NO: 321256 - RNA, 32 nt, Human
aggaggccuucacccucugcucugguucauug

SEQ ID NO: 321257 - RNA, 32 nt, Human
aggaggcgacaaguccaucagcagaaagucac

SEQ ID NO: 321258 - RNA, 22 nt, Human
aggaggcgaggaggccguugcc

SEQ ID NO: 321259 - RNA, 32 nt, Human
aggaggcgaggcggagccagccgagggaguga

SEQ ID NO: 321260 - RNA, 32 nt, Human
aggaggcgcagcccuaccuucuuucuggggaa

SEQ ID NO: 321261 - RNA, 32 nt, Human
aggaggcgcagcucccgcugcaccgcgaucga

SEQ ID NO: 321262 - RNA, 32 nt, Human
aggaggcgcuagugggagacagggggcaggcc

SEQ ID NO: 321263 - RNA, 32 nt, Human
aggaggcggagaggcagagggaggagccucgg

SEQ ID NO: 321264 - RNA, 32 nt, Human
aggaggcggaggaggagggaaggaagauggcg

SEQ ID NO: 321265 - RNA, 32 nt, Human
aggaggcggaggcagaggcugcagugacccaa

SEQ ID NO: 321266 - RNA, 32 nt, Human
aggaggcggaggcagcggcuggaggagcgcga

SEQ ID NO: 321267 - RNA, 32 nt, Human
aggaggcggaggcccgcagagcacagagcagg

SEQ ID NO: 321268 - RNA, 32 nt, Human
aggaggcggagggagagcaggagccacugaga

SEQ ID NO: 321269 - RNA, 32 nt, Human
aggaggcggagguugcagggagggagacugca

SEQ ID NO: 321270 - RNA, 32 nt, Human
aggaggcggagguugcagugagcucagaucuc

SEQ ID NO: 321271 - RNA, 32 nt, Human
aggaggcggagguugcagugagcucagauugc

SEQ ID NO: 321272 - RNA, 23 nt, Human
aggaggcggcggcuuagcugcua

SEQ ID NO: 321273 - RNA, 32 nt, Human
aggaggcggucgagccgcggagcccaggggcc

SEQ ID NO: 321274 - RNA, 18 nt, Human
aggaggcgugccugggaa

SEQ ID NO: 321275 - RNA, 32 nt, Human
aggaggcuaagcaggaggauggcuugggccca

SEQ ID NO: 321276 - RNA, 32 nt, Human
aggaggcuacaaaggccaggcuggugucggaa

SEQ ID NO: 321277 - RNA, 32 nt, Human
aggaggcuauggugguggaggugguggcagca

SEQ ID NO: 321278 - RNA, 32 nt, Human
aggaggcucacugccuccuguuccagcuccug

SEQ ID NO: 321279 - RNA, 32 nt, Human
aggaggcucagcggaaagcgacaggaaaguaa

SEQ ID NO: 321280 - RNA, 32 nt, Human
aggaggcucccaggaaccggagcuggaaaccc

SEQ ID NO: 321281 - RNA, 32 nt, Human
aggaggcucggggacagcaggagcacgggcug

SEQ ID NO: 321282 - RNA, 32 nt, Human
aggaggcucuagauggcggcugugccuuagag

SEQ ID NO: 321283 - RNA, 32 nt, Human
aggaggcucuagcccagaacagaggaagccag

SEQ ID NO: 321284 - RNA, 29 nt, Human
aggaggcucugacucuaaagcuucgacuu

SEQ ID NO: 321285 - RNA, 32 nt, Human
aggaggcucugccaucgggcuccuugcggcug

SEQ ID NO: 321286 - RNA, 32 nt, Human
aggaggcucugcccucuccagaggugccagac

SEQ ID NO: 321287 - RNA, 32 nt, Human
aggaggcucugggcggaggugcagugaccccg

SEQ ID NO: 321288 - RNA, 32 nt, Human
aggaggcucuugggaugcagcaagucccaggc

SEQ ID NO: 321289 - RNA, 32 nt, Human
aggaggcugacaggcccugcucccucugcucu

SEQ ID NO: 321290 - RNA, 32 nt, Human
aggaggcugaggcacgagacuugcuugaaccc

SEQ ID NO: 321291 - RNA, 32 nt, Human
aggaggcugaggcggagaauugcuugaacccg

SEQ ID NO: 321292 - RNA, 32 nt, Human
aggaggcugcaacgcuauaagagggcucaaga

SEQ ID NO: 321293 - RNA, 32 nt, Human
aggaggcugcagaagcaauggagugaccucug

SEQ ID NO: 321294 - RNA, 32 nt, Human
aggaggcugcagcuaccacgagggccucugag

SEQ ID NO: 321295 - RNA, 32 nt, Human
aggaggcugcagcugcuuccccaaggccacac

SEQ ID NO: 321296 - RNA, 20 nt, Human
aggaggcugcagcuggggga

SEQ ID NO: 321297 - RNA, 32 nt, Human
aggaggcugccggaacaacagcggcuuuccca

SEQ ID NO: 321298 - RNA, 18 nt, Human
aggaggcuggcagagcug

SEQ ID NO: 321299 - RNA, 32 nt, Human
aggaggcuggcguaauuaacacagcacaggga

SEQ ID NO: 321300 - RNA, 32 nt, Human
aggaggcuguaacaccccacacccaacccacg

SEQ ID NO: 321301 - RNA, 32 nt, Human
aggaggcugucgggggcgggccagccagcggg

SEQ ID NO: 321302 - RNA, 32 nt, Human
aggaggcuguggcagagaauugcuugaacccg

SEQ ID NO: 321303 - RNA, 23 nt, Human
aggaggcuguggcagcuguggca

SEQ ID NO: 321304 - RNA, 32 nt, Human
aggaggcuucuauugauaaauccagagccuca

SEQ ID NO: 321305 - RNA, 32 nt, Human
aggaggcuuugcgccucugcaggugcucucgg

SEQ ID NO: 321306 - RNA, 32 nt, Human
aggagggaaacacacuucacacaacaggcuua

SEQ ID NO: 321307 - RNA, 32 nt, Human
aggagggaaacugaggcccgaggcagauaccu

SEQ ID NO: 321308 - RNA, 32 nt, Human
aggagggaaccaggaccauguuccaguaaaug

SEQ ID NO: 321309 - RNA, 32 nt, Human
aggagggaacugcuccuucgacucugcagcuc

SEQ ID NO: 321310 - RNA, 22 nt, Human
aggagggaagagucccagugaa

SEQ ID NO: 321311 - RNA, 32 nt, Human
aggagggaagauggugggccucagggaggaug

SEQ ID NO: 321312 - RNA, 32 nt, Human
aggagggaaggagccggucaccccagaguauc

SEQ ID NO: 321313 - RNA, 32 nt, Human
aggagggaaggcggugaacacagcccccgugc

SEQ ID NO: 321314 - RNA, 32 nt, Human
aggagggaaguuugcuacaaaggggcugcaaa

SEQ ID NO: 321315 - RNA, 32 nt, Human
aggagggaauaggcaagucaagagugagagaa

SEQ ID NO: 321316 - RNA, 32 nt, Human
aggagggacagaaaugugguuucacaccugac

SEQ ID NO: 321317 - RNA, 32 nt, Human
aggagggacagagagacagggagagucagccu

SEQ ID NO: 321318 - RNA, 32 nt, Human
aggagggacagggguagagggagaagccuaga

SEQ ID NO: 321319 - RNA, 32 nt, Human
aggagggacaucuucccaugccuucccuagaa

SEQ ID NO: 321320 - RNA, 32 nt, Human
aggagggacuggagcagccaggagacucacuu

SEQ ID NO: 321321 - RNA, 32 nt, Human
aggagggacuuaguggcucugccgccagugag

SEQ ID NO: 321322 - RNA, 32 nt, Human
aggagggagaagggaaggaaggaaagaagaga

SEQ ID NO: 321323 - RNA, 32 nt, Human
aggagggagacugugguaggggcagggaggca

SEQ ID NO: 321324 - RNA, 32 nt, Human
aggagggagaggacagagccacugcagaggac

SEQ ID NO: 321325 - RNA, 32 nt, Human
aggagggagaggaggaagaggaaggggaggga

SEQ ID NO: 321326 - RNA, 32 nt, Human
aggagggagagggagucuggcaugagaugcaa

SEQ ID NO: 321327 - RNA, 32 nt, Human
aggagggagagggcagggaagacucacagcag

SEQ ID NO: 321328 - RNA, 32 nt, Human
aggagggagagggggaggggaggaguccaggg

SEQ ID NO: 321329 - RNA, 32 nt, Human
aggagggagagggucguugugagcagguugca

SEQ ID NO: 321330 - RNA, 32 nt, Human
aggagggagauuccaccuccccucccaaguga

SEQ ID NO: 321331 - RNA, 30 nt, Human
aggagggagcccugcagggcacagcaagac

SEQ ID NO: 321332 - RNA, 32 nt, Human
aggagggagccugcgugcuggggcaggguguc

SEQ ID NO: 321333 - RNA, 32 nt, Human
aggagggaggaaaggaaggaaaaagguugaga

SEQ ID NO: 321334 - RNA, 32 nt, Human
aggagggaggaggaagagagggagggaggcgg

SEQ ID NO: 321335 - RNA, 24 nt, Human
aggagggaggaucacuugaaccca

SEQ ID NO: 321336 - RNA, 24 nt, Human
aggagggaggaucgcuuaagccca

SEQ ID NO: 321337 - RNA, 32 nt, Human
aggagggagggagggacaggugccuggagccc

SEQ ID NO: 321338 - RNA, 32 nt, Human
aggagggagggagggacgauggcgguggguuu

SEQ ID NO: 321339 - RNA, 32 nt, Human
aggagggagggaggggcagaguggagugucau

SEQ ID NO: 321340 - RNA, 32 nt, Human
aggagggaggugggguagggaggaguguagga

SEQ ID NO: 321341 - RNA, 32 nt, Human
aggagggaggugggugggucaggugaguggaa

SEQ ID NO: 321342 - RNA, 32 nt, Human
aggagggagguggguguuggagccccugagac

SEQ ID NO: 321343 - RNA, 32 nt, Human
aggagggagugacaguauuggugaggaaugaa

SEQ ID NO: 321344 - RNA, 32 nt, Human
aggagggaguggagagacugacuggccgugau

SEQ ID NO: 321345 - RNA, 32 nt, Human
aggagggauagaaggaaggaaggaaggaaccc

SEQ ID NO: 321346 - RNA, 32 nt, Human
aggagggauuccggaauugaggggcacgcagg

SEQ ID NO: 321347 - RNA, 32 nt, Human
aggagggauugacucugaggaccugagcuaca

SEQ ID NO: 321348 - RNA, 32 nt, Human
aggagggauuucacucuucuucccagguucuu

SEQ ID NO: 321349 - RNA, 32 nt, Human
aggagggauuuccugacuuugacacacauggc

SEQ ID NO: 321350 - RNA, 32 nt, Human
aggagggcaagccccuugguccuggaacacag

SEQ ID NO: 321351 - RNA, 32 nt, Human
aggagggcagagaucacuugaggccaggagcu

SEQ ID NO: 321352 - RNA, 32 nt, Human
aggagggcagagcccucguggccugaccaccu

SEQ ID NO: 321353 - RNA, 24 nt, Human
aggagggcagaucacgaggucagg

SEQ ID NO: 321354 - RNA, 32 nt, Human
aggagggcagcgacaucagcuuggugggcagc

SEQ ID NO: 321355 - RNA, 32 nt, Human
aggagggcaggaguugggggagcaggagggca

SEQ ID NO: 321356 - RNA, 32 nt, Human
aggagggcagggccagcaccucaccccacaca

SEQ ID NO: 321357 - RNA, 32 nt, Human
aggagggcaggggugagagagcaagggggcag

SEQ ID NO: 321358 - RNA, 32 nt, Human
aggagggcagugagcugugauugcaccgugac

SEQ ID NO: 321359 - RNA, 32 nt, Human
aggagggcauuguugucagucuggaccgagcc

SEQ ID NO: 321360 - RNA, 32 nt, Human
aggagggcccauggggguaggagcaguugaac

SEQ ID NO: 321361 - RNA, 32 nt, Human
aggagggccgcugaaggacaaacauaaccgug

SEQ ID NO: 321362 - RNA, 32 nt, Human
aggagggccugacacgggaagagugcaguagg

SEQ ID NO: 321363 - RNA, 24 nt, Human
aggagggcggaucacaaggucagg

SEQ ID NO: 321364 - RNA, 32 nt, Human
aggagggcggggaaguuugcgucuuauugaac

SEQ ID NO: 321365 - RNA, 18 nt, Human
aggagggcuacccugggg

SEQ ID NO: 321366 - RNA, 32 nt, Human
aggagggcucucuucuuucuuccucauccuac

SEQ ID NO: 321367 - RNA, 32 nt, Human
aggagggcugcgcuggggagguuguggugcag

SEQ ID NO: 321368 - RNA, 32 nt, Human
aggagggcuucgaggguggugauuacgguggc

SEQ ID NO: 321369 - RNA, 32 nt, Human
aggaggggaaacugagcccacagugaguaugu

SEQ ID NO: 321370 - RNA, 32 nt, Human
aggaggggaaccagauguuagaucaggggagg

SEQ ID NO: 321371 - RNA, 32 nt, Human
aggaggggaagagacaaucuccagccacccgc

SEQ ID NO: 321372 - RNA, 32 nt, Human
aggaggggaagagagaggagccccacuucacu

SEQ ID NO: 321373 - RNA, 21 nt, Human
aggaggggaaggggaggcaga

SEQ ID NO: 321374 - RNA, 32 nt, Human
aggaggggacaacaauacuaccucacuacuac

SEQ ID NO: 321375 - RNA, 32 nt, Human
aggaggggacaguguugguggugcugugggcu

SEQ ID NO: 321376 - RNA, 17 nt, Human
aggaggggacccuggga

SEQ ID NO: 321377 - RNA, 32 nt, Human
aggaggggaccgugugggggaggggaccagug

SEQ ID NO: 321378 - RNA, 32 nt, Human
aggaggggacggggagaaagaagcaaugaaug

SEQ ID NO: 321379 - RNA, 32 nt, Human
aggaggggagaaaaaguucuuccaaaggcugg

SEQ ID NO: 321380 - RNA, 32 nt, Human
aggaggggagaaacaggagaggagaggccagg

SEQ ID NO: 321381 - RNA, 32 nt, Human
aggaggggagagacaggcagcccagcagugug

SEQ ID NO: 321382 - RNA, 32 nt, Human
aggaggggagaggcacggauccagguaccacg

SEQ ID NO: 321383 - RNA, 32 nt, Human
aggaggggagauuagacaugcacagaaggccg

SEQ ID NO: 321384 - RNA, 32 nt, Human
aggaggggagcgggcccaggagccaggcucag

SEQ ID NO: 321385 - RNA, 32 nt, Human
aggaggggaggaggaggaggaggaggaggucg

SEQ ID NO: 321386 - RNA, 32 nt, Human
aggaggggagggaggaagaaggaagagaggca

SEQ ID NO: 321387 - RNA, 32 nt, Human
aggaggggagggucgcuccacccuggagcggg

SEQ ID NO: 321388 - RNA, 32 nt, Human
aggaggggaguucagggugaggggagcuuuuu

SEQ ID NO: 321389 - RNA, 32 nt, Human
aggaggggauucuggaacugaauggcgcuucg

SEQ ID NO: 321390 - RNA, 32 nt, Human
aggaggggcacacaugccccaggggagcgagg

SEQ ID NO: 321391 - RNA, 32 nt, Human
aggaggggcagaagugaaggaagaauaggaag

SEQ ID NO: 321392 - RNA, 32 nt, Human
aggaggggcauggcaaauucugccauugccca

SEQ ID NO: 321393 - RNA, 18 nt, Human
aggaggggccaagaacca

SEQ ID NO: 321394 - RNA, 32 nt, Human
aggaggggccaagaaccagggggccaucaaaa

SEQ ID NO: 321395 - RNA, 20 nt, Human
aggaggggccagcagcccca

SEQ ID NO: 321396 - RNA, 32 nt, Human
aggaggggccuuucauagcuguagugaguaag

SEQ ID NO: 321397 - RNA, 32 nt, Human
aggaggggcugcagguccaugugggcagcugu

SEQ ID NO: 321398 - RNA, 32 nt, Human
aggagggggaaaccgggggaaaagagggaaaa

SEQ ID NO: 321399 - RNA, 32 nt, Human
aggagggggaagagaguccguuuugcagaaga

SEQ ID NO: 321400 - RNA, 32 nt, Human
aggagggggacugacacugauuuuucauuuga

SEQ ID NO: 321401 - RNA, 32 nt, Human
aggagggggacuggguguguccagccagaggg

SEQ ID NO: 321402 - RNA, 32 nt, Human
aggagggggagaaggagcaggaauaucgugga

SEQ ID NO: 321403 - RNA, 32 nt, Human
aggagggggaggaggagcgggaggagggacga

SEQ ID NO: 321404 - RNA, 32 nt, Human
aggagggggaugcagaggugaugcagcugggg

SEQ ID NO: 321405 - RNA, 32 nt, Human
aggagggggccaggucaggcaccaccaucaag

SEQ ID NO: 321406 - RNA, 32 nt, Human
aggagggggcccugaggcaugggaugggacag

SEQ ID NO: 321407 - RNA, 32 nt, Human
aggagggggcccuggagggaaaggccgaggcc

SEQ ID NO: 321408 - RNA, 32 nt, Human
aggagggggccgcagucgggagaggggacccc

SEQ ID NO: 321409 - RNA, 32 nt, Human
aggagggggcucugacgugcagguuggaaauc

SEQ ID NO: 321410 - RNA, 32 nt, Human
aggagggggcugggcgcugucccuucucuuuc

SEQ ID NO: 321411 - RNA, 32 nt, Human
aggagggggcugguaucccaaacucugguuuc

SEQ ID NO: 321412 - RNA, 32 nt, Human
aggaggggguuagagagucuguuuugauugau

SEQ ID NO: 321413 - RNA, 32 nt, Human
aggaggggguuggacauccugccccucacccc

SEQ ID NO: 321414 - RNA, 32 nt, Human
aggaggggucauuggccuuuuugucagcacaa

SEQ ID NO: 321415 - RNA, 32 nt, Human
aggaggggugggccauguucuauaagccauag

SEQ ID NO: 321416 - RNA, 32 nt, Human
aggagggguggguuuggggcugauggaagaaa

SEQ ID NO: 321417 - RNA, 32 nt, Human
aggagggguuaaagcugccagcacagaacuua

SEQ ID NO: 321418 - RNA, 32 nt, Human
aggagggguuucuuccugauuuuuagcagguu

SEQ ID NO: 321419 - RNA, 32 nt, Human
aggaggguacagcugggcuggggaggaccuga

SEQ ID NO: 321420 - RNA, 32 nt, Human
aggaggguagaaccuuaaaaagagaccuugaa

SEQ ID NO: 321421 - RNA, 22 nt, Human
aggaggguaggacggggucuca

SEQ ID NO: 321422 - RNA, 32 nt, Human
aggagggucauggaggauguuggggcucugac

SEQ ID NO: 321423 - RNA, 32 nt, Human
aggaggguccucugagacuccagaccugaggc

SEQ ID NO: 321424 - RNA, 32 nt, Human
aggagggucucaaacuccugaccucaggcgau

SEQ ID NO: 321425 - RNA, 20 nt, Human
aggagggucuccacacugcu

SEQ ID NO: 321426 - RNA, 32 nt, Human
aggagggucucgaacuccuggccucaagugau

SEQ ID NO: 321427 - RNA, 32 nt, Human
aggagggucuucgaaacccucuccccacagcc

SEQ ID NO: 321428 - RNA, 32 nt, Human
aggagggugaagauggugcugugcugaggaaa

SEQ ID NO: 321429 - RNA, 32 nt, Human
aggagggugaagauugaaaagcugccuauugc

SEQ ID NO: 321430 - RNA, 32 nt, Human
aggagggugccacccucucccugccaggggcc

SEQ ID NO: 321431 - RNA, 32 nt, Human
aggagggugcuaggcugcagacugccuuguac

SEQ ID NO: 321432 - RNA, 23 nt, Human
aggaggguggaucacgaggucag

SEQ ID NO: 321433 - RNA, 24 nt, Human
aggaggguggaucacgaggucagg

SEQ ID NO: 321434 - RNA, 32 nt, Human
aggaggguggcuucccucacaugaaggacacc

SEQ ID NO: 321435 - RNA, 24 nt, Human
aggagggugggcuggcgguaccca

SEQ ID NO: 321436 - RNA, 22 nt, Human
aggagggugggggaacagcuca

SEQ ID NO: 321437 - RNA, 32 nt, Human
aggaggguggguggagcagguggacuggaguu

SEQ ID NO: 321438 - RNA, 32 nt, Human
aggaggguggguggggaaggcugagcaaaggg

SEQ ID NO: 321439 - RNA, 20 nt, Human
aggaggguguccagaagcca

SEQ ID NO: 321440 - RNA, 32 nt, Human
aggagggugugagucagcucuguccauguggg

SEQ ID NO: 321441 - RNA, 25 nt, Human
aggagggugugggggagcccugagg

SEQ ID NO: 321442 - RNA, 32 nt, Human
aggagguaaagggagguuuucacugugggugu

SEQ ID NO: 321443 - RNA, 32 nt, Human
aggagguaccaugcuucccacucuggggccug

SEQ ID NO: 321444 - RNA, 32 nt, Human
aggagguacugagucaaugaugagggagguau

SEQ ID NO: 321445 - RNA, 23 nt, Human
aggagguagaaccucugcuguua

SEQ ID NO: 321446 - RNA, 32 nt, Human
aggagguagagaggagaaagagagcagcccgg

SEQ ID NO: 321447 - RNA, 32 nt, Human
aggagguagauggggaagaaauaccccagacc

SEQ ID NO: 321448 - RNA, 22 nt, Human
aggagguagccgaggccugagg

SEQ ID NO: 321449 - RNA, 32 nt, Human
aggaggucaagaccagccuggccaacguggug

SEQ ID NO: 321450 - RNA, 32 nt, Human
aggaggucaagaccagccugggcaacacggug

SEQ ID NO: 321451 - RNA, 32 nt, Human
aggaggucaagaucagccugaccaacaugaug

SEQ ID NO: 321452 - RNA, 19 nt, Human
aggaggucaaggcugcagu

SEQ ID NO: 321453 - RNA, 32 nt, Human
aggaggucaauaccagccugggcaacauagua

SEQ ID NO: 321454 - RNA, 32 nt, Human
aggaggucagcaaaggucuugaauagauuuuc

SEQ ID NO: 321455 - RNA, 32 nt, Human
aggaggucagcaggggugggcaggcccagcug

SEQ ID NO: 321456 - RNA, 32 nt, Human
aggaggucagccuggccaauauggugaaaccc

SEQ ID NO: 321457 - RNA, 32 nt, Human
aggaggucaggaguucgagaccagccuggcca

SEQ ID NO: 321458 - RNA, 32 nt, Human
aggaggucaggucaaggcugcagugagccaug

SEQ ID NO: 321459 - RNA, 32 nt, Human
aggaggucaguucucaccccuuccucgauggg

SEQ ID NO: 321460 - RNA, 32 nt, Human
aggaggucauuuuucugcagggguggagccaa

SEQ ID NO: 321461 - RNA, 32 nt, Human
aggagguccagaccagccugggcaacacagcg

SEQ ID NO: 321462 - RNA, 32 nt, Human
aggagguccucugagcccugaggcagagaucu

SEQ ID NO: 321463 - RNA, 32 nt, Human
aggagguccugaggcuacagagcugccgcggc

SEQ ID NO: 321464 - RNA, 32 nt, Human
aggaggucgagaccagccuggggaacacaucc

SEQ ID NO: 321465 - RNA, 32 nt, Human
aggaggucgcagaggugaagagcuaaaccacu

SEQ ID NO: 321466 - RNA, 32 nt, Human
aggaggucggagccacaagugaggggcuggga

SEQ ID NO: 321467 - RNA, 32 nt, Human
aggaggucucaccugcugaaccagccagcccu

SEQ ID NO: 321468 - RNA, 32 nt, Human
aggaggucucagucccagccucgggagggcac

SEQ ID NO: 321469 - RNA, 23 nt, Human
aggaggucugccucccaccagac

SEQ ID NO: 321470 - RNA, 32 nt, Human
aggaggucuucccacgcccugucauuaggcug

SEQ ID NO: 321471 - RNA, 32 nt, Human
aggaggugaacaaggagcuguggcgccagcag

SEQ ID NO: 321472 - RNA, 32 nt, Human
aggaggugaaggccacagugacccaacagggu

SEQ ID NO: 321473 - RNA, 19 nt, Human
aggaggugaagucggguca

SEQ ID NO: 321474 - RNA, 32 nt, Human
aggaggugagaggagaggaaggagaaaacugc

SEQ ID NO: 321475 - RNA, 32 nt, Human
aggaggugaggacaagccagagguccuuggug

SEQ ID NO: 321476 - RNA, 32 nt, Human
aggaggugagggaagcagcgcugucagaguuu

SEQ ID NO: 321477 - RNA, 20 nt, Human
aggaggugaggggcaccuau

SEQ ID NO: 321478 - RNA, 32 nt, Human
aggaggugaugaggucacagaggcagaaaccu

SEQ ID NO: 321479 - RNA, 32 nt, Human
aggaggugaugguggaugacaggcuagucaca

SEQ ID NO: 321480 - RNA, 32 nt, Human
aggaggugcaccuggcagcccacauuuuuguu

SEQ ID NO: 321481 - RNA, 32 nt, Human
aggaggugccccgggaccucagggcuguggcu

SEQ ID NO: 321482 - RNA, 32 nt, Human
aggaggugcucaauaaaaguugacuccgaaug

SEQ ID NO: 321483 - RNA, 32 nt, Human
aggaggugcucaauaaaaguugacucugacug

SEQ ID NO: 321484 - RNA, 32 nt, Human
aggaggugcuccagaagcacgggacuguggac

SEQ ID NO: 321485 - RNA, 32 nt, Human
aggaggugcugguguccaccuccagggccccc

SEQ ID NO: 321486 - RNA, 32 nt, Human
aggagguggagagacagcccacccccgugucc

SEQ ID NO: 321487 - RNA, 32 nt, Human
aggagguggagagacagcccacccuugugucc

SEQ ID NO: 321488 - RNA, 32 nt, Human
aggagguggaggaggagagguggcaggaggag

SEQ ID NO: 321489 - RNA, 32 nt, Human
aggagguggaggaggaggaagaggagaaggaa

SEQ ID NO: 321490 - RNA, 32 nt, Human
aggagguggaggaggaggaggaagaucaggag

SEQ ID NO: 321491 - RNA, 32 nt, Human
aggagguggaggaggaggaggaggaggaggag

SEQ ID NO: 321492 - RNA, 32 nt, Human
aggagguggaggcugcaaugagcugagauagu

SEQ ID NO: 321493 - RNA, 32 nt, Human
aggagguggagguugaaaugagcugagaucau

SEQ ID NO: 321494 - RNA, 21 nt, Human
aggagguggagguugcaguga

SEQ ID NO: 321495 - RNA, 32 nt, Human
aggagguggcaccggauauaacaugucucugu

SEQ ID NO: 321496 - RNA, 32 nt, Human
aggagguggcuccaaaggguaaagcaaacaaa

SEQ ID NO: 321497 - RNA, 32 nt, Human
aggagguggcucgugacaccacgaugggacac

SEQ ID NO: 321498 - RNA, 32 nt, Human
aggaggugggcacagggugagguagggggugg

SEQ ID NO: 321499 - RNA, 31 nt, Human
aggaggugggcauuuccuacauuccuccuug

SEQ ID NO: 321500 - RNA, 32 nt, Human
aggagguggggauccgagugcagugagagccu

SEQ ID NO: 321501 - RNA, 32 nt, Human
aggaggugggguggaaauagggugggcuccuu

SEQ ID NO: 321502 - RNA, 31 nt, Human
aggagguggguggaggcaugcaggggagacg

SEQ ID NO: 321503 - RNA, 32 nt, Human
aggagguggguggaggcaugcaggggagacga

SEQ ID NO: 321504 - RNA, 18 nt, Human
aggagguggguugggaga

SEQ ID NO: 321505 - RNA, 32 nt, Human
aggagguggugaguuggcuacaagagaaaggg

SEQ ID NO: 321506 - RNA, 32 nt, Human
aggaggugguucugaaaguggcucuucuaacc

SEQ ID NO: 321507 - RNA, 26 nt, Human
aggaggugguuggccagagaugggga

SEQ ID NO: 321508 - RNA, 32 nt, Human
aggaggugucuugcuucaccuucaccuuccac

SEQ ID NO: 321509 - RNA, 32 nt, Human
aggagguucaaccucucuggcagaucaucucu

SEQ ID NO: 321510 - RNA, 32 nt, Human
aggagguuccagccuuggcaagaggagugugg

SEQ ID NO: 321511 - RNA, 19 nt, Human
aggagguucccggaagcca

SEQ ID NO: 321512 - RNA, 20 nt, Human
aggagguugaggcugggagg

SEQ ID NO: 321513 - RNA, 31 nt, Human
aggagguuggagagagaaagggugaaagcag

SEQ ID NO: 321514 - RNA, 32 nt, Human
aggagguuggagcagcccugcccagccccgug

SEQ ID NO: 321515 - RNA, 32 nt, Human
aggagguugucagggacacagagcagggggag

SEQ ID NO: 321516 - RNA, 21 nt, Human
aggagguugucucuuccuccu

SEQ ID NO: 321517 - RNA, 32 nt, Human
aggagguugugagucagcucuguccauguggg

SEQ ID NO: 321518 - RNA, 32 nt, Human
aggagguuugccgcggcagaaaaguuuucuuc

SEQ ID NO: 321519 - RNA, 25 nt, Human
aggagguuuguuguuuugccuguua

SEQ ID NO: 321520 - RNA, 32 nt, Human
aggaguaaaucuaaauguggcuuuugucaagc

SEQ ID NO: 321521 - RNA, 32 nt, Human
aggaguaagggggaggccagagggcucagaug

SEQ ID NO: 321522 - RNA, 32 nt, Human
aggaguacaggguccugugagcuguuugacca

SEQ ID NO: 321523 - RNA, 32 nt, Human
aggaguacagucaggggucaguguggcaacua

SEQ ID NO: 321524 - RNA, 32 nt, Human
aggaguacauugaagggagauuggcacccagg

SEQ ID NO: 321525 - RNA, 32 nt, Human
aggaguacauugaagggagauuggcaccuagu

SEQ ID NO: 321526 - RNA, 32 nt, Human
aggaguacauugaagggggauuggcacccagu

SEQ ID NO: 321527 - RNA, 32 nt, Human
aggaguaccugccuccuucagcccacuaguag

SEQ ID NO: 321528 - RNA, 32 nt, Human
aggaguagaagaggaugaccagcuagacuccc

SEQ ID NO: 321529 - RNA, 32 nt, Human
aggaguagccacugccccuccucgccccauuc

SEQ ID NO: 321530 - RNA, 32 nt, Human
aggaguaggacugcagcagagagggguuuugc

SEQ ID NO: 321531 - RNA, 32 nt, Human
aggaguagggacaggaaggacaggggaugccu

SEQ ID NO: 321532 - RNA, 32 nt, Human
aggaguaucaggaggaccuggcccugcgggcu

SEQ ID NO: 321533 - RNA, 32 nt, Human
aggaguaucccuugagucugggagguggaggc

SEQ ID NO: 321534 - RNA, 32 nt, Human
aggaguauugaggagcuugaaagggaacauuc

SEQ ID NO: 321535 - RNA, 32 nt, Human
aggagucaagggagcagggcagcucuaccagg

SEQ ID NO: 321536 - RNA, 32 nt, Human
aggagucacuggauggauguugcuugacuccu

SEQ ID NO: 321537 - RNA, 32 nt, Human
aggagucagaggaggaguuagaggaggaggag

SEQ ID NO: 321538 - RNA, 32 nt, Human
aggagucagaggcaggaggcaccaccagguua

SEQ ID NO: 321539 - RNA, 32 nt, Human
aggagucagaggcuggagugcaauggcgugau

SEQ ID NO: 321540 - RNA, 32 nt, Human
aggagucagcaaggcuccugcccauugccagg

SEQ ID NO: 321541 - RNA, 32 nt, Human
aggagucaggcagggccagcacaggguggcgu

SEQ ID NO: 321542 - RNA, 32 nt, Human
aggagucaguacaggcuuuauucaccucaaag

SEQ ID NO: 321543 - RNA, 32 nt, Human
aggagucaguucucccuuucugcuauccauca

SEQ ID NO: 321544 - RNA, 18 nt, Human
aggagucaucccagaagc

SEQ ID NO: 321545 - RNA, 32 nt, Human
aggagucauguuggagguuggggaagaaccug

SEQ ID NO: 321546 - RNA, 32 nt, Human
aggagucauuagcagugaugauuuugggaccu

SEQ ID NO: 321547 - RNA, 32 nt, Human
aggaguccaaagccagccugggcaacauggug

SEQ ID NO: 321548 - RNA, 32 nt, Human
aggaguccaaccugggcaacauggugaaaccc

SEQ ID NO: 321549 - RNA, 32 nt, Human
aggaguccaagaccagccuggccaacauggug

SEQ ID NO: 321550 - RNA, 32 nt, Human
aggaguccaagaccagccugggcaacauggca

SEQ ID NO: 321551 - RNA, 32 nt, Human
aggaguccaaggaaaccucagaacagccgucc

SEQ ID NO: 321552 - RNA, 32 nt, Human
aggaguccaggccauggaggcagaauccuggc

SEQ ID NO: 321553 - RNA, 32 nt, Human
aggaguccaguuccuaaaagauuauuucagag

SEQ ID NO: 321554 - RNA, 32 nt, Human
aggaguccccuuucccugucccagccccaucu

SEQ ID NO: 321555 - RNA, 32 nt, Human
aggagucccgcaggaaggaggccuucuucugu

SEQ ID NO: 321556 - RNA, 32 nt, Human
aggagucccugccaucauguuuacagaggaca

SEQ ID NO: 321557 - RNA, 32 nt, Human
aggaguccgagaccagccugggcaacauagug

SEQ ID NO: 321558 - RNA, 32 nt, Human
aggaguccucccccuucuccugcagucucugg

SEQ ID NO: 321559 - RNA, 32 nt, Human
aggaguccucggaggaggagcagugcccaugc

SEQ ID NO: 321560 - RNA, 32 nt, Human
aggaguccucuuaaguuugauagaaaugaauu

SEQ ID NO: 321561 - RNA, 32 nt, Human
aggaguccugcccagcagccucgguggccaag

SEQ ID NO: 321562 - RNA, 32 nt, Human
aggaguccugggagcauggcuuucccugagcc

SEQ ID NO: 321563 - RNA, 32 nt, Human
aggagucgcagcggacugggaacugcagcugc

SEQ ID NO: 321564 - RNA, 32 nt, Human
aggagucggagaccagccugggcaacauggcg

SEQ ID NO: 321565 - RNA, 32 nt, Human
aggagucgugaaugguucucaccaggaccuga

SEQ ID NO: 321566 - RNA, 32 nt, Human
aggagucuaggaccagccuggacaacauggug

SEQ ID NO: 321567 - RNA, 32 nt, Human
aggagucucucuugcucuguugcccaggcugg

SEQ ID NO: 321568 - RNA, 32 nt, Human
aggagucugagaccagccuggccaacauagca

SEQ ID NO: 321569 - RNA, 32 nt, Human
aggagucugagaccagccuggccaacauggca

SEQ ID NO: 321570 - RNA, 32 nt, Human
aggagucugagaccagccugggcaacauagca

SEQ ID NO: 321571 - RNA, 32 nt, Human
aggagucugagaccagccugggcaacauggug

SEQ ID NO: 321572 - RNA, 32 nt, Human
aggagucugcacucuucagucuuugcaggcag

SEQ ID NO: 321573 - RNA, 19 nt, Human
aggagucugccaggagcca

SEQ ID NO: 321574 - RNA, 32 nt, Human
aggagucugucagcuacggaggacaaugaccu

SEQ ID NO: 321575 - RNA, 32 nt, Human
aggagucuuggugagauuuugcucugaugcau

SEQ ID NO: 321576 - RNA, 32 nt, Human
aggagugaaagaagaaaagaagacuuagaaac

SEQ ID NO: 321577 - RNA, 32 nt, Human
aggagugaagaaaggcugggaggaauagagau

SEQ ID NO: 321578 - RNA, 32 nt, Human
aggagugaagccaccacacagauggaaacaaa

SEQ ID NO: 321579 - RNA, 32 nt, Human
aggagugacagaauaucaaaauaauuuguggc

SEQ ID NO: 321580 - RNA, 32 nt, Human
aggagugagcaaaggaagcauuuaccccgaug

SEQ ID NO: 321581 - RNA, 32 nt, Human
aggagugagcaccuaaaugaacgcaguaaacc

SEQ ID NO: 321582 - RNA, 22 nt, Human
aggagugagccaccaugcccgg

SEQ ID NO: 321583 - RNA, 18 nt, Human
aggagugagcucccuggg

SEQ ID NO: 321584 - RNA, 32 nt, Human
aggagugaggcagcagccucuaugcuugauuu

SEQ ID NO: 321585 - RNA, 32 nt, Human
aggagugaggcaugucuucagcagagcuugua

SEQ ID NO: 321586 - RNA, 22 nt, Human
aggagugagggaacccuggggc

SEQ ID NO: 321587 - RNA, 32 nt, Human
aggagugcaaaagcagccugagcaacauagug

SEQ ID NO: 321588 - RNA, 32 nt, Human
aggagugcacagcuccugcugauguauuuuuc

SEQ ID NO: 321589 - RNA, 32 nt, Human
aggagugcaccacugcacuccagccugggcaa

SEQ ID NO: 321590 - RNA, 32 nt, Human
aggagugcaguggcacagucauggcucgcugc

SEQ ID NO: 321591 - RNA, 32 nt, Human
aggagugcaguggcaugcucucagcucacugc

SEQ ID NO: 321592 - RNA, 32 nt, Human
aggagugcaguggcgugaucuuggcucacugc

SEQ ID NO: 321593 - RNA, 32 nt, Human
aggagugcauagauuccugaaggccauccagu

SEQ ID NO: 321594 - RNA, 32 nt, Human
aggagugccagccuggcccaggugaaagccau

SEQ ID NO: 321595 - RNA, 32 nt, Human
aggagugccuaagccaggacccagaaacucag

SEQ ID NO: 321596 - RNA, 32 nt, Human
aggagugccuggggauuugauccccauccugg

SEQ ID NO: 321597 - RNA, 20 nt, Human
aggagugcuaaaaggagcca

SEQ ID NO: 321598 - RNA, 32 nt, Human
aggagugcucuucaucaacuaauagagcaccu

SEQ ID NO: 321599 - RNA, 32 nt, Human
aggagugcugagggcuggagugggugggcccu

SEQ ID NO: 321600 - RNA, 32 nt, Human
aggagugcugaugagaggcagaggcucuucug

SEQ ID NO: 321601 - RNA, 32 nt, Human
aggagugcugggauaggagucgggauggugag

SEQ ID NO: 321602 - RNA, 32 nt, Human
aggagugcuguuagcccaaggggaagagcuaa

SEQ ID NO: 321603 - RNA, 17 nt, Human
aggaguggaaaaagagc

SEQ ID NO: 321604 - RNA, 21 nt, Human
aggaguggaaaacaaaaccca

SEQ ID NO: 321605 - RNA, 21 nt, Human
aggaguggaacugcuggguca

SEQ ID NO: 321606 - RNA, 18 nt, Human
aggaguggaacuggggga

SEQ ID NO: 321607 - RNA, 32 nt, Human
aggaguggaagaccuucuggugugggcugggc

SEQ ID NO: 321608 - RNA, 19 nt, Human
aggaguggaagaggagaca

SEQ ID NO: 321609 - RNA, 32 nt, Human
aggaguggaagaggagacaauuugaaugaauc

SEQ ID NO: 321610 - RNA, 17 nt, Human
aggaguggaaggaaacc

SEQ ID NO: 321611 - RNA, 21 nt, Human
aggaguggaauuucuaaguca

SEQ ID NO: 321612 - RNA, 32 nt, Human
aggaguggacaagccucuugguuaaggcuccu

SEQ ID NO: 321613 - RNA, 21 nt, Human
aggaguggacguuucaagcca

SEQ ID NO: 321614 - RNA, 32 nt, Human
aggaguggagagaaugaguaggagggcagaag

SEQ ID NO: 321615 - RNA, 32 nt, Human
aggaguggagagugugcaugagugugugugag

SEQ ID NO: 321616 - RNA, 19 nt, Human
aggaguggagcaugaaaca

SEQ ID NO: 321617 - RNA, 19 nt, Human
aggaguggaguagagccca

SEQ ID NO: 321618 - RNA, 22 nt, Human
aggaguggaguagagcccaauc

SEQ ID NO: 321619 - RNA, 32 nt, Human
aggaguggcagaagaaagauagguuggagaca

SEQ ID NO: 321620 - RNA, 20 nt, Human
aggaguggcaugagaggcca

SEQ ID NO: 321621 - RNA, 19 nt, Human
aggaguggccacaaggcca

SEQ ID NO: 321622 - RNA, 19 nt, Human
aggaguggccucaaggcca

SEQ ID NO: 321623 - RNA, 32 nt, Human
aggaguggcggcuccuggaggaggggcagagg

SEQ ID NO: 321624 - RNA, 32 nt, Human
aggaguggcugaggcagggcauggagcggagc

SEQ ID NO: 321625 - RNA, 32 nt, Human
aggaguggcugcaugugucugauaauaaagac

SEQ ID NO: 321626 - RNA, 32 nt, Human
aggagugggaaagaugguagagagacagaaga

SEQ ID NO: 321627 - RNA, 32 nt, Human
aggagugggaaucucccuuggccucaucucuc

SEQ ID NO: 321628 - RNA, 32 nt, Human
aggagugggagcaggagccagggcagaacaaa

SEQ ID NO: 321629 - RNA, 32 nt, Human
aggagugggcaggccggaguggggcgcccugg

SEQ ID NO: 321630 - RNA, 32 nt, Human
aggagugggcaggccugagugagggucacuga

SEQ ID NO: 321631 - RNA, 32 nt, Human
aggagugggcgcugggagaagcucccauuuag

SEQ ID NO: 321632 - RNA, 17 nt, Human
aggagugggcggaaacc

SEQ ID NO: 321633 - RNA, 21 nt, Human
aggagugggcugucacuagga

SEQ ID NO: 321634 - RNA, 18 nt, Human
aggaguggggagaaacca

SEQ ID NO: 321635 - RNA, 32 nt, Human
aggaguggggagaagagcauacgccaggagcc

SEQ ID NO: 321636 - RNA, 32 nt, Human
aggagugggggaagaauggccauugggagaca

SEQ ID NO: 321637 - RNA, 32 nt, Human
aggaguggguuauaaaaacauucaaguugguc

SEQ ID NO: 321638 - RNA, 23 nt, Human
aggagugguggggaccagaagcc

SEQ ID NO: 321639 - RNA, 32 nt, Human
aggagugguucugcagcuugaguccucugguu

SEQ ID NO: 321640 - RNA, 20 nt, Human
aggagugguucuuagaaaca

SEQ ID NO: 321641 - RNA, 29 nt, Human
aggagugguugggcugugccugggccuag

SEQ ID NO: 321642 - RNA, 32 nt, Human
aggaguguauauguuucauaaucuuuaucaag

SEQ ID NO: 321643 - RNA, 32 nt, Human
aggaguguauugcuaaagcaugugaguaauca

SEQ ID NO: 321644 - RNA, 22 nt, Human
aggagugugacggcaggagcca

SEQ ID NO: 321645 - RNA, 32 nt, Human
aggagugugagagacacaugcccacuucaugc

SEQ ID NO: 321646 - RNA, 32 nt, Human
aggagugugagaggaugggggaagcacugugg

SEQ ID NO: 321647 - RNA, 32 nt, Human
aggagugugcuggcaguacaaugacaguuuuc

SEQ ID NO: 321648 - RNA, 32 nt, Human
aggagugugggaugugguuucugccuucuaga

SEQ ID NO: 321649 - RNA, 32 nt, Human
aggaguguuauuuauggcuuugccaagcuaca

SEQ ID NO: 321650 - RNA, 32 nt, Human
aggaguuaaacaccagccugacaaacauggag

SEQ ID NO: 321651 - RNA, 32 nt, Human
aggaguuaaagaccagccuggccaacaaggug

SEQ ID NO: 321652 - RNA, 32 nt, Human
aggaguuaaagaccagccuggccaacauggca

SEQ ID NO: 321653 - RNA, 32 nt, Human
aggaguuaaagaccagccugggcaacauaggg

SEQ ID NO: 321654 - RNA, 32 nt, Human
aggaguuaaaugaagaaagagauaaguauaga

SEQ ID NO: 321655 - RNA, 32 nt, Human
aggaguuaaugacucccucuccccagcugucc

SEQ ID NO: 321656 - RNA, 32 nt, Human
aggaguuacagucccuuuuggcccucacaucc

SEQ ID NO: 321657 - RNA, 32 nt, Human
aggaguuacccacuuugugucuccugagagcu

SEQ ID NO: 321658 - RNA, 32 nt, Human
aggaguuagagaccagccuggccaacaaggca

SEQ ID NO: 321659 - RNA, 32 nt, Human
aggaguuagagaccagccugggcaacaugaug

SEQ ID NO: 321660 - RNA, 32 nt, Human
aggaguuagagaccagccugggcaacauggug

SEQ ID NO: 321661 - RNA, 32 nt, Human
aggaguuagaggaggaggaggaggaggaagag

SEQ ID NO: 321662 - RNA, 32 nt, Human
aggaguuaggucucaggucagccuggcuccug

SEQ ID NO: 321663 - RNA, 23 nt, Human
aggaguuagguggcuugauaaua

SEQ ID NO: 321664 - RNA, 32 nt, Human
aggaguucaaaaccaaccuggucuacauggug

SEQ ID NO: 321665 - RNA, 32 nt, Human
aggaguucaaaaccagccugaccaacauggug

SEQ ID NO: 321666 - RNA, 32 nt, Human
aggaguucaaaaccagccugaccaauauggug

SEQ ID NO: 321667 - RNA, 32 nt, Human
aggaguucaaaaccagccuggacaaucuggcg

SEQ ID NO: 321668 - RNA, 32 nt, Human
aggaguucaaaaccagccuggccaacaugcug

SEQ ID NO: 321669 - RNA, 32 nt, Human
aggaguucaaaaccagccuggccaacauggug

SEQ ID NO: 321670 - RNA, 32 nt, Human
aggaguucaaaaccagccugggcaauauagug

SEQ ID NO: 321671 - RNA, 32 nt, Human
aggaguucaaaaccagccuguccaauauagug

SEQ ID NO: 321672 - RNA, 32 nt, Human
aggaguucaaaaccagcuugggcagcauggcg

SEQ ID NO: 321673 - RNA, 32 nt, Human
aggaguucaacaccagcaugaccaacauggag

SEQ ID NO: 321674 - RNA, 32 nt, Human
aggaguucaacaccagccugagcaacauggua

SEQ ID NO: 321675 - RNA, 32 nt, Human
aggaguucaacaccagccuggccaacauggug

SEQ ID NO: 321676 - RNA, 32 nt, Human
aggaguucaacgccagccuggccaacauggug

SEQ ID NO: 321677 - RNA, 32 nt, Human
aggaguucaagaacagccugaccaacauggug

SEQ ID NO: 321678 - RNA, 32 nt, Human
aggaguucaagacaaggcugaccaacauggca

SEQ ID NO: 321679 - RNA, 32 nt, Human
aggaguucaagaccacccugaccaagguggug

SEQ ID NO: 321680 - RNA, 32 nt, Human
aggaguucaagaccagccuagccaacauggug

SEQ ID NO: 321681 - RNA, 32 nt, Human
aggaguucaagaccagccuaggcaacauaggg

SEQ ID NO: 321682 - RNA, 32 nt, Human
aggaguucaagaccagccuaggcaacuaagug

SEQ ID NO: 321683 - RNA, 32 nt, Human
aggaguucaagaccagccuaggccagauggug

SEQ ID NO: 321684 - RNA, 32 nt, Human
aggaguucaagaccagccucaacauggagaaa

SEQ ID NO: 321685 - RNA, 32 nt, Human
aggaguucaagaccagccugaccaacaugaag

SEQ ID NO: 321686 - RNA, 32 nt, Human
aggaguucaagaccagccugaccaacauggau

SEQ ID NO: 321687 - RNA, 32 nt, Human
aggaguucaagaccagccugaccaacauggca

SEQ ID NO: 321688 - RNA, 32 nt, Human
aggaguucaagaccagccugaccaacauggcg

SEQ ID NO: 321689 - RNA, 32 nt, Human
aggaguucaagaccagccugaccaacaugggg

SEQ ID NO: 321690 - RNA, 32 nt, Human
aggaguucaagaccagccugaccaacauggug

SEQ ID NO: 321691 - RNA, 32 nt, Human
aggaguucaagaccagccugacccacauggag

SEQ ID NO: 321692 - RNA, 32 nt, Human
aggaguucaagaccagccugagaaacauagug

SEQ ID NO: 321693 - RNA, 32 nt, Human
aggaguucaagaccagccugagcaaaaagacc

SEQ ID NO: 321694 - RNA, 32 nt, Human
aggaguucaagaccagccugagcaacauagug

SEQ ID NO: 321695 - RNA, 32 nt, Human
aggaguucaagaccagccugagcagcguagca

SEQ ID NO: 321696 - RNA, 32 nt, Human
aggaguucaagaccagccugaucaacauggug

SEQ ID NO: 321697 - RNA, 32 nt, Human
aggaguucaagaccagccugcccaacauagug

SEQ ID NO: 321698 - RNA, 32 nt, Human
aggaguucaagaccagccugcccaacauggca

SEQ ID NO: 321699 - RNA, 32 nt, Human
aggaguucaagaccagccugcccaacauggug

SEQ ID NO: 321700 - RNA, 32 nt, Human
aggaguucaagaccagccuggacaacacagca

SEQ ID NO: 321701 - RNA, 32 nt, Human
aggaguucaagaccagccuggacaacauagug

SEQ ID NO: 321702 - RNA, 32 nt, Human
aggaguucaagaccagccuggacaacauggca

SEQ ID NO: 321703 - RNA, 32 nt, Human
aggaguucaagaccagccuggacaacauggug

SEQ ID NO: 321704 - RNA, 32 nt, Human
aggaguucaagaccagccuggacaauauagug

SEQ ID NO: 321705 - RNA, 32 nt, Human
aggaguucaagaccagccuggacagcuuagug

SEQ ID NO: 321706 - RNA, 32 nt, Human
aggaguucaagaccagccuggccaacaaggcg

SEQ ID NO: 321707 - RNA, 32 nt, Human
aggaguucaagaccagccuggccaacaaggug

SEQ ID NO: 321708 - RNA, 32 nt, Human
aggaguucaagaccagccuggccaacacagug

SEQ ID NO: 321709 - RNA, 32 nt, Human
aggaguucaagaccagccuggccaacacggug

SEQ ID NO: 321710 - RNA, 32 nt, Human
aggaguucaagaccagccuggccaacauagug

SEQ ID NO: 321711 - RNA, 32 nt, Human
aggaguucaagaccagccuggccaacaugaaa

SEQ ID NO: 321712 - RNA, 32 nt, Human
aggaguucaagaccagccuggccaacaugaca

SEQ ID NO: 321713 - RNA, 32 nt, Human
aggaguucaagaccagccuggccaacaugacg

SEQ ID NO: 321714 - RNA, 32 nt, Human
aggaguucaagaccagccuggccaacaugaua

SEQ ID NO: 321715 - RNA, 32 nt, Human
aggaguucaagaccagccuggccaacaugaug

SEQ ID NO: 321716 - RNA, 32 nt, Human
aggaguucaagaccagccuggccaacauggag

SEQ ID NO: 321717 - RNA, 32 nt, Human
aggaguucaagaccagccuggccaacauggca

SEQ ID NO: 321718 - RNA, 32 nt, Human
aggaguucaagaccagccuggccaacauggcg

SEQ ID NO: 321719 - RNA, 32 nt, Human
aggaguucaagaccagccuggccaacaugggg

SEQ ID NO: 321720 - RNA, 32 nt, Human
aggaguucaagaccagccuggccaacauggua

SEQ ID NO: 321721 - RNA, 32 nt, Human
aggaguucaagaccagccuggccaacaugguc

SEQ ID NO: 321722 - RNA, 32 nt, Human
aggaguucaagaccagccuggccaacauggug

SEQ ID NO: 321723 - RNA, 32 nt, Human
aggaguucaagaccagccuggccaaccuggug

SEQ ID NO: 321724 - RNA, 32 nt, Human
aggaguucaagaccagccuggccaacguggca

SEQ ID NO: 321725 - RNA, 32 nt, Human
aggaguucaagaccagccuggccaacguggug

SEQ ID NO: 321726 - RNA, 32 nt, Human
aggaguucaagaccagccuggccaacuuggag

SEQ ID NO: 321727 - RNA, 32 nt, Human
aggaguucaagaccagccuggccaacuuggug

SEQ ID NO: 321728 - RNA, 32 nt, Human
aggaguucaagaccagccuggccaagauggug

SEQ ID NO: 321729 - RNA, 32 nt, Human
aggaguucaagaccagccuggccaauauggca

SEQ ID NO: 321730 - RNA, 32 nt, Human
aggaguucaagaccagccuggccaauauggug

SEQ ID NO: 321731 - RNA, 32 nt, Human
aggaguucaagaccagccuggccaauguagug

SEQ ID NO: 321732 - RNA, 32 nt, Human
aggaguucaagaccagccuggccaaugugaug

SEQ ID NO: 321733 - RNA, 32 nt, Human
aggaguucaagaccagccuggccacauggugc

SEQ ID NO: 321734 - RNA, 32 nt, Human
aggaguucaagaccagccuggccgacauggcg

SEQ ID NO: 321735 - RNA, 32 nt, Human
aggaguucaagaccagccuggccgggguggug

SEQ ID NO: 321736 - RNA, 32 nt, Human
aggaguucaagaccagccuggcuaacauggca

SEQ ID NO: 321737 - RNA, 32 nt, Human
aggaguucaagaccagccuggcuaacauggug

SEQ ID NO: 321738 - RNA, 32 nt, Human
aggaguucaagaccagccuggcuaacauguga

SEQ ID NO: 321739 - RNA, 32 nt, Human
aggaguucaagaccagccuggcuaauauggug

SEQ ID NO: 321740 - RNA, 32 nt, Human
aggaguucaagaccagccuggcugacaccgug

SEQ ID NO: 321741 - RNA, 32 nt, Human
aggaguucaagaccagccugggaacacagcga

SEQ ID NO: 321742 - RNA, 32 nt, Human
aggaguucaagaccagccugggcaacacagca

SEQ ID NO: 321743 - RNA, 32 nt, Human
aggaguucaagaccagccugggcaacacagcg

SEQ ID NO: 321744 - RNA, 32 nt, Human
aggaguucaagaccagccugggcaacacagug

SEQ ID NO: 321745 - RNA, 32 nt, Human
aggaguucaagaccagccugggcaacacgaaa

SEQ ID NO: 321746 - RNA, 32 nt, Human
aggaguucaagaccagccugggcaacauaaug

SEQ ID NO: 321747 - RNA, 32 nt, Human
aggaguucaagaccagccugggcaacauacca

SEQ ID NO: 321748 - RNA, 32 nt, Human
aggaguucaagaccagccugggcaacauagca

SEQ ID NO: 321749 - RNA, 32 nt, Human
aggaguucaagaccagccugggcaacauagga

SEQ ID NO: 321750 - RNA, 32 nt, Human
aggaguucaagaccagccugggcaacauaggg

SEQ ID NO: 321751 - RNA, 32 nt, Human
aggaguucaagaccagccugggcaacauagug

SEQ ID NO: 321752 - RNA, 32 nt, Human
aggaguucaagaccagccugggcaacaugaua

SEQ ID NO: 321753 - RNA, 32 nt, Human
aggaguucaagaccagccugggcaacauggcg

SEQ ID NO: 321754 - RNA, 32 nt, Human
aggaguucaagaccagccugggcaacauggcu

SEQ ID NO: 321755 - RNA, 32 nt, Human
aggaguucaagaccagccugggcaacauggug

SEQ ID NO: 321756 - RNA, 32 nt, Human
aggaguucaagaccagccugggcaacauuccc

SEQ ID NO: 321757 - RNA, 32 nt, Human
aggaguucaagaccagccugggcaacguagca

SEQ ID NO: 321758 - RNA, 32 nt, Human
aggaguucaagaccagccugggcaacuuaggg

SEQ ID NO: 321759 - RNA, 32 nt, Human
aggaguucaagaccagccugggcaacuuagug

SEQ ID NO: 321760 - RNA, 32 nt, Human
aggaguucaagaccagccugggcaauauagug

SEQ ID NO: 321761 - RNA, 32 nt, Human
aggaguucaagaccagccugggcaaugugaug

SEQ ID NO: 321762 - RNA, 32 nt, Human
aggaguucaagaccagccugggcagcaugaca

SEQ ID NO: 321763 - RNA, 32 nt, Human
aggaguucaagaccagccugggcagcauggug

SEQ ID NO: 321764 - RNA, 32 nt, Human
aggaguucaagaccagccugggcuacagagca

SEQ ID NO: 321765 - RNA, 32 nt, Human
aggaguucaagaccagccugggcuacaugacg

SEQ ID NO: 321766 - RNA, 32 nt, Human
aggaguucaagaccagccuggggaacauagag

SEQ ID NO: 321767 - RNA, 32 nt, Human
aggaguucaagaccagccuggguaacaugggg

SEQ ID NO: 321768 - RNA, 32 nt, Human
aggaguucaagaccagccuggguaacauggug

SEQ ID NO: 321769 - RNA, 32 nt, Human
aggaguucaagaccagccuggguaucauaggg

SEQ ID NO: 321770 - RNA, 32 nt, Human
aggaguucaagaccagccuggucaacauggca

SEQ ID NO: 321771 - RNA, 32 nt, Human
aggaguucaagaccagccuggucaacauggug

SEQ ID NO: 321772 - RNA, 32 nt, Human
aggaguucaagaccagccuggucaacauguca

SEQ ID NO: 321773 - RNA, 32 nt, Human
aggaguucaagaccagccuguccaacauggug

SEQ ID NO: 321774 - RNA, 32 nt, Human
aggaguucaagaccagccuguggaacauaaca

SEQ ID NO: 321775 - RNA, 32 nt, Human
aggaguucaagaccagccuugccaacauggug

SEQ ID NO: 321776 - RNA, 32 nt, Human
aggaguucaagaccagccuugccaagauggug

SEQ ID NO: 321777 - RNA, 32 nt, Human
aggaguucaagaccagccuuggcaacauggug

SEQ ID NO: 321778 - RNA, 32 nt, Human
aggaguucaagacuagccugaccaacauggug

SEQ ID NO: 321779 - RNA, 32 nt, Human
aggaguucaagagcaaccugaccaauacggug

SEQ ID NO: 321780 - RNA, 32 nt, Human
aggaguucaagaucagccugaccaacauggag

SEQ ID NO: 321781 - RNA, 32 nt, Human
aggaguucaaggccagccuggacaacauagua

SEQ ID NO: 321782 - RNA, 32 nt, Human
aggaguucaaggccagccuggccaacauggug

SEQ ID NO: 321783 - RNA, 32 nt, Human
aggaguucaaggccagccuggccaacgugaug

SEQ ID NO: 321784 - RNA, 32 nt, Human
aggaguucaaggccagccugggcaacauagua

SEQ ID NO: 321785 - RNA, 32 nt, Human
aggaguucaaggccagccugggcaacauagug

SEQ ID NO: 321786 - RNA, 32 nt, Human
aggaguucaaggccagccugggcaacauggca

SEQ ID NO: 321787 - RNA, 32 nt, Human
aggaguucaaggccagccugggcaacauggug

SEQ ID NO: 321788 - RNA, 32 nt, Human
aggaguucaauaccagccuggccaacguggug

SEQ ID NO: 321789 - RNA, 32 nt, Human
aggaguucaauaccagccugggcaacauacgg

SEQ ID NO: 321790 - RNA, 32 nt, Human
aggaguucaauaccagccugggcaacauaggg

SEQ ID NO: 321791 - RNA, 32 nt, Human
aggaguucacaaccagccuggucaacuuggua

SEQ ID NO: 321792 - RNA, 32 nt, Human
aggaguucacgaccagccuggccaacauggug

SEQ ID NO: 321793 - RNA, 32 nt, Human
aggaguucacgaccagccuggccaacauugug

SEQ ID NO: 321794 - RNA, 32 nt, Human
aggaguucaggaccagccugaccaacauggug

SEQ ID NO: 321795 - RNA, 32 nt, Human
aggaguucaggaccagccuggaaagcaaguca

SEQ ID NO: 321796 - RNA, 32 nt, Human
aggaguucaggaccagccuggccaacaugaug

SEQ ID NO: 321797 - RNA, 32 nt, Human
aggaguucaggaccagccuggccaauauggug

SEQ ID NO: 321798 - RNA, 32 nt, Human
aggaguucaggaccagccuggccagcauggug

SEQ ID NO: 321799 - RNA, 32 nt, Human
aggaguucaggaccagccugggcaacauagcg

SEQ ID NO: 321800 - RNA, 32 nt, Human
aggaguucaggaguucaagaccagccuggcca

SEQ ID NO: 321801 - RNA, 32 nt, Human
aggaguucauaaccagccuggauuaaaacaau

SEQ ID NO: 321802 - RNA, 32 nt, Human
aggaguucaugcugagaugaucaugaguucau

SEQ ID NO: 321803 - RNA, 32 nt, Human
aggaguucauucuucuuaucaaccagauuacg

SEQ ID NO: 321804 - RNA, 32 nt, Human
aggaguuccaaaccagcccuggcaacauugug

SEQ ID NO: 321805 - RNA, 32 nt, Human
aggaguuccagaccagccugaccaaaauggug

SEQ ID NO: 321806 - RNA, 32 nt, Human
aggaguuccagaccagccugaccaacguggug

SEQ ID NO: 321807 - RNA, 32 nt, Human
aggaguuccagaccagccuggccaacauagug

SEQ ID NO: 321808 - RNA, 32 nt, Human
aggaguuccagaccagccuggccaacaugaug

SEQ ID NO: 321809 - RNA, 32 nt, Human
aggaguuccagaccagccuggccaacauggca

SEQ ID NO: 321810 - RNA, 32 nt, Human
aggaguuccagaccagccuggccaacauggcu

SEQ ID NO: 321811 - RNA, 32 nt, Human
aggaguuccagaccagccuggccaacauggug

SEQ ID NO: 321812 - RNA, 32 nt, Human
aggaguuccagaccagccuggccaucauggug

SEQ ID NO: 321813 - RNA, 32 nt, Human
aggaguuccagaccagccuggcuaauauggug

SEQ ID NO: 321814 - RNA, 32 nt, Human
aggaguuccagaccagccugggcaacauagca

SEQ ID NO: 321815 - RNA, 32 nt, Human
aggaguuccagaccagccugggcaacauagug

SEQ ID NO: 321816 - RNA, 32 nt, Human
aggaguuccagaccagccugggcaacaugcga

SEQ ID NO: 321817 - RNA, 32 nt, Human
aggaguuccagaccagccugggcaauauaggg

SEQ ID NO: 321818 - RNA, 32 nt, Human
aggaguuccagaccagccugggcagcaucgug

SEQ ID NO: 321819 - RNA, 32 nt, Human
aggaguuccagaccagccuggucaacauggug

SEQ ID NO: 321820 - RNA, 32 nt, Human
aggaguuccagaucagccugagcaacauagca

SEQ ID NO: 321821 - RNA, 32 nt, Human
aggaguuccuuuccugcacucuucuccauccu

SEQ ID NO: 321822 - RNA, 32 nt, Human
aggaguucgaaaccagccugaccaacguggag

SEQ ID NO: 321823 - RNA, 32 nt, Human
aggaguucgaaaccagccuggccaacauagug

SEQ ID NO: 321824 - RNA, 32 nt, Human
aggaguucgaaaccagccuggccaacauggag

SEQ ID NO: 321825 - RNA, 32 nt, Human
aggaguucgaaaccagccuggccaacaugggg

SEQ ID NO: 321826 - RNA, 32 nt, Human
aggaguucgaaaccagccuggccaacauggug

SEQ ID NO: 321827 - RNA, 32 nt, Human
aggaguucgaaaccagccuggccaacuugaug

SEQ ID NO: 321828 - RNA, 32 nt, Human
aggaguucgaaaccagccugggcaacauagug

SEQ ID NO: 321829 - RNA, 32 nt, Human
aggaguucgaaaccagccugugcaacacagcg

SEQ ID NO: 321830 - RNA, 32 nt, Human
aggaguucgaaaccagccuucccaacauggug

SEQ ID NO: 321831 - RNA, 32 nt, Human
aggaguucgaagccagccugggcaacaaagug

SEQ ID NO: 321832 - RNA, 32 nt, Human
aggaguucgacaccagccuggccaacacagug

SEQ ID NO: 321833 - RNA, 32 nt, Human
aggaguucgagaccagcaugaccaacauggug

SEQ ID NO: 321834 - RNA, 32 nt, Human
aggaguucgagaccagccagaccaacaugaug

SEQ ID NO: 321835 - RNA, 32 nt, Human
aggaguucgagaccagccuaaacaacauagug

SEQ ID NO: 321836 - RNA, 32 nt, Human
aggaguucgagaccagccuagccaacauggug

SEQ ID NO: 321837 - RNA, 32 nt, Human
aggaguucgagaccagccuagcuaacauggua

SEQ ID NO: 321838 - RNA, 32 nt, Human
aggaguucgagaccagccuaggcaacauggag

SEQ ID NO: 321839 - RNA, 32 nt, Human
aggaguucgagaccagccuaggcaugauaaga

SEQ ID NO: 321840 - RNA, 32 nt, Human
aggaguucgagaccagccucaacauggagaaa

SEQ ID NO: 321841 - RNA, 32 nt, Human
aggaguucgagaccagccucagcaacacagug

SEQ ID NO: 321842 - RNA, 32 nt, Human
aggaguucgagaccagccucgccaacauggcg

SEQ ID NO: 321843 - RNA, 32 nt, Human
aggaguucgagaccagccugaacaacacggug

SEQ ID NO: 321844 - RNA, 32 nt, Human
aggaguucgagaccagccugaacaacauggca

SEQ ID NO: 321845 - RNA, 32 nt, Human
aggaguucgagaccagccugaccaacacggug

SEQ ID NO: 321846 - RNA, 32 nt, Human
aggaguucgagaccagccugaccaacauagug

SEQ ID NO: 321847 - RNA, 32 nt, Human
aggaguucgagaccagccugaccaacaugacg

SEQ ID NO: 321848 - RNA, 32 nt, Human
aggaguucgagaccagccugaccaacaugaug

SEQ ID NO: 321849 - RNA, 32 nt, Human
aggaguucgagaccagccugaccaacauggag

SEQ ID NO: 321850 - RNA, 32 nt, Human
aggaguucgagaccagccugaccaacauggca

SEQ ID NO: 321851 - RNA, 32 nt, Human
aggaguucgagaccagccugaccaacauggcg

SEQ ID NO: 321852 - RNA, 32 nt, Human
aggaguucgagaccagccugaccaacauggua

SEQ ID NO: 321853 - RNA, 32 nt, Human
aggaguucgagaccagccugaccaacauggug

SEQ ID NO: 321854 - RNA, 32 nt, Human
aggaguucgagaccagccugaccaacaugucg

SEQ ID NO: 321855 - RNA, 32 nt, Human
aggaguucgagaccagccugaccaacguggag

SEQ ID NO: 321856 - RNA, 32 nt, Human
aggaguucgagaccagccugaccaacguggug

SEQ ID NO: 321857 - RNA, 32 nt, Human
aggaguucgagaccagccugaccaagaugaug

SEQ ID NO: 321858 - RNA, 32 nt, Human
aggaguucgagaccagccugaccaauauggug

SEQ ID NO: 321859 - RNA, 32 nt, Human
aggaguucgagaccagccugaccaccauggag

SEQ ID NO: 321860 - RNA, 32 nt, Human
aggaguucgagaccagccugagaaacauagug

SEQ ID NO: 321861 - RNA, 32 nt, Human
aggaguucgagaccagccugagcaacacugug

SEQ ID NO: 321862 - RNA, 32 nt, Human
aggaguucgagaccagccugaucggcauggug

SEQ ID NO: 321863 - RNA, 32 nt, Human
aggaguucgagaccagccugccaacaugguga

SEQ ID NO: 321864 - RNA, 32 nt, Human
aggaguucgagaccagccugcccaacauggug

SEQ ID NO: 321865 - RNA, 32 nt, Human
aggaguucgagaccagccugcccaauauggug

SEQ ID NO: 321866 - RNA, 32 nt, Human
aggaguucgagaccagccugccuaacauggug

SEQ ID NO: 321867 - RNA, 32 nt, Human
aggaguucgagaccagccuggacaacauagug

SEQ ID NO: 321868 - RNA, 32 nt, Human
aggaguucgagaccagccuggcaaacauggcg

SEQ ID NO: 321869 - RNA, 32 nt, Human
aggaguucgagaccagccuggccaaaauagug

SEQ ID NO: 321870 - RNA, 32 nt, Human
aggaguucgagaccagccuggccaacaaggca

SEQ ID NO: 321871 - RNA, 32 nt, Human
aggaguucgagaccagccuggccaacacaaug

SEQ ID NO: 321872 - RNA, 32 nt, Human
aggaguucgagaccagccuggccaacacggug

SEQ ID NO: 321873 - RNA, 32 nt, Human
aggaguucgagaccagccuggccaacauaaug

SEQ ID NO: 321874 - RNA, 32 nt, Human
aggaguucgagaccagccuggccaacauagug

SEQ ID NO: 321875 - RNA, 32 nt, Human
aggaguucgagaccagccuggccaacaugaug

SEQ ID NO: 321876 - RNA, 32 nt, Human
aggaguucgagaccagccuggccaacauggca

SEQ ID NO: 321877 - RNA, 32 nt, Human
aggaguucgagaccagccuggccaacauggcg

SEQ ID NO: 321878 - RNA, 32 nt, Human
aggaguucgagaccagccuggccaacaugggg

SEQ ID NO: 321879 - RNA, 32 nt, Human
aggaguucgagaccagccuggccaacauggua

SEQ ID NO: 321880 - RNA, 32 nt, Human
aggaguucgagaccagccuggccaacauggug

SEQ ID NO: 321881 - RNA, 32 nt, Human
aggaguucgagaccagccuggccaacaugguu

SEQ ID NO: 321882 - RNA, 32 nt, Human
aggaguucgagaccagccuggccaacaugucg

SEQ ID NO: 321883 - RNA, 32 nt, Human
aggaguucgagaccagccuggccaaccaacau

SEQ ID NO: 321884 - RNA, 32 nt, Human
aggaguucgagaccagccuggccaacccagcc

SEQ ID NO: 321885 - RNA, 32 nt, Human
aggaguucgagaccagccuggccaacguggug

SEQ ID NO: 321886 - RNA, 32 nt, Human
aggaguucgagaccagccuggccaacugccug

SEQ ID NO: 321887 - RNA, 32 nt, Human
aggaguucgagaccagccuggccaagagacca

SEQ ID NO: 321888 - RNA, 32 nt, Human
aggaguucgagaccagccuggccaagauggcg

SEQ ID NO: 321889 - RNA, 32 nt, Human
aggaguucgagaccagccuggccaauaaggug

SEQ ID NO: 321890 - RNA, 32 nt, Human
aggaguucgagaccagccuggccaauacggca

SEQ ID NO: 321891 - RNA, 32 nt, Human
aggaguucgagaccagccuggccaauaugcaa

SEQ ID NO: 321892 - RNA, 32 nt, Human
aggaguucgagaccagccuggccaauauggug

SEQ ID NO: 321893 - RNA, 32 nt, Human
aggaguucgagaccagccuggccacauggcaa

SEQ ID NO: 321894 - RNA, 32 nt, Human
aggaguucgagaccagccuggccagcaaggug

SEQ ID NO: 321895 - RNA, 32 nt, Human
aggaguucgagaccagccuggccagcauggca

SEQ ID NO: 321896 - RNA, 32 nt, Human
aggaguucgagaccagccuggccagcauggcg

SEQ ID NO: 321897 - RNA, 32 nt, Human
aggaguucgagaccagccuggccagcauggug

SEQ ID NO: 321898 - RNA, 32 nt, Human
aggaguucgagaccagccuggccagcgguucc

SEQ ID NO: 321899 - RNA, 32 nt, Human
aggaguucgagaccagccuggcccacauggug

SEQ ID NO: 321900 - RNA, 32 nt, Human
aggaguucgagaccagccuggcuaacauggca

SEQ ID NO: 321901 - RNA, 32 nt, Human
aggaguucgagaccagccuggcuaacauggug

SEQ ID NO: 321902 - RNA, 32 nt, Human
aggaguucgagaccagccugggagacagagca

SEQ ID NO: 321903 - RNA, 32 nt, Human
aggaguucgagaccagccugggcaacaaagug

SEQ ID NO: 321904 - RNA, 32 nt, Human
aggaguucgagaccagccugggcaacacagcg

SEQ ID NO: 321905 - RNA, 32 nt, Human
aggaguucgagaccagccugggcaacacagga

SEQ ID NO: 321906 - RNA, 32 nt, Human
aggaguucgagaccagccugggcaacagagac

SEQ ID NO: 321907 - RNA, 32 nt, Human
aggaguucgagaccagccugggcaacagcaag

SEQ ID NO: 321908 - RNA, 32 nt, Human
aggaguucgagaccagccugggcaacauagag

SEQ ID NO: 321909 - RNA, 32 nt, Human
aggaguucgagaccagccugggcaacauaugg

SEQ ID NO: 321910 - RNA, 32 nt, Human
aggaguucgagaccagccugggcaacaucggg

SEQ ID NO: 321911 - RNA, 32 nt, Human
aggaguucgagaccagccugggcaacauggcg

SEQ ID NO: 321912 - RNA, 32 nt, Human
aggaguucgagaccagccugggcaacauggug

SEQ ID NO: 321913 - RNA, 32 nt, Human
aggaguucgagaccagccugggcaaccuaaug

SEQ ID NO: 321914 - RNA, 32 nt, Human
aggaguucgagaccagccugggcaacgcagug

SEQ ID NO: 321915 - RNA, 32 nt, Human
aggaguucgagaccagccugggcaacguggcg

SEQ ID NO: 321916 - RNA, 32 nt, Human
aggaguucgagaccagccugggcaacguggug

SEQ ID NO: 321917 - RNA, 32 nt, Human
aggaguucgagaccagccugggcagcauagca

SEQ ID NO: 321918 - RNA, 32 nt, Human
aggaguucgagaccagccugggcgacacggug

SEQ ID NO: 321919 - RNA, 32 nt, Human
aggaguucgagaccagccuggguaacauagcu

SEQ ID NO: 321920 - RNA, 32 nt, Human
aggaguucgagaccagccuggucaacauggcg

SEQ ID NO: 321921 - RNA, 32 nt, Human
aggaguucgagaccagccuggucaacauggug

SEQ ID NO: 321922 - RNA, 32 nt, Human
aggaguucgagaccagccuggucaacuuggug

SEQ ID NO: 321923 - RNA, 32 nt, Human
aggaguucgagaccagccugguccacauggca

SEQ ID NO: 321924 - RNA, 32 nt, Human
aggaguucgagaccagccuguucagcauagca

SEQ ID NO: 321925 - RNA, 32 nt, Human
aggaguucgagaccagccuugccaacauagug

SEQ ID NO: 321926 - RNA, 32 nt, Human
aggaguucgagaccugccugaccaacaugcug

SEQ ID NO: 321927 - RNA, 32 nt, Human
aggaguucgagacuagccugaccaacauggug

SEQ ID NO: 321928 - RNA, 32 nt, Human
aggaguucgagaucagccugaccaacauggag

SEQ ID NO: 321929 - RNA, 32 nt, Human
aggaguucgagaucagccugagcaacauaaca

SEQ ID NO: 321930 - RNA, 32 nt, Human
aggaguucgagcccagccugaccaauaugaug

SEQ ID NO: 321931 - RNA, 32 nt, Human
aggaguucgagcccagccugaccaauauggug

SEQ ID NO: 321932 - RNA, 32 nt, Human
aggaguucgagcccagccuggccaacauggcg

SEQ ID NO: 321933 - RNA, 32 nt, Human
aggaguucgagcccagccuggccaacauggug

SEQ ID NO: 321934 - RNA, 32 nt, Human
aggaguucgaggccagccugaccaacauggug

SEQ ID NO: 321935 - RNA, 32 nt, Human
aggaguucgaggccagccuggccaacaugaug

SEQ ID NO: 321936 - RNA, 32 nt, Human
aggaguucgagggcagccugaccaacauagug

SEQ ID NO: 321937 - RNA, 32 nt, Human
aggaguucgaguccagccugaccaacaugaag

SEQ ID NO: 321938 - RNA, 32 nt, Human
aggaguucgaguccagccuggccaacauggug

SEQ ID NO: 321939 - RNA, 32 nt, Human
aggaguucgaguccagccuggccaauaugcug

SEQ ID NO: 321940 - RNA, 32 nt, Human
aggaguucgauaccagccugaccaacauggcg

SEQ ID NO: 321941 - RNA, 32 nt, Human
aggaguucgauaccagccuggccaacauggug

SEQ ID NO: 321942 - RNA, 32 nt, Human
aggaguucgauaccagccuggccaauaugcaa

SEQ ID NO: 321943 - RNA, 32 nt, Human
aggaguucgauaccagccuggccaauaugcga

SEQ ID NO: 321944 - RNA, 32 nt, Human
aggaguucgauaccagccugggcaacauagug

SEQ ID NO: 321945 - RNA, 32 nt, Human
aggaguucgcaaccagccuggccaauauggug

SEQ ID NO: 321946 - RNA, 32 nt, Human
aggaguucgcgaccagccuacccaacauggug

SEQ ID NO: 321947 - RNA, 32 nt, Human
aggaguucggagcccaggcuuucaggcgaccu

SEQ ID NO: 321948 - RNA, 32 nt, Human
aggaguucgggaccagccugggaaauauagug

SEQ ID NO: 321949 - RNA, 32 nt, Human
aggaguucgggaccagccugggcaacauggug

SEQ ID NO: 321950 - RNA, 32 nt, Human
aggaguucgugaccagccuggucaacauggug

SEQ ID NO: 321951 - RNA, 32 nt, Human
aggaguucuagaccagccugaccaacauggug

SEQ ID NO: 321952 - RNA, 32 nt, Human
aggaguucuagaccagccugaccgacauggag

SEQ ID NO: 321953 - RNA, 32 nt, Human
aggaguucuagaccagccuggccaacauauag

SEQ ID NO: 321954 - RNA, 32 nt, Human
aggaguucuagaccagccuggccaacaugacc

SEQ ID NO: 321955 - RNA, 32 nt, Human
aggaguucuagaccagccuggccagcauggug

SEQ ID NO: 321956 - RNA, 32 nt, Human
aggaguucuagaccagccuggucaacauggcg

SEQ ID NO: 321957 - RNA, 32 nt, Human
aggaguucucauucccucaccuggcuucagcg

SEQ ID NO: 321958 - RNA, 32 nt, Human
aggaguucugaggaggagagagugaggguuuu

SEQ ID NO: 321959 - RNA, 32 nt, Human
aggaguugaagaccagccuggccaacauggca

SEQ ID NO: 321960 - RNA, 32 nt, Human
aggaguugaagaccagccuggccaacauggug

SEQ ID NO: 321961 - RNA, 32 nt, Human
aggaguugaagaccagccugggcaacacagug

SEQ ID NO: 321962 - RNA, 32 nt, Human
aggaguugaagaccagccugggcaacauagug

SEQ ID NO: 321963 - RNA, 32 nt, Human
aggaguugacuucagcaugggagggaggcucg

SEQ ID NO: 321964 - RNA, 32 nt, Human
aggaguugaggcggaaggauugcuugagccca

SEQ ID NO: 321965 - RNA, 32 nt, Human
aggaguugcagaccagccuggccaacauggca

SEQ ID NO: 321966 - RNA, 32 nt, Human
aggaguugcuacuggcaucuccuggguggagg

SEQ ID NO: 321967 - RNA, 32 nt, Human
aggaguuggaauccagccugagcaacagagca

SEQ ID NO: 321968 - RNA, 32 nt, Human
aggaguuggagaccagccuaggcaacacaggg

SEQ ID NO: 321969 - RNA, 32 nt, Human
aggaguuggagaccagccugaccaacauggac

SEQ ID NO: 321970 - RNA, 32 nt, Human
aggaguuggagaccagccugcccaacaugaug

SEQ ID NO: 321971 - RNA, 32 nt, Human
aggaguuggagaccagccuggauaacaaaggg

SEQ ID NO: 321972 - RNA, 32 nt, Human
aggaguuggagaccagccuggccaacauagug

SEQ ID NO: 321973 - RNA, 32 nt, Human
aggaguuggagaccagccuggccaacauggug

SEQ ID NO: 321974 - RNA, 32 nt, Human
aggaguuggagaccagccuggccaacguggca

SEQ ID NO: 321975 - RNA, 32 nt, Human
aggaguuggagaccagccugggcaacacagug

SEQ ID NO: 321976 - RNA, 32 nt, Human
aggaguuggagaccagccugggcaacauagug

SEQ ID NO: 321977 - RNA, 32 nt, Human
aggaguuggagaccagccugggcaacauggca

SEQ ID NO: 321978 - RNA, 32 nt, Human
aggaguuggaggaggaggaggaggaggcgagg

SEQ ID NO: 321979 - RNA, 32 nt, Human
aggaguuggaggccagccugggcaacacagca

SEQ ID NO: 321980 - RNA, 32 nt, Human
aggaguuguuucugacccacugaucucuacua

SEQ ID NO: 321981 - RNA, 32 nt, Human
aggaguuuaaaaccagaaugaucaacagagug

SEQ ID NO: 321982 - RNA, 32 nt, Human
aggaguuuaaaaugagggugauccuucccuuu

SEQ ID NO: 321983 - RNA, 32 nt, Human
aggaguuuaagaccagccugaccaacauggag

SEQ ID NO: 321984 - RNA, 32 nt, Human
aggaguuuaagaccagccuggacaacauagga

SEQ ID NO: 321985 - RNA, 32 nt, Human
aggaguuuaagaccagccuggccaacauggca

SEQ ID NO: 321986 - RNA, 32 nt, Human
aggaguuuaagaccagccugggcaacaaagug

SEQ ID NO: 321987 - RNA, 32 nt, Human
aggaguuuaagaccagccugggcaacacagga

SEQ ID NO: 321988 - RNA, 32 nt, Human
aggaguuuaagaccagccugggcaacauacag

SEQ ID NO: 321989 - RNA, 32 nt, Human
aggaguuuaagaccagccugggcaacauagca

SEQ ID NO: 321990 - RNA, 32 nt, Human
aggaguuuaagaccagccugggcaacaugggg

SEQ ID NO: 321991 - RNA, 32 nt, Human
aggaguuuaagaccagccugggcaacauggug

SEQ ID NO: 321992 - RNA, 32 nt, Human
aggaguuuaagaccagccugggcaacauuggg

SEQ ID NO: 321993 - RNA, 32 nt, Human
aggaguuuaaggccagccugggcaacauagca

SEQ ID NO: 321994 - RNA, 32 nt, Human
aggaguuucagaccagccugggcaacaugaca

SEQ ID NO: 321995 - RNA, 20 nt, Human
aggaguuuccccagaaguca

SEQ ID NO: 321996 - RNA, 32 nt, Human
aggaguuugaaaccagcauggccaacagaugu

SEQ ID NO: 321997 - RNA, 32 nt, Human
aggaguuugaaaccagccugagcagcaaagca

SEQ ID NO: 321998 - RNA, 32 nt, Human
aggaguuugaaaccagccuggccaacauggcg

SEQ ID NO: 321999 - RNA, 32 nt, Human
aggaguuugaaaccagccuggccaacauggug

SEQ ID NO: 322000 - RNA, 32 nt, Human
aggaguuugaaaccagccugggcaacauaggg

SEQ ID NO: 322001 - RNA, 32 nt, Human
aggaguuugaaaccagccugggcaacauggug

SEQ ID NO: 322002 - RNA, 32 nt, Human
aggaguuugaaaccagccuggguaacauggca

SEQ ID NO: 322003 - RNA, 32 nt, Human
aggaguuugacaccagccugggcaacauagug

SEQ ID NO: 322004 - RNA, 32 nt, Human
aggaguuugacaccagccugggcaacauggua

SEQ ID NO: 322005 - RNA, 32 nt, Human
aggaguuugagaccacccugaccaacaugaaa

SEQ ID NO: 322006 - RNA, 32 nt, Human
aggaguuugagaccagacugaccaacauggag

SEQ ID NO: 322007 - RNA, 32 nt, Human
aggaguuugagaccagcaugaccaacauggcg

SEQ ID NO: 322008 - RNA, 32 nt, Human
aggaguuugagaccagccuagacaacauggug

SEQ ID NO: 322009 - RNA, 32 nt, Human
aggaguuugagaccagccuagccaacaugcug

SEQ ID NO: 322010 - RNA, 32 nt, Human
aggaguuugagaccagccuagccaacauggug

SEQ ID NO: 322011 - RNA, 32 nt, Human
aggaguuugagaccagccuaggcaacacagug

SEQ ID NO: 322012 - RNA, 32 nt, Human
aggaguuugagaccagccuaggcaacauagca

SEQ ID NO: 322013 - RNA, 32 nt, Human
aggaguuugagaccagccuagucaacaugagg

SEQ ID NO: 322014 - RNA, 32 nt, Human
aggaguuugagaccagccucaccaacauggag

SEQ ID NO: 322015 - RNA, 32 nt, Human
aggaguuugagaccagccuccuggccaacaug

SEQ ID NO: 322016 - RNA, 32 nt, Human
aggaguuugagaccagccucgccaacauggug

SEQ ID NO: 322017 - RNA, 32 nt, Human
aggaguuugagaccagccucggcaacauggca

SEQ ID NO: 322018 - RNA, 32 nt, Human
aggaguuugagaccagccugaccaaacauggc

SEQ ID NO: 322019 - RNA, 32 nt, Human
aggaguuugagaccagccugaccaacauagag

SEQ ID NO: 322020 - RNA, 32 nt, Human
aggaguuugagaccagccugaccaacauaguu

SEQ ID NO: 322021 - RNA, 32 nt, Human
aggaguuugagaccagccugaccaacauggag

SEQ ID NO: 322022 - RNA, 32 nt, Human
aggaguuugagaccagccugaccaacauggca

SEQ ID NO: 322023 - RNA, 32 nt, Human
aggaguuugagaccagccugaccaacauggug

SEQ ID NO: 322024 - RNA, 32 nt, Human
aggaguuugagaccagccugaccaacguggug

SEQ ID NO: 322025 - RNA, 32 nt, Human
aggaguuugagaccagccugaccaucauggug

SEQ ID NO: 322026 - RNA, 32 nt, Human
aggaguuugagaccagccugagcaacaaagca

SEQ ID NO: 322027 - RNA, 32 nt, Human
aggaguuugagaccagccugagcaacauagca

SEQ ID NO: 322028 - RNA, 32 nt, Human
aggaguuugagaccagccugagugacauagug

SEQ ID NO: 322029 - RNA, 32 nt, Human
aggaguuugagaccagccugaucaacauggug

SEQ ID NO: 322030 - RNA, 32 nt, Human
aggaguuugagaccagccugaucaacguggug

SEQ ID NO: 322031 - RNA, 32 nt, Human
aggaguuugagaccagccugcccaacauggug

SEQ ID NO: 322032 - RNA, 32 nt, Human
aggaguuugagaccagccuggacaacaaacau

SEQ ID NO: 322033 - RNA, 32 nt, Human
aggaguuugagaccagccuggacaacauggug

SEQ ID NO: 322034 - RNA, 32 nt, Human
aggaguuugagaccagccuggcaaacauggug

SEQ ID NO: 322035 - RNA, 32 nt, Human
aggaguuugagaccagccuggccaacacagua

SEQ ID NO: 322036 - RNA, 32 nt, Human
aggaguuugagaccagccuggccaacacgaug

SEQ ID NO: 322037 - RNA, 32 nt, Human
aggaguuugagaccagccuggccaacacggca

SEQ ID NO: 322038 - RNA, 32 nt, Human
aggaguuugagaccagccuggccaacacggug

SEQ ID NO: 322039 - RNA, 32 nt, Human
aggaguuugagaccagccuggccaacacuauc

SEQ ID NO: 322040 - RNA, 32 nt, Human
aggaguuugagaccagccuggccaacagggug

SEQ ID NO: 322041 - RNA, 32 nt, Human
aggaguuugagaccagccuggccaacauagug

SEQ ID NO: 322042 - RNA, 32 nt, Human
aggaguuugagaccagccuggccaacauauag

SEQ ID NO: 322043 - RNA, 32 nt, Human
aggaguuugagaccagccuggccaacaugaug

SEQ ID NO: 322044 - RNA, 32 nt, Human
aggaguuugagaccagccuggccaacauggag

SEQ ID NO: 322045 - RNA, 32 nt, Human
aggaguuugagaccagccuggccaacauggca

SEQ ID NO: 322046 - RNA, 32 nt, Human
aggaguuugagaccagccuggccaacauggcg

SEQ ID NO: 322047 - RNA, 32 nt, Human
aggaguuugagaccagccuggccaacauggua

SEQ ID NO: 322048 - RNA, 32 nt, Human
aggaguuugagaccagccuggccaacauggug

SEQ ID NO: 322049 - RNA, 32 nt, Human
aggaguuugagaccagccuggccaaccaacau

SEQ ID NO: 322050 - RNA, 32 nt, Human
aggaguuugagaccagccuggccaacguagug

SEQ ID NO: 322051 - RNA, 32 nt, Human
aggaguuugagaccagccuggccaacguggca

SEQ ID NO: 322052 - RNA, 32 nt, Human
aggaguuugagaccagccuggccaacguggug

SEQ ID NO: 322053 - RNA, 32 nt, Human
aggaguuugagaccagccuggccaauauggca

SEQ ID NO: 322054 - RNA, 32 nt, Human
aggaguuugagaccagccuggccaauauggug

SEQ ID NO: 322055 - RNA, 32 nt, Human
aggaguuugagaccagccuggccaccauggug

SEQ ID NO: 322056 - RNA, 32 nt, Human
aggaguuugagaccagccuggccagcauggcg

SEQ ID NO: 322057 - RNA, 32 nt, Human
aggaguuugagaccagccuggccagcauggug

SEQ ID NO: 322058 - RNA, 32 nt, Human
aggaguuugagaccagccuggccgacauggug

SEQ ID NO: 322059 - RNA, 32 nt, Human
aggaguuugagaccagccuggcuaacauggug

SEQ ID NO: 322060 - RNA, 32 nt, Human
aggaguuugagaccagccuggcugacagggua

SEQ ID NO: 322061 - RNA, 32 nt, Human
aggaguuugagaccagccugggcaacaaagug

SEQ ID NO: 322062 - RNA, 32 nt, Human
aggaguuugagaccagccugggcaacacaaga

SEQ ID NO: 322063 - RNA, 32 nt, Human
aggaguuugagaccagccugggcaacacaggg

SEQ ID NO: 322064 - RNA, 32 nt, Human
aggaguuugagaccagccugggcaacacggug

SEQ ID NO: 322065 - RNA, 32 nt, Human
aggaguuugagaccagccugggcaacagggua

SEQ ID NO: 322066 - RNA, 32 nt, Human
aggaguuugagaccagccugggcaacauagca

SEQ ID NO: 322067 - RNA, 32 nt, Human
aggaguuugagaccagccugggcaacauagcg

SEQ ID NO: 322068 - RNA, 32 nt, Human
aggaguuugagaccagccugggcaacauaggg

SEQ ID NO: 322069 - RNA, 32 nt, Human
aggaguuugagaccagccugggcaacauagua

SEQ ID NO: 322070 - RNA, 32 nt, Human
aggaguuugagaccagccugggcaacauagug

SEQ ID NO: 322071 - RNA, 32 nt, Human
aggaguuugagaccagccugggcaacaucaug

SEQ ID NO: 322072 - RNA, 32 nt, Human
aggaguuugagaccagccugggcaacaugaug

SEQ ID NO: 322073 - RNA, 32 nt, Human
aggaguuugagaccagccugggcaacauggag

SEQ ID NO: 322074 - RNA, 32 nt, Human
aggaguuugagaccagccugggcaacauggca

SEQ ID NO: 322075 - RNA, 32 nt, Human
aggaguuugagaccagccugggcaacauggcu

SEQ ID NO: 322076 - RNA, 32 nt, Human
aggaguuugagaccagccugggcaacauggug

SEQ ID NO: 322077 - RNA, 32 nt, Human
aggaguuugagaccagccugggcaauauagca

SEQ ID NO: 322078 - RNA, 32 nt, Human
aggaguuugagaccagccugggcaauauagcg

SEQ ID NO: 322079 - RNA, 32 nt, Human
aggaguuugagaccagccugggcaauauagug

SEQ ID NO: 322080 - RNA, 32 nt, Human
aggaguuugagaccagccugggcaauaucgug

SEQ ID NO: 322081 - RNA, 32 nt, Human
aggaguuugagaccagccugggcaauauggug

SEQ ID NO: 322082 - RNA, 32 nt, Human
aggaguuugagaccagccugggcaccauggug

SEQ ID NO: 322083 - RNA, 32 nt, Human
aggaguuugagaccagccugggcagcauagca

SEQ ID NO: 322084 - RNA, 32 nt, Human
aggaguuugagaccagccugggcgauauagug

SEQ ID NO: 322085 - RNA, 32 nt, Human
aggaguuugagaccagccuggguaacaugaua

SEQ ID NO: 322086 - RNA, 32 nt, Human
aggaguuugagaccagccuggguaacaugggg

SEQ ID NO: 322087 - RNA, 32 nt, Human
aggaguuugagaccagccuggguaauauggca

SEQ ID NO: 322088 - RNA, 32 nt, Human
aggaguuugagaccagccuggucaacauggcg

SEQ ID NO: 322089 - RNA, 32 nt, Human
aggaguuugagaccagccuggucaacauggua

SEQ ID NO: 322090 - RNA, 32 nt, Human
aggaguuugagaccagccugucucuacuaaca

SEQ ID NO: 322091 - RNA, 32 nt, Human
aggaguuugagaccagccugugcaacaucaug

SEQ ID NO: 322092 - RNA, 32 nt, Human
aggaguuugagaccagccuugacaacauggug

SEQ ID NO: 322093 - RNA, 32 nt, Human
aggaguuugagaccagugugaccuugucucug

SEQ ID NO: 322094 - RNA, 32 nt, Human
aggaguuugagacuagccugaccaacauggag

SEQ ID NO: 322095 - RNA, 32 nt, Human
aggaguuugagagcagccugagcaacauagac

SEQ ID NO: 322096 - RNA, 32 nt, Human
aggaguuugaggccagccuggccaacauggcg

SEQ ID NO: 322097 - RNA, 32 nt, Human
aggaguuugaggccagccugggcaacauagag

SEQ ID NO: 322098 - RNA, 32 nt, Human
aggaguuugauaccagccugaccaacauggag

SEQ ID NO: 322099 - RNA, 32 nt, Human
aggaguuugauaccagccuggccaacauggug

SEQ ID NO: 322100 - RNA, 32 nt, Human
aggaguuugcuuguuguguuugcuuggaggcg

SEQ ID NO: 322101 - RNA, 20 nt, Human
aggaguuuggccagaaguca

SEQ ID NO: 322102 - RNA, 32 nt, Human
aggaguuugggaccagccugaccaacauggug

SEQ ID NO: 322103 - RNA, 32 nt, Human
aggaguuugggaccagccuggccaacauggug

SEQ ID NO: 322104 - RNA, 32 nt, Human
aggaguuugggaccagccugggcaacauaggg

SEQ ID NO: 322105 - RNA, 32 nt, Human
aggaguuugugaccagccugaccaacauagug

SEQ ID NO: 322106 - RNA, 32 nt, Human
aggaguuuguuaccagccugggcaacauagug

SEQ ID NO: 322107 - RNA, 32 nt, Human
aggaguuuuagaccagccuggccaacaugacg

SEQ ID NO: 322108 - RNA, 32 nt, Human
aggauaaaaaggaaggagagaugaccccuacc

SEQ ID NO: 322109 - RNA, 32 nt, Human
aggauaaaaauauacacaccauugggcaggaa

SEQ ID NO: 322110 - RNA, 32 nt, Human
aggauaaacacaaauuucuccuuaaauuucca

SEQ ID NO: 322111 - RNA, 32 nt, Human
aggauaaaccuccaagcucacauuuaauauaa

SEQ ID NO: 322112 - RNA, 32 nt, Human
aggauaaagaugagcaaauucuacccuaaaaa

SEQ ID NO: 322113 - RNA, 32 nt, Human
aggauaaagcaauucauuuucucccacccucg

SEQ ID NO: 322114 - RNA, 32 nt, Human
aggauaaaggaaaugacacuuugaggaacugg

SEQ ID NO: 322115 - RNA, 18 nt, Human
aggauaagaccacaggga

SEQ ID NO: 322116 - RNA, 32 nt, Human
aggauaagccacugcaccuggccagcucuagu

SEQ ID NO: 322117 - RNA, 31 nt, Human
aggauaagccucuuuauacucacuuaaacca

SEQ ID NO: 322118 - RNA, 18 nt, Human
aggauaaggcccagcgca

SEQ ID NO: 322119 - RNA, 32 nt, Human
aggauaauuguuguuuucaccuugggacucug

SEQ ID NO: 322120 - RNA, 32 nt, Human
aggauacaagaaaaggagcaggaagaaauuug

SEQ ID NO: 322121 - RNA, 32 nt, Human
aggauacaagggccuacccagagaccagagag

SEQ ID NO: 322122 - RNA, 32 nt, Human
aggauacacaucucugccaggaguugaaccug

SEQ ID NO: 322123 - RNA, 32 nt, Human
aggauacacaugcagucauagccaucaucuca

SEQ ID NO: 322124 - RNA, 32 nt, Human
aggauacagagccacauugaaaagauaaaccu

SEQ ID NO: 322125 - RNA, 32 nt, Human
aggauacaguggugagaggagccccauuuuag

SEQ ID NO: 322126 - RNA, 32 nt, Human
aggauacauuuagugccucccacccagcucca

SEQ ID NO: 322127 - RNA, 32 nt, Human
aggauaccaacauuucuuccuaauauucuaua

SEQ ID NO: 322128 - RNA, 32 nt, Human
aggauacccacugccucuugcuccuaaagccu

SEQ ID NO: 322129 - RNA, 32 nt, Human
aggauacccgguggcuucuggcacuggcgggc

SEQ ID NO: 322130 - RNA, 30 nt, Human
aggauacccucugccaugcucuugugcugc

SEQ ID NO: 322131 - RNA, 32 nt, Human
aggauaccggacacaccucugcuccaaaggaa

SEQ ID NO: 322132 - RNA, 32 nt, Human
aggauaccugggagacagaagccucugcaccu

SEQ ID NO: 322133 - RNA, 32 nt, Human
aggauacuaccaacuacuaucaccaugaccau

SEQ ID NO: 322134 - RNA, 32 nt, Human
aggauagaaaugccaucaggaaauagcugaau

SEQ ID NO: 322135 - RNA, 32 nt, Human
aggauagacaugggauguauggagaggaugga

SEQ ID NO: 322136 - RNA, 32 nt, Human
aggauagagaggaggagggaagaacaaaagag

SEQ ID NO: 322137 - RNA, 32 nt, Human
aggauagaucuucugcaacagucuugcugaca

SEQ ID NO: 322138 - RNA, 32 nt, Human
aggauagcacauuugacaguuuuugcauuuuu

SEQ ID NO: 322139 - RNA, 32 nt, Human
aggauagcaccccaccaugccagccugacuug

SEQ ID NO: 322140 - RNA, 32 nt, Human
aggauagccucgcuucccaggugcagcucccg

SEQ ID NO: 322141 - RNA, 32 nt, Human
aggauaggaagagaaggagaugcucacagaua

SEQ ID NO: 322142 - RNA, 32 nt, Human
aggauaggagaagaggaggaggaggagcgggg

SEQ ID NO: 322143 - RNA, 32 nt, Human
aggauaggaguucacuucaucuucucagcucc

SEQ ID NO: 322144 - RNA, 32 nt, Human
aggauaggaguuugagguugcagucagcuaug

SEQ ID NO: 322145 - RNA, 32 nt, Human
aggauagggaauggggaggucagaggacgcaa

SEQ ID NO: 322146 - RNA, 32 nt, Human
aggauagucucgaucuccugaccucgugaucu

SEQ ID NO: 322147 - RNA, 32 nt, Human
aggauagucuugaucuccugaccucaugaucc

SEQ ID NO: 322148 - RNA, 32 nt, Human
aggauagucuugaucuccugaccucgugaucc

SEQ ID NO: 322149 - RNA, 25 nt, Human
aggauaguuucagugguuccuggga

SEQ ID NO: 322150 - RNA, 32 nt, Human
aggauauaugaaaagggaccagcuggaagacu

SEQ ID NO: 322151 - RNA, 32 nt, Human
aggauauaugcccacccccacuggggcgaagg

SEQ ID NO: 322152 - RNA, 32 nt, Human
aggauaucaagaaaccagacugugaugacugg

SEQ ID NO: 322153 - RNA, 32 nt, Human
aggauaucacugaacucuucugccuucauaac

SEQ ID NO: 322154 - RNA, 32 nt, Human
aggauaucagcugccugaggagcugccacgga

SEQ ID NO: 322155 - RNA, 32 nt, Human
aggauaucugagaacaucccacccucaacuca

SEQ ID NO: 322156 - RNA, 32 nt, Human
aggauauuaugcauacugagcuagaccagaag

SEQ ID NO: 322157 - RNA, 32 nt, Human
aggauauucccaagccgaccuucccuccgccu

SEQ ID NO: 322158 - RNA, 19 nt, Human
aggauauucccagauggac

SEQ ID NO: 322159 - RNA, 32 nt, Human
aggauauucugcagcgcuucugucuuuuucuu

SEQ ID NO: 322160 - RNA, 32 nt, Human
aggauauuggacucugcuuagcauuuucaagc

SEQ ID NO: 322161 - RNA, 32 nt, Human
aggauauuucaggugagucaggguuggauggu

SEQ ID NO: 322162 - RNA, 32 nt, Human
aggaucaaaugagaugcuguguggaaagcccu

SEQ ID NO: 322163 - RNA, 32 nt, Human
aggaucaacggcagggaagacagagcagaggc

SEQ ID NO: 322164 - RNA, 32 nt, Human
aggaucacaaacucacagcacagugugugaug

SEQ ID NO: 322165 - RNA, 32 nt, Human
aggaucacaccacugcacuccagccuggacaa

SEQ ID NO: 322166 - RNA, 32 nt, Human
aggaucacaccauugcuguccagccuggguga

SEQ ID NO: 322167 - RNA, 32 nt, Human
aggaucacaucuaaugcuuguguccuuauacu

SEQ ID NO: 322168 - RNA, 32 nt, Human
aggaucacuaggaggcagagguugcagugagc

SEQ ID NO: 322169 - RNA, 32 nt, Human
aggaucacucaaggccaggagugcaagaccau

SEQ ID NO: 322170 - RNA, 32 nt, Human
aggaucacucuacagccugccuccuggguuuu

SEQ ID NO: 322171 - RNA, 32 nt, Human
aggaucacugaggaaggggaagugggcaaagc

SEQ ID NO: 322172 - RNA, 32 nt, Human
aggaucacugcacccagcccaaggucuugcca

SEQ ID NO: 322173 - RNA, 32 nt, Human
aggaucacuggaguucgaggcugcagugagcu

SEQ ID NO: 322174 - RNA, 32 nt, Human
aggaucacuggguggugaaagaaagaaacacu

SEQ ID NO: 322175 - RNA, 32 nt, Human
aggaucacuucuccuuggcuuccuucuuuucu

SEQ ID NO: 322176 - RNA, 32 nt, Human
aggaucacuugaaccugggaggcggagguugc

SEQ ID NO: 322177 - RNA, 32 nt, Human
aggaucacuugagcccagggaggcagagguug

SEQ ID NO: 322178 - RNA, 32 nt, Human
aggaucagccaagaucuugcucucauugcucg

SEQ ID NO: 322179 - RNA, 32 nt, Human
aggaucagccacgggauuccagccuuggucuu

SEQ ID NO: 322180 - RNA, 23 nt, Human
aggaucagccuggacagcccucu

SEQ ID NO: 322181 - RNA, 32 nt, Human
aggaucaggccacugcacuccagccuggguaa

SEQ ID NO: 322182 - RNA, 32 nt, Human
aggaucaggggugggaggggaggccccugagg

SEQ ID NO: 322183 - RNA, 32 nt, Human
aggaucagugccuggaaggcaggugugcccgu

SEQ ID NO: 322184 - RNA, 32 nt, Human
aggaucauaccaacaugcuccagccugaguga

SEQ ID NO: 322185 - RNA, 32 nt, Human
aggaucauauggcguauaucuugguucaucuu

SEQ ID NO: 322186 - RNA, 32 nt, Human
aggaucaucucuccaaacuuccuauucaugga

SEQ ID NO: 322187 - RNA, 32 nt, Human
aggaucaucugagccugggagggugaggaugc

SEQ ID NO: 322188 - RNA, 31 nt, Human
aggaucaugaccugcggaucaggauuuggug

SEQ ID NO: 322189 - RNA, 32 nt, Human
aggaucaugaggaucagguggaucaugaggau

SEQ ID NO: 322190 - RNA, 32 nt, Human
aggaucaugccacugcacuccagcuugggcga

SEQ ID NO: 322191 - RNA, 32 nt, Human
aggaucauuucgguuucagacuucaaaguuga

SEQ ID NO: 322192 - RNA, 32 nt, Human
aggauccaaacaguuaccauuaagccccaccu

SEQ ID NO: 322193 - RNA, 32 nt, Human
aggauccaacacaggcaauauuccagcuaugg

SEQ ID NO: 322194 - RNA, 32 nt, Human
aggauccacaucagguggccacgaggacuugc

SEQ ID NO: 322195 - RNA, 32 nt, Human
aggauccagacgcucccugccugucugcguag

SEQ ID NO: 322196 - RNA, 32 nt, Human
aggauccaucagaggagacaaaggacgaggac

SEQ ID NO: 322197 - RNA, 32 nt, Human
aggauccauuucucccuuacuuucagauuauu

SEQ ID NO: 322198 - RNA, 32 nt, Human
aggaucccacuccuguagcacacacagaggcu

SEQ ID NO: 322199 - RNA, 32 nt, Human
aggauccccagccaguauagagacuugguugg

SEQ ID NO: 322200 - RNA, 20 nt, Human
aggauccccagcuggacucc

SEQ ID NO: 322201 - RNA, 21 nt, Human
aggaucccgcccuguggcccg

SEQ ID NO: 322202 - RNA, 32 nt, Human
aggaucccuccccuuccgucuucuccacugga

SEQ ID NO: 322203 - RNA, 25 nt, Human
aggauccgauuaugcgccccugggg

SEQ ID NO: 322204 - RNA, 26 nt, Human
aggauccggcccgccgccccccgggg

SEQ ID NO: 322205 - RNA, 25 nt, Human
aggauccgguguuccaacccagggg

SEQ ID NO: 322206 - RNA, 32 nt, Human
aggauccucagccauguucaagugaaguaagc

SEQ ID NO: 322207 - RNA, 32 nt, Human
aggauccuccacugaugguaaaaucugaggau

SEQ ID NO: 322208 - RNA, 32 nt, Human
aggauccucuucaaaaaggaagggauagugga

SEQ ID NO: 322209 - RNA, 32 nt, Human
aggauccugaugcugugacugaggccauuucc

SEQ ID NO: 322210 - RNA, 20 nt, Human
aggauccugauuccucuuca

SEQ ID NO: 322211 - RNA, 32 nt, Human
aggauccugcgggguggagcaggcuggagcua

SEQ ID NO: 322212 - RNA, 32 nt, Human
aggauccuguucugagcugggucaaacaaagc

SEQ ID NO: 322213 - RNA, 32 nt, Human
aggauccuuccuaucucuccaugggacuagac

SEQ ID NO: 322214 - RNA, 32 nt, Human
aggauccuugagcccaggagguugaggcugca

SEQ ID NO: 322215 - RNA, 32 nt, Human
aggaucgcagggagaggccguauuauuagccu

SEQ ID NO: 322216 - RNA, 32 nt, Human
aggaucgccugggaggugaggugugugugacc

SEQ ID NO: 322217 - RNA, 32 nt, Human
aggaucgcgccauugcacuccagccugggcaa

SEQ ID NO: 322218 - RNA, 32 nt, Human
aggaucgcuugaaccugggaggcggagguucc

SEQ ID NO: 322219 - RNA, 32 nt, Human
aggaucgcuugagaccagccuggggaacauag

SEQ ID NO: 322220 - RNA, 32 nt, Human
aggaucgcuugagcccaggagucuugagacca

SEQ ID NO: 322221 - RNA, 32 nt, Human
aggaucgcuugagccugggagguggagguugc

SEQ ID NO: 322222 - RNA, 32 nt, Human
aggaucgcuugggccugggaggcggagguugc

SEQ ID NO: 322223 - RNA, 26 nt, Human
aggaucggaaccuucugcagcaaugg

SEQ ID NO: 322224 - RNA, 25 nt, Human
aggaucggcccccaccauccaggca

SEQ ID NO: 322225 - RNA, 32 nt, Human
aggaucgucucaggucagcggagggaggagac

SEQ ID NO: 322226 - RNA, 32 nt, Human
aggaucgucuugagcccaggaguucaagacca

SEQ ID NO: 322227 - RNA, 32 nt, Human
aggaucgugccacugcacuccaaccuggguga

SEQ ID NO: 322228 - RNA, 17 nt, Human
aggaucuaaggcacaau

SEQ ID NO: 322229 - RNA, 32 nt, Human
aggaucuacugagccucgucuuaguuaaucug

SEQ ID NO: 322230 - RNA, 32 nt, Human
aggaucuacugaggaaggugcaaggcuagaga

SEQ ID NO: 322231 - RNA, 32 nt, Human
aggaucuagcagugggacuagauuuggguaga

SEQ ID NO: 322232 - RNA, 32 nt, Human
aggaucuaggagaggggcuugggagcccacuu

SEQ ID NO: 322233 - RNA, 32 nt, Human
aggaucuaggagagugacugggugugccaaaa

SEQ ID NO: 322234 - RNA, 32 nt, Human
aggaucuaguuucuuucucucuacucuggcuu

SEQ ID NO: 322235 - RNA, 32 nt, Human
aggaucucacccagugcugacagcuccucuuu

SEQ ID NO: 322236 - RNA, 23 nt, Human
aggaucucagcauauuucuggaa

SEQ ID NO: 322237 - RNA, 32 nt, Human
aggaucucagcauugcacaaugccucauggaa

SEQ ID NO: 322238 - RNA, 32 nt, Human
aggaucuccacuggacccuugauucauucuga

SEQ ID NO: 322239 - RNA, 32 nt, Human
aggaucuccaucugucacccaggcuggugugc

SEQ ID NO: 322240 - RNA, 25 nt, Human
aggaucucgcucugucacccaggca

SEQ ID NO: 322241 - RNA, 32 nt, Human
aggaucucugccugccuuccugccguccuucc

SEQ ID NO: 322242 - RNA, 32 nt, Human
aggaucucuugaggcugggaggcagagguugc

SEQ ID NO: 322243 - RNA, 22 nt, Human
aggaucugaccgcagucccggg

SEQ ID NO: 322244 - RNA, 32 nt, Human
aggaucugagagccaugucggccagcagccuc

SEQ ID NO: 322245 - RNA, 32 nt, Human
aggaucuggagagcugcuggagaacaccaugg

SEQ ID NO: 322246 - RNA, 32 nt, Human
aggaucugggaaugggguggagaggacauccu

SEQ ID NO: 322247 - RNA, 32 nt, Human
aggaucugggagggacaaguugcauugugaug

SEQ ID NO: 322248 - RNA, 32 nt, Human
aggaucugggcugguuugucuggggagacaga

SEQ ID NO: 322249 - RNA, 32 nt, Human
aggaucuggggacgaggucacccuggauugag

SEQ ID NO: 322250 - RNA, 23 nt, Human
aggaucuggggcauugcccuagg

SEQ ID NO: 322251 - RNA, 32 nt, Human
aggaucuggguucgucucugcagcugccuacc

SEQ ID NO: 322252 - RNA, 32 nt, Human
aggaucugguaguacagacagugugauggaug

SEQ ID NO: 322253 - RNA, 24 nt, Human
aggaucuggucgcugccccagggg

SEQ ID NO: 322254 - RNA, 19 nt, Human
aggaucuggugggccucag

SEQ ID NO: 322255 - RNA, 32 nt, Human
aggaucuguacgagaaaaacaaaaaggaaauc

SEQ ID NO: 322256 - RNA, 32 nt, Human
aggaucugugccaggccauucgcaccagccac

SEQ ID NO: 322257 - RNA, 32 nt, Human
aggaucuguguuuggugaaaaggagccaaauu

SEQ ID NO: 322258 - RNA, 32 nt, Human
aggaucuguucuguuucaccauguaacacaca

SEQ ID NO: 322259 - RNA, 32 nt, Human
aggaucuucugccuccgccagccugugagcug

SEQ ID NO: 322260 - RNA, 22 nt, Human
aggaucuugacuugcccagggg

SEQ ID NO: 322261 - RNA, 32 nt, Human
aggaucuugcccuaaaacgugcagugcagaga

SEQ ID NO: 322262 - RNA, 32 nt, Human
aggaucuuggauaggaucaucucuccaaacuu

SEQ ID NO: 322263 - RNA, 32 nt, Human
aggaucuuggggagguggccgggugcaguggc

SEQ ID NO: 322264 - RNA, 32 nt, Human
aggaucuuuggaugagucuccuuaauucauuu

SEQ ID NO: 322265 - RNA, 32 nt, Human
aggaugaaaagauggcacagucagugcuggua

SEQ ID NO: 322266 - RNA, 32 nt, Human
aggaugaagcagaucugcuguagacuuuucag

SEQ ID NO: 322267 - RNA, 32 nt, Human
aggaugaagggaagggagagccagugacgacu

SEQ ID NO: 322268 - RNA, 32 nt, Human
aggaugaagggcccgagaacauggccuaaggg

SEQ ID NO: 322269 - RNA, 32 nt, Human
aggaugaaugggaaaguauuuuugaaagaauu

SEQ ID NO: 322270 - RNA, 21 nt, Human
aggaugacacacuucauguca

SEQ ID NO: 322271 - RNA, 32 nt, Human
aggaugacacuggccccagagaugcuagaguc

SEQ ID NO: 322272 - RNA, 28 nt, Human
aggaugacagaacaggagacccuggccc

SEQ ID NO: 322273 - RNA, 32 nt, Human
aggaugaccucuucagcuucuggggcccgggg

SEQ ID NO: 322274 - RNA, 32 nt, Human
aggaugacgugcagaaaaaugggugaaggaua

SEQ ID NO: 322275 - RNA, 32 nt, Human
aggaugacugggccucugccccuugugggugu

SEQ ID NO: 322276 - RNA, 32 nt, Human
aggaugacuucugcucuucuauggcaauacuu

SEQ ID NO: 322277 - RNA, 32 nt, Human
aggaugagagaagcaagagcaaacacauucaa

SEQ ID NO: 322278 - RNA, 32 nt, Human
aggaugagagaaggggaaccagaagcuccgga

SEQ ID NO: 322279 - RNA, 32 nt, Human
aggaugagagcagagacucagugugugggugu

SEQ ID NO: 322280 - RNA, 32 nt, Human
aggaugagagcugucugucucuuaccugccug

SEQ ID NO: 322281 - RNA, 32 nt, Human
aggaugagauccagauguuaaaagccaauggu

SEQ ID NO: 322282 - RNA, 32 nt, Human
aggaugagccuggggucacagggggugucggg

SEQ ID NO: 322283 - RNA, 32 nt, Human
aggaugaggagcuuaggggagagcagaaaauu

SEQ ID NO: 322284 - RNA, 32 nt, Human
aggaugaggaggaggaaggugaagaggaggac

SEQ ID NO: 322285 - RNA, 32 nt, Human
aggaugaggggcuggaaaauuggggucauuga

SEQ ID NO: 322286 - RNA, 32 nt, Human
aggaugaucacauuuuucugccuguguacuuu

SEQ ID NO: 322287 - RNA, 32 nt, Human
aggaugaucaugggagggagcucagggguuaa

SEQ ID NO: 322288 - RNA, 32 nt, Human
aggaugaucucgaucuccugaccucaugaucc

SEQ ID NO: 322289 - RNA, 28 nt, Human
aggaugaugccccagcugcaguucaaag

SEQ ID NO: 322290 - RNA, 21 nt, Human
aggaugauugccgcccagggg

SEQ ID NO: 322291 - RNA, 32 nt, Human
aggaugauuuccugucaagguuggcugcagag

SEQ ID NO: 322292 - RNA, 32 nt, Human
aggaugcaacugcccaaaaaugggucuaaagu

SEQ ID NO: 322293 - RNA, 32 nt, Human
aggaugcacuguauagccaggcugugggagga

SEQ ID NO: 322294 - RNA, 21 nt, Human
aggaugcagcuggccccaggg

SEQ ID NO: 322295 - RNA, 32 nt, Human
aggaugcagggcuggugucacaggugugugac

SEQ ID NO: 322296 - RNA, 32 nt, Human
aggaugcaggggccaugcauucaucccagcac

SEQ ID NO: 322297 - RNA, 19 nt, Human
aggaugcaggucccagcca

SEQ ID NO: 322298 - RNA, 32 nt, Human
aggaugcauacagcuguaauuuaacccagagc

SEQ ID NO: 322299 - RNA, 32 nt, Human
aggaugcaugagccaugauuacgccacugcau

SEQ ID NO: 322300 - RNA, 28 nt, Human
aggaugccacagcugagccuguccucgc

SEQ ID NO: 322301 - RNA, 32 nt, Human
aggaugcccacuucccuccacccccacacccc

SEQ ID NO: 322302 - RNA, 32 nt, Human
aggaugccccaggugggggaccccaaaaccuc

SEQ ID NO: 322303 - RNA, 32 nt, Human
aggaugccccgucccccucuggcuccagcugg

SEQ ID NO: 322304 - RNA, 32 nt, Human
aggaugcccgcgcucaggugguugcagaaguc

SEQ ID NO: 322305 - RNA, 32 nt, Human
aggaugcccucucuccccuuugcccagcaaga

SEQ ID NO: 322306 - RNA, 25 nt, Human
aggaugccgcgcagaagccgugugg

SEQ ID NO: 322307 - RNA, 32 nt, Human
aggaugccucucucacacuuguauucucgaca

SEQ ID NO: 322308 - RNA, 32 nt, Human
aggaugccugauacaagaccgucugcaguguu

SEQ ID NO: 322309 - RNA, 32 nt, Human
aggaugccuggacugcagagcccuugcuccgu

SEQ ID NO: 322310 - RNA, 32 nt, Human
aggaugcggcuuucucugccucugggcagccu

SEQ ID NO: 322311 - RNA, 32 nt, Human
aggaugcggggagguguggaggugagggguua

SEQ ID NO: 322312 - RNA, 32 nt, Human
aggaugcuaagcuuccuacucacuuucuccua

SEQ ID NO: 322313 - RNA, 32 nt, Human
aggaugcucaucauaugggccuaaaaccuugg

SEQ ID NO: 322314 - RNA, 32 nt, Human
aggaugcuccaagcucuauccuccccgggucc

SEQ ID NO: 322315 - RNA, 32 nt, Human
aggaugcucucgaacuccugaccucgugaucu

SEQ ID NO: 322316 - RNA, 32 nt, Human
aggaugcugaggaagccagcgaggaggccccu

SEQ ID NO: 322317 - RNA, 28 nt, Human
aggaugcugccugggcggcugugcuggg

SEQ ID NO: 322318 - RNA, 32 nt, Human
aggaugcuucccagccucuccucaguuuccca

SEQ ID NO: 322319 - RNA, 32 nt, Human
aggaugcuucugcucucccugcucuggcaucc

SEQ ID NO: 322320 - RNA, 32 nt, Human
aggaugcuuuucugcuuaccauggcccggaua

SEQ ID NO: 322321 - RNA, 32 nt, Human
aggauggaaaaggggacucucaagaagagaaa

SEQ ID NO: 322322 - RNA, 32 nt, Human
aggauggaacucagaaugaaacugcaacccac

SEQ ID NO: 322323 - RNA, 32 nt, Human
aggauggaaggcagaggguggguguggggccu

SEQ ID NO: 322324 - RNA, 32 nt, Human
aggauggaaugaagguagaaaaggcagaauua

SEQ ID NO: 322325 - RNA, 32 nt, Human
aggauggaauucuuccuccucugcugggacuc

SEQ ID NO: 322326 - RNA, 28 nt, Human
aggauggacccaggagaucccgcuggug

SEQ ID NO: 322327 - RNA, 32 nt, Human
aggauggacccccaugauccccaccuccuggu

SEQ ID NO: 322328 - RNA, 32 nt, Human
aggauggacgagugagcuaccaggaagagggg

SEQ ID NO: 322329 - RNA, 32 nt, Human
aggauggagauggagacccagcagcccccaga

SEQ ID NO: 322330 - RNA, 32 nt, Human
aggauggagaugguuuugcccucccucucugc

SEQ ID NO: 322331 - RNA, 32 nt, Human
aggauggagcaaugguucucaaacuucagcca

SEQ ID NO: 322332 - RNA, 32 nt, Human
aggauggagcccagagugacacagaggaagag

SEQ ID NO: 322333 - RNA, 28 nt, Human
aggauggaggcagagggcagcagcgcgc

SEQ ID NO: 322334 - RNA, 32 nt, Human
aggauggaggcuggacugugugguaguuuuac

SEQ ID NO: 322335 - RNA, 28 nt, Human
aggauggaggcuguugugaacuuguacc

SEQ ID NO: 322336 - RNA, 32 nt, Human
aggauggagggcugagcccugugacaaccugc

SEQ ID NO: 322337 - RNA, 23 nt, Human
aggauggagggguccacauacua

SEQ ID NO: 322338 - RNA, 32 nt, Human
aggauggagguggaaggcuggagggcaggggu

SEQ ID NO: 322339 - RNA, 32 nt, Human
aggauggaugcagauccagagguuucuggcag

SEQ ID NO: 322340 - RNA, 32 nt, Human
aggauggcacaauugcacuccagcccgaguga

SEQ ID NO: 322341 - RNA, 32 nt, Human
aggauggcagaacugguccucugcaagaaaca

SEQ ID NO: 322342 - RNA, 32 nt, Human
aggauggcagaauucuguaaaaccacuucugg

SEQ ID NO: 322343 - RNA, 28 nt, Human
aggauggccaaggaaagaugccugaaaa

SEQ ID NO: 322344 - RNA, 28 nt, Human
aggauggccagccuguuccgguccuauc

SEQ ID NO: 322345 - RNA, 32 nt, Human
aggauggcccagcugcccuagugugugcuugc

SEQ ID NO: 322346 - RNA, 21 nt, Human
aggauggcccagggugaggug

SEQ ID NO: 322347 - RNA, 32 nt, Human
aggauggccugagaguccuuccuugcugaaaa

SEQ ID NO: 322348 - RNA, 32 nt, Human
aggauggcuggcucugcaccuguaggauauug

SEQ ID NO: 322349 - RNA, 32 nt, Human
aggauggcuuuuccugcuguacugaaccugcu

SEQ ID NO: 322350 - RNA, 28 nt, Human
aggaugggaaccggauugguugcagugu

SEQ ID NO: 322351 - RNA, 20 nt, Human
aggaugggaaggagggaggu

SEQ ID NO: 322352 - RNA, 32 nt, Human
aggaugggaagguggagugggugagcaucuug

SEQ ID NO: 322353 - RNA, 32 nt, Human
aggaugggacaacuccaucuucugcugcccau

SEQ ID NO: 322354 - RNA, 32 nt, Human
aggaugggacuuccagcuaugaauuuguacau

SEQ ID NO: 322355 - RNA, 32 nt, Human
aggaugggagaaugauuuggcccacacaagga

SEQ ID NO: 322356 - RNA, 32 nt, Human
aggaugggagagaacaggagggaagaugggaa

SEQ ID NO: 322357 - RNA, 22 nt, Human
aggaugggagaggccgcaggug

SEQ ID NO: 322358 - RNA, 22 nt, Human
aggaugggagcccuggaguggg

SEQ ID NO: 322359 - RNA, 23 nt, Human
aggaugggagcugagggggaagg

SEQ ID NO: 322360 - RNA, 24 nt, Human
aggaugggagcugggcgugaggug

SEQ ID NO: 322361 - RNA, 32 nt, Human
aggaugggagcugggcgugaggugcuuugggg

SEQ ID NO: 322362 - RNA, 32 nt, Human
aggaugggagugaaucccaggcggaggccaga

SEQ ID NO: 322363 - RNA, 22 nt, Human
aggaugggagugggcagaggug

SEQ ID NO: 322364 - RNA, 19 nt, Human
aggaugggccauccaggca

SEQ ID NO: 322365 - RNA, 28 nt, Human
aggaugggccggaaggugaccguggcca

SEQ ID NO: 322366 - RNA, 32 nt, Human
aggaugggccucaaacuccuagcuucaagcag

SEQ ID NO: 322367 - RNA, 32 nt, Human
aggaugggcugcagguugcagucagggcuuga

SEQ ID NO: 322368 - RNA, 32 nt, Human
aggaugggcugcuccugggccuggugagcuac

SEQ ID NO: 322369 - RNA, 32 nt, Human
aggauggggaggcagggcugggggcuuugagg

SEQ ID NO: 322370 - RNA, 32 nt, Human
aggauggggaggugggcagguagcugauaggg

SEQ ID NO: 322371 - RNA, 32 nt, Human
aggauggggaugggaaagaaggugugcguucu

SEQ ID NO: 322372 - RNA, 21 nt, Human
aggcgugagccacccugacug

SEQ ID NO: 322373 - RNA, 22 nt, Human
aggcgugagccaccgcacccgg

SEQ ID NO: 322374 - RNA, 22 nt, Human
aggcgugagccaccgcaccugg

SEQ ID NO: 322375 - RNA, 21 nt, Human
aggcgugagccaccgcacugg

SEQ ID NO: 322376 - RNA, 22 nt, Human
aggcgugagccaccgcaucugg

SEQ ID NO: 322377 - RNA, 19 nt, Human
aggcgugagccaccgcgcc

SEQ ID NO: 322378 - RNA, 24 nt, Human
aggcgugagccaccgcgcccccgg

SEQ ID NO: 322379 - RNA, 21 nt, Human
aggcgugagccaccgcgcccg

SEQ ID NO: 322380 - RNA, 22 nt, Human
aggcgugagccaccgcgcccgg

SEQ ID NO: 322381 - RNA, 21 nt, Human
aggcgugagccaccgcgccgg

SEQ ID NO: 322382 - RNA, 22 nt, Human
aggcgugagccaccgcgccugg

SEQ ID NO: 322383 - RNA, 23 nt, Human
aggcgugagccaccgcgccuggu

SEQ ID NO: 322384 - RNA, 24 nt, Human
aggcgugagccaccgcgccugucc

SEQ ID NO: 322385 - RNA, 20 nt, Human
aggcgugagccaccgcggcc

SEQ ID NO: 322386 - RNA, 20 nt, Human
aggcgugagccaccgcgucc

SEQ ID NO: 322387 - RNA, 22 nt, Human
aggcgugagccaccgcguccgg

SEQ ID NO: 322388 - RNA, 19 nt, Human
aggcgugagccaccgcucc

SEQ ID NO: 322389 - RNA, 22 nt, Human
aggcgugagccaccgcuccugg

SEQ ID NO: 322390 - RNA, 22 nt, Human
aggcgugagccaccguacccgg

SEQ ID NO: 322391 - RNA, 19 nt, Human
aggcgugagccaccgugcc

SEQ ID NO: 322392 - RNA, 20 nt, Human
aggcgugagccaccgugccc

SEQ ID NO: 322393 - RNA, 24 nt, Human
aggcgugagccaccgugcccccgg

SEQ ID NO: 322394 - RNA, 22 nt, Human
aggcgugagccaccgugcccgg

SEQ ID NO: 322395 - RNA, 22 nt, Human
aggcgugagccaccgugccugg

SEQ ID NO: 322396 - RNA, 20 nt, Human
aggcgugagccaccgugcuc

SEQ ID NO: 322397 - RNA, 21 nt, Human
aggcgugagccaccgugcugg

SEQ ID NO: 322398 - RNA, 22 nt, Human
aggcgugagccaccucaccagg

SEQ ID NO: 322399 - RNA, 20 nt, Human
aggcgugagccaccuugccc

SEQ ID NO: 322400 - RNA, 32 nt, Human
aggcgugagccacggcauccagccucaucuuu

SEQ ID NO: 322401 - RNA, 32 nt, Human
aggcgugagccacuacacccagccaaucaguu

SEQ ID NO: 322402 - RNA, 22 nt, Human
aggcgugagccacucugcccgg

SEQ ID NO: 322403 - RNA, 22 nt, Human
aggcgugagccacugagcccgg

SEQ ID NO: 322404 - RNA, 32 nt, Human
aggcgugagccacugcacccagccuagaaucu

SEQ ID NO: 322405 - RNA, 32 nt, Human
aggcgugagccacugcacccagccuauucuau

SEQ ID NO: 322406 - RNA, 32 nt, Human
aggcgugagccacugcacccagccucauguug

SEQ ID NO: 322407 - RNA, 32 nt, Human
aggcgugagccacugcacccagccugggagag

SEQ ID NO: 322408 - RNA, 21 nt, Human
aggcgugagccacugcacccg

SEQ ID NO: 322409 - RNA, 22 nt, Human
aggcgugagccacugcacccgg

SEQ ID NO: 322410 - RNA, 32 nt, Human
aggcgugagccacugcacccggccuaauuucu

SEQ ID NO: 322411 - RNA, 32 nt, Human
aggcgugagccacugcaccuggccugacauuc

SEQ ID NO: 322412 - RNA, 22 nt, Human
aggcgugagccacugcgcccgg

SEQ ID NO: 322413 - RNA, 20 nt, Human
aggcgugagccacugcgucc

SEQ ID NO: 322414 - RNA, 19 nt, Human
aggcgugagccacugcucc

SEQ ID NO: 322415 - RNA, 21 nt, Human
aggcgugagccacugcucgug

SEQ ID NO: 322416 - RNA, 19 nt, Human
aggcgugagccacuggcgg

SEQ ID NO: 322417 - RNA, 20 nt, Human
aggcgugagccacugugccc

SEQ ID NO: 322418 - RNA, 22 nt, Human
aggcgugagccacugugcccgg

SEQ ID NO: 322419 - RNA, 20 nt, Human
aggcgugagccacuguggcc

SEQ ID NO: 322420 - RNA, 20 nt, Human
aggcgugagccacugugucc

SEQ ID NO: 322421 - RNA, 21 nt, Human
aggcgugagccacuuacccgg

SEQ ID NO: 322422 - RNA, 22 nt, Human
aggcgugagccagugugcccgg

SEQ ID NO: 322423 - RNA, 20 nt, Human
aggcgugagccaucgugccc

SEQ ID NO: 322424 - RNA, 32 nt, Human
aggcgugagccauggcgcccagccugggccaa

SEQ ID NO: 322425 - RNA, 32 nt, Human
aggcgugagccccagcacuaggugggaaggcu

SEQ ID NO: 322426 - RNA, 20 nt, Human
aggcgugagcccccgugccc

SEQ ID NO: 322427 - RNA, 22 nt, Human
aggcgugagccccugcacccgg

SEQ ID NO: 322428 - RNA, 22 nt, Human
aggcgugagccccugcgcccgg

SEQ ID NO: 322429 - RNA, 22 nt, Human
aggcgugagccgccgugcccgg

SEQ ID NO: 322430 - RNA, 22 nt, Human
aggcgugagccuccgcgcccgg

SEQ ID NO: 322431 - RNA, 32 nt, Human
aggcgugagcuaccaccaugccuggcuuccau

SEQ ID NO: 322432 - RNA, 22 nt, Human
aggcgugagcuaccaugcccgg

SEQ ID NO: 322433 - RNA, 20 nt, Human
aggcgugagcuacugugccc

SEQ ID NO: 322434 - RNA, 22 nt, Human
aggcgugaggcaccgcgcccgg

SEQ ID NO: 322435 - RNA, 22 nt, Human
aggcgugagucaccgcgcccgg

SEQ ID NO: 322436 - RNA, 20 nt, Human
aggcgugagucaccgugccc

SEQ ID NO: 322437 - RNA, 32 nt, Human
aggcgugcaccacugaguccagccuauauucu

SEQ ID NO: 322438 - RNA, 32 nt, Human
aggcgugcaccacugcgccuagcuccaguacc

SEQ ID NO: 322439 - RNA, 32 nt, Human
aggcgugcugccgaaaauuuccacucuguuua

SEQ ID NO: 322440 - RNA, 32 nt, Human
aggcguggagaagagggagggagcgagagcga

SEQ ID NO: 322441 - RNA, 32 nt, Human
aggcguggauccuggcacgcugagccucaggc

SEQ ID NO: 322442 - RNA, 32 nt, Human
aggcguggcagaauugggcagggcaagggccc

SEQ ID NO: 322443 - RNA, 32 nt, Human
aggcguggccuuccaucacaggaacagagacu

SEQ ID NO: 322444 - RNA, 32 nt, Human
aggcgugggaggccgaguccccaguggcgagc

SEQ ID NO: 322445 - RNA, 32 nt, Human
aggcgugggucuggggcugagggccagggccc

SEQ ID NO: 322446 - RNA, 32 nt, Human
aggcguggguggccuagaagaugaggggagug

SEQ ID NO: 322447 - RNA, 32 nt, Human
aggcgugguggcucaaaugccuguaaucccag

SEQ ID NO: 322448 - RNA, 23 nt, Human
aggcgugguggcucauguaugua

SEQ ID NO: 322449 - RNA, 32 nt, Human
aggcguggugggcaccuguauucccagcuacu

SEQ ID NO: 322450 - RNA, 32 nt, Human
aggcgugguguuucugcuggauccgguuucau

SEQ ID NO: 322451 - RNA, 32 nt, Human
aggcgugguuguggccuguaaucccagcuacu

SEQ ID NO: 322452 - RNA, 24 nt, Human
aggcgugugagccaccacgcccgg

SEQ ID NO: 322453 - RNA, 32 nt, Human
aggcgugugggugcccccuuucugccagcagu

SEQ ID NO: 322454 - RNA, 32 nt, Human
aggcguucaacaccagccuggccaacauggaa

SEQ ID NO: 322455 - RNA, 32 nt, Human
aggcguucaagaccagccuggccaacauggug

SEQ ID NO: 322456 - RNA, 32 nt, Human
aggcguucaagaccagccugggcaacagaaca

SEQ ID NO: 322457 - RNA, 32 nt, Human
aggcguucaauaccagccuggccaacauggug

SEQ ID NO: 322458 - RNA, 32 nt, Human
aggcguuccagaccagccugggcaacauagug

SEQ ID NO: 322459 - RNA, 32 nt, Human
aggcguuccucagagucacagggaauggcggc

SEQ ID NO: 322460 - RNA, 32 nt, Human
aggcguucgagaccagccugggcaacauagug

SEQ ID NO: 322461 - RNA, 32 nt, Human
aggcguucgggaccagccuggccaacaugaug

SEQ ID NO: 322462 - RNA, 32 nt, Human
aggcguugcaaggagcuagagcuggauaaugg

SEQ ID NO: 322463 - RNA, 32 nt, Human
aggcguuggcugccugcccuccaggggagaca

SEQ ID NO: 322464 - RNA, 32 nt, Human
aggcguuggggagggguggcgggggaauagcg

SEQ ID NO: 322465 - RNA, 32 nt, Human
aggcguugguaucuucauuuuacaguucauua

SEQ ID NO: 322466 - RNA, 32 nt, Human
aggcguuuaagaccagcuugaccaacauggug

SEQ ID NO: 322467 - RNA, 32 nt, Human
aggcguuugaaccugggcaacuccaccuggaa

SEQ ID NO: 322468 - RNA, 32 nt, Human
aggcguuugagaccagccuggccaacauggug

SEQ ID NO: 322469 - RNA, 19 nt, Human
aggcuaaaaauauugcagg

SEQ ID NO: 322470 - RNA, 32 nt, Human
aggcuaaaagcagagucagcuugauuucaagg

SEQ ID NO: 322471 - RNA, 32 nt, Human
aggcuaaaagccuuugaacaccacgcuguagu

SEQ ID NO: 322472 - RNA, 32 nt, Human
aggcuaaagaugaagcuacaagaaauaaguug

SEQ ID NO: 322473 - RNA, 32 nt, Human
aggcuaaaggcggccagguuugcagugcggga

SEQ ID NO: 322474 - RNA, 32 nt, Human
aggcuaaaucaguuuuauuguccucugauuuu

SEQ ID NO: 322475 - RNA, 32 nt, Human
aggcuaaaucuuuguaacagcucucuuucccc

SEQ ID NO: 322476 - RNA, 32 nt, Human
aggcuaaaugugcagcucuuucuccagguggg

SEQ ID NO: 322477 - RNA, 32 nt, Human
aggcuaacauuucggaguaggugcagaauguu

SEQ ID NO: 322478 - RNA, 32 nt, Human
aggcuaaccugcucaaaggauaccaaauaaug

SEQ ID NO: 322479 - RNA, 32 nt, Human
aggcuaagaaacgccaggucugccuguucuug

SEQ ID NO: 322480 - RNA, 32 nt, Human
aggcuaagacacacuccccacuucacuuucuu

SEQ ID NO: 322481 - RNA, 32 nt, Human
aggcuaagacaggcagaucaccugagcucagg

SEQ ID NO: 322482 - RNA, 32 nt, Human
aggcuaagaggugggauuugagcugagacuug

SEQ ID NO: 322483 - RNA, 32 nt, Human
aggcuaagcccagaggagagcaauggcacauu

SEQ ID NO: 322484 - RNA, 32 nt, Human
aggcuaagcccaguucaaggcugcagugaacu

SEQ ID NO: 322485 - RNA, 32 nt, Human
aggcuaagcgugcccacuggggccugugguca

SEQ ID NO: 322486 - RNA, 23 nt, Human
aggcuaaggcaggaggauugcuu

SEQ ID NO: 322487 - RNA, 20 nt, Human
aggcuaaggcagguggauca

SEQ ID NO: 322488 - RNA, 32 nt, Human
aggcuaaggccaucccaauccccggggccaag

SEQ ID NO: 322489 - RNA, 24 nt, Human
aggcuaaggcgggagaaucacuug

SEQ ID NO: 322490 - RNA, 32 nt, Human
aggcuaaggcgggaggaugacuugaggccagg

SEQ ID NO: 322491 - RNA, 32 nt, Human
aggcuaaucuugaacuugugaccucaggugau

SEQ ID NO: 322492 - RNA, 32 nt, Human
aggcuaaucuuucucuuuccagugucuuagac

SEQ ID NO: 322493 - RNA, 32 nt, Human
aggcuacaauacucaaguaacaagguuuggga

SEQ ID NO: 322494 - RNA, 32 nt, Human
aggcuacagcacacuccaccccacucucaggg

SEQ ID NO: 322495 - RNA, 32 nt, Human
aggcuacagcacuccagccugggcaacaagag

SEQ ID NO: 322496 - RNA, 32 nt, Human
aggcuacagcugcuaucacaugccgaacuuuc

SEQ ID NO: 322497 - RNA, 32 nt, Human
aggcuacagggcacuugucuucccugguggcu

SEQ ID NO: 322498 - RNA, 32 nt, Human
aggcuacaucacccaaaguagauguuagaaaa

SEQ ID NO: 322499 - RNA, 32 nt, Human
aggcuacccugacuaagccacaggguuggcau

SEQ ID NO: 322500 - RNA, 32 nt, Human
aggcuacuccuuccuguagagcagaaauugua

SEQ ID NO: 322501 - RNA, 32 nt, Human
aggcuacucucaaacuccugaccucaggugau

SEQ ID NO: 322502 - RNA, 32 nt, Human
aggcuacugugagccaugaucaugccacugca

SEQ ID NO: 322503 - RNA, 32 nt, Human
aggcuacuucuccccuccucuugccucccucc

SEQ ID NO: 322504 - RNA, 32 nt, Human
aggcuacuuuauuuucugaaaaggagggaguu

SEQ ID NO: 322505 - RNA, 32 nt, Human
aggcuacuuucuuguuuuagaggaagguacug

SEQ ID NO: 322506 - RNA, 32 nt, Human
aggcuagaaagagcagccagagaacuuuuuaa

SEQ ID NO: 322507 - RNA, 32 nt, Human
aggcuagagaagaggcuccucuucucaguguu

SEQ ID NO: 322508 - RNA, 32 nt, Human
aggcuagagccugggaaggaagugggggcccc

SEQ ID NO: 322509 - RNA, 32 nt, Human
aggcuagaggggucuuguucaaagcauccaac

SEQ ID NO: 322510 - RNA, 32 nt, Human
aggcuagaguaagcccugaucccgccagcacc

SEQ ID NO: 322511 - RNA, 32 nt, Human
aggcuagcccaggucguggaggcuggcaggcu

SEQ ID NO: 322512 - RNA, 32 nt, Human
aggcuagccccaaacuccugggcucaagugau

SEQ ID NO: 322513 - RNA, 32 nt, Human
aggcuagccuccagagccgauuuauuugagag

SEQ ID NO: 322514 - RNA, 32 nt, Human
aggcuagccucgaacuccugaacucaggugau

SEQ ID NO: 322515 - RNA, 32 nt, Human
aggcuagcuucugcuuuucugcccuggcugcu

SEQ ID NO: 322516 - RNA, 32 nt, Human
aggcuagcuuugaggaaaacagccugggcucu

SEQ ID NO: 322517 - RNA, 27 nt, Human
aggcuaggaaaggaugucucuggggug

SEQ ID NO: 322518 - RNA, 32 nt, Human
aggcuaggaaaggggagaagagccgaagacag

SEQ ID NO: 322519 - RNA, 32 nt, Human
aggcuaggaaguggccuagugcaagaugagcu

SEQ ID NO: 322520 - RNA, 32 nt, Human
aggcuaggagagaagggacugggguuacugac

SEQ ID NO: 322521 - RNA, 32 nt, Human
aggcuaggaguuagagaccacccugggcaaug

SEQ ID NO: 322522 - RNA, 32 nt, Human
aggcuaggcacggcaccagccugggaugccag

SEQ ID NO: 322523 - RNA, 26 nt, Human
aggcuaggcugaggucacucagcaga

SEQ ID NO: 322524 - RNA, 32 nt, Human
aggcuagggcuggggacagauaucuuguacuc

SEQ ID NO: 322525 - RNA, 32 nt, Human
aggcuaguauugaacuccuggccucaagcaau

SEQ ID NO: 322526 - RNA, 32 nt, Human
aggcuagucacgaacuccuaaccucaggugau

SEQ ID NO: 322527 - RNA, 32 nt, Human
aggcuagucacgaacuccugaccucgugaucc

SEQ ID NO: 322528 - RNA, 32 nt, Human
aggcuagucagccuccaugcuuucuucauuuu

SEQ ID NO: 322529 - RNA, 32 nt, Human
aggcuagucaugaacuccuggccucaagcgau

SEQ ID NO: 322530 - RNA, 32 nt, Human
aggcuaguccacucuucucugagcugcccugg

SEQ ID NO: 322531 - RNA, 32 nt, Human
aggcuagucuaagucugugcugucuuggcaug

SEQ ID NO: 322532 - RNA, 32 nt, Human
aggcuagucucaaaccccugaccuuagguggu

SEQ ID NO: 322533 - RNA, 23 nt, Human
aggcuagucucaaacucccgacc

SEQ ID NO: 322534 - RNA, 23 nt, Human
aggcuagucucaaacuccugacc

SEQ ID NO: 322535 - RNA, 32 nt, Human
aggcuagucucaaacuccugaccucaggugau

SEQ ID NO: 322536 - RNA, 32 nt, Human
aggcuagucucaaacuccugaccucaggugcu

SEQ ID NO: 322537 - RNA, 32 nt, Human
aggcuagucucaaacuccugaccuccagugau

SEQ ID NO: 322538 - RNA, 32 nt, Human
aggcuagucucaaacuccugacgucgugaucc

SEQ ID NO: 322539 - RNA, 32 nt, Human
aggcuagucucaaacuccugggcucaagcaau

SEQ ID NO: 322540 - RNA, 32 nt, Human
aggcuagucucaaacuccugggcucaagugau

SEQ ID NO: 322541 - RNA, 32 nt, Human
aggcuagucuccaacuccugggcucagaugag

SEQ ID NO: 322542 - RNA, 32 nt, Human
aggcuagucucgaacgccugaccucaggugau

SEQ ID NO: 322543 - RNA, 32 nt, Human
aggcuagucucgaacucaugaccucaagugau

SEQ ID NO: 322544 - RNA, 32 nt, Human
aggcuagucucgaacuccugaccucaggugau

SEQ ID NO: 322545 - RNA, 32 nt, Human
aggcuagucucgaacucgugaccgcaagcgau

SEQ ID NO: 322546 - RNA, 32 nt, Human
aggcuagucucgaauuccugggcucaagugau

SEQ ID NO: 322547 - RNA, 32 nt, Human
aggcuagucucgagcucgugaccucacgugau

SEQ ID NO: 322548 - RNA, 32 nt, Human
aggcuagucucgaucuccugaccucaggugau

SEQ ID NO: 322549 - RNA, 32 nt, Human
aggcuagucuggaacuccugagcucaagcagu

SEQ ID NO: 322550 - RNA, 32 nt, Human
aggcuagucuugaacuccugaccucaaaugac

SEQ ID NO: 322551 - RNA, 32 nt, Human
aggcuagucuugaacuccugaccucaagugau

SEQ ID NO: 322552 - RNA, 32 nt, Human
aggcuagucuugaacuccugaccucaggugau

SEQ ID NO: 322553 - RNA, 32 nt, Human
aggcuagucuugaacuccugaccuugugauuc

SEQ ID NO: 322554 - RNA, 32 nt, Human
aggcuagucuugaacuccugggcccaagcaau

SEQ ID NO: 322555 - RNA, 32 nt, Human
aggcuagucuugaacuccugggcucaagcgau

SEQ ID NO: 322556 - RNA, 32 nt, Human
aggcuagucuugaacuccugggcucgaaugau

SEQ ID NO: 322557 - RNA, 32 nt, Human
aggcuagucuugaacuccuggguucaagcagu

SEQ ID NO: 322558 - RNA, 32 nt, Human
aggcuagucuugaauuccugaccuccugaccu

SEQ ID NO: 322559 - RNA, 32 nt, Human
aggcuagugccucagagagaacuguacggggu

SEQ ID NO: 322560 - RNA, 32 nt, Human
aggcuaguggacggugugcagagcagauggag

SEQ ID NO: 322561 - RNA, 32 nt, Human
aggcuaguuucaaacuccugaccuuaggugau

SEQ ID NO: 322562 - RNA, 32 nt, Human
aggcuaguuucgaacuccugaccucaagugau

SEQ ID NO: 322563 - RNA, 24 nt, Human
aggcuauaaucccagguacucggg

SEQ ID NO: 322564 - RNA, 32 nt, Human
aggcuauagggaggcgagcaggugagggccag

SEQ ID NO: 322565 - RNA, 32 nt, Human
aggcuauaguaagcugagauuacgccacugca

SEQ ID NO: 322566 - RNA, 32 nt, Human
aggcuauagugugcuaugaucaugccugugaa

SEQ ID NO: 322567 - RNA, 32 nt, Human
aggcuauccaggcugcaguggagccuggugaa

SEQ ID NO: 322568 - RNA, 32 nt, Human
aggcuaugcagcagcagucgagagguggccac

SEQ ID NO: 322569 - RNA, 23 nt, Human
aggcuaugcagcagccacagcag

SEQ ID NO: 322570 - RNA, 30 nt, Human
aggcuauggaggcugugacagaugggggug

SEQ ID NO: 322571 - RNA, 32 nt, Human
aggcuauggagguggaguagcugaggcuuaga

SEQ ID NO: 322572 - RNA, 32 nt, Human
aggcuauggcuuggcacagcugcucuggaacc

SEQ ID NO: 322573 - RNA, 32 nt, Human
aggcuauucucgaacuccugaccucgugaucc

SEQ ID NO: 322574 - RNA, 32 nt, Human
aggcuauuguuggccagcccuggguggaggug

SEQ ID NO: 322575 - RNA, 32 nt, Human
aggcuauuuauuacugaauuaauuccagagcu

SEQ ID NO: 322576 - RNA, 23 nt, Human
aggcuauuugggacaggcuguug

SEQ ID NO: 322577 - RNA, 32 nt, Human
aggcuauuuuucccccugcauucuuucuguau

SEQ ID NO: 322578 - RNA, 32 nt, Human
aggcucaaaagaugcucccaccacagccuccc

SEQ ID NO: 322579 - RNA, 32 nt, Human
aggcucaaacuccugggcucaagugucuuccu

SEQ ID NO: 322580 - RNA, 32 nt, Human
aggcucaaaugaucuccucccaccucagccuc

SEQ ID NO: 322581 - RNA, 32 nt, Human
aggcucaaccugcacuuccuaggcagcuaccu

SEQ ID NO: 322582 - RNA, 23 nt, Human
aggcucaagagauccuccugccu

SEQ ID NO: 322583 - RNA, 23 nt, Human
aggcucaagcgauccucccgccu

SEQ ID NO: 322584 - RNA, 23 nt, Human
aggcucaagcgauccuccugccu

SEQ ID NO: 322585 - RNA, 18 nt, Human
aggcucacaggcugugcc

SEQ ID NO: 322586 - RNA, 32 nt, Human
aggcucaccacaaccucugccuuccagguuca

SEQ ID NO: 322587 - RNA, 32 nt, Human
aggcucaccuccugcccucaggaucccagagg

SEQ ID NO: 322588 - RNA, 32 nt, Human
aggcucaccuguuacucggccucccagaaaga

SEQ ID NO: 322589 - RNA, 32 nt, Human
aggcucaccuguuccugggacugucugagaug

SEQ ID NO: 322590 - RNA, 32 nt, Human
aggcucacgccuguaaucccagcacuuuggga

SEQ ID NO: 322591 - RNA, 32 nt, Human
aggcucacgggacagcugcaccucucagcguc

SEQ ID NO: 322592 - RNA, 32 nt, Human
aggcucacguggcccaggcuggugcgccccgc

SEQ ID NO: 322593 - RNA, 32 nt, Human
aggcucacuccaccuacauccccagucugcca

SEQ ID NO: 322594 - RNA, 32 nt, Human
aggcucacugcaaccucaaccuucugguuuca

SEQ ID NO: 322595 - RNA, 32 nt, Human
aggcucacugcaaccucagccuccugggcuca

SEQ ID NO: 322596 - RNA, 32 nt, Human
aggcucacugcaaccuccaccucccagguuca

SEQ ID NO: 322597 - RNA, 32 nt, Human
aggcucacugcaaccuccuucucccagguuca

SEQ ID NO: 322598 - RNA, 32 nt, Human
aggcucacugcaaccucugucuccaggguuga

SEQ ID NO: 322599 - RNA, 32 nt, Human
aggcucacugcaaccuucaccgcccagguuca

SEQ ID NO: 322600 - RNA, 32 nt, Human
aggcucacugcaacuuccgccucccggguuca

SEQ ID NO: 322601 - RNA, 32 nt, Human
aggcucacugcaacuucugccucccaugcuua

SEQ ID NO: 322602 - RNA, 32 nt, Human
aggcucacuuuuguuaagaugacuguaauucu

SEQ ID NO: 322603 - RNA, 32 nt, Human
aggcucagagagaccugguguugacucuggaa

SEQ ID NO: 322604 - RNA, 32 nt, Human
aggcucagagaucgagcuucuccucugaguuc

SEQ ID NO: 322605 - RNA, 32 nt, Human
aggcucagagggcuuaaauaaauuacucuagg

SEQ ID NO: 322606 - RNA, 32 nt, Human
aggcucagaggggcaaagucaccugcauggua

SEQ ID NO: 322607 - RNA, 32 nt, Human
aggcucagaucccagagggaugcaggagcccu

SEQ ID NO: 322608 - RNA, 32 nt, Human
aggcucagcagauguuuuucugccauuaggaa

SEQ ID NO: 322609 - RNA, 32 nt, Human
aggcucagccuggccagggccagaggccccuc

SEQ ID NO: 322610 - RNA, 32 nt, Human
aggcucagcucugcaucuugaggucccucuga

SEQ ID NO: 322611 - RNA, 32 nt, Human
aggcucagcuggagagggacggguugggacgc

SEQ ID NO: 322612 - RNA, 32 nt, Human
aggcucaggaguucaagaccagccuggccaac

SEQ ID NO: 322613 - RNA, 32 nt, Human
aggcucaggcagcccagucugaaagugaacug

SEQ ID NO: 322614 - RNA, 32 nt, Human
aggcucaggcaucccuggugaccugugguucu

SEQ ID NO: 322615 - RNA, 32 nt, Human
aggcucaggccuggcucucaggggcagaguca

SEQ ID NO: 322616 - RNA, 32 nt, Human
aggcucaggcgggaagaaggaggcaucgucca

SEQ ID NO: 322617 - RNA, 20 nt, Human
aggcucagggcucugcaaca

SEQ ID NO: 322618 - RNA, 32 nt, Human
aggcucagggcugccuccucgaguucuguggg

SEQ ID NO: 322619 - RNA, 32 nt, Human
aggcucaggucugaaggccagaauucuacagu

SEQ ID NO: 322620 - RNA, 32 nt, Human
aggcucaggugcuuccaucuguggugacugga

SEQ ID NO: 322621 - RNA, 32 nt, Human
aggcucagguugucauuugcucaaaucacaca

SEQ ID NO: 322622 - RNA, 32 nt, Human
aggcucaucuguguccgccuuucacuccacua

SEQ ID NO: 322623 - RNA, 23 nt, Human
aggcucaugccacccacccacca

SEQ ID NO: 322624 - RNA, 32 nt, Human
aggcucaugccuguaaucccagcacuuuggga

SEQ ID NO: 322625 - RNA, 32 nt, Human
aggcucaugccuguaauccuagcagcuuggga

SEQ ID NO: 322626 - RNA, 32 nt, Human
aggcucauuccuguaaucccagcucuuuggga

SEQ ID NO: 322627 - RNA, 32 nt, Human
aggcuccaauuuauauucaucuggggguucac

SEQ ID NO: 322628 - RNA, 32 nt, Human
aggcuccacagcccugcuggcuggucaccugc

SEQ ID NO: 322629 - RNA, 19 nt, Human
aggcuccacccagaggcca

SEQ ID NO: 322630 - RNA, 22 nt, Human
aggcuccacuccugggcuccau

SEQ ID NO: 322631 - RNA, 32 nt, Human
aggcuccacugcacuggcucauuccugccuca

SEQ ID NO: 322632 - RNA, 21 nt, Human
aggcuccacugggaccugcug

SEQ ID NO: 322633 - RNA, 32 nt, Human
aggcuccacuuguuagagccucggugaucacu

SEQ ID NO: 322634 - RNA, 32 nt, Human
aggcuccagcuccccucagaccuccucaucuc

SEQ ID NO: 322635 - RNA, 32 nt, Human
aggcuccaggcucaccuccugcccucaggauc

SEQ ID NO: 322636 - RNA, 21 nt, Human
aggcuccaggcugacuggggg

SEQ ID NO: 322637 - RNA, 32 nt, Human
aggcuccaggggaacagacgcugcccaguguu

SEQ ID NO: 322638 - RNA, 32 nt, Human
aggcuccagugaaccauaauugugccacugca

SEQ ID NO: 322639 - RNA, 32 nt, Human
aggcuccaguuuagcuuuuguuuguggguuug

SEQ ID NO: 322640 - RNA, 32 nt, Human
aggcuccauuccaacuggaggaggaggcaucu

SEQ ID NO: 322641 - RNA, 32 nt, Human
aggcuccauucugccaucuacaucccagcgca

SEQ ID NO: 322642 - RNA, 32 nt, Human
aggcucccaaagugcugagauuacaggcauga

SEQ ID NO: 322643 - RNA, 32 nt, Human
aggcucccaaguagcuaggaccaggugcgcgc

SEQ ID NO: 322644 - RNA, 32 nt, Human
aggcucccaaguagcugggacuacaguagcug

SEQ ID NO: 322645 - RNA, 32 nt, Human
aggcucccaaguagcugggauuacaggugccc

SEQ ID NO: 322646 - RNA, 32 nt, Human
aggcucccaggccuaucagaaagugauuuucu

SEQ ID NO: 322647 - RNA, 32 nt, Human
aggcucccaucccgagcuugcguagugguucu

SEQ ID NO: 322648 - RNA, 32 nt, Human
aggcuccccacugucagccacacaccugcccc

SEQ ID NO: 322649 - RNA, 32 nt, Human
aggcuccccaggaagccugggguggagacucu

SEQ ID NO: 322650 - RNA, 32 nt, Human
aggcuccccaggaggcucaaggcugggggcuu

SEQ ID NO: 322651 - RNA, 32 nt, Human
aggcucccccgugcccugccucccucugucag

SEQ ID NO: 322652 - RNA, 18 nt, Human
aggcucccccuccucucc

SEQ ID NO: 322653 - RNA, 32 nt, Human
aggcucccccucuccaccuccuggggcccauc

SEQ ID NO: 322654 - RNA, 32 nt, Human
aggcuccccuccaggccccgcgauugccacca

SEQ ID NO: 322655 - RNA, 32 nt, Human
aggcuccccuuguuuguccucccggagccugg

SEQ ID NO: 322656 - RNA, 32 nt, Human
aggcucccgaguagcugggauuacaggcaugu

SEQ ID NO: 322657 - RNA, 32 nt, Human
aggcucccgccgcugcuccagcgcggcgcagc

SEQ ID NO: 322658 - RNA, 32 nt, Human
aggcucccgggagcaagggaagaugggagaca

SEQ ID NO: 322659 - RNA, 32 nt, Human
aggcucccuccaggcuuggggccgugguggcc

SEQ ID NO: 322660 - RNA, 32 nt, Human
aggcucccucccucccugugacauggccuggg

SEQ ID NO: 322661 - RNA, 32 nt, Human
aggcucccucugccaagaaagcagagaucugc

SEQ ID NO: 322662 - RNA, 32 nt, Human
aggcucccucuuccucuccauaccugccccug

SEQ ID NO: 322663 - RNA, 32 nt, Human
aggcucccuucuggccucuccugcugcugacc

SEQ ID NO: 322664 - RNA, 32 nt, Human
aggcucccuuucucuucuuccccagguccuuc

SEQ ID NO: 322665 - RNA, 25 nt, Human
aggcuccgccagccccuccacccca

SEQ ID NO: 322666 - RNA, 32 nt, Human
aggcuccggacgcagagguggcaguggcacca

SEQ ID NO: 322667 - RNA, 32 nt, Human
aggcuccgggccacagagacggugucaguggu

SEQ ID NO: 322668 - RNA, 32 nt, Human
aggcuccgggcgaagccucccugcugcagguu

SEQ ID NO: 322669 - RNA, 32 nt, Human
aggcuccgggguaucugccuucugcugggcuc

SEQ ID NO: 322670 - RNA, 32 nt, Human
aggcuccggggugacgaauuuggccgauggca

SEQ ID NO: 322671 - RNA, 32 nt, Human
aggcuccggucugagccuggccucgggucggu

SEQ ID NO: 322672 - RNA, 19 nt, Human
aggcuccuaucccacccca

SEQ ID NO: 322673 - RNA, 32 nt, Human
aggcuccucacucuucuccaucaggcauuaaa

SEQ ID NO: 322674 - RNA, 19 nt, Human
aggcuccucgcgccucagg

SEQ ID NO: 322675 - RNA, 32 nt, Human
aggcuccucuccccguuuucucuuuugguggg

SEQ ID NO: 322676 - RNA, 32 nt, Human
aggcuccugaagaugcugggcgguccuggcac

SEQ ID NO: 322677 - RNA, 32 nt, Human
aggcuccugaguagcuaggauuacaggcacau

SEQ ID NO: 322678 - RNA, 32 nt, Human
aggcuccugaguagcugggacuacaggauuac

SEQ ID NO: 322679 - RNA, 32 nt, Human
aggcuccugaguagcugggauuacaggcacgu

SEQ ID NO: 322680 - RNA, 32 nt, Human
aggcuccugaguagcuggggauuacaggugcc

SEQ ID NO: 322681 - RNA, 19 nt, Human
aggcuccugauuccucuuc

SEQ ID NO: 322682 - RNA, 32 nt, Human
aggcuccugcagucccagcuacuugggaggcu

SEQ ID NO: 322683 - RNA, 32 nt, Human
aggcuccugccugccccaggcccccugcccca

SEQ ID NO: 322684 - RNA, 32 nt, Human
aggcuccuggccuuggcacuugccugcaccca

SEQ ID NO: 322685 - RNA, 32 nt, Human
aggcuccuggggacaguggcccaggacuuggg

SEQ ID NO: 322686 - RNA, 28 nt, Human
aggcuccuguugccugccucaucccaca

SEQ ID NO: 322687 - RNA, 32 nt, Human
aggcuccuucccucccugucaccucccucuca

SEQ ID NO: 322688 - RNA, 32 nt, Human
aggcuccuuccuggucuggcccagcuggcuuc

SEQ ID NO: 322689 - RNA, 32 nt, Human
aggcuccuucuuggaccccaggcugugagcac

SEQ ID NO: 322690 - RNA, 32 nt, Human
aggcuccuuucaucuuaaaaugccaucaucuu

SEQ ID NO: 322691 - RNA, 32 nt, Human
aggcuccuuugggugagaacaugugaaccagg

SEQ ID NO: 322692 - RNA, 18 nt, Human
aggcucgagagguccagc

SEQ ID NO: 322693 - RNA, 32 nt, Human
aggcucgauuccaucacauguaaauaaaaaua

SEQ ID NO: 322694 - RNA, 32 nt, Human
aggcucggccccgccccacccugggccucacg

SEQ ID NO: 322695 - RNA, 32 nt, Human
aggcucggcugcagccucggggagggggucca

SEQ ID NO: 322696 - RNA, 31 nt, Human
aggcucguagauggaacugguagucagcugg

SEQ ID NO: 322697 - RNA, 32 nt, Human
aggcucguccauuccuccuguguuuuaguauu

SEQ ID NO: 322698 - RNA, 32 nt, Human
aggcucgucuagaaccucugaccucaggugau

SEQ ID NO: 322699 - RNA, 32 nt, Human
aggcucgucucaaacuccugaccucaggugau

SEQ ID NO: 322700 - RNA, 32 nt, Human
aggcucgucucgaacuccugaccucaagugau

SEQ ID NO: 322701 - RNA, 32 nt, Human
aggcucgugccuacaaucccagcacuuuggga

SEQ ID NO: 322702 - RNA, 32 nt, Human
aggcucuacaacccagaagacaacccugggua

SEQ ID NO: 322703 - RNA, 32 nt, Human
aggcucuagguuuugucuaucaucucaguuca

SEQ ID NO: 322704 - RNA, 32 nt, Human
aggcucucacugccccuucgccauccuagagu

SEQ ID NO: 322705 - RNA, 32 nt, Human
aggcucucaguccccaccuguacaacaacgga

SEQ ID NO: 322706 - RNA, 32 nt, Human
aggcucuccaucugcggccagggaaagggaua

SEQ ID NO: 322707 - RNA, 32 nt, Human
aggcucuccaucuuucccuugagagcuggcuc

SEQ ID NO: 322708 - RNA, 32 nt, Human
aggcucuccauuuugauucagaaaguuagcau

SEQ ID NO: 322709 - RNA, 31 nt, Human
aggcucucccucucugcaccugucucauagc

SEQ ID NO: 322710 - RNA, 32 nt, Human
aggcucucgccaccaugcccgguuauuuuugu

SEQ ID NO: 322711 - RNA, 32 nt, Human
aggcucucuccucccucuuucuucgggcagcc

SEQ ID NO: 322712 - RNA, 32 nt, Human
aggcucucugcaaccugggccucccggguuca

SEQ ID NO: 322713 - RNA, 32 nt, Human
aggcucugaacaccccucccugugauuaacca

SEQ ID NO: 322714 - RNA, 20 nt, Human
aggcucugaagcggcugcug

SEQ ID NO: 322715 - RNA, 32 nt, Human
aggcucugaagcggcugcugcaccgcggggcc

SEQ ID NO: 322716 - RNA, 32 nt, Human
aggcucugaccagcagccuaugaggggguuug

SEQ ID NO: 322717 - RNA, 32 nt, Human
aggcucugaccuucuuucccaggaugaggugg

SEQ ID NO: 322718 - RNA, 32 nt, Human
aggcucugacucuggcacuuugcucagcacgu

SEQ ID NO: 322719 - RNA, 32 nt, Human
aggcucugacucuucgauccucccucuuugug

SEQ ID NO: 322720 - RNA, 32 nt, Human
aggcucugagacauagcagcaguauccucucc

SEQ ID NO: 322721 - RNA, 32 nt, Human
aggcucugagacuuuacuggccuaugccugag

SEQ ID NO: 322722 - RNA, 32 nt, Human
aggcucugagagccaccugcccaccaaucugg

SEQ ID NO: 322723 - RNA, 32 nt, Human
aggcucugagaggccguguccuaaccugcccu

SEQ ID NO: 322724 - RNA, 32 nt, Human
aggcucugagcagcagugaaucagauggggga

SEQ ID NO: 322725 - RNA, 32 nt, Human
aggcucugagccagaaacacacugugggcgug

SEQ ID NO: 322726 - RNA, 32 nt, Human
aggcucugagggguucauggaggcagaugcug

SEQ ID NO: 322727 - RNA, 31 nt, Human
aggcucugaguguccaguggcagccagaaca

SEQ ID NO: 322728 - RNA, 20 nt, Human
aggcucugcgccugccccac

SEQ ID NO: 322729 - RNA, 21 nt, Human
aggcucugcuauucgagguca

SEQ ID NO: 322730 - RNA, 32 nt, Human
aggcucuggagcugggucuguuuugacgguca

SEQ ID NO: 322731 - RNA, 32 nt, Human
aggcucugggagaugggaggggaagccaaaug

SEQ ID NO: 322732 - RNA, 32 nt, Human
aggcucugggaugcaugucucuccuucucuag

SEQ ID NO: 322733 - RNA, 32 nt, Human
aggcucugggcggaggugcagugaccccgcag

SEQ ID NO: 322734 - RNA, 32 nt, Human
aggcucugguucccccucacaggaugagcaug

SEQ ID NO: 322735 - RNA, 32 nt, Human
aggcucugguuucugcugccucuucucuuaca

SEQ ID NO: 322736 - RNA, 32 nt, Human
aggcucuguggccugaugccucccuggcagca

SEQ ID NO: 322737 - RNA, 22 nt, Human
aggcucugugucuuaaaggcca

SEQ ID NO: 322738 - RNA, 32 nt, Human
aggcucuuccaacccagagaacccaucugccc

SEQ ID NO: 322739 - RNA, 32 nt, Human
aggcucuucuuccugccacccuuugggcucag

SEQ ID NO: 322740 - RNA, 32 nt, Human
aggcucuucuuuccgcugaaucuuccuucccu

SEQ ID NO: 322741 - RNA, 32 nt, Human
aggcucuuggaaguagaaagagcugcugaucu

SEQ ID NO: 322742 - RNA, 32 nt, Human
aggcucuuuaggcucaggagaagcauuuuaaa

SEQ ID NO: 322743 - RNA, 32 nt, Human
aggcucuuuccugaguguuugcuuucgguuug

SEQ ID NO: 322744 - RNA, 32 nt, Human
aggcucuuucugcagucauaccgcggacccaa

SEQ ID NO: 322745 - RNA, 32 nt, Human
aggcucuuuggaaguauauacauuauuaacau

SEQ ID NO: 322746 - RNA, 32 nt, Human
aggcucuuuucagagccacccaccuaaucacu

SEQ ID NO: 322747 - RNA, 32 nt, Human
aggcucuuuuucucccuggccuccagugccca

SEQ ID NO: 322748 - RNA, 32 nt, Human
aggcugaaaacccaugcugcuguuauacacaa

SEQ ID NO: 322749 - RNA, 19 nt, Human
aggcugaaagaacuguggu

SEQ ID NO: 322750 - RNA, 32 nt, Human
aggcugaaaguggucuaagaggugaggggaca

SEQ ID NO: 322751 - RNA, 32 nt, Human
aggcugaaaucaccccaggcacugugagggcu

SEQ ID NO: 322752 - RNA, 32 nt, Human
aggcugaaccuugagucccccugcuuuuuggc

SEQ ID NO: 322753 - RNA, 32 nt, Human
aggcugaagaaggcgaagaauacugggggagg

SEQ ID NO: 322754 - RNA, 32 nt, Human
aggcugaagaaggugaagaauacugggggagg

SEQ ID NO: 322755 - RNA, 32 nt, Human
aggcugaagugagcugucaucaugccacugca

SEQ ID NO: 322756 - RNA, 32 nt, Human
aggcugaaguggguggaucaccagaggucagg

SEQ ID NO: 322757 - RNA, 32 nt, Human
aggcugaaugucugaggcuaccagguuuauca

SEQ ID NO: 322758 - RNA, 32 nt, Human
aggcugacaauccaggccgcugcuucccagcu

SEQ ID NO: 322759 - RNA, 32 nt, Human
aggcugacagaugguaugcaacagguggugga

SEQ ID NO: 322760 - RNA, 32 nt, Human
aggcugacaguuccacucccaccccacacaac

SEQ ID NO: 322761 - RNA, 32 nt, Human
aggcugacauagugcccuugucaguuucugua

SEQ ID NO: 322762 - RNA, 32 nt, Human
aggcugacccuccuccccgggguggcgugggg

SEQ ID NO: 322763 - RNA, 23 nt, Human
aggcugaccucaaacuccugacc

SEQ ID NO: 322764 - RNA, 32 nt, Human
aggcugaccucaaacuccugaccucaggugau

SEQ ID NO: 322765 - RNA, 32 nt, Human
aggcugacucccaggggaagaggggaagcacu

SEQ ID NO: 322766 - RNA, 32 nt, Human
aggcugacucucugcuacucagcauugggagu

SEQ ID NO: 322767 - RNA, 17 nt, Human
aggcugacuugccugaa

SEQ ID NO: 322768 - RNA, 32 nt, Human
aggcugacuuggacccaaacugggcgacuagg

SEQ ID NO: 322769 - RNA, 32 nt, Human
aggcugagaaaugcaaaggcucauauuuauaa

SEQ ID NO: 322770 - RNA, 32 nt, Human
aggcugagacaggcagaucacuugaggucagg

SEQ ID NO: 322771 - RNA, 32 nt, Human
aggcugagacauucuucaccuccuuggcgcug

SEQ ID NO: 322772 - RNA, 22 nt, Human
aggcugagacuggcgcugucac

SEQ ID NO: 322773 - RNA, 32 nt, Human
aggcugagacuggcgcugucaccuccacccag

SEQ ID NO: 322774 - RNA, 32 nt, Human
aggcugagaggaacccagacuuuuacauguga

SEQ ID NO: 322775 - RNA, 32 nt, Human
aggcugagaggaguaggaagaucaggagcuag

SEQ ID NO: 322776 - RNA, 32 nt, Human
aggcugagaggucaagguugcagugagccaua

SEQ ID NO: 322777 - RNA, 32 nt, Human
aggcugagaggugggaggaugccuugagcuug

SEQ ID NO: 322778 - RNA, 32 nt, Human
aggcugagaugggguuucaccacguuggccag

SEQ ID NO: 322779 - RNA, 32 nt, Human
aggcugagcacccagggggaggcugcccugac

SEQ ID NO: 322780 - RNA, 32 nt, Human
aggcugagccaagaauggagcucaugccagaa

SEQ ID NO: 322781 - RNA, 32 nt, Human
aggcugagccagugcgagacugaacuugugca

SEQ ID NO: 322782 - RNA, 32 nt, Human
aggcugagccccgggaggagagaucaaagcuu

SEQ ID NO: 322783 - RNA, 32 nt, Human
aggcugagccuccugaaaacccaugaacgcug

SEQ ID NO: 322784 - RNA, 32 nt, Human
aggcugagccugacucugaagcuguucccagc

SEQ ID NO: 322785 - RNA, 32 nt, Human
aggcugagcggggcaggacugaguaaugccag

SEQ ID NO: 322786 - RNA, 32 nt, Human
aggcugagcgguugaggaagcggccagccaug

SEQ ID NO: 322787 - RNA, 32 nt, Human
aggcugagcuccgacagggagcagggaggagg

SEQ ID NO: 322788 - RNA, 32 nt, Human
aggcugaggaaacaggcucaaacucagcuggu

SEQ ID NO: 322789 - RNA, 32 nt, Human
aggcugaggaauuaccaaggaggcaggaggug

SEQ ID NO: 322790 - RNA, 32 nt, Human
aggcugaggagcaggagagaaugcaggacaug

SEQ ID NO: 322791 - RNA, 32 nt, Human
aggcugaggagggaagccagggcucagagacc

SEQ ID NO: 322792 - RNA, 32 nt, Human
aggcugaggagggagauggaccagcccacgcc

SEQ ID NO: 322793 - RNA, 32 nt, Human
aggcugaggcagaagacaaaagagccuggcuu

SEQ ID NO: 322794 - RNA, 32 nt, Human
aggcugaggcagcagaauugcuugaacccggg

SEQ ID NO: 322795 - RNA, 32 nt, Human
aggcugaggcagcagacuggugugaacccggg

SEQ ID NO: 322796 - RNA, 32 nt, Human
aggcugaggcaggagagaaucgcuugaaccgg

SEQ ID NO: 322797 - RNA, 20 nt, Human
aggcugaggcaggaggauca

SEQ ID NO: 322798 - RNA, 32 nt, Human
aggcugaggcaggaguggagaggcauggagag

SEQ ID NO: 322799 - RNA, 32 nt, Human
aggcugaggcaggauaauuuugcuuaaacccg

SEQ ID NO: 322800 - RNA, 24 nt, Human
aggcugaggcaggcaguucacuug

SEQ ID NO: 322801 - RNA, 20 nt, Human
aggcugaggcaggcggauca

SEQ ID NO: 322802 - RNA, 32 nt, Human
aggcugaggcagggcagauugcaugagcccag

SEQ ID NO: 322803 - RNA, 20 nt, Human
aggcugaggcagguggauca

SEQ ID NO: 322804 - RNA, 20 nt, Human
aggcugaggcgaguggauca

SEQ ID NO: 322805 - RNA, 24 nt, Human
aggcugaggcgggagaaucaccug

SEQ ID NO: 322806 - RNA, 24 nt, Human
aggcugaggcgggagaaucacuug

SEQ ID NO: 322807 - RNA, 24 nt, Human
aggcugaggcgggaggaucacuug

SEQ ID NO: 322808 - RNA, 32 nt, Human
aggcugaggcucagagaggcacagucaccuuc

SEQ ID NO: 322809 - RNA, 32 nt, Human
aggcugaggcuggagaauggugugaacccagg

SEQ ID NO: 322810 - RNA, 32 nt, Human
aggcugagggagaugaggggagcuggcaccuc

SEQ ID NO: 322811 - RNA, 32 nt, Human
aggcugaggugaggggaaucaccugagccggg

SEQ ID NO: 322812 - RNA, 32 nt, Human
aggcugagguggaaggcuugagcccaggaguu

SEQ ID NO: 322813 - RNA, 32 nt, Human
aggcugagguggcgggagagaccccucuccuc

SEQ ID NO: 322814 - RNA, 23 nt, Human
aggcugaggugggaggaucacuu

SEQ ID NO: 322815 - RNA, 23 nt, Human
aggcugaggugggaggauugcuu

SEQ ID NO: 322816 - RNA, 32 nt, Human
aggcugaggugugaggugacagcagguaaaga

SEQ ID NO: 322817 - RNA, 32 nt, Human
aggcugagguugcgccacuacacuccagccug

SEQ ID NO: 322818 - RNA, 32 nt, Human
aggcugagguugggaggaucaccugagcccaa

SEQ ID NO: 322819 - RNA, 32 nt, Human
aggcugagguuguagcucacacauaccuggau

SEQ ID NO: 322820 - RNA, 32 nt, Human
aggcugagguuuggguggugugaucuguccua

SEQ ID NO: 322821 - RNA, 32 nt, Human
aggcugaguaccaugggcuacagugucuggcc

SEQ ID NO: 322822 - RNA, 32 nt, Human
aggcugagucuccagcccaggccuccuuccgu

SEQ ID NO: 322823 - RNA, 32 nt, Human
aggcugaguggacugaggccugccccgcccag

SEQ ID NO: 322824 - RNA, 32 nt, Human
aggcugagugucuucugccucauguggguggc

SEQ ID NO: 322825 - RNA, 32 nt, Human
aggcugagugugagcugagccugccccaccac

SEQ ID NO: 322826 - RNA, 31 nt, Human
aggcugaguuucucacucaugccaaguuuua

SEQ ID NO: 322827 - RNA, 32 nt, Human
aggcugaguuugacauguugauauuacguagc

SEQ ID NO: 322828 - RNA, 32 nt, Human
aggcugaucccagaaguucccucugcccacgc

SEQ ID NO: 322829 - RNA, 23 nt, Human
aggcugaucccguccuccacuga

SEQ ID NO: 322830 - RNA, 32 nt, Human
aggcugaucucaaacaucugaccucaggaagu

SEQ ID NO: 322831 - RNA, 23 nt, Human
aggcugaucucaaacucccaacc

SEQ ID NO: 322832 - RNA, 23 nt, Human
aggcugaucucaaacuccugacc

SEQ ID NO: 322833 - RNA, 32 nt, Human
aggcugaucucaaacuccugaccucaagugau

SEQ ID NO: 322834 - RNA, 32 nt, Human
aggcugaucucaaacuccugaccucaugaucc

SEQ ID NO: 322835 - RNA, 23 nt, Human
aggcugaucucaaacuccuggcc

SEQ ID NO: 322836 - RNA, 32 nt, Human
aggcugaucucaaacuucugaccucaggugau

SEQ ID NO: 322837 - RNA, 32 nt, Human
aggcugaucucgaacuccuaaccucaagugau

SEQ ID NO: 322838 - RNA, 32 nt, Human
aggcugaucucgaacuccugaccgcaagugau

SEQ ID NO: 322839 - RNA, 32 nt, Human
aggcugaucucgaacuccugacuuuaggugau

SEQ ID NO: 322840 - RNA, 32 nt, Human
aggcugaucucgaacucuugaccucaggugau

SEQ ID NO: 322841 - RNA, 32 nt, Human
aggcugaucucgagcuccugaccucaggugau

SEQ ID NO: 322842 - RNA, 32 nt, Human
aggcugaucuggaacuccugaccucaggugau

SEQ ID NO: 322843 - RNA, 32 nt, Human
aggcugaucuggaacuucugaccucaggugau

SEQ ID NO: 322844 - RNA, 32 nt, Human
aggcugaucuugaaccucugaccucaggugau

SEQ ID NO: 322845 - RNA, 32 nt, Human
aggcugaucuugaacuccugaccucaagugau

SEQ ID NO: 322846 - RNA, 32 nt, Human
aggcugaucuugaacuccugaccucaggugau

SEQ ID NO: 322847 - RNA, 32 nt, Human
aggcugaucuugaacuccugaggucaggcaau

SEQ ID NO: 322848 - RNA, 32 nt, Human
aggcugaucuugaacucgugaccucaggugau

SEQ ID NO: 322849 - RNA, 32 nt, Human
aggcugaugaaaaggcaggagaggaaguuagg

SEQ ID NO: 322850 - RNA, 32 nt, Human
aggcugaugcaggagaauggccagcaccaaag

SEQ ID NO: 322851 - RNA, 31 nt, Human
aggcugauguccuugcccauugccaagaagu

SEQ ID NO: 322852 - RNA, 32 nt, Human
aggcugauuccaccccagccugccuggacaac

SEQ ID NO: 322853 - RNA, 32 nt, Human
aggcugauugauugauuuacucacuuaauaaa

SEQ ID NO: 322854 - RNA, 32 nt, Human
aggcugauuucgaacuccugaccucagaugac

SEQ ID NO: 322855 - RNA, 32 nt, Human
aggcugauuucuccccucuccugggccagggg

SEQ ID NO: 322856 - RNA, 32 nt, Human
aggcugauuuugaacuccugaccucaggugau

SEQ ID NO: 322857 - RNA, 32 nt, Human
aggcugcaagggguggaggcugagcuggaagg

SEQ ID NO: 322858 - RNA, 32 nt, Human
aggcugcaagugagcugagaucaugccauggc

SEQ ID NO: 322859 - RNA, 32 nt, Human
aggcugcacacacaccucgcucugggaguagc

SEQ ID NO: 322860 - RNA, 32 nt, Human
aggcugcacacagcagucccaggcccugugag

SEQ ID NO: 322861 - RNA, 32 nt, Human
aggcugcacagggaagggaaagacugggcuuu

SEQ ID NO: 322862 - RNA, 20 nt, Human
aggcugcacccaccugugcc

SEQ ID NO: 322863 - RNA, 32 nt, Human
aggcugcacccuccaaccucccauuggcucgc

SEQ ID NO: 322864 - RNA, 21 nt, Human
aggcugcacgggccucugcca

SEQ ID NO: 322865 - RNA, 32 nt, Human
aggcugcacugaggaccgugagcuccaggccc

SEQ ID NO: 322866 - RNA, 22 nt, Human
aggcugcagaugccgaggcgcc

SEQ ID NO: 322867 - RNA, 32 nt, Human
aggcugcagcacaaggucuccaccaucagaca

SEQ ID NO: 322868 - RNA, 32 nt, Human
aggcugcagccccgguccccagcggcuaaagg

SEQ ID NO: 322869 - RNA, 20 nt, Human
aggcugcaggcccugugaaa

SEQ ID NO: 322870 - RNA, 32 nt, Human
aggcugcaggcugccaggugugcuuggagagc

SEQ ID NO: 322871 - RNA, 23 nt, Human
aggcugcaggcuuccuucugugc

SEQ ID NO: 322872 - RNA, 32 nt, Human
aggcugcagggagggcccaggagccggcuggg

SEQ ID NO: 322873 - RNA, 20 nt, Human
aggcugcagggccucagccu

SEQ ID NO: 322874 - RNA, 23 nt, Human
aggcugcagggcuccccacgcca

SEQ ID NO: 322875 - RNA, 18 nt, Human
aggcugcagggggugcua

SEQ ID NO: 322876 - RNA, 32 nt, Human
aggcugcagggugaggccaggcaggccugggu

SEQ ID NO: 322877 - RNA, 18 nt, Human
aggcugcaggugaggcuu

SEQ ID NO: 322878 - RNA, 32 nt, Human
aggcugcaguaagccaagaucgcaugcuacug

SEQ ID NO: 322879 - RNA, 27 nt, Human
aggcugcagugaacaaagacugugcca

SEQ ID NO: 322880 - RNA, 32 nt, Human
aggcugcagugaauuaugauuguggcauugca

SEQ ID NO: 322881 - RNA, 32 nt, Human
aggcugcagugaauucuacaaagaggcuaugg

SEQ ID NO: 322882 - RNA, 32 nt, Human
aggcugcagugaccgaugaucaugccacugca

SEQ ID NO: 322883 - RNA, 32 nt, Human
aggcugcagugagccaugaucaugccacugca

SEQ ID NO: 322884 - RNA, 32 nt, Human
aggcugcagugagccaugaucuugccacugcu

SEQ ID NO: 322885 - RNA, 32 nt, Human
aggcugcagugagccgagaucacaccacugcg

SEQ ID NO: 322886 - RNA, 32 nt, Human
aggcugcagugagccgagaucacaccacugug

SEQ ID NO: 322887 - RNA, 32 nt, Human
aggcugcagugagccgagaucaugccacugca

SEQ ID NO: 322888 - RNA, 32 nt, Human
aggcugcagugagccgagaucaugccauuacu

SEQ ID NO: 322889 - RNA, 32 nt, Human
aggcugcagugagccgagaucgcaccacugca

SEQ ID NO: 322890 - RNA, 32 nt, Human
aggcugcagugagccgagaucgcgccacuacu

SEQ ID NO: 322891 - RNA, 32 nt, Human
aggcugcagugagccgagaucgcgccacugca

SEQ ID NO: 322892 - RNA, 32 nt, Human
aggcugcagugagccgagaucgugccaccuac

SEQ ID NO: 322893 - RNA, 32 nt, Human
aggcugcagugagccgagaucgugccacugca

SEQ ID NO: 322894 - RNA, 32 nt, Human
aggcugcagugagccgagaucgugccacugcg

SEQ ID NO: 322895 - RNA, 32 nt, Human
aggcugcagugagccgagauugcaccacugca

SEQ ID NO: 322896 - RNA, 32 nt, Human
aggcugcagugagccgagauugcgccacugca

SEQ ID NO: 322897 - RNA, 32 nt, Human
aggcugcagugagccgagauugugccacugca

SEQ ID NO: 322898 - RNA, 32 nt, Human
aggcugcagugagccgugaucaugccacugca

SEQ ID NO: 322899 - RNA, 32 nt, Human
aggcugcagugagcuaugaccauaccagugca

SEQ ID NO: 322900 - RNA, 32 nt, Human
aggcugcagugagcugugauagcaccacugcg

SEQ ID NO: 322901 - RNA, 32 nt, Human
aggcugcaguggcuaugaucaugccacugcac

SEQ ID NO: 322902 - RNA, 32 nt, Human
aggcugcaguggcuccccugcccagccugcuc

SEQ ID NO: 322903 - RNA, 32 nt, Human
aggcugcagugucuuaaggguaguggcaugag

SEQ ID NO: 322904 - RNA, 22 nt, Human
aggcugcaugacuauucagaga

SEQ ID NO: 322905 - RNA, 32 nt, Human
aggcugccaacagaggaugaagaggauacaaa

SEQ ID NO: 322906 - RNA, 31 nt, Human
aggcugccaagguccuguacagcagagaccc

SEQ ID NO: 322907 - RNA, 32 nt, Human
aggcugccaagucccaagaucugcagucagca

SEQ ID NO: 322908 - RNA, 32 nt, Human
aggcugccauaggugaaucacagcagaggccu

SEQ ID NO: 322909 - RNA, 32 nt, Human
aggcugcccaucucccccugccaggccugugu

SEQ ID NO: 322910 - RNA, 32 nt, Human
aggcugccccucucuccuccaugcugccuccc

SEQ ID NO: 322911 - RNA, 32 nt, Human
aggcugccccugccaggccugcagccucccca

SEQ ID NO: 322912 - RNA, 32 nt, Human
aggcugccccugggacaugguggugauguggg

SEQ ID NO: 322913 - RNA, 32 nt, Human
aggcugccccugggcagggccauguggccuca

SEQ ID NO: 322914 - RNA, 32 nt, Human
aggcugcccugcacuccugccucccagcccac

SEQ ID NO: 322915 - RNA, 32 nt, Human
aggcugccgaggacccuccccacccugaacaa

SEQ ID NO: 322916 - RNA, 32 nt, Human
aggcugccgaucggcucguucucucugcguug

SEQ ID NO: 322917 - RNA, 32 nt, Human
aggcugccgcggggcaggggugcagugggugu

SEQ ID NO: 322918 - RNA, 32 nt, Human
aggcugccucaccuuggugauuagauuccuaa

SEQ ID NO: 322919 - RNA, 32 nt, Human
aggcugccucccucucagccuggacagcuacc

SEQ ID NO: 322920 - RNA, 32 nt, Human
aggcugccuccgggaccccacggcuguccgga

SEQ ID NO: 322921 - RNA, 32 nt, Human
aggcugccucuagcgccacuacucgagacccu

SEQ ID NO: 322922 - RNA, 32 nt, Human
aggcugccugggagccccgccucccuaccaug

SEQ ID NO: 322923 - RNA, 32 nt, Human
aggcugccuggguuugaacccagaucuauuua

SEQ ID NO: 322924 - RNA, 32 nt, Human
aggcugccuucucaaggaguccacagucugga

SEQ ID NO: 322925 - RNA, 32 nt, Human
aggcugccuuggaggguacaagauccacugag

SEQ ID NO: 322926 - RNA, 32 nt, Human
aggcugccuuggauggccucaggccagguaac

SEQ ID NO: 322927 - RNA, 32 nt, Human
aggcugccuuucugccccuuuggugaucugcc

SEQ ID NO: 322928 - RNA, 32 nt, Human
aggcugccuuucugguuccaucuccuugggug

SEQ ID NO: 322929 - RNA, 22 nt, Human
aggcugcgaccccuuccuccca

SEQ ID NO: 322930 - RNA, 32 nt, Human
aggcugcgaggugcguaauccccagccggccc

SEQ ID NO: 322931 - RNA, 32 nt, Human
aggcugcgcagcguuaaugcgcauugcgugcg

SEQ ID NO: 322932 - RNA, 32 nt, Human
aggcugcgcagggggugcgggccacacaggua

SEQ ID NO: 322933 - RNA, 32 nt, Human
aggcugcgcccuggcccagccuggcucggcuc

SEQ ID NO: 322934 - RNA, 32 nt, Human
aggcugcgcugcacuccucugcccuggggcca

SEQ ID NO: 322935 - RNA, 20 nt, Human
aggcugcggccagugccaag

SEQ ID NO: 322936 - RNA, 32 nt, Human
aggcugcgggaggaagagaugacccaagauua

SEQ ID NO: 322937 - RNA, 32 nt, Human
aggcugcgguccgucaagggcuugccucgcuu

SEQ ID NO: 322938 - RNA, 32 nt, Human
aggcugcggugacugcacuuucccuggagugg

SEQ ID NO: 322939 - RNA, 32 nt, Human
aggcugcggugagccgagauugcgccauugca

SEQ ID NO: 322940 - RNA, 32 nt, Human
aggcugcgucaaagcacagaggcuccccggac

SEQ ID NO: 322941 - RNA, 32 nt, Human
aggcugcgugccuccgucugccugugugcugg

SEQ ID NO: 322942 - RNA, 32 nt, Human
aggcugcuaagcugagccacacaccccuccgu

SEQ ID NO: 322943 - RNA, 32 nt, Human
aggcugcucacugcgggcccuaugacccuuuc

SEQ ID NO: 322944 - RNA, 32 nt, Human
aggcugcucacuggcccgucuccucucaugac

SEQ ID NO: 322945 - RNA, 32 nt, Human
aggcugcuccaccccuacucuccucccuugcu

SEQ ID NO: 322946 - RNA, 32 nt, Human
aggcugcucccgaacugcugaccucagaucau

SEQ ID NO: 322947 - RNA, 32 nt, Human
aggcugcucucaaacuccugaccucaggugau

SEQ ID NO: 322948 - RNA, 32 nt, Human
aggcugcucucagacuccugaucucaggugac

SEQ ID NO: 322949 - RNA, 32 nt, Human
aggcugcucucgaacuccugaccucaucgucc

SEQ ID NO: 322950 - RNA, 32 nt, Human
aggcugcucucgaacuccugaccucaugaucc

SEQ ID NO: 322951 - RNA, 32 nt, Human
aggcugcucucuccaucucuccuacagcuccc

SEQ ID NO: 322952 - RNA, 32 nt, Human
aggcugcucuggagucaacagaucaucuuuuc

SEQ ID NO: 322953 - RNA, 32 nt, Human
aggcugcucuugaacuccugaccucaaaugau

SEQ ID NO: 322954 - RNA, 32 nt, Human
aggcugcucuugaacuccugaccucagguaau

SEQ ID NO: 322955 - RNA, 32 nt, Human
aggcugcucuugaacuccugaccucaggugau

SEQ ID NO: 322956 - RNA, 32 nt, Human
aggcugcugacccucagcagggccagacaagg

SEQ ID NO: 322957 - RNA, 32 nt, Human
aggcugcugaugaagugagggaaaguggagga

SEQ ID NO: 322958 - RNA, 32 nt, Human
aggcugcugcaggaggccaggcccaggccaga

SEQ ID NO: 322959 - RNA, 32 nt, Human
aggcugcugcucagcacccaggacggagagga

SEQ ID NO: 322960 - RNA, 32 nt, Human
aggcugcuggaaggagaaagaagagggugagg

SEQ ID NO: 322961 - RNA, 32 nt, Human
aggcugcuggccucucagggaugaggagagcc

SEQ ID NO: 322962 - RNA, 32 nt, Human
aggcugcugggaacagguggcagagaagugcc

SEQ ID NO: 322963 - RNA, 20 nt, Human
aggcugcugggaguccagcu

SEQ ID NO: 322964 - RNA, 32 nt, Human
aggcugcugggcuccccucuaggcagccuccc

SEQ ID NO: 322965 - RNA, 32 nt, Human
aggcugcuguaacugucaggacagugcgacgg

SEQ ID NO: 322966 - RNA, 32 nt, Human
aggcugcuuccccaagcccacagucuguaagg

SEQ ID NO: 322967 - RNA, 32 nt, Human
aggcugcuuccucugcugacuucuguccuuuu

SEQ ID NO: 322968 - RNA, 32 nt, Human
aggcugcuucguugcacacccgagaaaguuuc

SEQ ID NO: 322969 - RNA, 32 nt, Human
aggcugcuucuuccaacuccaucccaguaaug

SEQ ID NO: 322970 - RNA, 32 nt, Human
aggcugcuuuuugcuuucuucuuuccagaccc

SEQ ID NO: 322971 - RNA, 32 nt, Human
aggcuggaagaccuggcuugcaagaugaacuu

SEQ ID NO: 322972 - RNA, 32 nt, Human
aggcuggaagguggagcgagaaguggaugccc

SEQ ID NO: 322973 - RNA, 21 nt, Human
aggcuggacaacauggugaaa

SEQ ID NO: 322974 - RNA, 23 nt, Human
aggcuggacacacugggaaacag

SEQ ID NO: 322975 - RNA, 19 nt, Human
aggcuggacccagaggcca

SEQ ID NO: 322976 - RNA, 32 nt, Human
aggcuggaccugcaggcuccuccuggacagug

SEQ ID NO: 322977 - RNA, 32 nt, Human
aggcuggacuccccauugcuuuucuaaaaauc

SEQ ID NO: 322978 - RNA, 32 nt, Human
aggcuggacugaucacggcucacuacagccuc

SEQ ID NO: 322979 - RNA, 32 nt, Human
aggcuggacugcagcagcgugaucucagcuca

SEQ ID NO: 322980 - RNA, 32 nt, Human
aggcuggacugcugccaccucaugccccuccu

SEQ ID NO: 322981 - RNA, 32 nt, Human
aggcuggagaccugggcuggggccuuccucca

SEQ ID NO: 322982 - RNA, 32 nt, Human
aggcuggagagacacugcgcucagggacggcu

SEQ ID NO: 322983 - RNA, 32 nt, Human
aggcuggagagggcagggagcggcaggaugga

SEQ ID NO: 322984 - RNA, 32 nt, Human
aggcuggagaggggguugccggugguggcagg

SEQ ID NO: 322985 - RNA, 31 nt, Human
aggcuggagcuggaagggugggugaauccgg

SEQ ID NO: 322986 - RNA, 32 nt, Human
aggcuggaggcuggagguggagauggggucag

SEQ ID NO: 322987 - RNA, 32 nt, Human
aggcuggagggcaggggugaggagggagcagg

SEQ ID NO: 322988 - RNA, 32 nt, Human
aggcuggaggggcucugugacucccauuaaug

SEQ ID NO: 322989 - RNA, 32 nt, Human
aggcuggaggugccggugggccuguguugcug

SEQ ID NO: 322990 - RNA, 32 nt, Human
aggcuggaguacaguggucacugcaaccucca

SEQ ID NO: 322991 - RNA, 22 nt, Human
aggcuggaguacagugguguca

SEQ ID NO: 322992 - RNA, 32 nt, Human
aggcuggaguauaguagugcaguggugugauc

SEQ ID NO: 322993 - RNA, 32 nt, Human
aggcuggagucaggcucagcuguggggcuggg

SEQ ID NO: 322994 - RNA, 32 nt, Human
aggcuggagugaucucagcucacugcaaccuc

SEQ ID NO: 322995 - RNA, 32 nt, Human
aggcuggagugcaacgguaugaucucauguca

SEQ ID NO: 322996 - RNA, 21 nt, Human
aggcuggagugcaacggugca

SEQ ID NO: 322997 - RNA, 32 nt, Human
aggcuggagugcaguagcgugaucucagcuca

SEQ ID NO: 322998 - RNA, 21 nt, Human
aggcuggagugcagugacuca

SEQ ID NO: 322999 - RNA, 21 nt, Human
aggcuggagugcauuggcaca

SEQ ID NO: 323000 - RNA, 32 nt, Human
aggcuggaguguagugacaugaucucgguuca

SEQ ID NO: 323001 - RNA, 32 nt, Human
aggcuggagugugguagcacgaucucagcuca

SEQ ID NO: 323002 - RNA, 20 nt, Human
aggcuggauagagugacuca

SEQ ID NO: 323003 - RNA, 32 nt, Human
aggcuggauggacuucaacuuggaguugaguu

SEQ ID NO: 323004 - RNA, 26 nt, Human
aggcuggcaccuggcgcgcucggggg

SEQ ID NO: 323005 - RNA, 32 nt, Human
aggcuggcagaggggcuggugcccuggagaaa

SEQ ID NO: 323006 - RNA, 24 nt, Human
aggcuggcagaucacaaggucagg

SEQ ID NO: 323007 - RNA, 32 nt, Human
aggcuggcagcccagccaggaagagcgggcca

SEQ ID NO: 323008 - RNA, 32 nt, Human
aggcuggcagccgccggcacgcacaccuaguc

SEQ ID NO: 323009 - RNA, 32 nt, Human
aggcuggcaggaaugaggcucacaacucagcc

SEQ ID NO: 323010 - RNA, 32 nt, Human
aggcuggcagggcgaaggugggaacggagaac

SEQ ID NO: 323011 - RNA, 32 nt, Human
aggcuggcaucccaccaccaacgcgcgugacu

SEQ ID NO: 323012 - RNA, 32 nt, Human
aggcuggcaugagguucagucauuccagugag

SEQ ID NO: 323013 - RNA, 21 nt, Human
aggcuggccaacacggugaaa

SEQ ID NO: 323014 - RNA, 21 nt, Human
aggcuggccaacauggugaaa

SEQ ID NO: 323015 - RNA, 21 nt, Human
aggcuggccagcauggugaaa

SEQ ID NO: 323016 - RNA, 32 nt, Human
aggcuggccaggacccaaccccuagaucccac

SEQ ID NO: 323017 - RNA, 32 nt, Human
aggcuggcccccaggcccugaguggccugguu

SEQ ID NO: 323018 - RNA, 23 nt, Human
aggcuggccucaaacucccgacc

SEQ ID NO: 323019 - RNA, 32 nt, Human
aggcuggccucaaacucccgaccucaggugau

SEQ ID NO: 323020 - RNA, 32 nt, Human
aggcuggccucaaacuccugaccucaggugau

SEQ ID NO: 323021 - RNA, 32 nt, Human
aggcuggccucaaaguccugaccucaggugau

SEQ ID NO: 323022 - RNA, 32 nt, Human
aggcuggccucgaacucccaaccucaggugau

SEQ ID NO: 323023 - RNA, 32 nt, Human
aggcuggccucgaacuccugaccucaagugau

SEQ ID NO: 323024 - RNA, 32 nt, Human
aggcuggccucgaacuccugaccucaggugau

SEQ ID NO: 323025 - RNA, 32 nt, Human
aggcuggccuugaacuccugaccucaggugau

SEQ ID NO: 323026 - RNA, 32 nt, Human
aggcuggccuuuggaucucucuuccaagccuu

SEQ ID NO: 323027 - RNA, 24 nt, Human
aggcuggcggaucacgaggucagg

SEQ ID NO: 323028 - RNA, 24 nt, Human
aggcuggcggaucaugaggucagg

SEQ ID NO: 323029 - RNA, 32 nt, Human
aggcuggcguaucaccugagguugggaguuca

SEQ ID NO: 323030 - RNA, 32 nt, Human
aggcuggcucagaagguucugggggaggaguu

SEQ ID NO: 323031 - RNA, 32 nt, Human
aggcuggcucagagaucuccagagaagcugca

SEQ ID NO: 323032 - RNA, 32 nt, Human
aggcuggcugcucugggcagcgccuucacucu

SEQ ID NO: 323033 - RNA, 22 nt, Human
aggcuggcuggaagaggcagga

SEQ ID NO: 323034 - RNA, 32 nt, Human
aggcuggcuggcugucucucucacacagauac

SEQ ID NO: 323035 - RNA, 32 nt, Human
aggcuggcuucugggcugggcguggugauuca

SEQ ID NO: 323036 - RNA, 23 nt, Human
aggcuggcuuguccccuccucac

SEQ ID NO: 323037 - RNA, 32 nt, Human
aggcuggcuuugaacuccugaccucaggugau

SEQ ID NO: 323038 - RNA, 32 nt, Human
aggcugggaaacacugaauuaugaaauaaagc

SEQ ID NO: 323039 - RNA, 32 nt, Human
aggcugggaacacggcccaccuagcaggaagu

SEQ ID NO: 323040 - RNA, 22 nt, Human
aggcugggaaggggcuaaguga

SEQ ID NO: 323041 - RNA, 32 nt, Human
aggcugggaauggaggggcagagccaggaaga

SEQ ID NO: 323042 - RNA, 30 nt, Human
aggcugggaauugcaguggcacaaucccuc

SEQ ID NO: 323043 - RNA, 32 nt, Human
aggcugggacagugaaaggcagguuugagcug

SEQ ID NO: 323044 - RNA, 32 nt, Human
aggcugggacaguggugcaugccagucauccc

SEQ ID NO: 323045 - RNA, 32 nt, Human
aggcugggacauggugggcaucagggacuuug

SEQ ID NO: 323046 - RNA, 32 nt, Human
aggcugggaccaagcucugccuucacagugca

SEQ ID NO: 323047 - RNA, 32 nt, Human
aggcugggagacugaagacucagcccgggugg

SEQ ID NO: 323048 - RNA, 32 nt, Human
aggcugggagagaaagggugccaacagguccc

SEQ ID NO: 323049 - RNA, 32 nt, Human
aggcugggagcauagcagaggggccaggccca

SEQ ID NO: 323050 - RNA, 32 nt, Human
aggcugggagcccugcccugcccaucccuccc

SEQ ID NO: 323051 - RNA, 32 nt, Human
aggcugggaggaacaccaaccuaagccagggu

SEQ ID NO: 323052 - RNA, 25 nt, Human
aggcugggaggaucacuugagccca

SEQ ID NO: 323053 - RNA, 32 nt, Human
aggcugggaggcacaguucaggguggacugug

SEQ ID NO: 323054 - RNA, 32 nt, Human
aggcugggaggcagagguugcagugagcugag

SEQ ID NO: 323055 - RNA, 32 nt, Human
aggcugggaggcggagguugcagugagcugag

SEQ ID NO: 323056 - RNA, 32 nt, Human
aggcugggaggcggcagaaugcagccagagga

SEQ ID NO: 323057 - RNA, 32 nt, Human
aggcugggaguggcaucugaggccgggagugg

SEQ ID NO: 323058 - RNA, 32 nt, Human
aggcugggauuccaacccaggcagucugaccc

SEQ ID NO: 323059 - RNA, 20 nt, Human
aggcugggcacagugacuca

SEQ ID NO: 323060 - RNA, 32 nt, Human
aggcugggcagaagggcuguggggaaguaggg

SEQ ID NO: 323061 - RNA, 32 nt, Human
aggcugggcagaggucacacagugaguaaaug

SEQ ID NO: 323062 - RNA, 32 nt, Human
aggcugggcagccucuggauggaggccugccu

SEQ ID NO: 323063 - RNA, 32 nt, Human
aggcugggcauguccugucugugugcagaauc

SEQ ID NO: 323064 - RNA, 32 nt, Human
aggcugggccaagcccuuaagucaggagcagu

SEQ ID NO: 323065 - RNA, 32 nt, Human
aggcugggccauuauugcagagcugugcugag

SEQ ID NO: 323066 - RNA, 32 nt, Human
aggcugggccugaugaacuuugcugaugaguu

SEQ ID NO: 323067 - RNA, 20 nt, Human
aggcugggccuggagcccaa

SEQ ID NO: 323068 - RNA, 32 nt, Human
aggcugggcggaggugggcaggaugugagagg

SEQ ID NO: 323069 - RNA, 32 nt, Human
aggcugggcucccuucccaccucucucacucc

SEQ ID NO: 323070 - RNA, 32 nt, Human
aggcugggcugauucccuucugugcucccaca

SEQ ID NO: 323071 - RNA, 32 nt, Human
aggcugggcugcaggcucucggcugcagcgcu

SEQ ID NO: 323072 - RNA, 32 nt, Human
aggcugggcuguucccuucugugcucccacau

SEQ ID NO: 323073 - RNA, 32 nt, Human
aggcugggcuuccugaucccacagcaucgcag

SEQ ID NO: 323074 - RNA, 32 nt, Human
aggcugggcuugaacuccuggccucaagcagu

SEQ ID NO: 323075 - RNA, 32 nt, Human
aggcuggggaagggguuggagggggcuguuga

SEQ ID NO: 323076 - RNA, 23 nt, Human
aggcuggggaccccuccacccca

SEQ ID NO: 323077 - RNA, 21 nt, Human
aggcuggggcagacugugcca

SEQ ID NO: 323078 - RNA, 32 nt, Human
aggcuggggccucgagaaggagucacucagac

SEQ ID NO: 323079 - RNA, 32 nt, Human
aggcuggggcugcuugcccugcuccucguggc

SEQ ID NO: 323080 - RNA, 32 nt, Human
aggcuggggcuggggcugaccacaacauccuu

SEQ ID NO: 323081 - RNA, 31 nt, Human
aggcuggggguggaaggagcagggcucugga

SEQ ID NO: 323082 - RNA, 32 nt, Human
aggcuggggucccugaggguggggcugugucu

SEQ ID NO: 323083 - RNA, 32 nt, Human
aggcugggguuagaguggggagugggcuucuu

SEQ ID NO: 323084 - RNA, 32 nt, Human
aggcugggguucagaccugcagaggaaaacau

SEQ ID NO: 323085 - RNA, 23 nt, Human
aggcugggucaguccccugccca

SEQ ID NO: 323086 - RNA, 32 nt, Human
aggcugggucccauucuguccuucuugucaug

SEQ ID NO: 323087 - RNA, 32 nt, Human
aggcugggugacagagugagacuccaucucaa

SEQ ID NO: 323088 - RNA, 32 nt, Human
aggcugggugcacggccgggcaccacaguggg

SEQ ID NO: 323089 - RNA, 18 nt, Human
aggcuggguggggccuca

SEQ ID NO: 323090 - RNA, 32 nt, Human
aggcuggguggggccucagugggggcugcugc

SEQ ID NO: 323091 - RNA, 32 nt, Human
aggcuggguuccgaggcccaagcccuuggcag

SEQ ID NO: 323092 - RNA, 32 nt, Human
aggcugguagccaggggcaaguucuuagcucu

SEQ ID NO: 323093 - RNA, 32 nt, Human
aggcugguauccaacucuugaccucaggugau

SEQ ID NO: 323094 - RNA, 32 nt, Human
aggcugguaucgaccuccugaccucaagugau

SEQ ID NO: 323095 - RNA, 21 nt, Human
aggcuggucaacauggcgaaa

SEQ ID NO: 323096 - RNA, 32 nt, Human
aggcuggucaagaacuccugaccucaagugau

SEQ ID NO: 323097 - RNA, 32 nt, Human
aggcuggucacaaacuccugaccucaggugau

SEQ ID NO: 323098 - RNA, 32 nt, Human
aggcuggucacaaacuccugaccucaugugau

SEQ ID NO: 323099 - RNA, 32 nt, Human
aggcuggucacgaacuccugggcucaagccau

SEQ ID NO: 323100 - RNA, 32 nt, Human
aggcuggucaggagucagccagccugaaagag

SEQ ID NO: 323101 - RNA, 32 nt, Human
aggcuggucaugaacuccugaccucaggugau

SEQ ID NO: 323102 - RNA, 32 nt, Human
aggcugguccaguggcuuuggugagggcgccu

SEQ ID NO: 323103 - RNA, 23 nt, Human
aggcuggucccaaacuccugacc

SEQ ID NO: 323104 - RNA, 32 nt, Human
aggcuggucccaaacuccugaccucauguaau

SEQ ID NO: 323105 - RNA, 32 nt, Human
aggcuggucccaaacuccuggccucaagcagu

SEQ ID NO: 323106 - RNA, 22 nt, Human
aggcugguccccugcccuggag

SEQ ID NO: 323107 - RNA, 32 nt, Human
aggcuggucccgaacuccugaccucaggugau

SEQ ID NO: 323108 - RNA, 32 nt, Human
aggcuggucccuaugucaugucuuccauuaag

SEQ ID NO: 323109 - RNA, 32 nt, Human
aggcugguccugaaugccugaccucaagugau

SEQ ID NO: 323110 - RNA, 32 nt, Human
aggcugguccugguugaagggagaaggucaaa

SEQ ID NO: 323111 - RNA, 32 nt, Human
aggcuggucgcgaacuccugagcucaggcaau

SEQ ID NO: 323112 - RNA, 32 nt, Human
aggcuggucgugaacuccugagcucaagugau

SEQ ID NO: 323113 - RNA, 32 nt, Human
aggcuggucgugaacuccuggcuucaagcagu

SEQ ID NO: 323114 - RNA, 32 nt, Human
aggcuggucuaaaacuccugaccucaagugau

SEQ ID NO: 323115 - RNA, 32 nt, Human
aggcuggucuagaacuccugaccacaugaugu

SEQ ID NO: 323116 - RNA, 32 nt, Human
aggcuggucuagaacuccugacugcaaaugau

SEQ ID NO: 323117 - RNA, 32 nt, Human
aggcuggucucaaaauccugaccucaagucau

SEQ ID NO: 323118 - RNA, 32 nt, Human
aggcuggucucaaacaccugaccucaggugau

SEQ ID NO: 323119 - RNA, 21 nt, Human
aggcuggucucaaacccccag

SEQ ID NO: 323120 - RNA, 23 nt, Human
aggcuggucucaaaccccggacc

SEQ ID NO: 323121 - RNA, 32 nt, Human
aggcuggucucaaaccccggaccucaggugau

SEQ ID NO: 323122 - RNA, 23 nt, Human
aggcuggucucaaaccccugacc

SEQ ID NO: 323123 - RNA, 32 nt, Human
aggcuggucucaaaccccugaccucaggcaau

SEQ ID NO: 323124 - RNA, 32 nt, Human
aggcuggucucaaacgccagaccucaggugau

SEQ ID NO: 323125 - RNA, 18 nt, Human
aggcuggucucaaacucc

SEQ ID NO: 323126 - RNA, 19 nt, Human
aggcuggucucaaacucca

SEQ ID NO: 323127 - RNA, 24 nt, Human
aggcuggucucaaacuccaccaaa

SEQ ID NO: 323128 - RNA, 32 nt, Human
aggcuggucucaaacuccagaccucaugauuu

SEQ ID NO: 323129 - RNA, 23 nt, Human
aggcuggucucaaacucccaacc

SEQ ID NO: 323130 - RNA, 23 nt, Human
aggcuggucucaaacucccgacc

SEQ ID NO: 323131 - RNA, 32 nt, Human
aggcuggucucaaacucccgaccucaggugau

SEQ ID NO: 323132 - RNA, 23 nt, Human
aggcuggucucaaacucccuacc

SEQ ID NO: 323133 - RNA, 32 nt, Human
aggcuggucucaaacuccuaaccucgugaucc

SEQ ID NO: 323134 - RNA, 23 nt, Human
aggcuggucucaaacuccuagcc

SEQ ID NO: 323135 - RNA, 22 nt, Human
aggcuggucucaaacuccucca

SEQ ID NO: 323136 - RNA, 21 nt, Human
aggcuggucucaaacuccucg

SEQ ID NO: 323137 - RNA, 32 nt, Human
aggcuggucucaaacuccugaacucaagugau

SEQ ID NO: 323138 - RNA, 23 nt, Human
aggcuggucucaaacuccugacc

SEQ ID NO: 323139 - RNA, 32 nt, Human
aggcuggucucaaacuccugaccucaaaugau

SEQ ID NO: 323140 - RNA, 32 nt, Human
aggcuggucucaaacuccugaccucaagcaau

SEQ ID NO: 323141 - RNA, 32 nt, Human
aggcuggucucaaacuccugaccucaagcgau

SEQ ID NO: 323142 - RNA, 32 nt, Human
aggcuggucucaaacuccugaccucaaguaau

SEQ ID NO: 323143 - RNA, 32 nt, Human
aggcuggucucaaacuccugaccucaagugag

SEQ ID NO: 323144 - RNA, 32 nt, Human
aggcuggucucaaacuccugaccucaagugau

SEQ ID NO: 323145 - RNA, 32 nt, Human
aggcuggucucaaacuccugaccucagaugau

SEQ ID NO: 323146 - RNA, 32 nt, Human
aggcuggucucaaacuccugaccucaggcaau

SEQ ID NO: 323147 - RNA, 32 nt, Human
aggcuggucucaaacuccugaccucaggggau

SEQ ID NO: 323148 - RNA, 32 nt, Human
aggcuggucucaaacuccugaccucagguaau

SEQ ID NO: 323149 - RNA, 32 nt, Human
aggcuggucucaaacuccugaccucagguacu

SEQ ID NO: 323150 - RNA, 32 nt, Human
aggcuggucucaaacuccugaccucaggugau

SEQ ID NO: 323151 - RNA, 32 nt, Human
aggcuggucucaaacuccugaccucagguguu

SEQ ID NO: 323152 - RNA, 32 nt, Human
aggcuggucucaaacuccugaccucaugaucc

SEQ ID NO: 323153 - RNA, 32 nt, Human
aggcuggucucaaacuccugaccucaugaucu

SEQ ID NO: 323154 - RNA, 32 nt, Human
aggcuggucucaaacuccugaccucguaaucc

SEQ ID NO: 323155 - RNA, 32 nt, Human
aggcuggucucaaacuccugaccucgugauac

SEQ ID NO: 323156 - RNA, 32 nt, Human
aggcuggucucaaacuccugaccucgugaucc

SEQ ID NO: 323157 - RNA, 32 nt, Human
aggcuggucucaaacuccugaccuuaagugau

SEQ ID NO: 323158 - RNA, 32 nt, Human
aggcuggucucaaacuccugaccuugugaucc

SEQ ID NO: 323159 - RNA, 32 nt, Human
aggcuggucucaaacuccugaccuugugaucu

SEQ ID NO: 323160 - RNA, 32 nt, Human
aggcuggucucaaacuccugaccuuguggucc

SEQ ID NO: 323161 - RNA, 32 nt, Human
aggcuggucucaaacuccugacgccaggugau

SEQ ID NO: 323162 - RNA, 32 nt, Human
aggcuggucucaaacuccugacucgaagugau

SEQ ID NO: 323163 - RNA, 32 nt, Human
aggcuggucucaaacuccugacuucaaaugau

SEQ ID NO: 323164 - RNA, 32 nt, Human
aggcuggucucaaacuccugacuucaagugau

SEQ ID NO: 323165 - RNA, 32 nt, Human
aggcuggucucaaacuccugacuucaggugau

SEQ ID NO: 323166 - RNA, 32 nt, Human
aggcuggucucaaacuccugacuucgugaucu

SEQ ID NO: 323167 - RNA, 32 nt, Human
aggcuggucucaaacuccugagcacuagcaau

SEQ ID NO: 323168 - RNA, 32 nt, Human
aggcuggucucaaacuccugagcucaagcaau

SEQ ID NO: 323169 - RNA, 32 nt, Human
aggcuggucucaaacuccugagcucaagccau

SEQ ID NO: 323170 - RNA, 32 nt, Human
aggcuggucucaaacuccugagcucaagcgau

SEQ ID NO: 323171 - RNA, 32 nt, Human
aggcuggucucaaacuccugagcucaggcaau

SEQ ID NO: 323172 - RNA, 32 nt, Human
aggcuggucucaaacuccugagcucaggcaga

SEQ ID NO: 323173 - RNA, 32 nt, Human
aggcuggucucaaacuccugagcucaggccau

SEQ ID NO: 323174 - RNA, 32 nt, Human
aggcuggucucaaacuccugaucucaagagau

SEQ ID NO: 323175 - RNA, 32 nt, Human
aggcuggucucaaacuccugcccucaggugau

SEQ ID NO: 323176 - RNA, 22 nt, Human
aggcuggucucaaacuccugcu

SEQ ID NO: 323177 - RNA, 32 nt, Human
aggcuggucucaaacuccugcucucaagugau

SEQ ID NO: 323178 - RNA, 32 nt, Human
aggcuggucucaaacuccuggacccaagccau

SEQ ID NO: 323179 - RNA, 32 nt, Human
aggcuggucucaaacuccuggacucaagcaau

SEQ ID NO: 323180 - RNA, 32 nt, Human
aggcuggucucaaacuccuggacucaagggau

SEQ ID NO: 323181 - RNA, 23 nt, Human
aggcuggucucaaacuccuggcc

SEQ ID NO: 323182 - RNA, 32 nt, Human
aggcuggucucaaacuccuggccucaagcaau

SEQ ID NO: 323183 - RNA, 32 nt, Human
aggcuggucucaaacuccuggccucaagugac

SEQ ID NO: 323184 - RNA, 32 nt, Human
aggcuggucucaaacuccuggccucaagugau

SEQ ID NO: 323185 - RNA, 32 nt, Human
aggcuggucucaaacuccuggccucaggugau

SEQ ID NO: 323186 - RNA, 32 nt, Human
aggcuggucucaaacuccuggcuucaagcaau

SEQ ID NO: 323187 - RNA, 32 nt, Human
aggcuggucucaaacuccuggcuucaagugau

SEQ ID NO: 323188 - RNA, 32 nt, Human
aggcuggucucaaacuccugggcucaagcaau

SEQ ID NO: 323189 - RNA, 32 nt, Human
aggcuggucucaaacuccugggcucaagcgau

SEQ ID NO: 323190 - RNA, 32 nt, Human
aggcuggucucaaacuccugggcucaagugaa

SEQ ID NO: 323191 - RNA, 32 nt, Human
aggcuggucucaaacuccugggcucaagugau

SEQ ID NO: 323192 - RNA, 32 nt, Human
aggcuggucucaaacuccugggcucaggcgau

SEQ ID NO: 323193 - RNA, 18 nt, Human
aggcuggucucaaacucu

SEQ ID NO: 323194 - RNA, 27 nt, Human
aggcuggucucaaacucuaacgucaag

SEQ ID NO: 323195 - RNA, 32 nt, Human
aggcuggucucaaacucuugaccucaggugau

SEQ ID NO: 323196 - RNA, 21 nt, Human
aggcuggucucaaacugcuaa

SEQ ID NO: 323197 - RNA, 32 nt, Human
aggcuggucucaaacugcuaacaucaagugau

SEQ ID NO: 323198 - RNA, 21 nt, Human
aggcuggucucaaacugcuga

SEQ ID NO: 323199 - RNA, 32 nt, Human
aggcuggucucaaacugcugaccucaagugau

SEQ ID NO: 323200 - RNA, 18 nt, Human
aggcuggucucaaacuuc

SEQ ID NO: 323201 - RNA, 32 nt, Human
aggcuggucucaaacuucugaccucaaaugau

SEQ ID NO: 323202 - RNA, 32 nt, Human
aggcuggucucaaacuucugaccucaagugau

SEQ ID NO: 323203 - RNA, 32 nt, Human
aggcuggucucaaacuucugaccucaggugau

SEQ ID NO: 323204 - RNA, 32 nt, Human
aggcuggucucaaacuucugaccucgugaucc

SEQ ID NO: 323205 - RNA, 32 nt, Human
aggcuggucucaaauuccugaccccaggugau

SEQ ID NO: 323206 - RNA, 32 nt, Human
aggcuggucucaaauuccugaccucaggugau

SEQ ID NO: 323207 - RNA, 32 nt, Human
aggcuggucucaaauuccugaccuuaagugau

SEQ ID NO: 323208 - RNA, 32 nt, Human
aggcuggucucaaccuccugaccucaagugau

SEQ ID NO: 323209 - RNA, 32 nt, Human
aggcuggucucaaccucuggaccucaggugau

SEQ ID NO: 323210 - RNA, 32 nt, Human
aggcuggucucaacuccugaccucaggugauc

SEQ ID NO: 323211 - RNA, 32 nt, Human
aggcuggucucaacuccugagcucaggcaauc

SEQ ID NO: 323212 - RNA, 32 nt, Human
aggcuggucucaacuccugggcucaagcgauc

SEQ ID NO: 323213 - RNA, 32 nt, Human
aggcuggucucacacuccugaccucaggugau

SEQ ID NO: 323214 - RNA, 32 nt, Human
aggcuggucucaggagucacuccugagcucaa

SEQ ID NO: 323215 - RNA, 32 nt, Human
aggcuggucuccaacuccugaccucaagugau

SEQ ID NO: 323216 - RNA, 32 nt, Human
aggcuggucuccaacuccugaccucaggcgau

SEQ ID NO: 323217 - RNA, 32 nt, Human
aggcuggucuccaacuccugaccucaggugau

SEQ ID NO: 323218 - RNA, 32 nt, Human
aggcuggucuccaacuccugagcucaggugau

SEQ ID NO: 323219 - RNA, 32 nt, Human
aggcuggucuccaacuccugcccucaagugau

SEQ ID NO: 323220 - RNA, 32 nt, Human
aggcuggucuccaacuccuggacucaagcaau

SEQ ID NO: 323221 - RNA, 32 nt, Human
aggcuggucuccaacuccuggacucaagugau

SEQ ID NO: 323222 - RNA, 32 nt, Human
aggcuggucuccaacuccuggccucaaaugau

SEQ ID NO: 323223 - RNA, 32 nt, Human
aggcuggucuccaacuccugggcucaagcaau

SEQ ID NO: 323224 - RNA, 32 nt, Human
aggcuggucuccgauuccugaccucgggugau

SEQ ID NO: 323225 - RNA, 32 nt, Human
aggcuggucucgaacaccugaccucaggugau

SEQ ID NO: 323226 - RNA, 32 nt, Human
aggcuggucucgaacaccugaccucguggucc

SEQ ID NO: 323227 - RNA, 32 nt, Human
aggcuggucucgaacaccugggcucaacugau

SEQ ID NO: 323228 - RNA, 32 nt, Human
aggcuggucucgaaccccugagcucaggugau

SEQ ID NO: 323229 - RNA, 32 nt, Human
aggcuggucucgaacgccugaccucaugaucu

SEQ ID NO: 323230 - RNA, 32 nt, Human
aggcuggucucgaacgccugaccucgugugau

SEQ ID NO: 323231 - RNA, 32 nt, Human
aggcuggucucgaacuacugaccucgugaucc

SEQ ID NO: 323232 - RNA, 32 nt, Human
aggcuggucucgaacuacugaccucgugaucu

SEQ ID NO: 323233 - RNA, 32 nt, Human
aggcuggucucgaacucauggccucaaaugau

SEQ ID NO: 323234 - RNA, 32 nt, Human
aggcuggucucgaacuccagaccucaggugau

SEQ ID NO: 323235 - RNA, 32 nt, Human
aggcuggucucgaacucccaccucagccuccc

SEQ ID NO: 323236 - RNA, 32 nt, Human
aggcuggucucgaacucccagccucaggugau

SEQ ID NO: 323237 - RNA, 32 nt, Human
aggcuggucucgaacucccgaccucaagugau

SEQ ID NO: 323238 - RNA, 32 nt, Human
aggcuggucucgaacucccgaccucaggugau

SEQ ID NO: 323239 - RNA, 32 nt, Human
aggcuggucucgaacucccgaucucaggugau

SEQ ID NO: 323240 - RNA, 32 nt, Human
aggcuggucucgaacucccguaauccagccau

SEQ ID NO: 323241 - RNA, 32 nt, Human
aggcuggucucgaacuccgaaccucaggugau

SEQ ID NO: 323242 - RNA, 32 nt, Human
aggcuggucucgaacuccgcaucucaggugau

SEQ ID NO: 323243 - RNA, 32 nt, Human
aggcuggucucgaacuccuaaccucaggugau

SEQ ID NO: 323244 - RNA, 32 nt, Human
aggcuggucucgaacuccuaaccucgggugau

SEQ ID NO: 323245 - RNA, 32 nt, Human
aggcuggucucgaacuccuaaucucaaguuau

SEQ ID NO: 323246 - RNA, 32 nt, Human
aggcuggucucgaacuccuacacucaggugau

SEQ ID NO: 323247 - RNA, 32 nt, Human
aggcuggucucgaacuccuagccucaagugau

SEQ ID NO: 323248 - RNA, 32 nt, Human
aggcuggucucgaacuccucaccucaagugau

SEQ ID NO: 323249 - RNA, 32 nt, Human
aggcuggucucgaacuccucaccucgagugau

SEQ ID NO: 323250 - RNA, 32 nt, Human
aggcuggucucgaacuccugaacucaagugau

SEQ ID NO: 323251 - RNA, 32 nt, Human
aggcuggucucgaacuccugaacuuaggugau

SEQ ID NO: 323252 - RNA, 32 nt, Human
aggcuggucucgaacuccugacaucaagugau

SEQ ID NO: 323253 - RNA, 32 nt, Human
aggcuggucucgaacuccugacaucaggugau

SEQ ID NO: 323254 - RNA, 32 nt, Human
aggcuggucucgaacuccugaccccaggugau

SEQ ID NO: 323255 - RNA, 32 nt, Human
aggcuggucucgaacuccugaccgcaagugau

SEQ ID NO: 323256 - RNA, 32 nt, Human
aggcuggucucgaacuccugaccuagugaucu

SEQ ID NO: 323257 - RNA, 32 nt, Human
aggcuggucucgaacuccugaccucaagcagu

SEQ ID NO: 323258 - RNA, 32 nt, Human
aggcuggucucgaacuccugaccucaagcgau

SEQ ID NO: 323259 - RNA, 32 nt, Human
aggcuggucucgaacuccugaccucaaguaau

SEQ ID NO: 323260 - RNA, 32 nt, Human
aggcuggucucgaacuccugaccucaagugac

SEQ ID NO: 323261 - RNA, 32 nt, Human
aggcuggucucgaacuccugaccucaagugau

SEQ ID NO: 323262 - RNA, 32 nt, Human
aggcuggucucgaacuccugaccucaaguggu

SEQ ID NO: 323263 - RNA, 32 nt, Human
aggcuggucucgaacuccugaccucagacgau

SEQ ID NO: 323264 - RNA, 32 nt, Human
aggcuggucucgaacuccugaccucagauaau

SEQ ID NO: 323265 - RNA, 32 nt, Human
aggcuggucucgaacuccugaccucagaugau

SEQ ID NO: 323266 - RNA, 32 nt, Human
aggcuggucucgaacuccugaccucaggcaau

SEQ ID NO: 323267 - RNA, 32 nt, Human
aggcuggucucgaacuccugaccucaggcgau

SEQ ID NO: 323268 - RNA, 32 nt, Human
aggcuggucucgaacuccugaccucaggggau

SEQ ID NO: 323269 - RNA, 32 nt, Human
aggcuggucucgaacuccugaccucagguaau

SEQ ID NO: 323270 - RNA, 30 nt, Human
aggcuggucucgaacuccugaccucaggug

SEQ ID NO: 323271 - RNA, 32 nt, Human
aggcuggucucgaacuccugaccucaggugag

SEQ ID NO: 323272 - RNA, 32 nt, Human
aggcuggucucgaacuccugaccucaggugau

SEQ ID NO: 323273 - RNA, 32 nt, Human
aggcuggucucgaacuccugaccucaguugau

SEQ ID NO: 323274 - RNA, 32 nt, Human
aggcuggucucgaacuccugaccucaugagcc

SEQ ID NO: 323275 - RNA, 32 nt, Human
aggcuggucucgaacuccugaccucaugaucc

SEQ ID NO: 323276 - RNA, 32 nt, Human
aggcuggucucgaacuccugaccucaugaucu

SEQ ID NO: 323277 - RNA, 32 nt, Human
aggcuggucucgaacuccugaccucaugauuu

SEQ ID NO: 323278 - RNA, 32 nt, Human
aggcuggucucgaacuccugaccucaugugau

SEQ ID NO: 323279 - RNA, 32 nt, Human
aggcuggucucgaacuccugaccucgugaucc

SEQ ID NO: 323280 - RNA, 32 nt, Human
aggcuggucucgaacuccugaccucgugaucg

SEQ ID NO: 323281 - RNA, 32 nt, Human
aggcuggucucgaacuccugaccucgugaucu

SEQ ID NO: 323282 - RNA, 32 nt, Human
aggcuggucucgaacuccugaccucgugauug

SEQ ID NO: 323283 - RNA, 32 nt, Human
aggcuggucucgaacuccugaccucgugauuu

SEQ ID NO: 323284 - RNA, 32 nt, Human
aggcuggucucgaacuccugaccugaagugau

SEQ ID NO: 323285 - RNA, 32 nt, Human
aggcuggucucgaacuccugaccuggugaucu

SEQ ID NO: 323286 - RNA, 32 nt, Human
aggcuggucucgaacuccugaccuggugauuu

SEQ ID NO: 323287 - RNA, 32 nt, Human
aggcuggucucgaacuccugaccuuaagugau

SEQ ID NO: 323288 - RNA, 32 nt, Human
aggcuggucucgaacuccugaccuuacgugau

SEQ ID NO: 323289 - RNA, 32 nt, Human
aggcuggucucgaacuccugaccuuaggugau

SEQ ID NO: 323290 - RNA, 32 nt, Human
aggcuggucucgaacuccugaccuugaguaau

SEQ ID NO: 323291 - RNA, 32 nt, Human
aggcuggucucgaacuccugaccuuggguaau

SEQ ID NO: 323292 - RNA, 32 nt, Human
aggcuggucucgaacuccugaccuugugauac

SEQ ID NO: 323293 - RNA, 32 nt, Human
aggcuggucucgaacuccugaccuugugaucc

SEQ ID NO: 323294 - RNA, 32 nt, Human
aggcuggucucgaacuccugaccuugugaucu

SEQ ID NO: 323295 - RNA, 32 nt, Human
aggcuggucucgaacuccugaccuuguuaucc

SEQ ID NO: 323296 - RNA, 32 nt, Human
aggcuggucucgaacuccugacgucaagcaau

SEQ ID NO: 323297 - RNA, 32 nt, Human
aggcuggucucgaacuccugacucaaaugauc

SEQ ID NO: 323298 - RNA, 32 nt, Human
aggcuggucucgaacuccugacugcaagugau

SEQ ID NO: 323299 - RNA, 32 nt, Human
aggcuggucucgaacuccugacuucaagugau

SEQ ID NO: 323300 - RNA, 32 nt, Human
aggcuggucucgaacuccugagcucaagugau

SEQ ID NO: 323301 - RNA, 32 nt, Human
aggcuggucucgaacuccugagcucaggcaau

SEQ ID NO: 323302 - RNA, 32 nt, Human
aggcuggucucgaacuccugagcucaggcagu

SEQ ID NO: 323303 - RNA, 32 nt, Human
aggcuggucucgaacuccugagcucaggugau

SEQ ID NO: 323304 - RNA, 32 nt, Human
aggcuggucucgaacuccugaucucaugaucc

SEQ ID NO: 323305 - RNA, 32 nt, Human
aggcuggucucgaacuccugaucugaagugau

SEQ ID NO: 323306 - RNA, 32 nt, Human
aggcuggucucgaacuccugcccucaggugau

SEQ ID NO: 323307 - RNA, 32 nt, Human
aggcuggucucgaacuccugccucaagugauc

SEQ ID NO: 323308 - RNA, 32 nt, Human
aggcuggucucgaacuccuggacucaagcaau

SEQ ID NO: 323309 - RNA, 32 nt, Human
aggcuggucucgaacuccuggacucaagugau

SEQ ID NO: 323310 - RNA, 32 nt, Human
aggcuggucucgaacuccuggacuuaagugag

SEQ ID NO: 323311 - RNA, 32 nt, Human
aggcuggucucgaacuccuggcaucaagcgau

SEQ ID NO: 323312 - RNA, 32 nt, Human
aggcuggucucgaacuccuggccacaagugug

SEQ ID NO: 323313 - RNA, 32 nt, Human
aggcuggucucgaacuccuggccauaggugau

SEQ ID NO: 323314 - RNA, 32 nt, Human
aggcuggucucgaacuccuggccuaaugaucu

SEQ ID NO: 323315 - RNA, 32 nt, Human
aggcuggucucgaacuccuggccuaggugauc

SEQ ID NO: 323316 - RNA, 32 nt, Human
aggcuggucucgaacuccuggccucaagugau

SEQ ID NO: 323317 - RNA, 32 nt, Human
aggcuggucucgaacuccuggccucacgugau

SEQ ID NO: 323318 - RNA, 32 nt, Human
aggcuggucucgaacuccuggccucaggugug

SEQ ID NO: 323319 - RNA, 32 nt, Human
aggcuggucucgaacuccuggccucaugugau

SEQ ID NO: 323320 - RNA, 32 nt, Human
aggcuggucucgaacuccuggccucgagcagu

SEQ ID NO: 323321 - RNA, 32 nt, Human
aggcuggucucgaacuccuggccucgugaucu

SEQ ID NO: 323322 - RNA, 32 nt, Human
aggcuggucucgaacuccuggcuucaagggau

SEQ ID NO: 323323 - RNA, 32 nt, Human
aggcuggucucgaacuccugggcucaagccgu

SEQ ID NO: 323324 - RNA, 32 nt, Human
aggcuggucucgaacuccugggcucaagcgau

SEQ ID NO: 323325 - RNA, 32 nt, Human
aggcuggucucgaacuccugggcucaagcggu

SEQ ID NO: 323326 - RNA, 32 nt, Human
aggcuggucucgaacuccugggcucaagugau

SEQ ID NO: 323327 - RNA, 32 nt, Human
aggcuggucucgaacuccugggcucgggugau

SEQ ID NO: 323328 - RNA, 32 nt, Human
aggcuggucucgaacuccugggcuuaaaugac

SEQ ID NO: 323329 - RNA, 32 nt, Human
aggcuggucucgaacuccuguccucagguaau

SEQ ID NO: 323330 - RNA, 32 nt, Human
aggcuggucucgaacuccuuaccucaggugau

SEQ ID NO: 323331 - RNA, 32 nt, Human
aggcuggucucgaacuccuuggcucaagugau

SEQ ID NO: 323332 - RNA, 32 nt, Human
aggcuggucucgaacucgagacuuuaggugau

SEQ ID NO: 323333 - RNA, 32 nt, Human
aggcuggucucgaacucgugaccgcagugauc

SEQ ID NO: 323334 - RNA, 32 nt, Human
aggcuggucucgaacucuggaccucagaucuu

SEQ ID NO: 323335 - RNA, 32 nt, Human
aggcuggucucgaacucuggccucaaacgacc

SEQ ID NO: 323336 - RNA, 32 nt, Human
aggcuggucucgaacucuggguucaagaaauc

SEQ ID NO: 323337 - RNA, 32 nt, Human
aggcuggucucgaacucuugaccucaagugau

SEQ ID NO: 323338 - RNA, 32 nt, Human
aggcuggucucgaacucuugaccucaggugau

SEQ ID NO: 323339 - RNA, 32 nt, Human
aggcuggucucgaacucuugacuucagaugau

SEQ ID NO: 323340 - RNA, 32 nt, Human
aggcuggucucgaacugcugaccucaaguaau

SEQ ID NO: 323341 - RNA, 32 nt, Human
aggcuggucucgaacuuaugaccucaggugau

SEQ ID NO: 323342 - RNA, 32 nt, Human
aggcuggucucgaacuucgggccccaagccau

SEQ ID NO: 323343 - RNA, 32 nt, Human
aggcuggucucgaacuucugaccucaggugau

SEQ ID NO: 323344 - RNA, 32 nt, Human
aggcuggucucgaacuucugaccucagugauc

SEQ ID NO: 323345 - RNA, 32 nt, Human
aggcuggucucgaacuucugacgucaagugau

SEQ ID NO: 323346 - RNA, 32 nt, Human
aggcuggucucgaacuucugagcucaagcgau

SEQ ID NO: 323347 - RNA, 32 nt, Human
aggcuggucucgaacuucugagcucgagcgau

SEQ ID NO: 323348 - RNA, 32 nt, Human
aggcuggucucgaacuucugggcucaagcaau

SEQ ID NO: 323349 - RNA, 32 nt, Human
aggcuggucucgaaugccuggccucaggugau

SEQ ID NO: 323350 - RNA, 32 nt, Human
aggcuggucucgaaugucugaccucaggugau

SEQ ID NO: 323351 - RNA, 32 nt, Human
aggcuggucucgaauuccagaccucaggugau

SEQ ID NO: 323352 - RNA, 32 nt, Human
aggcuggucucgaauucccgaccucagguaau

SEQ ID NO: 323353 - RNA, 32 nt, Human
aggcuggucucgaauuccugaccucaagugau

SEQ ID NO: 323354 - RNA, 32 nt, Human
aggcuggucucgaauuccugaccucaggugau

SEQ ID NO: 323355 - RNA, 32 nt, Human
aggcuggucucgaauuccugagcucaggugau

SEQ ID NO: 323356 - RNA, 32 nt, Human
aggcuggucucgaauuccuggauucaagugau

SEQ ID NO: 323357 - RNA, 32 nt, Human
aggcuggucucgaauuccuggccucaagcgau

SEQ ID NO: 323358 - RNA, 32 nt, Human
aggcuggucucgacccugaccucagggugauc

SEQ ID NO: 323359 - RNA, 32 nt, Human
aggcuggucucgagcuccugaccucaagugau

SEQ ID NO: 323360 - RNA, 32 nt, Human
aggcuggucucgagcuccugaccucaggugau

SEQ ID NO: 323361 - RNA, 32 nt, Human
aggcuggucucgagcuccugacucaggugauc

SEQ ID NO: 323362 - RNA, 32 nt, Human
aggcuggucucgagcuccugagcucaagcgau

SEQ ID NO: 323363 - RNA, 32 nt, Human
aggcuggucucgagcuccugagcucaggcaau

SEQ ID NO: 323364 - RNA, 32 nt, Human
aggcuggucucgagcucuugaccucaaguaau

SEQ ID NO: 323365 - RNA, 32 nt, Human
aggcuggucucgaucuccugaccucaggugau

SEQ ID NO: 323366 - RNA, 32 nt, Human
aggcuggucucgaucuccugaccucgugaucc

SEQ ID NO: 323367 - RNA, 32 nt, Human
aggcuggucucgaucuccugacuucaggugau

SEQ ID NO: 323368 - RNA, 32 nt, Human
aggcuggucucgaucugaccucaugauccacc

SEQ ID NO: 323369 - RNA, 32 nt, Human
aggcuggucucgauuuccugaccucaggugau

SEQ ID NO: 323370 - RNA, 32 nt, Human
aggcuggucucuaacucccgaccucaggugau

SEQ ID NO: 323371 - RNA, 32 nt, Human
aggcuggucucuaacuccugggcucagugauc

SEQ ID NO: 323372 - RNA, 32 nt, Human
aggcuggucuggaacaccugaccuccggugau

SEQ ID NO: 323373 - RNA, 32 nt, Human
aggcuggucuggaacgccugaccucaagugau

SEQ ID NO: 323374 - RNA, 32 nt, Human
aggcuggucuggaacuccuaaccucagguuau

SEQ ID NO: 323375 - RNA, 32 nt, Human
aggcuggucuggaacuccugaccucaagugau

SEQ ID NO: 323376 - RNA, 32 nt, Human
aggcuggucuggaacuccugaccucaggugau

SEQ ID NO: 323377 - RNA, 32 nt, Human
aggcuggucuggaacuccugaccuucagguga

SEQ ID NO: 323378 - RNA, 32 nt, Human
aggcuggucuggaacuccugaccuugugaucu

SEQ ID NO: 323379 - RNA, 32 nt, Human
aggcuggucuggaacuccugagcucaagugau

SEQ ID NO: 323380 - RNA, 32 nt, Human
aggcuggucuggaacuccuggccuccagucau

SEQ ID NO: 323381 - RNA, 32 nt, Human
aggcuggucuggaacugcugaccucaacuaau

SEQ ID NO: 323382 - RNA, 32 nt, Human
aggcuggucuuaaacuccuggccucaacugau

SEQ ID NO: 323383 - RNA, 32 nt, Human
aggcuggucuuaaacucucgaccucaggugau

SEQ ID NO: 323384 - RNA, 32 nt, Human
aggcuggucuuagacuccugaccucaguugau

SEQ ID NO: 323385 - RNA, 32 nt, Human
aggcuggucuugaacaccugaccucaaaugau

SEQ ID NO: 323386 - RNA, 32 nt, Human
aggcuggucuugaaccccugaccucaagugau

SEQ ID NO: 323387 - RNA, 32 nt, Human
aggcuggucuugaaccccugaccucaggugau

SEQ ID NO: 323388 - RNA, 32 nt, Human
aggcuggucuugaacccuugaccucaggucau

SEQ ID NO: 323389 - RNA, 32 nt, Human
aggcuggucuugaacgccugaccuugugaucu

SEQ ID NO: 323390 - RNA, 32 nt, Human
aggcuggucuugaacucccgaccucagaugau

SEQ ID NO: 323391 - RNA, 32 nt, Human
aggcuggucuugaacucccgaccucaggugau

SEQ ID NO: 323392 - RNA, 32 nt, Human
aggcuggucuugaacuccuaaccucgggugau

SEQ ID NO: 323393 - RNA, 32 nt, Human
aggcuggucuugaacuccuagacucaagugau

SEQ ID NO: 323394 - RNA, 32 nt, Human
aggcuggucuugaacuccuaggcucaagagau

SEQ ID NO: 323395 - RNA, 32 nt, Human
aggcuggucuugaacuccucaccucaagcgau

SEQ ID NO: 323396 - RNA, 32 nt, Human
aggcuggucuugaacuccucaccucaggugau

SEQ ID NO: 323397 - RNA, 32 nt, Human
aggcuggucuugaacuccucggcucaagcaau

SEQ ID NO: 323398 - RNA, 32 nt, Human
aggcuggucuugaacuccugaacucaagcaau

SEQ ID NO: 323399 - RNA, 32 nt, Human
aggcuggucuugaacuccugaacucaagugau

SEQ ID NO: 323400 - RNA, 32 nt, Human
aggcuggucuugaacuccugaacucaauugau

SEQ ID NO: 323401 - RNA, 32 nt, Human
aggcuggucuugaacuccugacaucaaguggu

SEQ ID NO: 323402 - RNA, 28 nt, Human
aggcuggucuugaacuccugaccacagg

SEQ ID NO: 323403 - RNA, 32 nt, Human
aggcuggucuugaacuccugaccccaggugau

SEQ ID NO: 323404 - RNA, 32 nt, Human
aggcuggucuugaacuccugacccucaaguga

SEQ ID NO: 323405 - RNA, 32 nt, Human
aggcuggucuugaacuccugaccgcagguaau

SEQ ID NO: 323406 - RNA, 26 nt, Human
aggcuggucuugaacuccugaccuca

SEQ ID NO: 323407 - RNA, 32 nt, Human
aggcuggucuugaacuccugaccucaaacgau

SEQ ID NO: 323408 - RNA, 32 nt, Human
aggcuggucuugaacuccugaccucaaaugag

SEQ ID NO: 323409 - RNA, 32 nt, Human
aggcuggucuugaacuccugaccucaaaugau

SEQ ID NO: 323410 - RNA, 32 nt, Human
aggcuggucuugaacuccugaccucaacugau

SEQ ID NO: 323411 - RNA, 32 nt, Human
aggcuggucuugaacuccugaccucaacuggu

SEQ ID NO: 323412 - RNA, 32 nt, Human
aggcuggucuugaacuccugaccucaagcgau

SEQ ID NO: 323413 - RNA, 32 nt, Human
aggcuggucuugaacuccugaccucaaguaau

SEQ ID NO: 323414 - RNA, 32 nt, Human
aggcuggucuugaacuccugaccucaagugag

SEQ ID NO: 323415 - RNA, 32 nt, Human
aggcuggucuugaacuccugaccucaagugau

SEQ ID NO: 323416 - RNA, 32 nt, Human
aggcuggucuugaacuccugaccucaaguggu

SEQ ID NO: 323417 - RNA, 32 nt, Human
aggcuggucuugaacuccugaccucacacaau

SEQ ID NO: 323418 - RNA, 32 nt, Human
aggcuggucuugaacuccugaccucaggcgau

SEQ ID NO: 323419 - RNA, 32 nt, Human
aggcuggucuugaacuccugaccucagguaau

SEQ ID NO: 323420 - RNA, 32 nt, Human
aggcuggucuugaacuccugaccucaggugag

SEQ ID NO: 323421 - RNA, 32 nt, Human
aggcuggucuugaacuccugaccucaggugau

SEQ ID NO: 323422 - RNA, 32 nt, Human
aggcuggucuugaacuccugaccucaugaucc

SEQ ID NO: 323423 - RNA, 32 nt, Human
aggcuggucuugaacuccugaccucaugugau

SEQ ID NO: 323424 - RNA, 32 nt, Human
aggcuggucuugaacuccugaccuccugaucc

SEQ ID NO: 323425 - RNA, 32 nt, Human
aggcuggucuugaacuccugaccucgugaccc

SEQ ID NO: 323426 - RNA, 32 nt, Human
aggcuggucuugaacuccugaccucgugaucc

SEQ ID NO: 323427 - RNA, 32 nt, Human
aggcuggucuugaacuccugaccucgugaucu

SEQ ID NO: 323428 - RNA, 32 nt, Human
aggcuggucuugaacuccugaccucgugauug

SEQ ID NO: 323429 - RNA, 32 nt, Human
aggcuggucuugaacuccugaccuugugaucc

SEQ ID NO: 323430 - RNA, 32 nt, Human
aggcuggucuugaacuccugaccuugugaucu

SEQ ID NO: 323431 - RNA, 32 nt, Human
aggcuggucuugaacuccugaccuuguggucc

SEQ ID NO: 323432 - RNA, 32 nt, Human
aggcuggucuugaacuccugacgucaagugau

SEQ ID NO: 323433 - RNA, 32 nt, Human
aggcuggucuugaacuccugacuucaggugac

SEQ ID NO: 323434 - RNA, 32 nt, Human
aggcuggucuugaacuccugagccucgugagu

SEQ ID NO: 323435 - RNA, 32 nt, Human
aggcuggucuugaacuccugagccugugaucc

SEQ ID NO: 323436 - RNA, 32 nt, Human
aggcuggucuugaacuccugagcucaagggau

SEQ ID NO: 323437 - RNA, 32 nt, Human
aggcuggucuugaacuccugagcucaagugau

SEQ ID NO: 323438 - RNA, 32 nt, Human
aggcuggucuugaacuccugagcucaggugau

SEQ ID NO: 323439 - RNA, 32 nt, Human
aggcuggucuugaacuccugagcucaugccau

SEQ ID NO: 323440 - RNA, 32 nt, Human
aggcuggucuugaacuccugaguucaagcagu

SEQ ID NO: 323441 - RNA, 32 nt, Human
aggcuggucuugaacuccugaguucaagcgau

SEQ ID NO: 323442 - RNA, 32 nt, Human
aggcuggucuugaacuccuggacucaagcaac

SEQ ID NO: 323443 - RNA, 32 nt, Human
aggcuggucuugaacuccuggacucaagcgac

SEQ ID NO: 323444 - RNA, 32 nt, Human
aggcuggucuugaacuccuggacucauccuaa

SEQ ID NO: 323445 - RNA, 32 nt, Human
aggcuggucuugaacuccuggacugaagcggu

SEQ ID NO: 323446 - RNA, 32 nt, Human
aggcuggucuugaacuccuggacuuagacgau

SEQ ID NO: 323447 - RNA, 27 nt, Human
aggcuggucuugaacuccuggccucaa

SEQ ID NO: 323448 - RNA, 32 nt, Human
aggcuggucuugaacuccuggccucaaaugau

SEQ ID NO: 323449 - RNA, 32 nt, Human
aggcuggucuugaacuccuggccucaagcaac

SEQ ID NO: 323450 - RNA, 32 nt, Human
aggcuggucuugaacuccuggccucaagcaau

SEQ ID NO: 323451 - RNA, 32 nt, Human
aggcuggucuugaacuccuggccucaagcgau

SEQ ID NO: 323452 - RNA, 32 nt, Human
aggcuggucuugaacuccuggccucaagggau

SEQ ID NO: 323453 - RNA, 32 nt, Human
aggcuggucuugaacuccuggccucaagucau

SEQ ID NO: 323454 - RNA, 32 nt, Human
aggcuggucuugaacuccuggccucaagugau

SEQ ID NO: 323455 - RNA, 32 nt, Human
aggcuggucuugaacuccuggccucaaguggu

SEQ ID NO: 323456 - RNA, 32 nt, Human
aggcuggucuugaacuccuggccucauaugau

SEQ ID NO: 323457 - RNA, 32 nt, Human
aggcuggucuugaacuccuggccuuaagcaau

SEQ ID NO: 323458 - RNA, 32 nt, Human
aggcuggucuugaacuccuggccuuaugugau

SEQ ID NO: 323459 - RNA, 32 nt, Human
aggcuggucuugaacuccuggcucaagaaauc

SEQ ID NO: 323460 - RNA, 32 nt, Human
aggcuggucuugaacuccuggcuucgggugau

SEQ ID NO: 323461 - RNA, 32 nt, Human
aggcuggucuugaacuccugggcucaagcaau

SEQ ID NO: 323462 - RNA, 32 nt, Human
aggcuggucuugaacuccugggcucaagccau

SEQ ID NO: 323463 - RNA, 32 nt, Human
aggcuggucuugaacuccugggcucaagcgau

SEQ ID NO: 323464 - RNA, 32 nt, Human
aggcuggucuugaacuccugggcucaagcuau

SEQ ID NO: 323465 - RNA, 32 nt, Human
aggcuggucuugaacuccugggcucaagugau

SEQ ID NO: 323466 - RNA, 32 nt, Human
aggcuggucuugaacuccugggcucaugcaau

SEQ ID NO: 323467 - RNA, 32 nt, Human
aggcuggucuugaacuccugggcuccagugau

SEQ ID NO: 323468 - RNA, 32 nt, Human
aggcuggucuugaacuccuggucucaagugau

SEQ ID NO: 323469 - RNA, 32 nt, Human
aggcuggucuugaacuccuguccucaaguaau

SEQ ID NO: 323470 - RNA, 32 nt, Human
aggcuggucuugaacuccuugaccucagguaa

SEQ ID NO: 323471 - RNA, 32 nt, Human
aggcuggucuugaacucucgaccucaggaaac

SEQ ID NO: 323472 - RNA, 32 nt, Human
aggcuggucuugaacucuugaccucaggugau

SEQ ID NO: 323473 - RNA, 32 nt, Human
aggcuggucuugaacuucugaccucaagugau

SEQ ID NO: 323474 - RNA, 32 nt, Human
aggcuggucuugaauucccgaccucaggugau

SEQ ID NO: 323475 - RNA, 32 nt, Human
aggcuggucuugaauuccugaccucaagugau

SEQ ID NO: 323476 - RNA, 32 nt, Human
aggcuggucuugaauuccugaccucaggugau

SEQ ID NO: 323477 - RNA, 32 nt, Human
aggcuggucuugaauuccugaccucagugauc

SEQ ID NO: 323478 - RNA, 32 nt, Human
aggcuggucuugaauuccugaccucgugaucc

SEQ ID NO: 323479 - RNA, 32 nt, Human
aggcuggucuugaccuccugaccuaggugauc

SEQ ID NO: 323480 - RNA, 32 nt, Human
aggcuggucuugcacuccugaccucacgugau

SEQ ID NO: 323481 - RNA, 32 nt, Human
aggcuggucuuggacuccugaccucaugcucc

SEQ ID NO: 323482 - RNA, 32 nt, Human
aggcuggucuuggauucccgaccucaggugau

SEQ ID NO: 323483 - RNA, 32 nt, Human
aggcuggucuuguacuccugacgucaggugau

SEQ ID NO: 323484 - RNA, 32 nt, Human
aggcuggucuuuaacuccugaccucaagugau

SEQ ID NO: 323485 - RNA, 32 nt, Human
aggcuggucuuuaacuccugaccucagguguu

SEQ ID NO: 323486 - RNA, 32 nt, Human
aggcuggugacuagcagagguccaccugaccc

SEQ ID NO: 323487 - RNA, 32 nt, Human
aggcuggugacuagcagagguccaccugaccu

SEQ ID NO: 323488 - RNA, 32 nt, Human
aggcuggugcagccuacauggcacaggauauu

SEQ ID NO: 323489 - RNA, 32 nt, Human
aggcuggugcuguggccagggugagagcugcu

SEQ ID NO: 323490 - RNA, 32 nt, Human
aggcuggugcuuaguacuguuuucccugcacg

SEQ ID NO: 323491 - RNA, 24 nt, Human
aggcugguggaucacaaggucagg

SEQ ID NO: 323492 - RNA, 21 nt, Human
aggcugguggaucacgagguc

SEQ ID NO: 323493 - RNA, 22 nt, Human
aggcugguggaucacgagguca

SEQ ID NO: 323494 - RNA, 23 nt, Human
aggcugguggaucacgaggucag

SEQ ID NO: 323495 - RNA, 24 nt, Human
aggcugguggaucacgaggucagg

SEQ ID NO: 323496 - RNA, 32 nt, Human
aggcugguggccugggugccucugcacacuga

SEQ ID NO: 323497 - RNA, 17 nt, Human
aggcugguggugagcuc

SEQ ID NO: 323498 - RNA, 32 nt, Human
aggcugguggugcuggagaaggagcugcuccg

SEQ ID NO: 323499 - RNA, 32 nt, Human
aggcuggugucaaacuccugacuucaggugau

SEQ ID NO: 323500 - RNA, 32 nt, Human
aggcuggugucaaacuccugggcucagucagu

SEQ ID NO: 323501 - RNA, 32 nt, Human
aggcuggugucgaacuccugaccucaggugau

SEQ ID NO: 323502 - RNA, 32 nt, Human
aggcuggugucgaacuccugggcucaagcgau

SEQ ID NO: 323503 - RNA, 32 nt, Human
aggcugguguggaacuccugaacucaggcugu

SEQ ID NO: 323504 - RNA, 32 nt, Human
aggcugguguugaacuccugaccucaagugau

SEQ ID NO: 323505 - RNA, 32 nt, Human
aggcugguguugaacuccugaccucagguaau

SEQ ID NO: 323506 - RNA, 32 nt, Human
aggcugguguugaacucuugaccucaggugau

SEQ ID NO: 323507 - RNA, 32 nt, Human
aggcugguguugaacuucugaccucaggugau

SEQ ID NO: 323508 - RNA, 32 nt, Human
aggcugguucaucaaauaaagcaaaaccuugc

SEQ ID NO: 323509 - RNA, 32 nt, Human
aggcugguuccuggucgcacagcuggucaugg

SEQ ID NO: 323510 - RNA, 32 nt, Human
aggcugguucuugcgugcucugugcccccacc

SEQ ID NO: 323511 - RNA, 22 nt, Human
aggcugguuggcauaauaugua

SEQ ID NO: 323512 - RNA, 32 nt, Human
aggcugguuuagaacuccugaccucaggugau

SEQ ID NO: 323513 - RNA, 32 nt, Human
aggcugguuucaaacuccugaccucaagugac

SEQ ID NO: 323514 - RNA, 32 nt, Human
aggcugguuucaaacuccugaccucaagugau

SEQ ID NO: 323515 - RNA, 32 nt, Human
aggcugguuucaaacuccugaccucaggugau

SEQ ID NO: 323516 - RNA, 32 nt, Human
aggcugguuucaaacuccugaccucauaugau

SEQ ID NO: 323517 - RNA, 32 nt, Human
aggcugguuucaaacuccugagcucaaaugau

SEQ ID NO: 323518 - RNA, 32 nt, Human
aggcugguuucgaacucccgaccucaggugau

SEQ ID NO: 323519 - RNA, 32 nt, Human
aggcugguuucgaacuccuaaccuccagugau

SEQ ID NO: 323520 - RNA, 32 nt, Human
aggcugguuucgaacuccugaccucaggugau

SEQ ID NO: 323521 - RNA, 32 nt, Human
aggcugguuucgaacuccugaccucgugaucc

SEQ ID NO: 323522 - RNA, 32 nt, Human
aggcugguuucgaacuccuggacucaagcagu

SEQ ID NO: 323523 - RNA, 32 nt, Human
aggcugguuucgaacuccuggccucaggugau

SEQ ID NO: 323524 - RNA, 32 nt, Human
aggcugguuucgaacuccugggcuuaagugau

SEQ ID NO: 323525 - RNA, 32 nt, Human
aggcugguuucgaacucggcucaagugaucua

SEQ ID NO: 323526 - RNA, 32 nt, Human
aggcugguuucgaacucuguaaucccagcacu

SEQ ID NO: 323527 - RNA, 32 nt, Human
aggcugguuucuccucuuggcccuggccuaca

SEQ ID NO: 323528 - RNA, 30 nt, Human
aggcugguuucuuucaugcuccuuacccug

SEQ ID NO: 323529 - RNA, 32 nt, Human
aggcugguuuucaacuccugaccuuaggugau

SEQ ID NO: 323530 - RNA, 32 nt, Human
aggcugguuuugaacuccugaccucaggugag

SEQ ID NO: 323531 - RNA, 32 nt, Human
aggcugguuuugaacuccuggccucaagcaau

SEQ ID NO: 323532 - RNA, 32 nt, Human
aggcugguuuugaacuccuggccucaagugau

SEQ ID NO: 323533 - RNA, 32 nt, Human
aggcugguuuugaacuccuggcuucaagcgau

SEQ ID NO: 323534 - RNA, 32 nt, Human
aggcugguuuugaacuccuugccucaaguaau

SEQ ID NO: 323535 - RNA, 32 nt, Human
aggcuguaaaauugauuguggggaagacagag

SEQ ID NO: 323536 - RNA, 32 nt, Human
aggcuguaacaugcccagaagcuguuguggcc

SEQ ID NO: 323537 - RNA, 32 nt, Human
aggcuguaagcauucugagcugggcuuguugu

SEQ ID NO: 323538 - RNA, 32 nt, Human
aggcugucacagaggcuggagaaauaagcagu

SEQ ID NO: 323539 - RNA, 32 nt, Human
aggcugucagccacacuagguaucagggaucc

SEQ ID NO: 323540 - RNA, 21 nt, Human
aggcugucagcgccucaaggg

SEQ ID NO: 323541 - RNA, 32 nt, Human
aggcugucccagcugucugaguguuuguccgg

SEQ ID NO: 323542 - RNA, 32 nt, Human
aggcuguccucccagggcugccacuaccagag

SEQ ID NO: 323543 - RNA, 32 nt, Human
aggcugucucaaacuccuggccucaagugguc

SEQ ID NO: 323544 - RNA, 18 nt, Human
aggcugucucacuuguug

SEQ ID NO: 323545 - RNA, 18 nt, Human
aggcugucucuccaggca

SEQ ID NO: 323546 - RNA, 32 nt, Human
aggcugucugcauccaccuccccagccuuugu

SEQ ID NO: 323547 - RNA, 32 nt, Human
aggcugugaacaaacauacgcugcuuuauucu

SEQ ID NO: 323548 - RNA, 24 nt, Human
aggcugugaagaagcucuaugaca

SEQ ID NO: 323549 - RNA, 32 nt, Human
aggcugugaccaacacaugugagacccagucc

SEQ ID NO: 323550 - RNA, 32 nt, Human
aggcugugagggcaguucagggccagggccca

SEQ ID NO: 323551 - RNA, 32 nt, Human
aggcugugcagggugaagagugcugcuccgug

SEQ ID NO: 323552 - RNA, 32 nt, Human
aggcugugcugggugcagaaccgccagagcca

SEQ ID NO: 323553 - RNA, 32 nt, Human
aggcugugcuuccauggagcugggugucaaga

SEQ ID NO: 323554 - RNA, 32 nt, Human
aggcuguggacacccuugccaccacuggggac

SEQ ID NO: 323555 - RNA, 32 nt, Human
aggcuguggacuuacuugccaccagcuugugc

SEQ ID NO: 323556 - RNA, 23 nt, Human
aggcuguggagcagcugaggcag

SEQ ID NO: 323557 - RNA, 32 nt, Human
aggcuguggaucuguggcgguacucugaaagc

SEQ ID NO: 323558 - RNA, 29 nt, Human
aggcuguggcugcuaugaccucuuugcug

SEQ ID NO: 323559 - RNA, 29 nt, Human
aggcuguggcugcugucauggcaccucac

SEQ ID NO: 323560 - RNA, 29 nt, Human
aggcuguggcugcugugggcccucuggaa

SEQ ID NO: 323561 - RNA, 32 nt, Human
aggcugugggaucuauuacagcugcaggccgg

SEQ ID NO: 323562 - RNA, 21 nt, Human
aggcugugggcacuguauaca

SEQ ID NO: 323563 - RNA, 32 nt, Human
aggcuguggggaggggaggagaacugcucacu

SEQ ID NO: 323564 - RNA, 32 nt, Human
aggcuguggggaggggcagaugacuugcagcu

SEQ ID NO: 323565 - RNA, 32 nt, Human
aggcuguggugcacugugaucaugccuaugag

SEQ ID NO: 323566 - RNA, 32 nt, Human
aggcugugguggcaccacugagccuagaccau

SEQ ID NO: 323567 - RNA, 32 nt, Human
aggcugugguuugaaaacugagcccagagggc

SEQ ID NO: 323568 - RNA, 32 nt, Human
aggcugugucagaaacugaagcuguucucagg

SEQ ID NO: 323569 - RNA, 32 nt, Human
aggcugugucaugggcguccuuaacuuuggga

SEQ ID NO: 323570 - RNA, 32 nt, Human
aggcugugugguuaauauugagugucaacuug

SEQ ID NO: 323571 - RNA, 21 nt, Human
aggcuguuaaccugcaagugu

SEQ ID NO: 323572 - RNA, 22 nt, Human
aggcuguuagcaggagcuaugu

SEQ ID NO: 323573 - RNA, 32 nt, Human
aggcuguuagucuaauccaacaugguguccuu

SEQ ID NO: 323574 - RNA, 23 nt, Human
aggcuguuccugaggccugacca

SEQ ID NO: 323575 - RNA, 32 nt, Human
aggcuguucuaaaacuccugaacucagguaau

SEQ ID NO: 323576 - RNA, 32 nt, Human
aggcuguucucaaacuccuggccucaggcgau

SEQ ID NO: 323577 - RNA, 32 nt, Human
aggcuguucuccaacuccugaccuuggccaaa

SEQ ID NO: 323578 - RNA, 32 nt, Human
aggcuguucucgaacuccugaccucaggugau

SEQ ID NO: 323579 - RNA, 32 nt, Human
aggcuguucuuccuccuccuagaaugucugga

SEQ ID NO: 323580 - RNA, 32 nt, Human
aggcuguucuugaacuccuggccucaaaugau

SEQ ID NO: 323581 - RNA, 32 nt, Human
aggcuguucuugaacuccuggucuccagugau

SEQ ID NO: 323582 - RNA, 32 nt, Human
aggcuguugaaagcuucacaagaccauuguua

SEQ ID NO: 323583 - RNA, 32 nt, Human
aggcuguugauucaucagagucuagcaggagg

SEQ ID NO: 323584 - RNA, 32 nt, Human
aggcuguuggacgcagccuggguggcagaggg

SEQ ID NO: 323585 - RNA, 32 nt, Human
aggcuguuggggaaggaagcugagagauccuc

SEQ ID NO: 323586 - RNA, 32 nt, Human
aggcuguugucuuuuccuucugagccugccuu

SEQ ID NO: 323587 - RNA, 32 nt, Human
aggcuguuugacuucucugcugaagugauuuc

SEQ ID NO: 323588 - RNA, 32 nt, Human
aggcuuaagauuuggaauaaagucacagaauc

SEQ ID NO: 323589 - RNA, 32 nt, Human
aggcuuacacccuucguggacaggcgaggcuc

SEQ ID NO: 323590 - RNA, 32 nt, Human
aggcuuacauggugaugccugugaccuuggag

SEQ ID NO: 323591 - RNA, 32 nt, Human
aggcuuacuacagccuccaccuucagguucaa

SEQ ID NO: 323592 - RNA, 32 nt, Human
aggcuuacugagaucaggagacagggaggccc

SEQ ID NO: 323593 - RNA, 32 nt, Human
aggcuuagaacaguguguggcagaugguaggu

SEQ ID NO: 323594 - RNA, 32 nt, Human
aggcuuagccccucugcccucccuucauugua

SEQ ID NO: 323595 - RNA, 32 nt, Human
aggcuuagcgugaaggggaaucaaagaggagg

SEQ ID NO: 323596 - RNA, 24 nt, Human
aggcuuaggcgggagaaucacuug

SEQ ID NO: 323597 - RNA, 32 nt, Human
aggcuuagggacaggaccccagcucugcgucg

SEQ ID NO: 323598 - RNA, 32 nt, Human
aggcuuaucccuucaccagcaggccuucagaa

SEQ ID NO: 323599 - RNA, 32 nt, Human
aggcuuaugauauuuaaaagacuucugcaucg

SEQ ID NO: 323600 - RNA, 32 nt, Human
aggcuuaugaucugagcaaaaugugaacuuca

SEQ ID NO: 323601 - RNA, 32 nt, Human
aggcuuaugccccgagggaaacccucacacgu

SEQ ID NO: 323602 - RNA, 32 nt, Human
aggcuuauguauggggacucaccaggggccag

SEQ ID NO: 323603 - RNA, 32 nt, Human
aggcuuauuuaccuagauugugugugaacaaa

SEQ ID NO: 323604 - RNA, 32 nt, Human
aggcuucacaagucacgagauggcaguuuugg

SEQ ID NO: 323605 - RNA, 31 nt, Human
aggcuucacagcuuaaugccaaggacagcga

SEQ ID NO: 323606 - RNA, 32 nt, Human
aggcuucacccacuggaaagaaccaccaucug

SEQ ID NO: 323607 - RNA, 32 nt, Human
aggcuucaccugcugauuagaaauguggucgg

SEQ ID NO: 323608 - RNA, 32 nt, Human
aggcuucacugccucugcuuccagcugcagcc

SEQ ID NO: 323609 - RNA, 32 nt, Human
aggcuucagccaccacacccagccucauucau

SEQ ID NO: 323610 - RNA, 32 nt, Human
aggcuucagcccugggcucugaggggaaagag

SEQ ID NO: 323611 - RNA, 19 nt, Human
aggcuucaggagcccaaga

SEQ ID NO: 323612 - RNA, 32 nt, Human
aggcuucagugagccaugaucaugccacugca

SEQ ID NO: 323613 - RNA, 32 nt, Human
aggcuucauaugcacaugcacacuguccccua

SEQ ID NO: 323614 - RNA, 24 nt, Human
aggcuucauccaggaacuagguga

SEQ ID NO: 323615 - RNA, 32 nt, Human
aggcuucaucuuaggugaggaggcaggagaga

SEQ ID NO: 323616 - RNA, 32 nt, Human
aggcuucaucuucucccuguaacugagauuuc

SEQ ID NO: 323617 - RNA, 24 nt, Human
aggcuucaugcaggaacuaaguga

SEQ ID NO: 323618 - RNA, 32 nt, Human
aggcuucaugccugcauccuccagagaccacc

SEQ ID NO: 323619 - RNA, 32 nt, Human
aggcuuccaagaaccuccagaaaccuacugga

SEQ ID NO: 323620 - RNA, 32 nt, Human
aggcuuccacugcauccuggccaggggacgga

SEQ ID NO: 323621 - RNA, 32 nt, Human
aggcuuccagaugggagacccaucucucuugu

SEQ ID NO: 323622 - RNA, 32 nt, Human
aggcuuccauguccagaauccugcuuaagguu

SEQ ID NO: 323623 - RNA, 32 nt, Human
aggcuucccaggguuggggaggcugugggacc

SEQ ID NO: 323624 - RNA, 32 nt, Human
aggcuucccuugugucucccuggaccugccug

SEQ ID NO: 323625 - RNA, 32 nt, Human
aggcuuccuaagucagaccucuugucuaaauu

SEQ ID NO: 323626 - RNA, 32 nt, Human
aggcuuccuccagcggcuggguggugaaggac

SEQ ID NO: 323627 - RNA, 23 nt, Human
aggcuuccugcuuggaguccgca

SEQ ID NO: 323628 - RNA, 32 nt, Human
aggcuuccuggacaagguaguuccccagcuga

SEQ ID NO: 323629 - RNA, 32 nt, Human
aggcuuccuucuggggagaccccacacccaag

SEQ ID NO: 323630 - RNA, 32 nt, Human
aggcuucgggcgugaacugaacuccagacccc

SEQ ID NO: 323631 - RNA, 32 nt, Human
aggcuucgggggccagccgccgccaugauccu

SEQ ID NO: 323632 - RNA, 32 nt, Human
aggcuucuacagccucuucuccaccuaagcag

SEQ ID NO: 323633 - RNA, 32 nt, Human
aggcuucucaacagaugggaaguggcuguggu

SEQ ID NO: 323634 - RNA, 32 nt, Human
aggcuucucacugcucacgaccuccgugccgg

SEQ ID NO: 323635 - RNA, 19 nt, Human
aggcuucuccccucagggg

SEQ ID NO: 323636 - RNA, 32 nt, Human
aggcuucuccugcugaguccuggucuuggccu

SEQ ID NO: 323637 - RNA, 32 nt, Human
aggcuucucugaauugugcucauuccaaauua

SEQ ID NO: 323638 - RNA, 32 nt, Human
aggcuucugaccaugucugagcucuuuacccc

SEQ ID NO: 323639 - RNA, 32 nt, Human
aggcuucugagagaugaacauacacaucucua

SEQ ID NO: 323640 - RNA, 32 nt, Human
aggcuucugaguagcuaggacuauggguacau

SEQ ID NO: 323641 - RNA, 32 nt, Human
aggcuucugaguagcugggauuauaggugcgc

SEQ ID NO: 323642 - RNA, 32 nt, Human
aggcuucugcagcuuuggcugcacgucacccu

SEQ ID NO: 323643 - RNA, 32 nt, Human
aggcuucugccuggccgccgccgccuauaagc

SEQ ID NO: 323644 - RNA, 32 nt, Human
aggcuucugggagauucugcagggucagcuuu

SEQ ID NO: 323645 - RNA, 32 nt, Human
aggcuucugggaggcuggagauccuuucucuc

SEQ ID NO: 323646 - RNA, 32 nt, Human
aggcuucuguaaucccagcuacuugggaggcu

SEQ ID NO: 323647 - RNA, 32 nt, Human
aggcuucuuccuggauggggcagagcuucucc

SEQ ID NO: 323648 - RNA, 32 nt, Human
aggcuucuugacuugccccuugugacuugaaa

SEQ ID NO: 323649 - RNA, 32 nt, Human
aggcuucuuguccaccucuucuccccugccca

SEQ ID NO: 323650 - RNA, 32 nt, Human
aggcuugacccacugcgcccagccugcaucuu

SEQ ID NO: 323651 - RNA, 32 nt, Human
aggcuugacuuugaggagaggcugugauguuu

SEQ ID NO: 323652 - RNA, 32 nt, Human
aggcuugagaucuagcaaugaacaagaucucu

SEQ ID NO: 323653 - RNA, 22 nt, Human
aggcuugagccaccgcacccgg

SEQ ID NO: 323654 - RNA, 22 nt, Human
aggcuugagccaccgcgcccgg

SEQ ID NO: 323655 - RNA, 32 nt, Human
aggcuugagccacugcaccuagccucuauuug

SEQ ID NO: 323656 - RNA, 32 nt, Human
aggcuugagcccaggagguggagguugcaaug

SEQ ID NO: 323657 - RNA, 24 nt, Human
aggcuugauuagguaaacaaagca

SEQ ID NO: 323658 - RNA, 32 nt, Human
aggcuugcagugagccaugaucaugccacugu

SEQ ID NO: 323659 - RNA, 32 nt, Human
aggcuugccauggcuagucgaggggcucggca

SEQ ID NO: 323660 - RNA, 32 nt, Human
aggcuugccccucagcucagcacuguugacca

SEQ ID NO: 323661 - RNA, 32 nt, Human
aggcuugcuaaguguguuuccugcugacuaca

SEQ ID NO: 323662 - RNA, 32 nt, Human
aggcuugcugaagaagggagaaaaagaacagc

SEQ ID NO: 323663 - RNA, 24 nt, Human
aggcuugcuuagguaaacaaagca

SEQ ID NO: 323664 - RNA, 24 nt, Human
aggcuugcuuagguaaacagagca

SEQ ID NO: 323665 - RNA, 32 nt, Human
aggcuuggaaagaggcaugugaagagcuuuaa

SEQ ID NO: 323666 - RNA, 32 nt, Human
aggcuuggaacuaguaccuacuuuaaaagaug

SEQ ID NO: 323667 - RNA, 32 nt, Human
aggcuuggaagaggaugauaaagaaaaugaua

SEQ ID NO: 323668 - RNA, 32 nt, Human
aggcuuggagagugagccaacaucaagaaggc

SEQ ID NO: 323669 - RNA, 32 nt, Human
aggcuuggcuuaguacucucaucucugguucc

SEQ ID NO: 323670 - RNA, 32 nt, Human
aggcuugggaaagaucugucagaggagccuuu

SEQ ID NO: 323671 - RNA, 32 nt, Human
aggcuugggaaggcuggcugcugcccucagcu

SEQ ID NO: 323672 - RNA, 32 nt, Human
aggcuugggaauggguugggagaggcaucugu

SEQ ID NO: 323673 - RNA, 32 nt, Human
aggcuugggaggcggggcccugcaggacguca

SEQ ID NO: 323674 - RNA, 32 nt, Human
aggcuugggauuucauuuaaauaaucuaagcc

SEQ ID NO: 323675 - RNA, 32 nt, Human
aggcuugggcuccauucccaucacugcugucc

SEQ ID NO: 323676 - RNA, 32 nt, Human
aggcuuggggcugcuccaugguggcuggucac

SEQ ID NO: 323677 - RNA, 32 nt, Human
aggcuugggggugauggaggaggacucgguaa

SEQ ID NO: 323678 - RNA, 32 nt, Human
aggcuugggugcauuugcggaagaggaauuug

SEQ ID NO: 323679 - RNA, 32 nt, Human
aggcuugggugggguuuguggugcaggcaguc

SEQ ID NO: 323680 - RNA, 32 nt, Human
aggcuuggugaguuggacucuguaaggaauuu

SEQ ID NO: 323681 - RNA, 32 nt, Human
aggcuuggugaucucugaagauggcaccaacc

SEQ ID NO: 323682 - RNA, 32 nt, Human
aggcuugguggagucaguggaacagggacaug

SEQ ID NO: 323683 - RNA, 32 nt, Human
aggcuugguuuuccugaccugcccugauucca

SEQ ID NO: 323684 - RNA, 32 nt, Human
aggcuugucucaaacuccugaccucaaaucau

SEQ ID NO: 323685 - RNA, 32 nt, Human
aggcuugucucaaacuccuggccuuaagugau

SEQ ID NO: 323686 - RNA, 32 nt, Human
aggcuugucucgaacuccugaccccaaguuau

SEQ ID NO: 323687 - RNA, 32 nt, Human
aggcuugucuggaacuccugggcucaagggau

SEQ ID NO: 323688 - RNA, 32 nt, Human
aggcuugucuugaacuccugaccuugagauau

SEQ ID NO: 323689 - RNA, 32 nt, Human
aggcuuguggccuggcuguucauggccacugc

SEQ ID NO: 323690 - RNA, 32 nt, Human
aggcuuguggucaagcaaaaauucagcccuga

SEQ ID NO: 323691 - RNA, 32 nt, Human
aggcuuuaaagugccucagggguccccugaaa

SEQ ID NO: 323692 - RNA, 32 nt, Human
aggcuuuaaggagugagagagauguguacaua

SEQ ID NO: 323693 - RNA, 32 nt, Human
aggcuuuacaacagugcuacugaccccuauga

SEQ ID NO: 323694 - RNA, 32 nt, Human
aggcuuuacaguuuaagccacagggaaagaaa

SEQ ID NO: 323695 - RNA, 32 nt, Human
aggcuuuagaaauuccuguugcagagauuuau

SEQ ID NO: 323696 - RNA, 32 nt, Human
aggcuuuagcucccagauucccaugugcuaaa

SEQ ID NO: 323697 - RNA, 32 nt, Human
aggcuuuaggaucagagagcagcagauucaaa

SEQ ID NO: 323698 - RNA, 32 nt, Human
aggcuuuauccaggugcuacagacagggugaa

SEQ ID NO: 323699 - RNA, 24 nt, Human
aggcuuucaaggguuuucuucccu

SEQ ID NO: 323700 - RNA, 32 nt, Human
aggcuuucagccagcagacaugauggggagag

SEQ ID NO: 323701 - RNA, 32 nt, Human
aggcuuucagccuugaggcaacauuggauauu

SEQ ID NO: 323702 - RNA, 32 nt, Human
aggcuuucaugcccuucucagcugcacacucc

SEQ ID NO: 323703 - RNA, 32 nt, Human
aggcuuucgggcaugacucacaccuggcacaa

SEQ ID NO: 323704 - RNA, 32 nt, Human
aggcuuucguuggagaaacagaaauaaggccu

SEQ ID NO: 323705 - RNA, 32 nt, Human
aggcuuucuccaggaggauuagcuuggaguuc

SEQ ID NO: 323706 - RNA, 22 nt, Human
aggcuuucugaggccugugcca

SEQ ID NO: 323707 - RNA, 32 nt, Human
aggcuuugaagaggaggagaugcagaagauaa

SEQ ID NO: 323708 - RNA, 32 nt, Human
aggcuuugacugggcugccugccugugagguc

SEQ ID NO: 323709 - RNA, 32 nt, Human
aggcuuugagaaccaaggcuugaaggccggca

SEQ ID NO: 323710 - RNA, 32 nt, Human
aggcuuugagggcugaagucucccuuuguuac

SEQ ID NO: 323711 - RNA, 32 nt, Human
aggcuuugcaaacugugaagugcagugccuac

SEQ ID NO: 323712 - RNA, 32 nt, Human
aggcuuugcagccugggagaccccgacuuucu

SEQ ID NO: 323713 - RNA, 32 nt, Human
aggcuuugcuguuccccagcagccugcagagg

SEQ ID NO: 323714 - RNA, 32 nt, Human
aggcuuugggaagggcuucagaauucagccug

SEQ ID NO: 323715 - RNA, 32 nt, Human
aggcuuuguauaaucccacccaccucaccaaa

SEQ ID NO: 323716 - RNA, 32 nt, Human
aggcuuugucauaauucaugcauauguugggc

SEQ ID NO: 323717 - RNA, 32 nt, Human
aggcuuugugggaaaaugaucuaaauuauugu

SEQ ID NO: 323718 - RNA, 32 nt, Human
aggcuuuuaagcaugauucacaccuggcaaaa

SEQ ID NO: 323719 - RNA, 32 nt, Human
aggcuuuucaggaugggacuucagaccaagga

SEQ ID NO: 323720 - RNA, 32 nt, Human
aggcuuuuccuuccucuuguaaguaaagcucg

SEQ ID NO: 323721 - RNA, 32 nt, Human
aggcuuuugaauggucucccucuccccagccc

SEQ ID NO: 323722 - RNA, 21 nt, Human
aggcuuuugcuacucuucacu

SEQ ID NO: 323723 - RNA, 23 nt, Human
aggcuuuuucagugaucuucacu

SEQ ID NO: 323724 - RNA, 32 nt, Human
agggaaaaaguuguaucaguaccauuugaucu

SEQ ID NO: 323725 - RNA, 32 nt, Human
agggaaaaauaggcauuuccacaguacuauua

SEQ ID NO: 323726 - RNA, 32 nt, Human
agggaaaagagcuggagguggggagagaaaga

SEQ ID NO: 323727 - RNA, 32 nt, Human
agggaaaagccaccuucccaggcacagccaua

SEQ ID NO: 323728 - RNA, 32 nt, Human
agggaaaagcuaagcugggacugaggcaugca

SEQ ID NO: 323729 - RNA, 32 nt, Human
agggaaaaggagagagcaauugaggcaguuga

SEQ ID NO: 323730 - RNA, 32 nt, Human
agggaaaaggcaaggcuuccaggccaguuggc

SEQ ID NO: 323731 - RNA, 30 nt, Human
agggaaaaggcccacagggcacagauggca

SEQ ID NO: 323732 - RNA, 20 nt, Human
agggaaaauggaggcuccag

SEQ ID NO: 323733 - RNA, 32 nt, Human
agggaaaauggcgaacgacuccccugcaaaaa

SEQ ID NO: 323734 - RNA, 32 nt, Human
agggaaaauguucauucuucaucagcuuugcu

SEQ ID NO: 323735 - RNA, 32 nt, Human
agggaaaauugcuuccucuggggaggcgaaua

SEQ ID NO: 323736 - RNA, 32 nt, Human
agggaaacacucuuuccacucuucccagacug

SEQ ID NO: 323737 - RNA, 32 nt, Human
agggaaaccacuggucucugacugccuuuccc

SEQ ID NO: 323738 - RNA, 23 nt, Human
agggaaacccugucuuuacaaaa

SEQ ID NO: 323739 - RNA, 32 nt, Human
agggaaaccugacaucucauuuucucaguguc

SEQ ID NO: 323740 - RNA, 32 nt, Human
agggaaacggcgcuccagccaaggcacggggu

SEQ ID NO: 323741 - RNA, 32 nt, Human
agggaaacugauuagauggguuguguuugugu

SEQ ID NO: 323742 - RNA, 18 nt, Human
agggaaagaaacaacuuu

SEQ ID NO: 323743 - RNA, 32 nt, Human
agggaaagaagguugcuguggugaggaacgag

SEQ ID NO: 323744 - RNA, 32 nt, Human
agggaaagagagagaauaccuacauauaaggu

SEQ ID NO: 323745 - RNA, 32 nt, Human
agggaaagaggcuugggaagaaaacagcagaa

SEQ ID NO: 323746 - RNA, 32 nt, Human
agggaaagcaagaaacuagaugccuguguggu

SEQ ID NO: 323747 - RNA, 32 nt, Human
agggaaagcuuuuuccucugggccacaugccc

SEQ ID NO: 323748 - RNA, 32 nt, Human
agggaaaggaagacagucucacagaggaaggg

SEQ ID NO: 323749 - RNA, 32 nt, Human
agggaaaggaagacuguuagaggcucuuuuga

SEQ ID NO: 323750 - RNA, 32 nt, Human
agggaaaggaagaggagugggccugaggagca

SEQ ID NO: 323751 - RNA, 32 nt, Human
agggaaaggaagaggcaaagaggagcaugcaa

SEQ ID NO: 323752 - RNA, 32 nt, Human
agggaaaggagagagaaggaaaggagugaggu

SEQ ID NO: 323753 - RNA, 32 nt, Human
agggaaaggaggagggagagagauggagagga

SEQ ID NO: 323754 - RNA, 32 nt, Human
agggaaaggcagcagcggcggcagcuggagga

SEQ ID NO: 323755 - RNA, 32 nt, Human
agggaaaggcugucccgggaccccgaggagga

SEQ ID NO: 323756 - RNA, 32 nt, Human
agggaaaggggccaggguguucccgggguugg

SEQ ID NO: 323757 - RNA, 32 nt, Human
agggaaagggguuacagagagccuccucagau

SEQ ID NO: 323758 - RNA, 32 nt, Human
agggaaaggguggaugcucucaggcugaggga

SEQ ID NO: 323759 - RNA, 32 nt, Human
agggaaaggguggucagggugaggauggugag

SEQ ID NO: 323760 - RNA, 31 nt, Human
agggaaagugagaagaaaauuaauguauuag

SEQ ID NO: 323761 - RNA, 32 nt, Human
agggaaagugaguuuugagggaggagugguga

SEQ ID NO: 323762 - RNA, 32 nt, Human
agggaaagugggugaacagaggugagaaggag

SEQ ID NO: 323763 - RNA, 32 nt, Human
agggaaaguguaaaucuagaaaugagaaaccc

SEQ ID NO: 323764 - RNA, 32 nt, Human
agggaaaguuccagcaguuucaugagaugcag

SEQ ID NO: 323765 - RNA, 32 nt, Human
agggaaaguuuagacaucugcagagaggcagg

SEQ ID NO: 323766 - RNA, 32 nt, Human
agggaaauaaaucggcuggcccuacugcaauc

SEQ ID NO: 323767 - RNA, 32 nt, Human
agggaaaucacuuccuuuaggacugaaagcua

SEQ ID NO: 323768 - RNA, 32 nt, Human
agggaaaucucucccuucauuuacuuuuucuu

SEQ ID NO: 323769 - RNA, 32 nt, Human
agggaaaugugggcaacauacauauuugacaa

SEQ ID NO: 323770 - RNA, 32 nt, Human
agggaaauguugagccaaaguuaugccugcga

SEQ ID NO: 323771 - RNA, 32 nt, Human
agggaacaaaggagcggagaggggaggggaga

SEQ ID NO: 323772 - RNA, 32 nt, Human
agggaacaacuaagguggcugaagaccuuucu

SEQ ID NO: 323773 - RNA, 32 nt, Human
agggaacacaggaggagguguaguucuuaggg

SEQ ID NO: 323774 - RNA, 32 nt, Human
agggaacaccuggcauucugugguguuucgug

SEQ ID NO: 323775 - RNA, 32 nt, Human
agggaacacuaggacaaauccaaaaagugggu

SEQ ID NO: 323776 - RNA, 25 nt, Human
agggaacacugaaagacaguuuccu

SEQ ID NO: 323777 - RNA, 32 nt, Human
agggaacagaagcaccugcaguagugacagag

SEQ ID NO: 323778 - RNA, 32 nt, Human
agggaacaggcaggaagaucagggcagaauag

SEQ ID NO: 323779 - RNA, 23 nt, Human
agggaacaggugccaccugcugg

SEQ ID NO: 323780 - RNA, 32 nt, Human
agggaacauaucauaacugcacugugaugaag

SEQ ID NO: 323781 - RNA, 32 nt, Human
agggaacauggcaaaaccccagcucuacaaaa

SEQ ID NO: 323782 - RNA, 32 nt, Human
agggaaccaucucuccugcucuccuugggaug

SEQ ID NO: 323783 - RNA, 32 nt, Human
agggaacccaggaauugugagguuagcaggaa

SEQ ID NO: 323784 - RNA, 32 nt, Human
agggaacccugagcuccaagcgugcugugcgu

SEQ ID NO: 323785 - RNA, 32 nt, Human
agggaacccuuccaccaucaugugaagaagcc

SEQ ID NO: 323786 - RNA, 32 nt, Human
agggaaccgcccccaaacuagaaagcuaauuu

SEQ ID NO: 323787 - RNA, 32 nt, Human
agggaaccugaggccuucaaacaguggccgag

SEQ ID NO: 323788 - RNA, 32 nt, Human
agggaaccugggaacccuucuccccucaccuu

SEQ ID NO: 323789 - RNA, 32 nt, Human
agggaaccuuggagcugggaaggcaggaaacc

SEQ ID NO: 323790 - RNA, 32 nt, Human
agggaacuccacugugugacaguccuuucaau

SEQ ID NO: 323791 - RNA, 32 nt, Human
agggaacugcagguggauucuguugagaggca

SEQ ID NO: 323792 - RNA, 32 nt, Human
agggaacugccugggcucccuugugcgugggu

SEQ ID NO: 323793 - RNA, 32 nt, Human
agggaacuggacugucccauggccugugagca

SEQ ID NO: 323794 - RNA, 32 nt, Human
agggaacugggaagagaaggaggggaacuuaa

SEQ ID NO: 323795 - RNA, 32 nt, Human
agggaacuuggucacucggcacuuuuaagccu

SEQ ID NO: 323796 - RNA, 32 nt, Human
agggaagaaaugcagcaguauggaggcaaaag

SEQ ID NO: 323797 - RNA, 32 nt, Human
agggaagacgagaagagacaggccaggcccaa

SEQ ID NO: 323798 - RNA, 32 nt, Human
agggaagacgcugaggaggaggaggaggcgga

SEQ ID NO: 323799 - RNA, 32 nt, Human
agggaagacggccaaggcugggcccagaauau

SEQ ID NO: 323800 - RNA, 32 nt, Human
agggaagagaaagcaggcccagcuggagauuu

SEQ ID NO: 323801 - RNA, 22 nt, Human
agggaagagaaggaggcucacc

SEQ ID NO: 323802 - RNA, 32 nt, Human
agggaagagaauuggugcugcagaaguguacc

SEQ ID NO: 323803 - RNA, 19 nt, Human
agggaagagagaccagaga

SEQ ID NO: 323804 - RNA, 32 nt, Human
agggaagagaguagaguacuuucuccaagucc

SEQ ID NO: 323805 - RNA, 32 nt, Human
agggaagaggagaggaaggggagccggaccga

SEQ ID NO: 323806 - RNA, 32 nt, Human
agggaagagguagaggaugagaggaugaagag

SEQ ID NO: 323807 - RNA, 32 nt, Human
agggaagauauaugaauaucuuggccacagaa

SEQ ID NO: 323808 - RNA, 32 nt, Human
agggaagaucccggaggaagagugggaauuca

SEQ ID NO: 323809 - RNA, 32 nt, Human
agggaagcaaaagcuguuucuccucccagaga

SEQ ID NO: 323810 - RNA, 32 nt, Human
agggaagcaagaguaggguuguggaaagacca

SEQ ID NO: 323811 - RNA, 32 nt, Human
agggaagcaaucagaggaaaucuccugaaagg

SEQ ID NO: 323812 - RNA, 32 nt, Human
agggaagcaaugcagaaaucagagggcucugg

SEQ ID NO: 323813 - RNA, 32 nt, Human
agggaagcacaggccucggccucccagcuccc

SEQ ID NO: 323814 - RNA, 32 nt, Human
agggaagcagaggaugugagaggcagaggcag

SEQ ID NO: 323815 - RNA, 32 nt, Human
agggaagcagaugccagcguucucugcugaaa

SEQ ID NO: 323816 - RNA, 32 nt, Human
agggaagcaggaacucguggugccucaaggaa

SEQ ID NO: 323817 - RNA, 32 nt, Human
agggaagcaggggaggcggaaaaauagaguuu

SEQ ID NO: 323818 - RNA, 32 nt, Human
agggaagcagugaggaaagaugaggcaucgug

SEQ ID NO: 323819 - RNA, 32 nt, Human
agggaagccaucaucuaacaccucuggccacc

SEQ ID NO: 323820 - RNA, 32 nt, Human
agggaagcccagggaagagagggacuccuggu

SEQ ID NO: 323821 - RNA, 32 nt, Human
agggaagccgggcagcagaggaguacuugaag

SEQ ID NO: 323822 - RNA, 19 nt, Human
agggaagccugggggccag

SEQ ID NO: 323823 - RNA, 32 nt, Human
agggaagcguuucucaccccuuaacucacagc

SEQ ID NO: 323824 - RNA, 32 nt, Human
agggaagcugggaaguuaaggcugcaggcucc

SEQ ID NO: 323825 - RNA, 32 nt, Human
agggaagcugguugaagcccuggaccuguuug

SEQ ID NO: 323826 - RNA, 32 nt, Human
agggaagcuguacaaaacugagguggucaggu

SEQ ID NO: 323827 - RNA, 32 nt, Human
agggaagcuguggaggcaggcccuaccaagag

SEQ ID NO: 323828 - RNA, 32 nt, Human
agggaaggaaagaacuugcauguuggugaagg

SEQ ID NO: 323829 - RNA, 32 nt, Human
agggaaggaacgggaaaggugguucugaagga

SEQ ID NO: 323830 - RNA, 32 nt, Human
agggaaggaaggaagagagggaggcgggcaag

SEQ ID NO: 323831 - RNA, 32 nt, Human
agggaaggaaggagggcagguggcccuuugac

SEQ ID NO: 323832 - RNA, 32 nt, Human
agggaaggaauagaacgaggaguucaaucugu

SEQ ID NO: 323833 - RNA, 32 nt, Human
agggaaggaccucacuuguuucaucaaaugga

SEQ ID NO: 323834 - RNA, 32 nt, Human
agggaaggagagaagaguuccaggcaauccca

SEQ ID NO: 323835 - RNA, 32 nt, Human
agggaaggagaggagggauggagaagcucugc

SEQ ID NO: 323836 - RNA, 32 nt, Human
agggaaggagaggugucaggccuugucugcug

SEQ ID NO: 323837 - RNA, 32 nt, Human
agggaaggagcccggcccugccuugucagcgc

SEQ ID NO: 323838 - RNA, 32 nt, Human
agggaaggaggcaggggugcugagaaggcggc

SEQ ID NO: 323839 - RNA, 32 nt, Human
agggaaggaggcgguguucccccuggccugac

SEQ ID NO: 323840 - RNA, 32 nt, Human
agggaaggaggcuuggaggaggugagagugga

SEQ ID NO: 323841 - RNA, 32 nt, Human
agggaaggagggagaggaaggcaggggaguug

SEQ ID NO: 323842 - RNA, 32 nt, Human
agggaaggaugccucggagcugagguggggug

SEQ ID NO: 323843 - RNA, 32 nt, Human
agggaaggcccgucaugucccugcacucuguu

SEQ ID NO: 323844 - RNA, 32 nt, Human
agggaaggcgagaagagggaggagacacuggu

SEQ ID NO: 323845 - RNA, 32 nt, Human
agggaaggcgcgagugaggaaaggagguacug

SEQ ID NO: 323846 - RNA, 32 nt, Human
agggaagggaaagcacuggggugggggagcag

SEQ ID NO: 323847 - RNA, 32 nt, Human
agggaagggaaaguggcuggaaguugacuuaa

SEQ ID NO: 323848 - RNA, 32 nt, Human
agggaagggaacacaucccagccacagccagg

SEQ ID NO: 323849 - RNA, 32 nt, Human
agggaagggaggauggcuggggccaggggucu

SEQ ID NO: 323850 - RNA, 32 nt, Human
agggaagggaggugggcagcagugggucagag

SEQ ID NO: 323851 - RNA, 32 nt, Human
agggaagggaguaggaaaagaaaagcauuuuu

SEQ ID NO: 323852 - RNA, 32 nt, Human
agggaagggaguggagcaggcagugaggagag

SEQ ID NO: 323853 - RNA, 21 nt, Human
agggaagggcagaagcuuccu

SEQ ID NO: 323854 - RNA, 32 nt, Human
agggaagggccagauaggcaacuucauuuggc

SEQ ID NO: 323855 - RNA, 32 nt, Human
agggaagggcucagcuucccaccccacguaca

SEQ ID NO: 323856 - RNA, 32 nt, Human
agggaagggcuggccgcucacugcuugggccc

SEQ ID NO: 323857 - RNA, 32 nt, Human
agggaagggcugggaagagacagccuccaagg

SEQ ID NO: 323858 - RNA, 32 nt, Human
agggaagggcugggaugcugggaccuguuguu

SEQ ID NO: 323859 - RNA, 32 nt, Human
agggaagggcuggggugugaaaaagaagauug

SEQ ID NO: 323860 - RNA, 31 nt, Human
agggaaggggagagagaaggaauggggagug

SEQ ID NO: 323861 - RNA, 32 nt, Human
agggaaggggaguuggaacaaaugucuguucc

SEQ ID NO: 323862 - RNA, 32 nt, Human
agggaaggggaugucaucggggguccaggaaa

SEQ ID NO: 323863 - RNA, 22 nt, Human
agggaaggggcucccacugcuu

SEQ ID NO: 323864 - RNA, 32 nt, Human
agggaaggggcugggggaaccaggaaggaagc

SEQ ID NO: 323865 - RNA, 32 nt, Human
agggaagggggaaauggagggggaagagagga

SEQ ID NO: 323866 - RNA, 32 nt, Human
agggaagggggaggaggaggaggaucaugaag

SEQ ID NO: 323867 - RNA, 32 nt, Human
agggaagggguaggaaaggcacucugggcaga

SEQ ID NO: 323868 - RNA, 19 nt, Human
agggaaggguagccaggga

SEQ ID NO: 323869 - RNA, 32 nt, Human
agggaagggugguggagccaguaaacagagga

SEQ ID NO: 323870 - RNA, 32 nt, Human
agggaagguguuuugugcuucucagauguugc

SEQ ID NO: 323871 - RNA, 32 nt, Human
agggaagguuggcagagggauccaugugacug

SEQ ID NO: 323872 - RNA, 32 nt, Human
agggaaguaucucccggccaucuuguugcucu

SEQ ID NO: 323873 - RNA, 16 nt, Human
agggaagucuccgccc

SEQ ID NO: 323874 - RNA, 32 nt, Human
agggaagucuccgcccugauuggaugaggaaa

SEQ ID NO: 323875 - RNA, 32 nt, Human
agggaagucugccuggugaggcuggcaggugg

SEQ ID NO: 323876 - RNA, 32 nt, Human
agggaauaaaggcucagggaccggcaguucua

SEQ ID NO: 323877 - RNA, 32 nt, Human
agggaauaaauacaaagauggaaagccaguaa

SEQ ID NO: 323878 - RNA, 32 nt, Human
agggaauagaaauguacaaucaagagaauuca

SEQ ID NO: 323879 - RNA, 32 nt, Human
agggaauaguauugcagggaagacugagaaaa

SEQ ID NO: 323880 - RNA, 31 nt, Human
agggaauaguuucagugacauuaugucauug

SEQ ID NO: 323881 - RNA, 32 nt, Human
agggaaucacuacaggcugguuagccaaaaag

SEQ ID NO: 323882 - RNA, 32 nt, Human
agggaauccaaucaauaaaauugaagacuggc

SEQ ID NO: 323883 - RNA, 17 nt, Human
agggaaucgacugaaga

SEQ ID NO: 323884 - RNA, 32 nt, Human
agggaaucggaauaacuccagcaaggaaaugg

SEQ ID NO: 323885 - RNA, 32 nt, Human
agggaaucuccccagccgacuuccacugggcu

SEQ ID NO: 323886 - RNA, 32 nt, Human
agggaaucucuugccugcuccaucucauaggc

SEQ ID NO: 323887 - RNA, 32 nt, Human
agggaaugaaacacccucaccccuucaaaguc

SEQ ID NO: 323888 - RNA, 32 nt, Human
agggaaugaaauggaaagggaggcugauuccc

SEQ ID NO: 323889 - RNA, 30 nt, Human
agggaaugccccggagggcggagaacuggg

SEQ ID NO: 323890 - RNA, 32 nt, Human
agggaaugcuuugcuugaggccacacagcagg

SEQ ID NO: 323891 - RNA, 32 nt, Human
agggaauggaaaggaauggaaagauuuguugg

SEQ ID NO: 323892 - RNA, 32 nt, Human
agggaauggagcagcugccugcaccaagcuuc

SEQ ID NO: 323893 - RNA, 32 nt, Human
agggaaugggagaagaugggagcuaagaaugu

SEQ ID NO: 323894 - RNA, 32 nt, Human
agggaauggggagggggaaguagagcugagaa

SEQ ID NO: 323895 - RNA, 32 nt, Human
agggaauggggugggagaugugggggaauggu

SEQ ID NO: 323896 - RNA, 32 nt, Human
agggaauggggugggagucgggggaagugcag

SEQ ID NO: 323897 - RNA, 32 nt, Human
agggaauguaugggagauggugaggggugcca

SEQ ID NO: 323898 - RNA, 32 nt, Human
agggaaugugagacaacacaauauugcugugg

SEQ ID NO: 323899 - RNA, 32 nt, Human
agggaauuaagggcagauaauacacauagaua

SEQ ID NO: 323900 - RNA, 32 nt, Human
agggaauucacaggacccccugagaagagcca

SEQ ID NO: 323901 - RNA, 32 nt, Human
agggaauuccuauaauuguguggaauguggca

SEQ ID NO: 323902 - RNA, 32 nt, Human
agggaauugcugucuggucaucaucuauuguu

SEQ ID NO: 323903 - RNA, 32 nt, Human
agggaauuuaaguaacuugcucaauaucacuc

SEQ ID NO: 323904 - RNA, 32 nt, Human
agggacaaaaggacccagaaguagaagaaugg

SEQ ID NO: 323905 - RNA, 24 nt, Human
agggacaaaauuugguuaauuuuu

SEQ ID NO: 323906 - RNA, 32 nt, Human
agggacaaaugccucccuucccugcagcuucc

SEQ ID NO: 323907 - RNA, 32 nt, Human
agggacaagcaagcccaugucuugccagcuuc

SEQ ID NO: 323908 - RNA, 32 nt, Human
agggacaauaagcuagagacccugccagcauc

SEQ ID NO: 323909 - RNA, 32 nt, Human
agggacaaugccaagaccagaucuaagacccc

SEQ ID NO: 323910 - RNA, 23 nt, Human
agggacaauggugggcaguugcu

SEQ ID NO: 323911 - RNA, 32 nt, Human
agggacacaaggacuugggugcaucaggacgc

SEQ ID NO: 323912 - RNA, 22 nt, Human
agggacacacacgacacaggga

SEQ ID NO: 323913 - RNA, 19 nt, Human
agggacacacagccaggaa

SEQ ID NO: 323914 - RNA, 32 nt, Human
agggacacacagccuagcacagcagcuuauaa

SEQ ID NO: 323915 - RNA, 32 nt, Human
agggacaccaagcaggaggugccggguaagcu

SEQ ID NO: 323916 - RNA, 32 nt, Human
agggacacccccagugccuggauuacgggccc

SEQ ID NO: 323917 - RNA, 32 nt, Human
agggacaccucaguuguccucccgcgggcccu

SEQ ID NO: 323918 - RNA, 32 nt, Human
agggacaccucccggguucaagcaguucuccu

SEQ ID NO: 323919 - RNA, 23 nt, Human
agggacacgagggcaacccugug

SEQ ID NO: 323920 - RNA, 32 nt, Human
agggacacugaugccacagcuccugggccggc

SEQ ID NO: 323921 - RNA, 32 nt, Human
agggacacuggcagcuguggaaaugaaugagg

SEQ ID NO: 323922 - RNA, 16 nt, Human
agggacacugggcugg

SEQ ID NO: 323923 - RNA, 23 nt, Human
agggacacuuagggccacagagg

SEQ ID NO: 323924 - RNA, 32 nt, Human
agggacagaaauugugcauucaaggagcuugg

SEQ ID NO: 323925 - RNA, 32 nt, Human
agggacagagcagaggggccagggacugagug

SEQ ID NO: 323926 - RNA, 32 nt, Human
agggacagagcccgggagagacucgcucacuc

SEQ ID NO: 323927 - RNA, 32 nt, Human
agggacagagccucuuucucugagaacuacca

SEQ ID NO: 323928 - RNA, 32 nt, Human
agggacagaggccagcagaggagccagcuuac

SEQ ID NO: 323929 - RNA, 32 nt, Human
agggacagagggcuguaccuaacgcucacgca

SEQ ID NO: 323930 - RNA, 32 nt, Human
agggacagaguuucaccauguuggccaggcug

SEQ ID NO: 323931 - RNA, 32 nt, Human
agggacagaguuuugcuauguugcccagauug

SEQ ID NO: 323932 - RNA, 32 nt, Human
agggacagaugugugggagugcagggcugcag

SEQ ID NO: 323933 - RNA, 32 nt, Human
agggacagcagcaccacuccagccucagagac

SEQ ID NO: 323934 - RNA, 32 nt, Human
agggacagccuccagguagagcuguucgccgg

SEQ ID NO: 323935 - RNA, 32 nt, Human
agggacagcguccccuuccagcgggggcagcc

SEQ ID NO: 323936 - RNA, 21 nt, Human
agggacagcuggcuacaggga

SEQ ID NO: 323937 - RNA, 32 nt, Human
agggacaggaaggacaggggaugccugaccug

SEQ ID NO: 323938 - RNA, 32 nt, Human
agggacaggaguuggauggagagcagacugua

SEQ ID NO: 323939 - RNA, 32 nt, Human
agggacaggcccuuccccuccucaugucuccu

SEQ ID NO: 323940 - RNA, 32 nt, Human
agggacaggcugaagagagggacaggcacucc

SEQ ID NO: 323941 - RNA, 32 nt, Human
agggacagggaaauaaauggugccugggauga

SEQ ID NO: 323942 - RNA, 32 nt, Human
agggacagggagugggcaaggggaagaagcag

SEQ ID NO: 323943 - RNA, 32 nt, Human
agggacagggcagaggggacccugccacagcu

SEQ ID NO: 323944 - RNA, 32 nt, Human
agggacaggggcccuuccaaagagcaggacuc

SEQ ID NO: 323945 - RNA, 32 nt, Human
agggacagggucuugcucuguugccaaguuaa

SEQ ID NO: 323946 - RNA, 32 nt, Human
agggacagggucuugcucuguugcccaggcug

SEQ ID NO: 323947 - RNA, 32 nt, Human
agggacaggguucugguucuggcucaaccuug

SEQ ID NO: 323948 - RNA, 22 nt, Human
agggacagguacaaacaacuuc

SEQ ID NO: 323949 - RNA, 27 nt, Human
agggacagguccccacggccacaggga

SEQ ID NO: 323950 - RNA, 32 nt, Human
agggacaguaggcggaggaccaggugacggca

SEQ ID NO: 323951 - RNA, 32 nt, Human
agggacaguuacuuaacucaggaaaagcaacc

SEQ ID NO: 323952 - RNA, 32 nt, Human
agggacaguuaucugggagagguggaggaggg

SEQ ID NO: 323953 - RNA, 32 nt, Human
agggacaucgggggcaaguuugcaguggggcc

SEQ ID NO: 323954 - RNA, 32 nt, Human
agggacaugaugaagagguuggugagcgucug

SEQ ID NO: 323955 - RNA, 32 nt, Human
agggacaugauggggaaggaguacaaaacaau

SEQ ID NO: 323956 - RNA, 32 nt, Human
agggacaugcuguccucugcuccuggguguac

SEQ ID NO: 323957 - RNA, 32 nt, Human
agggacauggcacgggcaccugcucugucugg

SEQ ID NO: 323958 - RNA, 23 nt, Human
agggacauggcagggccugggca

SEQ ID NO: 323959 - RNA, 32 nt, Human
agggacauggguggaaugauggcagaauccag

SEQ ID NO: 323960 - RNA, 32 nt, Human
agggacauuuaagaguuggaggugcaaauaua

SEQ ID NO: 323961 - RNA, 32 nt, Human
agggaccaagaccacacucgggcugcuuggac

SEQ ID NO: 323962 - RNA, 22 nt, Human
agggaccaagugggggagccug

SEQ ID NO: 323963 - RNA, 32 nt, Human
agggaccacaaacauggaggccacgggcucua

SEQ ID NO: 323964 - RNA, 32 nt, Human
agggaccaccugcaccaggcacuuuucuccuc

SEQ ID NO: 323965 - RNA, 32 nt, Human
agggaccacucuggcuucugugcauccaccca

SEQ ID NO: 323966 - RNA, 32 nt, Human
agggaccagaagcgggagcugagcgcagggga

SEQ ID NO: 323967 - RNA, 32 nt, Human
agggaccagaccgggagguguuucugggcggg

SEQ ID NO: 323968 - RNA, 32 nt, Human
agggaccagagggagccaggcagcuguguaca

SEQ ID NO: 323969 - RNA, 32 nt, Human
agggaccagagggaggaggccgggagcagcga

SEQ ID NO: 323970 - RNA, 25 nt, Human
agggaccagauguguccugccucau

SEQ ID NO: 323971 - RNA, 32 nt, Human
agggaccagcuggaacuggacaggcugaaaga

SEQ ID NO: 323972 - RNA, 32 nt, Human
agggaccaggccaaaaccagacugccacugcc

SEQ ID NO: 323973 - RNA, 32 nt, Human
agggaccagggcaggcagaggucuuccugccu

SEQ ID NO: 323974 - RNA, 32 nt, Human
agggaccagggugggagagcugauugcagaaa

SEQ ID NO: 323975 - RNA, 31 nt, Human
agggaccaguuucacuuuuagcaccuacccu

SEQ ID NO: 323976 - RNA, 32 nt, Human
agggacccagaagagccuggagauguuggugc

SEQ ID NO: 323977 - RNA, 32 nt, Human
agggacccagggcauugggggaagggaggcga

SEQ ID NO: 323978 - RNA, 32 nt, Human
agggacccaguguacccagccucuggccucgu

SEQ ID NO: 323979 - RNA, 32 nt, Human
agggaccccugccacuguccccugcugcagca

SEQ ID NO: 323980 - RNA, 32 nt, Human
agggaccccugccccugucugccagcagaggc

SEQ ID NO: 323981 - RNA, 32 nt, Human
agggaccccugcccuugucccacucaagccaa

SEQ ID NO: 323982 - RNA, 32 nt, Human
agggacccgacucugucucuucugcuggaaac

SEQ ID NO: 323983 - RNA, 32 nt, Human
agggacccggcccugcccugccgcccgcugac

SEQ ID NO: 323984 - RNA, 32 nt, Human
agggacccucaaggaccucgagguuacugcag

SEQ ID NO: 323985 - RNA, 32 nt, Human
agggacccucagaaggcagcagugaugcggac

SEQ ID NO: 323986 - RNA, 32 nt, Human
agggacccuccaccaccucuuugggccuggcu

SEQ ID NO: 323987 - RNA, 32 nt, Human
agggacccuccagaaacacaguguuucaagag

SEQ ID NO: 323988 - RNA, 32 nt, Human
agggacccugcucuggcugugacugcuuuauc

SEQ ID NO: 323989 - RNA, 21 nt, Human
agggacccuggagcccuggga

SEQ ID NO: 323990 - RNA, 32 nt, Human
agggaccgagugagccacuccuugucccgagc

SEQ ID NO: 323991 - RNA, 32 nt, Human
agggaccgccugggugaggugaggaccuggug

SEQ ID NO: 323992 - RNA, 22 nt, Human
agggaccgcggggcagcccccu

SEQ ID NO: 323993 - RNA, 32 nt, Human
agggaccgcuugcugccgaggcugccaccuca

SEQ ID NO: 323994 - RNA, 32 nt, Human
agggaccggcagagcucuacaggccugcagcc

SEQ ID NO: 323995 - RNA, 32 nt, Human
agggaccgggccuggaaagggggugaagggaa

SEQ ID NO: 323996 - RNA, 32 nt, Human
agggaccuaccugagccaccguccuagccaag

SEQ ID NO: 323997 - RNA, 32 nt, Human
agggaccuacugaacccagagucaggaagaga

SEQ ID NO: 323998 - RNA, 32 nt, Human
agggaccucaacuacacugaucaccagcccca

SEQ ID NO: 323999 - RNA, 32 nt, Human
agggaccucaaggagcuaugaacauagaaacc

SEQ ID NO: 324000 - RNA, 32 nt, Human
agggaccucugacugcucugggccaaagaauc

SEQ ID NO: 324001 - RNA, 32 nt, Human
agggaccucugccuucucccacaccccuuaca

SEQ ID NO: 324002 - RNA, 32 nt, Human
agggaccugaguaacuggugguguguagcagg

SEQ ID NO: 324003 - RNA, 32 nt, Human
agggaccugagucaucgcacacaugagccugu

SEQ ID NO: 324004 - RNA, 32 nt, Human
agggaccugccaccccuucccucccuccgcag

SEQ ID NO: 324005 - RNA, 32 nt, Human
agggaccugcucccauuuucuuuccuagugga

SEQ ID NO: 324006 - RNA, 32 nt, Human
agggaccuggaacccucuuggccaaggggagu

SEQ ID NO: 324007 - RNA, 24 nt, Human
agggaccuuaccagauucguguca

SEQ ID NO: 324008 - RNA, 32 nt, Human
agggaccuuagcaaucaucucauccauuuccc

SEQ ID NO: 324009 - RNA, 32 nt, Human
agggaccuuuggcugcuuucucuccuuaaacu

SEQ ID NO: 324010 - RNA, 32 nt, Human
agggacgaggggcuggcucucaguccccgccu

SEQ ID NO: 324011 - RNA, 32 nt, Human
agggacgauccuuguucucugcuguaaacugu

SEQ ID NO: 324012 - RNA, 32 nt, Human
agggacgccaaagagagguugcagucagaacc

SEQ ID NO: 324013 - RNA, 32 nt, Human
agggacgccaagcagacacaccugcccucccc

SEQ ID NO: 324014 - RNA, 32 nt, Human
agggacgcccaggguggggaggaagagucugc

SEQ ID NO: 324015 - RNA, 32 nt, Human
agggacgcgaauaaguuugcuccuucauauaa

SEQ ID NO: 324016 - RNA, 19 nt, Human
agggacgcugagcggucgc

SEQ ID NO: 324017 - RNA, 32 nt, Human
agggacggaaucaaucgugugaccgaugggcu

SEQ ID NO: 324018 - RNA, 32 nt, Human
agggacggagccaagauggcggcggccgacgg

SEQ ID NO: 324019 - RNA, 32 nt, Human
agggacggaggacccaggcuggcuggggacug

SEQ ID NO: 324020 - RNA, 32 nt, Human
agggacggccucuccccuccuaccugccaccg

SEQ ID NO: 324021 - RNA, 32 nt, Human
agggacggggaggggagccaggacccaggagc

SEQ ID NO: 324022 - RNA, 32 nt, Human
agggacgggguuacaccauguuggccaggcug

SEQ ID NO: 324023 - RNA, 32 nt, Human
agggacgggguuucaccguguuagccaggaug

SEQ ID NO: 324024 - RNA, 32 nt, Human
agggacgggguuucaucauguuggccagacug

SEQ ID NO: 324025 - RNA, 32 nt, Human
agggacgguacccgcuucugccaccuccugga

SEQ ID NO: 324026 - RNA, 21 nt, Human
agggacggucaccauuccuga

SEQ ID NO: 324027 - RNA, 23 nt, Human
agggacggugacacacacagaga

SEQ ID NO: 324028 - RNA, 32 nt, Human
agggacguguggggacaggugcaccggaaacu

SEQ ID NO: 324029 - RNA, 32 nt, Human
agggacguuuuugcuuucuucccuuuuugacc

SEQ ID NO: 324030 - RNA, 32 nt, Human
agggacuaaccagaccugccacccuggcugcc

SEQ ID NO: 324031 - RNA, 32 nt, Human
agggacuaccuaaaccccuguccaucucugac

SEQ ID NO: 324032 - RNA, 32 nt, Human
agggacuagaucagaagagaucaagggcugua

SEQ ID NO: 324033 - RNA, 32 nt, Human
agggacuagggagggaggcagggaacguuuuu

SEQ ID NO: 324034 - RNA, 32 nt, Human
agggacuagggagggagggagggaaggcagag

SEQ ID NO: 324035 - RNA, 32 nt, Human
agggacuaucagagaugcaaaaauuacuucaa

SEQ ID NO: 324036 - RNA, 32 nt, Human
agggacucaaagcuguacccaaaucaagaaag

SEQ ID NO: 324037 - RNA, 22 nt, Human
agggacuccaaguucaucauca

SEQ ID NO: 324038 - RNA, 22 nt, Human
agggacuccuggggacacuccc

SEQ ID NO: 324039 - RNA, 22 nt, Human
agggacucggagguccacagca

SEQ ID NO: 324040 - RNA, 32 nt, Human
agggacucgggacugaaggucuccuggaagcu

SEQ ID NO: 324041 - RNA, 16 nt, Human
agggacucuccagccu

SEQ ID NO: 324042 - RNA, 32 nt, Human
agggacucuccccucacccccaccuuuuccuu

SEQ ID NO: 324043 - RNA, 32 nt, Human
agggacucuccucagcacaacaucucuaagug

SEQ ID NO: 324044 - RNA, 32 nt, Human
agggacucucucccguccccacccuauucuca

SEQ ID NO: 324045 - RNA, 32 nt, Human
agggacucugccucuuggaguuugguagcuac

SEQ ID NO: 324046 - RNA, 32 nt, Human
agggacucuggacuccauuccuccaggagcug

SEQ ID NO: 324047 - RNA, 32 nt, Human
agggacugaccagcuagcuaggagagcugaga

SEQ ID NO: 324048 - RNA, 32 nt, Human
agggacugacuccagcccuuggacucaggaca

SEQ ID NO: 324049 - RNA, 32 nt, Human
agggacugacucugggcgucucugaagauggc

SEQ ID NO: 324050 - RNA, 22 nt, Human
agggacugaggggaacccuggg

SEQ ID NO: 324051 - RNA, 32 nt, Human
agggacugauuuuuauaggaaaggaggaaaaa

SEQ ID NO: 324052 - RNA, 32 nt, Human
agggacugcccaggacugaguccauauggaag

SEQ ID NO: 324053 - RNA, 32 nt, Human
agggacugcuaaggaagaggcugcauggcgcg

SEQ ID NO: 324054 - RNA, 32 nt, Human
agggacuggcacacuggccuccagaagggcag

SEQ ID NO: 324055 - RNA, 32 nt, Human
agggacuggccagggcacccugugcugcaggg

SEQ ID NO: 324056 - RNA, 32 nt, Human
agggacuggggagcacucacuucacuugugug

SEQ ID NO: 324057 - RNA, 32 nt, Human
agggacuggggaggggaggggaggggcgggau

SEQ ID NO: 324058 - RNA, 32 nt, Human
agggacugguugccaugagagcagccgucuga

SEQ ID NO: 324059 - RNA, 32 nt, Human
agggacugugguggugggcaucacgccugguc

SEQ ID NO: 324060 - RNA, 32 nt, Human
agggacuguguguugccacaggacacagucag

SEQ ID NO: 324061 - RNA, 32 nt, Human
agggacuuagaaacuugccugagaugguggac

SEQ ID NO: 324062 - RNA, 32 nt, Human
agggacuucucccgcaccccacucugucccag

SEQ ID NO: 324063 - RNA, 25 nt, Human
agggacuugccuugccucagaugaa

SEQ ID NO: 324064 - RNA, 32 nt, Human
agggacuugggaccugggagaauggggcugag

SEQ ID NO: 324065 - RNA, 32 nt, Human
agggacuuugccuauuaagucuaccaaauuaa

SEQ ID NO: 324066 - RNA, 32 nt, Human
agggacuuugccugcccagucuuuggagagcu

SEQ ID NO: 324067 - RNA, 32 nt, Human
agggagaaagagggaggaagagagggagggag

SEQ ID NO: 324068 - RNA, 32 nt, Human
agggagaaaggauggccggccuggcggcgcgg

SEQ ID NO: 324069 - RNA, 32 nt, Human
agggagaacagcuucucucaccccugagccuu

SEQ ID NO: 324070 - RNA, 22 nt, Human
agggagaaggcagcacacugcu

SEQ ID NO: 324071 - RNA, 32 nt, Human
agggagaaggcaggccucaggauugugcggag

SEQ ID NO: 324072 - RNA, 32 nt, Human
agggagaagggaaggaaggaaagaagagagga

SEQ ID NO: 324073 - RNA, 32 nt, Human
agggagaagggagaggaaugaauugaggaagu

SEQ ID NO: 324074 - RNA, 32 nt, Human
agggagaagggauggagcaggagcgggcuaag

SEQ ID NO: 324075 - RNA, 32 nt, Human
agggagaagucaggcccugccucuccagggua

SEQ ID NO: 324076 - RNA, 32 nt, Human
agggagaagucugcaagaugucaagggccaag

SEQ ID NO: 324077 - RNA, 32 nt, Human
agggagaaugagaaagagagggacagagagau

SEQ ID NO: 324078 - RNA, 32 nt, Human
agggagacagaagucuaggcccagggauggcu

SEQ ID NO: 324079 - RNA, 32 nt, Human
agggagacagacagagguugcagugagccgag

SEQ ID NO: 324080 - RNA, 32 nt, Human
agggagacagcagaagaaagaaagagagagaa

SEQ ID NO: 324081 - RNA, 32 nt, Human
agggagaccacauucccucccuugguugccac

SEQ ID NO: 324082 - RNA, 32 nt, Human
agggagaccagccugaccaauauggagaaauc

SEQ ID NO: 324083 - RNA, 23 nt, Human
agggagaccccaucucuacagaa

SEQ ID NO: 324084 - RNA, 23 nt, Human
agggagaccccaucucuaugaaa

SEQ ID NO: 324085 - RNA, 24 nt, Human
agggagacccccaucucuacaaaa

SEQ ID NO: 324086 - RNA, 23 nt, Human
agggagaccccgucucuacaaaa

SEQ ID NO: 324087 - RNA, 23 nt, Human
agggagaccccgucucuauaaaa

SEQ ID NO: 324088 - RNA, 22 nt, Human
agggagacccgugucgacaaaa

SEQ ID NO: 324089 - RNA, 23 nt, Human
agggagacccugucccuacaaaa

SEQ ID NO: 324090 - RNA, 23 nt, Human
agggagacccugucucuacagaa

SEQ ID NO: 324091 - RNA, 23 nt, Human
agggagacccugucucugcaaaa

SEQ ID NO: 324092 - RNA, 32 nt, Human
agggagaccgggaggaucacagagccagcaug

SEQ ID NO: 324093 - RNA, 32 nt, Human
agggagaccguggguuccgaaaaucccuggau

SEQ ID NO: 324094 - RNA, 32 nt, Human
agggagacggaucugggcuccgggagggacgc

SEQ ID NO: 324095 - RNA, 32 nt, Human
agggagacggcuagggcagcaagugaaggaca

SEQ ID NO: 324096 - RNA, 22 nt, Human
agggagacucaucucuacaaaa

SEQ ID NO: 324097 - RNA, 22 nt, Human
agggagacucugucaugucuga

SEQ ID NO: 324098 - RNA, 32 nt, Human
agggagacuuuccuccgauguuuauuuagcug

SEQ ID NO: 324099 - RNA, 32 nt, Human
agggagacuuuggcaacagauaacuagccuca

SEQ ID NO: 324100 - RNA, 32 nt, Human
agggagagaaaagauuuugaguuaaggucauu

SEQ ID NO: 324101 - RNA, 32 nt, Human
agggagagaccccagagagcuuguucccuccc

SEQ ID NO: 324102 - RNA, 32 nt, Human
agggagagagaggaagaagggacucgauccag

SEQ ID NO: 324103 - RNA, 32 nt, Human
agggagagagggagagugacagcagcgcucgc

SEQ ID NO: 324104 - RNA, 32 nt, Human
agggagagagggagagugacagcagcgcucgg

SEQ ID NO: 324105 - RNA, 32 nt, Human
agggagagagggaggaaggaagaaggugcaaa

SEQ ID NO: 324106 - RNA, 32 nt, Human
agggagagagggagggagagagagugaaagaa

SEQ ID NO: 324107 - RNA, 32 nt, Human
agggagagagggaggggaggaaauuggagacc

SEQ ID NO: 324108 - RNA, 32 nt, Human
agggagagaggugggaggucagaggagauggg

SEQ ID NO: 324109 - RNA, 32 nt, Human
agggagagagugagacugggagaaagagaagc

SEQ ID NO: 324110 - RNA, 32 nt, Human
agggagagauccagagaguuuucaaguuuuug

SEQ ID NO: 324111 - RNA, 32 nt, Human
agggagagcaagaagaccagcugugggugagg

SEQ ID NO: 324112 - RNA, 32 nt, Human
agggagagcaagaggucaagagcugugggaca

SEQ ID NO: 324113 - RNA, 32 nt, Human
agggagagcaagcgcacagcagaggaggugug

SEQ ID NO: 324114 - RNA, 32 nt, Human
agggagagccccaggacucaggagugcugggc

SEQ ID NO: 324115 - RNA, 22 nt, Human
agggagagcgcccacacugucc

SEQ ID NO: 324116 - RNA, 32 nt, Human
agggagagcugcagaguguccugccugccuug

SEQ ID NO: 324117 - RNA, 32 nt, Human
agggagaggaagagaagcccagcucugggaac

SEQ ID NO: 324118 - RNA, 32 nt, Human
agggagaggaagcacacugcagggcugcugug

SEQ ID NO: 324119 - RNA, 32 nt, Human
agggagaggacagccaacaagguccagggccc

SEQ ID NO: 324120 - RNA, 32 nt, Human
agggagaggagaagagacgcaaaagaccggga

SEQ ID NO: 324121 - RNA, 32 nt, Human
agggagaggagagauuaaagugaggagagagc

SEQ ID NO: 324122 - RNA, 22 nt, Human
agggagaggaggccccggcaga

SEQ ID NO: 324123 - RNA, 32 nt, Human
agggagaggagggagagggggaggggaggagu

SEQ ID NO: 324124 - RNA, 32 nt, Human
agggagaggaugacaggguuaccccuuggaga

SEQ ID NO: 324125 - RNA, 32 nt, Human
agggagaggcagcagucuccucccaggugggg

SEQ ID NO: 324126 - RNA, 32 nt, Human
agggagagggaagagggagaccaaaugucggg

SEQ ID NO: 324127 - RNA, 32 nt, Human
agggagagggaagaguagguggggccgggcag

SEQ ID NO: 324128 - RNA, 32 nt, Human
agggagagggaggagguugcaaaaagccagau

SEQ ID NO: 324129 - RNA, 32 nt, Human
agggagagggugaagcagguaucagagucacu

SEQ ID NO: 324130 - RNA, 32 nt, Human
agggagaguggcagagagaggagcaguagccc

SEQ ID NO: 324131 - RNA, 32 nt, Human
agggagaguuuugcggggguuggcaguggaga

SEQ ID NO: 324132 - RNA, 32 nt, Human
agggagauacccuauucacugccugccaggca

SEQ ID NO: 324133 - RNA, 32 nt, Human
agggagaucugggggaggcaggaagcuccuca

SEQ ID NO: 324134 - RNA, 32 nt, Human
agggagaucuuuagccuccaucaccugccauc

SEQ ID NO: 324135 - RNA, 31 nt, Human
agggagauggugcuggcccaggggcugcucu

SEQ ID NO: 324136 - RNA, 32 nt, Human
agggagcaagcugcccccuccuugcccccaag

SEQ ID NO: 324137 - RNA, 32 nt, Human
agggagcaagcuguuucucuugacuacuggcu

SEQ ID NO: 324138 - RNA, 20 nt, Human
agggagcacaaacauacuga

SEQ ID NO: 324139 - RNA, 20 nt, Human
agggagcacaggaacucuga

SEQ ID NO: 324140 - RNA, 16 nt, Human
agggagcacagucugc

SEQ ID NO: 324141 - RNA, 18 nt, Human
agggagcacagugagccu

SEQ ID NO: 324142 - RNA, 32 nt, Human
agggagcacaguuagaaguuugcagaacagaa

SEQ ID NO: 324143 - RNA, 18 nt, Human
agggagcacauccccuga

SEQ ID NO: 324144 - RNA, 19 nt, Human
agggagcacauuggcguga

SEQ ID NO: 324145 - RNA, 19 nt, Human
agggagcacauuucaccug

SEQ ID NO: 324146 - RNA, 32 nt, Human
agggagcacccacaugcuuagauagcugaugu

SEQ ID NO: 324147 - RNA, 22 nt, Human
agggagcacuggggugcccuga

SEQ ID NO: 324148 - RNA, 17 nt, Human
agggagcacuggguuga

SEQ ID NO: 324149 - RNA, 32 nt, Human
agggagcagagcagcugccggcugugugccca

SEQ ID NO: 324150 - RNA, 32 nt, Human
agggagcagaggccagcugggggccagugggg

SEQ ID NO: 324151 - RNA, 21 nt, Human
agggagcagcccaccugcugg

SEQ ID NO: 324152 - RNA, 32 nt, Human
agggagcagccccgcaggccgccacauagcuc

SEQ ID NO: 324153 - RNA, 32 nt, Human
agggagcagcggggagcuugcagugaccaaga

SEQ ID NO: 324154 - RNA, 32 nt, Human
agggagcagcuuucuauccuggccacacugag

SEQ ID NO: 324155 - RNA, 32 nt, Human
agggagcaggaggguguuccuucaugugggaa

SEQ ID NO: 324156 - RNA, 32 nt, Human
agggagcaggcagagauagagugcagggcaug

SEQ ID NO: 324157 - RNA, 32 nt, Human
agggagcaggcagagggugggggaccuggcgg

SEQ ID NO: 324158 - RNA, 32 nt, Human
agggagcaggcccaagggcagagcagaggcug

SEQ ID NO: 324159 - RNA, 32 nt, Human
agggagcaggccggaaccacagggccagaggg

SEQ ID NO: 324160 - RNA, 32 nt, Human
agggagcagggagagaaagacuggaguagauu

SEQ ID NO: 324161 - RNA, 32 nt, Human
agggagcagggcucggcgaggggaagacggcg

SEQ ID NO: 324162 - RNA, 32 nt, Human
agggagcaggguggcgguugaggaacgcuuca

SEQ ID NO: 324163 - RNA, 31 nt, Human
agggagcaguuucugccccuccugccccguc

SEQ ID NO: 324164 - RNA, 32 nt, Human
agggagcauuaguaccuggugcuagagaauag

SEQ ID NO: 324165 - RNA, 32 nt, Human
agggagccaaggucacuccaauaaaacaagcu

SEQ ID NO: 324166 - RNA, 32 nt, Human
agggagccacagccgcgcucagccuggaggga

SEQ ID NO: 324167 - RNA, 32 nt, Human
agggagccacgccagccagacaccccggccag

SEQ ID NO: 324168 - RNA, 32 nt, Human
agggagccacugcauccagcacauggggugcc

SEQ ID NO: 324169 - RNA, 32 nt, Human
agggagccacuggccgcgguggcagggccagg

SEQ ID NO: 324170 - RNA, 32 nt, Human
agggagccaugcugcugaauucugguuggcau

SEQ ID NO: 324171 - RNA, 32 nt, Human
agggagccauggaaggugccagaaggaagguu

SEQ ID NO: 324172 - RNA, 32 nt, Human
agggagcccacagcagcaucagacccauccag

SEQ ID NO: 324173 - RNA, 32 nt, Human
agggagcccaggccaucgcucaugcccucugc

SEQ ID NO: 324174 - RNA, 32 nt, Human
agggagccccaaaugcaaccagccucuuguuc

SEQ ID NO: 324175 - RNA, 32 nt, Human
agggagccccuaggaaagcaguguguccuugg

SEQ ID NO: 324176 - RNA, 32 nt, Human
agggagcccugagcccuucagcugccugcaca

SEQ ID NO: 324177 - RNA, 32 nt, Human
agggagccgacaaccucuuuucugcagaaaag

SEQ ID NO: 324178 - RNA, 32 nt, Human
agggagccgaggaggccauggagccaggggaa

SEQ ID NO: 324179 - RNA, 22 nt, Human
agggagccucaggacagcuucu

SEQ ID NO: 324180 - RNA, 32 nt, Human
agggagccuccccucccuguaucacccccucc

SEQ ID NO: 324181 - RNA, 32 nt, Human
agggagccuccuggccccgcgguucugugcac

SEQ ID NO: 324182 - RNA, 21 nt, Human
agggagccugcacagcuucuu

SEQ ID NO: 324183 - RNA, 32 nt, Human
agggagccugcucucccuccccacaccccacc

SEQ ID NO: 324184 - RNA, 32 nt, Human
agggagccugcugagccaggagggagaaaaga

SEQ ID NO: 324185 - RNA, 32 nt, Human
agggagccuggcccagaagaccagcccugccg

SEQ ID NO: 324186 - RNA, 32 nt, Human
agggagccuuucucugccucuuccuccccugu

SEQ ID NO: 324187 - RNA, 32 nt, Human
agggagcgagagaauggcuccaaccuggccuu

SEQ ID NO: 324188 - RNA, 21 nt, Human
agggagcgaggggcucacacc

SEQ ID NO: 324189 - RNA, 32 nt, Human
agggagcggaugaaggauggcagcaucucaca

SEQ ID NO: 324190 - RNA, 32 nt, Human
agggagcgggcagaggccgcagggcuggcucg

SEQ ID NO: 324191 - RNA, 19 nt, Human
agggagcgggcccaccuga

SEQ ID NO: 324192 - RNA, 27 nt, Human
agggagcggggucgggaucaccugcca

SEQ ID NO: 324193 - RNA, 20 nt, Human
agggagcguagaaucugugu

SEQ ID NO: 324194 - RNA, 32 nt, Human
agggagcguggggccaucugagccaaacagaa

SEQ ID NO: 324195 - RNA, 32 nt, Human
agggagcuaaggaagacacagcccagacaaga

SEQ ID NO: 324196 - RNA, 32 nt, Human
agggagcucaggcuggauggaggaagccacgc

SEQ ID NO: 324197 - RNA, 32 nt, Human
agggagcuccaggacucacccucagcugagcc

SEQ ID NO: 324198 - RNA, 32 nt, Human
agggagcuccaggagaccucaggacggccccc

SEQ ID NO: 324199 - RNA, 24 nt, Human
agggagcuccggggacagcuuccu

SEQ ID NO: 324200 - RNA, 20 nt, Human
agggagcuccgucagcuucu

SEQ ID NO: 324201 - RNA, 32 nt, Human
agggagcucuccugcucugccaccucauuugu

SEQ ID NO: 324202 - RNA, 32 nt, Human
agggagcucugccuguuggagcucccuguccu

SEQ ID NO: 324203 - RNA, 32 nt, Human
agggagcucugggugcggccucaggcccucca

SEQ ID NO: 324204 - RNA, 32 nt, Human
agggagcugagagccugguucugugaucaugg

SEQ ID NO: 324205 - RNA, 32 nt, Human
agggagcugagcgcagcauggcuggucuggca

SEQ ID NO: 324206 - RNA, 31 nt, Human
agggagcugcagagagaacaagaccugagac

SEQ ID NO: 324207 - RNA, 32 nt, Human
agggagcugcaggaacaggaaaaagagaccuu

SEQ ID NO: 324208 - RNA, 32 nt, Human
agggagcugcccggcuggccuaggcaggcagc

SEQ ID NO: 324209 - RNA, 32 nt, Human
agggagcugccuagcaucuggccuggagugua

SEQ ID NO: 324210 - RNA, 32 nt, Human
agggagcugccuggcuucucugccuccagccu

SEQ ID NO: 324211 - RNA, 32 nt, Human
agggagcugcuuggcagugccagagcccaggc

SEQ ID NO: 324212 - RNA, 32 nt, Human
agggagcugcuuggggaagccaggggcugggg

SEQ ID NO: 324213 - RNA, 19 nt, Human
agggagcuggaacagccuc

SEQ ID NO: 324214 - RNA, 32 nt, Human
agggagcuggaccgcaguguccaggcuggaca

SEQ ID NO: 324215 - RNA, 32 nt, Human
agggagcuggcagaggacugcaagcgcccucu

SEQ ID NO: 324216 - RNA, 32 nt, Human
agggagcugggaaggaaggaagggggcgcuag

SEQ ID NO: 324217 - RNA, 32 nt, Human
agggagcugggaccccuccccuccaacacaca

SEQ ID NO: 324218 - RNA, 32 nt, Human
agggagcugggccuccccucauccucuguaac

SEQ ID NO: 324219 - RNA, 32 nt, Human
agggagcuggucuccagccaggugagcaacaa

SEQ ID NO: 324220 - RNA, 32 nt, Human
agggagcugucuaccagcugagguccucccaa

SEQ ID NO: 324221 - RNA, 22 nt, Human
agggagcugugaucacacugcu

SEQ ID NO: 324222 - RNA, 32 nt, Human
agggagcuugcucuccuucucggagggccgga

SEQ ID NO: 324223 - RNA, 32 nt, Human
agggagcuuggguaggggccaggcuagccuga

SEQ ID NO: 324224 - RNA, 32 nt, Human
agggagcuuguugccagagagugagcuugccc

SEQ ID NO: 324225 - RNA, 21 nt, Human
agggaggaaaaaugacauuca

SEQ ID NO: 324226 - RNA, 21 nt, Human
agggaggaaaacaugcgccca

SEQ ID NO: 324227 - RNA, 32 nt, Human
agggaggaaagccaucaggacuggguagccug

SEQ ID NO: 324228 - RNA, 32 nt, Human
agggaggaaagcuuccgccugcgggccggaca

SEQ ID NO: 324229 - RNA, 32 nt, Human
agggaggaagaagagggagggagcgaggaagg

SEQ ID NO: 324230 - RNA, 32 nt, Human
agggaggaagacaggaaggaaggaaggaagga

SEQ ID NO: 324231 - RNA, 22 nt, Human
agggaggaagacccucaucuca

SEQ ID NO: 324232 - RNA, 32 nt, Human
agggaggaagaguuugggggcuguggagggaa

SEQ ID NO: 324233 - RNA, 32 nt, Human
agggaggaaggaaggaaggaaggaaagaaaga

SEQ ID NO: 324234 - RNA, 26 nt, Human
agggaggaaggagcgcgacagugcca

SEQ ID NO: 324235 - RNA, 18 nt, Human
agggaggaagggcagaug

SEQ ID NO: 324236 - RNA, 21 nt, Human
agggaggaaggggauggccca

SEQ ID NO: 324237 - RNA, 23 nt, Human
agggaggaaggggcggcugcuca

SEQ ID NO: 324238 - RNA, 24 nt, Human
agggaggaagguccaugaugcuca

SEQ ID NO: 324239 - RNA, 32 nt, Human
agggaggaauauagaaugaaagacugaaucuu

SEQ ID NO: 324240 - RNA, 32 nt, Human
agggaggacacagcagaccuguuucucaggga

SEQ ID NO: 324241 - RNA, 32 nt, Human
agggaggacauggagaaaaguucuuuaaacaa

SEQ ID NO: 324242 - RNA, 19 nt, Human
agggaggacccacacugcu

SEQ ID NO: 324243 - RNA, 32 nt, Human
agggaggaccucaagagacugccuggcccagu

SEQ ID NO: 324244 - RNA, 32 nt, Human
agggaggacuccugagcucugccucuuccagu

SEQ ID NO: 324245 - RNA, 21 nt, Human
agggaggagaaagaucccugu

SEQ ID NO: 324246 - RNA, 32 nt, Human
agggaggagaggggaaggugggcgaggagggc

SEQ ID NO: 324247 - RNA, 32 nt, Human
agggaggagaggggacuggagaguguggggaa

SEQ ID NO: 324248 - RNA, 32 nt, Human
agggaggagaggggaucacagggguuucagag

SEQ ID NO: 324249 - RNA, 32 nt, Human
agggaggagagggguuggaguaggugggaagu

SEQ ID NO: 324250 - RNA, 32 nt, Human
agggaggagaugaaaauguggacacauccccc

SEQ ID NO: 324251 - RNA, 32 nt, Human
agggaggagccaagauggccgaauagaacagc

SEQ ID NO: 324252 - RNA, 32 nt, Human
agggaggagcggagguagagggccaggauggu

SEQ ID NO: 324253 - RNA, 32 nt, Human
agggaggaggaaaaggaggaagaggaggacaa

SEQ ID NO: 324254 - RNA, 19 nt, Human
agggaggaggagagccagg

SEQ ID NO: 324255 - RNA, 32 nt, Human
agggaggaggagcagacggcagaggaaauccu

SEQ ID NO: 324256 - RNA, 32 nt, Human
agggaggaggcagagcgcgccgggccgguggc

SEQ ID NO: 324257 - RNA, 32 nt, Human
agggaggaggccucaugucugaagggggauuu

SEQ ID NO: 324258 - RNA, 32 nt, Human
agggaggaggcugagcagaaggagucaucaug

SEQ ID NO: 324259 - RNA, 32 nt, Human
agggaggaggcugaggcuggagaugcagcucc

SEQ ID NO: 324260 - RNA, 32 nt, Human
agggaggagggccgagacaggagcagcccacc

SEQ ID NO: 324261 - RNA, 20 nt, Human
agggaggaggggacagcuuc

SEQ ID NO: 324262 - RNA, 32 nt, Human
agggaggaggugguagaguccggguagugagc

SEQ ID NO: 324263 - RNA, 32 nt, Human
agggaggaucacuggaguacaggaguuugggg

SEQ ID NO: 324264 - RNA, 32 nt, Human
agggaggaucuguccugugccucucucuguug

SEQ ID NO: 324265 - RNA, 32 nt, Human
agggaggcagacggcaagaccuccuuccauga

SEQ ID NO: 324266 - RNA, 32 nt, Human
agggaggcagggaaucuggcuugauuggcgug

SEQ ID NO: 324267 - RNA, 32 nt, Human
agggaggcagggaggcagggaggaacggaggg

SEQ ID NO: 324268 - RNA, 32 nt, Human
agggaggcagggaggcagggaggcagggagga

SEQ ID NO: 324269 - RNA, 32 nt, Human
agggaggcaggggagagccggucacgguggcu

SEQ ID NO: 324270 - RNA, 32 nt, Human
agggaggcaguggaggcaggagaggcugggga

SEQ ID NO: 324271 - RNA, 32 nt, Human
agggaggcauggcaagggaccucugcuguccu

SEQ ID NO: 324272 - RNA, 32 nt, Human
agggaggccacugcaacauuuuauccccauca

SEQ ID NO: 324273 - RNA, 32 nt, Human
agggaggccaggaggaagauaggcccaagcuc

SEQ ID NO: 324274 - RNA, 32 nt, Human
agggaggccccuagccuguggcccaggcucuc

SEQ ID NO: 324275 - RNA, 16 nt, Human
agggaggcccuggaaa

SEQ ID NO: 324276 - RNA, 32 nt, Human
agggaggcccugugccccuugacaacuggcag

SEQ ID NO: 324277 - RNA, 32 nt, Human
agggaggccucaggaagcuuacagucauggug

SEQ ID NO: 324278 - RNA, 32 nt, Human
agggaggccuccaucuggaaaugggaggauga

SEQ ID NO: 324279 - RNA, 23 nt, Human
agggaggccugagcacacugcuu

SEQ ID NO: 324280 - RNA, 32 nt, Human
agggaggcuacccgcucccagcugggguuggu

SEQ ID NO: 324281 - RNA, 32 nt, Human
agggaggcugugagacccacagggcuaggccc

SEQ ID NO: 324282 - RNA, 32 nt, Human
agggagggaaggaaggaagagagggaggcggg

SEQ ID NO: 324283 - RNA, 32 nt, Human
agggagggaaggcaggguuugggaaccaaggc

SEQ ID NO: 324284 - RNA, 32 nt, Human
agggagggaaggcaugggaagaagcaggauug

SEQ ID NO: 324285 - RNA, 32 nt, Human
agggagggaauagaggaauguguucggguuaa

SEQ ID NO: 324286 - RNA, 32 nt, Human
agggagggacacggaccaggaaccugagcuag

SEQ ID NO: 324287 - RNA, 32 nt, Human
agggagggacagagggacagagagauauaaaa

SEQ ID NO: 324288 - RNA, 32 nt, Human
agggagggagaaauuuauuuucuggguaggag

SEQ ID NO: 324289 - RNA, 32 nt, Human
agggagggagagaagaagggggucuuugccca

SEQ ID NO: 324290 - RNA, 32 nt, Human
agggagggagagaagagggggcuaaauuugau

SEQ ID NO: 324291 - RNA, 32 nt, Human
agggagggagagaauggcccgagggaggaggg

SEQ ID NO: 324292 - RNA, 32 nt, Human
agggagggagagagaaagacgaagggagagag

SEQ ID NO: 324293 - RNA, 32 nt, Human
agggagggagagaugaauuuucccuggaggga

SEQ ID NO: 324294 - RNA, 32 nt, Human
agggagggagagcagguuacuuggcaaccaua

SEQ ID NO: 324295 - RNA, 32 nt, Human
agggagggagagguggggagggagacagagac

SEQ ID NO: 324296 - RNA, 32 nt, Human
agggagggagcgagcgagcagugaguaagcca

SEQ ID NO: 324297 - RNA, 32 nt, Human
agggagggagcgaggaaggaagauaggagaug

SEQ ID NO: 324298 - RNA, 32 nt, Human
agggagggagcugucagccagggaaaaccgag

SEQ ID NO: 324299 - RNA, 32 nt, Human
agggagggaggaagaagagggagggagcgagg

SEQ ID NO: 324300 - RNA, 32 nt, Human
agggagggaggaagacaggaaggaaggaagga

SEQ ID NO: 324301 - RNA, 32 nt, Human
agggagggaggaaggaaggaaggaaggaaaga

SEQ ID NO: 324302 - RNA, 32 nt, Human
agggagggaggaaggaaggaagggaggaagga

SEQ ID NO: 324303 - RNA, 32 nt, Human
agggagggaggcagcugcuggggaggggcuug

SEQ ID NO: 324304 - RNA, 32 nt, Human
agggagggagggagagggagagagggagaaaa

SEQ ID NO: 324305 - RNA, 32 nt, Human
agggagggagggaggaagaagagggagggagc

SEQ ID NO: 324306 - RNA, 32 nt, Human
agggagggagggaggaaggaaggaaggaagga

SEQ ID NO: 324307 - RNA, 32 nt, Human
agggagggagggagggagagaauggcccgagg

SEQ ID NO: 324308 - RNA, 32 nt, Human
agggagggagguacccaugagcagaggguagu

SEQ ID NO: 324309 - RNA, 32 nt, Human
agggagggagguggagaaggacgggagaggca

SEQ ID NO: 324310 - RNA, 32 nt, Human
agggagggauggcaggcuucagccacuucucc

SEQ ID NO: 324311 - RNA, 32 nt, Human
agggagggauuccaugcugccuucuccggacu

SEQ ID NO: 324312 - RNA, 32 nt, Human
agggagggcagccuucugccaccugugucgcc

SEQ ID NO: 324313 - RNA, 32 nt, Human
agggagggcagggagagcaaggggcaaggucc

SEQ ID NO: 324314 - RNA, 32 nt, Human
agggagggccaaguccacccagcaucaccaca

SEQ ID NO: 324315 - RNA, 17 nt, Human
agggagggcccagcaaa

SEQ ID NO: 324316 - RNA, 32 nt, Human
agggagggccccgguuccccagacuucuccac

SEQ ID NO: 324317 - RNA, 17 nt, Human
agggagggccugagaaa

SEQ ID NO: 324318 - RNA, 21 nt, Human
agggagggcgagcccuuggga

SEQ ID NO: 324319 - RNA, 19 nt, Human
agggagggcgggccccggg

SEQ ID NO: 324320 - RNA, 16 nt, Human
agggagggcucagccc

SEQ ID NO: 324321 - RNA, 32 nt, Human
agggagggcugcugccacagacuguggugagg

SEQ ID NO: 324322 - RNA, 32 nt, Human
agggaggggaaagagaaggagaugggagaggg

SEQ ID NO: 324323 - RNA, 32 nt, Human
agggaggggaaagugaagagggaagcauaggg

SEQ ID NO: 324324 - RNA, 32 nt, Human
agggaggggagauggagaggagagguggacaa

SEQ ID NO: 324325 - RNA, 18 nt, Human
agggaggggagcgcggga

SEQ ID NO: 324326 - RNA, 18 nt, Human
agggaggggaggccagga

SEQ ID NO: 324327 - RNA, 32 nt, Human
agggaggggagggagaggguggcugaaugggg

SEQ ID NO: 324328 - RNA, 32 nt, Human
agggaggggcaggagagcagugaggagcugcu

SEQ ID NO: 324329 - RNA, 32 nt, Human
agggaggggccaggcagcugagggccaggaaa

SEQ ID NO: 324330 - RNA, 32 nt, Human
agggaggggccuugggcccacccucacagggg

SEQ ID NO: 324331 - RNA, 32 nt, Human
agggaggggcgccggggcgcugggcagccggg

SEQ ID NO: 324332 - RNA, 32 nt, Human
agggaggggcugauccugccucagcugugugg

SEQ ID NO: 324333 - RNA, 32 nt, Human
agggaggggcuggccagagggagaggcagcag

SEQ ID NO: 324334 - RNA, 32 nt, Human
agggaggggcugggaagggcuacugaaggccc

SEQ ID NO: 324335 - RNA, 32 nt, Human
agggagggggagggaggagggagcaggcaggu

SEQ ID NO: 324336 - RNA, 32 nt, Human
agggagggggcagagggcagcuugcuucugca

SEQ ID NO: 324337 - RNA, 32 nt, Human
agggagggggcccgggguuggggaagggggcc

SEQ ID NO: 324338 - RNA, 32 nt, Human
agggagggggcuaagagaggagcaaagcagga

SEQ ID NO: 324339 - RNA, 19 nt, Human
agggaggggggagcgggga

SEQ ID NO: 324340 - RNA, 32 nt, Human
agggaggggucagaaggguccacuccagggcc

SEQ ID NO: 324341 - RNA, 32 nt, Human
agggaggguaaaaccucagacuuuaugugauu

SEQ ID NO: 324342 - RNA, 32 nt, Human
agggagggugucugcacuaaggauuuagaaac

SEQ ID NO: 324343 - RNA, 32 nt, Human
agggagguaggugggggugugggugaugaggg

SEQ ID NO: 324344 - RNA, 32 nt, Human
agggagguccuggccguccacagggucggccc

SEQ ID NO: 324345 - RNA, 32 nt, Human
agggaggucuccuuggaugaaggggugccugg

SEQ ID NO: 324346 - RNA, 32 nt, Human
agggaggugagcugggggcccuggagaaucuc

SEQ ID NO: 324347 - RNA, 16 nt, Human
agggaggugccagccc

SEQ ID NO: 324348 - RNA, 32 nt, Human
agggagguggaaaugcugacaaugaggaggaa

SEQ ID NO: 324349 - RNA, 32 nt, Human
agggagguggaagagcuuuuuaaucacuugcu

SEQ ID NO: 324350 - RNA, 20 nt, Human
agggagguggaagggaaaag

SEQ ID NO: 324351 - RNA, 32 nt, Human
agggagguggggguugggggaguaguggggca

SEQ ID NO: 324352 - RNA, 32 nt, Human
agggaggugggugggucaggugaguggaaggg

SEQ ID NO: 324353 - RNA, 32 nt, Human
agggagguggguuggggugaggccacaugcgg

SEQ ID NO: 324354 - RNA, 32 nt, Human
agggaggugugggugagcugauauaaaagguu

SEQ ID NO: 324355 - RNA, 32 nt, Human
agggagguuacauuguaaaauauguccaugag

SEQ ID NO: 324356 - RNA, 32 nt, Human
agggagguuccucgcaggucucagcccgggac

SEQ ID NO: 324357 - RNA, 32 nt, Human
agggagguugaaauaggagaugaccacuaauu

SEQ ID NO: 324358 - RNA, 32 nt, Human
agggagguugggcagacaagaccugggccaug

SEQ ID NO: 324359 - RNA, 32 nt, Human
agggaguaagggagggagggaggcgagagaga

SEQ ID NO: 324360 - RNA, 21 nt, Human
agggaguacgccauguccuga

SEQ ID NO: 324361 - RNA, 32 nt, Human
agggaguagcugcugcuucacggcgucuccac

SEQ ID NO: 324362 - RNA, 32 nt, Human
agggaguagggagggagaggcaccaugcaugu

SEQ ID NO: 324363 - RNA, 32 nt, Human
agggaguauaaggcagcuccgcacuugaaauc

SEQ ID NO: 324364 - RNA, 32 nt, Human
agggaguaugucuuaaauguaaaguuucuggu

SEQ ID NO: 324365 - RNA, 32 nt, Human
agggagucacauugcauggggguugaguugac

SEQ ID NO: 324366 - RNA, 32 nt, Human
agggaguccacggagaagaugcagugaaugcu

SEQ ID NO: 324367 - RNA, 22 nt, Human
agggagucccagucagacugcu

SEQ ID NO: 324368 - RNA, 32 nt, Human
agggagucccauuucagguguggggcugggca

SEQ ID NO: 324369 - RNA, 32 nt, Human
agggagucccauuucagguguggggcugggua

SEQ ID NO: 324370 - RNA, 20 nt, Human
agggagucccucaugcuuga

SEQ ID NO: 324371 - RNA, 23 nt, Human
agggagucccuggcucauacugc

SEQ ID NO: 324372 - RNA, 32 nt, Human
agggagucgcccaggcuggagagcgguggcgc

SEQ ID NO: 324373 - RNA, 22 nt, Human
agggagucgcuggccacacucu

SEQ ID NO: 324374 - RNA, 32 nt, Human
agggagucggcagagagagagcaucaggaaga

SEQ ID NO: 324375 - RNA, 32 nt, Human
agggagucuggcuuuuacuaucuuucuuaaaa

SEQ ID NO: 324376 - RNA, 32 nt, Human
agggagucuuccucuguggcccaggcugaaga

SEQ ID NO: 324377 - RNA, 32 nt, Human
agggagugaagagagcgcgacggcggcggcgg

SEQ ID NO: 324378 - RNA, 32 nt, Human
agggagugaccguguucucaggaugcagcgac

SEQ ID NO: 324379 - RNA, 32 nt, Human
agggagugagagccaccccgugccgcccacag

SEQ ID NO: 324380 - RNA, 32 nt, Human
agggagugagauugcaucccugggcuuagaag

SEQ ID NO: 324381 - RNA, 32 nt, Human
agggagugagcagcaagacaggacacauuuug

SEQ ID NO: 324382 - RNA, 32 nt, Human
agggagugagccagcagcuuaaguccagcuca

SEQ ID NO: 324383 - RNA, 21 nt, Human
agggagugaggggccgcugcc

SEQ ID NO: 324384 - RNA, 23 nt, Human
agggagugagggggcaguguuga

SEQ ID NO: 324385 - RNA, 32 nt, Human
agggagugaugauuugggggaggcuuugggag

SEQ ID NO: 324386 - RNA, 32 nt, Human
agggagugcagcaggaaggaacaaagacaggc

SEQ ID NO: 324387 - RNA, 31 nt, Human
agggagugccucucugggacccccuguguug

SEQ ID NO: 324388 - RNA, 32 nt, Human
agggagugcgccgggagcggagauauggaggg

SEQ ID NO: 324389 - RNA, 32 nt, Human
agggagugcugacaagggaggagccagugcaa

SEQ ID NO: 324390 - RNA, 32 nt, Human
agggaguggcaugcagggccccugccaugggu

SEQ ID NO: 324391 - RNA, 32 nt, Human
agggaguggccagaugucuccagaggcagcgu

SEQ ID NO: 324392 - RNA, 31 nt, Human
agggaguggccucucccuucuccauggacuu

SEQ ID NO: 324393 - RNA, 32 nt, Human
agggaguggcgaccccagauuuauaggaaaug

SEQ ID NO: 324394 - RNA, 32 nt, Human
agggaguggguggagagcaugggagguaaagu

SEQ ID NO: 324395 - RNA, 31 nt, Human
agggagugggugggcagggguagaggagggg

SEQ ID NO: 324396 - RNA, 32 nt, Human
agggaguggugaggcccugggccuccagagcc

SEQ ID NO: 324397 - RNA, 31 nt, Human
agggaguguaaacugcccccagauguuccug

SEQ ID NO: 324398 - RNA, 23 nt, Human
agggaguucaggacaacccuccu

SEQ ID NO: 324399 - RNA, 32 nt, Human
agggaguuccaaaugagagggagcuucugugg

SEQ ID NO: 324400 - RNA, 32 nt, Human
agggaguuuaauacaggaaauugacuuacaua

SEQ ID NO: 324401 - RNA, 32 nt, Human
agggaguuuacaacccaagccauuccaccccc

SEQ ID NO: 324402 - RNA, 22 nt, Human
agggaguuucagaagagaggca

SEQ ID NO: 324403 - RNA, 32 nt, Human
agggauaaaaaggcaccuaaggcccuuuugca

SEQ ID NO: 324404 - RNA, 32 nt, Human
agggauaaaagugggcugggcgcaguggcuca

SEQ ID NO: 324405 - RNA, 20 nt, Human
agggauaaaaugaggcucca

SEQ ID NO: 324406 - RNA, 32 nt, Human
agggauaaaccagcgcaauggauugggggacg

SEQ ID NO: 324407 - RNA, 32 nt, Human
agggauaaacuagauauagcauacagagccug

SEQ ID NO: 324408 - RNA, 32 nt, Human
agggauaaagagagaauggaaaaagaauggaa

SEQ ID NO: 324409 - RNA, 32 nt, Human
agggauaaagcuuaccauuaaagcuuuugggu

SEQ ID NO: 324410 - RNA, 32 nt, Human
agggauaaggagagcugagauuggagggaauu

SEQ ID NO: 324411 - RNA, 32 nt, Human
agggauaagggauguuagcuguccugcaaagu

SEQ ID NO: 324412 - RNA, 21 nt, Human
agggauacugggauaauuuuu

SEQ ID NO: 324413 - RNA, 32 nt, Human
agggauacuuuuguaaaaguaaaaccuuguau

SEQ ID NO: 324414 - RNA, 32 nt, Human
agggauagaagaguugaaaagggaaagcaaaa

SEQ ID NO: 324415 - RNA, 32 nt, Human
agggauagagucagcugccgaacggagaucag

SEQ ID NO: 324416 - RNA, 32 nt, Human
agggauagccucugugccacuuuuugccagag

SEQ ID NO: 324417 - RNA, 32 nt, Human
agggauagccugggccauggaggccgaugaag

SEQ ID NO: 324418 - RNA, 32 nt, Human
agggauaucgagacagagucucgcucugucac

SEQ ID NO: 324419 - RNA, 22 nt, Human
agggauaugcagggcacuuuuu

SEQ ID NO: 324420 - RNA, 32 nt, Human
agggauaugucuccucuccuucucacuaagga

SEQ ID NO: 324421 - RNA, 23 nt, Human
agggauaugugaaacaauguuaa

SEQ ID NO: 324422 - RNA, 32 nt, Human
agggaucaagggcaaggcgagcuccauguggg

SEQ ID NO: 324423 - RNA, 32 nt, Human
agggaucauaaauuaugcauaucuaugaauuu

SEQ ID NO: 324424 - RNA, 32 nt, Human
agggaucauccaccaucauccuucaugucugc

SEQ ID NO: 324425 - RNA, 32 nt, Human
agggauccagagacauagaggaaguagggggu

SEQ ID NO: 324426 - RNA, 32 nt, Human
agggaucccaccccuucucuguguuuucacuc

SEQ ID NO: 324427 - RNA, 32 nt, Human
agggaucccccagcucccccagccccuggcuu

SEQ ID NO: 324428 - RNA, 32 nt, Human
agggaucccgugggaggugaucagaucauggg

SEQ ID NO: 324429 - RNA, 32 nt, Human
agggauccgagaguucugcacacugaggaaaa

SEQ ID NO: 324430 - RNA, 32 nt, Human
agggauccggaggcggcggagggagacgucau

SEQ ID NO: 324431 - RNA, 32 nt, Human
agggauccggccaggguggagugggugaggca

SEQ ID NO: 324432 - RNA, 32 nt, Human
agggauccucacccuuccacuuucaugcaaga

SEQ ID NO: 324433 - RNA, 16 nt, Human
agggauccuccagcuc

SEQ ID NO: 324434 - RNA, 32 nt, Human
agggauccuuggcugaggauuguauuucagaa

SEQ ID NO: 324435 - RNA, 32 nt, Human
agggauccuuggcugcuucauugucuuccccc

SEQ ID NO: 324436 - RNA, 32 nt, Human
agggaucgacaggcaccucuucugccuuuacu

SEQ ID NO: 324437 - RNA, 32 nt, Human
agggaucgcaccacugcacuccagccugggcu

SEQ ID NO: 324438 - RNA, 32 nt, Human
agggaucgcagggccuaggugccuggacccag

SEQ ID NO: 324439 - RNA, 32 nt, Human
agggaucguaccacugcacuccagccugggcu

SEQ ID NO: 324440 - RNA, 32 nt, Human
agggaucgugggggcggggagguggaguggag

SEQ ID NO: 324441 - RNA, 32 nt, Human
agggaucucacacccauguuacuugccauuua

SEQ ID NO: 324442 - RNA, 32 nt, Human
agggaucucuugggacccuccugguuuuaacu

SEQ ID NO: 324443 - RNA, 32 nt, Human
agggaucugacuccugaguugguugccucucc

SEQ ID NO: 324444 - RNA, 23 nt, Human
agggaucugagagcagcauaauc

SEQ ID NO: 324445 - RNA, 32 nt, Human
agggaucugcucccuccugcuucccuuaccag

SEQ ID NO: 324446 - RNA, 32 nt, Human
agggaucugcugcagccacagcuccuccagaa

SEQ ID NO: 324447 - RNA, 32 nt, Human
agggaucugcuuguuacaugaacuggaaauag

SEQ ID NO: 324448 - RNA, 32 nt, Human
agggaucugucucuuuggcucucagcucugcu

SEQ ID NO: 324449 - RNA, 32 nt, Human
agggaucuugcucucccuugaagccuugaguu

SEQ ID NO: 324450 - RNA, 32 nt, Human
agggaucuuucaccugcugugcccaguaguuc

SEQ ID NO: 324451 - RNA, 32 nt, Human
agggaucuuuguaaagacagcucuucacuuca

SEQ ID NO: 324452 - RNA, 24 nt, Human
agggaugaaacacccagaaacuca

SEQ ID NO: 324453 - RNA, 32 nt, Human
agggaugaagucaugggagauaaucugcugcu

SEQ ID NO: 324454 - RNA, 32 nt, Human
agggaugagagaaaggaggugguauggaagac

SEQ ID NO: 324455 - RNA, 32 nt, Human
agggaugagagggagggagaggagagagagug

SEQ ID NO: 324456 - RNA, 22 nt, Human
agggaugagccaccaugccugg

SEQ ID NO: 324457 - RNA, 32 nt, Human
agggaugaggauggauggguccuaaccccuga

SEQ ID NO: 324458 - RNA, 24 nt, Human
agggaugaggcacccucuugcuca

SEQ ID NO: 324459 - RNA, 32 nt, Human
agggaugagggagggaggggcauugugaugua

SEQ ID NO: 324460 - RNA, 32 nt, Human
agggaugaguccugucaagggggccacaggag

SEQ ID NO: 324461 - RNA, 32 nt, Human
agggaugaguucaccaguaccugucccaguga

SEQ ID NO: 324462 - RNA, 32 nt, Human
agggaugcacacaacuaugaacauuucugaag

SEQ ID NO: 324463 - RNA, 32 nt, Human
agggaugcacaugguuuccucugccuuuguga

SEQ ID NO: 324464 - RNA, 32 nt, Human
agggaugcagugccuuuccccauucauuccug

SEQ ID NO: 324465 - RNA, 31 nt, Human
agggaugcucuugcugggccugccucucccu

SEQ ID NO: 324466 - RNA, 32 nt, Human
agggaugcugcuucuguucccuccaggccuug

SEQ ID NO: 324467 - RNA, 17 nt, Human
agggaugcuggcucuug

SEQ ID NO: 324468 - RNA, 21 nt, Human
agggaugcugugcaugccuga

SEQ ID NO: 324469 - RNA, 32 nt, Human
agggaugcugugcugcucucccaugagccagu

SEQ ID NO: 324470 - RNA, 32 nt, Human
agggauggaaccucugggucaggaaacagcug

SEQ ID NO: 324471 - RNA, 32 nt, Human
agggauggacaaggagcugagauuuaugaccc

SEQ ID NO: 324472 - RNA, 32 nt, Human
agggauggagcaggacaacuccaaggcucccc

SEQ ID NO: 324473 - RNA, 32 nt, Human
agggauggagugagacauuuaggaagcuggac

SEQ ID NO: 324474 - RNA, 32 nt, Human
agggauggauaagagaaagcauuuggcagaca

SEQ ID NO: 324475 - RNA, 32 nt, Human
agggauggcagagcgagagggaagugcaggga

SEQ ID NO: 324476 - RNA, 29 nt, Human
agggauggccccggaagugauaaggcagg

SEQ ID NO: 324477 - RNA, 32 nt, Human
agggauggcucuccaguccuugggucccguag

SEQ ID NO: 324478 - RNA, 32 nt, Human
agggauggcugaacagacuucccacugcuggu

SEQ ID NO: 324479 - RNA, 32 nt, Human
agggaugggaacaggcugugcaucuuaguugg

SEQ ID NO: 324480 - RNA, 32 nt, Human
agggaugggaaugggaguggguaggaggggua

SEQ ID NO: 324481 - RNA, 32 nt, Human
agggaugggacuagggcugaguugugucucca

SEQ ID NO: 324482 - RNA, 32 nt, Human
agggaugggaggcggaggguagagaugaacuc

SEQ ID NO: 324483 - RNA, 32 nt, Human
agggaugggguuucaccauguuagcuaggaug

SEQ ID NO: 324484 - RNA, 32 nt, Human
agggaugggguuucccauguuggccaggcugg

SEQ ID NO: 324485 - RNA, 32 nt, Human
agggaugggguuucuccauguuggucaggcug

SEQ ID NO: 324486 - RNA, 32 nt, Human
agggaugggugagggcuaaggggcuuggcucu

SEQ ID NO: 324487 - RNA, 32 nt, Human
agggauggugccagauacaucugucccauuua

SEQ ID NO: 324488 - RNA, 32 nt, Human
agggaugguuccaaagugagaggucuccaugg

SEQ ID NO: 324489 - RNA, 32 nt, Human
agggauguaaagacagggggaaagcacgccgg

SEQ ID NO: 324490 - RNA, 23 nt, Human
agggauguacugucugggucaga

SEQ ID NO: 324491 - RNA, 32 nt, Human
agggauguagaauaugcuuuccugccaacaug

SEQ ID NO: 324492 - RNA, 22 nt, Human
agggauguagcaccaugccugg

SEQ ID NO: 324493 - RNA, 32 nt, Human
agggaugucacagaaaugucugugucugaauc

SEQ ID NO: 324494 - RNA, 32 nt, Human
agggauguccagaggucggugcagccccuauc

SEQ ID NO: 324495 - RNA, 32 nt, Human
agggaugugggucugaagagcuugguugcaga

SEQ ID NO: 324496 - RNA, 32 nt, Human
agggauguguuuuauuaaugucuaggaugaag

SEQ ID NO: 324497 - RNA, 32 nt, Human
agggauuaaaaauguacguaaaauuaguaguc

SEQ ID NO: 324498 - RNA, 32 nt, Human
agggauuacuggccuccagagucuucaagauc

SEQ ID NO: 324499 - RNA, 32 nt, Human
agggauuagcugugucaggaacuuggaguugc

SEQ ID NO: 324500 - RNA, 21 nt, Human
agggauuaggaacagcuuccu

SEQ ID NO: 324501 - RNA, 32 nt, Human
agggauuauaccugucuguucuuaaagauuuc

SEQ ID NO: 324502 - RNA, 32 nt, Human
agggauucacaccuggcacaacaucagagagu

SEQ ID NO: 324503 - RNA, 32 nt, Human
agggauucagaacucacagugcagccugacga

SEQ ID NO: 324504 - RNA, 32 nt, Human
agggauucccuuucccacucugaggcucuggc

SEQ ID NO: 324505 - RNA, 32 nt, Human
agggauuccuuucuccccucuuuguguggccc

SEQ ID NO: 324506 - RNA, 32 nt, Human
agggauucuccuccuucauccuguaaagguca

SEQ ID NO: 324507 - RNA, 32 nt, Human
agggauucucucuugcugccucaguugcuagg

SEQ ID NO: 324508 - RNA, 32 nt, Human
agggauugaaguuuauuauuuucaaaggaaaa

SEQ ID NO: 324509 - RNA, 32 nt, Human
agggauugccaagaagggaacaaucaccccaa

SEQ ID NO: 324510 - RNA, 32 nt, Human
agggauugcccgugaagacuuuggccuagcaa

SEQ ID NO: 324511 - RNA, 32 nt, Human
agggauugcucacuccagguuacugcaacccu

SEQ ID NO: 324512 - RNA, 32 nt, Human
agggauugcuuaagccugggaggcagagguug

SEQ ID NO: 324513 - RNA, 32 nt, Human
agggauuggguuuugccuuguugcccaggcug

SEQ ID NO: 324514 - RNA, 19 nt, Human
agggauugguuccaggacc

SEQ ID NO: 324515 - RNA, 32 nt, Human
agggauuuagccaagagcacagacuuggauuc

SEQ ID NO: 324516 - RNA, 32 nt, Human
agggauuuagcccucugcccuaaggugccauu

SEQ ID NO: 324517 - RNA, 32 nt, Human
agggauuugagaccagccuggccaacauggcg

SEQ ID NO: 324518 - RNA, 32 nt, Human
agggauuugccacagccccacccuugggcuga

SEQ ID NO: 324519 - RNA, 32 nt, Human
agggauuugccucaccuuggggccuugaugac

SEQ ID NO: 324520 - RNA, 32 nt, Human
agggauuuuccccaucagucugucccuugggu

SEQ ID NO: 324521 - RNA, 32 nt, Human
agggcaaacauggugaaucuaucucuccggag

SEQ ID NO: 324522 - RNA, 32 nt, Human
agggcaaagaugguggcugugucucuccccgg

SEQ ID NO: 324523 - RNA, 32 nt, Human
agggcaaaggcgaggcgggggagcagcgugug

SEQ ID NO: 324524 - RNA, 32 nt, Human
agggcaacacagcaagaccccaucucuacaaa

SEQ ID NO: 324525 - RNA, 32 nt, Human
agggcaacagagcagaggcucggagaggaacc

SEQ ID NO: 324526 - RNA, 32 nt, Human
agggcaacagcaccugccccacccuguccccg

SEQ ID NO: 324527 - RNA, 32 nt, Human
agggcaacauggugaaaccccaucucuacuaa

SEQ ID NO: 324528 - RNA, 32 nt, Human
agggcaaccuaaaagcccacuuagaaacuuuu

SEQ ID NO: 324529 - RNA, 32 nt, Human
agggcaacucacgggugcaugaaaccacugga

SEQ ID NO: 324530 - RNA, 32 nt, Human
agggcaacuuggaaauaauggugaaaagaaug

SEQ ID NO: 324531 - RNA, 23 nt, Human
agggcaagaagagugacucgaag

SEQ ID NO: 324532 - RNA, 21 nt, Human
agggcaagaaggucugagagg

SEQ ID NO: 324533 - RNA, 21 nt, Human
agggcaagaauucacacguag

SEQ ID NO: 324534 - RNA, 32 nt, Human
agggcaagagcaucucgaugcagcgcauacag

SEQ ID NO: 324535 - RNA, 22 nt, Human
agggcaagaggaaaccagggca

SEQ ID NO: 324536 - RNA, 32 nt, Human
agggcaagaggaaaggaggagaguaagggaac

SEQ ID NO: 324537 - RNA, 21 nt, Human
agggcaagaggcugcaggaag

SEQ ID NO: 324538 - RNA, 32 nt, Human
agggcaagagggcacaagacagcaagggucaa

SEQ ID NO: 324539 - RNA, 32 nt, Human
agggcaagagguggggaggaggucagaggaga

SEQ ID NO: 324540 - RNA, 32 nt, Human
agggcaagagugagcaagagauggaaguugca

SEQ ID NO: 324541 - RNA, 32 nt, Human
agggcaaggacguggccagugggagcuggugu

SEQ ID NO: 324542 - RNA, 32 nt, Human
agggcaaggagguaccucacagguggguguga

SEQ ID NO: 324543 - RNA, 32 nt, Human
agggcaaggauccugugcugcugucugguuga

SEQ ID NO: 324544 - RNA, 32 nt, Human
agggcaaggcaagaugguggacagauagagaa

SEQ ID NO: 324545 - RNA, 32 nt, Human
agggcaagggcugaccccaugggcuaguacuu

SEQ ID NO: 324546 - RNA, 32 nt, Human
agggcaaggggcuguggaguuuggugucuacu

SEQ ID NO: 324547 - RNA, 32 nt, Human
agggcaagggggcgcggcguccugguccucga

SEQ ID NO: 324548 - RNA, 32 nt, Human
agggcaaggucccucuccagcugcaggugagg

SEQ ID NO: 324549 - RNA, 31 nt, Human
agggcaagugagagccggacgggcacugggc

SEQ ID NO: 324550 - RNA, 32 nt, Human
agggcaaugaaagccaaggagagcagaggggu

SEQ ID NO: 324551 - RNA, 32 nt, Human
agggcaaugcagcaauuaaccccacaucguuu

SEQ ID NO: 324552 - RNA, 32 nt, Human
agggcaauuagaagaggaaagacugacuucau

SEQ ID NO: 324553 - RNA, 32 nt, Human
agggcaauuccuccucucucucugccuggccc

SEQ ID NO: 324554 - RNA, 32 nt, Human
agggcacaaaauccaagagaaggucugugagc

SEQ ID NO: 324555 - RNA, 32 nt, Human
agggcacaaccauaauggcauuacugacuucc

SEQ ID NO: 324556 - RNA, 32 nt, Human
agggcacaagcagaaacaggcccgacuuccuu

SEQ ID NO: 324557 - RNA, 32 nt, Human
agggcacaauacugagcaacauggacaagguc

SEQ ID NO: 324558 - RNA, 32 nt, Human
agggcacacagccggcugagccaggacccacc

SEQ ID NO: 324559 - RNA, 32 nt, Human
agggcacacccaggggaauuuaaugaggcgac

SEQ ID NO: 324560 - RNA, 32 nt, Human
agggcacacucccaugcugucacccucaggaa

SEQ ID NO: 324561 - RNA, 32 nt, Human
agggcacagaggcaaggccuccugucuacagc

SEQ ID NO: 324562 - RNA, 32 nt, Human
agggcacagauugcagagguaaugcuguggca

SEQ ID NO: 324563 - RNA, 32 nt, Human
agggcacagccaggcuggagucagugucugcc

SEQ ID NO: 324564 - RNA, 18 nt, Human
agggcacaggagcugcuc

SEQ ID NO: 324565 - RNA, 32 nt, Human
agggcacaggcuuccagccaguucuaccuggg

SEQ ID NO: 324566 - RNA, 32 nt, Human
agggcacagggcccugggggcaccuuccuccu

SEQ ID NO: 324567 - RNA, 32 nt, Human
agggcacagucucuaggucucugacaggcagg

SEQ ID NO: 324568 - RNA, 32 nt, Human
agggcaccagugcugcccaaagaccucuugcu

SEQ ID NO: 324569 - RNA, 32 nt, Human
agggcaccauuuuuaaucccagaacacauuuc

SEQ ID NO: 324570 - RNA, 32 nt, Human
agggcaccccucuccccacuuaagucuggaag

SEQ ID NO: 324571 - RNA, 32 nt, Human
agggcacccuguggcccuggcucugcuguccc

SEQ ID NO: 324572 - RNA, 22 nt, Human
agggcaccgcugucgucggcca

SEQ ID NO: 324573 - RNA, 32 nt, Human
agggcaccuccaggugggcaggagcuaccacu

SEQ ID NO: 324574 - RNA, 32 nt, Human
agggcaccuguguggagccagggaagccaggg

SEQ ID NO: 324575 - RNA, 32 nt, Human
agggcacgacucucucccagcucgggucgccg

SEQ ID NO: 324576 - RNA, 32 nt, Human
agggcacgcagcgugagggugugucuucccug

SEQ ID NO: 324577 - RNA, 32 nt, Human
agggcacgcugccagaauccaggcuggucgua

SEQ ID NO: 324578 - RNA, 32 nt, Human
agggcacggcuuccucugcuucucccaccacu

SEQ ID NO: 324579 - RNA, 32 nt, Human
agggcacgggcuguggcccgaggaggcggugg

SEQ ID NO: 324580 - RNA, 32 nt, Human
agggcacgugaagucauugaggcccugcugcg

SEQ ID NO: 324581 - RNA, 32 nt, Human
agggcacucaccaggcugcaagaacagugcug

SEQ ID NO: 324582 - RNA, 32 nt, Human
agggcacugacgcugaauggugcagugagaaa

SEQ ID NO: 324583 - RNA, 32 nt, Human
agggcacugccacugcugaaucagagcaugcc

SEQ ID NO: 324584 - RNA, 21 nt, Human
agggcacugcccugggucacu

SEQ ID NO: 324585 - RNA, 32 nt, Human
agggcacugccuggccuuggcucuuuguuccc

SEQ ID NO: 324586 - RNA, 32 nt, Human
agggcacuggacuuucuggcaugggggcugug

SEQ ID NO: 324587 - RNA, 32 nt, Human
agggcacuguguggcccccuuccaaaucucag

SEQ ID NO: 324588 - RNA, 32 nt, Human
agggcacuucucucucuuaccucucuugcacu

SEQ ID NO: 324589 - RNA, 32 nt, Human
agggcacuuggacacuuugcuucaccucagcc

SEQ ID NO: 324590 - RNA, 32 nt, Human
agggcacuuguauuccagccucgcugcauuug

SEQ ID NO: 324591 - RNA, 32 nt, Human
agggcagaaagcggcggcaggagaagcaggca

SEQ ID NO: 324592 - RNA, 32 nt, Human
agggcagaaauagucccauguauaccuuuucc

SEQ ID NO: 324593 - RNA, 32 nt, Human
agggcagaaggaaggagggaagaaaagaaagc

SEQ ID NO: 324594 - RNA, 32 nt, Human
agggcagaaggcagaguccaggcuuagacugc

SEQ ID NO: 324595 - RNA, 32 nt, Human
agggcagacacaggccaguggggcgugccaug

SEQ ID NO: 324596 - RNA, 32 nt, Human
agggcagaccacaccaccccagagccaagugc

SEQ ID NO: 324597 - RNA, 32 nt, Human
agggcagacucugcuuggguuugguuguaaga

SEQ ID NO: 324598 - RNA, 32 nt, Human
agggcagagaaggcugaggcagcuggagcuac

SEQ ID NO: 324599 - RNA, 32 nt, Human
agggcagagaaugaggcgugugcacugucugc

SEQ ID NO: 324600 - RNA, 32 nt, Human
agggcagagacacuucaacagucauugccagc

SEQ ID NO: 324601 - RNA, 32 nt, Human
agggcagagaggaggagggaggcugucaggau

SEQ ID NO: 324602 - RNA, 32 nt, Human
agggcagagaucuuguucacaucuugcucacu

SEQ ID NO: 324603 - RNA, 32 nt, Human
agggcagagcacaacucagccucccaggcugc

SEQ ID NO: 324604 - RNA, 32 nt, Human
agggcagagccuggcugcugggcagaagggca

SEQ ID NO: 324605 - RNA, 32 nt, Human
agggcagaggaagcaggguacagacaggagaa

SEQ ID NO: 324606 - RNA, 32 nt, Human
agggcagaggggucagggcugaggaggagaag

SEQ ID NO: 324607 - RNA, 32 nt, Human
agggcagaguaagagaaaagauggaaugagug

SEQ ID NO: 324608 - RNA, 32 nt, Human
agggcagagugggcggaggggagcagccgcac

SEQ ID NO: 324609 - RNA, 21 nt, Human
agggcagauaccagccuuucu

SEQ ID NO: 324610 - RNA, 32 nt, Human
agggcagauacuuccugucaauaaacagaucu

SEQ ID NO: 324611 - RNA, 32 nt, Human
agggcagaucaagcaauucucuugccucagcc

SEQ ID NO: 324612 - RNA, 32 nt, Human
agggcagaucuggacagcagaauguuauaacg

SEQ ID NO: 324613 - RNA, 24 nt, Human
agggcagcacccaaggucugggca

SEQ ID NO: 324614 - RNA, 32 nt, Human
agggcagcacuguggccagcugucugucuuua

SEQ ID NO: 324615 - RNA, 25 nt, Human
agggcagcagcagccagguguggca

SEQ ID NO: 324616 - RNA, 20 nt, Human
agggcagcagccccugggca

SEQ ID NO: 324617 - RNA, 32 nt, Human
agggcagcagccuaagggcaguagcuuaugug

SEQ ID NO: 324618 - RNA, 32 nt, Human
agggcagcagggacaggacuggaagggaccug

SEQ ID NO: 324619 - RNA, 32 nt, Human
agggcagcagggagucuugaagugaucauuuc

SEQ ID NO: 324620 - RNA, 22 nt, Human
agggcagcaggugauccgggca

SEQ ID NO: 324621 - RNA, 19 nt, Human
agggcagcagugccggggu

SEQ ID NO: 324622 - RNA, 32 nt, Human
agggcagcauugaggguguacagagcccagug

SEQ ID NO: 324623 - RNA, 32 nt, Human
agggcagccagccuccauugacggcgagccuc

SEQ ID NO: 324624 - RNA, 32 nt, Human
agggcagccaugcacucccccugggugucgcu

SEQ ID NO: 324625 - RNA, 24 nt, Human
agggcagccaugccagccugagca

SEQ ID NO: 324626 - RNA, 32 nt, Human
agggcagccccaccccauccagccugggcucc

SEQ ID NO: 324627 - RNA, 21 nt, Human
agggcagccccagcacgggca

SEQ ID NO: 324628 - RNA, 23 nt, Human
agggcagcccggcaagcccgggc

SEQ ID NO: 324629 - RNA, 32 nt, Human
agggcagccggcaggagccaggcgagaacaga

SEQ ID NO: 324630 - RNA, 32 nt, Human
agggcagccugaccaacauagugaaaccccau

SEQ ID NO: 324631 - RNA, 21 nt, Human
agggcagccugcgccugggua

SEQ ID NO: 324632 - RNA, 32 nt, Human
agggcagccuugugucccuggccacacuucca

SEQ ID NO: 324633 - RNA, 32 nt, Human
agggcagcgaagcagaauggccaacaugcagg

SEQ ID NO: 324634 - RNA, 32 nt, Human
agggcagcgaaggggccgggccccagacugag

SEQ ID NO: 324635 - RNA, 21 nt, Human
agggcagcggagggcccggca

SEQ ID NO: 324636 - RNA, 32 nt, Human
agggcagcguaugggggcagagcccgguucug

SEQ ID NO: 324637 - RNA, 32 nt, Human
agggcagcgugcagcagaauuugcauuugcuu

SEQ ID NO: 324638 - RNA, 32 nt, Human
agggcagcguucagcacacuccugggcauggc

SEQ ID NO: 324639 - RNA, 32 nt, Human
agggcagcugcaugcucccucucuccagacca

SEQ ID NO: 324640 - RNA, 21 nt, Human
agggcagcugugccugggaca

SEQ ID NO: 324641 - RNA, 21 nt, Human
agggcagcuuagcuggccugg

SEQ ID NO: 324642 - RNA, 32 nt, Human
agggcagcuuggcagagccucaggauggaccc

SEQ ID NO: 324643 - RNA, 32 nt, Human
agggcaggaaccuggucuugaaccccaguguu

SEQ ID NO: 324644 - RNA, 32 nt, Human
agggcaggaagggcacguucucaucagcauga

SEQ ID NO: 324645 - RNA, 32 nt, Human
agggcaggacagcagaggacgugcugggauua

SEQ ID NO: 324646 - RNA, 32 nt, Human
agggcaggaccacccagcuggucagacucuga

SEQ ID NO: 324647 - RNA, 18 nt, Human
agggcaggaccugagaaa

SEQ ID NO: 324648 - RNA, 32 nt, Human
agggcaggaggcucuugaccccaaacagcuga

SEQ ID NO: 324649 - RNA, 32 nt, Human
agggcaggcaggagguggaguugcagcuguug

SEQ ID NO: 324650 - RNA, 32 nt, Human
agggcaggcaggcaauggguggaaaucagggg

SEQ ID NO: 324651 - RNA, 23 nt, Human
agggcaggccagaagccugggca

SEQ ID NO: 324652 - RNA, 32 nt, Human
agggcaggccagagcugaggggcugcuccugc

SEQ ID NO: 324653 - RNA, 32 nt, Human
agggcaggcgccugggcugggggcggggacca

SEQ ID NO: 324654 - RNA, 32 nt, Human
agggcaggcuccaagggagcaggcuggccccu

SEQ ID NO: 324655 - RNA, 32 nt, Human
agggcaggcuggaccugucaagacgggaaggg

SEQ ID NO: 324656 - RNA, 32 nt, Human
agggcagggaacaggcuacuguccuucccugu

SEQ ID NO: 324657 - RNA, 32 nt, Human
agggcagggaagggaagggcggagcuggggug

SEQ ID NO: 324658 - RNA, 32 nt, Human
agggcagggaccccucuccccugcugucucuu

SEQ ID NO: 324659 - RNA, 32 nt, Human
agggcagggacccgcuaagcugaucuccugua

SEQ ID NO: 324660 - RNA, 32 nt, Human
agggcagggagugggagccaaugaacaggcau

SEQ ID NO: 324661 - RNA, 32 nt, Human
agggcagggcugggccugcauccgcuugcccu

SEQ ID NO: 324662 - RNA, 32 nt, Human
agggcagggcugggcgcgauggcucacaccug

SEQ ID NO: 324663 - RNA, 32 nt, Human
agggcagggcuggggugaugaccaugguaaca

SEQ ID NO: 324664 - RNA, 23 nt, Human
agggcagggcuggguccugggca

SEQ ID NO: 324665 - RNA, 32 nt, Human
agggcagggcuucuacccugcaucccuggcca

SEQ ID NO: 324666 - RNA, 32 nt, Human
agggcaggggagaaggagggggagcagaaaaa

SEQ ID NO: 324667 - RNA, 32 nt, Human
agggcaggggcagguugcuaagucaggugcag

SEQ ID NO: 324668 - RNA, 32 nt, Human
agggcaggggcccuuggcugagcccaccccgc

SEQ ID NO: 324669 - RNA, 32 nt, Human
agggcaggggcgcgcagagccacgguuugcuc

SEQ ID NO: 324670 - RNA, 17 nt, Human
agggcagggguuggagg

SEQ ID NO: 324671 - RNA, 32 nt, Human
agggcaggucccggggaagcuccggacuccua

SEQ ID NO: 324672 - RNA, 32 nt, Human
agggcagguggagaguccagggaggcaggaug

SEQ ID NO: 324673 - RNA, 21 nt, Human
agggcagguggggccacucug

SEQ ID NO: 324674 - RNA, 32 nt, Human
agggcagguugugcagcuggaggcagagcagu

SEQ ID NO: 324675 - RNA, 32 nt, Human
agggcagguuugcuugaccucugccucaguuc

SEQ ID NO: 324676 - RNA, 32 nt, Human
agggcaguagaucucuaauguggaggugggaa

SEQ ID NO: 324677 - RNA, 22 nt, Human
agggcagucacuaaccugccca

SEQ ID NO: 324678 - RNA, 32 nt, Human
agggcagucauccucaggccguacccagccag

SEQ ID NO: 324679 - RNA, 32 nt, Human
agggcagucccagugagaacucucaagaccuc

SEQ ID NO: 324680 - RNA, 32 nt, Human
agggcagucugaagauggccaauuacacgcug

SEQ ID NO: 324681 - RNA, 32 nt, Human
agggcagucuucuuggaggaagugaaucugga

SEQ ID NO: 324682 - RNA, 32 nt, Human
agggcagugagcugugauugcaccgugacacu

SEQ ID NO: 324683 - RNA, 21 nt, Human
agggcagugcagcacuaggca

SEQ ID NO: 324684 - RNA, 32 nt, Human
agggcagugcagcacuaggcaggugugaggag

SEQ ID NO: 324685 - RNA, 32 nt, Human
agggcagugcaugaagccaggggucaucagcc

SEQ ID NO: 324686 - RNA, 32 nt, Human
agggcagugcguggaaaggccggggaggugca

SEQ ID NO: 324687 - RNA, 32 nt, Human
agggcaguggaccaauggacagcuccaccagc

SEQ ID NO: 324688 - RNA, 32 nt, Human
agggcaguggaggcugaggcuaugauggcggc

SEQ ID NO: 324689 - RNA, 32 nt, Human
agggcaguggcaaaggccagugaggcagcugu

SEQ ID NO: 324690 - RNA, 32 nt, Human
agggcaguggcaggaucucaguucaccccaac

SEQ ID NO: 324691 - RNA, 32 nt, Human
agggcagugggacgcuggccacggccagggug

SEQ ID NO: 324692 - RNA, 32 nt, Human
agggcaguguccagauccccagagccacacau

SEQ ID NO: 324693 - RNA, 19 nt, Human
agggcaguuagccagcuca

SEQ ID NO: 324694 - RNA, 32 nt, Human
agggcaguuugguuucaacacagcagaccuga

SEQ ID NO: 324695 - RNA, 32 nt, Human
agggcauacacucuauugugggcacagaauga

SEQ ID NO: 324696 - RNA, 32 nt, Human
agggcauaccauuucuuccugacauuugucag

SEQ ID NO: 324697 - RNA, 32 nt, Human
agggcauagacucaggcagagaggauuguggg

SEQ ID NO: 324698 - RNA, 32 nt, Human
agggcaucacugggucugcuggcuucuacacu

SEQ ID NO: 324699 - RNA, 32 nt, Human
agggcaucagguguagggacccugccaagugg

SEQ ID NO: 324700 - RNA, 21 nt, Human
agggcaucccgggccugggca

SEQ ID NO: 324701 - RNA, 32 nt, Human
agggcauccugaggcccugacugccagcugaa

SEQ ID NO: 324702 - RNA, 32 nt, Human
agggcaucgaucuuccucacaccacaaaucug

SEQ ID NO: 324703 - RNA, 32 nt, Human
agggcaucuccaggaaggcggggcuucaaccu

SEQ ID NO: 324704 - RNA, 32 nt, Human
agggcaucucugaaacaaaggcagcagcccca

SEQ ID NO: 324705 - RNA, 32 nt, Human
agggcaucucugaaagaaaggcagcagcccca

SEQ ID NO: 324706 - RNA, 32 nt, Human
agggcaucuugcaucugccacugcuuuuauaa

SEQ ID NO: 324707 - RNA, 32 nt, Human
agggcaugaaaguaucugaaagcaauguagca

SEQ ID NO: 324708 - RNA, 31 nt, Human
agggcaugaacuaccuccaugccaagaauau

SEQ ID NO: 324709 - RNA, 32 nt, Human
agggcaugagaggcagagugcacaguggucaa

SEQ ID NO: 324710 - RNA, 32 nt, Human
agggcaugaggcaccuccaggaggaagaaggc

SEQ ID NO: 324711 - RNA, 32 nt, Human
agggcaugcucuggaacccagcaggaucacag

SEQ ID NO: 324712 - RNA, 32 nt, Human
agggcauggaaggcuucuccgcccauucugac

SEQ ID NO: 324713 - RNA, 32 nt, Human
agggcauggagcauguggcuguccugagguuc

SEQ ID NO: 324714 - RNA, 32 nt, Human
agggcauggagggagaggaauaaagagaaaca

SEQ ID NO: 324715 - RNA, 32 nt, Human
agggcauggcacugacaucugccuuguaacug

SEQ ID NO: 324716 - RNA, 32 nt, Human
agggcaugggagcacacagagagauggcagcc

SEQ ID NO: 324717 - RNA, 32 nt, Human
agggcauguagcaggccaggccacgggcuugc

SEQ ID NO: 324718 - RNA, 32 nt, Human
agggcauguggaauucguugaguuugcuuuua

SEQ ID NO: 324719 - RNA, 32 nt, Human
agggcauguguauguacaguaauguguauucc

SEQ ID NO: 324720 - RNA, 32 nt, Human
agggcauguguaugugucugcuaauguaaacu

SEQ ID NO: 324721 - RNA, 32 nt, Human
agggcauuacaaaaauuuagcuacuuucaaau

SEQ ID NO: 324722 - RNA, 32 nt, Human
agggcauucacuccauggugcucauuggaguu

SEQ ID NO: 324723 - RNA, 32 nt, Human
agggcauuccagcaagaggcugaugcaggaga

SEQ ID NO: 324724 - RNA, 32 nt, Human
agggcauugagaugcaucucuucaggguggag

SEQ ID NO: 324725 - RNA, 32 nt, Human
agggcauugguuacuucauagcauuuucuuuc

SEQ ID NO: 324726 - RNA, 32 nt, Human
agggcauuguaucugucuuuccacucuggauu

SEQ ID NO: 324727 - RNA, 32 nt, Human
agggcauuugucacuuaccaaaugucacauag

SEQ ID NO: 324728 - RNA, 32 nt, Human
agggccaaacagcagaguggagcugagcugug

SEQ ID NO: 324729 - RNA, 32 nt, Human
agggccaaaccaaaagacaaaaauuggaguaa

SEQ ID NO: 324730 - RNA, 32 nt, Human
agggccaaacccuccugguucccuucagaguc

SEQ ID NO: 324731 - RNA, 18 nt, Human
agggccaaaggcagugua

SEQ ID NO: 324732 - RNA, 32 nt, Human
agggccaaaggcuggcuuggccuguguuuccc

SEQ ID NO: 324733 - RNA, 24 nt, Human
agggccaaauucccaaccugcuca

SEQ ID NO: 324734 - RNA, 32 nt, Human
agggccaacaguucacaucugucuccaagcca

SEQ ID NO: 324735 - RNA, 19 nt, Human
agggccaaccacagaaugc

SEQ ID NO: 324736 - RNA, 21 nt, Human
agggccaagaccuacugcgga

SEQ ID NO: 324737 - RNA, 32 nt, Human
agggccaagagaaaggccugcacacaagccca

SEQ ID NO: 324738 - RNA, 21 nt, Human
agggccaagagggccugugga

SEQ ID NO: 324739 - RNA, 24 nt, Human
agggccaagcagaguucuuuugga

SEQ ID NO: 324740 - RNA, 32 nt, Human
agggccaagcuaccagaaaaguagaaguggag

SEQ ID NO: 324741 - RNA, 32 nt, Human
agggccaaggcauugcuguaagaaaaggucua

SEQ ID NO: 324742 - RNA, 32 nt, Human
agggccaaggccgggugcagugguucacgccu

SEQ ID NO: 324743 - RNA, 24 nt, Human
agggccaaggggaacuauugugga

SEQ ID NO: 324744 - RNA, 32 nt, Human
agggccaaguacaggcaaucacccccaucuuc

SEQ ID NO: 324745 - RNA, 22 nt, Human
agggccaaguggacaucuugga

SEQ ID NO: 324746 - RNA, 22 nt, Human
agggccaaguguuccuguucau

SEQ ID NO: 324747 - RNA, 32 nt, Human
agggccacagcccagcgagggugagguggggg

SEQ ID NO: 324748 - RNA, 19 nt, Human
agggccacaggacccggga

SEQ ID NO: 324749 - RNA, 23 nt, Human
agggccacaucgggcuguuuugc

SEQ ID NO: 324750 - RNA, 21 nt, Human
agggccacaugggaggcucac

SEQ ID NO: 324751 - RNA, 21 nt, Human
agggccaccaaccccagggaa

SEQ ID NO: 324752 - RNA, 32 nt, Human
agggccaccauccuccagaccccagaauggug

SEQ ID NO: 324753 - RNA, 32 nt, Human
agggccaccauccuccagaucccagaauguag

SEQ ID NO: 324754 - RNA, 24 nt, Human
agggccaccccgucccuccucucc

SEQ ID NO: 324755 - RNA, 32 nt, Human
agggccacguucuccuggcccuuggggaucgu

SEQ ID NO: 324756 - RNA, 32 nt, Human
agggccacuacacuccagccugggugacagag

SEQ ID NO: 324757 - RNA, 32 nt, Human
agggccacucuugcccuggagaucuuggccuu

SEQ ID NO: 324758 - RNA, 32 nt, Human
agggccacuggaaacugucccaggaacgaugg

SEQ ID NO: 324759 - RNA, 21 nt, Human
agggccacuguccuccaggca

SEQ ID NO: 324760 - RNA, 21 nt, Human
agggccacuuagagagcagua

SEQ ID NO: 324761 - RNA, 32 nt, Human
agggccacuuguugaagucugagcacuuuaug

SEQ ID NO: 324762 - RNA, 32 nt, Human
agggccagacaaggcucaguggaucuggucug

SEQ ID NO: 324763 - RNA, 23 nt, Human
agggccagaccuugccucugggc

SEQ ID NO: 324764 - RNA, 32 nt, Human
agggccagagaagggguucucaaacugggguc

SEQ ID NO: 324765 - RNA, 32 nt, Human
agggccagagaggcaccuucucaagcgcagga

SEQ ID NO: 324766 - RNA, 32 nt, Human
agggccagagcagaggacacauggccuugcgu

SEQ ID NO: 324767 - RNA, 32 nt, Human
agggccagagccaaggccagagccagggcccg

SEQ ID NO: 324768 - RNA, 23 nt, Human
agggccagagccaugcaguccca

SEQ ID NO: 324769 - RNA, 22 nt, Human
agggccagagcgagccaugcca

SEQ ID NO: 324770 - RNA, 32 nt, Human
agggccagagcggggcagacauggacaagcgg

SEQ ID NO: 324771 - RNA, 32 nt, Human
agggccagagcugagggggucucagucacuuc

SEQ ID NO: 324772 - RNA, 32 nt, Human
agggccagcacauggaauaaaauagccagggc

SEQ ID NO: 324773 - RNA, 19 nt, Human
agggccagcaggcagcgcc

SEQ ID NO: 324774 - RNA, 32 nt, Human
agggccagccccggcugagaggacaggagugu

SEQ ID NO: 324775 - RNA, 23 nt, Human
agggccagccuccagcgcugcuc

SEQ ID NO: 324776 - RNA, 32 nt, Human
agggccagccuccagcgcugcucuuucuguag

SEQ ID NO: 324777 - RNA, 32 nt, Human
agggccagcugaugccgggagcuaacuaccgc

SEQ ID NO: 324778 - RNA, 32 nt, Human
agggccagcugcagagggcucucucuaggcag

SEQ ID NO: 324779 - RNA, 32 nt, Human
agggccagcugcccucuggcucuggcuguggc

SEQ ID NO: 324780 - RNA, 32 nt, Human
agggccagcuuugauaauggagcgagaugcca

SEQ ID NO: 324781 - RNA, 21 nt, Human
agggccaggaaccaggcugcc

SEQ ID NO: 324782 - RNA, 19 nt, Human
agggccaggaagccugagc

SEQ ID NO: 324783 - RNA, 32 nt, Human
agggccaggagagagaucuagaaaguggguuc

SEQ ID NO: 324784 - RNA, 32 nt, Human
agggccaggcaaggccagagugcuaggggcag

SEQ ID NO: 324785 - RNA, 32 nt, Human
agggccaggccgcccccuccccgagaccuguc

SEQ ID NO: 324786 - RNA, 32 nt, Human
agggccaggccugggucuagaauucuugcugc

SEQ ID NO: 324787 - RNA, 32 nt, Human
agggccaggcggggccaaauuccaucugcugc

SEQ ID NO: 324788 - RNA, 32 nt, Human
agggccagggaaugacagaaucagggccugau

SEQ ID NO: 324789 - RNA, 24 nt, Human
agggccagggauguucauugugga

SEQ ID NO: 324790 - RNA, 32 nt, Human
agggccagggcgggaggagcuggggagcuggg

SEQ ID NO: 324791 - RNA, 32 nt, Human
agggccagggcugaugguacugcuggcccaac

SEQ ID NO: 324792 - RNA, 22 nt, Human
agggccaggggcuucugugaga

SEQ ID NO: 324793 - RNA, 21 nt, Human
agggccaggguacgcagcucc

SEQ ID NO: 324794 - RNA, 23 nt, Human
agggccagguccuggucugugga

SEQ ID NO: 324795 - RNA, 21 nt, Human
agggccaggucuaggggccag

SEQ ID NO: 324796 - RNA, 32 nt, Human
agggccagguggguucauauuuacagauaugc

SEQ ID NO: 324797 - RNA, 21 nt, Human
agggccagucgagccugucca

SEQ ID NO: 324798 - RNA, 32 nt, Human
agggccagugccuggcaugugucccagggaca

SEQ ID NO: 324799 - RNA, 32 nt, Human
agggccagugcucugugccacucuggagaaau

SEQ ID NO: 324800 - RNA, 32 nt, Human
agggccaguggcagcuucccagccucuuuggg

SEQ ID NO: 324801 - RNA, 32 nt, Human
agggccaguggguuuucauggugaacugaggg

SEQ ID NO: 324802 - RNA, 32 nt, Human
agggccaguguacaaaccagcaccugcuagga

SEQ ID NO: 324803 - RNA, 32 nt, Human
agggccaguucugcucccuggcuccacugagc

SEQ ID NO: 324804 - RNA, 32 nt, Human
agggccaguucugugggcucuagucggccaua

SEQ ID NO: 324805 - RNA, 24 nt, Human
agggccauaugcgauuauguuuca

SEQ ID NO: 324806 - RNA, 27 nt, Human
agggccauccaacuacggaccugccca

SEQ ID NO: 324807 - RNA, 32 nt, Human
agggccauccuugggcuaacaacugggguggg

SEQ ID NO: 324808 - RNA, 31 nt, Human
agggccaugaaacuacaggccgugauggaga

SEQ ID NO: 324809 - RNA, 19 nt, Human
agggccaugccugcuucau

SEQ ID NO: 324810 - RNA, 31 nt, Human
agggccauggagaagaggcugggagucaagc

SEQ ID NO: 324811 - RNA, 31 nt, Human
agggccauggcagagggugaggauaugcaga

SEQ ID NO: 324812 - RNA, 24 nt, Human
agggccauguaguucuugcuucgc

SEQ ID NO: 324813 - RNA, 32 nt, Human
agggccauucaccaggagcaugcggcucccug

SEQ ID NO: 324814 - RNA, 32 nt, Human
agggcccaaacccugaggccauuaggccugau

SEQ ID NO: 324815 - RNA, 32 nt, Human
agggcccacagcccggacucagccacagcaga

SEQ ID NO: 324816 - RNA, 32 nt, Human
agggcccacccuccuuuuucagccucugcaua

SEQ ID NO: 324817 - RNA, 32 nt, Human
agggcccaccuccaaauaccaucacauuggga

SEQ ID NO: 324818 - RNA, 32 nt, Human
agggcccaccugcugguuggugaaagcagugg

SEQ ID NO: 324819 - RNA, 32 nt, Human
agggcccacugcagccucagcccaggagccac

SEQ ID NO: 324820 - RNA, 32 nt, Human
agggcccacuugcccagcaccaaggcgagcuc

SEQ ID NO: 324821 - RNA, 31 nt, Human
agggcccagagaggcgguggggugggcgacc

SEQ ID NO: 324822 - RNA, 31 nt, Human
agggcccagagaguggguggagaagcucugc

SEQ ID NO: 324823 - RNA, 32 nt, Human
agggcccagagcuuuggccagagcagagaaca

SEQ ID NO: 324824 - RNA, 32 nt, Human
agggcccagcagcaaccugccgcugccgcuga

SEQ ID NO: 324825 - RNA, 32 nt, Human
agggcccagcugucuugccugcccgugggcac

SEQ ID NO: 324826 - RNA, 32 nt, Human
agggcccaggaggucaaggcuucagugagcca

SEQ ID NO: 324827 - RNA, 32 nt, Human
agggcccaggcaggccaccauauucagugcug

SEQ ID NO: 324828 - RNA, 32 nt, Human
agggcccaggcaggcggccuauccugauccuu

SEQ ID NO: 324829 - RNA, 32 nt, Human
agggcccagggcaagcagaggcagcaaugguu

SEQ ID NO: 324830 - RNA, 32 nt, Human
agggcccaggggcagagcucucccuaugcuac

SEQ ID NO: 324831 - RNA, 32 nt, Human
agggcccagggugggugucccugggagcccug

SEQ ID NO: 324832 - RNA, 28 nt, Human
agggccccaagugucugacucgcaaagg

SEQ ID NO: 324833 - RNA, 32 nt, Human
agggccccagaacgaggaaggagcggaguugg

SEQ ID NO: 324834 - RNA, 32 nt, Human
agggccccagcacggggcuggacugccacagc

SEQ ID NO: 324835 - RNA, 32 nt, Human
agggccccagccagggcagcuuucaggguggg

SEQ ID NO: 324836 - RNA, 32 nt, Human
agggccccaggcucguuuuccuuuauagcgaa

SEQ ID NO: 324837 - RNA, 32 nt, Human
agggccccagggugggaugguggggagauaag

SEQ ID NO: 324838 - RNA, 32 nt, Human
agggcccccagaggaagcccucagccucugcc

SEQ ID NO: 324839 - RNA, 21 nt, Human
agggccccccugccccaccgc

SEQ ID NO: 324840 - RNA, 32 nt, Human
agggcccccugccugcucugguccaccccguc

SEQ ID NO: 324841 - RNA, 32 nt, Human
agggccccgagcgaaggaaggaagggaggcgc

SEQ ID NO: 324842 - RNA, 19 nt, Human
agggccccgcccuccuccc

SEQ ID NO: 324843 - RNA, 32 nt, Human
agggccccuccaggacugccaagcucccaaag

SEQ ID NO: 324844 - RNA, 32 nt, Human
agggccccucccuugccugccacuuuggggac

SEQ ID NO: 324845 - RNA, 32 nt, Human
agggccccucgccuuccuccccuggaccuggg

SEQ ID NO: 324846 - RNA, 21 nt, Human
agggccccucuccccagggaa

SEQ ID NO: 324847 - RNA, 32 nt, Human
agggccccuucccucuaaaccuuuccuccauu

SEQ ID NO: 324848 - RNA, 32 nt, Human
agggcccgauggggugccuccuugucccaagu

SEQ ID NO: 324849 - RNA, 32 nt, Human
agggcccgcggcuucauucuugaagucaguga

SEQ ID NO: 324850 - RNA, 32 nt, Human
agggcccggcgccguccguggaugagccacag

SEQ ID NO: 324851 - RNA, 32 nt, Human
agggcccggcuggaggcugacaggcuuccaag

SEQ ID NO: 324852 - RNA, 24 nt, Human
agggcccgguggugucugcuucac

SEQ ID NO: 324853 - RNA, 32 nt, Human
agggcccuaagaguguggucugcagggucaag

SEQ ID NO: 324854 - RNA, 18 nt, Human
agggcccuccccucugcc

SEQ ID NO: 324855 - RNA, 22 nt, Human
agggcccuccugaaccccauca

SEQ ID NO: 324856 - RNA, 20 nt, Human
agggcccuccuuguccaugu

SEQ ID NO: 324857 - RNA, 32 nt, Human
agggcccucgaaugccauucacaggaacagcc

SEQ ID NO: 324858 - RNA, 18 nt, Human
agggcccucggccgggga

SEQ ID NO: 324859 - RNA, 32 nt, Human
agggcccugaacaccaggcucaggggcuugcu

SEQ ID NO: 324860 - RNA, 32 nt, Human
agggcccugaccaucuucuccucccagggcca

SEQ ID NO: 324861 - RNA, 32 nt, Human
agggcccugagcuugccgugaggagcacauuu

SEQ ID NO: 324862 - RNA, 32 nt, Human
agggcccugcagccuccagccagagugcccuc

SEQ ID NO: 324863 - RNA, 32 nt, Human
agggcccugcuacuguucagggauggggagug

SEQ ID NO: 324864 - RNA, 32 nt, Human
agggcccuggaaggaagggucuccugcugcca

SEQ ID NO: 324865 - RNA, 32 nt, Human
agggcccuggagcaccugguuucggggacagu

SEQ ID NO: 324866 - RNA, 32 nt, Human
agggcccuggagugagaaagccuggauuuuca

SEQ ID NO: 324867 - RNA, 24 nt, Human
agggcccugggcccugugcuguca

SEQ ID NO: 324868 - RNA, 32 nt, Human
agggcccuguaugauaggauuaaugcccuuuu

SEQ ID NO: 324869 - RNA, 32 nt, Human
agggcccugugaaaagcucuucaccuccucug

SEQ ID NO: 324870 - RNA, 32 nt, Human
agggcccuuagcauggccacacauguccccag

SEQ ID NO: 324871 - RNA, 32 nt, Human
agggcccuucagaccccagcugucugcgcguc

SEQ ID NO: 324872 - RNA, 32 nt, Human
agggcccuuccagagccugucauguccuugug

SEQ ID NO: 324873 - RNA, 32 nt, Human
agggcccuuggccuccccagugccucuuccag

SEQ ID NO: 324874 - RNA, 32 nt, Human
agggcccuugucugagaaaccccaaaccagga

SEQ ID NO: 324875 - RNA, 22 nt, Human
agggccgagaaggcgcgugcca

SEQ ID NO: 324876 - RNA, 21 nt, Human
agggccgagccggaacuccac

SEQ ID NO: 324877 - RNA, 18 nt, Human
agguggaagaaggcugcu

SEQ ID NO: 324878 - RNA, 32 nt, Human
agguggaagcagaggcccugcccccaccccuu

SEQ ID NO: 324879 - RNA, 32 nt, Human
agguggaaggaaggaggaaaggagaggggccu

SEQ ID NO: 324880 - RNA, 23 nt, Human
agguggaaggauugcucgaggcc

SEQ ID NO: 324881 - RNA, 32 nt, Human
agguggaaggauugcucgaggccagguguucg

SEQ ID NO: 324882 - RNA, 23 nt, Human
agguggaaggauugcuugagucc

SEQ ID NO: 324883 - RNA, 24 nt, Human
agguggacagaucacgaggucagg

SEQ ID NO: 324884 - RNA, 32 nt, Human
agguggaccuggcagugguggaggugggcauu

SEQ ID NO: 324885 - RNA, 22 nt, Human
agguggacgcaccugccuggag

SEQ ID NO: 324886 - RNA, 24 nt, Human
agguggacggaucacgaggucagg

SEQ ID NO: 324887 - RNA, 26 nt, Human
agguggacggaucauuugaggucagg

SEQ ID NO: 324888 - RNA, 32 nt, Human
agguggacugccucucucauucccaggagcug

SEQ ID NO: 324889 - RNA, 32 nt, Human
agguggacuugcucccccucccugagagcuaa

SEQ ID NO: 324890 - RNA, 32 nt, Human
agguggagaacagccccucuccccgcgccccc

SEQ ID NO: 324891 - RNA, 32 nt, Human
agguggagaagagguacaaaggaaaacgagag

SEQ ID NO: 324892 - RNA, 23 nt, Human
agguggagaauugcuugaaccca

SEQ ID NO: 324893 - RNA, 32 nt, Human
agguggagagaccuggaggagugaggccacag

SEQ ID NO: 324894 - RNA, 32 nt, Human
agguggagagagaagagcagaguaccaggacg

SEQ ID NO: 324895 - RNA, 32 nt, Human
agguggagagagaagagcagaguaccaggaug

SEQ ID NO: 324896 - RNA, 32 nt, Human
agguggagagugggaagcaggagcccagccag

SEQ ID NO: 324897 - RNA, 32 nt, Human
agguggagaucagaagccagggauuagagauu

SEQ ID NO: 324898 - RNA, 32 nt, Human
agguggagauccaaguggaggugggagcggag

SEQ ID NO: 324899 - RNA, 32 nt, Human
agguggagaugguggaggugguggugguggug

SEQ ID NO: 324900 - RNA, 32 nt, Human
agguggagccaccggcccggccuggauuuucc

SEQ ID NO: 324901 - RNA, 32 nt, Human
agguggagcccccauuuaaaccucuguugcaa

SEQ ID NO: 324902 - RNA, 32 nt, Human
agguggagcucccacagccagcaguaaucagg

SEQ ID NO: 324903 - RNA, 32 nt, Human
agguggagcugcugggcugcgagccagggguu

SEQ ID NO: 324904 - RNA, 30 nt, Human
agguggagcuugcaaugagccgagaucgcg

SEQ ID NO: 324905 - RNA, 19 nt, Human
agguggagcuugcagugag

SEQ ID NO: 324906 - RNA, 30 nt, Human
agguggagcuugcagugagccaagaucacg

SEQ ID NO: 324907 - RNA, 30 nt, Human
agguggagcuugcagugagccaagaucgca

SEQ ID NO: 324908 - RNA, 30 nt, Human
agguggagcuugcagugagccaagaucgcg

SEQ ID NO: 324909 - RNA, 30 nt, Human
agguggagcuugcagugagccaagaucgua

SEQ ID NO: 324910 - RNA, 30 nt, Human
agguggagcuugcagugagccgagaccgug

SEQ ID NO: 324911 - RNA, 30 nt, Human
agguggagcuugcagugagcggagaucgcg

SEQ ID NO: 324912 - RNA, 32 nt, Human
agguggaggaagaaauccagacccuagcacgc

SEQ ID NO: 324913 - RNA, 32 nt, Human
agguggaggagaaaggggaaucucccaaaauu

SEQ ID NO: 324914 - RNA, 32 nt, Human
agguggaggaggaggaagaggagaaggaaaag

SEQ ID NO: 324915 - RNA, 32 nt, Human
agguggaggaggaggaggaagagguggaggag

SEQ ID NO: 324916 - RNA, 32 nt, Human
agguggaggaggaggaggaagaucaggaggag

SEQ ID NO: 324917 - RNA, 32 nt, Human
agguggaggaggaggaggaggaggaggaggug

SEQ ID NO: 324918 - RNA, 32 nt, Human
agguggaggaggaggaggaggaggugguggag

SEQ ID NO: 324919 - RNA, 32 nt, Human
agguggaggagggaggggaggagcaggugggc

SEQ ID NO: 324920 - RNA, 32 nt, Human
agguggaggcgagaugagcugcgcagccccgc

SEQ ID NO: 324921 - RNA, 32 nt, Human
agguggagggcaagccauccugacugagcagu

SEQ ID NO: 324922 - RNA, 32 nt, Human
agguggagggucucgcucugucacacaggcug

SEQ ID NO: 324923 - RNA, 32 nt, Human
agguggagguggagguugcagugagccgagau

SEQ ID NO: 324924 - RNA, 18 nt, Human
agguggagguugcaguga

SEQ ID NO: 324925 - RNA, 19 nt, Human
agguggagguugcagugag

SEQ ID NO: 324926 - RNA, 32 nt, Human
agguggagguugcagugagucaagauggcacc

SEQ ID NO: 324927 - RNA, 32 nt, Human
agguggaguacacggcagacucgaccguggca

SEQ ID NO: 324928 - RNA, 32 nt, Human
agguggagugggcagaggugcaagagagggau

SEQ ID NO: 324929 - RNA, 32 nt, Human
agguggauaagaaggugaaaagggggucccug

SEQ ID NO: 324930 - RNA, 32 nt, Human
agguggauaauugaggccuacaagagagggga

SEQ ID NO: 324931 - RNA, 24 nt, Human
agguggauagaucacuugagguca

SEQ ID NO: 324932 - RNA, 26 nt, Human
agguggauagaucacuugaggucagg

SEQ ID NO: 324933 - RNA, 32 nt, Human
agguggaucacugaggucagggguucaagacc

SEQ ID NO: 324934 - RNA, 32 nt, Human
agguggaucccuugagcccaggaguucgagac

SEQ ID NO: 324935 - RNA, 32 nt, Human
agguggaugcagccaugaauacaaggccacac

SEQ ID NO: 324936 - RNA, 32 nt, Human
agguggauggccacuggcagugauggggaugg

SEQ ID NO: 324937 - RNA, 32 nt, Human
agguggaugguucuacccuuucugccuucugu

SEQ ID NO: 324938 - RNA, 32 nt, Human
agguggaugucccuaggucuguuuucaaagaa

SEQ ID NO: 324939 - RNA, 32 nt, Human
agguggauguugcagugagcugagaccaugcc

SEQ ID NO: 324940 - RNA, 32 nt, Human
agguggauguugcagugagcugagauugugcc

SEQ ID NO: 324941 - RNA, 26 nt, Human
agguggauugagaagagagucccaga

SEQ ID NO: 324942 - RNA, 32 nt, Human
agguggauugagaagagagucccagaggagaa

SEQ ID NO: 324943 - RNA, 32 nt, Human
agguggcaaaauggguacagggggagucaggc

SEQ ID NO: 324944 - RNA, 32 nt, Human
agguggcaagaugguguuggaaagcacuaugg

SEQ ID NO: 324945 - RNA, 32 nt, Human
agguggcaaugugugucaggugacuaucagcc

SEQ ID NO: 324946 - RNA, 32 nt, Human
agguggcacacaggcgcugucucuccagagcc

SEQ ID NO: 324947 - RNA, 32 nt, Human
agguggcaccacugccgucauuucagcuucug

SEQ ID NO: 324948 - RNA, 32 nt, Human
agguggcaccacugccuucauuucagcuuccg

SEQ ID NO: 324949 - RNA, 32 nt, Human
agguggcacccugcgggaccuggaucugggcg

SEQ ID NO: 324950 - RNA, 32 nt, Human
agguggcagauguuugaggaaaggaauuaugc

SEQ ID NO: 324951 - RNA, 32 nt, Human
agguggcagccacagaagccuaggcagaccaa

SEQ ID NO: 324952 - RNA, 32 nt, Human
agguggcagccccugcccacucccaugcuggu

SEQ ID NO: 324953 - RNA, 32 nt, Human
agguggcagcugcgaaucuauucuuuaacaau

SEQ ID NO: 324954 - RNA, 32 nt, Human
agguggcaggcagagcaggaugcagaggcaca

SEQ ID NO: 324955 - RNA, 32 nt, Human
agguggcagggcccuauggagcaccaacugcc

SEQ ID NO: 324956 - RNA, 32 nt, Human
agguggcagggccuuggggagccccagcacaa

SEQ ID NO: 324957 - RNA, 32 nt, Human
agguggcaguagaggauuccuuuugcuuuaaa

SEQ ID NO: 324958 - RNA, 32 nt, Human
agguggcagugagccgagaucacaccauugca

SEQ ID NO: 324959 - RNA, 32 nt, Human
agguggcagugagccgagaucacgccacugua

SEQ ID NO: 324960 - RNA, 32 nt, Human
agguggcagugagccgagauugcgccauugca

SEQ ID NO: 324961 - RNA, 31 nt, Human
agguggcaguuucuuuuucagccucagaacu

SEQ ID NO: 324962 - RNA, 32 nt, Human
agguggcaucccugaguccugaugccugacug

SEQ ID NO: 324963 - RNA, 32 nt, Human
agguggcaucuaagggaagaauggguuuucuu

SEQ ID NO: 324964 - RNA, 32 nt, Human
agguggcauucaaagcgucauagguaaccagg

SEQ ID NO: 324965 - RNA, 32 nt, Human
agguggccaccaacacagaggcccugcagagc

SEQ ID NO: 324966 - RNA, 32 nt, Human
agguggccaccaacacagaggcccugcagagu

SEQ ID NO: 324967 - RNA, 32 nt, Human
agguggccaguauuuugcccacaacagguaca

SEQ ID NO: 324968 - RNA, 19 nt, Human
agguggcccacccucaggg

SEQ ID NO: 324969 - RNA, 32 nt, Human
agguggcccaggaaggugccuggcccagaaua

SEQ ID NO: 324970 - RNA, 32 nt, Human
agguggccccuggagucaugccuggagauucu

SEQ ID NO: 324971 - RNA, 32 nt, Human
agguggccccuggcucuggccuggugggcgga

SEQ ID NO: 324972 - RNA, 32 nt, Human
agguggccccuugugccagcaguggcuccucu

SEQ ID NO: 324973 - RNA, 23 nt, Human
agguggcccggaagaaccagaag

SEQ ID NO: 324974 - RNA, 32 nt, Human
agguggcccuggagacagaggacggagagggg

SEQ ID NO: 324975 - RNA, 32 nt, Human
agguggcccuggagaugggaaagugucugugu

SEQ ID NO: 324976 - RNA, 32 nt, Human
agguggccguaaccuuuggccuggggcagcug

SEQ ID NO: 324977 - RNA, 32 nt, Human
agguggccuccaggaggcagcugggaaaaggg

SEQ ID NO: 324978 - RNA, 32 nt, Human
agguggccuccucauagggcgucucgcugugg

SEQ ID NO: 324979 - RNA, 32 nt, Human
agguggccucuccuuguggccugggccuccuc

SEQ ID NO: 324980 - RNA, 32 nt, Human
agguggccuuguaaccuuucuguugccggcuc

SEQ ID NO: 324981 - RNA, 23 nt, Human
agguggcuauuccaccugguuca

SEQ ID NO: 324982 - RNA, 32 nt, Human
agguggcucacaccuauaaucccagcccuuug

SEQ ID NO: 324983 - RNA, 32 nt, Human
agguggcucacaccuauaauccuaggacuuug

SEQ ID NO: 324984 - RNA, 32 nt, Human
agguggcucccagggucuaauuggaggcaccu

SEQ ID NO: 324985 - RNA, 32 nt, Human
agguggcucucauuauuuuucaugauucuaaa

SEQ ID NO: 324986 - RNA, 31 nt, Human
agguggcucuggccucccaugucagguaggg

SEQ ID NO: 324987 - RNA, 18 nt, Human
agguggcugagccccagg

SEQ ID NO: 324988 - RNA, 32 nt, Human
agguggcugcgguagcagcagcgcggcagccu

SEQ ID NO: 324989 - RNA, 23 nt, Human
agguggcugcuuucucugggcug

SEQ ID NO: 324990 - RNA, 32 nt, Human
agguggcuggacugagugucccccaggcccag

SEQ ID NO: 324991 - RNA, 22 nt, Human
agguggcuggagcaggccucug

SEQ ID NO: 324992 - RNA, 32 nt, Human
agguggcuggcagaggcacaugcagacccuac

SEQ ID NO: 324993 - RNA, 32 nt, Human
agguggcuggcagaggcacaugcagacccugc

SEQ ID NO: 324994 - RNA, 32 nt, Human
agguggcugggcuggaaaggagggcagggcua

SEQ ID NO: 324995 - RNA, 32 nt, Human
agguggcuggggacccagagggaaggcagaag

SEQ ID NO: 324996 - RNA, 32 nt, Human
agguggcuguacugugagccuagggaaggcag

SEQ ID NO: 324997 - RNA, 20 nt, Human
agguggcugugcaugccuga

SEQ ID NO: 324998 - RNA, 32 nt, Human
agguggcuuguggggacugcaccagaaagugu

SEQ ID NO: 324999 - RNA, 32 nt, Human
agguggcuuugaccccggguugcccggccagc

SEQ ID NO: 325000 - RNA, 24 nt, Human
aggugggaaaaucacuugagccca

SEQ ID NO: 325001 - RNA, 24 nt, Human
aggugggaaaaugacuugagccca

SEQ ID NO: 325002 - RNA, 32 nt, Human
aggugggaaagccacggcaggcagcgagcagc

SEQ ID NO: 325003 - RNA, 32 nt, Human
aggugggaaaggagagcacuguucuuugauug

SEQ ID NO: 325004 - RNA, 32 nt, Human
aggugggaacagaagagagaaggaggcaggga

SEQ ID NO: 325005 - RNA, 32 nt, Human
aggugggaacauucucuguggccagugaggaa

SEQ ID NO: 325006 - RNA, 24 nt, Human
aggugggaagaucacuugagccca

SEQ ID NO: 325007 - RNA, 22 nt, Human
aggugggaagaucauuguucca

SEQ ID NO: 325008 - RNA, 24 nt, Human
aggugggaagaucauuugagccca

SEQ ID NO: 325009 - RNA, 24 nt, Human
aggugggaagaucccuugagccca

SEQ ID NO: 325010 - RNA, 24 nt, Human
aggugggaagaucucuugagccca

SEQ ID NO: 325011 - RNA, 24 nt, Human
aggugggaagauggcuugagccca

SEQ ID NO: 325012 - RNA, 24 nt, Human
aggugggaagauugccugagcuca

SEQ ID NO: 325013 - RNA, 24 nt, Human
aggugggaagauugcuugaacuca

SEQ ID NO: 325014 - RNA, 24 nt, Human
aggugggaagauugcuugagccca

SEQ ID NO: 325015 - RNA, 32 nt, Human
aggugggaaggcaguuaugacaguugagaagu

SEQ ID NO: 325016 - RNA, 32 nt, Human
aggugggaagggucggauggaggacucugcca

SEQ ID NO: 325017 - RNA, 32 nt, Human
aggugggaauugagggugagggguuuggggaa

SEQ ID NO: 325018 - RNA, 32 nt, Human
aggugggaccacaggcaugcgccagccaccau

SEQ ID NO: 325019 - RNA, 32 nt, Human
aggugggaccagagcuuccagcauagauucaa

SEQ ID NO: 325020 - RNA, 32 nt, Human
aggugggacccucgaggacaggccguagcccu

SEQ ID NO: 325021 - RNA, 32 nt, Human
aggugggacggggaguguugacccuggguggc

SEQ ID NO: 325022 - RNA, 32 nt, Human
aggugggacuacagaugugugccaccaagccu

SEQ ID NO: 325023 - RNA, 32 nt, Human
aggugggacuacaggcaccugccaccacccug

SEQ ID NO: 325024 - RNA, 32 nt, Human
aggugggacuacaggcgcacaccaccaugccc

SEQ ID NO: 325025 - RNA, 32 nt, Human
aggugggacuacaggugcccgccaccacaccc

SEQ ID NO: 325026 - RNA, 32 nt, Human
aggugggacuacaggugcccgccaccacgccc

SEQ ID NO: 325027 - RNA, 32 nt, Human
aggugggacuauagguucgcaccaccacuccc

SEQ ID NO: 325028 - RNA, 32 nt, Human
aggugggacuccaggcaugcaccaccaugccu

SEQ ID NO: 325029 - RNA, 32 nt, Human
aggugggacuggcucucccuccccagccacga

SEQ ID NO: 325030 - RNA, 24 nt, Human
aggugggagaaucacaaggucagg

SEQ ID NO: 325031 - RNA, 23 nt, Human
aggugggagaaucacuugaaccc

SEQ ID NO: 325032 - RNA, 24 nt, Human
aggugggagaaucacuugaauccc

SEQ ID NO: 325033 - RNA, 24 nt, Human
aggugggagaaucacuugagccca

SEQ ID NO: 325034 - RNA, 23 nt, Human
aggugggagaaucacuuggacuc

SEQ ID NO: 325035 - RNA, 24 nt, Human
aggugggagaaucgcuuaacccca

SEQ ID NO: 325036 - RNA, 23 nt, Human
aggugggagaaucgcuugaaccc

SEQ ID NO: 325037 - RNA, 24 nt, Human
aggugggagaaucgcuugaaccca

SEQ ID NO: 325038 - RNA, 24 nt, Human
aggugggagaaucgcuugagccca

SEQ ID NO: 325039 - RNA, 23 nt, Human
aggugggagaaucgcuugagucc

SEQ ID NO: 325040 - RNA, 32 nt, Human
aggugggagaauggguguaggaggcaggcccc

SEQ ID NO: 325041 - RNA, 24 nt, Human
aggugggagaauuaccugagccca

SEQ ID NO: 325042 - RNA, 24 nt, Human
aggugggagaauugccugagccca

SEQ ID NO: 325043 - RNA, 24 nt, Human
aggugggagaauugcucaagccca

SEQ ID NO: 325044 - RNA, 20 nt, Human
aggugggagaauugcuugaa

SEQ ID NO: 325045 - RNA, 23 nt, Human
aggugggagaauugcuugaaccc

SEQ ID NO: 325046 - RNA, 24 nt, Human
aggugggagaauugcuugaaccca

SEQ ID NO: 325047 - RNA, 23 nt, Human
aggugggagaauugcuugaaccu

SEQ ID NO: 325048 - RNA, 23 nt, Human
aggugggagaauugcuugaagcc

SEQ ID NO: 325049 - RNA, 24 nt, Human
aggugggagaauugcuugagccca

SEQ ID NO: 325050 - RNA, 23 nt, Human
aggugggagaauugcuugagcuu

SEQ ID NO: 325051 - RNA, 31 nt, Human
aggugggagagagucaggcaggagccgaggc

SEQ ID NO: 325052 - RNA, 23 nt, Human
aggugggagagaugcugagccca

SEQ ID NO: 325053 - RNA, 21 nt, Human
aggugggagagcaggccccug

SEQ ID NO: 325054 - RNA, 32 nt, Human
aggugggagagggccugggggcugggaggcag

SEQ ID NO: 325055 - RNA, 32 nt, Human
aggugggagaggguagcagcaugggcuacgcg

SEQ ID NO: 325056 - RNA, 32 nt, Human
aggugggagauaagggaaguggggugagagga

SEQ ID NO: 325057 - RNA, 23 nt, Human
aggugggagaucgcuuaaaccca

SEQ ID NO: 325058 - RNA, 32 nt, Human
aggugggagccaccgcacccagccugcagguc

SEQ ID NO: 325059 - RNA, 32 nt, Human
aggugggagccacugcacccggccugaaugau

SEQ ID NO: 325060 - RNA, 23 nt, Human
aggugggagcugccuuugcccca

SEQ ID NO: 325061 - RNA, 32 nt, Human
aggugggagcugcugggugaggcagggaaccc

SEQ ID NO: 325062 - RNA, 32 nt, Human
aggugggaggaagagagaccucagggaaaaua

SEQ ID NO: 325063 - RNA, 24 nt, Human
aggugggaggacgacuugagccca

SEQ ID NO: 325064 - RNA, 21 nt, Human
aggugggaggacuaacuucca

SEQ ID NO: 325065 - RNA, 24 nt, Human
aggugggaggacugcuuaagcuca

SEQ ID NO: 325066 - RNA, 32 nt, Human
aggugggaggacugcuugaggccaggaguucg

SEQ ID NO: 325067 - RNA, 23 nt, Human
aggugggaggagaccugauccca

SEQ ID NO: 325068 - RNA, 24 nt, Human
aggugggaggaguacuugagccca

SEQ ID NO: 325069 - RNA, 32 nt, Human
aggugggaggagugcuugaggccaggaguuca

SEQ ID NO: 325070 - RNA, 24 nt, Human
aggugggaggauaguuugacccca

SEQ ID NO: 325071 - RNA, 24 nt, Human
aggugggaggaucaccugagcuca

SEQ ID NO: 325072 - RNA, 23 nt, Human
aggugggaggaucacucgagucc

SEQ ID NO: 325073 - RNA, 23 nt, Human
aggugggaggaucacugagacca

SEQ ID NO: 325074 - RNA, 23 nt, Human
aggugggaggaucacuggaaccc

SEQ ID NO: 325075 - RNA, 23 nt, Human
aggugggaggaucacuuaagccc

SEQ ID NO: 325076 - RNA, 24 nt, Human
aggugggaggaucacuucagccca

SEQ ID NO: 325077 - RNA, 23 nt, Human
aggugggaggaucacuugaaccc

SEQ ID NO: 325078 - RNA, 24 nt, Human
aggugggaggaucacuugaaccca

SEQ ID NO: 325079 - RNA, 24 nt, Human
aggugggaggaucacuugaaccua

SEQ ID NO: 325080 - RNA, 24 nt, Human
aggugggaggaucacuugaacuca

SEQ ID NO: 325081 - RNA, 23 nt, Human
aggugggaggaucacuugagccc

SEQ ID NO: 325082 - RNA, 24 nt, Human
aggugggaggaucacuugagccca

SEQ ID NO: 325083 - RNA, 23 nt, Human
aggugggaggaucacuugagccu

SEQ ID NO: 325084 - RNA, 23 nt, Human
aggugggaggaucacuugauccu

SEQ ID NO: 325085 - RNA, 23 nt, Human
aggugggaggaucacuuggacuu

SEQ ID NO: 325086 - RNA, 24 nt, Human
aggugggaggaucacuugggucca

SEQ ID NO: 325087 - RNA, 23 nt, Human
aggugggaggaucacuuguggcc

SEQ ID NO: 325088 - RNA, 23 nt, Human
aggugggaggaucaguugagccc

SEQ ID NO: 325089 - RNA, 22 nt, Human
aggugggaggaucaugagguca

SEQ ID NO: 325090 - RNA, 24 nt, Human
aggugggaggaucauuggaucuca

SEQ ID NO: 325091 - RNA, 24 nt, Human
aggugggaggaucauuugaaccca

SEQ ID NO: 325092 - RNA, 24 nt, Human
aggugggaggaucauuugagccca

SEQ ID NO: 325093 - RNA, 24 nt, Human
aggugggaggaucccuugagccca

SEQ ID NO: 325094 - RNA, 24 nt, Human
aggugggaggaucccuugauccca

SEQ ID NO: 325095 - RNA, 23 nt, Human
aggugggaggaucgccugaaccu

SEQ ID NO: 325096 - RNA, 24 nt, Human
aggugggaggaucgccugagccca

SEQ ID NO: 325097 - RNA, 23 nt, Human
aggugggaggaucgccugagccu

SEQ ID NO: 325098 - RNA, 23 nt, Human
aggugggaggaucgcuggagccu

SEQ ID NO: 325099 - RNA, 24 nt, Human
aggugggaggaucgcuuaagccca

SEQ ID NO: 325100 - RNA, 24 nt, Human
aggugggaggaucgcuugaaccca

SEQ ID NO: 325101 - RNA, 24 nt, Human
aggugggaggaucgcuugagacca

SEQ ID NO: 325102 - RNA, 23 nt, Human
aggugggaggaucgcuugagccc

SEQ ID NO: 325103 - RNA, 24 nt, Human
aggugggaggaucgcuugagccca

SEQ ID NO: 325104 - RNA, 23 nt, Human
aggugggaggaucgcuugagccu

SEQ ID NO: 325105 - RNA, 23 nt, Human
aggugggaggaucgcuugugccu

SEQ ID NO: 325106 - RNA, 24 nt, Human
aggugggaggaucgguugagccca

SEQ ID NO: 325107 - RNA, 24 nt, Human
aggugggaggaucucuugagccca

SEQ ID NO: 325108 - RNA, 24 nt, Human
aggugggaggaucuuuugaaccca

SEQ ID NO: 325109 - RNA, 24 nt, Human
aggugggaggauggcuugagccca

SEQ ID NO: 325110 - RNA, 24 nt, Human
aggugggaggauuacuggauccca

SEQ ID NO: 325111 - RNA, 24 nt, Human
aggugggaggauuacuugagacca

SEQ ID NO: 325112 - RNA, 23 nt, Human
aggugggaggauugcccgagucc

SEQ ID NO: 325113 - RNA, 24 nt, Human
aggugggaggauugccugagccca

SEQ ID NO: 325114 - RNA, 23 nt, Human
aggugggaggauugcuuaagccc

SEQ ID NO: 325115 - RNA, 23 nt, Human
aggugggaggauugcuugaaccc

SEQ ID NO: 325116 - RNA, 24 nt, Human
aggugggaggauugcuugaaccca

SEQ ID NO: 325117 - RNA, 22 nt, Human
aggugggaggauugcuugaccc

SEQ ID NO: 325118 - RNA, 24 nt, Human
aggugggaggauugcuugagacca

SEQ ID NO: 325119 - RNA, 22 nt, Human
aggugggaggauugcuugagcc

SEQ ID NO: 325120 - RNA, 23 nt, Human
aggugggaggauugcuugagccc

SEQ ID NO: 325121 - RNA, 24 nt, Human
aggugggaggauugcuugagccca

SEQ ID NO: 325122 - RNA, 23 nt, Human
aggugggaggauugcuugagccu

SEQ ID NO: 325123 - RNA, 24 nt, Human
aggugggaggauugcuugagccua

SEQ ID NO: 325124 - RNA, 24 nt, Human
aggugggaggauugcuugagcuca

SEQ ID NO: 325125 - RNA, 23 nt, Human
aggugggaggauugcuugaggcc

SEQ ID NO: 325126 - RNA, 23 nt, Human
aggugggaggauugcuugagucc

SEQ ID NO: 325127 - RNA, 23 nt, Human
aggugggaggauugcuugggccu

SEQ ID NO: 325128 - RNA, 24 nt, Human
aggugggaggauugcuugguccca

SEQ ID NO: 325129 - RNA, 23 nt, Human
aggugggaggauugcuugugccu

SEQ ID NO: 325130 - RNA, 23 nt, Human
aggugggaggauugcuuguuccc

SEQ ID NO: 325131 - RNA, 24 nt, Human
aggugggaggauugcuuuagccca

SEQ ID NO: 325132 - RNA, 24 nt, Human
aggugggaggauuguuugagccca

SEQ ID NO: 325133 - RNA, 32 nt, Human
aggugggaggggaagggagaaauccaaaacaa

SEQ ID NO: 325134 - RNA, 32 nt, Human
aggugggaggggcaggaagcagccggagugag

SEQ ID NO: 325135 - RNA, 32 nt, Human
aggugggaggggccauggagacugcaggacag

SEQ ID NO: 325136 - RNA, 32 nt, Human
aggugggaggggccucagcaggcucccagcuc

SEQ ID NO: 325137 - RNA, 24 nt, Human
aggugggagggucgcuugagccca

SEQ ID NO: 325138 - RNA, 24 nt, Human
aggugggaggguugcuugagccca

SEQ ID NO: 325139 - RNA, 32 nt, Human
aggugggaggucagaggagauggaggcuggcu

SEQ ID NO: 325140 - RNA, 32 nt, Human
aggugggaggucagaggagaugggggcuggcu

SEQ ID NO: 325141 - RNA, 32 nt, Human
aggugggaggugggagaggaagguggaguacu

SEQ ID NO: 325142 - RNA, 24 nt, Human
aggugggagguuugcuuaagccca

SEQ ID NO: 325143 - RNA, 32 nt, Human
aggugggaguagcugaggaagacaaguggcug

SEQ ID NO: 325144 - RNA, 24 nt, Human
aggugggaguaucgcuugagccca

SEQ ID NO: 325145 - RNA, 21 nt, Human
aggugggagugagccgaccca

SEQ ID NO: 325146 - RNA, 32 nt, Human
aggugggauaagggucaggcccaggugacccc

SEQ ID NO: 325147 - RNA, 32 nt, Human
aggugggaugagcccaacacagcaacaacagc

SEQ ID NO: 325148 - RNA, 32 nt, Human
aggugggaugcagagguaacagaguuuaaaug

SEQ ID NO: 325149 - RNA, 32 nt, Human
aggugggauuacaagcaugcaccaccaugccc

SEQ ID NO: 325150 - RNA, 32 nt, Human
aggugggauuacaggcaugcaccaccaugccc

SEQ ID NO: 325151 - RNA, 32 nt, Human
aggugggauuacaggcaugcgccaccacgccu

SEQ ID NO: 325152 - RNA, 32 nt, Human
aggugggauuacaggugcauaccaccacaccu

SEQ ID NO: 325153 - RNA, 32 nt, Human
aggugggauuacaggugcccaccaccaagccc

SEQ ID NO: 325154 - RNA, 24 nt, Human
aggugggcaaaucacaaggucagg

SEQ ID NO: 325155 - RNA, 24 nt, Human
aggugggcaaaucaugaggucagg

SEQ ID NO: 325156 - RNA, 24 nt, Human
aggugggcaaauuacgaggucagg

SEQ ID NO: 325157 - RNA, 32 nt, Human
aggugggcaagacugacugggcccggcuucgg

SEQ ID NO: 325158 - RNA, 25 nt, Human
aggugggcaaucauuugaggucagg

SEQ ID NO: 325159 - RNA, 32 nt, Human
aggugggcacuucaaugccaaguauauacucu

SEQ ID NO: 325160 - RNA, 32 nt, Human
aggugggcagagugggggcagugccuugcucc

SEQ ID NO: 325161 - RNA, 24 nt, Human
aggugggcagaucacaaggucagg

SEQ ID NO: 325162 - RNA, 24 nt, Human
aggugggcagaucacaagguuagg

SEQ ID NO: 325163 - RNA, 26 nt, Human
aggugggcagaucaccggaggucagg

SEQ ID NO: 325164 - RNA, 26 nt, Human
aggugggcagaucaccuaaggucagg

SEQ ID NO: 325165 - RNA, 25 nt, Human
aggugggcagaucaccugaggucag

SEQ ID NO: 325166 - RNA, 26 nt, Human
aggugggcagaucaccugaggucagg

SEQ ID NO: 325167 - RNA, 26 nt, Human
aggugggcagaucaccugagguuagg

SEQ ID NO: 325168 - RNA, 32 nt, Human
aggugggcagaucaccugagguugggaguucg

SEQ ID NO: 325169 - RNA, 23 nt, Human
aggugggcagaucacgaagucag

SEQ ID NO: 325170 - RNA, 24 nt, Human
aggugggcagaucacgaagucagg

SEQ ID NO: 325171 - RNA, 24 nt, Human
aggugggcagaucacgagcucagg

SEQ ID NO: 325172 - RNA, 22 nt, Human
aggugggcagaucacgagguca

SEQ ID NO: 325173 - RNA, 24 nt, Human
aggugggcagaucacgaggucagg

SEQ ID NO: 325174 - RNA, 24 nt, Human
aggugggcagaucacgaggugagg

SEQ ID NO: 325175 - RNA, 26 nt, Human
aggugggcagaucacucaaggucagg

SEQ ID NO: 325176 - RNA, 26 nt, Human
aggugggcagaucacuggaggucagg

SEQ ID NO: 325177 - RNA, 26 nt, Human
aggugggcagaucacuugaggucagg

SEQ ID NO: 325178 - RNA, 26 nt, Human
aggugggcagaucacuugaggucggg

SEQ ID NO: 325179 - RNA, 25 nt, Human
aggugggcagaucacuugagguuag

SEQ ID NO: 325180 - RNA, 26 nt, Human
aggugggcagaucagcugaggucagg

SEQ ID NO: 325181 - RNA, 24 nt, Human
aggugggcagaucaggaggucagg

SEQ ID NO: 325182 - RNA, 26 nt, Human
aggugggcagaucaguugaggucagg

SEQ ID NO: 325183 - RNA, 24 nt, Human
aggugggcagaucauaaggucagg

SEQ ID NO: 325184 - RNA, 23 nt, Human
aggugggcagaucaugaggucag

SEQ ID NO: 325185 - RNA, 24 nt, Human
aggugggcagaucaugaggucagg

SEQ ID NO: 325186 - RNA, 21 nt, Human
aggugggcagaucauggguca

SEQ ID NO: 325187 - RNA, 26 nt, Human
aggugggcagaucgccugaggucagg

SEQ ID NO: 325188 - RNA, 32 nt, Human
aggugggcagaucgcuugagugcaagaguuca

SEQ ID NO: 325189 - RNA, 24 nt, Human
aggugggcagaucucaaggucagg

SEQ ID NO: 325190 - RNA, 26 nt, Human
aggugggcagaucucuugaggucagg

SEQ ID NO: 325191 - RNA, 26 nt, Human
aggugggcagaucuuuuaaggucagg

SEQ ID NO: 325192 - RNA, 26 nt, Human
aggugggcagaugacuugaggucagg

SEQ ID NO: 325193 - RNA, 32 nt, Human
aggugggcagccaggguagccagugaggucag

SEQ ID NO: 325194 - RNA, 32 nt, Human
aggugggcaggcagggacuguggcagcuuaug

SEQ ID NO: 325195 - RNA, 32 nt, Human
aggugggcaucgggggcauggggccuggccuc

SEQ ID NO: 325196 - RNA, 32 nt, Human
aggugggccaggacgcagccucugggcgccgu

SEQ ID NO: 325197 - RNA, 32 nt, Human
aggugggcccucagcugagggaagguacgagc

SEQ ID NO: 325198 - RNA, 32 nt, Human
aggugggcccuggcauccccagccuccucuaa

SEQ ID NO: 325199 - RNA, 24 nt, Human
aggugggccgaucacgaggucagg

SEQ ID NO: 325200 - RNA, 24 nt, Human
aggugggcgaaucacaaggucagg

SEQ ID NO: 325201 - RNA, 26 nt, Human
aggugggcgaaucaccugaggucagg

SEQ ID NO: 325202 - RNA, 24 nt, Human
aggugggcgaaucaugagaucagg

SEQ ID NO: 325203 - RNA, 26 nt, Human
aggugggcggauaaccugaggucagg

SEQ ID NO: 325204 - RNA, 21 nt, Human
aggugggcggaucacaagguc

SEQ ID NO: 325205 - RNA, 24 nt, Human
aggugggcggaucacaaggucagg

SEQ ID NO: 325206 - RNA, 27 nt, Human
aggugggcggaucacccugagguuagg

SEQ ID NO: 325207 - RNA, 25 nt, Human
aggugggcggaucaccugaggucag

SEQ ID NO: 325208 - RNA, 26 nt, Human
aggugggcggaucaccugaggucagg

SEQ ID NO: 325209 - RNA, 26 nt, Human
aggugggcggaucaccugaggucggg

SEQ ID NO: 325210 - RNA, 24 nt, Human
aggugggcggaucacgaagucagg

SEQ ID NO: 325211 - RNA, 24 nt, Human
aggugggcggaucacgaggucagg

SEQ ID NO: 325212 - RNA, 24 nt, Human
aggugggcggaucacgaggucugg

SEQ ID NO: 325213 - RNA, 24 nt, Human
aggugggcggaucacggggucagg

SEQ ID NO: 325214 - RNA, 26 nt, Human
aggugggcggaucacgugaggucagg

SEQ ID NO: 325215 - RNA, 26 nt, Human
aggugggcggaucacuugaggucagg

SEQ ID NO: 325216 - RNA, 26 nt, Human
aggugggcggaucacuugaggucggg

SEQ ID NO: 325217 - RNA, 24 nt, Human
aggugggcggaucaugaggucagg

SEQ ID NO: 325218 - RNA, 24 nt, Human
aggugggcggaucaugagguuagg

SEQ ID NO: 325219 - RNA, 26 nt, Human
aggugggcggaucgccugaggucagg

SEQ ID NO: 325220 - RNA, 26 nt, Human
aggugggcggauugcuugaggucggg

SEQ ID NO: 325221 - RNA, 32 nt, Human
aggugggcuaagugccucccuagaggacucca

SEQ ID NO: 325222 - RNA, 16 nt, Human
aggugggcugaugcca

SEQ ID NO: 325223 - RNA, 32 nt, Human
aggugggcuggccaggugagagcugcuggcag

SEQ ID NO: 325224 - RNA, 32 nt, Human
agguggggaaaauguuguggcuucugagcuuu

SEQ ID NO: 325225 - RNA, 32 nt, Human
agguggggaagauucgggcaugugagugcccc

SEQ ID NO: 325226 - RNA, 32 nt, Human
agguggggaagcugaggcaggaagcccuuuag

SEQ ID NO: 325227 - RNA, 32 nt, Human
agguggggagagaagccaggaccccucagcug

SEQ ID NO: 325228 - RNA, 32 nt, Human
agguggggaggcacugcuggccuagaccagcu

SEQ ID NO: 325229 - RNA, 32 nt, Human
agguggggaggcugcgggaggaagagaugacc

SEQ ID NO: 325230 - RNA, 32 nt, Human
agguggggagggcagcacacagcagcucaugg

SEQ ID NO: 325231 - RNA, 32 nt, Human
agguggggcagaagagaggacugugugccuuu

SEQ ID NO: 325232 - RNA, 32 nt, Human
agguggggcaggcggagguugcaguaagccaa

SEQ ID NO: 325233 - RNA, 19 nt, Human
agguggggcaucugggcca

SEQ ID NO: 325234 - RNA, 20 nt, Human
agguggggccacgcugcagg

SEQ ID NO: 325235 - RNA, 32 nt, Human
agguggggccggacuccagggaaggagaauuu

SEQ ID NO: 325236 - RNA, 32 nt, Human
agguggggcgaggcugggggagggcggcgccg

SEQ ID NO: 325237 - RNA, 32 nt, Human
aggugggggaacacugagaaagaggcagggac

SEQ ID NO: 325238 - RNA, 20 nt, Human
aggugggggaagagcuggaa

SEQ ID NO: 325239 - RNA, 32 nt, Human
aggugggggcagcagaggccugggcugggugc

SEQ ID NO: 325240 - RNA, 32 nt, Human
aggugggggcggggaguauugaaugguggugg

SEQ ID NO: 325241 - RNA, 21 nt, Human
agguggggggaucacaagguc

SEQ ID NO: 325242 - RNA, 24 nt, Human
agguggggggaucacgaggucagg

SEQ ID NO: 325243 - RNA, 32 nt, Human
agguggggucacugccccuccuggguuagcau

SEQ ID NO: 325244 - RNA, 32 nt, Human
agguggggugcugaagcuugaagagcauuucu

SEQ ID NO: 325245 - RNA, 32 nt, Human
aggugggguggagucccagagcugcacagggu

SEQ ID NO: 325246 - RNA, 32 nt, Human
agguggggugggaagagaggaggccaggccag

SEQ ID NO: 325247 - RNA, 32 nt, Human
agguggggugggaccaggcugccccucgcccc

SEQ ID NO: 325248 - RNA, 32 nt, Human
aggugggguuaguauuaaccccagagcacuga

SEQ ID NO: 325249 - RNA, 21 nt, Human
aggugggguuucaccauauug

SEQ ID NO: 325250 - RNA, 21 nt, Human
aggugggguuucaccaugcug

SEQ ID NO: 325251 - RNA, 23 nt, Human
agguggguaaacugaggcucagg

SEQ ID NO: 325252 - RNA, 32 nt, Human
agguggguaaacugaggcucaggaaguuucca

SEQ ID NO: 325253 - RNA, 26 nt, Human
agguggguaaaucacuugaggucagg

SEQ ID NO: 325254 - RNA, 24 nt, Human
agguggguagauaccugaagucag

SEQ ID NO: 325255 - RNA, 25 nt, Human
agguggguagaucaccugaggucag

SEQ ID NO: 325256 - RNA, 26 nt, Human
agguggguagaucaccugaggucggg

SEQ ID NO: 325257 - RNA, 22 nt, Human
agguggguagaucacgagauca

SEQ ID NO: 325258 - RNA, 26 nt, Human
agguggguagaucacuugaggucagg

SEQ ID NO: 325259 - RNA, 26 nt, Human
agguggguagaucaucugaggucagg

SEQ ID NO: 325260 - RNA, 20 nt, Human
agguggguagaucauuucag

SEQ ID NO: 325261 - RNA, 26 nt, Human
agguggguagaucauuugaggucagg

SEQ ID NO: 325262 - RNA, 22 nt, Human
agguggguagcccagguucagg

SEQ ID NO: 325263 - RNA, 24 nt, Human
agguggguaggguuacagauccag

SEQ ID NO: 325264 - RNA, 32 nt, Human
agguggguauugugugugugggaaggugggga

SEQ ID NO: 325265 - RNA, 25 nt, Human
aggugggucgaucacugaggucagg

SEQ ID NO: 325266 - RNA, 26 nt, Human
aggugggugaaucacaugaggucagg

SEQ ID NO: 325267 - RNA, 26 nt, Human
aggugggugaauugcuugaggucagg

SEQ ID NO: 325268 - RNA, 32 nt, Human
aggugggugaggaucugagaaaugcuaaaggc

SEQ ID NO: 325269 - RNA, 24 nt, Human
aggugggugcucugcaaaguuagg

SEQ ID NO: 325270 - RNA, 20 nt, Human
agguggguggaagggccagg

SEQ ID NO: 325271 - RNA, 26 nt, Human
agguggguggaccacaugaggucagg

SEQ ID NO: 325272 - RNA, 26 nt, Human
agguggguggaccaccugagguuagg

SEQ ID NO: 325273 - RNA, 24 nt, Human
agguggguggaccaguacuccagg

SEQ ID NO: 325274 - RNA, 22 nt, Human
agguggguggagagagggcagg

SEQ ID NO: 325275 - RNA, 19 nt, Human
agguggguggagaggugag

SEQ ID NO: 325276 - RNA, 22 nt, Human
agguggguggaucacaagguca

SEQ ID NO: 325277 - RNA, 24 nt, Human
agguggguggaucacaaggucagg

SEQ ID NO: 325278 - RNA, 24 nt, Human
agguggguggaucacaaggucggg

SEQ ID NO: 325279 - RNA, 24 nt, Human
agguggguggaucacaagguuggg

SEQ ID NO: 325280 - RNA, 23 nt, Human
agguggguggaucacaggucagg

SEQ ID NO: 325281 - RNA, 24 nt, Human
agguggguggaucaccaggucagg

SEQ ID NO: 325282 - RNA, 21 nt, Human
agguggguggaucaccugaga

SEQ ID NO: 325283 - RNA, 21 nt, Human
agguggguggaucaccugagg

SEQ ID NO: 325284 - RNA, 24 nt, Human
agguggguggaucaccugagguca

SEQ ID NO: 325285 - RNA, 25 nt, Human
agguggguggaucaccugaggucag

SEQ ID NO: 325286 - RNA, 26 nt, Human
agguggguggaucaccugaggucagg

SEQ ID NO: 325287 - RNA, 26 nt, Human
agguggguggaucaccugaggucggg

SEQ ID NO: 325288 - RNA, 22 nt, Human
agguggguggaucacgaaguca

SEQ ID NO: 325289 - RNA, 21 nt, Human
agguggguggaucacgagguc

SEQ ID NO: 325290 - RNA, 22 nt, Human
agguggguggaucacgagguca

SEQ ID NO: 325291 - RNA, 24 nt, Human
agguggguggaucacgaggucagg

SEQ ID NO: 325292 - RNA, 24 nt, Human
agguggguggaucacugggucagg

SEQ ID NO: 325293 - RNA, 21 nt, Human
agguggguggaucacuugagg

SEQ ID NO: 325294 - RNA, 26 nt, Human
agguggguggaucacuugaggucagg

SEQ ID NO: 325295 - RNA, 26 nt, Human
agguggguggaucacuugaggucggg

SEQ ID NO: 325296 - RNA, 26 nt, Human
agguggguggaucacuuggggucagg

SEQ ID NO: 325297 - RNA, 26 nt, Human
agguggguggaucagcugaggucagg

SEQ ID NO: 325298 - RNA, 26 nt, Human
agguggguggaucaguugaggucagg

SEQ ID NO: 325299 - RNA, 26 nt, Human
agguggguggaucaucugaggucagg

SEQ ID NO: 325300 - RNA, 24 nt, Human
agguggguggaucaugaagucagg

SEQ ID NO: 325301 - RNA, 24 nt, Human
agguggguggaucaugaggucagg

SEQ ID NO: 325302 - RNA, 24 nt, Human
agguggguggaucaugcggucagg

SEQ ID NO: 325303 - RNA, 26 nt, Human
agguggguggaucauuugaggucagg

SEQ ID NO: 325304 - RNA, 26 nt, Human
agguggguggaucgccugaggucggg

SEQ ID NO: 325305 - RNA, 26 nt, Human
agguggguggauuacuugaggucagg

SEQ ID NO: 325306 - RNA, 24 nt, Human
agguggguggauugcuugagccca

SEQ ID NO: 325307 - RNA, 21 nt, Human
agguggguggcccaggccagg

SEQ ID NO: 325308 - RNA, 22 nt, Human
aggugggugggacuaugccagg

SEQ ID NO: 325309 - RNA, 26 nt, Human
aggugggugggucaucugaggucagg

SEQ ID NO: 325310 - RNA, 32 nt, Human
aggugggugucgaacuccugaccucaagugau

SEQ ID NO: 325311 - RNA, 32 nt, Human
agguggguuccccaggcuuagagcaaaacacc

SEQ ID NO: 325312 - RNA, 32 nt, Human
agguggguuccccaggcuuagagcaaaacccc

SEQ ID NO: 325313 - RNA, 32 nt, Human
agguggguuuuuaggucccuuccagugccaca

SEQ ID NO: 325314 - RNA, 32 nt, Human
aggugguaaaagugccuggcagcuuggcugcc

SEQ ID NO: 325315 - RNA, 32 nt, Human
aggugguaaauggcagaaaggacauucccccu

SEQ ID NO: 325316 - RNA, 32 nt, Human
aggugguaagucaugagagcuccacccucaug

SEQ ID NO: 325317 - RNA, 32 nt, Human
aggugguaaugaaacaccucagcugggcucuu

SEQ ID NO: 325318 - RNA, 32 nt, Human
aggugguagugagccgagauggagccacugca

SEQ ID NO: 325319 - RNA, 32 nt, Human
aggugguaucaggagcccaggucuccagcugg

SEQ ID NO: 325320 - RNA, 32 nt, Human
aggugguaucuguucuuucguagcacaguguu

SEQ ID NO: 325321 - RNA, 23 nt, Human
aggugguauugacagaggucagg

SEQ ID NO: 325322 - RNA, 32 nt, Human
aggugguauuugcauucagugccuuacuggua

SEQ ID NO: 325323 - RNA, 22 nt, Human
agguggucaacaacauuccuca

SEQ ID NO: 325324 - RNA, 21 nt, Human
agguggucaagagacacugga

SEQ ID NO: 325325 - RNA, 32 nt, Human
agguggucacccaacccgagaugucaggaaag

SEQ ID NO: 325326 - RNA, 32 nt, Human
agguggucauaguccucccgugcugugucagc

SEQ ID NO: 325327 - RNA, 32 nt, Human
agguggucauugccuuucuccauugucuagua

SEQ ID NO: 325328 - RNA, 29 nt, Human
agguggucauugcuaucauuuucuuuugg

SEQ ID NO: 325329 - RNA, 32 nt, Human
aggugguccucgcugugacacugaggugcuga

SEQ ID NO: 325330 - RNA, 24 nt, Human
agguggucggaucacgagguuagg

SEQ ID NO: 325331 - RNA, 23 nt, Human
agguggucggauccucugggcug

SEQ ID NO: 325332 - RNA, 32 nt, Human
agguggucggggaugggagaaagggaaaaguc

SEQ ID NO: 325333 - RNA, 32 nt, Human
agguggucucagauugagaugaggaauuuguu

SEQ ID NO: 325334 - RNA, 32 nt, Human
agguggucuugaacuccugaugucaggugauu

SEQ ID NO: 325335 - RNA, 32 nt, Human
agguggucuuuuccuuauuugacauuuuagag

SEQ ID NO: 325336 - RNA, 32 nt, Human
agguggugagcauguggagaagguuccauagu

SEQ ID NO: 325337 - RNA, 32 nt, Human
agguggugaucaggacaaaaguguuagguucc

SEQ ID NO: 325338 - RNA, 32 nt, Human
agguggugcaccugccaggcagcgcccacaga

SEQ ID NO: 325339 - RNA, 32 nt, Human
agguggugccacugcacuccaaccugggggac

SEQ ID NO: 325340 - RNA, 32 nt, Human
agguggugcugguggguucacuuuccaaggcc

SEQ ID NO: 325341 - RNA, 32 nt, Human
aggugguggagacagagacaggcccugaacga

SEQ ID NO: 325342 - RNA, 20 nt, Human
aggugguggagcggcugcug

SEQ ID NO: 325343 - RNA, 32 nt, Human
aggugguggaggaggaggaggaggaggaaggc

SEQ ID NO: 325344 - RNA, 32 nt, Human
aggugguggaggcggcggaggcggcggcggag

SEQ ID NO: 325345 - RNA, 32 nt, Human
aggugguggaggugggguuggagcaggaaggg

SEQ ID NO: 325346 - RNA, 32 nt, Human
aggugguggcagcagagguauuauggaggagg

SEQ ID NO: 325347 - RNA, 32 nt, Human
aggugguggccugggccgcuccaccucaccgg

SEQ ID NO: 325348 - RNA, 32 nt, Human
aggugguggggagacagauggagaagcuggca

SEQ ID NO: 325349 - RNA, 32 nt, Human
agguggugucaggagcccaggucuccagcugg

SEQ ID NO: 325350 - RNA, 32 nt, Human
aggugguguguguggacucacacucacauucu

SEQ ID NO: 325351 - RNA, 32 nt, Human
aggugguguuacugucccuccuggugucaccc

SEQ ID NO: 325352 - RNA, 32 nt, Human
aggugguguuucuaaauaauuggcugcuaugg

SEQ ID NO: 325353 - RNA, 32 nt, Human
aggugguuaugcugugacgcugcugucucuaa

SEQ ID NO: 325354 - RNA, 32 nt, Human
aggugguuauuauaacauacuagcaauggacc

SEQ ID NO: 325355 - RNA, 32 nt, Human
aggugguuccaagggugucugcuuuuggccag

SEQ ID NO: 325356 - RNA, 32 nt, Human
aggugguugaaggauguaguagaaggauggau

SEQ ID NO: 325357 - RNA, 32 nt, Human
aggugguugcccccucccucuccugagauguc

SEQ ID NO: 325358 - RNA, 32 nt, Human
aggugguugguuuucuccagagaagaacccuu

SEQ ID NO: 325359 - RNA, 32 nt, Human
aggugguuguagucugugccugaagucugugu

SEQ ID NO: 325360 - RNA, 32 nt, Human
aggugguuguccaagcccaggucccggcccug

SEQ ID NO: 325361 - RNA, 22 nt, Human
aggugguuugugaaacucacag

SEQ ID NO: 325362 - RNA, 32 nt, Human
agguguaaacuuuccagaacaggcccagaauu

SEQ ID NO: 325363 - RNA, 32 nt, Human
agguguaacucuuacaccacagccuccaucug

SEQ ID NO: 325364 - RNA, 32 nt, Human
agguguaagaucauuaagaaguagaaggcacu

SEQ ID NO: 325365 - RNA, 32 nt, Human
agguguaagcaugggggcguggggaagagggc

SEQ ID NO: 325366 - RNA, 32 nt, Human
agguguaaggauucuuucucucugguuuuggc

SEQ ID NO: 325367 - RNA, 32 nt, Human
agguguaagggcagacaaacaggugaggguga

SEQ ID NO: 325368 - RNA, 32 nt, Human
agguguaagguacauggaugugcuuuggucaa

SEQ ID NO: 325369 - RNA, 24 nt, Human
agguguacaggauggaacacgaag

SEQ ID NO: 325370 - RNA, 32 nt, Human
agguguacauauucugcguagaugcuagacca

SEQ ID NO: 325371 - RNA, 32 nt, Human
agguguagagaccuccacuguccuauauuagc

SEQ ID NO: 325372 - RNA, 31 nt, Human
agguguagcagaggaauuuguaggagagagg

SEQ ID NO: 325373 - RNA, 32 nt, Human
agguguagccuggggcaaagugaugagauguc

SEQ ID NO: 325374 - RNA, 32 nt, Human
agguguagccuuucugauuccucgguuguuuc

SEQ ID NO: 325375 - RNA, 32 nt, Human
agguguagcguguuggguucagugagugguga

SEQ ID NO: 325376 - RNA, 32 nt, Human
agguguagcuggagagacauugugggugugua

SEQ ID NO: 325377 - RNA, 32 nt, Human
agguguaggaauagcuaauaaagcacaugaaa

SEQ ID NO: 325378 - RNA, 32 nt, Human
agguguaggcaggugggcucugcuucccgauu

SEQ ID NO: 325379 - RNA, 32 nt, Human
agguguauaauuuauuacugcaaaauaaauac

SEQ ID NO: 325380 - RNA, 32 nt, Human
agguguaugcagggcccucuucugccuuagcg

SEQ ID NO: 325381 - RNA, 32 nt, Human
agguguauucaggaguccaugcagcaggaagu

SEQ ID NO: 325382 - RNA, 32 nt, Human
aggugucagcaacacugugacccaccacaacc

SEQ ID NO: 325383 - RNA, 32 nt, Human
aggugucagccaccgcacccagccuggagugg

SEQ ID NO: 325384 - RNA, 32 nt, Human
aggugucaggagaaaguuuuguugauuuagaa

SEQ ID NO: 325385 - RNA, 32 nt, Human
aggugucaucauguuuaagccuaaaacuucag

SEQ ID NO: 325386 - RNA, 32 nt, Human
aggugucaucccuuugugucagagacagaccc

SEQ ID NO: 325387 - RNA, 32 nt, Human
aggugucauuauggugcuuagccugggaacug

SEQ ID NO: 325388 - RNA, 32 nt, Human
agguguccaagaagugcuggcaccaagggcug

SEQ ID NO: 325389 - RNA, 32 nt, Human
agguguccaagucacacagagccauggaaucu

SEQ ID NO: 325390 - RNA, 21 nt, Human
agguguccacagccaggcagg

SEQ ID NO: 325391 - RNA, 32 nt, Human
agguguccagaggcggcggcagcuggcagugc

SEQ ID NO: 325392 - RNA, 32 nt, Human
agguguccagcagaggaugaaggucagcaaga

SEQ ID NO: 325393 - RNA, 32 nt, Human
agguguccaugacugcccugaggcuccuacag

SEQ ID NO: 325394 - RNA, 32 nt, Human
aggugucccucggaucuguccucuucguguac

SEQ ID NO: 325395 - RNA, 32 nt, Human
agguguccugcaggcuguaaugcaguuuaauc

SEQ ID NO: 325396 - RNA, 32 nt, Human
agguguccuuuccccucucugccccugaucac

SEQ ID NO: 325397 - RNA, 32 nt, Human
aggugucucaaagaaggguggaaguucuaaug

SEQ ID NO: 325398 - RNA, 21 nt, Human
aggugucucacgucugggcug

SEQ ID NO: 325399 - RNA, 32 nt, Human
aggugucucugcccccacaccgcuacuggggu

SEQ ID NO: 325400 - RNA, 32 nt, Human
aggugucucuggcucaccuccgucuguucauc

SEQ ID NO: 325401 - RNA, 32 nt, Human
aggugucugagaauuccuccuccugggacucu

SEQ ID NO: 325402 - RNA, 32 nt, Human
aggugucugagaauuucuccucuugggacucu

SEQ ID NO: 325403 - RNA, 19 nt, Human
aggugucugcccucagggg

SEQ ID NO: 325404 - RNA, 32 nt, Human
aggugucugcuggcuuccugcucucccugcuc

SEQ ID NO: 325405 - RNA, 32 nt, Human
aggugucuggaauccuagcuacucaggaggcu

SEQ ID NO: 325406 - RNA, 32 nt, Human
aggugucuggacuggcugggccaugccugggc

SEQ ID NO: 325407 - RNA, 32 nt, Human
aggugucuggccaggcccaccugcugcggaug

SEQ ID NO: 325408 - RNA, 32 nt, Human
aggugucugguugcccugccucuggcuccaga

SEQ ID NO: 325409 - RNA, 32 nt, Human
aggugucugucucuggcugagguuuugucuau

SEQ ID NO: 325410 - RNA, 32 nt, Human
aggugucuuauaaucuuuuaccuauuucuuac

SEQ ID NO: 325411 - RNA, 32 nt, Human
aggugucuucaccucugcauuaggcauucgau

SEQ ID NO: 325412 - RNA, 32 nt, Human
aggugucuugcuggcuugccucuugcaauuca

SEQ ID NO: 325413 - RNA, 32 nt, Human
aggugugaauccagauaugcggucuuaauucc

SEQ ID NO: 325414 - RNA, 32 nt, Human
aggugugaaugaggcaggaugaacuggacagg

SEQ ID NO: 325415 - RNA, 32 nt, Human
aggugugaauggcucccuucuccucugcaggc

SEQ ID NO: 325416 - RNA, 32 nt, Human
aggugugagaauugugugugugaaaaagcugg

SEQ ID NO: 325417 - RNA, 20 nt, Human
aggugugagaccggcuuccc

SEQ ID NO: 325418 - RNA, 32 nt, Human
aggugugagaggggcuguggcuuuugugcagc

SEQ ID NO: 325419 - RNA, 32 nt, Human
aggugugagccaccacacccagccucuauauc

SEQ ID NO: 325420 - RNA, 32 nt, Human
aggugugagccaccacacccagccucuguagu

SEQ ID NO: 325421 - RNA, 22 nt, Human
aggugugagccaccacacccgg

SEQ ID NO: 325422 - RNA, 22 nt, Human
aggugugagccaccacgcccgg

SEQ ID NO: 325423 - RNA, 23 nt, Human
aggugugagccaccacgcccggu

SEQ ID NO: 325424 - RNA, 20 nt, Human
aggugugagccaccacgucc

SEQ ID NO: 325425 - RNA, 22 nt, Human
aggugugagccaccacguccgg

SEQ ID NO: 325426 - RNA, 32 nt, Human
aggugugagccaccaugcccagccucuucaag

SEQ ID NO: 325427 - RNA, 22 nt, Human
aggugugagccaccaugcccgg

SEQ ID NO: 325428 - RNA, 32 nt, Human
aggugugagccaccgcacccagccucaauuua

SEQ ID NO: 325429 - RNA, 22 nt, Human
aggugugagccaccgcacccgg

SEQ ID NO: 325430 - RNA, 22 nt, Human
aggugugagccaccgcgcccgg

SEQ ID NO: 325431 - RNA, 20 nt, Human
aggugugagccaccgcgucc

SEQ ID NO: 325432 - RNA, 20 nt, Human
aggugugagccaccgugccc

SEQ ID NO: 325433 - RNA, 23 nt, Human
aggugugagccaccgugcccagg

SEQ ID NO: 325434 - RNA, 22 nt, Human
aggugugagccaccgugcccgg

SEQ ID NO: 325435 - RNA, 32 nt, Human
aggugugagccacugcacccagccugugaugu

SEQ ID NO: 325436 - RNA, 32 nt, Human
aggugugagccacugcacccggccugaaauuu

SEQ ID NO: 325437 - RNA, 32 nt, Human
aggugugagccacugcgcccagccugaaucau

SEQ ID NO: 325438 - RNA, 20 nt, Human
aggugugagccacugugccc

SEQ ID NO: 325439 - RNA, 32 nt, Human
aggugugagccacugugcccagccucuucucu

SEQ ID NO: 325440 - RNA, 32 nt, Human
aggugugagccacugugcccagccucuuuugc

SEQ ID NO: 325441 - RNA, 32 nt, Human
aggugugagccgcugggcccagccugguuauc

SEQ ID NO: 325442 - RNA, 32 nt, Human
aggugugaggcugaggcaggguuuuacuuuua

SEQ ID NO: 325443 - RNA, 31 nt, Human
aggugugagggcagugcaaggagggagcaca

SEQ ID NO: 325444 - RNA, 32 nt, Human
aggugugaucaggggcucagagccaggguccu

SEQ ID NO: 325445 - RNA, 32 nt, Human
aggugugaucauagcacacugcagccuggaac

SEQ ID NO: 325446 - RNA, 32 nt, Human
aggugugcaccacugcucuucuuauggaguag

SEQ ID NO: 325447 - RNA, 32 nt, Human
aggugugcagaggcagaguguguacugcucgg

SEQ ID NO: 325448 - RNA, 24 nt, Human
aggugugcagaucacaaggucagg

SEQ ID NO: 325449 - RNA, 32 nt, Human
aggugugcaucuguggcuuucucucugucugg

SEQ ID NO: 325450 - RNA, 32 nt, Human
aggugugcccagcagaagugcaauagccagga

SEQ ID NO: 325451 - RNA, 32 nt, Human
aggugugcugagugccuguccccuggacccac

SEQ ID NO: 325452 - RNA, 32 nt, Human
aggugugcugugcaccuccccuuuaaauuaaa

SEQ ID NO: 325453 - RNA, 32 nt, Human
aggugugcuugcugugguacugggugagcggc

SEQ ID NO: 325454 - RNA, 32 nt, Human
aggugugcuugguuuggccugccuucucccuu

SEQ ID NO: 325455 - RNA, 32 nt, Human
agguguggaggcagcagcuguccugaggccau

SEQ ID NO: 325456 - RNA, 32 nt, Human
agguguggcacacgccuguaaucccaguuacu

SEQ ID NO: 325457 - RNA, 32 nt, Human
agguguggccacuuguagggcagugagaggaa

SEQ ID NO: 325458 - RNA, 32 nt, Human
agguguggcccaggcaggcugagugggugggc

SEQ ID NO: 325459 - RNA, 22 nt, Human
agguguggcccccuuggccugg

SEQ ID NO: 325460 - RNA, 30 nt, Human
agguguggccucuccacuucuguggacacc

SEQ ID NO: 325461 - RNA, 32 nt, Human
agguguggcucaugccuguaaucccagcacua

SEQ ID NO: 325462 - RNA, 32 nt, Human
aggugugggaacuggguauuucccuggggucu

SEQ ID NO: 325463 - RNA, 32 nt, Human
aggugugggacagaaggggcagagggagggca

SEQ ID NO: 325464 - RNA, 32 nt, Human
aggugugggauuaugguuuguguacugaaguu

SEQ ID NO: 325465 - RNA, 32 nt, Human
aggugugggcagggcaccaagcagggagguag

SEQ ID NO: 325466 - RNA, 32 nt, Human
agguguggggugugggguguucccggccauca

SEQ ID NO: 325467 - RNA, 32 nt, Human
aggugugguggcacaugcaccuguaaucccag

SEQ ID NO: 325468 - RNA, 32 nt, Human
agguguggugggcacacagauugccugggacc

SEQ ID NO: 325469 - RNA, 32 nt, Human
agguguggugggcaccuguaaucccagcuacu

SEQ ID NO: 325470 - RNA, 32 nt, Human
aggugugucaacuuuauauguaaggaaucugu

SEQ ID NO: 325471 - RNA, 32 nt, Human
aggugugucccuagggcuucaguccuggggca

SEQ ID NO: 325472 - RNA, 32 nt, Human
agguguguccgcucuuuucacacucgcggccg

SEQ ID NO: 325473 - RNA, 32 nt, Human
aggugugucucaggaaggugguucugugcaug

SEQ ID NO: 325474 - RNA, 32 nt, Human
aggugugucucaggaaugcacggugcccuuau

SEQ ID NO: 325475 - RNA, 32 nt, Human
aggugugucucuugccucugcuugccuccuac

SEQ ID NO: 325476 - RNA, 32 nt, Human
aggugugugccacccaugccuuuuaguagaga

SEQ ID NO: 325477 - RNA, 32 nt, Human
aggugugugccuggagggggccuggacuggca

SEQ ID NO: 325478 - RNA, 32 nt, Human
aggugugugcugcuaugacaucucuccagagc

SEQ ID NO: 325479 - RNA, 32 nt, Human
aggugugugcugggacgggcacuggacuggaa

SEQ ID NO: 325480 - RNA, 23 nt, Human
agguguuaaguagggugguguca

SEQ ID NO: 325481 - RNA, 32 nt, Human
agguguuaaucuucucuaaaagccuggugaua

SEQ ID NO: 325482 - RNA, 23 nt, Human
agguguuauauccccagcaccaa

SEQ ID NO: 325483 - RNA, 32 nt, Human
agguguuauuuuuaguugcauaggguauuuga

SEQ ID NO: 325484 - RNA, 32 nt, Human
agguguucaaacacaaccuacucugcaaaccu

SEQ ID NO: 325485 - RNA, 32 nt, Human
agguguucaagaccagccucaucaacauagug

SEQ ID NO: 325486 - RNA, 32 nt, Human
agguguucaagaccagccugaccaacauggug

SEQ ID NO: 325487 - RNA, 32 nt, Human
agguguucaaggccagccugggcaacauaaca

SEQ ID NO: 325488 - RNA, 31 nt, Human
agguguucaauaaauauuuguugaaugaauu

SEQ ID NO: 325489 - RNA, 32 nt, Human
agguguuccugcucuagcuuccacgaugaggc

SEQ ID NO: 325490 - RNA, 32 nt, Human
agguguuccuugcagcccccucccucucaggu

SEQ ID NO: 325491 - RNA, 32 nt, Human
agguguucgagaccagccugggcaacauagca

SEQ ID NO: 325492 - RNA, 32 nt, Human
agguguucucuccuuguagaacaucagagaag

SEQ ID NO: 325493 - RNA, 32 nt, Human
agguguucuuuguucaugcaggcagguuucug

SEQ ID NO: 325494 - RNA, 32 nt, Human
agguguugacacccuccauccucagagcaggu

SEQ ID NO: 325495 - RNA, 23 nt, Human
agguguugggaccacaggcguga

SEQ ID NO: 325496 - RNA, 24 nt, Human
agguguugggauuacagaugugag

SEQ ID NO: 325497 - RNA, 32 nt, Human
agguguugggauuacagaugugagccaccaca

SEQ ID NO: 325498 - RNA, 32 nt, Human
agguguugggauuacaggcgugagccaccgug

SEQ ID NO: 325499 - RNA, 32 nt, Human
agguguugggauuacaggcgugagccacugca

SEQ ID NO: 325500 - RNA, 32 nt, Human
agguguugggccagggcugagguaggagggag

SEQ ID NO: 325501 - RNA, 32 nt, Human
agguguuguggacaggagcugggaccaagauc

SEQ ID NO: 325502 - RNA, 32 nt, Human
agguguuucucuuccuccuucuccuccuucac

SEQ ID NO: 325503 - RNA, 32 nt, Human
agguguuugagaccagccuggccaacauggug

SEQ ID NO: 325504 - RNA, 32 nt, Human
agguguuugagaucagccuggccagcauggcg

SEQ ID NO: 325505 - RNA, 32 nt, Human
agguguuuucauuuuccuguucuuaccuauua

SEQ ID NO: 325506 - RNA, 32 nt, Human
agguguuuuccucugcuggcacgccagaaucc

SEQ ID NO: 325507 - RNA, 32 nt, Human
agguguuuuuauaauauccauauagaaaucua

SEQ ID NO: 325508 - RNA, 32 nt, Human
agguuaaagcagcgccaggaggaagcugacag

SEQ ID NO: 325509 - RNA, 32 nt, Human
agguuaaauccucaucaagagagaccaggcgg

SEQ ID NO: 325510 - RNA, 32 nt, Human
agguuaacaaucaaguagugaaagcacuauau

SEQ ID NO: 325511 - RNA, 32 nt, Human
agguuaacaggcaaacaaggccuugagcaaag

SEQ ID NO: 325512 - RNA, 32 nt, Human
agguuaacccuugugugaaaugaaggaacugu

SEQ ID NO: 325513 - RNA, 32 nt, Human
agguuaacggcagugccucaggaaaagcaggu

SEQ ID NO: 325514 - RNA, 32 nt, Human
agguuaacuaaagucaagauuggggcugcugc

SEQ ID NO: 325515 - RNA, 32 nt, Human
agguuaagaagaggaggaagugagacggggaa

SEQ ID NO: 325516 - RNA, 32 nt, Human
agguuaaggagaguggccgugagagugccauc

SEQ ID NO: 325517 - RNA, 32 nt, Human
agguuaagugucuugcccgaggucacacagcu

SEQ ID NO: 325518 - RNA, 32 nt, Human
agguuaaucaggaaaaauagcuuuugacaggg

SEQ ID NO: 325519 - RNA, 32 nt, Human
agguuaaucugaaguuugaaagcucagauuaa

SEQ ID NO: 325520 - RNA, 32 nt, Human
agguuacaacagauuugugaacucagccaagc

SEQ ID NO: 325521 - RNA, 32 nt, Human
agguuacagugagccgagaucacaccacugca

SEQ ID NO: 325522 - RNA, 32 nt, Human
agguuacagugagccgagaucauaccacugca

SEQ ID NO: 325523 - RNA, 32 nt, Human
agguuacagugagccgagaucaugccauugca

SEQ ID NO: 325524 - RNA, 32 nt, Human
agguuacagugagccgagaucgugccacugca

SEQ ID NO: 325525 - RNA, 32 nt, Human
agguuacagugagccgagauggcgccauuuca

SEQ ID NO: 325526 - RNA, 31 nt, Human
agguuacauacuuuauuuaaaaguauaguga

SEQ ID NO: 325527 - RNA, 32 nt, Human
agguuacauucacaucagucugucuuccccug

SEQ ID NO: 325528 - RNA, 32 nt, Human
agguuaccuagauguuaugagaaauuuuaguu

SEQ ID NO: 325529 - RNA, 32 nt, Human
agguuacgacagauuugugaacucagccaagc

SEQ ID NO: 325530 - RNA, 32 nt, Human
agguuacgcaggaagugagugguugagccaga

SEQ ID NO: 325531 - RNA, 32 nt, Human
agguuacugaaagcucugccuuccggaauccc

SEQ ID NO: 325532 - RNA, 32 nt, Human
agguuacugcacugaggccaaguuaggauggc

SEQ ID NO: 325533 - RNA, 32 nt, Human
agguuagaaagggagugagggaagggacaggg

SEQ ID NO: 325534 - RNA, 32 nt, Human
agguuagaaggaaugcaggauauuuuuaacac

SEQ ID NO: 325535 - RNA, 32 nt, Human
agguuagacccugggcccuggagcuuagggau

SEQ ID NO: 325536 - RNA, 32 nt, Human
agguuagacugaagcauggcagaggcuguugu

SEQ ID NO: 325537 - RNA, 32 nt, Human
agguuagagaaauggagagaggcuuggaggcu

SEQ ID NO: 325538 - RNA, 32 nt, Human
agguuagagggaacugggaggcacuuugcugu

SEQ ID NO: 325539 - RNA, 32 nt, Human
agguuagauuuccugcaucaacagugcuuugg

SEQ ID NO: 325540 - RNA, 32 nt, Human
agguuagcacgcaacagaauuuccuaaaauca

SEQ ID NO: 325541 - RNA, 32 nt, Human
agguuaggcccagagagcuggaguuggcucag

SEQ ID NO: 325542 - RNA, 32 nt, Human
agguuaggcccugcacuccaccuggggacggc

SEQ ID NO: 325543 - RNA, 32 nt, Human
agguuaggggagaggugacccugagggacagc

SEQ ID NO: 325544 - RNA, 32 nt, Human
agguuagggguuucaccauguuggccaggaug

SEQ ID NO: 325545 - RNA, 32 nt, Human
agguuagugcuggccuggucagcaugggcugg

SEQ ID NO: 325546 - RNA, 32 nt, Human
agguuaguguuugggggccgggggaggacuga

SEQ ID NO: 325547 - RNA, 32 nt, Human
agguuaguucucuuuggugacccuagacaucu

SEQ ID NO: 325548 - RNA, 32 nt, Human
agguuaguuguuacacagcaauagauagcgaa

SEQ ID NO: 325549 - RNA, 32 nt, Human
agguuauaacugagagcagugugcaagauaau

SEQ ID NO: 325550 - RNA, 32 nt, Human
agguuauaucagacaccacuaguagauagaaa

SEQ ID NO: 325551 - RNA, 32 nt, Human
agguuauauucauggauaaccaacaagauaag

SEQ ID NO: 325552 - RNA, 32 nt, Human
agguuaucaaaccauggagugauguggagcua

SEQ ID NO: 325553 - RNA, 32 nt, Human
agguuaucuccugaacacuuuugggcagauga

SEQ ID NO: 325554 - RNA, 32 nt, Human
agguuaucuugaacaagggaaggaaagauguu

SEQ ID NO: 325555 - RNA, 32 nt, Human
agguuaugcuccuuaugagaaucuaaugccug

SEQ ID NO: 325556 - RNA, 32 nt, Human
agguuauggacauucaugcccaauauauaagg

SEQ ID NO: 325557 - RNA, 32 nt, Human
agguuaugggaguugguguugggacagggugg

SEQ ID NO: 325558 - RNA, 32 nt, Human
agguuauucacucacaagccaccgggccuuca

SEQ ID NO: 325559 - RNA, 32 nt, Human
agguuauucucgaacuccugagcucaagugau

SEQ ID NO: 325560 - RNA, 32 nt, Human
agguucaacagaggccacgagauguguuacag

SEQ ID NO: 325561 - RNA, 32 nt, Human
agguucaagaacagcaaguuugcuauuuaaac

SEQ ID NO: 325562 - RNA, 22 nt, Human
agguucaagcaauucuccugcc

SEQ ID NO: 325563 - RNA, 23 nt, Human
agguucaagcaauucuccugccu

SEQ ID NO: 325564 - RNA, 23 nt, Human
agguucaagcaauucucuugccu

SEQ ID NO: 325565 - RNA, 23 nt, Human
agguucaagcauuucuccugccu

SEQ ID NO: 325566 - RNA, 31 nt, Human
agguucaagugauucccuugcuucagccucc

SEQ ID NO: 325567 - RNA, 32 nt, Human
agguucacaggugugcgaugagacugaggacu

SEQ ID NO: 325568 - RNA, 20 nt, Human
agguucacaguuguauucca

SEQ ID NO: 325569 - RNA, 32 nt, Human
agguucacuaaaugugaacagcuuugcuuuuc

SEQ ID NO: 325570 - RNA, 32 nt, Human
agguucacugguaaucccagcacuuugggagg

SEQ ID NO: 325571 - RNA, 32 nt, Human
agguucagacugagcucccccuucccaguagc

SEQ ID NO: 325572 - RNA, 32 nt, Human
agguucagccccggggaggagguuccacagga

SEQ ID NO: 325573 - RNA, 32 nt, Human
agguucagggucuaggaaggggagacauuuca

SEQ ID NO: 325574 - RNA, 26 nt, Human
agguucagucugaaagaaaucuccua

SEQ ID NO: 325575 - RNA, 32 nt, Human
agguucauauccagaggaauggcagaucugag

SEQ ID NO: 325576 - RNA, 21 nt, Human
agguucaugccuguaauccca

SEQ ID NO: 325577 - RNA, 32 nt, Human
agguucauggggaacccagcaggaaauuagaa

SEQ ID NO: 325578 - RNA, 32 nt, Human
agguuccacagcaagagcacccagcagaccau

SEQ ID NO: 325579 - RNA, 32 nt, Human
agguuccagacagccccucuucaccagcgauu

SEQ ID NO: 325580 - RNA, 32 nt, Human
agguuccagacuuagaaacagaccccucugua

SEQ ID NO: 325581 - RNA, 32 nt, Human
agguuccagcaacugaugccacugacuaacaa

SEQ ID NO: 325582 - RNA, 21 nt, Human
agguuccagcuaucacuugua

SEQ ID NO: 325583 - RNA, 32 nt, Human
agguuccaggaggcaucagguuggugugaugc

SEQ ID NO: 325584 - RNA, 32 nt, Human
agguuccagggcagcacccuuccugcugaagc

SEQ ID NO: 325585 - RNA, 21 nt, Human
agguuccaguaaaaaugcuuu

SEQ ID NO: 325586 - RNA, 32 nt, Human
agguuccagugagccgagauggcgcuauugca

SEQ ID NO: 325587 - RNA, 32 nt, Human
agguuccaucacaaaggggcaguauuaauuag

SEQ ID NO: 325588 - RNA, 32 nt, Human
agguucccacaguucauacuccugcuucagga

SEQ ID NO: 325589 - RNA, 32 nt, Human
agguucccaggaagcuuguauuuuaagccagg

SEQ ID NO: 325590 - RNA, 32 nt, Human
agguucccaggaccggucacauggucaggcac

SEQ ID NO: 325591 - RNA, 32 nt, Human
agguucccagguacucggaggcugagaggugg

SEQ ID NO: 325592 - RNA, 32 nt, Human
agguuccccaaaaggcugcccagccuuacagc

SEQ ID NO: 325593 - RNA, 32 nt, Human
agguuccccauucuagcacugaguauuugaaa

SEQ ID NO: 325594 - RNA, 21 nt, Human
agguucccccucucacccgca

SEQ ID NO: 325595 - RNA, 32 nt, Human
agguuccccuggacuccagccaaggcuguuca

SEQ ID NO: 325596 - RNA, 32 nt, Human
agguucccgaguagcugggacuacaggcaugu

SEQ ID NO: 325597 - RNA, 32 nt, Human
agguuccgaguagugucugagacucugcucug

SEQ ID NO: 325598 - RNA, 32 nt, Human
agguuccguaucucccuggagaagcaccagca

SEQ ID NO: 325599 - RNA, 22 nt, Human
agguuccguguggccugugcca

SEQ ID NO: 325600 - RNA, 32 nt, Human
agguuccucagaggggcaacccaaagccagag

SEQ ID NO: 325601 - RNA, 32 nt, Human
agguuccucagcugugguguaacugaagcagg

SEQ ID NO: 325602 - RNA, 32 nt, Human
agguuccugacucucccaucuucaccaacagc

SEQ ID NO: 325603 - RNA, 32 nt, Human
agguuccuguaacucccugccuccuccucucu

SEQ ID NO: 325604 - RNA, 32 nt, Human
agguuccugucuugucugucaugggagccauu

SEQ ID NO: 325605 - RNA, 21 nt, Human
agguuccuguggaccucaggg

SEQ ID NO: 325606 - RNA, 32 nt, Human
agguuccuucacugaguagucuggaagauaua

SEQ ID NO: 325607 - RNA, 32 nt, Human
agguuccuugccugucacgccacccccuuccu

SEQ ID NO: 325608 - RNA, 21 nt, Human
agguucgaggcucaccuauca

SEQ ID NO: 325609 - RNA, 32 nt, Human
agguucgccugcggacucggugcaguggaagc

SEQ ID NO: 325610 - RNA, 32 nt, Human
agguucggaaggcacaggaagcagcugaaagg

SEQ ID NO: 325611 - RNA, 32 nt, Human
agguucgucucaaacuccugaacccuaguaau

SEQ ID NO: 325612 - RNA, 32 nt, Human
agguucuaaggcaugggaucguuuccagauga

SEQ ID NO: 325613 - RNA, 32 nt, Human
agguucuagaugggugaaucaguuggguuuug

SEQ ID NO: 325614 - RNA, 32 nt, Human
agguucuaguccuagcuccaucauuuaccaac

SEQ ID NO: 325615 - RNA, 32 nt, Human
agguucuagugagccgagauugugcuauuugc

SEQ ID NO: 325616 - RNA, 32 nt, Human
agguucucacacuggccugggcuugggugccc

SEQ ID NO: 325617 - RNA, 32 nt, Human
agguucucagcaaguguacaguauuuaccuuc

SEQ ID NO: 325618 - RNA, 22 nt, Human
agguucuccaacaucacagccc

SEQ ID NO: 325619 - RNA, 32 nt, Human
agguucuccugcaucugccucuuccacuccuc

SEQ ID NO: 325620 - RNA, 32 nt, Human
agguucucuccccucuuuccucucacauacau

SEQ ID NO: 325621 - RNA, 32 nt, Human
agguucucuggagcccacacaggccaggacgu

SEQ ID NO: 325622 - RNA, 31 nt, Human
agguucugccucuguggcuguguuugaaaaa

SEQ ID NO: 325623 - RNA, 32 nt, Human
agguucugcucaccuucggguccuccucgcuu

SEQ ID NO: 325624 - RNA, 32 nt, Human
agguucuggagguuggagguuccgcucaguga

SEQ ID NO: 325625 - RNA, 32 nt, Human
agguucugggccuggaacuucugccuccuucc

SEQ ID NO: 325626 - RNA, 32 nt, Human
agguucugggcuggguugugggggacugggga

SEQ ID NO: 325627 - RNA, 32 nt, Human
agguucugugauuuuucagacucugaaaauuc

SEQ ID NO: 325628 - RNA, 32 nt, Human
agguucuguggaaguuccaguguucucucuua

SEQ ID NO: 325629 - RNA, 32 nt, Human
agguucuuagcacauccucuguucucuaccug

SEQ ID NO: 325630 - RNA, 32 nt, Human
agguucuucuggaacuccuguccccuuaguca

SEQ ID NO: 325631 - RNA, 32 nt, Human
agguucuugagacucuugauauuucugucuuc

SEQ ID NO: 325632 - RNA, 32 nt, Human
agguucuuucauggacuugcuguguaccccug

SEQ ID NO: 325633 - RNA, 32 nt, Human
agguucuuugagggacugccucugccacacuc

SEQ ID NO: 325634 - RNA, 32 nt, Human
agguucuuuucucucuuccucucaccuugucc

SEQ ID NO: 325635 - RNA, 32 nt, Human
agguugaaauagugauuuauacaugaugggca

SEQ ID NO: 325636 - RNA, 32 nt, Human
agguugaaaugagacggcuugugugugaaaag

SEQ ID NO: 325637 - RNA, 32 nt, Human
agguugaaaugccaccaggaaaaugccacuuc

SEQ ID NO: 325638 - RNA, 32 nt, Human
agguugaaaugguauguuguaaaagagaagac

SEQ ID NO: 325639 - RNA, 32 nt, Human
agguugaacucgccucuuuugcacuggaaggc

SEQ ID NO: 325640 - RNA, 32 nt, Human
agguugaacuguagcgaggcccccaggccgcc

SEQ ID NO: 325641 - RNA, 32 nt, Human
agguugaagcuguggagcuagacucugcuuca

SEQ ID NO: 325642 - RNA, 32 nt, Human
agguugaaguggcauggcaaugguuagagacc

SEQ ID NO: 325643 - RNA, 32 nt, Human
agguugaaguuggaguuugagguuggaaaaua

SEQ ID NO: 325644 - RNA, 31 nt, Human
agguugaaucaaugucuucucacuuaaucag

SEQ ID NO: 325645 - RNA, 32 nt, Human
agguugacccuccccuggccagguggcugccu

SEQ ID NO: 325646 - RNA, 32 nt, Human
agguugacuagagcugaccagugauuuacaaa

SEQ ID NO: 325647 - RNA, 32 nt, Human
agguugacuauagucaauggggccaauggagc

SEQ ID NO: 325648 - RNA, 32 nt, Human
agguugaggacacacauccaugacacagccuc

SEQ ID NO: 325649 - RNA, 32 nt, Human
agguugaggcagcagaauugcuugaacccagg

SEQ ID NO: 325650 - RNA, 32 nt, Human
agguugaggcagcaggauugcuggagcccagg

SEQ ID NO: 325651 - RNA, 32 nt, Human
agguugaggcguacuggagacaacaccucaga

SEQ ID NO: 325652 - RNA, 32 nt, Human
agguugagugcugcaggaagagcugcuucugc

SEQ ID NO: 325653 - RNA, 32 nt, Human
agguugaguuugcugccaggauucagaucagc

SEQ ID NO: 325654 - RNA, 32 nt, Human
agguugaucucagacugcugugcuagcaauca

SEQ ID NO: 325655 - RNA, 32 nt, Human
agguugaucuucuauuaaaaugauuccucuuu

SEQ ID NO: 325656 - RNA, 32 nt, Human
agguugaucuuggacuccugaccccaggugau

SEQ ID NO: 325657 - RNA, 32 nt, Human
agguugaugggaagacuuccuucccaaagaaa

SEQ ID NO: 325658 - RNA, 32 nt, Human
agguugauugauaucugaucccugcaaaauac

SEQ ID NO: 325659 - RNA, 32 nt, Human
agguugcaagugagcugagaucgcaccacugc

SEQ ID NO: 325660 - RNA, 32 nt, Human
agguugcaaucagccgagauggugccaucgca

SEQ ID NO: 325661 - RNA, 32 nt, Human
agguugcaaucagcugagaucacaccacugca

SEQ ID NO: 325662 - RNA, 32 nt, Human
agguugcaaugagccgagaucgugccacagca

SEQ ID NO: 325663 - RNA, 32 nt, Human
agguugcacacaguacacaccagaagauguga

SEQ ID NO: 325664 - RNA, 31 nt, Human
agguugcacagcuaccauguggcaaaaccag

SEQ ID NO: 325665 - RNA, 32 nt, Human
agguugcaccauuguacuccagccugggcaac

SEQ ID NO: 325666 - RNA, 32 nt, Human
agguugcacccucgugugugccuguguuaaaa

SEQ ID NO: 325667 - RNA, 32 nt, Human
agguugcacugagccgagaucaugccauugua

SEQ ID NO: 325668 - RNA, 32 nt, Human
agguugcagaggcuggccgcugccuggaagug

SEQ ID NO: 325669 - RNA, 32 nt, Human
agguugcagcaagccgagauugugccacugua

SEQ ID NO: 325670 - RNA, 32 nt, Human
agguugcagggagccgagaucacgccacugca

SEQ ID NO: 325671 - RNA, 32 nt, Human
agguugcagggagccgagauccgccacugcac

SEQ ID NO: 325672 - RNA, 32 nt, Human
agguugcaguaagccaagaucgcgccauugca

SEQ ID NO: 325673 - RNA, 32 nt, Human
agguugcaguaagccaagaucgugccauugca

SEQ ID NO: 325674 - RNA, 32 nt, Human
agguugcaguaagccaagauugcgccacugca

SEQ ID NO: 325675 - RNA, 32 nt, Human
agguugcaguaagccaaggucaugccacugca

SEQ ID NO: 325676 - RNA, 32 nt, Human
agguugcaguaagcccagauugugccacugca

SEQ ID NO: 325677 - RNA, 32 nt, Human
agguugcaguaagccgagacuaugccacugca

SEQ ID NO: 325678 - RNA, 32 nt, Human
agguugcaguaagccgagaucacgccacugca

SEQ ID NO: 325679 - RNA, 32 nt, Human
agguugcaguaagccgagaucacgccacugua

SEQ ID NO: 325680 - RNA, 32 nt, Human
agguugcaguaagccuaggucgugccacugca

SEQ ID NO: 325681 - RNA, 32 nt, Human
agguugcagucagccgagaucgugucacugca

SEQ ID NO: 325682 - RNA, 32 nt, Human
agguugcagugaaccgagaucaugccaccgca

SEQ ID NO: 325683 - RNA, 32 nt, Human
agguugcagugagccaagaucaugccuacugc

SEQ ID NO: 325684 - RNA, 32 nt, Human
agguugcagugagccaagauugcagugagcca

SEQ ID NO: 325685 - RNA, 32 nt, Human
agguugcagugagccaugaucaugccacugca

SEQ ID NO: 325686 - RNA, 32 nt, Human
agguugcagugagccgagaaugccacugcacu

SEQ ID NO: 325687 - RNA, 32 nt, Human
agguugcagugagccgagaccacgccacugca

SEQ ID NO: 325688 - RNA, 32 nt, Human
agguugcagugagccgagaccacgccauugca

SEQ ID NO: 325689 - RNA, 32 nt, Human
agguugcagugagccgagaccauaccacugca

SEQ ID NO: 325690 - RNA, 32 nt, Human
agguugcagugagccgagaccaugccacugca

SEQ ID NO: 325691 - RNA, 32 nt, Human
agguugcagugagccgagaccgcgccacugca

SEQ ID NO: 325692 - RNA, 32 nt, Human
agguugcagugagccgagaccgugccacugca

SEQ ID NO: 325693 - RNA, 32 nt, Human
agguugcagugagccgagacugugcuacugca

SEQ ID NO: 325694 - RNA, 32 nt, Human
agguugcagugagccgagagcacgccacugca

SEQ ID NO: 325695 - RNA, 32 nt, Human
agguugcagugagccgagauaaugccacugca

SEQ ID NO: 325696 - RNA, 32 nt, Human
agguugcagugagccgagauagugccacagcu

SEQ ID NO: 325697 - RNA, 32 nt, Human
agguugcagugagccgagauagugccacugca

SEQ ID NO: 325698 - RNA, 32 nt, Human
agguugcagugagccgagauagugccacugug

SEQ ID NO: 325699 - RNA, 32 nt, Human
agguugcagugagccgagaucacaccaccgca

SEQ ID NO: 325700 - RNA, 32 nt, Human
agguugcagugagccgagaucacaccacugca

SEQ ID NO: 325701 - RNA, 32 nt, Human
agguugcagugagccgagaucacaccacugua

SEQ ID NO: 325702 - RNA, 32 nt, Human
agguugcagugagccgagaucacaccauugca

SEQ ID NO: 325703 - RNA, 32 nt, Human
agguugcagugagccgagaucaccccauuuca

SEQ ID NO: 325704 - RNA, 32 nt, Human
agguugcagugagccgagaucacgccacugca

SEQ ID NO: 325705 - RNA, 32 nt, Human
agguugcagugagccgagaucacgccauugca

SEQ ID NO: 325706 - RNA, 32 nt, Human
agguugcagugagccgagaucacgucacugca

SEQ ID NO: 325707 - RNA, 32 nt, Human
agguugcagugagccgagaucacgucauugcu

SEQ ID NO: 325708 - RNA, 32 nt, Human
agguugcagugagccgagaucauaccauugca

SEQ ID NO: 325709 - RNA, 32 nt, Human
agguugcagugagccgagaucaugccacugca

SEQ ID NO: 325710 - RNA, 32 nt, Human
agguugcagugagccgagaucaugccauugca

SEQ ID NO: 325711 - RNA, 32 nt, Human
agguugcagugagccgagaucaugcuacugca

SEQ ID NO: 325712 - RNA, 32 nt, Human
agguugcagugagccgagaucaugucacugca

SEQ ID NO: 325713 - RNA, 32 nt, Human
agguugcagugagccgagaucccccgaccgca

SEQ ID NO: 325714 - RNA, 32 nt, Human
agguugcagugagccgagaucccgccacucac

SEQ ID NO: 325715 - RNA, 32 nt, Human
agguugcagugagccgagaucgagccacugca

SEQ ID NO: 325716 - RNA, 32 nt, Human
agguugcagugagccgagaucgagccauugca

SEQ ID NO: 325717 - RNA, 32 nt, Human
agguugcagugagccgagaucgcaccacgcca

SEQ ID NO: 325718 - RNA, 32 nt, Human
agguugcagugagccgagaucgcaccacugca

SEQ ID NO: 325719 - RNA, 32 nt, Human
agguugcagugagccgagaucgcaccacugua

SEQ ID NO: 325720 - RNA, 32 nt, Human
agguugcagugagccgagaucgcaccagugca

SEQ ID NO: 325721 - RNA, 32 nt, Human
agguugcagugagccgagaucgcaccauugca

SEQ ID NO: 325722 - RNA, 32 nt, Human
agguugcagugagccgagaucgcgccacccac

SEQ ID NO: 325723 - RNA, 32 nt, Human
agguugcagugagccgagaucgcgccacugca

SEQ ID NO: 325724 - RNA, 32 nt, Human
agguugcagugagccgagaucgcgccauagca

SEQ ID NO: 325725 - RNA, 32 nt, Human
agguugcagugagccgagaucgcgccauuaca

SEQ ID NO: 325726 - RNA, 32 nt, Human
agguugcagugagccgagaucgcgccauugca

SEQ ID NO: 325727 - RNA, 32 nt, Human
agguugcagugagccgagaucgcgucacugca

SEQ ID NO: 325728 - RNA, 32 nt, Human
agguugcagugagccgagaucgcuccacugca

SEQ ID NO: 325729 - RNA, 32 nt, Human
agguugcagugagccgagaucgucccacugca

SEQ ID NO: 325730 - RNA, 32 nt, Human
agguugcagugagccgagaucgugccacugca

SEQ ID NO: 325731 - RNA, 32 nt, Human
agguugcagugagccgagaucgugccacugcg

SEQ ID NO: 325732 - RNA, 32 nt, Human
agguugcagugagccgagaucgugccauugca

SEQ ID NO: 325733 - RNA, 32 nt, Human
agguugcagugagccgagaucgugcuacugca

SEQ ID NO: 325734 - RNA, 32 nt, Human
agguugcagugagccgagaucucaccauuaca

SEQ ID NO: 325735 - RNA, 32 nt, Human
agguugcagugagccgagauggcgccacugca

SEQ ID NO: 325736 - RNA, 32 nt, Human
agguugcagugagccgagauggugccacugca

SEQ ID NO: 325737 - RNA, 32 nt, Human
agguugcagugagccgagauuacaccauugca

SEQ ID NO: 325738 - RNA, 32 nt, Human
agguugcagugagccgagauuaugccacugca

SEQ ID NO: 325739 - RNA, 32 nt, Human
agguugcagugagccgagauuaugccacugua

SEQ ID NO: 325740 - RNA, 32 nt, Human
agguugcagugagccgagauuaugucacucca

SEQ ID NO: 325741 - RNA, 32 nt, Human
agguugcagugagccgagauugcaccaccgca

SEQ ID NO: 325742 - RNA, 32 nt, Human
agguugcagugagccgagauugcaccacugca

SEQ ID NO: 325743 - RNA, 32 nt, Human
agguugcagugagccgagauugcaccacuuac

SEQ ID NO: 325744 - RNA, 32 nt, Human
agguugcagugagccgagauugcaccauugca

SEQ ID NO: 325745 - RNA, 32 nt, Human
agguugcagugagccgagauugccacugcacu

SEQ ID NO: 325746 - RNA, 32 nt, Human
agguugcagugagccgagauugcgccacuaca

SEQ ID NO: 325747 - RNA, 32 nt, Human
agguugcagugagccgagauugcgccacugca

SEQ ID NO: 325748 - RNA, 32 nt, Human
agguugcagugagccgagauugcgccacugga

SEQ ID NO: 325749 - RNA, 32 nt, Human
agguugcagugagccgagauugcgccacugua

SEQ ID NO: 325750 - RNA, 32 nt, Human
agguugcagugagccgagauugcgccauugca

SEQ ID NO: 325751 - RNA, 32 nt, Human
agguugcagugagccgagauugcgucacugca

SEQ ID NO: 325752 - RNA, 32 nt, Human
agguugcagugagccgagauugcuccauugca

SEQ ID NO: 325753 - RNA, 32 nt, Human
agguugcagugagccgagauuggccauugcac

SEQ ID NO: 325754 - RNA, 32 nt, Human
agguugcagugagccgagauugugccacuaca

SEQ ID NO: 325755 - RNA, 32 nt, Human
agguugcagugagccgagauugugccacugca

SEQ ID NO: 325756 - RNA, 32 nt, Human
agguugcagugagccgagauugugccacugcg

SEQ ID NO: 325757 - RNA, 32 nt, Human
agguugcagugagccgagauugugccacugua

SEQ ID NO: 325758 - RNA, 32 nt, Human
agguugcagugagccgagauugugccauugca

SEQ ID NO: 325759 - RNA, 32 nt, Human
agguugcagugagccgagauuucaccagugca

SEQ ID NO: 325760 - RNA, 32 nt, Human
agguugcagugagccgggauugcagugagcca

SEQ ID NO: 325761 - RNA, 32 nt, Human
agguugcagugagcggagaucuugccacugca

SEQ ID NO: 325762 - RNA, 32 nt, Human
agguugcagugagcugagaucuucccacugca

SEQ ID NO: 325763 - RNA, 32 nt, Human
agguugcagugagcugagaucuugccacugca

SEQ ID NO: 325764 - RNA, 32 nt, Human
agguugcagugagcugagguugcggugagcug

SEQ ID NO: 325765 - RNA, 32 nt, Human
agguugcagugggccgagaucacaccacugca

SEQ ID NO: 325766 - RNA, 32 nt, Human
agguugcccaggcuggugucgaauuccugguc

SEQ ID NO: 325767 - RNA, 32 nt, Human
agguugccccuccagaccgcucccaacgucag

SEQ ID NO: 325768 - RNA, 32 nt, Human
agguugcccgggagacgcggguacacagagaa

SEQ ID NO: 325769 - RNA, 32 nt, Human
agguugccgugagccgagaucgugccauugca

SEQ ID NO: 325770 - RNA, 32 nt, Human
agguugccuuggugcugccccagaucugucca

SEQ ID NO: 325771 - RNA, 32 nt, Human
agguugcgccacuacacuccagccugggugac

SEQ ID NO: 325772 - RNA, 32 nt, Human
agguugcgccacugcacuccagccugggcaac

SEQ ID NO: 325773 - RNA, 32 nt, Human
agguugcgccacugcacucuagccugggcuac

SEQ ID NO: 325774 - RNA, 32 nt, Human
agguugcgccacuguacuccagccugggugag

SEQ ID NO: 325775 - RNA, 32 nt, Human
agguugcgcuacugcacuccagccuggacaac

SEQ ID NO: 325776 - RNA, 32 nt, Human
agguugcgguaagccgagaucaccuccagccu

SEQ ID NO: 325777 - RNA, 32 nt, Human
agguugcgguaagccgagaucgcaccauugca

SEQ ID NO: 325778 - RNA, 32 nt, Human
agguugcggugagccgagaucacgccacugca

SEQ ID NO: 325779 - RNA, 32 nt, Human
agguugcggugagccgagaucaugccacugca

SEQ ID NO: 325780 - RNA, 32 nt, Human
agguugcggugagccgagaucaugccauggca

SEQ ID NO: 325781 - RNA, 32 nt, Human
agguugcggugagccgagaucgcaccacugca

SEQ ID NO: 325782 - RNA, 32 nt, Human
agguugcggugagccgagaucgcgccauugca

SEQ ID NO: 325783 - RNA, 32 nt, Human
agguugcggugagccgagaucgcgcuacugca

SEQ ID NO: 325784 - RNA, 32 nt, Human
agguugcggugagccgagauugugccauugca

SEQ ID NO: 325785 - RNA, 32 nt, Human
agguugcguguucuucgaguugggcuaaagua

SEQ ID NO: 325786 - RNA, 32 nt, Human
agguugcugcuucaggaacggagggagugaga

SEQ ID NO: 325787 - RNA, 32 nt, Human
agguugcugcuucaggaauggagggagugaga

SEQ ID NO: 325788 - RNA, 32 nt, Human
agguugcuggggcccaggcuggugcuaacaua

SEQ ID NO: 325789 - RNA, 32 nt, Human
agguugcugugagccgagaucgugccacugca

SEQ ID NO: 325790 - RNA, 32 nt, Human
agguugcugugagccgagaucgugccacugcg

SEQ ID NO: 325791 - RNA, 32 nt, Human
agguuggaaaggaagaaagagaagagcugaag

SEQ ID NO: 325792 - RNA, 32 nt, Human
agguuggaagaaaaauggguggaagacaagug

SEQ ID NO: 325793 - RNA, 32 nt, Human
agguuggacagguccuucuguguccuugcaaa

SEQ ID NO: 325794 - RNA, 18 nt, Human
agguuggagaggcaccug

SEQ ID NO: 325795 - RNA, 32 nt, Human
agguuggagaguggagucucuaaaaaucugcu

SEQ ID NO: 325796 - RNA, 17 nt, Human
agguuggagcacacagc

SEQ ID NO: 325797 - RNA, 24 nt, Human
agguuggaggauugcuugagccca

SEQ ID NO: 325798 - RNA, 32 nt, Human
agguuggagucccuacccucccaccucccacc

SEQ ID NO: 325799 - RNA, 19 nt, Human
agguuggaguguaauagca

SEQ ID NO: 325800 - RNA, 32 nt, Human
agguuggaugcaugguugcauggauuuggggu

SEQ ID NO: 325801 - RNA, 32 nt, Human
agguuggauuagcugcgcugaggucccaucca

SEQ ID NO: 325802 - RNA, 32 nt, Human
agguuggauucauggaggagauauaacauuuu

SEQ ID NO: 325803 - RNA, 21 nt, Human
agguuggccaacauggugaga

SEQ ID NO: 325804 - RNA, 18 nt, Human
agguuggccccugaacug

SEQ ID NO: 325805 - RNA, 32 nt, Human
agguuggcccuccucaaggucagccuucagau

SEQ ID NO: 325806 - RNA, 32 nt, Human
agguugggaaaugaggaaugagccugacaccc

SEQ ID NO: 325807 - RNA, 32 nt, Human
agguugggaagaggaugaagauugaauaacug

SEQ ID NO: 325808 - RNA, 32 nt, Human
agguugggaagguaguggcaggagggcagccu

SEQ ID NO: 325809 - RNA, 32 nt, Human
agguugggacucugucuuacauaucugggugc

SEQ ID NO: 325810 - RNA, 32 nt, Human
agguugggagaggugggaaauagcagugaauu

SEQ ID NO: 325811 - RNA, 25 nt, Human
agguugggaggaucaccugagccca

SEQ ID NO: 325812 - RNA, 32 nt, Human
agguugggagguggaggcccagcaucccgcgc

SEQ ID NO: 325813 - RNA, 32 nt, Human
agguugggccuggauggggaggcucuagcauc

SEQ ID NO: 325814 - RNA, 32 nt, Human
agguugggcucaggaacugcagggacgugaac

SEQ ID NO: 325815 - RNA, 32 nt, Human
agguugggcucaggcugggugcucugccaugg

SEQ ID NO: 325816 - RNA, 32 nt, Human
agguugggcuggcagaucaugaggucaggagu

SEQ ID NO: 325817 - RNA, 32 nt, Human
agguugggcuggcuggacugagcccaggccug

SEQ ID NO: 325818 - RNA, 32 nt, Human
agguuggggagugaaguguggggacccuuuuc

SEQ ID NO: 325819 - RNA, 32 nt, Human
agguuggggccgggguagggaggcaggagcca

SEQ ID NO: 325820 - RNA, 32 nt, Human
agguuggggcggaggaagcuggaggauagggg

SEQ ID NO: 325821 - RNA, 32 nt, Human
agguuggggcuggguccacccuguccuaugac

SEQ ID NO: 325822 - RNA, 32 nt, Human
agguuggguuugguuuucuucuuaaagaguuu

SEQ ID NO: 325823 - RNA, 32 nt, Human
agguugguaucuuucaucaaauccagaugcaa

SEQ ID NO: 325824 - RNA, 32 nt, Human
agguuggucucaaacuccugagcucaagcaau

SEQ ID NO: 325825 - RNA, 32 nt, Human
agguuggucucaaacuccugagcucaagcagu

SEQ ID NO: 325826 - RNA, 32 nt, Human
agguuggucucaaacuccuggacucaagugau

SEQ ID NO: 325827 - RNA, 32 nt, Human
agguuggucucaagcuccugaccucagaugau

SEQ ID NO: 325828 - RNA, 32 nt, Human
agguuggucucgaacgccuaggcucaagugau

SEQ ID NO: 325829 - RNA, 32 nt, Human
agguuggucucgaacuccugaccucaggugau

SEQ ID NO: 325830 - RNA, 32 nt, Human
agguuggucucgaacuccugaccuugugaugc

SEQ ID NO: 325831 - RNA, 32 nt, Human
agguuggucucgaacuccugacuucaugugau

SEQ ID NO: 325832 - RNA, 32 nt, Human
agguuggucucgaacuccugaucucaugaucc

SEQ ID NO: 325833 - RNA, 32 nt, Human
agguuggucucgaacuccuggccucaagugau

SEQ ID NO: 325834 - RNA, 32 nt, Human
agguuggucucgaacuccuggcuucaagcgau

SEQ ID NO: 325835 - RNA, 32 nt, Human
agguuggucucgaacuccugggcucaagcagu

SEQ ID NO: 325836 - RNA, 32 nt, Human
agguuggucucgaacucuugaccucaagugau

SEQ ID NO: 325837 - RNA, 32 nt, Human
agguuggucuugaacuccuagaccuugugauc

SEQ ID NO: 325838 - RNA, 32 nt, Human
agguuggucuugaacuccugaccucaggugau

SEQ ID NO: 325839 - RNA, 32 nt, Human
agguuggucuugaacuccuggccucaagcauc

SEQ ID NO: 325840 - RNA, 32 nt, Human
agguuggucuugaacucuugaccucaugaucc

SEQ ID NO: 325841 - RNA, 32 nt, Human
agguuggugaugauauugucauagaagcuuug

SEQ ID NO: 325842 - RNA, 32 nt, Human
agguugguuuugaacuccugaccucaaguaau

SEQ ID NO: 325843 - RNA, 32 nt, Human
agguugguuuugaacuccugggcucaagcgau

SEQ ID NO: 325844 - RNA, 32 nt, Human
agguugguuuugcuguugaucggucuccuagg

SEQ ID NO: 325845 - RNA, 32 nt, Human
agguuguaccacugcacuccagccuggcugac

SEQ ID NO: 325846 - RNA, 32 nt, Human
agguuguagggagcuaugaucuugccauugca

SEQ ID NO: 325847 - RNA, 32 nt, Human
agguuguaguaagcugacauugugccacugca

SEQ ID NO: 325848 - RNA, 32 nt, Human
agguuguagugagccgagaucgcgccaucgca

SEQ ID NO: 325849 - RNA, 32 nt, Human
agguuguagugagccgagaucgcgccgcugca

SEQ ID NO: 325850 - RNA, 32 nt, Human
agguuguagugagccgagauuacuccagccua

SEQ ID NO: 325851 - RNA, 32 nt, Human
agguuguagugagccgagauugcaccacugca

SEQ ID NO: 325852 - RNA, 32 nt, Human
agguuguagugagccgagauugugccacugca

SEQ ID NO: 325853 - RNA, 32 nt, Human
agguugucagcuuuaagauauguggugguuuu

SEQ ID NO: 325854 - RNA, 32 nt, Human
agguuguccuuguccuauuaagccucuucccc

SEQ ID NO: 325855 - RNA, 22 nt, Human
agguugugaaccccucccccca

SEQ ID NO: 325856 - RNA, 32 nt, Human
agguugugaauugcaccuccagcuuugaacac

SEQ ID NO: 325857 - RNA, 32 nt, Human
agguugugccacugcacuccagccugggcaaa

SEQ ID NO: 325858 - RNA, 32 nt, Human
agguugugccacugcacuccagccugggugac

SEQ ID NO: 325859 - RNA, 32 nt, Human
agguugugccacugcacugcagccugggcuac

SEQ ID NO: 325860 - RNA, 32 nt, Human
agguugugcucuggcaguaggccacgaccugc

SEQ ID NO: 325861 - RNA, 32 nt, Human
agguugugcuuccggugcggaggucauggaca

SEQ ID NO: 325862 - RNA, 32 nt, Human
agguuguggaaauguuucagauuaaaugauag

SEQ ID NO: 325863 - RNA, 32 nt, Human
agguuguggcugaugguguugaagauaaauaa

SEQ ID NO: 325864 - RNA, 18 nt, Human
agguuguggcugcaguga

SEQ ID NO: 325865 - RNA, 29 nt, Human
agguuguggcugcugguaugcuucagcuu

SEQ ID NO: 325866 - RNA, 32 nt, Human
agguugugggggacaucuugagcugaagcagg

SEQ ID NO: 325867 - RNA, 32 nt, Human
agguuguggucugaggaccacuacauggggau

SEQ ID NO: 325868 - RNA, 32 nt, Human
agguuguggugaagggcaauugggagaggcua

SEQ ID NO: 325869 - RNA, 32 nt, Human
agguuguggugagccgagaucacgccacugca

SEQ ID NO: 325870 - RNA, 32 nt, Human
agguuguggugagccgagaucgcaccauugca

SEQ ID NO: 325871 - RNA, 32 nt, Human
agguuguggugagccgagaucgcgccaguaca

SEQ ID NO: 325872 - RNA, 32 nt, Human
agguuguggugagccgagaucgcgccauugca

SEQ ID NO: 325873 - RNA, 32 nt, Human
agguuguggugagccgagaucgugccacugua

SEQ ID NO: 325874 - RNA, 32 nt, Human
agguuguggugagccgagaucgugccauugca

SEQ ID NO: 325875 - RNA, 32 nt, Human
agguuguggugagccgagauugcaccacugca

SEQ ID NO: 325876 - RNA, 32 nt, Human
agguuguggugagccgagauugcaccauugcg

SEQ ID NO: 325877 - RNA, 32 nt, Human
agguuguggugagccgagauugcuccauugca

SEQ ID NO: 325878 - RNA, 32 nt, Human
agguugugucauugcacuccagccuggggaac

SEQ ID NO: 325879 - RNA, 32 nt, Human
agguuguugcggaugcuucucucuccaggcgc

SEQ ID NO: 325880 - RNA, 32 nt, Human
agguuguuugauuauuuugcaaaagccuuuca

SEQ ID NO: 325881 - RNA, 32 nt, Human
agguuguuuggaaagucggugugacagacaca

SEQ ID NO: 325882 - RNA, 32 nt, Human
agguuuaaagggggaaagaaaagggaagaaga

SEQ ID NO: 325883 - RNA, 32 nt, Human
agguuuaauuggcucaugguuccccaggcugu

SEQ ID NO: 325884 - RNA, 32 nt, Human
agguuuaauuguuguuuauugguacaauaagg

SEQ ID NO: 325885 - RNA, 32 nt, Human
agguuuacaccacugcacuccagucuggauga

SEQ ID NO: 325886 - RNA, 32 nt, Human
agguuuacacguggguuucaguguauuugccu

SEQ ID NO: 325887 - RNA, 32 nt, Human
agguuuacauuaugugaauacaugcacauuug

SEQ ID NO: 325888 - RNA, 32 nt, Human
agguuuagaagagaaaagagcaacagauuuuc

SEQ ID NO: 325889 - RNA, 32 nt, Human
agguuuagugcccuccugagugacugcgucag

SEQ ID NO: 325890 - RNA, 32 nt, Human
agguuuagugcugcugcuuucacugcugcacc

SEQ ID NO: 325891 - RNA, 32 nt, Human
agguuuaguucuuagauccuggcuccagacau

SEQ ID NO: 325892 - RNA, 32 nt, Human
agguuuauccccaaggccccagcuuugagaag

SEQ ID NO: 325893 - RNA, 32 nt, Human
agguuuaucucuccucuucuguuuucuggaag

SEQ ID NO: 325894 - RNA, 32 nt, Human
agguuuaugaaugcugaaccucagguuucaua

SEQ ID NO: 325895 - RNA, 32 nt, Human
agguuuauggucuguucucacacugcuacgaa

SEQ ID NO: 325896 - RNA, 32 nt, Human
agguuuauguugaggauucuguuccuggaauu

SEQ ID NO: 325897 - RNA, 32 nt, Human
agguuuauuaaauuaugcuuguaaaugaaaga

SEQ ID NO: 325898 - RNA, 32 nt, Human
agguuuauucaauccuguccuggguagggcga

SEQ ID NO: 325899 - RNA, 32 nt, Human
agguuucaacccagaguuaaugucaagcaugc

SEQ ID NO: 325900 - RNA, 32 nt, Human
agguuucaccucccaaacccagccucuagaac

SEQ ID NO: 325901 - RNA, 32 nt, Human
agguuucagaccgccucacaggcagaguucca

SEQ ID NO: 325902 - RNA, 32 nt, Human
agguuucagacuccaguuucucccuugcccuu

SEQ ID NO: 325903 - RNA, 32 nt, Human
agguuucagaucccaagcuacagaucaugucu

SEQ ID NO: 325904 - RNA, 32 nt, Human
agguuucagcaacaccaguggccuacagagaa

SEQ ID NO: 325905 - RNA, 30 nt, Human
agguuucagcuucccucgcuccuguuguua

SEQ ID NO: 325906 - RNA, 32 nt, Human
agguuucaggaaggggccacagcaagccaucu

SEQ ID NO: 325907 - RNA, 32 nt, Human
agguuucaggggcaagagcaguuuucaaaagu

SEQ ID NO: 325908 - RNA, 32 nt, Human
agguuucagugagccgagaucaugccacugca

SEQ ID NO: 325909 - RNA, 32 nt, Human
agguuucagugagccgagaucgcgccacugca

SEQ ID NO: 325910 - RNA, 32 nt, Human
agguuucagugagccgagauugugccacugca

SEQ ID NO: 325911 - RNA, 32 nt, Human
agguuucauaauuuacaaaugggaauuucauu

SEQ ID NO: 325912 - RNA, 32 nt, Human
agguuucauucugcagggauuuacuggaaucu

SEQ ID NO: 325913 - RNA, 32 nt, Human
agguuuccaagauaaaaccagagcaggaaaga

SEQ ID NO: 325914 - RNA, 32 nt, Human
agguuucccugccugucacugcucgggcagag

SEQ ID NO: 325915 - RNA, 32 nt, Human
agguuuccgcaggucugcuccccaccccugcc

SEQ ID NO: 325916 - RNA, 32 nt, Human
agguuuccuucagauugcugauugcuuauaca

SEQ ID NO: 325917 - RNA, 32 nt, Human
agguuucgagagcauuccuacucacauaagug

SEQ ID NO: 325918 - RNA, 32 nt, Human
agguuucucaaggagcuggagacuucagggag

SEQ ID NO: 325919 - RNA, 32 nt, Human
agguuucucucugccagcuccacgcuucugga

SEQ ID NO: 325920 - RNA, 32 nt, Human
agguuucuggugaaaacauggagaggaggcug

SEQ ID NO: 325921 - RNA, 32 nt, Human
agguuucuguaaccccugcccuggugugagga

SEQ ID NO: 325922 - RNA, 32 nt, Human
agguuucugucccuccccagaaccuuguagga

SEQ ID NO: 325923 - RNA, 32 nt, Human
agguuucuuuuccugucccucuuccaucccca

SEQ ID NO: 325924 - RNA, 32 nt, Human
agguuugauuucagccugcccuugccagugcc

SEQ ID NO: 325925 - RNA, 32 nt, Human
agguuugcaauccagaucugauuuucuccaac

SEQ ID NO: 325926 - RNA, 32 nt, Human
agguuugcaguuucacuccugaaaucagugua

SEQ ID NO: 325927 - RNA, 32 nt, Human
agguuugccucugcuuuuguucccugccuuuc

SEQ ID NO: 325928 - RNA, 32 nt, Human
agguuugcgccgacuccgucucccagaaauca

SEQ ID NO: 325929 - RNA, 32 nt, Human
agguuugcugcaggaggaaaguuuaauccccc

SEQ ID NO: 325930 - RNA, 32 nt, Human
agguuugcuucacucuuccaagggccuucuug

SEQ ID NO: 325931 - RNA, 32 nt, Human
agguuuggaaagccaccugagaccacuucaua

SEQ ID NO: 325932 - RNA, 32 nt, Human
agguuuggagagguaaauagcuauuucacauu

SEQ ID NO: 325933 - RNA, 32 nt, Human
agguuuggagaguguaaggaacauggcugugc

SEQ ID NO: 325934 - RNA, 32 nt, Human
agguuugggaggaugcugaggccugagaucuc

SEQ ID NO: 325935 - RNA, 32 nt, Human
agguuuggggcgaauguccugaggcagagaug

SEQ ID NO: 325936 - RNA, 32 nt, Human
agguuugguucaaacaccagacccaggcuugu

SEQ ID NO: 325937 - RNA, 32 nt, Human
agguuuguaauacuugaagcccuacauuucua

SEQ ID NO: 325938 - RNA, 32 nt, Human
agguuuguacaagccugcgcacacacagcagu

SEQ ID NO: 325939 - RNA, 32 nt, Human
agguuuguaggagacugaguuguuagcaggug

SEQ ID NO: 325940 - RNA, 32 nt, Human
agguuuguauuuucaggaaggagagaauaaca

SEQ ID NO: 325941 - RNA, 32 nt, Human
agguuugugcugcgcuuccaguuccgaaaagc

SEQ ID NO: 325942 - RNA, 32 nt, Human
agguuugugggauggggguuagcgucuaugug

SEQ ID NO: 325943 - RNA, 32 nt, Human
agguuuguuacuucccucacuucaccuccaua

SEQ ID NO: 325944 - RNA, 32 nt, Human
agguuuuaaaggccaagaaggcaguguugaaa

SEQ ID NO: 325945 - RNA, 32 nt, Human
agguuuuaagccaauucuaguaagaaauuaau

SEQ ID NO: 325946 - RNA, 32 nt, Human
agguuuuacuggcugcaccacaccccuucccc

SEQ ID NO: 325947 - RNA, 32 nt, Human
agguuuuagugagccgagauugcgccacugca

SEQ ID NO: 325948 - RNA, 32 nt, Human
agguuuuauacaccugaaagaagagaauguca

SEQ ID NO: 325949 - RNA, 32 nt, Human
agguuuucaaaaaugugagaacaguacaaagu

SEQ ID NO: 325950 - RNA, 32 nt, Human
agguuuucagaucacauuucccagagugaguu

SEQ ID NO: 325951 - RNA, 32 nt, Human
agguuuucagugauuauaccucagguauuucu

SEQ ID NO: 325952 - RNA, 32 nt, Human
agguuuucaguuaaagcccuaucugcacuuuu

SEQ ID NO: 325953 - RNA, 28 nt, Human
agguuuuccaugacugccucaucagcag

SEQ ID NO: 325954 - RNA, 32 nt, Human
agguuuucccccaaggcuuggcuuuguguagc

SEQ ID NO: 325955 - RNA, 32 nt, Human
agguuuuccugccucagaguguuggcugcacu

SEQ ID NO: 325956 - RNA, 32 nt, Human
agguuuuccuucccuuccuuuuuccccaaggu

SEQ ID NO: 325957 - RNA, 32 nt, Human
agguuuucucagaacucaauugagggugggca

SEQ ID NO: 325958 - RNA, 32 nt, Human
agguuuucuuacucugaauuuagaucuccaga

SEQ ID NO: 325959 - RNA, 32 nt, Human
agguuuugccauccacaaucccuccuacaggg

SEQ ID NO: 325960 - RNA, 24 nt, Human
agguuuuggaauuacaggugugag

SEQ ID NO: 325961 - RNA, 32 nt, Human
agguuuuggauccuuugggauucccccacggg

SEQ ID NO: 325962 - RNA, 32 nt, Human
agguuuugugagaguuuugacuggauguggcc

SEQ ID NO: 325963 - RNA, 32 nt, Human
agguuuugugugugagugcaaaauguaaacac

SEQ ID NO: 325964 - RNA, 32 nt, Human
agguuuuuacaaagggcagcauaucacacugu

SEQ ID NO: 325965 - RNA, 32 nt, Human
agguuuuuaucugguaaaauguuacacuuacu

SEQ ID NO: 325966 - RNA, 32 nt, Human
agguuuuuaucuugucuuaaauuucuuucuag

SEQ ID NO: 325967 - RNA, 23 nt, Human
agguuuuuccaguuuucugcacu

SEQ ID NO: 325968 - RNA, 32 nt, Human
agguuuuucuguggaggacugcagcauuuugg

SEQ ID NO: 325969 - RNA, 32 nt, Human
aguaaaaacagacaaaugaaacaaccuagugu

SEQ ID NO: 325970 - RNA, 32 nt, Human
aguaaaaaggaaauaguugcugaagaggaaaa

SEQ ID NO: 325971 - RNA, 32 nt, Human
aguaaaacaaauucagauguuaacuggccugc

SEQ ID NO: 325972 - RNA, 32 nt, Human
aguaaaacaacaaauagcuaccacuuuugcuc

SEQ ID NO: 325973 - RNA, 32 nt, Human
aguaaaacaagaaaaguacauucuuuagaaac

SEQ ID NO: 325974 - RNA, 32 nt, Human
aguaaaaccagcugccagccugagaagccugu

SEQ ID NO: 325975 - RNA, 32 nt, Human
aguaaaaccuuugacagaggauggauuuuuaa

SEQ ID NO: 325976 - RNA, 32 nt, Human
aguaaaacugggaggcauuuaggcuggaauag

SEQ ID NO: 325977 - RNA, 32 nt, Human
aguaaaagaaauggccucucuccucugucaga

SEQ ID NO: 325978 - RNA, 32 nt, Human
aguaaaagagcccacccuggaaccuggaucuc

SEQ ID NO: 325979 - RNA, 32 nt, Human
aguaaaagauguucuuuuucccaaagcguuuu

SEQ ID NO: 325980 - RNA, 32 nt, Human
aguaaaaggaaaugcuccuccagggagucuca

SEQ ID NO: 325981 - RNA, 32 nt, Human
aguaaaaggaggaggaagggcuggggagaaga

SEQ ID NO: 325982 - RNA, 32 nt, Human
aguaaaaguacccauuguuucacuuccuggag

SEQ ID NO: 325983 - RNA, 32 nt, Human
aguaaaagucuaccccucugaagcacuauuaa

SEQ ID NO: 325984 - RNA, 31 nt, Human
aguaaaagugggacuguuucacuggagucag

SEQ ID NO: 325985 - RNA, 32 nt, Human
aguaaaaguggucucugcuggggaaggguuuu

SEQ ID NO: 325986 - RNA, 32 nt, Human
aguaaaaucccacuuucaugcaucucugggaa

SEQ ID NO: 325987 - RNA, 32 nt, Human
aguaaaauggaaggaaauugggugcauuucua

SEQ ID NO: 325988 - RNA, 32 nt, Human
aguaaaauguacagauggaggccaaucuuaua

SEQ ID NO: 325989 - RNA, 32 nt, Human
aguaaaauuaaagucaauuaagaaauagaacu

SEQ ID NO: 325990 - RNA, 32 nt, Human
aguaaaauuuuaguaccuggagguuugacucu

SEQ ID NO: 325991 - RNA, 32 nt, Human
aguaaacacccuggggacuaggaaaaggaacc

SEQ ID NO: 325992 - RNA, 32 nt, Human
aguaaacagccaccuucuuggaaagggaaugc

SEQ ID NO: 325993 - RNA, 32 nt, Human
aguaaacaggaaggaaggaggccaucuguuca

SEQ ID NO: 325994 - RNA, 32 nt, Human
aguaaacaucucugccuuugccuguguguguu

SEQ ID NO: 325995 - RNA, 21 nt, Human
aguaaacaugacagacugaua

SEQ ID NO: 325996 - RNA, 32 nt, Human
aguaaacauugugccuuuacuacuucuuuaug

SEQ ID NO: 325997 - RNA, 32 nt, Human
aguaaaccaauacaacuguggaauaauauuuu

SEQ ID NO: 325998 - RNA, 32 nt, Human
aguaaaccauaccguggggaacaucagaugca

SEQ ID NO: 325999 - RNA, 32 nt, Human
aguaaacccaaacuuggcuggggcucagauac

SEQ ID NO: 326000 - RNA, 32 nt, Human
aguaaacccagcugccugcauugccugggacu

SEQ ID NO: 326001 - RNA, 32 nt, Human
aguaaacccuagugucaacucuggacuucagu

SEQ ID NO: 326002 - RNA, 32 nt, Human
aguaaacugccaacuccaacugccuuucugga

SEQ ID NO: 326003 - RNA, 32 nt, Human
aguaaagaacgucacuuugaaacccauucauc

SEQ ID NO: 326004 - RNA, 32 nt, Human
aguaaagacagggguuucaccaucuuggccag

SEQ ID NO: 326005 - RNA, 32 nt, Human
aguaaagacauaagcaaauaaauggucuuggu

SEQ ID NO: 326006 - RNA, 32 nt, Human
aguaaagacggggguuucaccauguuggccca

SEQ ID NO: 326007 - RNA, 32 nt, Human
aguaaagagaagaggaagggaggccauaucua

SEQ ID NO: 326008 - RNA, 32 nt, Human
aguaaagaguacacucagccacugucacaggc

SEQ ID NO: 326009 - RNA, 32 nt, Human
aguaaagaugcugaaugugacuuguuaagagg

SEQ ID NO: 326010 - RNA, 32 nt, Human
aguaaagcagacuggccugacuguguguggau

SEQ ID NO: 326011 - RNA, 32 nt, Human
aguaaagcagaggaugcaacaaauguggccaa

SEQ ID NO: 326012 - RNA, 32 nt, Human
aguaaagcauuuuauaugccugugucagcgag

SEQ ID NO: 326013 - RNA, 32 nt, Human
aguaaagcauuuucaaaacucaguauuuaaac

SEQ ID NO: 326014 - RNA, 32 nt, Human
aguaaagcccuaucaguauaaaauuugaaaga

SEQ ID NO: 326015 - RNA, 32 nt, Human
aguaaagcucaggaggugagugagucucuuga

SEQ ID NO: 326016 - RNA, 32 nt, Human
aguaaaggaggaagauggcggggugcaggggg

SEQ ID NO: 326017 - RNA, 32 nt, Human
aguaaaggcaacaagauuuccugacagauuga

SEQ ID NO: 326018 - RNA, 32 nt, Human
aguaaagggaucagccuucauggccaucauag

SEQ ID NO: 326019 - RNA, 32 nt, Human
aguaaaggggccagucuucacuggcaguggcu

SEQ ID NO: 326020 - RNA, 32 nt, Human
aguaaagugguuuuguuuguuucuuugagaug

SEQ ID NO: 326021 - RNA, 32 nt, Human
aguaaauaaaacacaggaaguauucuggugga

SEQ ID NO: 326022 - RNA, 32 nt, Human
aguaaauaagagagaggaaggaggugacguuc

SEQ ID NO: 326023 - RNA, 32 nt, Human
aguaaauacaugcuuaacaaaaggaaugagcc

SEQ ID NO: 326024 - RNA, 32 nt, Human
aguaaauagcagcuaugugugugcaaaauaaa

SEQ ID NO: 326025 - RNA, 32 nt, Human
aguaaaucaaaucuguucacaugcccacaaaa

SEQ ID NO: 326026 - RNA, 32 nt, Human
aguaaaucuauauuccgucugcuccaacacac

SEQ ID NO: 326027 - RNA, 32 nt, Human
aguaaaugaauuccagguuaaauguucacuuu

SEQ ID NO: 326028 - RNA, 32 nt, Human
aguaaaugccucauuuaauaacauacuccuuu

SEQ ID NO: 326029 - RNA, 32 nt, Human
aguaaauggagcagaggaacagguguggcagc

SEQ ID NO: 326030 - RNA, 32 nt, Human
aguaaauggggguugagggugaccuaggcagc

SEQ ID NO: 326031 - RNA, 32 nt, Human
aguaaaugguucccuucuuuccuuccuacuuu

SEQ ID NO: 326032 - RNA, 32 nt, Human
aguaaauguagcuggaauucucauaaaguuag

SEQ ID NO: 326033 - RNA, 32 nt, Human
aguaaaugucuacugagcacaaucuagugaau

SEQ ID NO: 326034 - RNA, 32 nt, Human
aguaaauuauauuguaauaaaaagguagauaa

SEQ ID NO: 326035 - RNA, 32 nt, Human
aguaaauuucugauuuuccuuuauugauuaug

SEQ ID NO: 326036 - RNA, 32 nt, Human
aguaacaaacaucacagucaacaggagcuugc

SEQ ID NO: 326037 - RNA, 32 nt, Human
aguaacaaagauccuucuaggccuucauuuua

SEQ ID NO: 326038 - RNA, 32 nt, Human
aguaacaagauggugacuucuccuuggggauc

SEQ ID NO: 326039 - RNA, 32 nt, Human
aguaacacaagucguuguaccucaguugugac

SEQ ID NO: 326040 - RNA, 32 nt, Human
aguaacacacaugagucucucccucagaagcc

SEQ ID NO: 326041 - RNA, 32 nt, Human
aguaacacauaaagaugucaccagaagacaaa

SEQ ID NO: 326042 - RNA, 32 nt, Human
aguaacacucacuucucucagaaccaucuuuu

SEQ ID NO: 326043 - RNA, 32 nt, Human
aguaacagagcagaugcuaaaccgucacagcu

SEQ ID NO: 326044 - RNA, 32 nt, Human
aguaacagcauacuuaacauuuuugugugugu

SEQ ID NO: 326045 - RNA, 32 nt, Human
aguaacagccaagaugcugcggaaucugcugg

SEQ ID NO: 326046 - RNA, 19 nt, Human
aguaacaguacuuuugguu

SEQ ID NO: 326047 - RNA, 32 nt, Human
aguaacagucaucgcccagcagugucuggccu

SEQ ID NO: 326048 - RNA, 32 nt, Human
aguaacaugaugagacccccaucucuacaaaa

SEQ ID NO: 326049 - RNA, 32 nt, Human
aguaacauuagggucuaccucuaccucaauuu

SEQ ID NO: 326050 - RNA, 32 nt, Human
aguaacauuuugcaaccaaaucugcacagauu

SEQ ID NO: 326051 - RNA, 32 nt, Human
aguaaccaaaucugugaaaauauucacaugag

SEQ ID NO: 326052 - RNA, 32 nt, Human
aguaaccaaauucccccaaagacaggaggugu

SEQ ID NO: 326053 - RNA, 24 nt, Human
aguaaccaacaaaaacuuguuuua

SEQ ID NO: 326054 - RNA, 32 nt, Human
aguaaccaacacagcaugguacugguaccaac

SEQ ID NO: 326055 - RNA, 32 nt, Human
aguaaccagaagacuuucagaugguuuauuug

SEQ ID NO: 326056 - RNA, 32 nt, Human
aguaaccagaagcccaaaugcaaugaguuucu

SEQ ID NO: 326057 - RNA, 32 nt, Human
aguaaccagcaaccuaggaacauagaagguaa

SEQ ID NO: 326058 - RNA, 32 nt, Human
aguaaccagggggcggggguggcaugggaaau

SEQ ID NO: 326059 - RNA, 32 nt, Human
aguaaccagguccuaagggugcagcccucaug

SEQ ID NO: 326060 - RNA, 32 nt, Human
aguaaccaucaacacaauuaguuuacagaaug

SEQ ID NO: 326061 - RNA, 32 nt, Human
aguaaccauggggaggaagcuggaccugucug

SEQ ID NO: 326062 - RNA, 32 nt, Human
aguaacccacagaacaucugugaucuuucuac

SEQ ID NO: 326063 - RNA, 32 nt, Human
aguaaccccuaaacucagccagucccauguuu

SEQ ID NO: 326064 - RNA, 32 nt, Human
aguaaccccuuuccugcuuuuuccugccucug

SEQ ID NO: 326065 - RNA, 19 nt, Human
aguaacccucccaucccca

SEQ ID NO: 326066 - RNA, 32 nt, Human
aguaaccucccaacuucucucccugcauucac

SEQ ID NO: 326067 - RNA, 32 nt, Human
aguaaccucucacagcuacccagcacaugcca

SEQ ID NO: 326068 - RNA, 32 nt, Human
aguaaccugcuguggucagcauagcuacagga

SEQ ID NO: 326069 - RNA, 18 nt, Human
aguaacgccacuuccaca

SEQ ID NO: 326070 - RNA, 32 nt, Human
aguaacgggguuucaccauguuggccaggcug

SEQ ID NO: 326071 - RNA, 21 nt, Human
aguaacguguucauuuugguc

SEQ ID NO: 326072 - RNA, 32 nt, Human
aguaacuacagcugcaacagacauccuccaca

SEQ ID NO: 326073 - RNA, 32 nt, Human
aguaacuaugugagugacuggugggaagagua

SEQ ID NO: 326074 - RNA, 32 nt, Human
aguaacuccccagcauuucccucuuuuucucc

SEQ ID NO: 326075 - RNA, 32 nt, Human
aguaacuccucuucccauuuuccaauccaucc

SEQ ID NO: 326076 - RNA, 32 nt, Human
aguaacugacgugugcaucaccccagaaguag

SEQ ID NO: 326077 - RNA, 32 nt, Human
aguaacugagauuacaggcacccaccaccaug

SEQ ID NO: 326078 - RNA, 32 nt, Human
aguaacugcaacuuuguugcuucuguguuuga

SEQ ID NO: 326079 - RNA, 32 nt, Human
aguaacugccaagaauuguuaacacacuugug

SEQ ID NO: 326080 - RNA, 32 nt, Human
aguaacugcccacaggcucuccagaaaacuac

SEQ ID NO: 326081 - RNA, 32 nt, Human
aguaacuggaguagcugggauuuacuaguagu

SEQ ID NO: 326082 - RNA, 32 nt, Human
aguaacuggagucacccaggaagcaagaggcg

SEQ ID NO: 326083 - RNA, 32 nt, Human
aguaacugggauuacaggcacccgccaccaug

SEQ ID NO: 326084 - RNA, 32 nt, Human
aguaacugggauuacaggcaugcaccaccaug

SEQ ID NO: 326085 - RNA, 32 nt, Human
aguaacugggauuacaggcaugcgccaccaua

SEQ ID NO: 326086 - RNA, 32 nt, Human
aguaacugggauuacaggcaugcgccaccaug

SEQ ID NO: 326087 - RNA, 32 nt, Human
aguaacugggauuacaggcaugcgccacuaag

SEQ ID NO: 326088 - RNA, 32 nt, Human
aguaacugggauuacaggcaugugccaucacg

SEQ ID NO: 326089 - RNA, 32 nt, Human
aguaacugggauuacaggcaugugucaccaug

SEQ ID NO: 326090 - RNA, 32 nt, Human
aguaacugggauuacaggcuugugccaccgca

SEQ ID NO: 326091 - RNA, 32 nt, Human
aguaacugggauuacaggugugugccaccaca

SEQ ID NO: 326092 - RNA, 32 nt, Human
aguaacugggauuacagucgugugccaccacg

SEQ ID NO: 326093 - RNA, 32 nt, Human
aguaacugugugagccuugggcaaguuacuca

SEQ ID NO: 326094 - RNA, 32 nt, Human
aguaacuguuaucuccucuccuaaggagauga

SEQ ID NO: 326095 - RNA, 32 nt, Human
aguaacuucaugaauacuacaaacuuccaguc

SEQ ID NO: 326096 - RNA, 32 nt, Human
aguaacuucuuauggaauugauuugcauugaa

SEQ ID NO: 326097 - RNA, 32 nt, Human
aguaacuuuggucagggauucucacuagcagc

SEQ ID NO: 326098 - RNA, 32 nt, Human
aguaagaaaagcuuuccuaaagucccauacau

SEQ ID NO: 326099 - RNA, 32 nt, Human
aguaagaaaaugcagaggcucgggcuuguuug

SEQ ID NO: 326100 - RNA, 32 nt, Human
aguaagaaaccaggagcguuuccaguuccacc

SEQ ID NO: 326101 - RNA, 32 nt, Human
aguaagaagaaggaaaacacagcacgcuggag

SEQ ID NO: 326102 - RNA, 32 nt, Human
aguaagaagaggaggaggccaggcaggcaaaa

SEQ ID NO: 326103 - RNA, 32 nt, Human
aguaagacagcuuuaauucauccuuuuuguuu

SEQ ID NO: 326104 - RNA, 32 nt, Human
aguaagacaggcacagcuaaagugcucucugg

SEQ ID NO: 326105 - RNA, 32 nt, Human
aguaagaccaggaugucucugaaauggacguc

SEQ ID NO: 326106 - RNA, 32 nt, Human
aguaagaccuggggcuugagggguggggaaug

SEQ ID NO: 326107 - RNA, 32 nt, Human
aguaagaccuucugaucuucugaccuucugug

SEQ ID NO: 326108 - RNA, 32 nt, Human
aguaagacucgugccucccccugcugcccugg

SEQ ID NO: 326109 - RNA, 32 nt, Human
aguaagacuugugcuuguuagcagguuuuucu

SEQ ID NO: 326110 - RNA, 32 nt, Human
aguaagagaacacaaucucuguuucuucaaug

SEQ ID NO: 326111 - RNA, 32 nt, Human
aguaagagacgggguuuugccauguuggccag

SEQ ID NO: 326112 - RNA, 32 nt, Human
aguaagagggaaaggaaaagagguaucaagua

SEQ ID NO: 326113 - RNA, 32 nt, Human
aguaagaguaagaccuguuguuuuggaagguc

SEQ ID NO: 326114 - RNA, 32 nt, Human
aguaagaguucugcauuugauauccugguuua

SEQ ID NO: 326115 - RNA, 32 nt, Human
aguaagauaaacucaacuaucucuugggaaga

SEQ ID NO: 326116 - RNA, 32 nt, Human
aguaagauaaauaauauaaagcacuuagaaca

SEQ ID NO: 326117 - RNA, 32 nt, Human
aguaagaugagcuagagaaaauaaccuggucu

SEQ ID NO: 326118 - RNA, 32 nt, Human
aguaagaugcacugaaaacuuagccagaguua

SEQ ID NO: 326119 - RNA, 32 nt, Human
aguaagauuuuuaaagacagaaagccacagga

SEQ ID NO: 326120 - RNA, 32 nt, Human
aguaagcaaggucuuuguggggcaguugucga

SEQ ID NO: 326121 - RNA, 32 nt, Human
aguaagcacaccaacagaacugaguuccagaa

SEQ ID NO: 326122 - RNA, 32 nt, Human
aguaagcacagcugccccugccugagaaggag

SEQ ID NO: 326123 - RNA, 32 nt, Human
aguaagcaccagcugccucuuugcugcuuugu

SEQ ID NO: 326124 - RNA, 32 nt, Human
aguaagcacuuaaggcaaacaguggauggcac

SEQ ID NO: 326125 - RNA, 32 nt, Human
aguaagcagcuugccaaucacuccaggucuga

SEQ ID NO: 326126 - RNA, 32 nt, Human
aguaagcaggagacuuaggauuugugcuguag

SEQ ID NO: 326127 - RNA, 32 nt, Human
aguaagccacugccucuuaccuaaaggucagc

SEQ ID NO: 326128 - RNA, 32 nt, Human
aguaagcccacuguugagaccuagugcucaga

SEQ ID NO: 326129 - RNA, 32 nt, Human
aguaagcugaggacaguguuuauuaugacuau

SEQ ID NO: 326130 - RNA, 32 nt, Human
aguaagcuggacacagagguguagugugcggg

SEQ ID NO: 326131 - RNA, 32 nt, Human
aguaagcuuuagaccaggacgauucagguuau

SEQ ID NO: 326132 - RNA, 32 nt, Human
aguaagcuuuauuuguagcuucugccuuguuu

SEQ ID NO: 326133 - RNA, 32 nt, Human
aguaaggagaaauuaagaccagcuggcuguua

SEQ ID NO: 326134 - RNA, 32 nt, Human
aguaaggagcuuccaugcuucauucccuggca

SEQ ID NO: 326135 - RNA, 32 nt, Human
aguaaggccuauggggcuggaggaucacaggg

SEQ ID NO: 326136 - RNA, 18 nt, Human
aguaaggcugucuugguu

SEQ ID NO: 326137 - RNA, 32 nt, Human
aguaaggcuuugcagaagugauauugcauuag

SEQ ID NO: 326138 - RNA, 32 nt, Human
aguaagggaagaggagaggaaggggagccgga

SEQ ID NO: 326139 - RNA, 32 nt, Human
aguaaggggagaaaggacccugcccucccugu

SEQ ID NO: 326140 - RNA, 32 nt, Human
aguaagggucucaaaugcaaugucaaagagcu

SEQ ID NO: 326141 - RNA, 32 nt, Human
aguaaguacaacauuuuuaacucucauuuggc

SEQ ID NO: 326142 - RNA, 32 nt, Human
aguaaguagggagauuugauaagcauaucuuu

SEQ ID NO: 326143 - RNA, 31 nt, Human
aguaagucaguguccccaacagcagaugagg

SEQ ID NO: 326144 - RNA, 32 nt, Human
aguaagugaggaagaaaugagugaagaugaag

SEQ ID NO: 326145 - RNA, 32 nt, Human
aguaagugaugagggccucugcauuuauaugc

SEQ ID NO: 326146 - RNA, 32 nt, Human
aguaagugcucccacagcuguggcagagguuc

SEQ ID NO: 326147 - RNA, 32 nt, Human
aguaagugggcaagaggcggcaggaagugggu

SEQ ID NO: 326148 - RNA, 32 nt, Human
aguaagugucugcagaugcaaguuuggaagag

SEQ ID NO: 326149 - RNA, 32 nt, Human
aguaaguucuccccauuuuaguuuucuaggac

SEQ ID NO: 326150 - RNA, 32 nt, Human
aguaaguuguuccaaaugauccugaagaaauc

SEQ ID NO: 326151 - RNA, 32 nt, Human
aguaauaacuuagguucuauuaaaaccuaauu

SEQ ID NO: 326152 - RNA, 32 nt, Human
aguaauacuggaggcagaguagggggugguug

SEQ ID NO: 326153 - RNA, 17 nt, Human
aguaauagcauaugguu

SEQ ID NO: 326154 - RNA, 17 nt, Human
aguaauaggauuugguu

SEQ ID NO: 326155 - RNA, 32 nt, Human
aguaauaguauuagcuuuuguauucugagauu

SEQ ID NO: 326156 - RNA, 32 nt, Human
aguaauauaaggaccuguucuggacacagcac

SEQ ID NO: 326157 - RNA, 17 nt, Human
aguaauauuuuuugguc

SEQ ID NO: 326158 - RNA, 31 nt, Human
aguaaucagugcauauuuuguugaaacuccu

SEQ ID NO: 326159 - RNA, 32 nt, Human
aguaaucauucaaccaacgcuuccaugucucu

SEQ ID NO: 326160 - RNA, 32 nt, Human
aguaauccacauaaugcauaagccacaccaaa

SEQ ID NO: 326161 - RNA, 32 nt, Human
aguaaucccgccacugcacucuagccugggug

SEQ ID NO: 326162 - RNA, 32 nt, Human
aguaauccucccaccccagccucccagguagc

SEQ ID NO: 326163 - RNA, 32 nt, Human
aguaauccucuuucugcucaccccaggcagac

SEQ ID NO: 326164 - RNA, 21 nt, Human
aguaaucugggacaucuuagu

SEQ ID NO: 326165 - RNA, 32 nt, Human
aguaaucuugccaaagguaaaggggcuaguug

SEQ ID NO: 326166 - RNA, 32 nt, Human
aguaaugaagccaccauuauguccucagucag

SEQ ID NO: 326167 - RNA, 32 nt, Human
aguaaugaaggacuccacugugccccacuuuc

SEQ ID NO: 326168 - RNA, 32 nt, Human
aguaaugaaucaaugaauaaauaaugagcuag

SEQ ID NO: 326169 - RNA, 32 nt, Human
aguaaugacccugguugguugcaggagguacc

SEQ ID NO: 326170 - RNA, 32 nt, Human
aguaaugaggaaacugagcauuucuuuugccc

SEQ ID NO: 326171 - RNA, 32 nt, Human
aguaaugagggcacugaacaccaauucuuuac

SEQ ID NO: 326172 - RNA, 32 nt, Human
aguaaugauuuccuuagcagaagccguauuug

SEQ ID NO: 326173 - RNA, 32 nt, Human
aguaaugcaaagugcauuuuugucucuaagua

SEQ ID NO: 326174 - RNA, 32 nt, Human
aguaaugcugggaaggagcagcagagucuggg

SEQ ID NO: 326175 - RNA, 32 nt, Human
aguaauggaaggauaaaggaaaagaggaaguu

SEQ ID NO: 326176 - RNA, 29 nt, Human
aguaauggauucacauacagaaaaugaag

SEQ ID NO: 326177 - RNA, 19 nt, Human
aguaaugggauugcugguc

SEQ ID NO: 326178 - RNA, 17 nt, Human
aguaaugggcacuuagu

SEQ ID NO: 326179 - RNA, 32 nt, Human
aguaaugggcugggcuugguggcucacuccug

SEQ ID NO: 326180 - RNA, 32 nt, Human
aguaaugucauuguguuugaccuugaaggaaa

SEQ ID NO: 326181 - RNA, 32 nt, Human
aguaaugugcuagagagacacaugcucccuuc

SEQ ID NO: 326182 - RNA, 32 nt, Human
aguaauuagaaggggagagggagagaggggga

SEQ ID NO: 326183 - RNA, 32 nt, Human
aguaauucagcccuaucucucccagcagaggu

SEQ ID NO: 326184 - RNA, 32 nt, Human
aguaauucauacuugaggaccaugacuguggg

SEQ ID NO: 326185 - RNA, 32 nt, Human
aguaauuccuguaaugucagauuuugauuuua

SEQ ID NO: 326186 - RNA, 32 nt, Human
aguaauugcaggaagauugaagaaaaauccuc

SEQ ID NO: 326187 - RNA, 32 nt, Human
aguaauugcagguuguccagagguugguuugu

SEQ ID NO: 326188 - RNA, 32 nt, Human
aguaauugucagccuaucaacauaguguaguc

SEQ ID NO: 326189 - RNA, 32 nt, Human
aguaauuuacagagaaaucacagacuuuugcu

SEQ ID NO: 326190 - RNA, 32 nt, Human
aguaauuuagagauaagccaugcauacaaguu

SEQ ID NO: 326191 - RNA, 21 nt, Human
aguaauuucaguuucuuucca

SEQ ID NO: 326192 - RNA, 32 nt, Human
aguaauuucccuuuuugcagcuuuuccucagg

SEQ ID NO: 326193 - RNA, 32 nt, Human
aguaauuuccugaccauuuaugcaucagugua

SEQ ID NO: 326194 - RNA, 32 nt, Human
aguaauuuuaacauaaaggguuggauuuagga

SEQ ID NO: 326195 - RNA, 32 nt, Human
aguaauuuuggaccagugaacuguuagcaaca

SEQ ID NO: 326196 - RNA, 32 nt, Human
aguaauuuuguauccagugaccccugucccuu

SEQ ID NO: 326197 - RNA, 32 nt, Human
aguaauuuuguguccagugaccccugucccuu

SEQ ID NO: 326198 - RNA, 23 nt, Human
aguaauuuuucuaaaaaugagga

SEQ ID NO: 326199 - RNA, 24 nt, Human
aguaauuuuucuaaaguauuggga

SEQ ID NO: 326200 - RNA, 23 nt, Human
aguaauuuuuguaaguaaugaga

SEQ ID NO: 326201 - RNA, 31 nt, Human
aguacaaacacuucuuuacauuuaaguuuug

SEQ ID NO: 326202 - RNA, 32 nt, Human
aguacaaacucauggccaaucagcuccgggag

SEQ ID NO: 326203 - RNA, 32 nt, Human
aguacaaacugcuuugaccuccuugaacuuuu

SEQ ID NO: 326204 - RNA, 32 nt, Human
aguacaaaggcagagugagggggcuuguggcu

SEQ ID NO: 326205 - RNA, 32 nt, Human
aguacaacagaaaauuuggacagacuucaauu

SEQ ID NO: 326206 - RNA, 32 nt, Human
aguacaagaagagguacucggagcuggagcag

SEQ ID NO: 326207 - RNA, 32 nt, Human
aguacaagaccacugucuaauuuugacuucau

SEQ ID NO: 326208 - RNA, 32 nt, Human
aguacaaggaucaggccuaaaauagcuccuug

SEQ ID NO: 326209 - RNA, 32 nt, Human
aguacaagggaaggauuaugcucugcagauac

SEQ ID NO: 326210 - RNA, 32 nt, Human
aguacaagggagcugacccuggguagaacggg

SEQ ID NO: 326211 - RNA, 32 nt, Human
aguacacacuguuggcaaaaggcuaacaccug

SEQ ID NO: 326212 - RNA, 21 nt, Human
aguacacagcccaggaaucca

SEQ ID NO: 326213 - RNA, 20 nt, Human
aguacacagugacccaggag

SEQ ID NO: 326214 - RNA, 32 nt, Human
aguacacccuccucccccuugggcuagcaucc

SEQ ID NO: 326215 - RNA, 32 nt, Human
aguacaccgugccagcucuguucccucuuaca

SEQ ID NO: 326216 - RNA, 32 nt, Human
aguacaccgugcuccggcuaaugauucgacag

SEQ ID NO: 326217 - RNA, 32 nt, Human
aguacacuccaaugucucuuuugcaagaguuu

SEQ ID NO: 326218 - RNA, 19 nt, Human
aguacagacuaauuuuuaa

SEQ ID NO: 326219 - RNA, 24 nt, Human
aguacagacugaaaggaaaauaga

SEQ ID NO: 326220 - RNA, 32 nt, Human
aguacagagaggugugggaugucagaacaucc

SEQ ID NO: 326221 - RNA, 32 nt, Human
aguacagagcagucaccaucugaucuucauca

SEQ ID NO: 326222 - RNA, 32 nt, Human
aguacagaugcauguaugugaucugcagaagc

SEQ ID NO: 326223 - RNA, 32 nt, Human
aguacagauggaaaccauuuccuacaucacaa

SEQ ID NO: 326224 - RNA, 32 nt, Human
aguacagcaagaggagagaggucaagcgagaa

SEQ ID NO: 326225 - RNA, 32 nt, Human
aguacagcaagggggcagugagcuuggcccuc

SEQ ID NO: 326226 - RNA, 32 nt, Human
aguacagcauuuacucuuaucaucuagaaaug

SEQ ID NO: 326227 - RNA, 32 nt, Human
aguacagcgaagaagaaagggaaguauuucuu

SEQ ID NO: 326228 - RNA, 32 nt, Human
aguacagcuagacccagaaauuuggaaggcug

SEQ ID NO: 326229 - RNA, 20 nt, Human
aguacagcuugcauauuuaa

SEQ ID NO: 326230 - RNA, 32 nt, Human
aguacaggaagagauucuguuauagcucagcu

SEQ ID NO: 326231 - RNA, 21 nt, Human
aguacaggagcuguugcuuaa

SEQ ID NO: 326232 - RNA, 32 nt, Human
aguacaggcugugaaguaucugaccuguguua

SEQ ID NO: 326233 - RNA, 32 nt, Human
aguacagggaccuuggcagguggagaggagga

SEQ ID NO: 326234 - RNA, 32 nt, Human
aguacagggauuagaguugugagccaccgcug

SEQ ID NO: 326235 - RNA, 32 nt, Human
aguacaggggccugguccgcaaagggaagaaa

SEQ ID NO: 326236 - RNA, 32 nt, Human
aguacaggggcugagggaggaggcagggccug

SEQ ID NO: 326237 - RNA, 32 nt, Human
aguacagggucugaguucugaauggagagcau

SEQ ID NO: 326238 - RNA, 19 nt, Human
aguacagguuuugcccuga

SEQ ID NO: 326239 - RNA, 19 nt, Human
aguacagucccagcacauu

SEQ ID NO: 326240 - RNA, 22 nt, Human
aguacaguggagcaaugccuga

SEQ ID NO: 326241 - RNA, 16 nt, Human
aguacaguggcauucc

SEQ ID NO: 326242 - RNA, 32 nt, Human
aguacaguggcuucaagaguccuuacugaagc

SEQ ID NO: 326243 - RNA, 22 nt, Human
aguacaguuguuacauauuuaa

SEQ ID NO: 326244 - RNA, 32 nt, Human
aguacaguuugaaaucaaguaguguggcaucu

SEQ ID NO: 326245 - RNA, 32 nt, Human
aguacauaaauagagagaaaacauuuguauau

SEQ ID NO: 326246 - RNA, 32 nt, Human
aguacauacaguguccagcacacaggaagccc

SEQ ID NO: 326247 - RNA, 32 nt, Human
aguacaucaggaaccgcuaccugugaaagagc

SEQ ID NO: 326248 - RNA, 32 nt, Human
aguacaucauuccuccucacuaggagcacuuu

SEQ ID NO: 326249 - RNA, 32 nt, Human
aguacauccagccuuaguucuuggggugcagu

SEQ ID NO: 326250 - RNA, 32 nt, Human
aguacaucccaagcagcaggcacacaagcaaa

SEQ ID NO: 326251 - RNA, 32 nt, Human
aguacaucuaugggcugugauucccccuugcc

SEQ ID NO: 326252 - RNA, 32 nt, Human
aguacaucugcugacgaugaugauggaucaau

SEQ ID NO: 326253 - RNA, 32 nt, Human
aguacauuagauucgcuggcuguuaugaucag

SEQ ID NO: 326254 - RNA, 32 nt, Human
aguacauugauuuuacaguuauuuugaaauac

SEQ ID NO: 326255 - RNA, 32 nt, Human
aguacauuuccuuguguuaccacgcaugggga

SEQ ID NO: 326256 - RNA, 32 nt, Human
aguacauuucucaaagauuuuugagguuguau

SEQ ID NO: 326257 - RNA, 24 nt, Human
aguacauuuugagacaguauucua

SEQ ID NO: 326258 - RNA, 32 nt, Human
aguaccaaaguaacugaauuauuucaggaagg

SEQ ID NO: 326259 - RNA, 32 nt, Human
aguaccacggaaggaagggcacugugaagcag

SEQ ID NO: 326260 - RNA, 32 nt, Human
aguaccacuccauccagccuugggcaagaugc

SEQ ID NO: 326261 - RNA, 32 nt, Human
aguaccacugcacuccagccugggcaacagag

SEQ ID NO: 326262 - RNA, 32 nt, Human
aguaccacugcacuccagccugggcgacagag

SEQ ID NO: 326263 - RNA, 32 nt, Human
aguaccagaguuuacagagagggugggcgaag

SEQ ID NO: 326264 - RNA, 32 nt, Human
aguaccagcagcccuggagagcagcagggggc

SEQ ID NO: 326265 - RNA, 32 nt, Human
aguaccagcagcccuggagagcagcagggggu

SEQ ID NO: 326266 - RNA, 32 nt, Human
aguaccagcuacucgagaggcugagucaggag

SEQ ID NO: 326267 - RNA, 32 nt, Human
aguaccagcuacucuggaggcugaggcaggag

SEQ ID NO: 326268 - RNA, 32 nt, Human
aguaccaggagaacaguggccacgaggggccc

SEQ ID NO: 326269 - RNA, 32 nt, Human
aguaccaggauuauaggcaugagccacugugc

SEQ ID NO: 326270 - RNA, 32 nt, Human
aguaccaggcaaagauuuucuucaacuauagu

SEQ ID NO: 326271 - RNA, 32 nt, Human
aguaccaggcagugaauaagcccuaggcagaa

SEQ ID NO: 326272 - RNA, 32 nt, Human
aguaccaggccgcccgagccacccugcucaga

SEQ ID NO: 326273 - RNA, 20 nt, Human
aguaccagggcugauaucua

SEQ ID NO: 326274 - RNA, 22 nt, Human
aguaccauaggcgacgcugcug

SEQ ID NO: 326275 - RNA, 32 nt, Human
aguaccaugguucugacagagacugggggacc

SEQ ID NO: 326276 - RNA, 32 nt, Human
aguaccauuagcuacagugaucuuagcuuccu

SEQ ID NO: 326277 - RNA, 32 nt, Human
aguaccauuauaagcaucucccaucugcuuuu

SEQ ID NO: 326278 - RNA, 23 nt, Human
aguaccauucacuggaguugcug

SEQ ID NO: 326279 - RNA, 32 nt, Human
aguaccauuccaggcugggcguggugacucac

SEQ ID NO: 326280 - RNA, 32 nt, Human
aguacccacaccaucaccacugcuuucucuuc

SEQ ID NO: 326281 - RNA, 31 nt, Human
aguacccagauguccaucagagguagaccag

SEQ ID NO: 326282 - RNA, 32 nt, Human
aguacccaggggcuaaggauuaagaccuguca

SEQ ID NO: 326283 - RNA, 32 nt, Human
aguacccauucaucacaccugccccauagccc

SEQ ID NO: 326284 - RNA, 32 nt, Human
aguacccauuuccucacauccuugccaguacu

SEQ ID NO: 326285 - RNA, 20 nt, Human
aguaccccgcccucuucucc

SEQ ID NO: 326286 - RNA, 32 nt, Human
aguaccccggguggggcgagggccagucaugg

SEQ ID NO: 326287 - RNA, 32 nt, Human
aguacccguuuuaaguaagacaugguuuucca

SEQ ID NO: 326288 - RNA, 32 nt, Human
aguacccucucauggcauaggcugcaacccag

SEQ ID NO: 326289 - RNA, 19 nt, Human
aguacccucuuucuugcca

SEQ ID NO: 326290 - RNA, 29 nt, Human
aguaccggcagcugcucauccccugugca

SEQ ID NO: 326291 - RNA, 32 nt, Human
aguaccuaaagaggagcgaagggauuuauaca

SEQ ID NO: 326292 - RNA, 32 nt, Human
aguaccuagagcccagcugaacaacaaggcuu

SEQ ID NO: 326293 - RNA, 32 nt, Human
aguaccuauguaugagcaggcagcagcagggc

SEQ ID NO: 326294 - RNA, 25 nt, Human
aguaccucagagcaccccacugcuc

SEQ ID NO: 326295 - RNA, 32 nt, Human
aguaccucaguagcuacugccaaaaagccuga

SEQ ID NO: 326296 - RNA, 32 nt, Human
aguaccuccagccccagggcccugaccugcgc

SEQ ID NO: 326297 - RNA, 32 nt, Human
aguaccucuccaccauccuccagucguugccc

SEQ ID NO: 326298 - RNA, 32 nt, Human
aguaccucuugaguuaauuuucugccuccagu

SEQ ID NO: 326299 - RNA, 32 nt, Human
aguaccugaaaugugauuguugcaguguucag

SEQ ID NO: 326300 - RNA, 32 nt, Human
aguaccugacuaaaaaugaaguaauacccuua

SEQ ID NO: 326301 - RNA, 32 nt, Human
aguaccugagauuacaggcacccaccaccaug

SEQ ID NO: 326302 - RNA, 32 nt, Human
aguaccugaggaguggaggagugagaaagaag

SEQ ID NO: 326303 - RNA, 18 nt, Human
aguaccugcaucuugguu

SEQ ID NO: 326304 - RNA, 32 nt, Human
aguaccugggauuacaggagcucccaccaagc

SEQ ID NO: 326305 - RNA, 32 nt, Human
aguaccugggauuacaggcaugcaccaccaug

SEQ ID NO: 326306 - RNA, 32 nt, Human
aguaccugggauuacaggcaugugccaccaca

SEQ ID NO: 326307 - RNA, 32 nt, Human
aguaccugggauuacaggcaugugccaccacg

SEQ ID NO: 326308 - RNA, 32 nt, Human
aguaccugggauuacagguagacaccaucacg

SEQ ID NO: 326309 - RNA, 32 nt, Human
aguaccugggauuacaggugcacaccaccacg

SEQ ID NO: 326310 - RNA, 32 nt, Human
aguaccuguaagucccagcuacucaggaggcu

SEQ ID NO: 326311 - RNA, 32 nt, Human
aguaccuguacagcgcucggcacuuugacagc

SEQ ID NO: 326312 - RNA, 32 nt, Human
aguaccuguagucucagcuauugggaggcuga

SEQ ID NO: 326313 - RNA, 32 nt, Human
aguaccugucguaggagauuuggguagaagcc

SEQ ID NO: 326314 - RNA, 32 nt, Human
aguaccuuaacacaaaguauaacucuguagag

SEQ ID NO: 326315 - RNA, 32 nt, Human
aguaccuucugccuccuccauucuuccugggu

SEQ ID NO: 326316 - RNA, 32 nt, Human
aguaccuugcagcauuucucugccauugcuuu

SEQ ID NO: 326317 - RNA, 32 nt, Human
aguaccuugcagcuguauugcucaccugcuuu

SEQ ID NO: 326318 - RNA, 32 nt, Human
aguacgccugguccaccaucagccacggacag

SEQ ID NO: 326319 - RNA, 32 nt, Human
aguacggaagaugcguauggucucagccaagu

SEQ ID NO: 326320 - RNA, 21 nt, Human
aguacggauuuuaauagccug

SEQ ID NO: 326321 - RNA, 21 nt, Human
aguacggggagcagacuccug

SEQ ID NO: 326322 - RNA, 25 nt, Human
aguacgucuuugucuuaaugaucua

SEQ ID NO: 326323 - RNA, 32 nt, Human
aguacgugaggaagaaaaaugucugaaaagca

SEQ ID NO: 326324 - RNA, 32 nt, Human
aguacgugaguuguuccucaggaauagauuuu

SEQ ID NO: 326325 - RNA, 32 nt, Human
aguacgugggcaagacuagccugguggagcgc

SEQ ID NO: 326326 - RNA, 32 nt, Human
aguacuaaaaucaacccucagccucuucaaug

SEQ ID NO: 326327 - RNA, 32 nt, Human
aguacuaacagcuuccuucagaucuggaagcc

SEQ ID NO: 326328 - RNA, 32 nt, Human
aguacuaacucuuuggaucucccuuuaaagug

SEQ ID NO: 326329 - RNA, 32 nt, Human
aguacuaagcaaggagacagaaugcuuuguuc

SEQ ID NO: 326330 - RNA, 32 nt, Human
aguacuagaguuguuucccaaucacccuacuc

SEQ ID NO: 326331 - RNA, 32 nt, Human
aguacuaggagcauugguugcaguggaggagu

SEQ ID NO: 326332 - RNA, 32 nt, Human
aguacuaugcugcagucgggggagagguggau

SEQ ID NO: 326333 - RNA, 31 nt, Human
aguacucaacuggacaucacagcagaaugaa

SEQ ID NO: 326334 - RNA, 32 nt, Human
aguacucaaucagcugccacuaccaccaucca

SEQ ID NO: 326335 - RNA, 32 nt, Human
aguacucagcauggucuuaugcacaggaacua

SEQ ID NO: 326336 - RNA, 32 nt, Human
aguacucaggcagugcaauacucagugcggua

SEQ ID NO: 326337 - RNA, 32 nt, Human
aguacuccaaccugcaggaaaaauuuggagug

SEQ ID NO: 326338 - RNA, 21 nt, Human
aguacuccacacugcacaaua

SEQ ID NO: 326339 - RNA, 32 nt, Human
aguacuccugcucugcuaacccugcgugcacc

SEQ ID NO: 326340 - RNA, 32 nt, Human
aguacuccuggucuuucuuucugcuaugagaa

SEQ ID NO: 326341 - RNA, 32 nt, Human
aguacucggacuccugugcuaauugucagcuu

SEQ ID NO: 326342 - RNA, 24 nt, Human
aguacucuaaauagaucucauuga

SEQ ID NO: 326343 - RNA, 32 nt, Human
aguacucugcauaagggggaaaagcuuccaga

SEQ ID NO: 326344 - RNA, 32 nt, Human
aguacucuuguacagccaguucuuuuaugcaa

SEQ ID NO: 326345 - RNA, 32 nt, Human
aguacugacccuggaucccuguucacugcguu

SEQ ID NO: 326346 - RNA, 32 nt, Human
aguacugacuuuucagcaaauuuccuuucugg

SEQ ID NO: 326347 - RNA, 32 nt, Human
aguacugagguuugaggaaaaauaaauguuga

SEQ ID NO: 326348 - RNA, 32 nt, Human
aguacugcaaccugacaggaugcucagacaag

SEQ ID NO: 326349 - RNA, 32 nt, Human
aguacugcaggaauaaaccaggagagcugaga

SEQ ID NO: 326350 - RNA, 32 nt, Human
aguacugccccaggccagccagccugccugcc

SEQ ID NO: 326351 - RNA, 32 nt, Human
aguacugccugcagagggugaccgaggcccgg

SEQ ID NO: 326352 - RNA, 32 nt, Human
aguacugcgcguucuaagacuuuuggcggaga

SEQ ID NO: 326353 - RNA, 32 nt, Human
aguacugcucuucuuuuuauggggaaauugau

SEQ ID NO: 326354 - RNA, 23 nt, Human
aguacugcucuuguuucuuuuca

SEQ ID NO: 326355 - RNA, 32 nt, Human
aguacugcugcuacugcuucuacaauguaaaa

SEQ ID NO: 326356 - RNA, 32 nt, Human
aguacuggaagucucgccacagcaaucaggca

SEQ ID NO: 326357 - RNA, 32 nt, Human
aguacuggagccaggaaggaagaagagggagg

SEQ ID NO: 326358 - RNA, 32 nt, Human
aguacugggaaaggggagcccauaguacuggg

SEQ ID NO: 326359 - RNA, 32 nt, Human
aguacugggaaaggggagggcacagcacuggg

SEQ ID NO: 326360 - RNA, 32 nt, Human
aguacugggaaaugggggcucacagcacugca

SEQ ID NO: 326361 - RNA, 32 nt, Human
aguacugggauuacaagcauaagccaccgggc

SEQ ID NO: 326362 - RNA, 32 nt, Human
aguacugggauuacaggcaugaaccaccgugg

SEQ ID NO: 326363 - RNA, 32 nt, Human
aguacugggauuacaggcaugagccaccacac

SEQ ID NO: 326364 - RNA, 32 nt, Human
aguacugggauuacaggcaugagccacugcac

SEQ ID NO: 326365 - RNA, 32 nt, Human
aguacugggauuacaggccugagccaccgcgc

SEQ ID NO: 326366 - RNA, 32 nt, Human
aguacugggauuacaggcgugaaccacugccc

SEQ ID NO: 326367 - RNA, 32 nt, Human
aguacugggauuacaggcgugagccaccacgc

SEQ ID NO: 326368 - RNA, 32 nt, Human
aguacugggauuacaggcgugagccaccacuc

SEQ ID NO: 326369 - RNA, 32 nt, Human
aguacugggauuacaggcgugagccaccaugc

SEQ ID NO: 326370 - RNA, 32 nt, Human
aguacugggauuacaggcgugagccaccgugc

SEQ ID NO: 326371 - RNA, 32 nt, Human
aguacugggauuacaggcgugagccaccucgc

SEQ ID NO: 326372 - RNA, 32 nt, Human
aguacugggauuacaggcgugagccacggcac

SEQ ID NO: 326373 - RNA, 32 nt, Human
aguacugggauuacaggcgugagccacugcac

SEQ ID NO: 326374 - RNA, 32 nt, Human
aguacugggauuacaggcgugagccacugugc

SEQ ID NO: 326375 - RNA, 19 nt, Human
aguacugggauuacaggug

SEQ ID NO: 326376 - RNA, 32 nt, Human
aguacugggauuacaggugagagucacugcuc

SEQ ID NO: 326377 - RNA, 32 nt, Human
aguacugggauuauaggcaugagccaccacgc

SEQ ID NO: 326378 - RNA, 32 nt, Human
aguacugggauuauaggcgugagccacggcau

SEQ ID NO: 326379 - RNA, 32 nt, Human
aguacugggauuauaggcuugagccaccacgc

SEQ ID NO: 326380 - RNA, 19 nt, Human
aguacugggauuauaggug

SEQ ID NO: 326381 - RNA, 32 nt, Human
aguacugggauuauaggugugaaccaccauac

SEQ ID NO: 326382 - RNA, 32 nt, Human
aguacugggauuauaggugugagcuacuguac

SEQ ID NO: 326383 - RNA, 32 nt, Human
aguacugggauuauauaggcaugagccacuga

SEQ ID NO: 326384 - RNA, 32 nt, Human
aguacugggcagcugcuauccccaucucccug

SEQ ID NO: 326385 - RNA, 22 nt, Human
aguacugggcaggcugcaaaug

SEQ ID NO: 326386 - RNA, 32 nt, Human
aguacuggggucccccuggggcccucuuuacu

SEQ ID NO: 326387 - RNA, 32 nt, Human
aguacugggguuacagaugugagccacuucgc

SEQ ID NO: 326388 - RNA, 32 nt, Human
aguacugggugcuggagggagagcucggggcc

SEQ ID NO: 326389 - RNA, 32 nt, Human
aguacuggguuuacaggugugagccacugugc

SEQ ID NO: 326390 - RNA, 21 nt, Human
aguacuguacuagagcuguug

SEQ ID NO: 326391 - RNA, 32 nt, Human
aguacugucaucugcauuauaacggacuguga

SEQ ID NO: 326392 - RNA, 32 nt, Human
aguacugucaucugcauuauacggacugugau

SEQ ID NO: 326393 - RNA, 18 nt, Human
aguacugucuagcuacca

SEQ ID NO: 326394 - RNA, 32 nt, Human
aguacugugcagccccgcccucugcguccccc

SEQ ID NO: 326395 - RNA, 32 nt, Human
aguacugugugugaccuucuuccagaagcacg

SEQ ID NO: 326396 - RNA, 32 nt, Human
aguacuguuguccaggcuggagcgcaguugau

SEQ ID NO: 326397 - RNA, 32 nt, Human
aguacuuaccauuguguuacaguguccuacag

SEQ ID NO: 326398 - RNA, 32 nt, Human
aguacuuacccuucucagguuccucagugcag

SEQ ID NO: 326399 - RNA, 32 nt, Human
aguacuuagggagguuggugucagaggcagga

SEQ ID NO: 326400 - RNA, 32 nt, Human
aguacuuauguagccaaaaagcauuugaaauc

SEQ ID NO: 326401 - RNA, 27 nt, Human
aguacuucaccugcaagaugcacaaua

SEQ ID NO: 326402 - RNA, 32 nt, Human
aguacuucacuacccacuaucuuauucagucc

SEQ ID NO: 326403 - RNA, 32 nt, Human
aguacuucaggcacgcugccuccugguaacag

SEQ ID NO: 326404 - RNA, 24 nt, Human
aguacuucaggcugggcacagugg

SEQ ID NO: 326405 - RNA, 32 nt, Human
aguacuuccuguucucggcuaacccuggcgcu

SEQ ID NO: 326406 - RNA, 32 nt, Human
aguacuugaaguggccagaagggucauucggg

SEQ ID NO: 326407 - RNA, 32 nt, Human
aguacuugggaaagcgguuuucaagaguauaa

SEQ ID NO: 326408 - RNA, 32 nt, Human
aguacuugggaaagugguuuucaagaguauaa

SEQ ID NO: 326409 - RNA, 31 nt, Human
aguacuuggguggaguaaggaggguggccuu

SEQ ID NO: 326410 - RNA, 32 nt, Human
aguacuuuauccucccuuuucuaucucuuucu

SEQ ID NO: 326411 - RNA, 32 nt, Human
aguacuuucugcagggcagauguggggaucua

SEQ ID NO: 326412 - RNA, 32 nt, Human
aguacuuucuuucuguguggugaaaacauaag

SEQ ID NO: 326413 - RNA, 32 nt, Human
aguagaaaaauccugcucugucccuaauuuuu

SEQ ID NO: 326414 - RNA, 32 nt, Human
aguagaaaacaacaugguguauaucucaaauu

SEQ ID NO: 326415 - RNA, 32 nt, Human
aguagaaaagcccagcuuuuccugggacaucu

SEQ ID NO: 326416 - RNA, 32 nt, Human
aguagaaauugguaugcuuagaagcagauucu

SEQ ID NO: 326417 - RNA, 32 nt, Human
aguagaaccagaggaggaaccaaagaaguggg

SEQ ID NO: 326418 - RNA, 32 nt, Human
aguagaacccaggucugaugccaaagcugcuu

SEQ ID NO: 326419 - RNA, 21 nt, Human
aguagaaccuguguaaccuca

SEQ ID NO: 326420 - RNA, 18 nt, Human
aguagaacuucuugggac

SEQ ID NO: 326421 - RNA, 32 nt, Human
aguagaagauaaggagaaaaguacgacagaga

SEQ ID NO: 326422 - RNA, 32 nt, Human
aguagaagcuuguggccgggugcaguggcuca

SEQ ID NO: 326423 - RNA, 32 nt, Human
aguagaagggggagggagagguguuggguuuu

SEQ ID NO: 326424 - RNA, 32 nt, Human
aguagaauaaagaaaaacgguuauaaauaaaa

SEQ ID NO: 326425 - RNA, 32 nt, Human
aguagaauauggacauucuauaugacagugac

SEQ ID NO: 326426 - RNA, 32 nt, Human
aguagaaucugaaucucggaucccaggcaggg

SEQ ID NO: 326427 - RNA, 32 nt, Human
aguagacaaggaaagaggacagcagugggcau

SEQ ID NO: 326428 - RNA, 32 nt, Human
aguagacacccaggacccuggaugcugccugc

SEQ ID NO: 326429 - RNA, 32 nt, Human
aguagacauaacugagccagugaaucuaguuu

SEQ ID NO: 326430 - RNA, 32 nt, Human
aguagacauauacacacacauauauguaugua

SEQ ID NO: 326431 - RNA, 32 nt, Human
aguagacauccuuccaccccugcccucagcca

SEQ ID NO: 326432 - RNA, 31 nt, Human
aguagacaugacaagugaacagcagagcugg

SEQ ID NO: 326433 - RNA, 32 nt, Human
aguagacauucaauaaauauuugcugguugaa

SEQ ID NO: 326434 - RNA, 32 nt, Human
aguagaccaggagcuccgggaggcagggccgg

SEQ ID NO: 326435 - RNA, 32 nt, Human
aguagaccaguauuauuguucuacuaauaaca

SEQ ID NO: 326436 - RNA, 32 nt, Human
aguagaccauggccuccagcccauggggcugu

SEQ ID NO: 326437 - RNA, 32 nt, Human
aguagacccgggagaggaguugcggccaacuu

SEQ ID NO: 326438 - RNA, 32 nt, Human
aguagaccugauuuucaaaaucugcccucaga

SEQ ID NO: 326439 - RNA, 32 nt, Human
aguagacgguuuccuccacccaggguugacuc

SEQ ID NO: 326440 - RNA, 32 nt, Human
aguagacuaggaacugagcccaggaaaggggg

SEQ ID NO: 326441 - RNA, 32 nt, Human
aguagacuccagcaagaggcugguuggcgugc

SEQ ID NO: 326442 - RNA, 32 nt, Human
aguagacuccuucgaugaggugcucaaaaaug

SEQ ID NO: 326443 - RNA, 32 nt, Human
aguagacugauuacacugaggugaggcuacaa

SEQ ID NO: 326444 - RNA, 32 nt, Human
aguagacuggauccccugggguauuuggggag

SEQ ID NO: 326445 - RNA, 32 nt, Human
aguagacuucacugagccuuucucccauuagu

SEQ ID NO: 326446 - RNA, 32 nt, Human
aguagacuucacugagccuuucucccauuggu

SEQ ID NO: 326447 - RNA, 32 nt, Human
aguagacuuuaagagaucaaacucagccuauu

SEQ ID NO: 326448 - RNA, 32 nt, Human
aguagagaaauggauucaguauaaggauaagg

SEQ ID NO: 326449 - RNA, 32 nt, Human
aguagagacaagaguuucaccauguuggccag

SEQ ID NO: 326450 - RNA, 32 nt, Human
aguagagacagggguuucaccacguuggccag

SEQ ID NO: 326451 - RNA, 32 nt, Human
aguagagacagggguuucaccauauuggccag

SEQ ID NO: 326452 - RNA, 32 nt, Human
aguagagacagggguuucuuccauguugccca

SEQ ID NO: 326453 - RNA, 32 nt, Human
aguagagacaggguucuuaccauguuggccag

SEQ ID NO: 326454 - RNA, 32 nt, Human
aguagagacggggguuucaccauguuagccag

SEQ ID NO: 326455 - RNA, 32 nt, Human
aguagagacggggguuucaccauguuggccag

SEQ ID NO: 326456 - RNA, 32 nt, Human
aguagagacggggguuucaccauguuggcugg

SEQ ID NO: 326457 - RNA, 32 nt, Human
aguagagacggggguuucacuauguuggcuag

SEQ ID NO: 326458 - RNA, 32 nt, Human
aguagagacggggguuucgccguguuggccag

SEQ ID NO: 326459 - RNA, 32 nt, Human
aguagagacggggguuucuucauguuggugag

SEQ ID NO: 326460 - RNA, 32 nt, Human
aguagagacuuucaguauuuguuuucucuuga

SEQ ID NO: 326461 - RNA, 32 nt, Human
aguagagagaaagucaaagauuacagaagugc

SEQ ID NO: 326462 - RNA, 32 nt, Human
aguagagagaaauggagauagcauuaaacuaa

SEQ ID NO: 326463 - RNA, 32 nt, Human
aguagagagacacccggcacccaguccgaagc

SEQ ID NO: 326464 - RNA, 32 nt, Human
aguagagagagaaaaagagggggugccgcaca

SEQ ID NO: 326465 - RNA, 32 nt, Human
aguagagagagcucgugcuggggagaagucca

SEQ ID NO: 326466 - RNA, 32 nt, Human
aguagagagaucugaccucuugccaggaaugc

SEQ ID NO: 326467 - RNA, 32 nt, Human
aguagagagcugcucuagguucuugagguuug

SEQ ID NO: 326468 - RNA, 32 nt, Human
aguagagagguuucaccauguuggccaggcug

SEQ ID NO: 326469 - RNA, 32 nt, Human
aguagagaugggaguuucaccauguuggccag

SEQ ID NO: 326470 - RNA, 32 nt, Human
aguagagauggggguuucaccauauuggccag

SEQ ID NO: 326471 - RNA, 32 nt, Human
aguagagauggggguuucaccauauuggucag

SEQ ID NO: 326472 - RNA, 32 nt, Human
aguagagauggggguuucuccuuguuggucag

SEQ ID NO: 326473 - RNA, 32 nt, Human
aguagagauguuucaccauguuggccaggcua

SEQ ID NO: 326474 - RNA, 32 nt, Human
aguagagcaaagagccauucagcuucagucuu

SEQ ID NO: 326475 - RNA, 32 nt, Human
aguagagcuaaaguggaaaaagcauuucccug

SEQ ID NO: 326476 - RNA, 32 nt, Human
aguagagcuagcaaugacaccuugcauuucau

SEQ ID NO: 326477 - RNA, 32 nt, Human
aguagaggaaacccuuucucauccagcagacc

SEQ ID NO: 326478 - RNA, 32 nt, Human
aguagaggagccucuucucauggccaccauug

SEQ ID NO: 326479 - RNA, 32 nt, Human
aguagaggaugggguuucacuauguuggccag

SEQ ID NO: 326480 - RNA, 32 nt, Human
aguagaggcaugaacacacauggaugcacaca

SEQ ID NO: 326481 - RNA, 32 nt, Human
aguagagggcaagaggagagagcgccuccagu

SEQ ID NO: 326482 - RNA, 32 nt, Human
aguagaggggugaggaaggguaaggggcaggg

SEQ ID NO: 326483 - RNA, 32 nt, Human
aguagaggucaguggugaugccucuugcugcu

SEQ ID NO: 326484 - RNA, 32 nt, Human
aguagaggugggcaggaggagcugaggggcug

SEQ ID NO: 326485 - RNA, 32 nt, Human
aguagaguucaacccgcaggaguaaauuacug

SEQ ID NO: 326486 - RNA, 32 nt, Human
aguagaguugauuacugauacuuuaugcuaag

SEQ ID NO: 326487 - RNA, 32 nt, Human
aguagaguuggggguuucacuauguuggccag

SEQ ID NO: 326488 - RNA, 32 nt, Human
aguagaguuuugucacguuggccagguuggcc

SEQ ID NO: 326489 - RNA, 32 nt, Human
aguagauagacagaaaaucauuagguaauuua

SEQ ID NO: 326490 - RNA, 32 nt, Human
aguagaucgagaccagccuggccaauauggug

SEQ ID NO: 326491 - RNA, 32 nt, Human
aguagaucucaguucugcguuuauuguaaguu

SEQ ID NO: 326492 - RNA, 32 nt, Human
aguagaucuccuccuccuucaugcagccagga

SEQ ID NO: 326493 - RNA, 32 nt, Human
aguagaugagggaagaaucaagacugaugaua

SEQ ID NO: 326494 - RNA, 32 nt, Human
aguagaugccuggcacuccucgaugcccagug

SEQ ID NO: 326495 - RNA, 30 nt, Human
aguagaugcucaauaaacacuuguugaaug

SEQ ID NO: 326496 - RNA, 31 nt, Human
aguagaugcucaauaaauuuuugcuggcacg

SEQ ID NO: 326497 - RNA, 32 nt, Human
aguagauggaaauuauauuggccaaguuuuag

SEQ ID NO: 326498 - RNA, 32 nt, Human
aguagauggcagggggaggauuugaagccugg

SEQ ID NO: 326499 - RNA, 32 nt, Human
aguagaugggauuacaggcgccugccaccacg

SEQ ID NO: 326500 - RNA, 32 nt, Human
aguagauuuugaauccugccucugccauuucc

SEQ ID NO: 326501 - RNA, 32 nt, Human
aguagcaaaaccacuuucuacuuuccaaacac

SEQ ID NO: 326502 - RNA, 32 nt, Human
aguagcaaagagaugagcuccuggauggcauu

SEQ ID NO: 326503 - RNA, 32 nt, Human
aguagcaacagcagcaaguugccaccaguuug

SEQ ID NO: 326504 - RNA, 32 nt, Human
aguagcaagacccaccccacacugccuucacc

SEQ ID NO: 326505 - RNA, 32 nt, Human
aguagcaagacugggaaaauaugacugaauuu

SEQ ID NO: 326506 - RNA, 32 nt, Human
aguagcaaggagagaagaauggcagcugugau

SEQ ID NO: 326507 - RNA, 32 nt, Human
aguagcaaguucuagagaagaggcuggugcug

SEQ ID NO: 326508 - RNA, 32 nt, Human
aguagcacccacccucucugugcucccgucug

SEQ ID NO: 326509 - RNA, 32 nt, Human
aguagcacugcacugucaccugaugauuggcc

SEQ ID NO: 326510 - RNA, 32 nt, Human
aguagcagcacccugagcucccugccaccagg

SEQ ID NO: 326511 - RNA, 32 nt, Human
aguagcagcuacuccagaggcugaaaugggag

SEQ ID NO: 326512 - RNA, 18 nt, Human
aguagcagcuccagcagc

SEQ ID NO: 326513 - RNA, 32 nt, Human
aguagcaggaaggaacacgcaggcugggcgag

SEQ ID NO: 326514 - RNA, 32 nt, Human
aguagcagggauuacaggugugugccaccaug

SEQ ID NO: 326515 - RNA, 32 nt, Human
aguagcaguagaauagcagagcagggggacuc

SEQ ID NO: 326516 - RNA, 32 nt, Human
aguagcaguggcugagagaguccuccaggcag

SEQ ID NO: 326517 - RNA, 32 nt, Human
aguagcaugggcgggugguggggacggcagug

SEQ ID NO: 326518 - RNA, 32 nt, Human
aguagccacuacucccccugccuggcccugag

SEQ ID NO: 326519 - RNA, 32 nt, Human
aguagccacugcacuccagccugggcaacgug

SEQ ID NO: 326520 - RNA, 32 nt, Human
aguagccagcaucugccuccccuucacuccca

SEQ ID NO: 326521 - RNA, 32 nt, Human
aguagcccaacaacaaggcugcugggggccug

SEQ ID NO: 326522 - RNA, 32 nt, Human
aguagcccaucuuugggccgcagcccugaccu

SEQ ID NO: 326523 - RNA, 32 nt, Human
aguagccccaaaagcagaaccuugauuugucu

SEQ ID NO: 326524 - RNA, 32 nt, Human
aguagccccaacaguaggagagaggucugggg

SEQ ID NO: 326525 - RNA, 32 nt, Human
aguagccccacgaguccccaccucucagugcu

SEQ ID NO: 326526 - RNA, 32 nt, Human
aguagccccgcucuccccugucccgaaggauu

SEQ ID NO: 326527 - RNA, 32 nt, Human
aguagcccugucccuucccugccugcagccca

SEQ ID NO: 326528 - RNA, 32 nt, Human
aguagccgccgcugcugugagccuggggacga

SEQ ID NO: 326529 - RNA, 32 nt, Human
aguagccgggcguggugaugcgugccuguaau

SEQ ID NO: 326530 - RNA, 32 nt, Human
aguagccuaaagugucaguuucaaccagaaaa

SEQ ID NO: 326531 - RNA, 32 nt, Human
aguagccuccuguagguauuugcccauguuaa

SEQ ID NO: 326532 - RNA, 32 nt, Human
aguagcgccacaucugguuuauaaaguaagag

SEQ ID NO: 326533 - RNA, 32 nt, Human
aguagcuaaggcuuugcucuuucauacuggug

SEQ ID NO: 326534 - RNA, 32 nt, Human
aguagcuaggaccauaggcacaugucaccaca

SEQ ID NO: 326535 - RNA, 32 nt, Human
aguagcuaggauuacaggugccugccaccaca

SEQ ID NO: 326536 - RNA, 32 nt, Human
aguagcuaggauuacaggugugugccaccacg

SEQ ID NO: 326537 - RNA, 32 nt, Human
aguagcuaggauuacaggugugugccaccaug

SEQ ID NO: 326538 - RNA, 32 nt, Human
aguagcucagacccaaggagauauuuuucuaa

SEQ ID NO: 326539 - RNA, 23 nt, Human
aguagcucaugccuguaauccca

SEQ ID NO: 326540 - RNA, 32 nt, Human
aguagcuccuugcuaacgauguuucaggaggu

SEQ ID NO: 326541 - RNA, 32 nt, Human
aguagcucugggcuccuggaaccaagcucagg

SEQ ID NO: 326542 - RNA, 32 nt, Human
aguagcugagacuacaggcaccugccaccaua

SEQ ID NO: 326543 - RNA, 32 nt, Human
aguagcugagauuacagaugcaagguagagag

SEQ ID NO: 326544 - RNA, 32 nt, Human
aguagcugagauuacaggcacaugccaccaca

SEQ ID NO: 326545 - RNA, 32 nt, Human
aguagcugagauuacaggcauccgccaccacg

SEQ ID NO: 326546 - RNA, 32 nt, Human
aguagcugagauuacaggcaugcaccaccaug

SEQ ID NO: 326547 - RNA, 32 nt, Human
aguagcugagauuacaggccucugccaccaug

SEQ ID NO: 326548 - RNA, 32 nt, Human
aguagcugagauuacaggcgcacaccaccacg

SEQ ID NO: 326549 - RNA, 32 nt, Human
aguagcugagauuacaggcgcccgccaccacg

SEQ ID NO: 326550 - RNA, 32 nt, Human
aguagcugagauuacaggcgcccgccaccaug

SEQ ID NO: 326551 - RNA, 32 nt, Human
aguagcugagauuacagguacgcaccaccaug

SEQ ID NO: 326552 - RNA, 20 nt, Human
aguagcugagauuacaggug

SEQ ID NO: 326553 - RNA, 32 nt, Human
aguagcugagauuacaggugcacaccaccaca

SEQ ID NO: 326554 - RNA, 32 nt, Human
aguagcugagauuacaggugcccgccaccaug

SEQ ID NO: 326555 - RNA, 32 nt, Human
aguagcugagauuacaggugcgcgccaccaca

SEQ ID NO: 326556 - RNA, 32 nt, Human
aguagcugagauuacaggugugcaccaccacg

SEQ ID NO: 326557 - RNA, 32 nt, Human
aguagcugagauuacaggugugugccaccaca

SEQ ID NO: 326558 - RNA, 32 nt, Human
aguagcugagauuacaggugugugccacccau

SEQ ID NO: 326559 - RNA, 32 nt, Human
aguagcugagauuauaggccuaccaccaugcc

SEQ ID NO: 326560 - RNA, 32 nt, Human
aguagcugagauugcaggcacaugccaccacg

SEQ ID NO: 326561 - RNA, 32 nt, Human
aguagcugaggagugggcggaaaccccuccug

SEQ ID NO: 326562 - RNA, 32 nt, Human
aguagcugaggcaggagaaucgcuugaacccg

SEQ ID NO: 326563 - RNA, 32 nt, Human
aguagcugaguguguuuauauuacauauuguc

SEQ ID NO: 326564 - RNA, 32 nt, Human
aguagcugcagcugaggacagccacccuuucu

SEQ ID NO: 326565 - RNA, 31 nt, Human
aguagcugccucucugcuuccucaucuacac

SEQ ID NO: 326566 - RNA, 32 nt, Human
aguagcugcuccaucaucuagcuugugaaacc

SEQ ID NO: 326567 - RNA, 32 nt, Human
aguagcuggaaccacgggggugugccaccacg

SEQ ID NO: 326568 - RNA, 19 nt, Human
aguagcuggauuacaggug

SEQ ID NO: 326569 - RNA, 20 nt, Human
aguagcugggaauacaggug

SEQ ID NO: 326570 - RNA, 20 nt, Human
aguagcugggacaacaggug

SEQ ID NO: 326571 - RNA, 20 nt, Human
aguagcugggaccacaggug

SEQ ID NO: 326572 - RNA, 32 nt, Human
aguagcugggacuacaggcuugugccaccaca

SEQ ID NO: 326573 - RNA, 19 nt, Human
aguagcugggacuacaggu

SEQ ID NO: 326574 - RNA, 20 nt, Human
aguagcugggacuacaggug

SEQ ID NO: 326575 - RNA, 32 nt, Human
aguagcugggacuacaguugugcaccacaaug

SEQ ID NO: 326576 - RNA, 32 nt, Human
aguagcugggacuacaguugugcaccaccaca

SEQ ID NO: 326577 - RNA, 32 nt, Human
aguagcugggacuacaguugugccaccacguc

SEQ ID NO: 326578 - RNA, 32 nt, Human
aguagcugggacuacaguugugcucuaccaca

SEQ ID NO: 326579 - RNA, 20 nt, Human
aguagcugggacuauaggug

SEQ ID NO: 326580 - RNA, 32 nt, Human
aguagcugggaggacaggugugagcugccgca

SEQ ID NO: 326581 - RNA, 20 nt, Human
aguagcugggauuacaagug

SEQ ID NO: 326582 - RNA, 32 nt, Human
aguagcugggauuacagaaagccgccaccgug

SEQ ID NO: 326583 - RNA, 32 nt, Human
aguagcugggauuacagacacccgccauggca

SEQ ID NO: 326584 - RNA, 32 nt, Human
aguagcugggauuacagacaugcaccacaacg

SEQ ID NO: 326585 - RNA, 32 nt, Human
aguagcugggauuacagacaugccaccaugcc

SEQ ID NO: 326586 - RNA, 32 nt, Human
aguagcugggauuacagacaugugccaccacg

SEQ ID NO: 326587 - RNA, 32 nt, Human
aguagcugggauuacagacgcacgccaccaug

SEQ ID NO: 326588 - RNA, 32 nt, Human
aguagcugggauuacagacgccugccaucacg

SEQ ID NO: 326589 - RNA, 32 nt, Human
aguagcugggauuacagacucaugccaccacg

SEQ ID NO: 326590 - RNA, 32 nt, Human
aguagcugggauuacagaugcccaccaccaug

SEQ ID NO: 326591 - RNA, 32 nt, Human
aguagcugggauuacagaugccugccaccaug

SEQ ID NO: 326592 - RNA, 32 nt, Human
aguagcugggauuacagaugggaccaccuagu

SEQ ID NO: 326593 - RNA, 32 nt, Human
aguagcugggauuacagauguaugcuaccacg

SEQ ID NO: 326594 - RNA, 32 nt, Human
aguagcugggauuacagaugugagccaccgua

SEQ ID NO: 326595 - RNA, 32 nt, Human
aguagcugggauuacagaugugcaccaccacg

SEQ ID NO: 326596 - RNA, 32 nt, Human
aguagcugggauuacagaugugcaccagcaca

SEQ ID NO: 326597 - RNA, 32 nt, Human
aguagcugggauuacagaugugugccacaucu

SEQ ID NO: 326598 - RNA, 32 nt, Human
aguagcugggauuacagcacccgccaccaugc

SEQ ID NO: 326599 - RNA, 32 nt, Human
aguagcugggauuacagccaugcaccaccaca

SEQ ID NO: 326600 - RNA, 32 nt, Human
aguagcugggauuacagcucugggacaaacca

SEQ ID NO: 326601 - RNA, 18 nt, Human
aguagcugggauuacagg

SEQ ID NO: 326602 - RNA, 32 nt, Human
aguagcugggauuacaggaacgcgccaccacg

SEQ ID NO: 326603 - RNA, 32 nt, Human
aguagcugggauuacaggagcaugccacaaga

SEQ ID NO: 326604 - RNA, 32 nt, Human
aguagcugggauuacaggagcgugccaccacu

SEQ ID NO: 326605 - RNA, 32 nt, Human
aguagcugggauuacaggagugcaccaucaug

SEQ ID NO: 326606 - RNA, 32 nt, Human
aguagcugggauuacaggagugugccaccaca

SEQ ID NO: 326607 - RNA, 32 nt, Human
aguagcugggauuacaggaguuagaaauggag

SEQ ID NO: 326608 - RNA, 32 nt, Human
aguagcugggauuacaggcaacugccaccaug

SEQ ID NO: 326609 - RNA, 32 nt, Human
aguagcugggauuacaggcacacgccaccaca

SEQ ID NO: 326610 - RNA, 32 nt, Human
aguagcugggauuacaggcacacgccaccaug

SEQ ID NO: 326611 - RNA, 32 nt, Human
aguagcugggauuacaggcacaugccaccaca

SEQ ID NO: 326612 - RNA, 32 nt, Human
aguagcugggauuacaggcacaugccaccaug

SEQ ID NO: 326613 - RNA, 32 nt, Human
aguagcugggauuacaggcaccagccaccaug

SEQ ID NO: 326614 - RNA, 32 nt, Human
aguagcugggauuacaggcacccaccacaucu

SEQ ID NO: 326615 - RNA, 32 nt, Human
aguagcugggauuacaggcacccaccaccaca

SEQ ID NO: 326616 - RNA, 32 nt, Human
aguagcugggauuacaggcacccaccaccacg

SEQ ID NO: 326617 - RNA, 32 nt, Human
aguagcugggauuacaggcacccaccaccaug

SEQ ID NO: 326618 - RNA, 32 nt, Human
aguagcugggauuacaggcacccaccaccuca

SEQ ID NO: 326619 - RNA, 32 nt, Human
aguagcugggauuacaggcacccaccacuaug

SEQ ID NO: 326620 - RNA, 32 nt, Human
aguagcugggauuacaggcacccgccaccaca

SEQ ID NO: 326621 - RNA, 32 nt, Human
aguagcugggauuacaggcacccgccaccacg

SEQ ID NO: 326622 - RNA, 32 nt, Human
aguagcugggauuacaggcacccgccaccgua

SEQ ID NO: 326623 - RNA, 32 nt, Human
aguagcugggauuacaggcacccgccaccgug

SEQ ID NO: 326624 - RNA, 32 nt, Human
aguagcugggauuacaggcacccgccaucaug

SEQ ID NO: 326625 - RNA, 32 nt, Human
aguagcugggauuacaggcaccugccaccaca

SEQ ID NO: 326626 - RNA, 32 nt, Human
aguagcugggauuacaggcaccugccaccacg

SEQ ID NO: 326627 - RNA, 32 nt, Human
aguagcugggauuacaggcaccugccaccaug

SEQ ID NO: 326628 - RNA, 32 nt, Human
aguagcugggauuacaggcaccugccauuaug

SEQ ID NO: 326629 - RNA, 32 nt, Human
aguagcugggauuacaggcacgcaccaccaca

SEQ ID NO: 326630 - RNA, 32 nt, Human
aguagcugggauuacaggcacgcgccaccaca

SEQ ID NO: 326631 - RNA, 32 nt, Human
aguagcugggauuacaggcacgcgccaccacg

SEQ ID NO: 326632 - RNA, 32 nt, Human
aguagcugggauuacaggcacgcgccaccacu

SEQ ID NO: 326633 - RNA, 32 nt, Human
aguagcugggauuacaggcacgcuccaccaca

SEQ ID NO: 326634 - RNA, 32 nt, Human
aguagcugggauuacaggcacguaccaccacg

SEQ ID NO: 326635 - RNA, 32 nt, Human
aguagcugggauuacaggcacgugacaccagg

SEQ ID NO: 326636 - RNA, 32 nt, Human
aguagcugggauuacaggcacgugccaacaca

SEQ ID NO: 326637 - RNA, 32 nt, Human
aguagcugggauuacaggcacgugccaccaag

SEQ ID NO: 326638 - RNA, 32 nt, Human
aguagcugggauuacaggcacgugccaccacg

SEQ ID NO: 326639 - RNA, 32 nt, Human
aguagcugggauuacaggcacgugccaccaug

SEQ ID NO: 326640 - RNA, 32 nt, Human
aguagcugggauuacaggcacuugccaccauu

SEQ ID NO: 326641 - RNA, 32 nt, Human
aguagcugggauuacaggcagccaccacgccc

SEQ ID NO: 326642 - RNA, 32 nt, Human
aguagcugggauuacaggcaggugccaccaug

SEQ ID NO: 326643 - RNA, 32 nt, Human
aguagcugggauuacaggcauccgccaccacg

SEQ ID NO: 326644 - RNA, 32 nt, Human
aguagcugggauuacaggcaucugccaaccau

SEQ ID NO: 326645 - RNA, 32 nt, Human
aguagcugggauuacaggcaugaaucaccaca

SEQ ID NO: 326646 - RNA, 32 nt, Human
aguagcugggauuacaggcaugagccacugug

SEQ ID NO: 326647 - RNA, 32 nt, Human
aguagcugggauuacaggcaugcaccaccaug

SEQ ID NO: 326648 - RNA, 32 nt, Human
aguagcugggauuacaggcaugcgccaccaca

SEQ ID NO: 326649 - RNA, 32 nt, Human
aguagcugggauuacaggcaugcgccaccacg

SEQ ID NO: 326650 - RNA, 32 nt, Human
aguagcugggauuacaggcaugcgccaccaug

SEQ ID NO: 326651 - RNA, 32 nt, Human
aguagcugggauuacaggcaugcgccacuaug

SEQ ID NO: 326652 - RNA, 32 nt, Human
aguagcugggauuacaggcaugcgccaucaug

SEQ ID NO: 326653 - RNA, 32 nt, Human
aguagcugggauuacaggcaugcgcuaacaca

SEQ ID NO: 326654 - RNA, 32 nt, Human
aguagcugggauuacaggcaugggccaccaug

SEQ ID NO: 326655 - RNA, 32 nt, Human
aguagcugggauuacaggcaugugagaccacg

SEQ ID NO: 326656 - RNA, 32 nt, Human
aguagcugggauuacaggcaugugccacaccu

SEQ ID NO: 326657 - RNA, 32 nt, Human
aguagcugggauuacaggcaugugccaccaca

SEQ ID NO: 326658 - RNA, 32 nt, Human
aguagcugggauuacaggcaugugccaccacg

SEQ ID NO: 326659 - RNA, 32 nt, Human
aguagcugggauuacaggcaugugccaccaug

SEQ ID NO: 326660 - RNA, 32 nt, Human
aguagcugggauuacaggcaugugccacccac

SEQ ID NO: 326661 - RNA, 32 nt, Human
aguagcugggauuacaggcaugugccagcaug

SEQ ID NO: 326662 - RNA, 32 nt, Human
aguagcugggauuacaggcaugugccaucacc

SEQ ID NO: 326663 - RNA, 32 nt, Human
aguagcugggauuacaggcaugugucaccacg

SEQ ID NO: 326664 - RNA, 32 nt, Human
aguagcugggauuacaggcgcacaccaccaca

SEQ ID NO: 326665 - RNA, 32 nt, Human
aguagcugggauuacaggcgcacgccaccacg

SEQ ID NO: 326666 - RNA, 32 nt, Human
aguagcugggauuacaggcgcacgccaccaug

SEQ ID NO: 326667 - RNA, 32 nt, Human
aguagcugggauuacaggcgcacgccaccgug

SEQ ID NO: 326668 - RNA, 32 nt, Human
aguagcugggauuacaggcgcaugccaccaca

SEQ ID NO: 326669 - RNA, 32 nt, Human
aguagcugggauuacaggcgcaugccaccaug

SEQ ID NO: 326670 - RNA, 32 nt, Human
aguagcugggauuacaggcgcccaccaccaca

SEQ ID NO: 326671 - RNA, 32 nt, Human
aguagcugggauuacaggcgcccaccaccaug

SEQ ID NO: 326672 - RNA, 32 nt, Human
aguagcugggauuacaggcgcccgccaccaca

SEQ ID NO: 326673 - RNA, 32 nt, Human
aguagcugggauuacaggcgcccgccaccacg

SEQ ID NO: 326674 - RNA, 32 nt, Human
aguagcugggauuacaggcgcccgccaccaug

SEQ ID NO: 326675 - RNA, 32 nt, Human
aguagcugggauuacaggcgcccgccaccugg

SEQ ID NO: 326676 - RNA, 32 nt, Human
aguagcugggauuacaggcgcccgccaucaca

SEQ ID NO: 326677 - RNA, 32 nt, Human
aguagcugggauuacaggcgcccgccaucacg

SEQ ID NO: 326678 - RNA, 32 nt, Human
aguagcugggauuacaggcgcccgccaucgug

SEQ ID NO: 326679 - RNA, 32 nt, Human
aguagcugggauuacaggcgcccgucaccaca

SEQ ID NO: 326680 - RNA, 32 nt, Human
aguagcugggauuacaggcgccgaucaccaag

SEQ ID NO: 326681 - RNA, 32 nt, Human
aguagcugggauuacaggcgccugccaccaca

SEQ ID NO: 326682 - RNA, 32 nt, Human
aguagcugggauuacaggcgccugccaccacg

SEQ ID NO: 326683 - RNA, 32 nt, Human
aguagcugggauuacaggcgccugccaccaug

SEQ ID NO: 326684 - RNA, 32 nt, Human
aguagcugggauuacaggcgccugcuaccaca

SEQ ID NO: 326685 - RNA, 32 nt, Human
aguagcugggauuacaggcgccugcuaccucg

SEQ ID NO: 326686 - RNA, 32 nt, Human
aguagcugggauuacaggcgcguaucaccaua

SEQ ID NO: 326687 - RNA, 28 nt, Human
aguagcugggauuacaggcgcgugccac

SEQ ID NO: 326688 - RNA, 32 nt, Human
aguagcugggauuacaggcgcgugccaccaca

SEQ ID NO: 326689 - RNA, 32 nt, Human
aguagcugggauuacaggcgcgugccaccaua

SEQ ID NO: 326690 - RNA, 32 nt, Human
aguagcugggauuacaggcguacgccaccaug

SEQ ID NO: 326691 - RNA, 32 nt, Human
aguagcugggauuacaggcguccgccaccaug

SEQ ID NO: 326692 - RNA, 32 nt, Human
aguagcugggauuacaggcguccgcuaccaca

SEQ ID NO: 326693 - RNA, 32 nt, Human
aguagcugggauuacaggcgugcgccaacaug

SEQ ID NO: 326694 - RNA, 32 nt, Human
aguagcugggauuacaggcgugcgccaccaaa

SEQ ID NO: 326695 - RNA, 32 nt, Human
aguagcugggauuacaggcgugcgccaccacg

SEQ ID NO: 326696 - RNA, 32 nt, Human
aguagcugggauuacaggcgugcgccacuaug

SEQ ID NO: 326697 - RNA, 32 nt, Human
aguagcugggauuacaggcgugcgccaucgug

SEQ ID NO: 326698 - RNA, 32 nt, Human
aguagcugggauuacaggcgugggcccccaug

SEQ ID NO: 326699 - RNA, 32 nt, Human
aguagcugggauuacaggcguguaccaccaua

SEQ ID NO: 326700 - RNA, 32 nt, Human
aguagcugggauuacaggcgugugccaccaca

SEQ ID NO: 326701 - RNA, 32 nt, Human
aguagcugggauuacaggcgugugccaccacg

SEQ ID NO: 326702 - RNA, 32 nt, Human
aguagcugggauuacaggcgugugccaccaug

SEQ ID NO: 326703 - RNA, 32 nt, Human
aguagcugggauuacaggcgugugccaccgcc

SEQ ID NO: 326704 - RNA, 32 nt, Human
aguagcugggauuacaggcgugugucaccacg

SEQ ID NO: 326705 - RNA, 32 nt, Human
aguagcugggauuacaggcucaugccaccaug

SEQ ID NO: 326706 - RNA, 32 nt, Human
aguagcugggauuacaggcuccugccaccacg

SEQ ID NO: 326707 - RNA, 32 nt, Human
aguagcugggauuacagguaccugccaccaug

SEQ ID NO: 326708 - RNA, 32 nt, Human
aguagcugggauuacagguaugaaccacuaug

SEQ ID NO: 326709 - RNA, 32 nt, Human
aguagcugggauuacagguaugugccaccacg

SEQ ID NO: 326710 - RNA, 32 nt, Human
aguagcugggauuacagguaugugccaccaug

SEQ ID NO: 326711 - RNA, 20 nt, Human
aguagcugggauuacaggug

SEQ ID NO: 326712 - RNA, 32 nt, Human
aguagcugggauuacaggugcacaccaccaca

SEQ ID NO: 326713 - RNA, 32 nt, Human
aguagcugggauuacaggugcacaccaccaug

SEQ ID NO: 326714 - RNA, 32 nt, Human
aguagcugggauuacaggugcacaccaccgca

SEQ ID NO: 326715 - RNA, 32 nt, Human
aguagcugggauuacaggugcaggccaccaug

SEQ ID NO: 326716 - RNA, 32 nt, Human
aguagcugggauuacaggugcaugccaccacg

SEQ ID NO: 326717 - RNA, 32 nt, Human
aguagcugggauuacaggugcaugccaccaug

SEQ ID NO: 326718 - RNA, 32 nt, Human
aguagcugggauuacaggugcaugccaucaca

SEQ ID NO: 326719 - RNA, 27 nt, Human
aguagcugggauuacaggugcccaaca

SEQ ID NO: 326720 - RNA, 32 nt, Human
aguagcugggauuacaggugcccaccaccaca

SEQ ID NO: 326721 - RNA, 32 nt, Human
aguagcugggauuacaggugcccaccaccacc

SEQ ID NO: 326722 - RNA, 32 nt, Human
aguagcugggauuacaggugcccaccaccaug

SEQ ID NO: 326723 - RNA, 32 nt, Human
aguagcugggauuacaggugcccaccaccgcg

SEQ ID NO: 326724 - RNA, 32 nt, Human
aguagcugggauuacaggugcccaccacugcg

SEQ ID NO: 326725 - RNA, 32 nt, Human
aguagcugggauuacaggugcccaccagcacg

SEQ ID NO: 326726 - RNA, 32 nt, Human
aguagcugggauuacaggugcccgccaccaca

SEQ ID NO: 326727 - RNA, 32 nt, Human
aguagcugggauuacaggugcccgccaccacg

SEQ ID NO: 326728 - RNA, 32 nt, Human
aguagcugggauuacaggugcccgccaccaug

SEQ ID NO: 326729 - RNA, 32 nt, Human
aguagcugggauuacaggugccugccacaaca

SEQ ID NO: 326730 - RNA, 32 nt, Human
aguagcugggauuacaggugccugccaccaca

SEQ ID NO: 326731 - RNA, 32 nt, Human
aguagcugggauuacaggugccugccaccacg

SEQ ID NO: 326732 - RNA, 32 nt, Human
aguagcugggauuacaggugccugccaccaua

SEQ ID NO: 326733 - RNA, 32 nt, Human
aguagcugggauuacaggugccugccaccaug

SEQ ID NO: 326734 - RNA, 32 nt, Human
aguagcugggauuacaggugccugccaccauu

SEQ ID NO: 326735 - RNA, 32 nt, Human
aguagcugggauuacaggugccugccacugcg

SEQ ID NO: 326736 - RNA, 32 nt, Human
aguagcugggauuacaggugcgcaccaccaug

SEQ ID NO: 326737 - RNA, 32 nt, Human
aguagcugggauuacaggugcgcaccacuacg

SEQ ID NO: 326738 - RNA, 32 nt, Human
aguagcugggauuacaggugcgcaccauuaca

SEQ ID NO: 326739 - RNA, 32 nt, Human
aguagcugggauuacaggugcgcacuaccacg

SEQ ID NO: 326740 - RNA, 32 nt, Human
aguagcugggauuacaggugcgccccaccaug

SEQ ID NO: 326741 - RNA, 32 nt, Human
aguagcugggauuacaggugcgcgccaucacg

SEQ ID NO: 326742 - RNA, 32 nt, Human
aguagcugggauuacaggugcgugccaccacg

SEQ ID NO: 326743 - RNA, 32 nt, Human
aguagcugggauuacaggugcucaccaccacg

SEQ ID NO: 326744 - RNA, 32 nt, Human
aguagcugggauuacagguggugacuuccaag

SEQ ID NO: 326745 - RNA, 32 nt, Human
aguagcugggauuacagguguaugccaccacg

SEQ ID NO: 326746 - RNA, 32 nt, Human
aguagcugggauuacagguguccgccaccacg

SEQ ID NO: 326747 - RNA, 32 nt, Human
aguagcugggauuacaggugucggccaccaca

SEQ ID NO: 326748 - RNA, 32 nt, Human
aguagcugggauuacaggugugagccacugca

SEQ ID NO: 326749 - RNA, 32 nt, Human
aguagcugggauuacaggugugcaccaacaca

SEQ ID NO: 326750 - RNA, 32 nt, Human
aguagcugggauuacaggugugcaccaccaca

SEQ ID NO: 326751 - RNA, 32 nt, Human
aguagcugggauuacaggugugcaccaccacg

SEQ ID NO: 326752 - RNA, 32 nt, Human
aguagcugggauuacaggugugcaccaccauu

SEQ ID NO: 326753 - RNA, 32 nt, Human
aguagcugggauuacaggugugcaccacccgu

SEQ ID NO: 326754 - RNA, 32 nt, Human
aguagcugggauuacaggugugcaccacuacc

SEQ ID NO: 326755 - RNA, 32 nt, Human
aguagcugggauuacaggugugcacuaccaug

SEQ ID NO: 326756 - RNA, 32 nt, Human
aguagcugggauuacaggugugccccaccacg

SEQ ID NO: 326757 - RNA, 32 nt, Human
aguagcugggauuacaggugugcgccaccacg

SEQ ID NO: 326758 - RNA, 32 nt, Human
aguagcugggauuacaggugugcgccaccaug

SEQ ID NO: 326759 - RNA, 32 nt, Human
aguagcugggauuacaggugugcgccaguacg

SEQ ID NO: 326760 - RNA, 32 nt, Human
aguagcugggauuacaggugugggccaccaca

SEQ ID NO: 326761 - RNA, 32 nt, Human
aguagcugggauuacaggugugugccaaccau

SEQ ID NO: 326762 - RNA, 32 nt, Human
aguagcugggauuacaggugugugccaccaca

SEQ ID NO: 326763 - RNA, 32 nt, Human
aguagcugggauuacaggugugugccaccaug

SEQ ID NO: 326764 - RNA, 32 nt, Human
aguagcugggauuacaggugugugccacuacg

SEQ ID NO: 326765 - RNA, 32 nt, Human
aguagcugggauuacaggugugugccagcaug

SEQ ID NO: 326766 - RNA, 32 nt, Human
aguagcugggauuacaggugugugccaucaug

SEQ ID NO: 326767 - RNA, 32 nt, Human
aguagcugggauuacagguuugcaccaccaug

SEQ ID NO: 326768 - RNA, 32 nt, Human
aguagcugggauuacagugccugccaccaugc

SEQ ID NO: 326769 - RNA, 32 nt, Human
aguagcugggauuacaguuuccaucauuaucu

SEQ ID NO: 326770 - RNA, 32 nt, Human
aguagcugggauuauaggugcgagccacugcg

SEQ ID NO: 326771 - RNA, 32 nt, Human
aguagcuggggcuccaggcaugaaucaccgug

SEQ ID NO: 326772 - RNA, 20 nt, Human
aguagcugggucuacaggug

SEQ ID NO: 326773 - RNA, 32 nt, Human
aguagcugguagcugggacuauaggcacgugc

SEQ ID NO: 326774 - RNA, 32 nt, Human
aguagcuggugcuccucugcucccucuuuuuc

SEQ ID NO: 326775 - RNA, 32 nt, Human
aguagcugugauuacaggcaugcgccaccaug

SEQ ID NO: 326776 - RNA, 32 nt, Human
aguagcuguggcaguggcagaagauuuaaauu

SEQ ID NO: 326777 - RNA, 32 nt, Human
aguagcuucagaacagcuucagagccaugaag

SEQ ID NO: 326778 - RNA, 21 nt, Human
aguagcuuccccgaggacccc

SEQ ID NO: 326779 - RNA, 20 nt, Human
aguagcuuggauuacaggug

SEQ ID NO: 326780 - RNA, 32 nt, Human
aguagcuugggacaaaucaagcuucaguuucc

SEQ ID NO: 326781 - RNA, 32 nt, Human
aguagcuuuucugucuuuuggccagugccgag

SEQ ID NO: 326782 - RNA, 19 nt, Human
aguaggaaaguaggcugcu

SEQ ID NO: 326783 - RNA, 32 nt, Human
aguaggaacugaggcugugcuucagguauggu

SEQ ID NO: 326784 - RNA, 32 nt, Human
aguaggaacugauucucuaccuuucuuggagc

SEQ ID NO: 326785 - RNA, 32 nt, Human
aguaggaagcagcuucccagcugcagucugca

SEQ ID NO: 326786 - RNA, 32 nt, Human
aguaggaaggcauucuuccuugccaaaauggg

SEQ ID NO: 326787 - RNA, 32 nt, Human
aguaggaagggagccagagaggccgauggcgc

SEQ ID NO: 326788 - RNA, 32 nt, Human
aguaggaagggcccugaggaacuaauccucau

SEQ ID NO: 326789 - RNA, 32 nt, Human
aguaggaccaggccauccuuggcuccagagcu

SEQ ID NO: 326790 - RNA, 32 nt, Human
aguaggaccuccuucuccucccccucccccuc

SEQ ID NO: 326791 - RNA, 22 nt, Human
aguaggacuuucuugcacuagu

SEQ ID NO: 326792 - RNA, 31 nt, Human
aguaggagaaagccgccucagaauccgcuuc

SEQ ID NO: 326793 - RNA, 32 nt, Human
aguaggagacacgacagcacacacaguggauu

SEQ ID NO: 326794 - RNA, 32 nt, Human
aguaggagagaucacgaucucagucuuuuuag

SEQ ID NO: 326795 - RNA, 32 nt, Human
aguaggagagugaguuuuggggccagacacgc

SEQ ID NO: 326796 - RNA, 32 nt, Human
aguaggagcaaaggaggaaggaaguggguguu

SEQ ID NO: 326797 - RNA, 32 nt, Human
aguaggagcaaaggaggaaggagguggguguu

SEQ ID NO: 326798 - RNA, 32 nt, Human
aguaggagcagagggaagagagagggaugaga

SEQ ID NO: 326799 - RNA, 32 nt, Human
aguaggagcccaggcuuugggcaucaaggcag

SEQ ID NO: 326800 - RNA, 32 nt, Human
aguaggaggagaaagaguguucuaggaagagu

SEQ ID NO: 326801 - RNA, 32 nt, Human
aguaggagggguggaggugagaaggagagagg

SEQ ID NO: 326802 - RNA, 32 nt, Human
aguaggaguaacuuauuccaguucuuacccau

SEQ ID NO: 326803 - RNA, 32 nt, Human
aguaggauagaacuagcauaauacucauguua

SEQ ID NO: 326804 - RNA, 32 nt, Human
aguaggauuguuugagacugggagguugaggc

SEQ ID NO: 326805 - RNA, 32 nt, Human
aguaggauuugggcuccuaugauaaucuaaug

SEQ ID NO: 326806 - RNA, 32 nt, Human
aguaggcaacacagccagcacggugcucucca

SEQ ID NO: 326807 - RNA, 32 nt, Human
aguaggcaaccagcagucuuccggcaauaggg

SEQ ID NO: 326808 - RNA, 32 nt, Human
aguaggcaauacaguuguuaaagaagaauaaa

SEQ ID NO: 326809 - RNA, 32 nt, Human
aguaggcacacacucccuuuucucgggugugu

SEQ ID NO: 326810 - RNA, 32 nt, Human
aguaggcacagggcucccaggccaggccucau

SEQ ID NO: 326811 - RNA, 32 nt, Human
aguaggcacccaauaaauauuuguugaauuua

SEQ ID NO: 326812 - RNA, 32 nt, Human
aguaggcacucaauaaauauugaaugaguaaa

SEQ ID NO: 326813 - RNA, 32 nt, Human
aguaggccggaaggaguccagugcaaagcugu

SEQ ID NO: 326814 - RNA, 32 nt, Human
aguaggccuugaaggccaggaggugggaguga

SEQ ID NO: 326815 - RNA, 30 nt, Human
aguaggcgcucaauaaauacuuguuuguug

SEQ ID NO: 326816 - RNA, 32 nt, Human
aguaggcgcucaauaaauacuuguuuguugaa

SEQ ID NO: 326817 - RNA, 32 nt, Human
aguaggcgcucaauaaauguugaaugaaugaa

SEQ ID NO: 326818 - RNA, 32 nt, Human
aguaggcggcgcgggagggaaaagaggauuga

SEQ ID NO: 326819 - RNA, 32 nt, Human
aguaggcuggggacaucagaggaggauggggg

SEQ ID NO: 326820 - RNA, 32 nt, Human
aguagggaccugcucugugcucacaccucggc

SEQ ID NO: 326821 - RNA, 32 nt, Human
aguagggaggaaaaggaguucuggagaggcgc

SEQ ID NO: 326822 - RNA, 32 nt, Human
aguagggaggaggagguugcagugagcugaga

SEQ ID NO: 326823 - RNA, 32 nt, Human
aguagggaguugaugcugacaggaugaagauu

SEQ ID NO: 326824 - RNA, 32 nt, Human
aguagggcaaaucuguguguguaugucauuaa

SEQ ID NO: 326825 - RNA, 32 nt, Human
aguagggccccuugcucucaggagccuccagc

SEQ ID NO: 326826 - RNA, 32 nt, Human
aguagggcccggggaagcagagcccuaaggga

SEQ ID NO: 326827 - RNA, 32 nt, Human
aguagggcucaaggugcccucgcuaccuagua

SEQ ID NO: 326828 - RNA, 32 nt, Human
aguaggggagacugagacugaccgguagccag

SEQ ID NO: 326829 - RNA, 32 nt, Human
aguaggggagagagcagagaaguacaggucau

SEQ ID NO: 326830 - RNA, 32 nt, Human
aguaggggccugguccugaaugacuuggaggc

SEQ ID NO: 326831 - RNA, 32 nt, Human
aguaggggcugaagaggaagguggaaggagau

SEQ ID NO: 326832 - RNA, 32 nt, Human
aguagggggaaaguagaaaaucgaguagaauu

SEQ ID NO: 326833 - RNA, 32 nt, Human
aguagggggccugcagugugcugugacgccug

SEQ ID NO: 326834 - RNA, 32 nt, Human
aguaggggugauucagggugugcuccaugaug

SEQ ID NO: 326835 - RNA, 32 nt, Human
aguagggguggaggcccgauggaggagggagg

SEQ ID NO: 326836 - RNA, 32 nt, Human
aguagggugaagcaagagaggcccuagggugu

SEQ ID NO: 326837 - RNA, 32 nt, Human
aguaggguggagcucccaacaggcugggcaug

SEQ ID NO: 326838 - RNA, 31 nt, Human
aguagguaaagacauucuaauuuuuacuuuu

SEQ ID NO: 326839 - RNA, 19 nt, Human
aguagguaaagcaggaccu

SEQ ID NO: 326840 - RNA, 32 nt, Human
aguagguaagaguuugguuuggucacaguugc

SEQ ID NO: 326841 - RNA, 32 nt, Human
aguagguacauaaaaaccacacacaugcaugc

SEQ ID NO: 326842 - RNA, 32 nt, Human
aguagguaggcuuaaacagaagagucuuuaga

SEQ ID NO: 326843 - RNA, 32 nt, Human
aguaggucacgcuggacgccacccuaagcugg

SEQ ID NO: 326844 - RNA, 32 nt, Human
aguagguccaggcuggaugcugguaugauggg

SEQ ID NO: 326845 - RNA, 32 nt, Human
aguagguccuggaaaaguaaauucuuuauuuu

SEQ ID NO: 326846 - RNA, 32 nt, Human
aguaggucuaggggaauacucagucugaucuu

SEQ ID NO: 326847 - RNA, 32 nt, Human
aguaggucugcagcuauuucaacuuccuuccg

SEQ ID NO: 326848 - RNA, 32 nt, Human
aguaggucugggauggacaggaaagggcaaag

SEQ ID NO: 326849 - RNA, 32 nt, Human
aguaggucuugugggcauucagucuagcccag

SEQ ID NO: 326850 - RNA, 22 nt, Human
aguaggugaagaaugucuggcu

SEQ ID NO: 326851 - RNA, 23 nt, Human
aguaggugacgugaaaggcagga

SEQ ID NO: 326852 - RNA, 31 nt, Human
aguaggugcucaauaaagacuuguugaauga

SEQ ID NO: 326853 - RNA, 32 nt, Human
aguaggugcucaauaaaugcauauugaauaac

SEQ ID NO: 326854 - RNA, 32 nt, Human
aguaggugcucaauaaauguugaaaccaacug

SEQ ID NO: 326855 - RNA, 32 nt, Human
aguaggugcucaauaaguauccaaugagugga

SEQ ID NO: 326856 - RNA, 32 nt, Human
aguagguggacaaauauccucacuuucuaucu

SEQ ID NO: 326857 - RNA, 32 nt, Human
aguagguggaggggagcgccugccauugguug

SEQ ID NO: 326858 - RNA, 20 nt, Human
aguaggugggacuacaggug

SEQ ID NO: 326859 - RNA, 32 nt, Human
aguaggugggauuacagaugcccgccaccaca

SEQ ID NO: 326860 - RNA, 32 nt, Human
aguaggugggauuacaggcaugcgccaccacg

SEQ ID NO: 326861 - RNA, 32 nt, Human
aguaggugggauuacaggcgcccgccaccacg

SEQ ID NO: 326862 - RNA, 32 nt, Human
aguaggugggauuacaggugcauaccaccaca

SEQ ID NO: 326863 - RNA, 32 nt, Human
aguaggugggauuacaggugcccaccaccaag

SEQ ID NO: 326864 - RNA, 32 nt, Human
aguagguguucaauaaauauuuguugaaugaa

SEQ ID NO: 326865 - RNA, 32 nt, Human
aguagguugaggacaggagagggaagggucuu

SEQ ID NO: 326866 - RNA, 32 nt, Human
aguaguaaaucaggaacauucuccuaacuugg

SEQ ID NO: 326867 - RNA, 32 nt, Human
aguaguaacuccauuaaacaaaggcauuuaca

SEQ ID NO: 326868 - RNA, 32 nt, Human
aguaguaagcugccugccucccuucccucaga

SEQ ID NO: 326869 - RNA, 32 nt, Human
aguaguaaugauucagaagaaaaagaaaaagg

SEQ ID NO: 326870 - RNA, 32 nt, Human
aguaguaccagccccaucagguuguugugaag

SEQ ID NO: 326871 - RNA, 20 nt, Human
aguaguacuggcaggcacag

SEQ ID NO: 326872 - RNA, 32 nt, Human
aguaguaguguugcuuucuaagcuauaacagu

SEQ ID NO: 326873 - RNA, 32 nt, Human
aguaguaguuauuccucccuauggagucaugg

SEQ ID NO: 326874 - RNA, 32 nt, Human
aguaguauuccacuguacucauucauaaggua

SEQ ID NO: 326875 - RNA, 32 nt, Human
aguaguauugacuucccuugagauaugaugua

SEQ ID NO: 326876 - RNA, 32 nt, Human
aguagucaggaaagggggcuuggggcuugcca

SEQ ID NO: 326877 - RNA, 32 nt, Human
aguagucauuuccauucuuuacauugucauga

SEQ ID NO: 326878 - RNA, 32 nt, Human
aguaguccaggccauggguaagaagaaagugu

SEQ ID NO: 326879 - RNA, 32 nt, Human
aguagucccagaggggccguguucuguccugc

SEQ ID NO: 326880 - RNA, 32 nt, Human
aguagucccauguugcuucacaccucuuaagu

SEQ ID NO: 326881 - RNA, 32 nt, Human
aguaguccuagccugguaaagacccuccacca

SEQ ID NO: 326882 - RNA, 32 nt, Human
aguagugaaaggaaggaggaggaaaggaaauu

SEQ ID NO: 326883 - RNA, 32 nt, Human
aguagugaaugacacagauuugccagaugaca

SEQ ID NO: 326884 - RNA, 32 nt, Human
aguagugaggcugugagugugagccacacagc

SEQ ID NO: 326885 - RNA, 31 nt, Human
aguagugauaauggauccuguugaagguuaa

SEQ ID NO: 326886 - RNA, 32 nt, Human
aguagugcaguggugugaucauagcucacugu

SEQ ID NO: 326887 - RNA, 32 nt, Human
aguagugcccugcuucuagggcucugaauacg

SEQ ID NO: 326888 - RNA, 32 nt, Human
aguagugcuugcucccccugccuugucccacc

SEQ ID NO: 326889 - RNA, 32 nt, Human
aguaguggaccagagcaggggaguuuuuaaaa

SEQ ID NO: 326890 - RNA, 32 nt, Human
aguaguggcucacaccuguaauuccagcacuu

SEQ ID NO: 326891 - RNA, 19 nt, Human
aguagugggauuacaggug

SEQ ID NO: 326892 - RNA, 32 nt, Human
aguagugggauuucaccauguuggccaggaug

SEQ ID NO: 326893 - RNA, 32 nt, Human
aguaguguuagcaaucagcugacuccugacuc

SEQ ID NO: 326894 - RNA, 32 nt, Human
aguaguuaaauuuccaugcagaaaaauaaaug

SEQ ID NO: 326895 - RNA, 32 nt, Human
aguaguuacaauuagaaauaccuacugauggu

SEQ ID NO: 326896 - RNA, 32 nt, Human
aguaguuacccauuggauucauaugagcuaaa

SEQ ID NO: 326897 - RNA, 32 nt, Human
aguaguucaagaccagccuaggcaacauagug

SEQ ID NO: 326898 - RNA, 32 nt, Human
aguaguucaagaccagccuggccaacauggug

SEQ ID NO: 326899 - RNA, 32 nt, Human
aguaguucaagaccagccugggcaacauagua

SEQ ID NO: 326900 - RNA, 32 nt, Human
aguaguucaggcuggguggagcagugggaaca

SEQ ID NO: 326901 - RNA, 32 nt, Human
aguaguuccaucaaaauauguaauaauucaca

SEQ ID NO: 326902 - RNA, 32 nt, Human
aguaguucgagaccagccuggccaauauggug

SEQ ID NO: 326903 - RNA, 32 nt, Human
aguaguucgagaccagccuggucaauauggug

SEQ ID NO: 326904 - RNA, 32 nt, Human
aguaguucgaguccagccugggcagcauagug

SEQ ID NO: 326905 - RNA, 32 nt, Human
aguaguucugccaccucugaugcaccacugcc

SEQ ID NO: 326906 - RNA, 32 nt, Human
aguaguucugguaccagcuaucaugaacagca

SEQ ID NO: 326907 - RNA, 32 nt, Human
aguaguugcagugaggauucaacgagaugaac

SEQ ID NO: 326908 - RNA, 32 nt, Human
aguaguuggagaccagccuggccaacauggcg

SEQ ID NO: 326909 - RNA, 32 nt, Human
aguaguugggauuacagaugcccgccaccgca

SEQ ID NO: 326910 - RNA, 32 nt, Human
aguaguugggauuacaggcgccugccaccaca

SEQ ID NO: 326911 - RNA, 32 nt, Human
aguaguugggauuacaggugacugccaccgug

SEQ ID NO: 326912 - RNA, 32 nt, Human
aguaguuuaaaccaaauaaaacaauuucugag

SEQ ID NO: 326913 - RNA, 32 nt, Human
aguaguuuaaaucuggauuuucccaguagaau

SEQ ID NO: 326914 - RNA, 32 nt, Human
aguaguuuacaaaacagaaaauacuuaacuag

SEQ ID NO: 326915 - RNA, 32 nt, Human
aguaguuuccuccacauucacgaaauuaccac

SEQ ID NO: 326916 - RNA, 32 nt, Human
aguaguuucuguucugauuagaucccagcugu

SEQ ID NO: 326917 - RNA, 32 nt, Human
aguaguuugaaacucauuguuuccuuguggua

SEQ ID NO: 326918 - RNA, 32 nt, Human
aguaguuugagaccagccuggccaacauagug

SEQ ID NO: 326919 - RNA, 32 nt, Human
aguaguuugagaccagccuggccaacauggug

SEQ ID NO: 326920 - RNA, 32 nt, Human
aguaguuugagaccagccuggccaauauggug

SEQ ID NO: 326921 - RNA, 32 nt, Human
aguaguuugugcuaggaaguauguaggaucca

SEQ ID NO: 326922 - RNA, 32 nt, Human
aguaguuuguguugggauuacugcucauaacc

SEQ ID NO: 326923 - RNA, 32 nt, Human
aguaguuuucccuugugacuucagggguugug

SEQ ID NO: 326924 - RNA, 32 nt, Human
aguaguuuuugguuucuugcuguugcuuuguu

SEQ ID NO: 326925 - RNA, 31 nt, Human
aguauaaaucuucagcauaccaaaguuauga

SEQ ID NO: 326926 - RNA, 32 nt, Human
aguauaacugauuucaggcuaacuuauuacca

SEQ ID NO: 326927 - RNA, 32 nt, Human
aguauaaggugucucauuugagucuuuuucuu

SEQ ID NO: 326928 - RNA, 32 nt, Human
aguauaauaaacugugaguauucuuccagaua

SEQ ID NO: 326929 - RNA, 32 nt, Human
aguauaauaaguaaccuuugguacagcagguu

SEQ ID NO: 326930 - RNA, 32 nt, Human
aguauaaugauacaucguagccuaagaaauau

SEQ ID NO: 326931 - RNA, 32 nt, Human
aguauaaugucauuaaggaaauuaagccucug

SEQ ID NO: 326932 - RNA, 21 nt, Human
aguauacaauucagucacuaa

SEQ ID NO: 326933 - RNA, 32 nt, Human
aguauacacggucuaacucaucucuccccaga

SEQ ID NO: 326934 - RNA, 32 nt, Human
aguauacaguguaugccuuuuccuucaugcag

SEQ ID NO: 326935 - RNA, 32 nt, Human
aguauacauaugccauauguauaacaagaaau

SEQ ID NO: 326936 - RNA, 32 nt, Human
aguauacauauguacuauagacauguuaauaa

SEQ ID NO: 326937 - RNA, 32 nt, Human
aguauacauggugauguacaucuguagcaaag

SEQ ID NO: 326938 - RNA, 32 nt, Human
aguauaccugcucuccuaugaccccaaaucau

SEQ ID NO: 326939 - RNA, 32 nt, Human
aguauacuacaguuauguuuacaucugaaagu

SEQ ID NO: 326940 - RNA, 32 nt, Human
aguauacuagcuuuuugcuucucuuuuagaaa

SEQ ID NO: 326941 - RNA, 32 nt, Human
aguauacuaucuuuaccuucaguuuuucagau

SEQ ID NO: 326942 - RNA, 32 nt, Human
aguauacugagaaccaggguucccucuggggu

SEQ ID NO: 326943 - RNA, 32 nt, Human
aguauacuggacugugcaucaaagggauguaa

SEQ ID NO: 326944 - RNA, 32 nt, Human
aguauagaagucuggcaaaaacagaaacagaa

SEQ ID NO: 326945 - RNA, 32 nt, Human
aguauagagaaaaguguauuagaugugguuuu

SEQ ID NO: 326946 - RNA, 32 nt, Human
aguauagagccaagagguaagcacagaucaaa

SEQ ID NO: 326947 - RNA, 32 nt, Human
aguauagaguccauauacaaagaaguuacagc

SEQ ID NO: 326948 - RNA, 32 nt, Human
aguauagauguuaggauaaagagcagacccuu

SEQ ID NO: 326949 - RNA, 32 nt, Human
aguauagcuacacuauugacuccaaccaggug

SEQ ID NO: 326950 - RNA, 32 nt, Human
aguauagcucuguaguggaauaugucuucugu

SEQ ID NO: 326951 - RNA, 32 nt, Human
aguauagcugugcaccucugggcaaauaguuu

SEQ ID NO: 326952 - RNA, 32 nt, Human
aguauaggaggguuacuuggggccaguaaauc

SEQ ID NO: 326953 - RNA, 32 nt, Human
aguauaggcaacagguuaaacuaccacguggg

SEQ ID NO: 326954 - RNA, 32 nt, Human
aguauaggcacuggguccagccuugaucagug

SEQ ID NO: 326955 - RNA, 32 nt, Human
aguauagugacuauccguucaugagagaaauu

SEQ ID NO: 326956 - RNA, 32 nt, Human
aguauagugacuaucuguucaugagagaaauu

SEQ ID NO: 326957 - RNA, 32 nt, Human
aguauauaaaaauucaggcaggagagaugguu

SEQ ID NO: 326958 - RNA, 32 nt, Human
aguauaucaagcaauaaucucccacccaaggc

SEQ ID NO: 326959 - RNA, 32 nt, Human
aguauaucugugcuucacuggaagaguugaaa

SEQ ID NO: 326960 - RNA, 31 nt, Human
aguauaugacuucucuuucuccgugguuagu

SEQ ID NO: 326961 - RNA, 32 nt, Human
aguauaugggguaggccgggugcaguggcuca

SEQ ID NO: 326962 - RNA, 32 nt, Human
aguauaugguguuccuagaaugcagcugaaga

SEQ ID NO: 326963 - RNA, 32 nt, Human
aguauauuauuuuacuaauuguacuuuuauga

SEQ ID NO: 326964 - RNA, 32 nt, Human
aguauauuguaaagauaggacaugguauaaug

SEQ ID NO: 326965 - RNA, 32 nt, Human
aguauauuuggguaauaaugaaaguuuaauuc

SEQ ID NO: 326966 - RNA, 32 nt, Human
aguauauuuuguucugaacuggcaguuuaaga

SEQ ID NO: 326967 - RNA, 32 nt, Human
aguauauuuuugcagaacaggcagcagcaaua

SEQ ID NO: 326968 - RNA, 32 nt, Human
aguaucaacucugcccguuggcugccugagcc

SEQ ID NO: 326969 - RNA, 32 nt, Human
aguaucaacuggccaggcaggguggcucacgc

SEQ ID NO: 326970 - RNA, 30 nt, Human
aguaucaccuuccccaugcucuuguggcug

SEQ ID NO: 326971 - RNA, 32 nt, Human
aguaucacuuuugcugugaugauguguucuug

SEQ ID NO: 326972 - RNA, 32 nt, Human
aguaucagaggguggagaugucagucugucca

SEQ ID NO: 326973 - RNA, 32 nt, Human
aguaucaggaauugggaucgcuagaguguuuc

SEQ ID NO: 326974 - RNA, 32 nt, Human
aguaucagucaugacagaugaagaaggagcag

SEQ ID NO: 326975 - RNA, 32 nt, Human
aguaucagugauggcaugaauucuucagcaca

SEQ ID NO: 326976 - RNA, 32 nt, Human
aguaucaguuuuacuuuucagaggauuuguaa

SEQ ID NO: 326977 - RNA, 32 nt, Human
aguaucaguuuuugaaccacaguaaugggaag

SEQ ID NO: 326978 - RNA, 32 nt, Human
aguaucauaagaaagugccaauguuucaauga

SEQ ID NO: 326979 - RNA, 32 nt, Human
aguaucauaaugaaggcaaagagaacuaggcu

SEQ ID NO: 326980 - RNA, 24 nt, Human
aguaucaugcuguuuugguuacug

SEQ ID NO: 326981 - RNA, 32 nt, Human
aguaucauuagagcuguccaaaauggaacagc

SEQ ID NO: 326982 - RNA, 32 nt, Human
aguaucauuugagccaggagguugagguugca

SEQ ID NO: 326983 - RNA, 32 nt, Human
aguauccaaagaucagguuggcaccaacaggu

SEQ ID NO: 326984 - RNA, 32 nt, Human
aguauccaacacaggcaauauuccagcuaugg

SEQ ID NO: 326985 - RNA, 32 nt, Human
aguauccaagaagucauuugccagcagauuuc

SEQ ID NO: 326986 - RNA, 32 nt, Human
aguaucccacacacacuggugcccagagccgg

SEQ ID NO: 326987 - RNA, 32 nt, Human
aguaucccuugagucugggagguggaggcugc

SEQ ID NO: 326988 - RNA, 32 nt, Human
aguaucuacagcuucagaacuugagcuaagua

SEQ ID NO: 326989 - RNA, 32 nt, Human
aguaucuauccaggagcuaccccaccaaacug

SEQ ID NO: 326990 - RNA, 32 nt, Human
aguaucucaaagacuucacuugacuucuugau

SEQ ID NO: 326991 - RNA, 32 nt, Human
aguaucucacagucccauccuuccaaccuucu

SEQ ID NO: 326992 - RNA, 32 nt, Human
aguaucucuguaacagugucuuaaauaaaugc

SEQ ID NO: 326993 - RNA, 32 nt, Human
aguaucugaagagugagagcauucauguuuga

SEQ ID NO: 326994 - RNA, 32 nt, Human
aguaucugcugugagccagagagcagaaggaa

SEQ ID NO: 326995 - RNA, 32 nt, Human
aguaucugcuucuguagcccacggcaccccaa

SEQ ID NO: 326996 - RNA, 32 nt, Human
aguaucugggacuacaguugcaugucaccacg

SEQ ID NO: 326997 - RNA, 32 nt, Human
aguaucugggauuacaggcaugugccaccaca

SEQ ID NO: 326998 - RNA, 32 nt, Human
aguaucugggggaacaucuaucaaagaagaga

SEQ ID NO: 326999 - RNA, 32 nt, Human
aguaucugucacugcuacauaguuccuuaauu

SEQ ID NO: 327000 - RNA, 32 nt, Human
aguaucugucaggcugucaggcugucagguug

SEQ ID NO: 327001 - RNA, 32 nt, Human
aguaucugucccaggagcccacacagagggac

SEQ ID NO: 327002 - RNA, 32 nt, Human
aguaucugugauuacaggcacgugccaccaug

SEQ ID NO: 327003 - RNA, 32 nt, Human
aguaucuguuaccccuucccucccagaguaac

SEQ ID NO: 327004 - RNA, 32 nt, Human
aguaucuuaacuuccauugucuucuuguuaac

SEQ ID NO: 327005 - RNA, 32 nt, Human
aguaucuucauacuuccucauccccucauugc

SEQ ID NO: 327006 - RNA, 32 nt, Human
aguaucuuccacugccccaucuguuggccacc

SEQ ID NO: 327007 - RNA, 32 nt, Human
aguaucuucguaaaucaagaacugguaaacca

SEQ ID NO: 327008 - RNA, 32 nt, Human
aguaucuuguugaauuguauguucuguuggau

SEQ ID NO: 327009 - RNA, 23 nt, Human
aguaucuuuguugauggcugcug

SEQ ID NO: 327010 - RNA, 32 nt, Human
aguaugaagaaaagcaacccaaaacucucaau

SEQ ID NO: 327011 - RNA, 32 nt, Human
aguaugaaguauucuugcacugccauuuucuu

SEQ ID NO: 327012 - RNA, 32 nt, Human
aguaugagaagucacugucaaugaaaguuguu

SEQ ID NO: 327013 - RNA, 32 nt, Human
aguaugagauagauuuaaucuucugagacaga

SEQ ID NO: 327014 - RNA, 32 nt, Human
aguaugaggugaacggggugaaaccucccauu

SEQ ID NO: 327015 - RNA, 32 nt, Human
aguaugagucucuuugccucucugggucucua

SEQ ID NO: 327016 - RNA, 32 nt, Human
aguaugagugagacccacagugcaccagagca

SEQ ID NO: 327017 - RNA, 32 nt, Human
aguaugaguguauguacuuuugauauucugug

SEQ ID NO: 327018 - RNA, 32 nt, Human
aguaugauggcaggagaaucagccuggggccu

SEQ ID NO: 327019 - RNA, 32 nt, Human
aguaugcauuucuuagagcaguagcuugcagu

SEQ ID NO: 327020 - RNA, 32 nt, Human
aguaugccaaagacuucauaaugaauucacca

SEQ ID NO: 327021 - RNA, 32 nt, Human
aguaugccagcugucucaauggcucaccauac

SEQ ID NO: 327022 - RNA, 32 nt, Human
aguaugccgcugcacuccagccugggggacag

SEQ ID NO: 327023 - RNA, 32 nt, Human
aguaugccuaaacucucugggcucccaggacc

SEQ ID NO: 327024 - RNA, 32 nt, Human
aguaugcuaaagauuuauuucuaguuugugua

SEQ ID NO: 327025 - RNA, 32 nt, Human
aguaugcuuacugaggccaugagaaccugagg

SEQ ID NO: 327026 - RNA, 32 nt, Human
aguaugcuuggguugcuauaacauacuaccau

SEQ ID NO: 327027 - RNA, 32 nt, Human
aguauggagcucagagagggcaggcaugaagu

SEQ ID NO: 327028 - RNA, 32 nt, Human
aguauggauguggcagaguccugaugaaagau

SEQ ID NO: 327029 - RNA, 32 nt, Human
aguauggauguuuccguaaaagcuggaauucc

SEQ ID NO: 327030 - RNA, 32 nt, Human
aguauggcagaauagcuaaagacuggacucag

SEQ ID NO: 327031 - RNA, 32 nt, Human
aguauggcaugccuaauuccaguauccuggaa

SEQ ID NO: 327032 - RNA, 32 nt, Human
aguauggccagccuccagcucucagccaggag

SEQ ID NO: 327033 - RNA, 32 nt, Human
aguauggcccaaagcucuuguguccuuuguga

SEQ ID NO: 327034 - RNA, 32 nt, Human
aguauggcugaggccuugcccacccaccugcc

SEQ ID NO: 327035 - RNA, 32 nt, Human
aguaugggaugagaucaauaagccuacagaga

SEQ ID NO: 327036 - RNA, 32 nt, Human
aguauggggccaggccccagagucccuuaucc

SEQ ID NO: 327037 - RNA, 32 nt, Human
aguaugguccucagaucccccuucucuccugc

SEQ ID NO: 327038 - RNA, 32 nt, Human
aguauggucucgaucuccugaccucgugauuc

SEQ ID NO: 327039 - RNA, 32 nt, Human
aguauggugaaauagcaggugcgucuucuagu

SEQ ID NO: 327040 - RNA, 32 nt, Human
aguauggugaugaacaaccacguucugacugg

SEQ ID NO: 327041 - RNA, 32 nt, Human
aguaugguucccaauuuuuaaauccauuucau

SEQ ID NO: 327042 - RNA, 32 nt, Human
aguauguacaagagaaaacggaagagagagga

SEQ ID NO: 327043 - RNA, 32 nt, Human
aguauguacgaggaauuucaaaucaucagaug

SEQ ID NO: 327044 - RNA, 31 nt, Human
aguauguacucaauaaauauuuguuggcuuu

SEQ ID NO: 327045 - RNA, 32 nt, Human
aguauguauuaaaagcaaaaauucccaugaag

SEQ ID NO: 327046 - RNA, 32 nt, Human
aguaugucugaagaguacagugagagguuaau

SEQ ID NO: 327047 - RNA, 20 nt, Human
aguaugucuucagcuugauc

SEQ ID NO: 327048 - RNA, 20 nt, Human
aguaugugcucagcgaggaa

SEQ ID NO: 327049 - RNA, 32 nt, Human
aguauguggcaaaacauauaccaccauagugc

SEQ ID NO: 327050 - RNA, 32 nt, Human
aguauguggcaaaacauauaccacccauagug

SEQ ID NO: 327051 - RNA, 32 nt, Human
aguaugugguugcaggaggcgguuguguucga

SEQ ID NO: 327052 - RNA, 32 nt, Human
aguauguucacagccugcuuuaucucuccuug

SEQ ID NO: 327053 - RNA, 32 nt, Human
aguauguuucauuuucuuucuucuucaccucu

SEQ ID NO: 327054 - RNA, 32 nt, Human
aguauguuugaacucuccagugcccuauagcu

SEQ ID NO: 327055 - RNA, 32 nt, Human
aguauuaaagaauugaggguggaauucuuaga

SEQ ID NO: 327056 - RNA, 32 nt, Human
aguauuaaccaaggagagaggaagggagcagg

SEQ ID NO: 327057 - RNA, 32 nt, Human
aguauuaaggguaggauguugcucugaaucac

SEQ ID NO: 327058 - RNA, 32 nt, Human
aguauuaaugaugccagcugucaggauaauaa

SEQ ID NO: 327059 - RNA, 32 nt, Human
aguauuaaugcaacugaagcugugauauuucc

SEQ ID NO: 327060 - RNA, 32 nt, Human
aguauuaauguuuuugcauacucuccaucuuu

SEQ ID NO: 327061 - RNA, 32 nt, Human
aguauuacaagaucaacuucugacccugugaa

SEQ ID NO: 327062 - RNA, 32 nt, Human
aguauuacagccgccucauccaccagaagcau

SEQ ID NO: 327063 - RNA, 32 nt, Human
aguauuacccaugggacaaaauuuguacuauu

SEQ ID NO: 327064 - RNA, 32 nt, Human
aguauuaccuuccuccccuauguauuaguaaa

SEQ ID NO: 327065 - RNA, 32 nt, Human
aguauuaccuuuuggaauuaaaagccacugac

SEQ ID NO: 327066 - RNA, 32 nt, Human
aguauuauagaaagcaaagaaugaaaugugcu

SEQ ID NO: 327067 - RNA, 32 nt, Human
aguauuauugaauuuauuuucuaaaucaggau

SEQ ID NO: 327068 - RNA, 32 nt, Human
aguauuauuuuccugaauaagaaccaggaaga

SEQ ID NO: 327069 - RNA, 32 nt, Human
aguauucagcaguggcuggacucuggauucuu

SEQ ID NO: 327070 - RNA, 32 nt, Human
aguauuccagcagauacagaugugaacaguca

SEQ ID NO: 327071 - RNA, 32 nt, Human
aguauuccauuucagaaaauggagauuugguu

SEQ ID NO: 327072 - RNA, 32 nt, Human
aguauucccaagaagccccaaauauguaagua

SEQ ID NO: 327073 - RNA, 32 nt, Human
aguauuccucuccugguaccgcaaggccuccu

SEQ ID NO: 327074 - RNA, 32 nt, Human
aguauucuaguguucucucuuuguuuggcaua

SEQ ID NO: 327075 - RNA, 22 nt, Human
aguauucugaaaggagauuuga

SEQ ID NO: 327076 - RNA, 32 nt, Human
aguauucugaagauagcgacagugacucugau

SEQ ID NO: 327077 - RNA, 32 nt, Human
aguauucuucacggcagccagaaguuaauggu

SEQ ID NO: 327078 - RNA, 32 nt, Human
aguauucuucagagagcugccuucccaaggga

SEQ ID NO: 327079 - RNA, 32 nt, Human
aguauucuucauuauccuuuugaugucugcag

SEQ ID NO: 327080 - RNA, 32 nt, Human
aguauucuugaggagccuuuugcucauaggcu

SEQ ID NO: 327081 - RNA, 32 nt, Human
aguauugaauacuuacauucucuaauaagaaa

SEQ ID NO: 327082 - RNA, 32 nt, Human
aguauugacagaagacguuacagugaagugcu

SEQ ID NO: 327083 - RNA, 32 nt, Human
aguauugagaugcuaaggagcugaugccaccu

SEQ ID NO: 327084 - RNA, 32 nt, Human
aguauugagauuacaggcaugagccacugcac

SEQ ID NO: 327085 - RNA, 32 nt, Human
aguauugaguccuguuugagcuauuguucucu

SEQ ID NO: 327086 - RNA, 32 nt, Human
aguauugagugaggacauucccaaaaccaaag

SEQ ID NO: 327087 - RNA, 32 nt, Human
aguauugcccuuucugucuuucuccuugugcc

SEQ ID NO: 327088 - RNA, 21 nt, Human
aguauugcuggagccccaaca

SEQ ID NO: 327089 - RNA, 32 nt, Human
aguauuggaaacauacuagccauuugaagaca

SEQ ID NO: 327090 - RNA, 32 nt, Human
aguauuggacauguuggcaguaugaagagacc

SEQ ID NO: 327091 - RNA, 32 nt, Human
aguauuggagaaaugcuuagguccuaugauag

SEQ ID NO: 327092 - RNA, 32 nt, Human
aguauuggagguggagccuagugggaggugau

SEQ ID NO: 327093 - RNA, 32 nt, Human
aguauuggaucugaaaauaaagugucauccaa

SEQ ID NO: 327094 - RNA, 32 nt, Human
aguauugggacuacaggcgugagccacagugc

SEQ ID NO: 327095 - RNA, 32 nt, Human
aguauugggauuacagacaugagccacugcac

SEQ ID NO: 327096 - RNA, 32 nt, Human
aguauugggauuacccgcgugagccaccgcgc

SEQ ID NO: 327097 - RNA, 32 nt, Human
aguauugggguggagguugcagugagcagaga

SEQ ID NO: 327098 - RNA, 32 nt, Human
aguauugggguggagguugcagugagcggaga

SEQ ID NO: 327099 - RNA, 18 nt, Human
aguauugguacaucuugg

SEQ ID NO: 327100 - RNA, 32 nt, Human
aguauugucuaaagugagcccagaggccacug

SEQ ID NO: 327101 - RNA, 20 nt, Human
aguauuuaacauucuugguc

SEQ ID NO: 327102 - RNA, 32 nt, Human
aguauuuaagaaaaggcugggccaggcacgau

SEQ ID NO: 327103 - RNA, 32 nt, Human
aguauuuaagugcccauaaggcagcaugaaaa

SEQ ID NO: 327104 - RNA, 32 nt, Human
aguauuuaugugaaaacucucuagaagguaaa

SEQ ID NO: 327105 - RNA, 32 nt, Human
aguauuuauucuuuguauuacacaaguccagu

SEQ ID NO: 327106 - RNA, 32 nt, Human
aguauuucaagaccagccuaaaggucaacaua

SEQ ID NO: 327107 - RNA, 32 nt, Human
aguauuucagagggccaggcaagagcacuuca

SEQ ID NO: 327108 - RNA, 32 nt, Human
aguauuuccucugaacagucauugauucuuca

SEQ ID NO: 327109 - RNA, 32 nt, Human
aguauuugagccacgaguuuaugugcacaagu

SEQ ID NO: 327110 - RNA, 32 nt, Human
aguauuugaggauauaaagaggaugugcacug

SEQ ID NO: 327111 - RNA, 22 nt, Human
aguauuugccaauaaaugaucu

SEQ ID NO: 327112 - RNA, 32 nt, Human
aguauuuggcaaucacuucauccacuacugca

SEQ ID NO: 327113 - RNA, 32 nt, Human
aguauuugguugccuucugaugccacuucuuc

SEQ ID NO: 327114 - RNA, 32 nt, Human
aguauuuguaagaauaaagcagcauuugaaau

SEQ ID NO: 327115 - RNA, 32 nt, Human
aguauuuguccuucugugacuggcuuauuuca

SEQ ID NO: 327116 - RNA, 32 nt, Human
aguauuugugcaacacaagcacaacuaaguau

SEQ ID NO: 327117 - RNA, 32 nt, Human
aguauuuguuccuguuuuacaaugcuucuguc

SEQ ID NO: 327118 - RNA, 32 nt, Human
aguauuuuaccaacucuugucuuagggagcau

SEQ ID NO: 327119 - RNA, 32 nt, Human
aguauuuuacuucucccuugaguccccaugcu

SEQ ID NO: 327120 - RNA, 32 nt, Human
aguauuuucagacauggugaaugcaucgacug

SEQ ID NO: 327121 - RNA, 32 nt, Human
aguauuuucauuuuguuuauuuuugccuuaua

SEQ ID NO: 327122 - RNA, 32 nt, Human
aguauuuugaaugaguuugacacugccggcuu

SEQ ID NO: 327123 - RNA, 32 nt, Human
aguauuuuggagugcagaacauucucaauuaa

SEQ ID NO: 327124 - RNA, 32 nt, Human
aguauuuuuaagucucaccaaaaagguggaag

SEQ ID NO: 327125 - RNA, 32 nt, Human
aguauuuuuaguaguggaucacuguggacagg

SEQ ID NO: 327126 - RNA, 32 nt, Human
aguauuuuucgucaguuaaaacuguuagaucu

SEQ ID NO: 327127 - RNA, 32 nt, Human
aguauuuuucucaaaugaacauguuuauugca

SEQ ID NO: 327128 - RNA, 32 nt, Human
aguauuuuuguuguuuauuuauaagguaauug

SEQ ID NO: 327129 - RNA, 21 nt, Human
agucaaaaagccuuuucugug

SEQ ID NO: 327130 - RNA, 32 nt, Human
agucaaaaaggcugcucggacccaggucuggc

SEQ ID NO: 327131 - RNA, 32 nt, Human
agucaaaaauacacguucgggccaggcgcggu

SEQ ID NO: 327132 - RNA, 32 nt, Human
agucaaaaaugagugucagcacuacuacugau

SEQ ID NO: 327133 - RNA, 32 nt, Human
agucaaaacucauugcacaucauagaacauac

SEQ ID NO: 327134 - RNA, 32 nt, Human
agucaaaauuacggcugcaaaauggcuaaggu

SEQ ID NO: 327135 - RNA, 25 nt, Human
agucaaacaaagaagaagucccugg

SEQ ID NO: 327136 - RNA, 18 nt, Human
agucaaacaaggaagcug

SEQ ID NO: 327137 - RNA, 32 nt, Human
agucaaaccacugcaauccagccugggcaacg

SEQ ID NO: 327138 - RNA, 32 nt, Human
agucaaaccagcuccuucaagaagcuuugagc

SEQ ID NO: 327139 - RNA, 32 nt, Human
agucaaaggcauuuugcugacuuuaauauuga

SEQ ID NO: 327140 - RNA, 32 nt, Human
agucaaagggccugaggaaugacuacuucccu

SEQ ID NO: 327141 - RNA, 32 nt, Human
agucaaagucccaacaccaggcccaguuccag

SEQ ID NO: 327142 - RNA, 32 nt, Human
agucaaagugaucagauagauguggauuauca

SEQ ID NO: 327143 - RNA, 32 nt, Human
agucaaaugaaugagucugcaccugguaccua

SEQ ID NO: 327144 - RNA, 32 nt, Human
agucaaauuacccuaagagaaaugacuaucau

SEQ ID NO: 327145 - RNA, 32 nt, Human
agucaacaagaguaagacaacauaccagaucc

SEQ ID NO: 327146 - RNA, 32 nt, Human
agucaacaauuauuccuucugaaaguaagggu

SEQ ID NO: 327147 - RNA, 32 nt, Human
agucaacagcuuucaacagaucuucaaaggcu

SEQ ID NO: 327148 - RNA, 32 nt, Human
agucaacaguucaggagaagagaaggaauuug

SEQ ID NO: 327149 - RNA, 32 nt, Human
agucaacauaaauaaauacagaaugccauguu

SEQ ID NO: 327150 - RNA, 32 nt, Human
agucaacauaugcaaaauacuguacauuguga

SEQ ID NO: 327151 - RNA, 25 nt, Human
agucaacaucugcugcuuuccugug

SEQ ID NO: 327152 - RNA, 32 nt, Human
agucaacaucuucaucauugggcuuucuuuaa

SEQ ID NO: 327153 - RNA, 32 nt, Human
agucaacaugccaaagaaugaggcuggagaca

SEQ ID NO: 327154 - RNA, 32 nt, Human
agucaacauggugaaaccccgucuccauuaaa

SEQ ID NO: 327155 - RNA, 32 nt, Human
agucaacauggugaaaccucaucucugcuaaa

SEQ ID NO: 327156 - RNA, 32 nt, Human
agucaaccacuucaccucacugggcaaggaag

SEQ ID NO: 327157 - RNA, 32 nt, Human
agucaaccagcuguagaugggcuuguuccgag

SEQ ID NO: 327158 - RNA, 25 nt, Human
agucaaccagcuguggcuuccugug

SEQ ID NO: 327159 - RNA, 32 nt, Human
agucaaccggagaacccaaaaaucaggaauag

SEQ ID NO: 327160 - RNA, 32 nt, Human
agucaaccugaguuccucccuccugggaagcu

SEQ ID NO: 327161 - RNA, 32 nt, Human
agucaacuggaaaauucaaggaguuaauaaaa

SEQ ID NO: 327162 - RNA, 32 nt, Human
agucaagacaagaaaaucaacaggcuuucagc

SEQ ID NO: 327163 - RNA, 32 nt, Human
agucaagagaguacugaaagaccugcgggacu

SEQ ID NO: 327164 - RNA, 32 nt, Human
agucaagagaucaagaccauccuggccaacau

SEQ ID NO: 327165 - RNA, 32 nt, Human
agucaagagaucuggaaaucuuuuaaucaguu

SEQ ID NO: 327166 - RNA, 32 nt, Human
agucaagagauggcuccagacaccccggaucc

SEQ ID NO: 327167 - RNA, 32 nt, Human
agucaagaggcagagggacuugggaccuggga

SEQ ID NO: 327168 - RNA, 32 nt, Human
agucaagaggcugaggccagagaaucgcuuga

SEQ ID NO: 327169 - RNA, 32 nt, Human
agucaagaggggcagcucaggaugcuaccagg

SEQ ID NO: 327170 - RNA, 32 nt, Human
agucaagaucucaccacugaacuccagccugg

SEQ ID NO: 327171 - RNA, 32 nt, Human
agucaagcagggaggcacgggccacacacaca

SEQ ID NO: 327172 - RNA, 32 nt, Human
agucaagccaguuuccagaagggcugggguga

SEQ ID NO: 327173 - RNA, 32 nt, Human
agucaaggagcagcagaccuggcacuggaaca

SEQ ID NO: 327174 - RNA, 32 nt, Human
agucaaggccgaacuccagccugguggcuuug

SEQ ID NO: 327175 - RNA, 32 nt, Human
agucaaggccuugccgcccgcagcggggucag

SEQ ID NO: 327176 - RNA, 32 nt, Human
agucaaggucugggugacgcgguguccagagg

SEQ ID NO: 327177 - RNA, 32 nt, Human
agucaaggugcuggcggggcuaugucccuucu

SEQ ID NO: 327178 - RNA, 32 nt, Human
agucaaggugcugguggggcuaugucccuucu

SEQ ID NO: 327179 - RNA, 32 nt, Human
agucaagguggggucccaggagcagcugugac

SEQ ID NO: 327180 - RNA, 32 nt, Human
agucaaggugugaccgucgaccacagccagug

SEQ ID NO: 327181 - RNA, 32 nt, Human
agucaagguuuauuuucacaugaguccagcuu

SEQ ID NO: 327182 - RNA, 23 nt, Human
agucaaguaaacaucuuuccugu

SEQ ID NO: 327183 - RNA, 32 nt, Human
agucaagucggccacagacuugagcgcuuuau

SEQ ID NO: 327184 - RNA, 22 nt, Human
agucaaguuuguggcuuaugga

SEQ ID NO: 327185 - RNA, 21 nt, Human
agucaaguuuguguucagggg

SEQ ID NO: 327186 - RNA, 32 nt, Human
agucaauacaucuugcuuauucuacaaucaag

SEQ ID NO: 327187 - RNA, 32 nt, Human
agucaauacccacucaucuggaauauugucuc

SEQ ID NO: 327188 - RNA, 32 nt, Human
agucaauaucuuggacuauaguuaauuuauca

SEQ ID NO: 327189 - RNA, 32 nt, Human
agucaaucaccacuuauucucaggcaaauuau

SEQ ID NO: 327190 - RNA, 32 nt, Human
agucaaucccagcugucucggaccagggcccc

SEQ ID NO: 327191 - RNA, 32 nt, Human
agucaaucugaaauuuucauaaaagagaugua

SEQ ID NO: 327192 - RNA, 32 nt, Human
agucaauggauguugcuugggcauuuuggggg

SEQ ID NO: 327193 - RNA, 20 nt, Human
agucaauguuucuuuuauca

SEQ ID NO: 327194 - RNA, 32 nt, Human
agucaauuagaugugcaggaguaaguaguaua

SEQ ID NO: 327195 - RNA, 32 nt, Human
agucaauuauucacgccaugcacagcauaauu

SEQ ID NO: 327196 - RNA, 32 nt, Human
agucaauuauuuuucaaaauguagaauuguag

SEQ ID NO: 327197 - RNA, 32 nt, Human
agucaauuccuucuuccucaccucucagccuc

SEQ ID NO: 327198 - RNA, 32 nt, Human
agucaauucuccucacuauaacuggguguggu

SEQ ID NO: 327199 - RNA, 32 nt, Human
agucaauugaaaagauuuuaucaggaauuaca

SEQ ID NO: 327200 - RNA, 32 nt, Human
agucacaaacauguuuugcaacaaaguuuuaa

SEQ ID NO: 327201 - RNA, 32 nt, Human
agucacaaaggccaaaguuuuaaaggaagaaa

SEQ ID NO: 327202 - RNA, 32 nt, Human
agucacaacaaaaggaagacuggagaaaugcu

SEQ ID NO: 327203 - RNA, 32 nt, Human
agucacaaggacauaguagcugagggguugcg

SEQ ID NO: 327204 - RNA, 32 nt, Human
agucacaagggcccugaccucaugaccuccca

SEQ ID NO: 327205 - RNA, 27 nt, Human
agucacaagggggccugagugcagugg

SEQ ID NO: 327206 - RNA, 32 nt, Human
agucacaagggggccugagugcaguggcucac

SEQ ID NO: 327207 - RNA, 32 nt, Human
agucacacaacuaucaaggagcagagcugagg

SEQ ID NO: 327208 - RNA, 32 nt, Human
agucacacacaaaacgcucacggaccuugaac

SEQ ID NO: 327209 - RNA, 32 nt, Human
agucacacagcagccuuguaggugacuggagg

SEQ ID NO: 327210 - RNA, 32 nt, Human
agucacacagccgugacucauugcucagguga

SEQ ID NO: 327211 - RNA, 32 nt, Human
agucacaccacuggcugccagucagggccugc

SEQ ID NO: 327212 - RNA, 32 nt, Human
agucacaccccugcacuccagccugggugaca

SEQ ID NO: 327213 - RNA, 32 nt, Human
agucacaccuauagucucagcauuuugggaaa

SEQ ID NO: 327214 - RNA, 32 nt, Human
agucacacuccacucaccuccaccucccaaag

SEQ ID NO: 327215 - RNA, 32 nt, Human
agucacagacacacucugccaugucuuagcug

SEQ ID NO: 327216 - RNA, 32 nt, Human
agucacagacacacuugaacuucacuacacuc

SEQ ID NO: 327217 - RNA, 32 nt, Human
agucacagagagaccucccuacugugucagag

SEQ ID NO: 327218 - RNA, 32 nt, Human
agucacagagaggggaagagaaaacagggacg

SEQ ID NO: 327219 - RNA, 32 nt, Human
agucacagagaugggaaggcagccuccugccu

SEQ ID NO: 327220 - RNA, 32 nt, Human
agucacagaucugucagccugggaaccggccc

SEQ ID NO: 327221 - RNA, 32 nt, Human
agucacagcaaacuguacaauggcaguugagu

SEQ ID NO: 327222 - RNA, 32 nt, Human
agucacagccuccucaaaggguugugaaaauc

SEQ ID NO: 327223 - RNA, 32 nt, Human
agucacagcuacucagggagguugaggcagca

SEQ ID NO: 327224 - RNA, 32 nt, Human
agucacagcuacuccagaggcugaggcaggag

SEQ ID NO: 327225 - RNA, 32 nt, Human
agucacagcuacucgggaggccgaggugggag

SEQ ID NO: 327226 - RNA, 32 nt, Human
agucacagcuacucgggaggcggagucaggag

SEQ ID NO: 327227 - RNA, 32 nt, Human
agucacagcuacuugggagacugagguuggag

SEQ ID NO: 327228 - RNA, 32 nt, Human
agucacaggagagaugagggugagaauggagu

SEQ ID NO: 327229 - RNA, 32 nt, Human
agucacaggagggagagagaggcaguguacuu

SEQ ID NO: 327230 - RNA, 32 nt, Human
agucacaggauucugaaggcagcugugcaagu

SEQ ID NO: 327231 - RNA, 32 nt, Human
agucacaggcugcauagauugcaggaaagcga

SEQ ID NO: 327232 - RNA, 32 nt, Human
agucacagggagaagacguccacccacacauc

SEQ ID NO: 327233 - RNA, 32 nt, Human
agucacaggggaacugacauuuugucaaaaga

SEQ ID NO: 327234 - RNA, 32 nt, Human
agucacaggggcccugaccccaggccacacag

SEQ ID NO: 327235 - RNA, 32 nt, Human
agucacagggucaggggucaggugguuguagu

SEQ ID NO: 327236 - RNA, 32 nt, Human
agucacaggguugccuuggacccucggcugua

SEQ ID NO: 327237 - RNA, 32 nt, Human
agucacauaguacuauuuacagaucuguccug

SEQ ID NO: 327238 - RNA, 32 nt, Human
agucacaucccaggcuggggauggaugcucug

SEQ ID NO: 327239 - RNA, 32 nt, Human
agucacaucuuccugcuuuguccagaacacau

SEQ ID NO: 327240 - RNA, 32 nt, Human
agucacaugccaccuugucauucccauauauc

SEQ ID NO: 327241 - RNA, 32 nt, Human
agucacauguacugccauacuacuucuuugua

SEQ ID NO: 327242 - RNA, 32 nt, Human
agucacauuccagauuugaagcuguguuuuug

SEQ ID NO: 327243 - RNA, 32 nt, Human
agucacauugaugaugaugagugcaguggggu

SEQ ID NO: 327244 - RNA, 20 nt, Human
agucacauugcugaugcuua

SEQ ID NO: 327245 - RNA, 32 nt, Human
agucacauuggcagagguggggguuggcugug

SEQ ID NO: 327246 - RNA, 32 nt, Human
agucaccaacaauagagucaggguaaagaaua

SEQ ID NO: 327247 - RNA, 32 nt, Human
agucaccaagaaacuuaauuuucauuuaaaau

SEQ ID NO: 327248 - RNA, 32 nt, Human
agucaccacacuccagccugggugacagagca

SEQ ID NO: 327249 - RNA, 18 nt, Human
agucaccacaggaugccu

SEQ ID NO: 327250 - RNA, 32 nt, Human
agucaccacaggcugaaugcccacgaggagcu

SEQ ID NO: 327251 - RNA, 32 nt, Human
agucaccacauccuucugccuggguggccucu

SEQ ID NO: 327252 - RNA, 32 nt, Human
agucaccaccaccuuauucaccuuagagccag

SEQ ID NO: 327253 - RNA, 32 nt, Human
agucaccaccucaagaggccaucuaguucugg

SEQ ID NO: 327254 - RNA, 32 nt, Human
agucaccacugacuguugcccugggcauagaa

SEQ ID NO: 327255 - RNA, 32 nt, Human
agucaccaggagaugaggguuaggugugccca

SEQ ID NO: 327256 - RNA, 32 nt, Human
agucaccagugaagagccuaugugcauuuugu

SEQ ID NO: 327257 - RNA, 24 nt, Human
agucaccaugugugggcucaggga

SEQ ID NO: 327258 - RNA, 22 nt, Human
agucaccauugcaaaugcuuaa

SEQ ID NO: 327259 - RNA, 25 nt, Human
agucacccaggcuggagugcagugg

SEQ ID NO: 327260 - RNA, 32 nt, Human
agucacccauguucucaacuggaaguuggucg

SEQ ID NO: 327261 - RNA, 32 nt, Human
agucaccccagccucugcugcaggauaucacc

SEQ ID NO: 327262 - RNA, 32 nt, Human
agucaccccucauuuuccucuggggaccccag

SEQ ID NO: 327263 - RNA, 32 nt, Human
agucaccccucugucuaaccagccccagcaca

SEQ ID NO: 327264 - RNA, 32 nt, Human
agucacccgggauuggaaugcaauggcgcgau

SEQ ID NO: 327265 - RNA, 32 nt, Human
agucacccuaaaaugcuucacaugguuaaaaa

SEQ ID NO: 327266 - RNA, 32 nt, Human
agucacccuaaaucaaggggcuuuucagaagg

SEQ ID NO: 327267 - RNA, 32 nt, Human
agucacccuacaacuacuacuucuugggaccu

SEQ ID NO: 327268 - RNA, 32 nt, Human
agucacccucugcaggcccagcuccugccucc

SEQ ID NO: 327269 - RNA, 32 nt, Human
agucaccuacucagcuuccucucuccaccacc

SEQ ID NO: 327270 - RNA, 32 nt, Human
agucaccuacuuccuguccuccucggccccag

SEQ ID NO: 327271 - RNA, 32 nt, Human
agucaccuccuccagcuccgccaucuugcgug

SEQ ID NO: 327272 - RNA, 32 nt, Human
agucaccucuggccuucaaggcccaggucuuu

SEQ ID NO: 327273 - RNA, 32 nt, Human
agucaccucugucaaagccacagucuguuccu

SEQ ID NO: 327274 - RNA, 32 nt, Human
agucaccugaacccaauuccugaacuuuuaaa

SEQ ID NO: 327275 - RNA, 32 nt, Human
agucaccugcagcuggaccuagagggugccuu

SEQ ID NO: 327276 - RNA, 32 nt, Human
agucaccugcugugguguguguccucuccucu

SEQ ID NO: 327277 - RNA, 32 nt, Human
agucaccuggagaucuuggugaaaugcagacu

SEQ ID NO: 327278 - RNA, 32 nt, Human
agucaccuggagaugggggccagguugugcag

SEQ ID NO: 327279 - RNA, 32 nt, Human
agucaccuguaaucccagcuacuugggaggcu

SEQ ID NO: 327280 - RNA, 32 nt, Human
agucaccuguagucccagcuacuugggaggau

SEQ ID NO: 327281 - RNA, 32 nt, Human
agucaccuguuccaguucuuugcccauuuccu

SEQ ID NO: 327282 - RNA, 32 nt, Human
agucacgacagcagaccaacuccacccuaaga

SEQ ID NO: 327283 - RNA, 32 nt, Human
agucacgccacugcacuccagccugggugaca

SEQ ID NO: 327284 - RNA, 32 nt, Human
agucacgccacugcauucuauccugggcaaca

SEQ ID NO: 327285 - RNA, 32 nt, Human
agucacgggcuccucucacuguucccugucug

SEQ ID NO: 327286 - RNA, 32 nt, Human
agucacgggcuuccacuucacagaccuccuua

SEQ ID NO: 327287 - RNA, 32 nt, Human
agucacggugggcgccuguaaucccagcuacu

SEQ ID NO: 327288 - RNA, 32 nt, Human
agucacgugaaaccucuucuccagucauagua

SEQ ID NO: 327289 - RNA, 20 nt, Human
agucacguguccuaccguca

SEQ ID NO: 327290 - RNA, 21 nt, Human
agucacuaccucuaucaccac

SEQ ID NO: 327291 - RNA, 32 nt, Human
agucacuacugccugccugccugccugcuacg

SEQ ID NO: 327292 - RNA, 32 nt, Human
agucacuagccugucuuuugccucuagggaug

SEQ ID NO: 327293 - RNA, 32 nt, Human
agucacuagccugugaucccagcacuuuggga

SEQ ID NO: 327294 - RNA, 32 nt, Human
agucacucacaccguucguacgcccaggacag

SEQ ID NO: 327295 - RNA, 32 nt, Human
agucacucaccucacugagccaccuccauuuc

SEQ ID NO: 327296 - RNA, 32 nt, Human
agucacucacuggcugauacauuuaaagcagc

SEQ ID NO: 327297 - RNA, 32 nt, Human
agucacucagcacagcccugggcacaucgcuu

SEQ ID NO: 327298 - RNA, 32 nt, Human
agucacucauuucuuaccauuuuauuccccuc

SEQ ID NO: 327299 - RNA, 32 nt, Human
agucacuccacgcuccccacaggccaacccug

SEQ ID NO: 327300 - RNA, 32 nt, Human
agucacucccuggcuacacacacugaggugcu

SEQ ID NO: 327301 - RNA, 32 nt, Human
agucacucucccagacuugcgugggucaguuc

SEQ ID NO: 327302 - RNA, 32 nt, Human
agucacucucuucaaucccacacccauggaca

SEQ ID NO: 327303 - RNA, 32 nt, Human
agucacucucuucacauuuuucuucuauuccu

SEQ ID NO: 327304 - RNA, 32 nt, Human
agucacucuugcauggcuuccaugucugguuu

SEQ ID NO: 327305 - RNA, 32 nt, Human
agucacugaacauagcuauauguaugguuguu

SEQ ID NO: 327306 - RNA, 32 nt, Human
agucacugaaguuccuucagugcucaagacuc

SEQ ID NO: 327307 - RNA, 32 nt, Human
agucacugaaguuugaaaaacauugacucaga

SEQ ID NO: 327308 - RNA, 32 nt, Human
agucacugaaugcucacaacagcccaaucugc

SEQ ID NO: 327309 - RNA, 32 nt, Human
agucacugacccuaacugcagaccaugaagua

SEQ ID NO: 327310 - RNA, 32 nt, Human
agucacugaggugacgguaccaagucaccggc

SEQ ID NO: 327311 - RNA, 32 nt, Human
agucacugcaaucucuuuaccaccuccccacu

SEQ ID NO: 327312 - RNA, 32 nt, Human
agucacugcagccugugucuccuggguucaag

SEQ ID NO: 327313 - RNA, 31 nt, Human
agucacugccucugucccucuggucagcgug

SEQ ID NO: 327314 - RNA, 32 nt, Human
agucacugcguguucgcaucaacuuggaagug

SEQ ID NO: 327315 - RNA, 32 nt, Human
agucacugcuuugcauacgagaccauggggac

SEQ ID NO: 327316 - RNA, 32 nt, Human
agucacuggccauguuauaaauauuguuauuu

SEQ ID NO: 327317 - RNA, 32 nt, Human
agucacugggagaagggaugugggucugaaga

SEQ ID NO: 327318 - RNA, 32 nt, Human
agucacugggauuacaggcgcccaccuccaca

SEQ ID NO: 327319 - RNA, 32 nt, Human
agucacugggauuacaggugcccaccaccaca

SEQ ID NO: 327320 - RNA, 32 nt, Human
agucacugggcagaggcacgagcacguccaca

SEQ ID NO: 327321 - RNA, 32 nt, Human
agucacugggcuuuuguuuugcuuuauggaaa

SEQ ID NO: 327322 - RNA, 32 nt, Human
agucacugucccggaaccuggggcagcggagu

SEQ ID NO: 327323 - RNA, 32 nt, Human
agucacugugagcucccaggugcagccagagg

SEQ ID NO: 327324 - RNA, 32 nt, Human
agucacuguggugggggcgagaggaggacuug

SEQ ID NO: 327325 - RNA, 23 nt, Human
agucacuguugaaguugcagugg

SEQ ID NO: 327326 - RNA, 32 nt, Human
agucacuuauaauuaugcuaccuacugauaac

SEQ ID NO: 327327 - RNA, 32 nt, Human
agucacuuccaaguuuccaagacuucucaugg

SEQ ID NO: 327328 - RNA, 32 nt, Human
agucacuuccaguguuggcugugugacagaau

SEQ ID NO: 327329 - RNA, 32 nt, Human
agucacuucucccuccaaugcaccaucugugg

SEQ ID NO: 327330 - RNA, 32 nt, Human
agucacuucuccuccuccuuucuccagccagc

SEQ ID NO: 327331 - RNA, 32 nt, Human
agucacuugaaaucuuugcagcaaugaguugg

SEQ ID NO: 327332 - RNA, 32 nt, Human
agucacuugaagcagugugcugugaagaugga

SEQ ID NO: 327333 - RNA, 32 nt, Human
agucacuuuuuacuucucagugccaucuauaa

SEQ ID NO: 327334 - RNA, 32 nt, Human
agucagaaaacacaccuggaauacgaugcagc

SEQ ID NO: 327335 - RNA, 32 nt, Human
agucagaauucuuccagauuguuuccagcugu

SEQ ID NO: 327336 - RNA, 32 nt, Human
agucagacagcagccacagggagaggguggua

SEQ ID NO: 327337 - RNA, 18 nt, Human
agucagaccagaaagcua

SEQ ID NO: 327338 - RNA, 32 nt, Human
agucagaccagaacauacuuccacuacaucag

SEQ ID NO: 327339 - RNA, 32 nt, Human
agucagaccagaauuuucuuugucccaugagg

SEQ ID NO: 327340 - RNA, 32 nt, Human
agucagaccagcugggaugggauccugccucc

SEQ ID NO: 327341 - RNA, 32 nt, Human
agucagaccgcuugcccacugcucuggugcag

SEQ ID NO: 327342 - RNA, 32 nt, Human
agucagacucacuagacuuuugguucgaguac

SEQ ID NO: 327343 - RNA, 32 nt, Human
agucagacucugcuucuucaccuucuccuucc

SEQ ID NO: 327344 - RNA, 32 nt, Human
agucagacugcacucccgcccuauuucugcaa

SEQ ID NO: 327345 - RNA, 32 nt, Human
agucagacuuagcccugagccugcacuuccug

SEQ ID NO: 327346 - RNA, 32 nt, Human
agucagagagaccagcaaaaagauugaaaaug

SEQ ID NO: 327347 - RNA, 32 nt, Human
agucagagagguggggugagggugagcuuacu

SEQ ID NO: 327348 - RNA, 32 nt, Human
agucagagaucauccauccauucuuugaauuu

SEQ ID NO: 327349 - RNA, 32 nt, Human
agucagagccugagugcacugcagccugaacu

SEQ ID NO: 327350 - RNA, 32 nt, Human
agucagaggccugggcgcagcucuggacucug

SEQ ID NO: 327351 - RNA, 23 nt, Human
agucagaggcuggagugcaaugg

SEQ ID NO: 327352 - RNA, 32 nt, Human
agucagaggcuggagugcaauggcgugaucuu

SEQ ID NO: 327353 - RNA, 32 nt, Human
agucagauaacacuguaauccaccuccagguu

SEQ ID NO: 327354 - RNA, 32 nt, Human
agucagauacagugcucugcaggccugcugug

SEQ ID NO: 327355 - RNA, 32 nt, Human
agucagauagucuucugcugcugguaccuggg

SEQ ID NO: 327356 - RNA, 32 nt, Human
agucagaucucaggcuugucccccugucagcu

SEQ ID NO: 327357 - RNA, 32 nt, Human
agucagauugaggaugcacauauacugggaaa

SEQ ID NO: 327358 - RNA, 32 nt, Human
agucagauuuccagucuccaccaggaaccucu

SEQ ID NO: 327359 - RNA, 32 nt, Human
agucagcacaucacauccccauggcccauggc

SEQ ID NO: 327360 - RNA, 32 nt, Human
agucagcaccuuggcccaggagcucugcgcca

SEQ ID NO: 327361 - RNA, 32 nt, Human
agucagcacuuguuuagccugcuuucaauuuu

SEQ ID NO: 327362 - RNA, 32 nt, Human
agucagcagagcagggcugaggccugggggua

SEQ ID NO: 327363 - RNA, 32 nt, Human
agucagcagccuucacaccaucuacccuuaaa

SEQ ID NO: 327364 - RNA, 32 nt, Human
agucagcagggugggguggggccagaggagcu

SEQ ID NO: 327365 - RNA, 32 nt, Human
agucagcaggugaggagaaagacugaaaacua

SEQ ID NO: 327366 - RNA, 32 nt, Human
agucagcaguaagccuuuugcuaaaagaguuu

SEQ ID NO: 327367 - RNA, 32 nt, Human
agucagcagugcagagacucccagggaaggcc

SEQ ID NO: 327368 - RNA, 31 nt, Human
agucagcaguuucagauucuuacacuccaua

SEQ ID NO: 327369 - RNA, 31 nt, Human
agucagcaguuucugggcacuucucucagua

SEQ ID NO: 327370 - RNA, 32 nt, Human
agucagccaaccacagcuacauuucaggcuuu

SEQ ID NO: 327371 - RNA, 19 nt, Human
agucagccacaccuuccug

SEQ ID NO: 327372 - RNA, 32 nt, Human
agucagccagaaaucucacugccugcagcgca

SEQ ID NO: 327373 - RNA, 28 nt, Human
agucagccaggagcccucuuuuccugug

SEQ ID NO: 327374 - RNA, 32 nt, Human
agugcugggauuacagacgugagccaccacuc

SEQ ID NO: 327375 - RNA, 32 nt, Human
agugcugggauuacagacgugagccaccgugc

SEQ ID NO: 327376 - RNA, 32 nt, Human
agugcugggauuacagacgugagcgacugcgc

SEQ ID NO: 327377 - RNA, 32 nt, Human
agugcugggauuacagacgugagcuaccacac

SEQ ID NO: 327378 - RNA, 32 nt, Human
agugcugggauuacagacgugagcuaucaugc

SEQ ID NO: 327379 - RNA, 32 nt, Human
agugcugggauuacagagugugagccaccaca

SEQ ID NO: 327380 - RNA, 32 nt, Human
agugcugggauuacagaugugagccaccacac

SEQ ID NO: 327381 - RNA, 32 nt, Human
agugcugggauuacagaugugagccaccacgc

SEQ ID NO: 327382 - RNA, 32 nt, Human
agugcugggauuacagaugugagccaccaugc

SEQ ID NO: 327383 - RNA, 32 nt, Human
agugcugggauuacagaugugagccaccgcau

SEQ ID NO: 327384 - RNA, 32 nt, Human
agugcugggauuacagaugugagccacugcac

SEQ ID NO: 327385 - RNA, 32 nt, Human
agugcugggauuacagaugugagccauggugc

SEQ ID NO: 327386 - RNA, 32 nt, Human
agugcugggauuacagaugugagccauugugg

SEQ ID NO: 327387 - RNA, 32 nt, Human
agugcugggauuacagaugugagccgccgcgc

SEQ ID NO: 327388 - RNA, 32 nt, Human
agugcugggauuacagcccugagcgaccgcgc

SEQ ID NO: 327389 - RNA, 32 nt, Human
agugcugggauuacagccgugagccacugcac

SEQ ID NO: 327390 - RNA, 32 nt, Human
agugcugggauuacagcgaagagccacagcac

SEQ ID NO: 327391 - RNA, 32 nt, Human
agugcugggauuacagcgugagccaccgcacc

SEQ ID NO: 327392 - RNA, 32 nt, Human
agugcugggauuacagcgugagcuaccuggcc

SEQ ID NO: 327393 - RNA, 32 nt, Human
agugcugggauuacagcugugagccaccgugc

SEQ ID NO: 327394 - RNA, 32 nt, Human
agugcugggauuacagcugugagccacugcac

SEQ ID NO: 327395 - RNA, 32 nt, Human
agugcugggauuacagcugugagccauggcac

SEQ ID NO: 327396 - RNA, 32 nt, Human
agugcugggauuacaggaaugagccacugugc

SEQ ID NO: 327397 - RNA, 32 nt, Human
agugcugggauuacaggagugaaccaccaagc

SEQ ID NO: 327398 - RNA, 32 nt, Human
agugcugggauuacaggagugaaccaccaugc

SEQ ID NO: 327399 - RNA, 23 nt, Human
agugcugggauuacaggagugag

SEQ ID NO: 327400 - RNA, 32 nt, Human
agugcugggauuacaggagugagccaccaugu

SEQ ID NO: 327401 - RNA, 32 nt, Human
agugcugggauuacaggagugagccaccgugc

SEQ ID NO: 327402 - RNA, 32 nt, Human
agugcugggauuacaggagugagccacugcgc

SEQ ID NO: 327403 - RNA, 32 nt, Human
agugcugggauuacaggagugagccgcugcgc

SEQ ID NO: 327404 - RNA, 32 nt, Human
agugcugggauuacaggagugugccacugcgc

SEQ ID NO: 327405 - RNA, 32 nt, Human
agugcugggauuacaggaugagccacugagcc

SEQ ID NO: 327406 - RNA, 18 nt, Human
agugcugggauuacaggc

SEQ ID NO: 327407 - RNA, 32 nt, Human
agugcugggauuacaggcaagagccaccauac

SEQ ID NO: 327408 - RNA, 32 nt, Human
agugcugggauuacaggcacgagccaccgcac

SEQ ID NO: 327409 - RNA, 32 nt, Human
agugcugggauuacaggcaggagccaccgcgc

SEQ ID NO: 327410 - RNA, 32 nt, Human
agugcugggauuacaggcauaagccacagcac

SEQ ID NO: 327411 - RNA, 32 nt, Human
agugcugggauuacaggcauaagccacugcgc

SEQ ID NO: 327412 - RNA, 32 nt, Human
agugcugggauuacaggcauaagccacuguac

SEQ ID NO: 327413 - RNA, 32 nt, Human
agugcugggauuacaggcauaagccacugugc

SEQ ID NO: 327414 - RNA, 32 nt, Human
agugcugggauuacaggcaucagccaccacac

SEQ ID NO: 327415 - RNA, 32 nt, Human
agugcugggauuacaggcaucagccaccaugc

SEQ ID NO: 327416 - RNA, 32 nt, Human
agugcugggauuacaggcaucagccaccgcac

SEQ ID NO: 327417 - RNA, 32 nt, Human
agugcugggauuacaggcaucagccacuaugc

SEQ ID NO: 327418 - RNA, 32 nt, Human
agugcugggauuacaggcaugaaccacagcgc

SEQ ID NO: 327419 - RNA, 32 nt, Human
agugcugggauuacaggcaugaaccaccacgc

SEQ ID NO: 327420 - RNA, 32 nt, Human
agugcugggauuacaggcaugaaccaccaugc

SEQ ID NO: 327421 - RNA, 32 nt, Human
agugcugggauuacaggcaugaaccaccgcuc

SEQ ID NO: 327422 - RNA, 32 nt, Human
agugcugggauuacaggcaugaaccaccgugc

SEQ ID NO: 327423 - RNA, 32 nt, Human
agugcugggauuacaggcaugaaccacugugc

SEQ ID NO: 327424 - RNA, 32 nt, Human
agugcugggauuacaggcaugaaccaucauac

SEQ ID NO: 327425 - RNA, 32 nt, Human
agugcugggauuacaggcaugaaccauggugc

SEQ ID NO: 327426 - RNA, 32 nt, Human
agugcugggauuacaggcaugaaccgccaugc

SEQ ID NO: 327427 - RNA, 32 nt, Human
agugcugggauuacaggcaugacccaccgcuc

SEQ ID NO: 327428 - RNA, 23 nt, Human
agugcugggauuacaggcaugag

SEQ ID NO: 327429 - RNA, 32 nt, Human
agugcugggauuacaggcaugagccacagugc

SEQ ID NO: 327430 - RNA, 32 nt, Human
agugcugggauuacaggcaugagccaccaaac

SEQ ID NO: 327431 - RNA, 32 nt, Human
agugcugggauuacaggcaugagccaccacaa

SEQ ID NO: 327432 - RNA, 32 nt, Human
agugcugggauuacaggcaugagccaccacac

SEQ ID NO: 327433 - RNA, 32 nt, Human
agugcugggauuacaggcaugagccaccacag

SEQ ID NO: 327434 - RNA, 32 nt, Human
agugcugggauuacaggcaugagccaccacau

SEQ ID NO: 327435 - RNA, 32 nt, Human
agugcugggauuacaggcaugagccaccacgc

SEQ ID NO: 327436 - RNA, 32 nt, Human
agugcugggauuacaggcaugagccaccacgg

SEQ ID NO: 327437 - RNA, 32 nt, Human
agugcugggauuacaggcaugagccaccacuc

SEQ ID NO: 327438 - RNA, 32 nt, Human
agugcugggauuacaggcaugagccaccaggc

SEQ ID NO: 327439 - RNA, 32 nt, Human
agugcugggauuacaggcaugagccaccaucu

SEQ ID NO: 327440 - RNA, 32 nt, Human
agugcugggauuacaggcaugagccaccaugc

SEQ ID NO: 327441 - RNA, 32 nt, Human
agugcugggauuacaggcaugagccaccaugu

SEQ ID NO: 327442 - RNA, 32 nt, Human
agugcugggauuacaggcaugagccaccccgc

SEQ ID NO: 327443 - RNA, 29 nt, Human
agugcugggauuacaggcaugagccaccg

SEQ ID NO: 327444 - RNA, 32 nt, Human
agugcugggauuacaggcaugagccaccgagc

SEQ ID NO: 327445 - RNA, 32 nt, Human
agugcugggauuacaggcaugagccaccgcac

SEQ ID NO: 327446 - RNA, 32 nt, Human
agugcugggauuacaggcaugagccaccgcag

SEQ ID NO: 327447 - RNA, 32 nt, Human
agugcugggauuacaggcaugagccaccgcgc

SEQ ID NO: 327448 - RNA, 32 nt, Human
agugcugggauuacaggcaugagccaccgcuc

SEQ ID NO: 327449 - RNA, 32 nt, Human
agugcugggauuacaggcaugagccaccgugc

SEQ ID NO: 327450 - RNA, 32 nt, Human
agugcugggauuacaggcaugagccaccgugg

SEQ ID NO: 327451 - RNA, 32 nt, Human
agugcugggauuacaggcaugagccaccucac

SEQ ID NO: 327452 - RNA, 32 nt, Human
agugcugggauuacaggcaugagccaccucgc

SEQ ID NO: 327453 - RNA, 32 nt, Human
agugcugggauuacaggcaugagccacggcac

SEQ ID NO: 327454 - RNA, 32 nt, Human
agugcugggauuacaggcaugagccacggcgc

SEQ ID NO: 327455 - RNA, 32 nt, Human
agugcugggauuacaggcaugagccacugcac

SEQ ID NO: 327456 - RNA, 32 nt, Human
agugcugggauuacaggcaugagccacugcau

SEQ ID NO: 327457 - RNA, 32 nt, Human
agugcugggauuacaggcaugagccacugcgc

SEQ ID NO: 327458 - RNA, 32 nt, Human
agugcugggauuacaggcaugagccacugggc

SEQ ID NO: 327459 - RNA, 32 nt, Human
agugcugggauuacaggcaugagccacugugc

SEQ ID NO: 327460 - RNA, 32 nt, Human
agugcugggauuacaggcaugagccacugugu

SEQ ID NO: 327461 - RNA, 32 nt, Human
agugcugggauuacaggcaugagccaucacac

SEQ ID NO: 327462 - RNA, 32 nt, Human
agugcugggauuacaggcaugagccaucgccc

SEQ ID NO: 327463 - RNA, 32 nt, Human
agugcugggauuacaggcaugagccaucgcgc

SEQ ID NO: 327464 - RNA, 32 nt, Human
agugcugggauuacaggcaugagccauugcgc

SEQ ID NO: 327465 - RNA, 32 nt, Human
agugcugggauuacaggcaugagccauugugc

SEQ ID NO: 327466 - RNA, 32 nt, Human
agugcugggauuacaggcaugagcgaccgugu

SEQ ID NO: 327467 - RNA, 32 nt, Human
agugcugggauuacaggcaugagcuaccacgc

SEQ ID NO: 327468 - RNA, 32 nt, Human
agugcugggauuacaggcaugagcuaccgugc

SEQ ID NO: 327469 - RNA, 32 nt, Human
agugcugggauuacaggcaugagcuacugcac

SEQ ID NO: 327470 - RNA, 32 nt, Human
agugcugggauuacaggcaugagcuacugugc

SEQ ID NO: 327471 - RNA, 32 nt, Human
agugcugggauuacaggcaugagcugccgcac

SEQ ID NO: 327472 - RNA, 32 nt, Human
agugcugggauuacaggcaugagucaccauau

SEQ ID NO: 327473 - RNA, 32 nt, Human
agugcugggauuacaggcaugagucauugcuc

SEQ ID NO: 327474 - RNA, 32 nt, Human
agugcugggauuacaggcauggccaccacgcc

SEQ ID NO: 327475 - RNA, 23 nt, Human
agugcugggauuacaggcauggg

SEQ ID NO: 327476 - RNA, 32 nt, Human
agugcugggauuacaggcaugggccaccacgc

SEQ ID NO: 327477 - RNA, 32 nt, Human
agugcugggauuacaggcccgagccgccgcac

SEQ ID NO: 327478 - RNA, 23 nt, Human
agugcugggauuacaggccugag

SEQ ID NO: 327479 - RNA, 32 nt, Human
agugcugggauuacaggccugagcaacugugc

SEQ ID NO: 327480 - RNA, 32 nt, Human
agugcugggauuacaggccugagccaccauac

SEQ ID NO: 327481 - RNA, 32 nt, Human
agugcugggauuacaggccugagccaccaugc

SEQ ID NO: 327482 - RNA, 32 nt, Human
agugcugggauuacaggccugagccaccgcgc

SEQ ID NO: 327483 - RNA, 32 nt, Human
agugcugggauuacaggccugagccaccgcgu

SEQ ID NO: 327484 - RNA, 32 nt, Human
agugcugggauuacaggccugagccaccguau

SEQ ID NO: 327485 - RNA, 32 nt, Human
agugcugggauuacaggccugagccaccgugc

SEQ ID NO: 327486 - RNA, 32 nt, Human
agugcugggauuacaggccuggccccaguuug

SEQ ID NO: 327487 - RNA, 32 nt, Human
agugcugggauuacaggcgcaagccacccagc

SEQ ID NO: 327488 - RNA, 32 nt, Human
agugcugggauuacaggcgcaagccacuacac

SEQ ID NO: 327489 - RNA, 32 nt, Human
agugcugggauuacaggcgcgagccaccaugc

SEQ ID NO: 327490 - RNA, 32 nt, Human
agugcugggauuacaggcgcgagccaccgcgc

SEQ ID NO: 327491 - RNA, 32 nt, Human
agugcugggauuacaggcgcgagccacggcgc

SEQ ID NO: 327492 - RNA, 32 nt, Human
agugcugggauuacaggcgggagccaccauga

SEQ ID NO: 327493 - RNA, 32 nt, Human
agugcugggauuacaggcgggagccaccaugc

SEQ ID NO: 327494 - RNA, 32 nt, Human
agugcugggauuacaggcguaagccaccacac

SEQ ID NO: 327495 - RNA, 32 nt, Human
agugcugggauuacaggcguaagccacugcgc

SEQ ID NO: 327496 - RNA, 32 nt, Human
agugcugggauuacaggcgucagccaccaugc

SEQ ID NO: 327497 - RNA, 32 nt, Human
agugcugggauuacaggcgucagccaccgcgc

SEQ ID NO: 327498 - RNA, 32 nt, Human
agugcugggauuacaggcgucagccaccguga

SEQ ID NO: 327499 - RNA, 22 nt, Human
agugcugggauuacaggcguga

SEQ ID NO: 327500 - RNA, 32 nt, Human
agugcugggauuacaggcgugaaccaccaauu

SEQ ID NO: 327501 - RNA, 32 nt, Human
agugcugggauuacaggcgugaaccacugcac

SEQ ID NO: 327502 - RNA, 32 nt, Human
agugcugggauuacaggcgugaaccacugugc

SEQ ID NO: 327503 - RNA, 32 nt, Human
agugcugggauuacaggcgugaaccacugugu

SEQ ID NO: 327504 - RNA, 23 nt, Human
agugcugggauuacaggcgugag

SEQ ID NO: 327505 - RNA, 32 nt, Human
agugcugggauuacaggcgugagacacugcgc

SEQ ID NO: 327506 - RNA, 32 nt, Human
agugcugggauuacaggcgugagcaacugcac

SEQ ID NO: 327507 - RNA, 27 nt, Human
agugcugggauuacaggcgugagccac

SEQ ID NO: 327508 - RNA, 32 nt, Human
agugcugggauuacaggcgugagccacaaugc

SEQ ID NO: 327509 - RNA, 32 nt, Human
agugcugggauuacaggcgugagccacagcgc

SEQ ID NO: 327510 - RNA, 32 nt, Human
agugcugggauuacaggcgugagccacagugc

SEQ ID NO: 327511 - RNA, 32 nt, Human
agugcugggauuacaggcgugagccaccacaa

SEQ ID NO: 327512 - RNA, 32 nt, Human
agugcugggauuacaggcgugagccaccacac

SEQ ID NO: 327513 - RNA, 32 nt, Human
agugcugggauuacaggcgugagccaccacau

SEQ ID NO: 327514 - RNA, 32 nt, Human
agugcugggauuacaggcgugagccaccaccc

SEQ ID NO: 327515 - RNA, 32 nt, Human
agugcugggauuacaggcgugagccaccacgc

SEQ ID NO: 327516 - RNA, 32 nt, Human
agugcugggauuacaggcgugagccaccacgu

SEQ ID NO: 327517 - RNA, 32 nt, Human
agugcugggauuacaggcgugagccaccagcc

SEQ ID NO: 327518 - RNA, 32 nt, Human
agugcugggauuacaggcgugagccaccaggc

SEQ ID NO: 327519 - RNA, 32 nt, Human
agugcugggauuacaggcgugagccaccauac

SEQ ID NO: 327520 - RNA, 32 nt, Human
agugcugggauuacaggcgugagccaccauga

SEQ ID NO: 327521 - RNA, 32 nt, Human
agugcugggauuacaggcgugagccaccaugc

SEQ ID NO: 327522 - RNA, 32 nt, Human
agugcugggauuacaggcgugagccaccaugu

SEQ ID NO: 327523 - RNA, 32 nt, Human
agugcugggauuacaggcgugagccaccauuc

SEQ ID NO: 327524 - RNA, 32 nt, Human
agugcugggauuacaggcgugagccacccuga

SEQ ID NO: 327525 - RNA, 32 nt, Human
agugcugggauuacaggcgugagccaccgcac

SEQ ID NO: 327526 - RNA, 32 nt, Human
agugcugggauuacaggcgugagccaccgcau

SEQ ID NO: 327527 - RNA, 32 nt, Human
agugcugggauuacaggcgugagccaccgccc

SEQ ID NO: 327528 - RNA, 32 nt, Human
agugcugggauuacaggcgugagccaccgcga

SEQ ID NO: 327529 - RNA, 32 nt, Human
agugcugggauuacaggcgugagccaccgcgc

SEQ ID NO: 327530 - RNA, 32 nt, Human
agugcugggauuacaggcgugagccaccgcgg

SEQ ID NO: 327531 - RNA, 32 nt, Human
agugcugggauuacaggcgugagccaccgcgu

SEQ ID NO: 327532 - RNA, 32 nt, Human
agugcugggauuacaggcgugagccaccgcuc

SEQ ID NO: 327533 - RNA, 32 nt, Human
agugcugggauuacaggcgugagccaccgugc

SEQ ID NO: 327534 - RNA, 32 nt, Human
agugcugggauuacaggcgugagccaccgugu

SEQ ID NO: 327535 - RNA, 32 nt, Human
agugcugggauuacaggcgugagccaccucac

SEQ ID NO: 327536 - RNA, 32 nt, Human
agugcugggauuacaggcgugagccaccuugc

SEQ ID NO: 327537 - RNA, 32 nt, Human
agugcugggauuacaggcgugagccacggcgc

SEQ ID NO: 327538 - RNA, 32 nt, Human
agugcugggauuacaggcgugagccacuacac

SEQ ID NO: 327539 - RNA, 32 nt, Human
agugcugggauuacaggcgugagccacuccac

SEQ ID NO: 327540 - RNA, 32 nt, Human
agugcugggauuacaggcgugagccacugagc

SEQ ID NO: 327541 - RNA, 32 nt, Human
agugcugggauuacaggcgugagccacugcac

SEQ ID NO: 327542 - RNA, 32 nt, Human
agugcugggauuacaggcgugagccacugcau

SEQ ID NO: 327543 - RNA, 32 nt, Human
agugcugggauuacaggcgugagccacugccc

SEQ ID NO: 327544 - RNA, 32 nt, Human
agugcugggauuacaggcgugagccacugcgc

SEQ ID NO: 327545 - RNA, 32 nt, Human
agugcugggauuacaggcgugagccacugcgu

SEQ ID NO: 327546 - RNA, 32 nt, Human
agugcugggauuacaggcgugagccacugcuc

SEQ ID NO: 327547 - RNA, 32 nt, Human
agugcugggauuacaggcgugagccacuggcc

SEQ ID NO: 327548 - RNA, 32 nt, Human
agugcugggauuacaggcgugagccacugggc

SEQ ID NO: 327549 - RNA, 32 nt, Human
agugcugggauuacaggcgugagccacugugc

SEQ ID NO: 327550 - RNA, 32 nt, Human
agugcugggauuacaggcgugagccacugugg

SEQ ID NO: 327551 - RNA, 32 nt, Human
agugcugggauuacaggcgugagccaucgcuu

SEQ ID NO: 327552 - RNA, 32 nt, Human
agugcugggauuacaggcgugagccauggcgc

SEQ ID NO: 327553 - RNA, 32 nt, Human
agugcugggauuacaggcgugagccgccgugc

SEQ ID NO: 327554 - RNA, 32 nt, Human
agugcugggauuacaggcgugagccgcugcac

SEQ ID NO: 327555 - RNA, 32 nt, Human
agugcugggauuacaggcgugagcuaccaagc

SEQ ID NO: 327556 - RNA, 32 nt, Human
agugcugggauuacaggcgugagcuaccacca

SEQ ID NO: 327557 - RNA, 32 nt, Human
agugcugggauuacaggcgugagcuaccacgc

SEQ ID NO: 327558 - RNA, 32 nt, Human
agugcugggauuacaggcgugagcuaccgcac

SEQ ID NO: 327559 - RNA, 32 nt, Human
agugcugggauuacaggcgugagcuaccgcgc

SEQ ID NO: 327560 - RNA, 32 nt, Human
agugcugggauuacaggcgugaggcaccgcgc

SEQ ID NO: 327561 - RNA, 32 nt, Human
agugcugggauuacaggcgugaggcaucacac

SEQ ID NO: 327562 - RNA, 32 nt, Human
agugcugggauuacaggcgugagucacagccc

SEQ ID NO: 327563 - RNA, 32 nt, Human
agugcugggauuacaggcgugagucaccacac

SEQ ID NO: 327564 - RNA, 32 nt, Human
agugcugggauuacaggcgugagucaccgcgc

SEQ ID NO: 327565 - RNA, 32 nt, Human
agugcugggauuacaggcgugagucaccgcgu

SEQ ID NO: 327566 - RNA, 32 nt, Human
agugcugggauuacaggcgugagucaccgugc

SEQ ID NO: 327567 - RNA, 32 nt, Human
agugcugggauuacaggcgugagucacugcaa

SEQ ID NO: 327568 - RNA, 32 nt, Human
agugcugggauuacaggcgugagucacugcac

SEQ ID NO: 327569 - RNA, 32 nt, Human
agugcugggauuacaggcgugagucacugcgc

SEQ ID NO: 327570 - RNA, 32 nt, Human
agugcugggauuacaggcgugauccaccacac

SEQ ID NO: 327571 - RNA, 32 nt, Human
agugcugggauuacaggcgugaugcccgggcc

SEQ ID NO: 327572 - RNA, 32 nt, Human
agugcugggauuacaggcguggccaccgcacc

SEQ ID NO: 327573 - RNA, 32 nt, Human
agugcugggauuacaggcguggccaccgcgcc

SEQ ID NO: 327574 - RNA, 32 nt, Human
agugcugggauuacaggcgugggccacugcgc

SEQ ID NO: 327575 - RNA, 32 nt, Human
agugcugggauuacaggcgugggccgccgcac

SEQ ID NO: 327576 - RNA, 32 nt, Human
agugcugggauuacaggcgugugagccaccac

SEQ ID NO: 327577 - RNA, 32 nt, Human
agugcugggauuacaggcgugugccaccaccc

SEQ ID NO: 327578 - RNA, 32 nt, Human
agugcugggauuacaggcguuagccacugcgc

SEQ ID NO: 327579 - RNA, 32 nt, Human
agugcugggauuacaggcuuaagccaccacgc

SEQ ID NO: 327580 - RNA, 32 nt, Human
agugcugggauuacaggcuuacgccaccacac

SEQ ID NO: 327581 - RNA, 32 nt, Human
agugcugggauuacaggcuucagccaccacac

SEQ ID NO: 327582 - RNA, 32 nt, Human
agugcugggauuacaggcuugacccacugcgc

SEQ ID NO: 327583 - RNA, 32 nt, Human
agugcugggauuacaggcuugagccaccacac

SEQ ID NO: 327584 - RNA, 32 nt, Human
agugcugggauuacaggcuugagccaccacgc

SEQ ID NO: 327585 - RNA, 32 nt, Human
agugcugggauuacaggcuugagccaccgcac

SEQ ID NO: 327586 - RNA, 32 nt, Human
agugcugggauuacaggcuugagccaccgcgc

SEQ ID NO: 327587 - RNA, 32 nt, Human
agugcugggauuacaggcuugagccaccgggu

SEQ ID NO: 327588 - RNA, 32 nt, Human
agugcugggauuacaggcuugagccaccgugc

SEQ ID NO: 327589 - RNA, 32 nt, Human
agugcugggauuacaggcuugagccacugcuc

SEQ ID NO: 327590 - RNA, 32 nt, Human
agugcugggauuacaggcuugagccacugugc

SEQ ID NO: 327591 - RNA, 32 nt, Human
agugcugggauuacaggcuugagcuaccgcgc

SEQ ID NO: 327592 - RNA, 32 nt, Human
agugcugggauuacaggcuugggccaccgcgc

SEQ ID NO: 327593 - RNA, 32 nt, Human
agugcugggauuacagggauaagccaccacac

SEQ ID NO: 327594 - RNA, 32 nt, Human
agugcugggauuacagggaugagccaccaugc

SEQ ID NO: 327595 - RNA, 32 nt, Human
agugcugggauuacagggaugagccaccgcgc

SEQ ID NO: 327596 - RNA, 32 nt, Human
agugcugggauuacaggggagccacugcacug

SEQ ID NO: 327597 - RNA, 32 nt, Human
agugcugggauuacagggggagccacugugcc

SEQ ID NO: 327598 - RNA, 32 nt, Human
agugcugggauuacaggggugagccaccacgc

SEQ ID NO: 327599 - RNA, 32 nt, Human
agugcugggauuacaggggugagccgcugugc

SEQ ID NO: 327600 - RNA, 18 nt, Human
agugcugggauuacaggu

SEQ ID NO: 327601 - RNA, 32 nt, Human
agugcugggauuacagguacgagucaccaugu

SEQ ID NO: 327602 - RNA, 32 nt, Human
agugcugggauuacagguaucagccaccgugc

SEQ ID NO: 327603 - RNA, 32 nt, Human
agugcugggauuacagguaugagccacaacgc

SEQ ID NO: 327604 - RNA, 32 nt, Human
agugcugggauuacagguaugagccaccacgc

SEQ ID NO: 327605 - RNA, 32 nt, Human
agugcugggauuacagguaugagccaccgcac

SEQ ID NO: 327606 - RNA, 19 nt, Human
agugcugggauuacaggug

SEQ ID NO: 327607 - RNA, 32 nt, Human
agugcugggauuacaggugcgagccaccgugc

SEQ ID NO: 327608 - RNA, 32 nt, Human
agugcugggauuacaggugggagccacaacac

SEQ ID NO: 327609 - RNA, 32 nt, Human
agugcugggauuacaggugggagccaccgcac

SEQ ID NO: 327610 - RNA, 32 nt, Human
agugcugggauuacaggugggagccacuacag

SEQ ID NO: 327611 - RNA, 32 nt, Human
agugcugggauuacagguguaagccaccccgc

SEQ ID NO: 327612 - RNA, 32 nt, Human
agugcugggauuacagguguaagccaccgcac

SEQ ID NO: 327613 - RNA, 32 nt, Human
agugcugggauuacagguguaagccaccgugc

SEQ ID NO: 327614 - RNA, 32 nt, Human
agugcugggauuacagguguaagccacugcgc

SEQ ID NO: 327615 - RNA, 32 nt, Human
agugcugggauuacagguguaagccacugugc

SEQ ID NO: 327616 - RNA, 32 nt, Human
agugcugggauuacagguguaagccgccacgc

SEQ ID NO: 327617 - RNA, 32 nt, Human
agugcugggauuacagguguaagucacuguac

SEQ ID NO: 327618 - RNA, 32 nt, Human
agugcugggauuacaggugucagccaccacgc

SEQ ID NO: 327619 - RNA, 32 nt, Human
agugcugggauuacaggugucagccaccgcac

SEQ ID NO: 327620 - RNA, 32 nt, Human
agugcugggauuacaggugucagccacuacac

SEQ ID NO: 327621 - RNA, 22 nt, Human
agugcugggauuacagguguga

SEQ ID NO: 327622 - RNA, 32 nt, Human
agugcugggauuacaggugugaaccaccacac

SEQ ID NO: 327623 - RNA, 32 nt, Human
agugcugggauuacaggugugaaccacugcgc

SEQ ID NO: 327624 - RNA, 32 nt, Human
agugcugggauuacaggugugaaucaccauac

SEQ ID NO: 327625 - RNA, 32 nt, Human
agugcugggauuacaggugugacccacugcgc

SEQ ID NO: 327626 - RNA, 23 nt, Human
agugcugggauuacaggugugag

SEQ ID NO: 327627 - RNA, 32 nt, Human
agugcugggauuacaggugugagcaaccauug

SEQ ID NO: 327628 - RNA, 32 nt, Human
agugcugggauuacaggugugagccacagcac

SEQ ID NO: 327629 - RNA, 32 nt, Human
agugcugggauuacaggugugagccacagcgc

SEQ ID NO: 327630 - RNA, 32 nt, Human
agugcugggauuacaggugugagccacagugc

SEQ ID NO: 327631 - RNA, 32 nt, Human
agugcugggauuacaggugugagccaccacac

SEQ ID NO: 327632 - RNA, 32 nt, Human
agugcugggauuacaggugugagccaccacag

SEQ ID NO: 327633 - RNA, 32 nt, Human
agugcugggauuacaggugugagccaccacgc

SEQ ID NO: 327634 - RNA, 32 nt, Human
agugcugggauuacaggugugagccaccaggc

SEQ ID NO: 327635 - RNA, 32 nt, Human
agugcugggauuacaggugugagccaccaugc

SEQ ID NO: 327636 - RNA, 32 nt, Human
agugcugggauuacaggugugagccaccaugu

SEQ ID NO: 327637 - RNA, 32 nt, Human
agugcugggauuacaggugugagccaccgcac

SEQ ID NO: 327638 - RNA, 32 nt, Human
agugcugggauuacaggugugagccaccgcgc

SEQ ID NO: 327639 - RNA, 32 nt, Human
agugcugggauuacaggugugagccaccgugc

SEQ ID NO: 327640 - RNA, 32 nt, Human
agugcugggauuacaggugugagccaccucgc

SEQ ID NO: 327641 - RNA, 32 nt, Human
agugcugggauuacaggugugagccacggcac

SEQ ID NO: 327642 - RNA, 32 nt, Human
agugcugggauuacaggugugagccacuacac

SEQ ID NO: 327643 - RNA, 32 nt, Human
agugcugggauuacaggugugagccacuauac

SEQ ID NO: 327644 - RNA, 32 nt, Human
agugcugggauuacaggugugagccacuaugc

SEQ ID NO: 327645 - RNA, 32 nt, Human
agugcugggauuacaggugugagccacugagc

SEQ ID NO: 327646 - RNA, 32 nt, Human
agugcugggauuacaggugugagccacugcac

SEQ ID NO: 327647 - RNA, 32 nt, Human
agugcugggauuacaggugugagccacugccu

SEQ ID NO: 327648 - RNA, 32 nt, Human
agugcugggauuacaggugugagccacugcgc

SEQ ID NO: 327649 - RNA, 32 nt, Human
agugcugggauuacaggugugagccacugggc

SEQ ID NO: 327650 - RNA, 32 nt, Human
agugcugggauuacaggugugagccacugugc

SEQ ID NO: 327651 - RNA, 32 nt, Human
agugcugggauuacaggugugagccacugugg

SEQ ID NO: 327652 - RNA, 32 nt, Human
agugcugggauuacaggugugagccacuucac

SEQ ID NO: 327653 - RNA, 32 nt, Human
agugcugggauuacaggugugagccaucacac

SEQ ID NO: 327654 - RNA, 32 nt, Human
agugcugggauuacaggugugagccaucacgc

SEQ ID NO: 327655 - RNA, 32 nt, Human
agugcugggauuacaggugugagccauggcac

SEQ ID NO: 327656 - RNA, 32 nt, Human
agugcugggauuacaggugugagccgccaugc

SEQ ID NO: 327657 - RNA, 32 nt, Human
agugcugggauuacaggugugagccgcugcgc

SEQ ID NO: 327658 - RNA, 32 nt, Human
agugcugggauuacaggugugagccgcugggc

SEQ ID NO: 327659 - RNA, 32 nt, Human
agugcugggauuacaggugugagcuaccgcac

SEQ ID NO: 327660 - RNA, 32 nt, Human
agugcugggauuacaggugugagcuaccgcgc

SEQ ID NO: 327661 - RNA, 32 nt, Human
agugcugggauuacaggugugagcuacugcgc

SEQ ID NO: 327662 - RNA, 32 nt, Human
agugcugggauuacaggugugagcuacugugc

SEQ ID NO: 327663 - RNA, 32 nt, Human
agugcugggauuacaggugugagcugccacgc

SEQ ID NO: 327664 - RNA, 32 nt, Human
agugcugggauuacaggugugagcugccgcac

SEQ ID NO: 327665 - RNA, 32 nt, Human
agugcugggauuacaggugugaggcaccgugc

SEQ ID NO: 327666 - RNA, 32 nt, Human
agugcugggauuacaggugugaggcacggugc

SEQ ID NO: 327667 - RNA, 32 nt, Human
agugcugggauuacaggugugagucaccacac

SEQ ID NO: 327668 - RNA, 32 nt, Human
agugcugggauuacaggugugagucaccacau

SEQ ID NO: 327669 - RNA, 32 nt, Human
agugcugggauuacaggugugagucaccccgc

SEQ ID NO: 327670 - RNA, 32 nt, Human
agugcugggauuacaggugugagucaccgcgc

SEQ ID NO: 327671 - RNA, 32 nt, Human
agugcugggauuacaggugugagucaccgugc

SEQ ID NO: 327672 - RNA, 32 nt, Human
agugcugggauuacaggugugagucacugcac

SEQ ID NO: 327673 - RNA, 32 nt, Human
agugcugggauuacaggugugcgccaccaugc

SEQ ID NO: 327674 - RNA, 32 nt, Human
agugcugggauuacagguguggccaccgcgcc

SEQ ID NO: 327675 - RNA, 32 nt, Human
agugcugggauuacaggugugggagccaccau

SEQ ID NO: 327676 - RNA, 32 nt, Human
agugcugggauuacagguuugagccacugcac

SEQ ID NO: 327677 - RNA, 32 nt, Human
agugcugggauuacagucaugagccaccacuc

SEQ ID NO: 327678 - RNA, 32 nt, Human
agugcugggauuacagucaugagccaccaugc

SEQ ID NO: 327679 - RNA, 32 nt, Human
agugcugggauuacagucaugagucaccaugc

SEQ ID NO: 327680 - RNA, 32 nt, Human
agugcugggauuacagucgugagccacuguac

SEQ ID NO: 327681 - RNA, 32 nt, Human
agugcugggauuacaguugcgagccaccgcgc

SEQ ID NO: 327682 - RNA, 32 nt, Human
agugcugggauuacaguugugagccacugugc

SEQ ID NO: 327683 - RNA, 32 nt, Human
agugcugggauuacaguugugagucacugugc

SEQ ID NO: 327684 - RNA, 32 nt, Human
agugcugggauuacaugagccaccacaugcag

SEQ ID NO: 327685 - RNA, 32 nt, Human
agugcugggauuacaugcgugagccacugcgc

SEQ ID NO: 327686 - RNA, 32 nt, Human
agugcugggauuacaugugugagccaccgccc

SEQ ID NO: 327687 - RNA, 32 nt, Human
agugcugggauuaccggcaugagccacugcgc

SEQ ID NO: 327688 - RNA, 23 nt, Human
agugcugggauuaccggcgugag

SEQ ID NO: 327689 - RNA, 32 nt, Human
agugcugggauuaccggcgugagccaccaugc

SEQ ID NO: 327690 - RNA, 32 nt, Human
agugcugggauuaccggcuugagccaccacac

SEQ ID NO: 327691 - RNA, 32 nt, Human
agugcugggauuaccgguaugaaccaccacaa

SEQ ID NO: 327692 - RNA, 32 nt, Human
agugcugggauuacgagcgugagucacagcac

SEQ ID NO: 327693 - RNA, 32 nt, Human
agugcugggauuacggacgugagccaccacgc

SEQ ID NO: 327694 - RNA, 32 nt, Human
agugcugggauuacgggcaugagccacugcac

SEQ ID NO: 327695 - RNA, 32 nt, Human
agugcugggauuacgggcaugagcugcugugc

SEQ ID NO: 327696 - RNA, 32 nt, Human
agugcugggauuacgggcgugagccaccgcgc

SEQ ID NO: 327697 - RNA, 32 nt, Human
agugcugggauuacgggcgugagccaccgugc

SEQ ID NO: 327698 - RNA, 32 nt, Human
agugcugggauuacgggggugagccacugcgc

SEQ ID NO: 327699 - RNA, 32 nt, Human
agugcugggauuacgggugugagccaccgugc

SEQ ID NO: 327700 - RNA, 32 nt, Human
agugcugggauuacgguguuagccacuacacc

SEQ ID NO: 327701 - RNA, 18 nt, Human
agugcugggauuacguga

SEQ ID NO: 327702 - RNA, 32 nt, Human
agugcugggauuacuagacguaagccaccaca

SEQ ID NO: 327703 - RNA, 32 nt, Human
agugcugggauuacugacaugagccaccacac

SEQ ID NO: 327704 - RNA, 32 nt, Human
agugcugggauuacuggcaugagccacugugc

SEQ ID NO: 327705 - RNA, 32 nt, Human
agugcugggauuacuggcgucagccaccgcgc

SEQ ID NO: 327706 - RNA, 32 nt, Human
agugcugggauuacuggcgugagccaccgugc

SEQ ID NO: 327707 - RNA, 32 nt, Human
agugcugggauuacugguaugaaccaccacgc

SEQ ID NO: 327708 - RNA, 32 nt, Human
agugcugggauuacuggugugagccaccacgg

SEQ ID NO: 327709 - RNA, 32 nt, Human
agugcugggauuagaagcgugagccaccacgc

SEQ ID NO: 327710 - RNA, 23 nt, Human
agugcugggauuagaggcaugag

SEQ ID NO: 327711 - RNA, 32 nt, Human
agugcugggauuagaggcaugagccaccgugc

SEQ ID NO: 327712 - RNA, 32 nt, Human
agugcugggauuagaggcaugagccacugcgc

SEQ ID NO: 327713 - RNA, 32 nt, Human
agugcugggauuagaggcaugagccacugucc

SEQ ID NO: 327714 - RNA, 32 nt, Human
agugcugggauuagaggcgugagccacugcac

SEQ ID NO: 327715 - RNA, 32 nt, Human
agugcugggauuagaggcuugagccaccaggc

SEQ ID NO: 327716 - RNA, 32 nt, Human
agugcugggauuagaggcuugagccacugcac

SEQ ID NO: 327717 - RNA, 32 nt, Human
agugcugggauuagaggugugagccaccacgc

SEQ ID NO: 327718 - RNA, 32 nt, Human
agugcugggauuaggugugagccaccgcaccu

SEQ ID NO: 327719 - RNA, 32 nt, Human
agugcugggauuauacaugugagccaccgugc

SEQ ID NO: 327720 - RNA, 32 nt, Human
agugcugggauuauacguaugggccucugcuc

SEQ ID NO: 327721 - RNA, 32 nt, Human
agugcugggauuauagaugugagccaccgcgc

SEQ ID NO: 327722 - RNA, 32 nt, Human
agugcugggauuauaggagugagccaccgcgc

SEQ ID NO: 327723 - RNA, 32 nt, Human
agugcugggauuauaggcaagagcgauggcgc

SEQ ID NO: 327724 - RNA, 32 nt, Human
agugcugggauuauaggcacaagacaccacaa

SEQ ID NO: 327725 - RNA, 32 nt, Human
agugcugggauuauaggcaugaaccaccgugc

SEQ ID NO: 327726 - RNA, 32 nt, Human
agugcugggauuauaggcaugaaccaccgugu

SEQ ID NO: 327727 - RNA, 32 nt, Human
agugcugggauuauaggcaugaaccacugugc

SEQ ID NO: 327728 - RNA, 32 nt, Human
agugcugggauuauaggcaugagccaccacac

SEQ ID NO: 327729 - RNA, 32 nt, Human
agugcugggauuauaggcaugagccaccaugc

SEQ ID NO: 327730 - RNA, 32 nt, Human
agugcugggauuauaggcaugagccaccgugc

SEQ ID NO: 327731 - RNA, 32 nt, Human
agugcugggauuauaggcaugagccacugcac

SEQ ID NO: 327732 - RNA, 32 nt, Human
agugcugggauuauaggcaugagccacugggc

SEQ ID NO: 327733 - RNA, 32 nt, Human
agugcugggauuauaggcaugagucacuguac

SEQ ID NO: 327734 - RNA, 32 nt, Human
agugcugggauuauaggcaugcgccaccaugc

SEQ ID NO: 327735 - RNA, 32 nt, Human
agugcugggauuauaggcaugugccaccacau

SEQ ID NO: 327736 - RNA, 32 nt, Human
agugcugggauuauaggccugagcccaccgug

SEQ ID NO: 327737 - RNA, 32 nt, Human
agugcugggauuauaggcguaagccaccacac

SEQ ID NO: 327738 - RNA, 32 nt, Human
agugcugggauuauaggcguaagccaccaugc

SEQ ID NO: 327739 - RNA, 32 nt, Human
agugcugggauuauaggcguaagccacugugu

SEQ ID NO: 327740 - RNA, 32 nt, Human
agugcugggauuauaggcgugagacaccgcgc

SEQ ID NO: 327741 - RNA, 32 nt, Human
agugcugggauuauaggcgugagccaccacac

SEQ ID NO: 327742 - RNA, 32 nt, Human
agugcugggauuauaggcgugagccaccaugc

SEQ ID NO: 327743 - RNA, 32 nt, Human
agugcugggauuauaggcgugagccaccgcac

SEQ ID NO: 327744 - RNA, 32 nt, Human
agugcugggauuauaggcgugagccaccgcgc

SEQ ID NO: 327745 - RNA, 32 nt, Human
agugcugggauuauaggcgugagccaccgugc

SEQ ID NO: 327746 - RNA, 32 nt, Human
agugcugggauuauaggcgugagccacugcgc

SEQ ID NO: 327747 - RNA, 32 nt, Human
agugcugggauuauaggcgugagccucuggcc

SEQ ID NO: 327748 - RNA, 32 nt, Human
agugcugggauuauaggcgugagcucccguac

SEQ ID NO: 327749 - RNA, 32 nt, Human
agugcugggauuauaggcgugagucaccaugc

SEQ ID NO: 327750 - RNA, 32 nt, Human
agugcugggauuauaggcgugugccauggugc

SEQ ID NO: 327751 - RNA, 32 nt, Human
agugcugggauuauaggcuugagccaccacgg

SEQ ID NO: 327752 - RNA, 32 nt, Human
agugcugggauuauagggaugagucacugugc

SEQ ID NO: 327753 - RNA, 19 nt, Human
agugcugggauuauaggug

SEQ ID NO: 327754 - RNA, 32 nt, Human
agugcugggauuauaggugugagccaccacac

SEQ ID NO: 327755 - RNA, 32 nt, Human
agugcugggauuauaggugugagccaccaugc

SEQ ID NO: 327756 - RNA, 32 nt, Human
agugcugggauuauaggugugagccacccugc

SEQ ID NO: 327757 - RNA, 32 nt, Human
agugcugggauuauaggugugagccaccgcac

SEQ ID NO: 327758 - RNA, 32 nt, Human
agugcugggauuauaggugugagccaccgcgc

SEQ ID NO: 327759 - RNA, 32 nt, Human
agugcugggauuauaggugugagccacugcac

SEQ ID NO: 327760 - RNA, 32 nt, Human
agugcugggauuauaggugugagccacugcgc

SEQ ID NO: 327761 - RNA, 32 nt, Human
agugcugggauuauaggugugagccacugcuc

SEQ ID NO: 327762 - RNA, 32 nt, Human
agugcugggauuauaggugugagcccccacgc

SEQ ID NO: 327763 - RNA, 32 nt, Human
agugcugggauuauaggugugagcccccgugc

SEQ ID NO: 327764 - RNA, 32 nt, Human
agugcugggauuauaggugugcgccaccacac

SEQ ID NO: 327765 - RNA, 32 nt, Human
agugcugggauuaucaauaugagccaccaugc

SEQ ID NO: 327766 - RNA, 32 nt, Human
agugcugggauuauggacgugagccaccacac

SEQ ID NO: 327767 - RNA, 32 nt, Human
agugcugggauuccaggcgugagccacugcgc

SEQ ID NO: 327768 - RNA, 32 nt, Human
agugcugggauuccaggcgugagccacugcgg

SEQ ID NO: 327769 - RNA, 19 nt, Human
agugcugggauuccaggug

SEQ ID NO: 327770 - RNA, 32 nt, Human
agugcugggauuccaggugugagccacuucac

SEQ ID NO: 327771 - RNA, 32 nt, Human
agugcugggauucugggugugagccacuguca

SEQ ID NO: 327772 - RNA, 32 nt, Human
agugcugggauugcaggcaugagccaccaugc

SEQ ID NO: 327773 - RNA, 32 nt, Human
agugcugggauugcaggcaugagccaccgcgc

SEQ ID NO: 327774 - RNA, 32 nt, Human
agugcugggauugcaggcaugagccaccgugc

SEQ ID NO: 327775 - RNA, 32 nt, Human
agugcugggauugcaggcaugagccacugcac

SEQ ID NO: 327776 - RNA, 32 nt, Human
agugcugggauugcaggcaugagccacugcuc

SEQ ID NO: 327777 - RNA, 32 nt, Human
agugcugggauugcaggcgugagccaccacac

SEQ ID NO: 327778 - RNA, 32 nt, Human
agugcugggauugcaggcgugagccaccacgc

SEQ ID NO: 327779 - RNA, 32 nt, Human
agugcugggauugcaggcgugagccaccaggc

SEQ ID NO: 327780 - RNA, 32 nt, Human
agugcugggauugcaggcgugagccaccaugc

SEQ ID NO: 327781 - RNA, 32 nt, Human
agugcugggauugcaggcgugagccaccgugc

SEQ ID NO: 327782 - RNA, 32 nt, Human
agugcugggauugcaggcgugagccacugcac

SEQ ID NO: 327783 - RNA, 32 nt, Human
agugcugggauugcaggcgugagccacuuucc

SEQ ID NO: 327784 - RNA, 19 nt, Human
agugcugggauugcaggug

SEQ ID NO: 327785 - RNA, 32 nt, Human
agugcugggauugcaggugugagccaccacgc

SEQ ID NO: 327786 - RNA, 32 nt, Human
agugcugggauugcaggugugagccaccgcac

SEQ ID NO: 327787 - RNA, 32 nt, Human
agugcugggauugugggugugagccaccgcgc

SEQ ID NO: 327788 - RNA, 24 nt, Human
agugcugggauuuacaggcaugag

SEQ ID NO: 327789 - RNA, 32 nt, Human
agugcugggauuucaggcgugagccaccacac

SEQ ID NO: 327790 - RNA, 32 nt, Human
agugcugggcaguacuccccuaggcagaucca

SEQ ID NO: 327791 - RNA, 32 nt, Human
agugcugggcccugugccuguugcaugagccu

SEQ ID NO: 327792 - RNA, 32 nt, Human
agugcugggcuauuccgggcucaguggucuug

SEQ ID NO: 327793 - RNA, 23 nt, Human
agugcugggcucccagacaaaug

SEQ ID NO: 327794 - RNA, 32 nt, Human
agugcuggggucggggagagccugacacacuc

SEQ ID NO: 327795 - RNA, 32 nt, Human
agugcugggguuacaggcaugagccaccacac

SEQ ID NO: 327796 - RNA, 32 nt, Human
agugcugggguuacaggcgugagccaccgcac

SEQ ID NO: 327797 - RNA, 19 nt, Human
agugcugggguuacaggug

SEQ ID NO: 327798 - RNA, 32 nt, Human
agugcugggguuacaggugugagccacugcac

SEQ ID NO: 327799 - RNA, 32 nt, Human
agugcugggguuacaggugugagccacugcgc

SEQ ID NO: 327800 - RNA, 32 nt, Human
agugcugggguuaugggugugagccaccgcgc

SEQ ID NO: 327801 - RNA, 32 nt, Human
agugcuggguuuacaggcaugagccaccacac

SEQ ID NO: 327802 - RNA, 32 nt, Human
agugcugguaaauaguuugcuguaguggaaag

SEQ ID NO: 327803 - RNA, 32 nt, Human
agugcugguaaauuauuuuuaaugauuugagu

SEQ ID NO: 327804 - RNA, 32 nt, Human
agugcugguauuacaggcgugagccaccaugc

SEQ ID NO: 327805 - RNA, 32 nt, Human
agugcugguauuacaggugugagccacugugu

SEQ ID NO: 327806 - RNA, 32 nt, Human
agugcuggucgaggcaggcgcccagcuggacg

SEQ ID NO: 327807 - RNA, 32 nt, Human
agugcugguuaguucccgcccccugguaaacc

SEQ ID NO: 327808 - RNA, 32 nt, Human
agugcuguaaggagagguuggaagugaagaug

SEQ ID NO: 327809 - RNA, 32 nt, Human
agugcuguagccuggccagaccccagagcccu

SEQ ID NO: 327810 - RNA, 32 nt, Human
agugcuguccccaggcugcaguucuggucccu

SEQ ID NO: 327811 - RNA, 32 nt, Human
agugcugugauuacaggugugagccacugcac

SEQ ID NO: 327812 - RNA, 32 nt, Human
agugcugugauuaccggugugagccacugcgc

SEQ ID NO: 327813 - RNA, 32 nt, Human
agugcugugcugcugcuggucuccugauggcu

SEQ ID NO: 327814 - RNA, 32 nt, Human
agugcuguggaucuggagaagcuggaagccag

SEQ ID NO: 327815 - RNA, 32 nt, Human
agugcugugguggaguggaguggcuauucaca

SEQ ID NO: 327816 - RNA, 32 nt, Human
agugcuguuuccuggcuggagugcaguggcau

SEQ ID NO: 327817 - RNA, 16 nt, Human
agugcuguuugaacug

SEQ ID NO: 327818 - RNA, 32 nt, Human
agugcuuagcucaagaggaaagaaggaaaauc

SEQ ID NO: 327819 - RNA, 32 nt, Human
agugcuuagcucucucccuccugaccucuggg

SEQ ID NO: 327820 - RNA, 32 nt, Human
agugcuucaaccacugcucucccugcucuacu

SEQ ID NO: 327821 - RNA, 32 nt, Human
agugcuucaacgaugugacugccaucaucuuc

SEQ ID NO: 327822 - RNA, 32 nt, Human
agugcuuccaaaggagggugcauccugagaga

SEQ ID NO: 327823 - RNA, 17 nt, Human
agugcuucccugaacug

SEQ ID NO: 327824 - RNA, 32 nt, Human
agugcuuccucuggagaggcagcuccacgagg

SEQ ID NO: 327825 - RNA, 32 nt, Human
agugcuucucauauugccccaggacagauguc

SEQ ID NO: 327826 - RNA, 32 nt, Human
agugcuucugcuugcccugccccaggcagccc

SEQ ID NO: 327827 - RNA, 32 nt, Human
agugcuucugguuucagcacacauggagauau

SEQ ID NO: 327828 - RNA, 32 nt, Human
agugcuucuuucacuccaccaccuacagcugg

SEQ ID NO: 327829 - RNA, 32 nt, Human
agugcuuggauuacaggcaugagccaccgcac

SEQ ID NO: 327830 - RNA, 19 nt, Human
agugcuuggauuacaggug

SEQ ID NO: 327831 - RNA, 32 nt, Human
agugcuuggauuacaggugugagccacugugu

SEQ ID NO: 327832 - RNA, 32 nt, Human
agugcuuggauuauaggcgugagccaccgcac

SEQ ID NO: 327833 - RNA, 32 nt, Human
agugcuuggauugcaggcaugagccacuucgc

SEQ ID NO: 327834 - RNA, 32 nt, Human
agugcuuguagcagccaucccccagccccagg

SEQ ID NO: 327835 - RNA, 32 nt, Human
agugcuugucauccucuucccugccucugucu

SEQ ID NO: 327836 - RNA, 32 nt, Human
agugcuuuaccuaaguguggauugugccucuu

SEQ ID NO: 327837 - RNA, 32 nt, Human
agugcuuuaccuaaguguugauugugccuguu

SEQ ID NO: 327838 - RNA, 31 nt, Human
agugcuuucaaguggauucuguugaagaaaa

SEQ ID NO: 327839 - RNA, 32 nt, Human
agugcuuuccccagcaccccagagccagucgg

SEQ ID NO: 327840 - RNA, 32 nt, Human
agugcuuugagagagaaaggacuccugaaaaa

SEQ ID NO: 327841 - RNA, 23 nt, Human
agugcuuuguuauguuuuauuaa

SEQ ID NO: 327842 - RNA, 32 nt, Human
agugcuuuucaccaaucccacucacccccggu

SEQ ID NO: 327843 - RNA, 32 nt, Human
aguggaaaaagcaauggagaagaaaaguugcu

SEQ ID NO: 327844 - RNA, 32 nt, Human
aguggaaaaagucccugagggcgguuaggagu

SEQ ID NO: 327845 - RNA, 32 nt, Human
aguggaaaacaguuaaugaccagccacggcgu

SEQ ID NO: 327846 - RNA, 32 nt, Human
aguggaaacuauucuaucauaacuacccaagg

SEQ ID NO: 327847 - RNA, 32 nt, Human
aguggaaagaggaugggcgaggaggccgggcu

SEQ ID NO: 327848 - RNA, 32 nt, Human
aguggaaauucugccgagccucuugucccuuc

SEQ ID NO: 327849 - RNA, 32 nt, Human
aguggaacagaugaaagaggccagcagaccca

SEQ ID NO: 327850 - RNA, 32 nt, Human
aguggaaccagcugccccugcuucacaccucu

SEQ ID NO: 327851 - RNA, 32 nt, Human
aguggaaccuggcucuggggagaagccgcgug

SEQ ID NO: 327852 - RNA, 21 nt, Human
aguggaacuaagccugcucca

SEQ ID NO: 327853 - RNA, 32 nt, Human
aguggaacuucacuucaucacagagugucagg

SEQ ID NO: 327854 - RNA, 32 nt, Human
aguggaagaagagggagagauggagcaaagug

SEQ ID NO: 327855 - RNA, 32 nt, Human
aguggaagacagagauggcagagccauccacc

SEQ ID NO: 327856 - RNA, 32 nt, Human
aguggaagagguaccaggagucacucaguuug

SEQ ID NO: 327857 - RNA, 32 nt, Human
aguggaagagguggcggggaccagcugggcag

SEQ ID NO: 327858 - RNA, 32 nt, Human
aguggaagcgaggaagaaggaggaguucccuc

SEQ ID NO: 327859 - RNA, 32 nt, Human
aguggaagcugcagugagccgagaucaggcca

SEQ ID NO: 327860 - RNA, 32 nt, Human
aguggaagggagcaucaggagaggaacaaaaa

SEQ ID NO: 327861 - RNA, 32 nt, Human
aguggaaucugaagggcccaccccauggagga

SEQ ID NO: 327862 - RNA, 32 nt, Human
aguggaauguauuuaaaacuuguugaauuaga

SEQ ID NO: 327863 - RNA, 31 nt, Human
aguggaaugucaccaucgcccagguggggau

SEQ ID NO: 327864 - RNA, 32 nt, Human
aguggacaaguccgcuuugugagaugaauacu

SEQ ID NO: 327865 - RNA, 32 nt, Human
aguggacaauguuuuguauauaguugagaauu

SEQ ID NO: 327866 - RNA, 32 nt, Human
aguggacacacaccuaaucuguccucaaggac

SEQ ID NO: 327867 - RNA, 32 nt, Human
aguggacacagcuguuaauuuccacuggcuau

SEQ ID NO: 327868 - RNA, 32 nt, Human
aguggacagcgaaaggagagaaaccaccacag

SEQ ID NO: 327869 - RNA, 32 nt, Human
aguggacauauauacaaaagguugagaggaaa

SEQ ID NO: 327870 - RNA, 32 nt, Human
aguggaccaagcugcaaugcaguauugacuug

SEQ ID NO: 327871 - RNA, 21 nt, Human
aguggaccagggccccugagg

SEQ ID NO: 327872 - RNA, 32 nt, Human
aguggacccagccaagggucagggucagcacu

SEQ ID NO: 327873 - RNA, 32 nt, Human
aguggacccauguaauacuuuuauccauguuu

SEQ ID NO: 327874 - RNA, 28 nt, Human
aguggaccccagggugccucauaccagc

SEQ ID NO: 327875 - RNA, 32 nt, Human
aguggaccugugucugugucuguccugagaac

SEQ ID NO: 327876 - RNA, 32 nt, Human
aguggaccuuaggccuuccucucuccagaugu

SEQ ID NO: 327877 - RNA, 32 nt, Human
aguggacguaggauauuuucccuaccuaagaa

SEQ ID NO: 327878 - RNA, 32 nt, Human
aguggacuaaccacagcagcagccagggaugg

SEQ ID NO: 327879 - RNA, 32 nt, Human
aguggacucaaacuuguccuccgaagcgcggc

SEQ ID NO: 327880 - RNA, 32 nt, Human
aguggacucgaauccuggaggaggaaauaaag

SEQ ID NO: 327881 - RNA, 32 nt, Human
aguggacucuucuaccagagcugggcaagacc

SEQ ID NO: 327882 - RNA, 32 nt, Human
aguggacugccugcucccacagccugggcuga

SEQ ID NO: 327883 - RNA, 32 nt, Human
aguggacuguucccugaggugggagaugugga

SEQ ID NO: 327884 - RNA, 32 nt, Human
aguggacuuuccacccccucccuggccuguuc

SEQ ID NO: 327885 - RNA, 32 nt, Human
aguggagaagugagacugggaaggggaggaga

SEQ ID NO: 327886 - RNA, 32 nt, Human
aguggagaaguuagaugagugcaaggagcucc

SEQ ID NO: 327887 - RNA, 32 nt, Human
aguggagacacugccacugauucuccagugca

SEQ ID NO: 327888 - RNA, 18 nt, Human
aguggagaccuaccucca

SEQ ID NO: 327889 - RNA, 32 nt, Human
aguggagacuuggacccaggagucuugcugac

SEQ ID NO: 327890 - RNA, 32 nt, Human
aguggagagaaccucgcccuccccaggcgcua

SEQ ID NO: 327891 - RNA, 32 nt, Human
aguggagagccaggggagugugggucagauaa

SEQ ID NO: 327892 - RNA, 27 nt, Human
aguggagaggagagagagcaaauauug

SEQ ID NO: 327893 - RNA, 32 nt, Human
aguggagaggaguggggccugccccucuucuc

SEQ ID NO: 327894 - RNA, 32 nt, Human
aguggagagggaacuccucucccccauuuugu

SEQ ID NO: 327895 - RNA, 32 nt, Human
aguggagagggagagacggagccccagaaggg

SEQ ID NO: 327896 - RNA, 32 nt, Human
aguggagagggugugugaaaugccgguggagc

SEQ ID NO: 327897 - RNA, 32 nt, Human
aguggagaucgugguccccauggaaagaaaaa

SEQ ID NO: 327898 - RNA, 32 nt, Human
aguggagauguggucugucuauaaaaggccgg

SEQ ID NO: 327899 - RNA, 32 nt, Human
aguggagauuguaccacugcacuccagccugg

SEQ ID NO: 327900 - RNA, 32 nt, Human
aguggagcaaacugacucuagggagaaggcaa

SEQ ID NO: 327901 - RNA, 32 nt, Human
aguggagcagggcuuagcaggagcaguuucug

SEQ ID NO: 327902 - RNA, 32 nt, Human
aguggagcagugagcugccuccucuccuagca

SEQ ID NO: 327903 - RNA, 32 nt, Human
aguggagccauggcuagaggcaggaagauguc

SEQ ID NO: 327904 - RNA, 32 nt, Human
aguggagcccagggugcugggauggcuauauu

SEQ ID NO: 327905 - RNA, 32 nt, Human
aguggagcccucuuucccugcagccuacauug

SEQ ID NO: 327906 - RNA, 32 nt, Human
aguggagccuccugcucuccuggaccagcugc

SEQ ID NO: 327907 - RNA, 32 nt, Human
aguggagccugacaguguguauuuuauucuuu

SEQ ID NO: 327908 - RNA, 32 nt, Human
aguggagccuggcaaggugcccuccuggccug

SEQ ID NO: 327909 - RNA, 32 nt, Human
aguggagcgagggagagacggugggaugguga

SEQ ID NO: 327910 - RNA, 32 nt, Human
aguggagcuugugaguaagaaugcagauagaa

SEQ ID NO: 327911 - RNA, 32 nt, Human
aguggaggaagaaggaaggagaggcuuggaaa

SEQ ID NO: 327912 - RNA, 32 nt, Human
aguggaggaagaggagaaagagggagggagau

SEQ ID NO: 327913 - RNA, 32 nt, Human
aguggaggaaguuagacaagcauuuuaaguaa

SEQ ID NO: 327914 - RNA, 32 nt, Human
aguggaggagaaacguggcaacugccgaauaa

SEQ ID NO: 327915 - RNA, 32 nt, Human
aguggaggagcucucacucacauaucauguaa

SEQ ID NO: 327916 - RNA, 32 nt, Human
aguggaggagugagaaagaagugccagagagc

SEQ ID NO: 327917 - RNA, 32 nt, Human
aguggaggcaggaugggagagcccccugggug

SEQ ID NO: 327918 - RNA, 32 nt, Human
aguggaggcccuggugcccggcccuuggugcu

SEQ ID NO: 327919 - RNA, 32 nt, Human
aguggaggcugcaggaagaggcgggucuuuag

SEQ ID NO: 327920 - RNA, 32 nt, Human
aguggaggcugcagugagccuagguggugcca

SEQ ID NO: 327921 - RNA, 32 nt, Human
aguggagggagaagaaucaggcugccagggag

SEQ ID NO: 327922 - RNA, 32 nt, Human
aguggagggagagaggacuuaagucagaugga

SEQ ID NO: 327923 - RNA, 32 nt, Human
aguggagggcaggggucuggcacaggugcgau

SEQ ID NO: 327924 - RNA, 32 nt, Human
aguggagggcauuuuccagggcacugcuuucc

SEQ ID NO: 327925 - RNA, 32 nt, Human
aguggaggggccagggcugagccggcgggucc

SEQ ID NO: 327926 - RNA, 32 nt, Human
aguggaggggcuguggcacgugggcggagacu

SEQ ID NO: 327927 - RNA, 32 nt, Human
aguggagggggaccucagaggagcaggaccag

SEQ ID NO: 327928 - RNA, 32 nt, Human
aguggaggguaaggaaaauggcugcacuuuag

SEQ ID NO: 327929 - RNA, 32 nt, Human
aguggagggugaaaggagggagaggaucagca

SEQ ID NO: 327930 - RNA, 22 nt, Human
aguggagguaaauuaagagccu

SEQ ID NO: 327931 - RNA, 32 nt, Human
aguggagguuguaccacugcacuccagccugg

SEQ ID NO: 327932 - RNA, 32 nt, Human
aguggaguacagaaccaggagccucuuccaua

SEQ ID NO: 327933 - RNA, 32 nt, Human
aguggagucaucugaggccacugcuauuuccc

SEQ ID NO: 327934 - RNA, 32 nt, Human
aguggaguccaggaaagacucuucucauuuau

SEQ ID NO: 327935 - RNA, 32 nt, Human
aguggagucuccuuuccaacaggaugaugcau

SEQ ID NO: 327936 - RNA, 32 nt, Human
aguggagucucucacugcaugugacguggaag

SEQ ID NO: 327937 - RNA, 32 nt, Human
aguggagucugggcagugaugacaguggaaag

SEQ ID NO: 327938 - RNA, 32 nt, Human
aguggagugacuauuuggagaauagcacccau

SEQ ID NO: 327939 - RNA, 32 nt, Human
aguggaguggagaaggggccagggguucuggg

SEQ ID NO: 327940 - RNA, 32 nt, Human
aguggagugggaagaaauguuuugaaauagag

SEQ ID NO: 327941 - RNA, 32 nt, Human
aguggaguuccaggagcaccaccugagugagg

SEQ ID NO: 327942 - RNA, 32 nt, Human
aguggauaaauaaugugcacugcucugagccc

SEQ ID NO: 327943 - RNA, 32 nt, Human
aguggauaacuuuucuuuuucccaggccagag

SEQ ID NO: 327944 - RNA, 32 nt, Human
aguggauagugugagagaauuaggcuguagaa

SEQ ID NO: 327945 - RNA, 20 nt, Human
aguggauaucagaugggaua

SEQ ID NO: 327946 - RNA, 32 nt, Human
aguggaucacacacauggaaggugaugggggc

SEQ ID NO: 327947 - RNA, 32 nt, Human
aguggaucacuugaggccaggaguuugagacc

SEQ ID NO: 327948 - RNA, 19 nt, Human
aguggaucacuugagguca

SEQ ID NO: 327949 - RNA, 32 nt, Human
aguggaucagucucaagugucugguaacagca

SEQ ID NO: 327950 - RNA, 32 nt, Human
aguggaucaucucuagcaacaggucacacauu

SEQ ID NO: 327951 - RNA, 32 nt, Human
aguggaucccagcucuggcgacagcaucagcu

SEQ ID NO: 327952 - RNA, 32 nt, Human
aguggaucuuggagugggauuucuugguaaau

SEQ ID NO: 327953 - RNA, 32 nt, Human
aguggaugcagagaggaugcagaugcugggcu

SEQ ID NO: 327954 - RNA, 32 nt, Human
aguggauggcacagugcugucaucccuucucc

SEQ ID NO: 327955 - RNA, 32 nt, Human
aguggauggggagucuguguggcacccuguga

SEQ ID NO: 327956 - RNA, 32 nt, Human
aguggaugugagugaggaucaaggaaaagccg

SEQ ID NO: 327957 - RNA, 32 nt, Human
aguggaugugucauauauugccaaacauuaca

SEQ ID NO: 327958 - RNA, 32 nt, Human
aguggauucaccaaauuagccauuccauuuuc

SEQ ID NO: 327959 - RNA, 32 nt, Human
aguggauuccccgugugucugugcugcagccu

SEQ ID NO: 327960 - RNA, 32 nt, Human
aguggauucuagugcugagucuuccaggaaaa

SEQ ID NO: 327961 - RNA, 32 nt, Human
aguggauuucagcagucccccuuugucugaaa

SEQ ID NO: 327962 - RNA, 32 nt, Human
aguggcaaaaccaguuccaccugcugguaggg

SEQ ID NO: 327963 - RNA, 32 nt, Human
aguggcaaaaucauggcucacugcagccugga

SEQ ID NO: 327964 - RNA, 32 nt, Human
aguggcaaacuucagacgguuccaauggucuu

SEQ ID NO: 327965 - RNA, 32 nt, Human
aguggcaaagaauguauuugaaagaagagacc

SEQ ID NO: 327966 - RNA, 17 nt, Human
aguggcaaagaugagau

SEQ ID NO: 327967 - RNA, 32 nt, Human
aguggcaaauggaucugucaacaggcuccauu

SEQ ID NO: 327968 - RNA, 32 nt, Human
aguggcaaccagcugugggguacauaggagug

SEQ ID NO: 327969 - RNA, 32 nt, Human
aguggcaacuucugccuuuuuccaagugguuu

SEQ ID NO: 327970 - RNA, 32 nt, Human
aguggcacaagaauggcucaacucuccaaaua

SEQ ID NO: 327971 - RNA, 28 nt, Human
aguggcacaagugcuguuucuaucacua

SEQ ID NO: 327972 - RNA, 32 nt, Human
aguggcacaaucuugacucgcugcagucucca

SEQ ID NO: 327973 - RNA, 32 nt, Human
aguggcacacggugagugcuggcauggcucua

SEQ ID NO: 327974 - RNA, 32 nt, Human
aguggcacagucauggcucgcugcagccuuga

SEQ ID NO: 327975 - RNA, 32 nt, Human
aguggcacagucucuacucaggaggcugaggc

SEQ ID NO: 327976 - RNA, 32 nt, Human
aguggcacccaaugccucucaggaugagacca

SEQ ID NO: 327977 - RNA, 32 nt, Human
aguggcaccuccuucaggccuuugggguauuc

SEQ ID NO: 327978 - RNA, 31 nt, Human
aguggcacgaucucagcucacuguaccuuug

SEQ ID NO: 327979 - RNA, 31 nt, Human
aguggcacggugcuugggccuguguccccgg

SEQ ID NO: 327980 - RNA, 32 nt, Human
aguggcacuccugguccugcugucuugguuuu

SEQ ID NO: 327981 - RNA, 32 nt, Human
aguggcacuggcuucguccucccagggcccag

SEQ ID NO: 327982 - RNA, 32 nt, Human
aguggcagacagcauggcucucacagcacagg

SEQ ID NO: 327983 - RNA, 32 nt, Human
aguggcagagcugugggcucugcuguucucuc

SEQ ID NO: 327984 - RNA, 32 nt, Human
aguggcagaggugaggggauaaguuagaaugu

SEQ ID NO: 327985 - RNA, 32 nt, Human
aguggcagcaggugggggcauucuucuaagaa

SEQ ID NO: 327986 - RNA, 32 nt, Human
aguggcagcccccuccccacaccaguugaacu

SEQ ID NO: 327987 - RNA, 32 nt, Human
aguggcagccuggauggacaggagagguuucu

SEQ ID NO: 327988 - RNA, 32 nt, Human
aguggcagccugggccucggggaaggaagggc

SEQ ID NO: 327989 - RNA, 32 nt, Human
aguggcagcucuucaugaguccugcagugcua

SEQ ID NO: 327990 - RNA, 32 nt, Human
aguggcagcuguugccacacacaugcggaggg

SEQ ID NO: 327991 - RNA, 32 nt, Human
aguggcaggagaaggagucggaccuccgcaag

SEQ ID NO: 327992 - RNA, 20 nt, Human
aguggcaggaggccgugcug

SEQ ID NO: 327993 - RNA, 32 nt, Human
aguggcaggaggucuguguugucauggugaac

SEQ ID NO: 327994 - RNA, 32 nt, Human
aguggcaggcggaucacuugagcucaggaguc

SEQ ID NO: 327995 - RNA, 32 nt, Human
aguggcagggcagaggaagcaggguacagaca

SEQ ID NO: 327996 - RNA, 32 nt, Human
aguggcagucguccaaaccccaggaagagagc

SEQ ID NO: 327997 - RNA, 32 nt, Human
aguggcagugccuggacacugcacagcggaau

SEQ ID NO: 327998 - RNA, 32 nt, Human
aguggcagugggacaggagcggaaggaccaca

SEQ ID NO: 327999 - RNA, 32 nt, Human
aguggcaguguguggauuugaggaccucugca

SEQ ID NO: 328000 - RNA, 32 nt, Human
aguggcaucggcugccccaggcagaggcuuug

SEQ ID NO: 328001 - RNA, 32 nt, Human
aguggcaucuuuauggaaucacuguggauacu

SEQ ID NO: 328002 - RNA, 32 nt, Human
aguggcaugaccuuggguagguggcugagccu

SEQ ID NO: 328003 - RNA, 32 nt, Human
aguggcaugaucugcaaucucugccucccagg

SEQ ID NO: 328004 - RNA, 32 nt, Human
aguggccaaaugaaguacuuugccaaauaaaa

SEQ ID NO: 328005 - RNA, 32 nt, Human
aguggccaagggaguugagcugagcaggggga

SEQ ID NO: 328006 - RNA, 32 nt, Human
aguggccaaguccuuuaucaaaaagcugcuuu

SEQ ID NO: 328007 - RNA, 32 nt, Human
aguggccaaucggagauucguuucuuaucuau

SEQ ID NO: 328008 - RNA, 32 nt, Human
aguggccagaagcugaaaugacagcaguggua

SEQ ID NO: 328009 - RNA, 32 nt, Human
aguggccagaagcugaaaugacagcaguggug

SEQ ID NO: 328010 - RNA, 32 nt, Human
aguggccagaagcugauaugcggcaguggugc

SEQ ID NO: 328011 - RNA, 32 nt, Human
aguggccagagaggaggagaaggagggugaga

SEQ ID NO: 328012 - RNA, 32 nt, Human
aguggccagccauuugaaucagcuucagccuu

SEQ ID NO: 328013 - RNA, 32 nt, Human
aguggccagccccaguuucccauugcuccucu

SEQ ID NO: 328014 - RNA, 32 nt, Human
aguggccaggcagggagugucugcaguccugg

SEQ ID NO: 328015 - RNA, 32 nt, Human
aguggccagggaggggagugguggagccaguc

SEQ ID NO: 328016 - RNA, 32 nt, Human
aguggccagguggaugaaguuagugucuugaa

SEQ ID NO: 328017 - RNA, 32 nt, Human
aguggccaugcuccccuccaugcgucuccccu

SEQ ID NO: 328018 - RNA, 32 nt, Human
aguggccauggcugccugccugacuguagugc

SEQ ID NO: 328019 - RNA, 32 nt, Human
aguggcccacaguuuccuuucucuccacaccu

SEQ ID NO: 328020 - RNA, 32 nt, Human
aguggcccagccagagagcgcagcucccgcgc

SEQ ID NO: 328021 - RNA, 32 nt, Human
aguggcccagcccugggugucccaucaccaug

SEQ ID NO: 328022 - RNA, 24 nt, Human
aguggcccaggcuggagugcaggg

SEQ ID NO: 328023 - RNA, 32 nt, Human
aguggcccaguucugguuuucuagauuguacu

SEQ ID NO: 328024 - RNA, 23 nt, Human
aguggcccaugccuguaaucuca

SEQ ID NO: 328025 - RNA, 32 nt, Human
aguggccccucaggacccagggucccagcugc

SEQ ID NO: 328026 - RNA, 32 nt, Human
aguggcccucagcccuccaccuccggcggggg

SEQ ID NO: 328027 - RNA, 32 nt, Human
aguggcccuccaccuuguuccugcccuuuaac

SEQ ID NO: 328028 - RNA, 32 nt, Human
aguggcccuggccuggcccguggcgcauccuc

SEQ ID NO: 328029 - RNA, 32 nt, Human
aguggcccuggguuggggaaauauagaaggaa

SEQ ID NO: 328030 - RNA, 32 nt, Human
aguggccgcugccccagcuacagagacggccg

SEQ ID NO: 328031 - RNA, 32 nt, Human
aguggccgugccauccugccccuccacucccg

SEQ ID NO: 328032 - RNA, 32 nt, Human
aguggccuacuggaguuggaggucucacagca

SEQ ID NO: 328033 - RNA, 22 nt, Human
aguggccuagggucucuccucc

SEQ ID NO: 328034 - RNA, 32 nt, Human
aguggccuccaggaaguucuccaccaaggaug

SEQ ID NO: 328035 - RNA, 32 nt, Human
aguggccucuggcugcucacacccugccagag

SEQ ID NO: 328036 - RNA, 32 nt, Human
aguggccugaggucuccuggggccagguggga

SEQ ID NO: 328037 - RNA, 32 nt, Human
aguggccugcagucuccuggccagucuguaga

SEQ ID NO: 328038 - RNA, 32 nt, Human
aguggccugccuggcauccucugcuuauugaa

SEQ ID NO: 328039 - RNA, 32 nt, Human
aguggccuggcugucugucugucugucuaacc

SEQ ID NO: 328040 - RNA, 32 nt, Human
aguggccuggcuugucggagcaaguuucauca

SEQ ID NO: 328041 - RNA, 32 nt, Human
aguggccuuccucccuuccuuucacagccggu

SEQ ID NO: 328042 - RNA, 32 nt, Human
aguggccuuggcaaugucugugccaccuccug

SEQ ID NO: 328043 - RNA, 32 nt, Human
aguggccuuuuuacaaacuguucaggcucaag

SEQ ID NO: 328044 - RNA, 32 nt, Human
aguggcgacacaggcacccagcuuuggggugg

SEQ ID NO: 328045 - RNA, 32 nt, Human
aguggcgaccggagugguaggagcagcaauuu

SEQ ID NO: 328046 - RNA, 32 nt, Human
aguggcgagacgauuaaugacacuggccgagg

SEQ ID NO: 328047 - RNA, 32 nt, Human
aguggcgauuaccuccagcacagagacgugcc

SEQ ID NO: 328048 - RNA, 32 nt, Human
aguggcgcccgcagucauggugguguucguug

SEQ ID NO: 328049 - RNA, 32 nt, Human
aguggcgggucugggcuggcagagguaggggg

SEQ ID NO: 328050 - RNA, 32 nt, Human
aguggcgugaaggcaaacaggauuaagugaac

SEQ ID NO: 328051 - RNA, 32 nt, Human
aguggcguuuccgcacaggauuuccuaagacg

SEQ ID NO: 328052 - RNA, 32 nt, Human
aguggcuaagacuggucuaagcuauuaguuuu

SEQ ID NO: 328053 - RNA, 32 nt, Human
aguggcuauaguuggcuucuagugaggcuuca

SEQ ID NO: 328054 - RNA, 32 nt, Human
aguggcuaugggcaggucucuccuucccuacu

SEQ ID NO: 328055 - RNA, 23 nt, Human
aguggcucacaccuguaauccca

SEQ ID NO: 328056 - RNA, 32 nt, Human
aguggcucacaccuguaauccugcacuuuggg

SEQ ID NO: 328057 - RNA, 23 nt, Human
aguggcucacaccuguaaucuca

SEQ ID NO: 328058 - RNA, 32 nt, Human
aguggcucacaccuguaaucucagccucccag

SEQ ID NO: 328059 - RNA, 23 nt, Human
aguggcucacgccuguaauccca

SEQ ID NO: 328060 - RNA, 32 nt, Human
aguggcucacugcaaccugggugacagaacaa

SEQ ID NO: 328061 - RNA, 32 nt, Human
aguggcucagcagucucggugccugagccugc

SEQ ID NO: 328062 - RNA, 23 nt, Human
aguggcucauaccuguaauccca

SEQ ID NO: 328063 - RNA, 23 nt, Human
aguggcucaugcccguaauccca

SEQ ID NO: 328064 - RNA, 32 nt, Human
aguggcucaugccuauauucccugcacuuugg

SEQ ID NO: 328065 - RNA, 23 nt, Human
aguggcucaugccuguaauccca

SEQ ID NO: 328066 - RNA, 23 nt, Human
aguggcucaugcuuguaauccca

SEQ ID NO: 328067 - RNA, 32 nt, Human
aguggcuccaacaccauacuuaagcuuacuuc

SEQ ID NO: 328068 - RNA, 32 nt, Human
aguggcucccggccgcggccccggcugcgaga

SEQ ID NO: 328069 - RNA, 32 nt, Human
aguggcucccguggggaaggcugggagggcaa

SEQ ID NO: 328070 - RNA, 32 nt, Human
aguggcuccucuaacaagugggcagcuuggaa

SEQ ID NO: 328071 - RNA, 32 nt, Human
aguggcuccuuggcgugagcacugcucagacu

SEQ ID NO: 328072 - RNA, 32 nt, Human
aguggcucgccuguaaucccagcacuuuggga

SEQ ID NO: 328073 - RNA, 32 nt, Human
aguggcucugccauagccccagacaagcugcu

SEQ ID NO: 328074 - RNA, 23 nt, Human
aguggcucuugccuguaauccca

SEQ ID NO: 328075 - RNA, 32 nt, Human
aguggcugaacaaagagcauggcuugagaauc

SEQ ID NO: 328076 - RNA, 32 nt, Human
aguggcugaagaggcaggauggcuuggggcug

SEQ ID NO: 328077 - RNA, 32 nt, Human
aguggcugaaggcagaacuguuggagugguuc

SEQ ID NO: 328078 - RNA, 32 nt, Human
aguggcugagcuccaagugccugcugaagucu

SEQ ID NO: 328079 - RNA, 32 nt, Human
aguggcugcccagccaggaccauuggcucacc

SEQ ID NO: 328080 - RNA, 32 nt, Human
aguggcugccuccgggugaugauggcugugug

SEQ ID NO: 328081 - RNA, 32 nt, Human
aguggcugccuccuguguucucuggauuucuu

SEQ ID NO: 328082 - RNA, 29 nt, Human
aguggcugccugugugugucaggguuaga

SEQ ID NO: 328083 - RNA, 32 nt, Human
aguggcugcuucgguaucacagacacucugac

SEQ ID NO: 328084 - RNA, 32 nt, Human
aguggcugcuucugcuauagagaacauucuuc

SEQ ID NO: 328085 - RNA, 32 nt, Human
aguggcuggacuaccgagagcuuggacuacac

SEQ ID NO: 328086 - RNA, 19 nt, Human
aguggcuggccacauccca

SEQ ID NO: 328087 - RNA, 32 nt, Human
aguggcugggaugugggagcagcaucucuagg

SEQ ID NO: 328088 - RNA, 32 nt, Human
aguggcugggauuacaggcauccgccaccaug

SEQ ID NO: 328089 - RNA, 32 nt, Human
aguggcugggauuacaggcaugcaccaccaug

SEQ ID NO: 328090 - RNA, 32 nt, Human
aguggcugggauuacaggcaugugccaccaca

SEQ ID NO: 328091 - RNA, 32 nt, Human
aguggcugggauuacaggcgcaaaccaccaug

SEQ ID NO: 328092 - RNA, 32 nt, Human
aguggcugggauuacaggcgcccaccacuaug

SEQ ID NO: 328093 - RNA, 32 nt, Human
aguggcugggauuacaggcgcccgccaccaca

SEQ ID NO: 328094 - RNA, 32 nt, Human
aguggcugggauuacaggcgcccgccaccacg

SEQ ID NO: 328095 - RNA, 32 nt, Human
aguggcugggauuacaggcgccugcuaccaug

SEQ ID NO: 328096 - RNA, 32 nt, Human
aguggcugggauuacaggugugcgccaccaug

SEQ ID NO: 328097 - RNA, 20 nt, Human
aguggcugggauuauaggug

SEQ ID NO: 328098 - RNA, 20 nt, Human
aguggcugggauugcaggug

SEQ ID NO: 328099 - RNA, 32 nt, Human
aguggcugggcaugggggcucacaccuguaau

SEQ ID NO: 328100 - RNA, 26 nt, Human
aguggcuggggcauggaaggcaagau

SEQ ID NO: 328101 - RNA, 32 nt, Human
aguggcugggguccagaaaugggcaggaauga

SEQ ID NO: 328102 - RNA, 32 nt, Human
aguggcuggggucccugcaggucaugaggggc

SEQ ID NO: 328103 - RNA, 32 nt, Human
aguggcuguaagaaauuguccaugccaccaau

SEQ ID NO: 328104 - RNA, 32 nt, Human
aguggcugucauuccucaaauggcaaaaccag

SEQ ID NO: 328105 - RNA, 32 nt, Human
aguggcugugauauuucaaccaauugucauau

SEQ ID NO: 328106 - RNA, 32 nt, Human
aguggcugugauggugguauuaauaccacucc

SEQ ID NO: 328107 - RNA, 32 nt, Human
aguggcugugcuucacagcgcuuguuggguuc

SEQ ID NO: 328108 - RNA, 21 nt, Human
aguggcuguuuuccacccaaa

SEQ ID NO: 328109 - RNA, 32 nt, Human
aguggcuuaacuucucugggccuuuguuccua

SEQ ID NO: 328110 - RNA, 32 nt, Human
aguggcuucaguguccuugcguacacauucug

SEQ ID NO: 328111 - RNA, 32 nt, Human
aguggcuuccagcagaguugccugggauuucu

SEQ ID NO: 328112 - RNA, 32 nt, Human
aguggcuucccagcucugacccuucuacauuu

SEQ ID NO: 328113 - RNA, 32 nt, Human
aguggcuucuccauccuguuuucugcaacauu

SEQ ID NO: 328114 - RNA, 32 nt, Human
aguggcuucugccucuccugcccugaaaagga

SEQ ID NO: 328115 - RNA, 32 nt, Human
aguggcuuggccucaagagaauagcugguuuc

SEQ ID NO: 328116 - RNA, 32 nt, Human
aguggcuuggccucugguucugggugagguua

SEQ ID NO: 328117 - RNA, 32 nt, Human
aguggcuuucagcaaaccucagucauauucuu

SEQ ID NO: 328118 - RNA, 32 nt, Human
agugggaaaacugggguggggguggggguggg

SEQ ID NO: 328119 - RNA, 32 nt, Human
agugggaaaagcuuuuuccucuguauucuuuu

SEQ ID NO: 328120 - RNA, 32 nt, Human
agugggaaagagagggacgggucugaugaguu

SEQ ID NO: 328121 - RNA, 32 nt, Human
agugggaacgacugggcacugccaccaccaga

SEQ ID NO: 328122 - RNA, 32 nt, Human
agugggaacuggagggugagaggaaggguggg

SEQ ID NO: 328123 - RNA, 32 nt, Human
agugggaagacagugccgcuguugagacaaga

SEQ ID NO: 328124 - RNA, 18 nt, Human
agugggaagagccuggaa

SEQ ID NO: 328125 - RNA, 24 nt, Human
agugggaagagggugguucccugg

SEQ ID NO: 328126 - RNA, 32 nt, Human
agugggaagcagucucuuccuggucugaacuc

SEQ ID NO: 328127 - RNA, 32 nt, Human
agugggaaggagaggagugagugaaguagccu

SEQ ID NO: 328128 - RNA, 32 nt, Human
agugggaagucaggaggguucugcaguaucug

SEQ ID NO: 328129 - RNA, 32 nt, Human
agugggaauuagaaagcuggagugcuucuuca

SEQ ID NO: 328130 - RNA, 22 nt, Human
agugggacaagaagacugcuga

SEQ ID NO: 328131 - RNA, 32 nt, Human
agugggacacuggcccugggaaccaggcugag

SEQ ID NO: 328132 - RNA, 32 nt, Human
agugggacccuccaguccugcugggggugugu

SEQ ID NO: 328133 - RNA, 32 nt, Human
agugggaccggcuuccagccuguggcggugcc

SEQ ID NO: 328134 - RNA, 32 nt, Human
agugggaccuugacuggagaaacuccacgauc

SEQ ID NO: 328135 - RNA, 22 nt, Human
agugggacgcuggccacggcca

SEQ ID NO: 328136 - RNA, 21 nt, Human
agugggacugaggccgcacca

SEQ ID NO: 328137 - RNA, 32 nt, Human
agugggacugcuggcccugacucugcagccca

SEQ ID NO: 328138 - RNA, 32 nt, Human
agugggacuggaaacugcucaccuaugucaug

SEQ ID NO: 328139 - RNA, 32 nt, Human
agugggagagaagaggagagggcuuggauaga

SEQ ID NO: 328140 - RNA, 32 nt, Human
agugggagagaccucagaucaaagccugcugg

SEQ ID NO: 328141 - RNA, 32 nt, Human
agugggagcaauggcacugacacugcuagagg

SEQ ID NO: 328142 - RNA, 32 nt, Human
agugggagcaggagcuuggaggugagcacagg

SEQ ID NO: 328143 - RNA, 32 nt, Human
agugggagcucaggucagggaggaggcagggg

SEQ ID NO: 328144 - RNA, 32 nt, Human
agugggaggaagcagagggagggacugggcag

SEQ ID NO: 328145 - RNA, 32 nt, Human
agugggaggagaaaauucuccaggugaauggg

SEQ ID NO: 328146 - RNA, 32 nt, Human
agugggaggaggggagaaggggagacaaaacc

SEQ ID NO: 328147 - RNA, 32 nt, Human
agugggaggauagcuugggcccaggagaugga

SEQ ID NO: 328148 - RNA, 32 nt, Human
agugggagguaauggaaaguagcaaguuaugu

SEQ ID NO: 328149 - RNA, 32 nt, Human
agugggaggucaaacaugggccuucggcauug

SEQ ID NO: 328150 - RNA, 32 nt, Human
agugggagguugugcauggaggccagugaaag

SEQ ID NO: 328151 - RNA, 32 nt, Human
agugggaugaugcagugaccacacagaauguc

SEQ ID NO: 328152 - RNA, 32 nt, Human
agugggauuacaggcaccugucaccacgccug

SEQ ID NO: 328153 - RNA, 32 nt, Human
agugggauuccucucugcaaagcugcuggcuu

SEQ ID NO: 328154 - RNA, 23 nt, Human
agugggauuuguagauuugcugg

SEQ ID NO: 328155 - RNA, 32 nt, Human
agugggcaaaggcuucccauggguggaggugg

SEQ ID NO: 328156 - RNA, 32 nt, Human
agugggcaccugcacuaccacuuuuuagagga

SEQ ID NO: 328157 - RNA, 32 nt, Human
agugggcagcacauaguaggugcucaggaaac

SEQ ID NO: 328158 - RNA, 32 nt, Human
agugggcagcauaaagucacucauuucuuacc

SEQ ID NO: 328159 - RNA, 19 nt, Human
agugggcagcuaauuuuac

SEQ ID NO: 328160 - RNA, 32 nt, Human
agugggcagcugggccccagaacugugccugg

SEQ ID NO: 328161 - RNA, 32 nt, Human
agugggcagggugggcagcaggggcccucuug

SEQ ID NO: 328162 - RNA, 32 nt, Human
agugggcaguagaacccaggagaggaagaaag

SEQ ID NO: 328163 - RNA, 32 nt, Human
agugggcaguguccacguuuuuggaaaaugua

SEQ ID NO: 328164 - RNA, 32 nt, Human
agugggcaucaggccugggacacugcucuccu

SEQ ID NO: 328165 - RNA, 32 nt, Human
agugggcauggggucccaggagggauuccgga

SEQ ID NO: 328166 - RNA, 32 nt, Human
agugggccaagguuugggacagguugacugug

SEQ ID NO: 328167 - RNA, 32 nt, Human
agugggccaucuuuaagcuucucagcuuccuu

SEQ ID NO: 328168 - RNA, 32 nt, Human
agugggcccaagcagacaaccuugucccaacc

SEQ ID NO: 328169 - RNA, 32 nt, Human
agugggcccucaguaaauaccuggaggaaugu

SEQ ID NO: 328170 - RNA, 32 nt, Human
agugggcccugcccaggcugagcugcuucagg

SEQ ID NO: 328171 - RNA, 32 nt, Human
agugggcccuggaagggagggggcaagccugg

SEQ ID NO: 328172 - RNA, 32 nt, Human
agugggccuccuggggauggggugguacacug

SEQ ID NO: 328173 - RNA, 32 nt, Human
agugggccugccguucaugggucucuagggau

SEQ ID NO: 328174 - RNA, 22 nt, Human
agugggccugggcaggcagcca

SEQ ID NO: 328175 - RNA, 32 nt, Human
agugggccuucuguucaacuuacccuccaccg

SEQ ID NO: 328176 - RNA, 32 nt, Human
agugggcgacucugcucucuauuuaaaagcgu

SEQ ID NO: 328177 - RNA, 32 nt, Human
agugggcgccuguaaucccagcuacucaggag

SEQ ID NO: 328178 - RNA, 32 nt, Human
agugggcgcggaucugguguggggaaggcggc

SEQ ID NO: 328179 - RNA, 32 nt, Human
agugggcucacggaguucuagcucagguccaa

SEQ ID NO: 328180 - RNA, 32 nt, Human
agugggcucagaggaggaaagggacuuacuug

SEQ ID NO: 328181 - RNA, 32 nt, Human
agugggcucauggguucuuuaaguucccccuc

SEQ ID NO: 328182 - RNA, 32 nt, Human
agugggcucuaugggguggucugcacccaucu

SEQ ID NO: 328183 - RNA, 32 nt, Human
agugggcucugggguuccaccaaccguagcug

SEQ ID NO: 328184 - RNA, 32 nt, Human
agugggcugcacuccuuucucuccaaccaggg

SEQ ID NO: 328185 - RNA, 32 nt, Human
agugggcuggccaggccaccugcaccagggag

SEQ ID NO: 328186 - RNA, 31 nt, Human
agugggcugggcgucucagccgguguguggg

SEQ ID NO: 328187 - RNA, 32 nt, Human
agugggcuucucugggagcucuccaguggcac

SEQ ID NO: 328188 - RNA, 32 nt, Human
agugggcuugugugugaugugcagucccgaag

SEQ ID NO: 328189 - RNA, 32 nt, Human
agugggcuuuucguuguccaugggcuuuuucg

SEQ ID NO: 328190 - RNA, 32 nt, Human
aguggggaaagcgggccagggggcgggagugg

SEQ ID NO: 328191 - RNA, 32 nt, Human
aguggggaagcugaagcucaggcaucaggauc

SEQ ID NO: 328192 - RNA, 32 nt, Human
aguggggaagugaacaaaucaccacggaacuc

SEQ ID NO: 328193 - RNA, 32 nt, Human
aguggggacagcuucuuccuagugaggaaaau

SEQ ID NO: 328194 - RNA, 32 nt, Human
aguggggacuagugaaugacuugaccugugac

SEQ ID NO: 328195 - RNA, 32 nt, Human
aguggggagagacggcaggugcagugauggcu

SEQ ID NO: 328196 - RNA, 32 nt, Human
aguggggagagcaguggcagugggaggcaucu

SEQ ID NO: 328197 - RNA, 23 nt, Human
aguggggagauuuccacugugga

SEQ ID NO: 328198 - RNA, 32 nt, Human
aguggggaggaguggcuggggcugugcgcucc

SEQ ID NO: 328199 - RNA, 32 nt, Human
aguggggagggaaaaacuccuccuugaagauu

SEQ ID NO: 328200 - RNA, 32 nt, Human
aguggggaguggagggcagaggcccuuugguc

SEQ ID NO: 328201 - RNA, 23 nt, Human
aguggggaucucaagcucuugga

SEQ ID NO: 328202 - RNA, 32 nt, Human
aguggggaucuuccccaggaggguucuuacca

SEQ ID NO: 328203 - RNA, 32 nt, Human
aguggggauggagaaagggcagaggaagagac

SEQ ID NO: 328204 - RNA, 32 nt, Human
aguggggcaccaguccuguagcaaagaggcac

SEQ ID NO: 328205 - RNA, 32 nt, Human
aguggggcaucgucugucuugccuugucacuc

SEQ ID NO: 328206 - RNA, 23 nt, Human
aguggggcaugucuauacuuaga

SEQ ID NO: 328207 - RNA, 32 nt, Human
aguggggccagaccucuuuacacacacauucc

SEQ ID NO: 328208 - RNA, 32 nt, Human
aguggggcccaggggcagggagggaggaaggg

SEQ ID NO: 328209 - RNA, 32 nt, Human
aguggggccccugaucuauauucaaaguguca

SEQ ID NO: 328210 - RNA, 32 nt, Human
aguggggccucuucaucagcagccugccuggc

SEQ ID NO: 328211 - RNA, 32 nt, Human
aguggggcgaggaaagcgggaugggaacaagu

SEQ ID NO: 328212 - RNA, 32 nt, Human
aguggggcgggguggcgggggagaagcagccg

SEQ ID NO: 328213 - RNA, 32 nt, Human
aguggggcuauaaacuccuuccucauaggaaa

SEQ ID NO: 328214 - RNA, 32 nt, Human
aguggggcuggcugugggcccccugugcuguu

SEQ ID NO: 328215 - RNA, 31 nt, Human
aguggggcugggaccuggugggugaaccuga

SEQ ID NO: 328216 - RNA, 32 nt, Human
aguggggcuguaugaauccagguccaguuugu

SEQ ID NO: 328217 - RNA, 32 nt, Human
aguggggcugugggcucagagcucaggagucg

SEQ ID NO: 328218 - RNA, 32 nt, Human
aguggggcuucaugaccaugugcaucagaauu

SEQ ID NO: 328219 - RNA, 32 nt, Human
agugggggaaacacuuuucacugcagaguuug

SEQ ID NO: 328220 - RNA, 32 nt, Human
agugggggaaggcaggcuguugccaugguggc

SEQ ID NO: 328221 - RNA, 32 nt, Human
agugggggagagagaggagaccaggacagcug

SEQ ID NO: 328222 - RNA, 21 nt, Human
agugggggagagcaggcuggc

SEQ ID NO: 328223 - RNA, 32 nt, Human
agugggggagcacgggccuucuacaccacaug

SEQ ID NO: 328224 - RNA, 32 nt, Human
agugggggaggcggcggcagcguuaagugaga

SEQ ID NO: 328225 - RNA, 32 nt, Human
agugggggagguggagggggaggcaggcacca

SEQ ID NO: 328226 - RNA, 32 nt, Human
agugggggauggaagagaguaccagguggucc

SEQ ID NO: 328227 - RNA, 32 nt, Human
agugggggcacauguacugcaggugugcagug

SEQ ID NO: 328228 - RNA, 32 nt, Human
agugggggcccaaacccaguuuccuucucauu

SEQ ID NO: 328229 - RNA, 32 nt, Human
agugggggccugugggguggggugggauugag

SEQ ID NO: 328230 - RNA, 32 nt, Human
agugggggcuguacuggggacugcucggauga

SEQ ID NO: 328231 - RNA, 23 nt, Human
aguggggggcggaagugcagugg

SEQ ID NO: 328232 - RNA, 32 nt, Human
agugggggucagccaggagcccagggagucac

SEQ ID NO: 328233 - RNA, 32 nt, Human
agugggggucucucaugcucuguuguagggga

SEQ ID NO: 328234 - RNA, 32 nt, Human
agugggggucugccaugagggcggccgagcag

SEQ ID NO: 328235 - RNA, 32 nt, Human
agugggggugcagagcuccugagaggacagcu

SEQ ID NO: 328236 - RNA, 32 nt, Human
agugggguaguagaugguaacagagauguaga

SEQ ID NO: 328237 - RNA, 32 nt, Human
aguggggucagggcugagaggagaaggaggga

SEQ ID NO: 328238 - RNA, 32 nt, Human
aguggggucgagagagaaaguagcacgcccgc

SEQ ID NO: 328239 - RNA, 32 nt, Human
aguggggugaugugccuuaaagcaucagacac

SEQ ID NO: 328240 - RNA, 32 nt, Human
agugggguggccuccccucugucugccuggug

SEQ ID NO: 328241 - RNA, 32 nt, Human
aguggggugggcacagaugagcagaguggaug

SEQ ID NO: 328242 - RNA, 32 nt, Human
agugggguggugcuggggaagguugacucgcu

SEQ ID NO: 328243 - RNA, 32 nt, Human
aguggggugguuauguuuccaugguuaccaug

SEQ ID NO: 328244 - RNA, 22 nt, Human
agugggguucgaagccacacca

SEQ ID NO: 328245 - RNA, 32 nt, Human
agugggguugcagagaugggggagacucaagu

SEQ ID NO: 328246 - RNA, 32 nt, Human
agugggguugggggcggggugggcaggguucu

SEQ ID NO: 328247 - RNA, 23 nt, Human
agugggucaaaggaggccuggaa

SEQ ID NO: 328248 - RNA, 32 nt, Human
agugggucaggggagaaggaaaagaggucaac

SEQ ID NO: 328249 - RNA, 32 nt, Human
agugggucaguggucugugccaaccaaacgau

SEQ ID NO: 328250 - RNA, 32 nt, Human
agugggucaugagaagaugaacacugaagucu

SEQ ID NO: 328251 - RNA, 32 nt, Human
agugggucccuuccuuucuccuuuccucucua

SEQ ID NO: 328252 - RNA, 32 nt, Human
aguggguccuggagacccuaaguggccuauga

SEQ ID NO: 328253 - RNA, 32 nt, Human
agugggucuccagugagagaaaugccuaugaa

SEQ ID NO: 328254 - RNA, 32 nt, Human
agugggucugacuugaggucugugaugugacc

SEQ ID NO: 328255 - RNA, 32 nt, Human
agugggucugagaacagucccugcccccaagu

SEQ ID NO: 328256 - RNA, 32 nt, Human
agugggucuuggaccagggcaagugcaucuuu

SEQ ID NO: 328257 - RNA, 32 nt, Human
agugggugagaaugaaaacuugagacucccaa

SEQ ID NO: 328258 - RNA, 32 nt, Human
agugggugaggacaggcuucaggcugucucuu

SEQ ID NO: 328259 - RNA, 32 nt, Human
agugggugccuguaaucccagcuacuugggag

SEQ ID NO: 328260 - RNA, 32 nt, Human
agugggugccuguagucccagcuacuugggag

SEQ ID NO: 328261 - RNA, 32 nt, Human
agugggugccuugcuuuguucuucccaagcug

SEQ ID NO: 328262 - RNA, 32 nt, Human
agugggugcucagcuggucugcacugaacgca

SEQ ID NO: 328263 - RNA, 32 nt, Human
agugggugcuguucccgaauguacccauucga

SEQ ID NO: 328264 - RNA, 32 nt, Human
aguggguggaagaggagaagagggaccuggaa

SEQ ID NO: 328265 - RNA, 32 nt, Human
aguggguggccugggaaaacgcacuuguggcc

SEQ ID NO: 328266 - RNA, 32 nt, Human
aguggguggggaaaggaaguggcuuugaggca

SEQ ID NO: 328267 - RNA, 31 nt, Human
aguggguggguggggugggguggggcaagug

SEQ ID NO: 328268 - RNA, 32 nt, Human
agugggugguggggcccuggggccagugcuca

SEQ ID NO: 328269 - RNA, 32 nt, Human
agugggugucaguauggaugugucugaaugug

SEQ ID NO: 328270 - RNA, 32 nt, Human
agugggugucuccucaagccuuaccuuucuca

SEQ ID NO: 328271 - RNA, 17 nt, Human
agugggugucugaacug

SEQ ID NO: 328272 - RNA, 32 nt, Human
agugggugucugaacugaggggcaguugucaa

SEQ ID NO: 328273 - RNA, 32 nt, Human
aguggguucucugcaaguucugaggcccaggg

SEQ ID NO: 328274 - RNA, 27 nt, Human
aguggguugauuacugugaaauucuca

SEQ ID NO: 328275 - RNA, 32 nt, Human
aguggguugcaccuccaaccagcaggcuccgc

SEQ ID NO: 328276 - RNA, 32 nt, Human
aguggguuugcuaucaaugaaaugcuacaaau

SEQ ID NO: 328277 - RNA, 32 nt, Human
aguggguuuguaguaaugagugcugcuguaaa

SEQ ID NO: 328278 - RNA, 32 nt, Human
agugguaacugggaacaauuuuccccaauaca

SEQ ID NO: 328279 - RNA, 32 nt, Human
agugguaaguugcccucccucuccuggccuua

SEQ ID NO: 328280 - RNA, 32 nt, Human
agugguaauguaauaccuuaccucacagguuu

SEQ ID NO: 328281 - RNA, 32 nt, Human
agugguacuaccugguaaaagaauugguucug

SEQ ID NO: 328282 - RNA, 22 nt, Human
agugguagaauaaaggcaggau

SEQ ID NO: 328283 - RNA, 32 nt, Human
agugguagcgcugucuccuggugaaggaguau

SEQ ID NO: 328284 - RNA, 32 nt, Human
agugguaggaagagcauggguuagggggaugg

SEQ ID NO: 328285 - RNA, 32 nt, Human
agugguaggagaguugacaucuugccaagggc

SEQ ID NO: 328286 - RNA, 32 nt, Human
agugguaggauuacaggcgugagccacugcac

SEQ ID NO: 328287 - RNA, 23 nt, Human
agugguagucccagcuacucagg

SEQ ID NO: 328288 - RNA, 32 nt, Human
agugguaucagcugcuccuccucuccuaggag

SEQ ID NO: 328289 - RNA, 32 nt, Human
agugguaugagcauagcuuccucaaauuccug

SEQ ID NO: 328290 - RNA, 32 nt, Human
aguggucacaccucaucuauuuacuguuacuc

SEQ ID NO: 328291 - RNA, 32 nt, Human
aguggucaccccaugggacaggcacagcuacu

SEQ ID NO: 328292 - RNA, 32 nt, Human
aguggucacugcaaccuccaucucccuggcuc

SEQ ID NO: 328293 - RNA, 32 nt, Human
aguggucagaagcagccagcagugaggaaucc

SEQ ID NO: 328294 - RNA, 32 nt, Human
aguggucagaugcucacagucuuauggaggag

SEQ ID NO: 328295 - RNA, 32 nt, Human
aguggucagccagcacugucccugccuguccc

SEQ ID NO: 328296 - RNA, 32 nt, Human
aguggucagccccuggggcgcaaacauucccc

SEQ ID NO: 328297 - RNA, 32 nt, Human
aguggucaggcagaaggugcccuggugagagc

SEQ ID NO: 328298 - RNA, 32 nt, Human
aguggucaggcaggagaggcagucggaugcag

SEQ ID NO: 328299 - RNA, 32 nt, Human
aguggucagggcugaagucggagaagcauagg

SEQ ID NO: 328300 - RNA, 32 nt, Human
aguggucaucuauaagcaaaggagagaagccu

SEQ ID NO: 328301 - RNA, 32 nt, Human
agugguccaaagccuucagccuagauggugca

SEQ ID NO: 328302 - RNA, 32 nt, Human
aguggucccggcuugcgggcagucuccccucu

SEQ ID NO: 328303 - RNA, 32 nt, Human
agugguccuagugccgcaucagauccaggugg

SEQ ID NO: 328304 - RNA, 32 nt, Human
agugguccuggacuacagacucuguugccuug

SEQ ID NO: 328305 - RNA, 32 nt, Human
agugguccuuccucucccaauguggccaugug

SEQ ID NO: 328306 - RNA, 21 nt, Human
aguggucuaagagaccuggaa

SEQ ID NO: 328307 - RNA, 32 nt, Human
aguggucuagguuaaggagggaggaggguuga

SEQ ID NO: 328308 - RNA, 32 nt, Human
aguggucuccuuagacugaauucaugugaacu

SEQ ID NO: 328309 - RNA, 32 nt, Human
aguggucuguuuaaaugaaaaauguuaaaaga

SEQ ID NO: 328310 - RNA, 32 nt, Human
aguggugaaaggaagcaagaagaaaagggguu

SEQ ID NO: 328311 - RNA, 32 nt, Human
aguggugaacagcuccauuucugugcacaugu

SEQ ID NO: 328312 - RNA, 32 nt, Human
aguggugacucuggacaaggagacucccguag

SEQ ID NO: 328313 - RNA, 32 nt, Human
aguggugacuggagagagagcugggaggggca

SEQ ID NO: 328314 - RNA, 32 nt, Human
aguggugagacaggguauuucuguguuguucu

SEQ ID NO: 328315 - RNA, 32 nt, Human
aguggugcaaacacaucucauuguagcuucaa

SEQ ID NO: 328316 - RNA, 32 nt, Human
aguggugcagagcacuagccagaugcagugca

SEQ ID NO: 328317 - RNA, 32 nt, Human
aguggugccaucauagcucacuguagccucga

SEQ ID NO: 328318 - RNA, 32 nt, Human
aguggugccaugaaguagagcagugggcuuug

SEQ ID NO: 328319 - RNA, 32 nt, Human
aguggugccaugaauuaaagaugccacuucgg

SEQ ID NO: 328320 - RNA, 32 nt, Human
aguggugcccguggaaagagggagaaagagaa

SEQ ID NO: 328321 - RNA, 32 nt, Human
aguggugccuguaaucccagcaguuugggagg

SEQ ID NO: 328322 - RNA, 32 nt, Human
aguggugcgauuucggcucacuucaaacuccg

SEQ ID NO: 328323 - RNA, 32 nt, Human
aguggugcugcgaggggaaggaaaagggaggc

SEQ ID NO: 328324 - RNA, 32 nt, Human
aguggugcuguccauggaaucaggccacagca

SEQ ID NO: 328325 - RNA, 32 nt, Human
aguggugcuuuacuuagcccuguggacaacuu

SEQ ID NO: 328326 - RNA, 20 nt, Human
aguggugcuuucccgaaucu

SEQ ID NO: 328327 - RNA, 32 nt, Human
agugguggagccaagauuugaacccagcuaga

SEQ ID NO: 328328 - RNA, 32 nt, Human
agugguggagccaggacucaaagccagucuag

SEQ ID NO: 328329 - RNA, 32 nt, Human
agugguggagugaggacaggggagggccggcc

SEQ ID NO: 328330 - RNA, 32 nt, Human
agugguggcacacaccugucaucccagcuacu

SEQ ID NO: 328331 - RNA, 32 nt, Human
agugguggcaggcaccuguagucccagcuacu

SEQ ID NO: 328332 - RNA, 32 nt, Human
agugguggcaguggcucccagcacuuugggag

SEQ ID NO: 328333 - RNA, 32 nt, Human
agugguggcauaggccuguaauuccagcuacu

SEQ ID NO: 328334 - RNA, 32 nt, Human
agugguggcaugugccuguaaucccagcuacu

SEQ ID NO: 328335 - RNA, 32 nt, Human
agugguggccagaauuagauaucuuuaaagaa

SEQ ID NO: 328336 - RNA, 32 nt, Human
agugguggcggguaccuguaaucccagcuacu

SEQ ID NO: 328337 - RNA, 32 nt, Human
agugguggcucacgccuguaaugccagcacuc

SEQ ID NO: 328338 - RNA, 32 nt, Human
agugguggcucaugccuguaaucccagcacuu

SEQ ID NO: 328339 - RNA, 32 nt, Human
agugguggcucgcaccuguaaucccagggacu

SEQ ID NO: 328340 - RNA, 32 nt, Human
agugguggcugacaccuguaaucccagcauuu

SEQ ID NO: 328341 - RNA, 32 nt, Human
agugguggcuuacaccugugaucccagcacuu

SEQ ID NO: 328342 - RNA, 32 nt, Human
aguggugggaccccuccccgaccuggcggggg

SEQ ID NO: 328343 - RNA, 32 nt, Human
aguggugggacucagcccagacugcccugggg

SEQ ID NO: 328344 - RNA, 32 nt, Human
aguggugggaggaauagagggggacagucugu

SEQ ID NO: 328345 - RNA, 32 nt, Human
aguggugggaggauggcuugagccggggagga

SEQ ID NO: 328346 - RNA, 32 nt, Human
aguggugggaggcagcuguggugcaggagcug

SEQ ID NO: 328347 - RNA, 32 nt, Human
aguggugggaucacaggcgugagccaccgugc

SEQ ID NO: 328348 - RNA, 19 nt, Human
aguggugggaucagagcca

SEQ ID NO: 328349 - RNA, 32 nt, Human
aguggugggauuacaagcaugagccacuguac

SEQ ID NO: 328350 - RNA, 32 nt, Human
aguggugggauuacagacgugagccacugcag

SEQ ID NO: 328351 - RNA, 19 nt, Human
aguggugggauuacaggug

SEQ ID NO: 328352 - RNA, 32 nt, Human
aguggugggauuacaggugugagccaccgcgu

SEQ ID NO: 328353 - RNA, 32 nt, Human
aguggugggauuauaggcaugagccaccgcac

SEQ ID NO: 328354 - RNA, 32 nt, Human
aguggugggcaggccaguggcagggccggccc

SEQ ID NO: 328355 - RNA, 32 nt, Human
aguggugggggagggggccagagaggcggcuc

SEQ ID NO: 328356 - RNA, 32 nt, Human
agugguggggucucuuucugucuucccuucuu

SEQ ID NO: 328357 - RNA, 32 nt, Human
aguggugggugaagcaggggaggcuccucuau

SEQ ID NO: 328358 - RNA, 32 nt, Human
aguggugggugguaaggacugucuccuauuag

SEQ ID NO: 328359 - RNA, 32 nt, Human
agugguggguuuauagggggaggaggaggcag

SEQ ID NO: 328360 - RNA, 32 nt, Human
agugguggucccacccacccucuagcuggcca

SEQ ID NO: 328361 - RNA, 32 nt, Human
agugguggugcaugccuguaaucccagcuacu

SEQ ID NO: 328362 - RNA, 32 nt, Human
aguggugguggccagcgugcagugagcuggcc

SEQ ID NO: 328363 - RNA, 32 nt, Human
aguggugguggcugccuguaaucccagcuacu

SEQ ID NO: 328364 - RNA, 32 nt, Human
agugguggugggcaccuguaaucccaguuacu

SEQ ID NO: 328365 - RNA, 32 nt, Human
agugguggugugcaccuguaguaaucccagcu

SEQ ID NO: 328366 - RNA, 32 nt, Human
agugguguaggguauacagagagguggguagu

SEQ ID NO: 328367 - RNA, 32 nt, Human
aguggugucauucuccagaaccagguguggau

SEQ ID NO: 328368 - RNA, 32 nt, Human
aguggugugaagagaagugaaauguugugccu

SEQ ID NO: 328369 - RNA, 32 nt, Human
aguggugugguguuuggagacagucucugaau

SEQ ID NO: 328370 - RNA, 32 nt, Human
agugguguuggcaucagcuugggcaggugugc

SEQ ID NO: 328371 - RNA, 32 nt, Human
agugguuaaaacuuguauucaugugaaccuuu

SEQ ID NO: 328372 - RNA, 32 nt, Human
agugguuaccuauaccuagcauaguacaauca

SEQ ID NO: 328373 - RNA, 32 nt, Human
agugguuacuauccucugccuuccucuccucc

SEQ ID NO: 328374 - RNA, 32 nt, Human
agugguucacagaaaacagcaaauauccccag

SEQ ID NO: 328375 - RNA, 32 nt, Human
agugguucagcuuucccagcugaucugaagcu

SEQ ID NO: 328376 - RNA, 23 nt, Human
agugguucaugccuguaauccca

SEQ ID NO: 328377 - RNA, 32 nt, Human
agugguucuacaaucuauuuauuggacauguc

SEQ ID NO: 328378 - RNA, 32 nt, Human
agugguucucagaguguguuuccagagcagca

SEQ ID NO: 328379 - RNA, 32 nt, Human
agugguucugcagcuugaguccucugguuuua

SEQ ID NO: 328380 - RNA, 32 nt, Human
agugguucugucccccagauguggaccugucg

SEQ ID NO: 328381 - RNA, 32 nt, Human
agugguugcccaggccuaguuucaguggcaga

SEQ ID NO: 328382 - RNA, 32 nt, Human
agugguuggccaggcugcaguauaacugaagc

SEQ ID NO: 328383 - RNA, 32 nt, Human
agugguuucccuggaaguggcagcagcaguga

SEQ ID NO: 328384 - RNA, 32 nt, Human
agugguuugagaggcugggaggguugagggga

SEQ ID NO: 328385 - RNA, 32 nt, Human
agugguuuguccaggcuccaguacagauggcu

SEQ ID NO: 328386 - RNA, 32 nt, Human
agugguuuuccucuuggcagauucucaaacag

SEQ ID NO: 328387 - RNA, 32 nt, Human
agugguuuugaguuacuucauggaacuuggac

SEQ ID NO: 328388 - RNA, 32 nt, Human
agugguuuuucauaauggaugcauaaugacug

SEQ ID NO: 328389 - RNA, 32 nt, Human
aguguaacauccucucugguccuuuucugugu

SEQ ID NO: 328390 - RNA, 32 nt, Human
aguguaacauucucuccacccagcuuauaaaa

SEQ ID NO: 328391 - RNA, 32 nt, Human
aguguaagaaaaugauugcuuaucaguaguau

SEQ ID NO: 328392 - RNA, 32 nt, Human
aguguaagggaguagggggugcagugggagau

SEQ ID NO: 328393 - RNA, 32 nt, Human
aguguaagugcuggacugcaggcugcagugau

SEQ ID NO: 328394 - RNA, 32 nt, Human
aguguaaguucagacuuaguaauaaaagaaaa

SEQ ID NO: 328395 - RNA, 32 nt, Human
aguguaaguuguuuuugcuguuaaauuggaua

SEQ ID NO: 328396 - RNA, 32 nt, Human
aguguaauacguauauuuuaacaaaccugucc

SEQ ID NO: 328397 - RNA, 32 nt, Human
aguguaaugaacacaggcaugaagaugucugu

SEQ ID NO: 328398 - RNA, 32 nt, Human
aguguacaaacccauggcugggcucagcuuca

SEQ ID NO: 328399 - RNA, 19 nt, Human
aguguacaagacugugcug

SEQ ID NO: 328400 - RNA, 32 nt, Human
aguguacaccacugugccugcuuugaauccuu

SEQ ID NO: 328401 - RNA, 31 nt, Human
aguguacaccagguuuuuacauucuuauuuu

SEQ ID NO: 328402 - RNA, 32 nt, Human
aguguacagaaaacaguaaaucccuucuuuac

SEQ ID NO: 328403 - RNA, 32 nt, Human
aguguacagacaccugccuucuuuaaggauga

SEQ ID NO: 328404 - RNA, 32 nt, Human
aguguacauuucuauaaauagaugcuguguau

SEQ ID NO: 328405 - RNA, 32 nt, Human
aguguaccagcuuuuuccuucccuuuuagaaa

SEQ ID NO: 328406 - RNA, 32 nt, Human
aguguaccccauuugguuucaccaggaaccca

SEQ ID NO: 328407 - RNA, 32 nt, Human
aguguaccuuggagagcuauccacucaggccc

SEQ ID NO: 328408 - RNA, 32 nt, Human
aguguacgaggcagacggcggcagugcggcuu

SEQ ID NO: 328409 - RNA, 32 nt, Human
aguguacugaggguacuggccuagccaugugg

SEQ ID NO: 328410 - RNA, 32 nt, Human
aguguagaaaaacacuagauagugugagaggu

SEQ ID NO: 328411 - RNA, 32 nt, Human
aguguagaaaaauaacaccguggugccaguag

SEQ ID NO: 328412 - RNA, 32 nt, Human
aguguagaaacaaguuuccaccuuucuaaaac

SEQ ID NO: 328413 - RNA, 32 nt, Human
aguguagaccagacugccucucucagauaugu

SEQ ID NO: 328414 - RNA, 32 nt, Human
aguguagccuggggcugguguugccugccucc

SEQ ID NO: 328415 - RNA, 32 nt, Human
aguguagcgcccccucccucuuucggcuggug

SEQ ID NO: 328416 - RNA, 32 nt, Human
aguguaggaggccaggagcuuggggcuucgug

SEQ ID NO: 328417 - RNA, 32 nt, Human
aguguagggauuacaggcgugagccacugugc

SEQ ID NO: 328418 - RNA, 32 nt, Human
aguguaguuauacauuuuguuuuggauauuua

SEQ ID NO: 328419 - RNA, 32 nt, Human
aguguaguugacugaaaacuacaguuguaaua

SEQ ID NO: 328420 - RNA, 32 nt, Human
aguguauauacauguaucaaaaagucacauug

SEQ ID NO: 328421 - RNA, 32 nt, Human
aguguauaucagaaaagggaaguugugccuuu

SEQ ID NO: 328422 - RNA, 32 nt, Human
aguguauauuauagcugcauugcagguuucag

SEQ ID NO: 328423 - RNA, 32 nt, Human
aguguauauuccaugaagacaaaauagaagau

SEQ ID NO: 328424 - RNA, 32 nt, Human
aguguaucaaagaauucagacaggcuucuguu

SEQ ID NO: 328425 - RNA, 32 nt, Human
aguguaucacacaaaccaaucuuauaagggua

SEQ ID NO: 328426 - RNA, 31 nt, Human
aguguaucgacaaucugucagccgacacagg

SEQ ID NO: 328427 - RNA, 31 nt, Human
aguguaucgacaaucugucagccgacgcagg

SEQ ID NO: 328428 - RNA, 32 nt, Human
aguguaugagagggcccugccugcugcaucuu

SEQ ID NO: 328429 - RNA, 32 nt, Human
aguguaugcauguguggguguguucaugcaca

SEQ ID NO: 328430 - RNA, 31 nt, Human
aguguaugccuuuuccuucaugcagaauuuu

SEQ ID NO: 328431 - RNA, 32 nt, Human
aguguaugcuuuuaaaaagccccacacaacaa

SEQ ID NO: 328432 - RNA, 32 nt, Human
aguguauggaaauaaauguaucauagaaaugu

SEQ ID NO: 328433 - RNA, 32 nt, Human
aguguauuaacagugcaugcuuuuacuuugua

SEQ ID NO: 328434 - RNA, 32 nt, Human
aguguauucagaaauccaaguuggugucauac

SEQ ID NO: 328435 - RNA, 32 nt, Human
aguguauuggcaaucaugcaguuaacauuuga

SEQ ID NO: 328436 - RNA, 32 nt, Human
aguguauuuaaagagcauuucaguuaacuuuu

SEQ ID NO: 328437 - RNA, 32 nt, Human
aguguauuucucagauuacaugacauuaguca

SEQ ID NO: 328438 - RNA, 32 nt, Human
agugucaaacagaggcugggugaccuccuguc

SEQ ID NO: 328439 - RNA, 32 nt, Human
agugucaacaguuaaagcagacgaaacgaagu

SEQ ID NO: 328440 - RNA, 32 nt, Human
agugucaagagaaaucaagagaugcuaaaagc

SEQ ID NO: 328441 - RNA, 32 nt, Human
agugucaagccugaaaccaagcaauaccguca

SEQ ID NO: 328442 - RNA, 19 nt, Human
agugucaaggaggcugcug

SEQ ID NO: 328443 - RNA, 32 nt, Human
agugucaagguguggaagggaccaagcgacca

SEQ ID NO: 328444 - RNA, 32 nt, Human
agugucacccaggcuggagugcagugauccac

SEQ ID NO: 328445 - RNA, 32 nt, Human
agugucaccccaccaucuuccauaagcuguga

SEQ ID NO: 328446 - RNA, 32 nt, Human
agugucaccucaguggaccagccugggggaag

SEQ ID NO: 328447 - RNA, 32 nt, Human
agugucaccucucccaagcacaugcuugcauc

SEQ ID NO: 328448 - RNA, 32 nt, Human
agugucacuucugcaguccuccucugcucacc

SEQ ID NO: 328449 - RNA, 32 nt, Human
agugucacuuuagaaagaacuaaggugcuagc

SEQ ID NO: 328450 - RNA, 32 nt, Human
agugucagcuacucggaaggcuguggugggaa

SEQ ID NO: 328451 - RNA, 32 nt, Human
agugucaggacauucccacaaaugcuggaaaa

SEQ ID NO: 328452 - RNA, 32 nt, Human
agugucagggcgggggccuggagcagcccgag

SEQ ID NO: 328453 - RNA, 32 nt, Human
agugucauacauauuuguucuccauugauaua

SEQ ID NO: 328454 - RNA, 32 nt, Human
agugucauuucuucagaacuccccuucauuga

SEQ ID NO: 328455 - RNA, 32 nt, Human
aguguccaagagccuguuuuugaaacacaagc

SEQ ID NO: 328456 - RNA, 32 nt, Human
aguguccagaagccacacaggguauaucucag

SEQ ID NO: 328457 - RNA, 32 nt, Human
aguguccagcacaaacaggcacucaaccacua

SEQ ID NO: 328458 - RNA, 32 nt, Human
aguguccaggcugaagucagggcccggccagc

SEQ ID NO: 328459 - RNA, 32 nt, Human
aguguccaguggcagccagaacaggugacaca

SEQ ID NO: 328460 - RNA, 32 nt, Human
aguguccaucaucugacucuucucggagucuc

SEQ ID NO: 328461 - RNA, 32 nt, Human
aguguccaucuuaaaaucauaacuagguaguu

SEQ ID NO: 328462 - RNA, 32 nt, Human
aguguccaugcauauacauacaugauacacau

SEQ ID NO: 328463 - RNA, 32 nt, Human
agugucccaacuagaauugaaaagcuugauau

SEQ ID NO: 328464 - RNA, 32 nt, Human
agugucccaagaaauggccuugacacacagga

SEQ ID NO: 328465 - RNA, 32 nt, Human
agugucccaccugggaccuguacaguccucag

SEQ ID NO: 328466 - RNA, 32 nt, Human
agugucccagcgggguugggagaggcauguga

SEQ ID NO: 328467 - RNA, 32 nt, Human
agugucccaggacccugcggugcaguagaggc

SEQ ID NO: 328468 - RNA, 32 nt, Human
aguguccccaacagcagaugaggcugggucuu

SEQ ID NO: 328469 - RNA, 32 nt, Human
aguguccccacugugccagauccaagagaagc

SEQ ID NO: 328470 - RNA, 22 nt, Human
aguguccccagccaacccccca

SEQ ID NO: 328471 - RNA, 32 nt, Human
aguguccccaggagguugggggaggagcaucu

SEQ ID NO: 328472 - RNA, 21 nt, Human
aguguccccaggaugcagcca

SEQ ID NO: 328473 - RNA, 32 nt, Human
aguguccccaggauggccagcuugaggaugaa

SEQ ID NO: 328474 - RNA, 21 nt, Human
aguguccccaucucacugcca

SEQ ID NO: 328475 - RNA, 32 nt, Human
aguguccccucuugggggucagagaugaggug

SEQ ID NO: 328476 - RNA, 32 nt, Human
agugucccucagacuuggauggaguuucuggg

SEQ ID NO: 328477 - RNA, 32 nt, Human
agugucccuccuggcccagcucagccagcauc

SEQ ID NO: 328478 - RNA, 32 nt, Human
agugucccugcaggacgccaaagcugaggcag

SEQ ID NO: 328479 - RNA, 32 nt, Human
agugucccuucccuagaaaggccugcccuccu

SEQ ID NO: 328480 - RNA, 32 nt, Human
aguguccgggggccccagccaagggacacauc

SEQ ID NO: 328481 - RNA, 29 nt, Human
aguguccgucugugucugugagggauugg

SEQ ID NO: 328482 - RNA, 32 nt, Human
aguguccuacugggagcucagucuguagugcc

SEQ ID NO: 328483 - RNA, 32 nt, Human
aguguccucagcuucauguccaguggauggca

SEQ ID NO: 328484 - RNA, 32 nt, Human
aguguccuccuagaaagagugggagagcagcu

SEQ ID NO: 328485 - RNA, 32 nt, Human
aguguccucugccccugauuucccaggagagu

SEQ ID NO: 328486 - RNA, 32 nt, Human
aguguccucuucaacuugcucucuuucccacu

SEQ ID NO: 328487 - RNA, 32 nt, Human
aguguccucuuucuagauugccagcucaugac

SEQ ID NO: 328488 - RNA, 32 nt, Human
aguguccugaaagcuuacauuuuccugagacc

SEQ ID NO: 328489 - RNA, 32 nt, Human
aguguccugccugguccucugugccugguggg

SEQ ID NO: 328490 - RNA, 32 nt, Human
aguguccuucgaggaacccacccggcuggccg

SEQ ID NO: 328491 - RNA, 32 nt, Human
agugucgaccaggcuggcaugagggaagaagg

SEQ ID NO: 328492 - RNA, 32 nt, Human
agugucgcgccuguaaucccagcacuuuggga

SEQ ID NO: 328493 - RNA, 32 nt, Human
agugucggacccugccuuccucccacuccaga

SEQ ID NO: 328494 - RNA, 32 nt, Human
agugucgguucugcaccccugcaggcucugua

SEQ ID NO: 328495 - RNA, 32 nt, Human
agugucuacaucuaccuucugccuucucucua

SEQ ID NO: 328496 - RNA, 32 nt, Human
agugucuacauugccaaccacaggccucucuu

SEQ ID NO: 328497 - RNA, 31 nt, Human
agugucuauaagcucaucacagccuagaguu

SEQ ID NO: 328498 - RNA, 24 nt, Human
agugucuauaauaaaacuaaacuu

SEQ ID NO: 328499 - RNA, 32 nt, Human
agugucucaaagugcugggauuacagguauga

SEQ ID NO: 328500 - RNA, 32 nt, Human
agugucucacugccaaaccucuugguuacgcu

SEQ ID NO: 328501 - RNA, 32 nt, Human
agugucucacugguuguagcuuucauggguuc

SEQ ID NO: 328502 - RNA, 32 nt, Human
agugucucauuuccuaacagaaucaucccauu

SEQ ID NO: 328503 - RNA, 32 nt, Human
agugucuccagcugugaacccaggaggucaag

SEQ ID NO: 328504 - RNA, 32 nt, Human
agugucucccuguguugcucaggcuggagugc

SEQ ID NO: 328505 - RNA, 32 nt, Human
agugucucuacaacuuugaauaaagggaaaug

SEQ ID NO: 328506 - RNA, 32 nt, Human
agugucucuagcugagccugaccucgggguuu

SEQ ID NO: 328507 - RNA, 32 nt, Human
agugucucuauuucggguaaaggaaagaccaa

SEQ ID NO: 328508 - RNA, 32 nt, Human
agugucucuccacuuagguguccucaguuccc

SEQ ID NO: 328509 - RNA, 32 nt, Human
agugucucugcaggcacucaggaagcuguucu

SEQ ID NO: 328510 - RNA, 32 nt, Human
agugucucuggacucgccccugagcuuccagg

SEQ ID NO: 328511 - RNA, 32 nt, Human
agugucugagcucaucuccaguucuggacucg

SEQ ID NO: 328512 - RNA, 32 nt, Human
agugucugcaccugaggcccucugugguaccu

SEQ ID NO: 328513 - RNA, 32 nt, Human
agugucugcagcugcugcccuucucccaggcc

SEQ ID NO: 328514 - RNA, 32 nt, Human
agugucugccaaaaucucugguguuuucucgg

SEQ ID NO: 328515 - RNA, 32 nt, Human
agugucugccaaggaacugaaauuuaaaauga

SEQ ID NO: 328516 - RNA, 32 nt, Human
agugucugcgucuaagagagcacuuuguugcu

SEQ ID NO: 328517 - RNA, 32 nt, Human
agugucugcucacuccccuuccacccucagcg

SEQ ID NO: 328518 - RNA, 32 nt, Human
agugucuggaguuucauuccaucccagggcuu

SEQ ID NO: 328519 - RNA, 32 nt, Human
agugucugggauugguagcucucuccaacugc

SEQ ID NO: 328520 - RNA, 32 nt, Human
agugucuggucugggagcucguuaacuaugcu

SEQ ID NO: 328521 - RNA, 32 nt, Human
agugucugugucuaagagagcacuuuguugcu

SEQ ID NO: 328522 - RNA, 32 nt, Human
agugucuguguguauaucuguacauagauaua

SEQ ID NO: 328523 - RNA, 32 nt, Human
agugucuguuauuagagaaacgagaaggaucc

SEQ ID NO: 328524 - RNA, 32 nt, Human
agugucuuaccugagagccuggcuggagaaga

SEQ ID NO: 328525 - RNA, 32 nt, Human
agugucuuccaucauggauucauuacagcuua

SEQ ID NO: 328526 - RNA, 32 nt, Human
agugucuuccuggucgcuucugaugcucauug

SEQ ID NO: 328527 - RNA, 32 nt, Human
agugucuugccagcaacauuccugcuagcaua

SEQ ID NO: 328528 - RNA, 32 nt, Human
agugucuuugccauuuuagaagguuccaguga

SEQ ID NO: 328529 - RNA, 32 nt, Human
agugucuuuuagcauucaugccagcuuuucuc

SEQ ID NO: 328530 - RNA, 32 nt, Human
agugugaaacuugcucuacucucugaaaugau

SEQ ID NO: 328531 - RNA, 32 nt, Human
agugugaacucccggcugcagacaguugugcu

SEQ ID NO: 328532 - RNA, 32 nt, Human
agugugaagaaucuccagcaggggaggcaaca

SEQ ID NO: 328533 - RNA, 32 nt, Human
agugugaagcaagguauccagugaagauucuc

SEQ ID NO: 328534 - RNA, 32 nt, Human
agugugaaggggcaagagcugccauuuaucua

SEQ ID NO: 328535 - RNA, 32 nt, Human
agugugacaggacugugauugugcuagaugua

SEQ ID NO: 328536 - RNA, 32 nt, Human
agugugacaguguccagccgguucugcagcac

SEQ ID NO: 328537 - RNA, 32 nt, Human
agugugaccagcccuggccaugcuugcugggu

SEQ ID NO: 328538 - RNA, 32 nt, Human
agugugaccccgcaguggcucucggugcuaga

SEQ ID NO: 328539 - RNA, 32 nt, Human
agugugaccugcucucuucccuccaggcugac

SEQ ID NO: 328540 - RNA, 32 nt, Human
agugugaccugcucuguucccucccugcugac

SEQ ID NO: 328541 - RNA, 32 nt, Human
agugugacugguguccaucuaagaagaaauua

SEQ ID NO: 328542 - RNA, 32 nt, Human
agugugagagaaggggucuccagggaagaguc

SEQ ID NO: 328543 - RNA, 32 nt, Human
agugugagaggaucgagccauugaaagcucau

SEQ ID NO: 328544 - RNA, 32 nt, Human
agugugagcaagauuugggucucuccagaccu

SEQ ID NO: 328545 - RNA, 32 nt, Human
agugugagcacacgcuggagugcagcguucca

SEQ ID NO: 328546 - RNA, 32 nt, Human
agugugagcagcuaacauccuaccucaaaugg

SEQ ID NO: 328547 - RNA, 32 nt, Human
agugugagccaccacacccagccagcaauaua

SEQ ID NO: 328548 - RNA, 32 nt, Human
agugugagccaccacacccagccuaauguaac

SEQ ID NO: 328549 - RNA, 32 nt, Human
agugugagccaccacaccuggccuggaaggaa

SEQ ID NO: 328550 - RNA, 32 nt, Human
agugugaggagaggguggcaucaggagcugcu

SEQ ID NO: 328551 - RNA, 21 nt, Human
agugugaggcggcccugacca

SEQ ID NO: 328552 - RNA, 32 nt, Human
agugugagggagcagggguguugauguuuguu

SEQ ID NO: 328553 - RNA, 32 nt, Human
agugugaggucagugggcuuauuccuccagcu

SEQ ID NO: 328554 - RNA, 32 nt, Human
agugugagugugaugggccaccggggcaagag

SEQ ID NO: 328555 - RNA, 32 nt, Human
agugugauaccuaauaaaguaccacuucucug

SEQ ID NO: 328556 - RNA, 32 nt, Human
agugugaugagcagcauagcaaacagauggau

SEQ ID NO: 328557 - RNA, 32 nt, Human
agugugauguaaugagagacuguguguguaug

SEQ ID NO: 328558 - RNA, 32 nt, Human
agugugcacccgggcuggagaaggcaggaggu

SEQ ID NO: 328559 - RNA, 32 nt, Human
agugugcagagcccaaaugaggggaccgcagg

SEQ ID NO: 328560 - RNA, 32 nt, Human
agugugcagggacacugucaagggauaaaguu

SEQ ID NO: 328561 - RNA, 32 nt, Human
agugugcagguguggaauagagcucaagaucu

SEQ ID NO: 328562 - RNA, 32 nt, Human
agugugcaugcaggcaggaggcagggaaaugu

SEQ ID NO: 328563 - RNA, 32 nt, Human
agugugcauggaggcccuccugugcuggggga

SEQ ID NO: 328564 - RNA, 32 nt, Human
agugugccaaucuauuuuuguaucagcauugg

SEQ ID NO: 328565 - RNA, 32 nt, Human
agugugccaccaggcugggcagggacaaccac

SEQ ID NO: 328566 - RNA, 32 nt, Human
agugugccagccugcuaaguccuguaagaaua

SEQ ID NO: 328567 - RNA, 32 nt, Human
agugugcccccaccaucccucauggccugccg

SEQ ID NO: 328568 - RNA, 32 nt, Human
agugugccuggcuuggcuucccuuccccaugg

SEQ ID NO: 328569 - RNA, 32 nt, Human
agugugcgaaucuacccugaccaaugggcuca

SEQ ID NO: 328570 - RNA, 32 nt, Human
agugugcgagugugugugcacauguuacaaag

SEQ ID NO: 328571 - RNA, 32 nt, Human
agugugcgauacucggggagcuggggcauguu

SEQ ID NO: 328572 - RNA, 32 nt, Human
agugugcucauccugaacuguuacuccaaauc

SEQ ID NO: 328573 - RNA, 32 nt, Human
agugugcugaguucucaguuccuggcccugug

SEQ ID NO: 328574 - RNA, 32 nt, Human
agugugcugaugaaguccucuauaagcacaag

SEQ ID NO: 328575 - RNA, 32 nt, Human
agugugcuguauuccucagaagugagggcauc

SEQ ID NO: 328576 - RNA, 32 nt, Human
agugugcuguccagagagaccugcugacccag

SEQ ID NO: 328577 - RNA, 32 nt, Human
agugugcuuggaugaucucuaagauggaauca

SEQ ID NO: 328578 - RNA, 32 nt, Human
agugugcuugggccagcucuccugccuguguc

SEQ ID NO: 328579 - RNA, 32 nt, Human
agugugcuuucugcuacacugcuaguuuucag

SEQ ID NO: 328580 - RNA, 32 nt, Human
agugugcuuuuuggaaagaugauggacuggga

SEQ ID NO: 328581 - RNA, 32 nt, Human
aguguggaaaacacaggacuuggcaaucacag

SEQ ID NO: 328582 - RNA, 32 nt, Human
aguguggaaccugaggcucagugagaaucagg

SEQ ID NO: 328583 - RNA, 32 nt, Human
aguguggacaagcuuccauucacugcaaauuc

SEQ ID NO: 328584 - RNA, 32 nt, Human
aguguggacagcuuccuugugugggacugaga

SEQ ID NO: 328585 - RNA, 32 nt, Human
aguguggaccaggaguacaaauucagucccaa

SEQ ID NO: 328586 - RNA, 32 nt, Human
aguguggacugcugguuccugcacagacugcc

SEQ ID NO: 328587 - RNA, 32 nt, Human
aguguggagccccacagucuugcaggucacau

SEQ ID NO: 328588 - RNA, 32 nt, Human
aguguggaggcagggaggucgagucagccaug

SEQ ID NO: 328589 - RNA, 32 nt, Human
aguguggagucccagcccaggcugaccucaca

SEQ ID NO: 328590 - RNA, 32 nt, Human
aguguggauuugguucucccauacauuuuaau

SEQ ID NO: 328591 - RNA, 32 nt, Human
aguguggcaaagccuuccgagaaaagucaaca

SEQ ID NO: 328592 - RNA, 32 nt, Human
aguguggcaaagccuuucgugggcagucagca

SEQ ID NO: 328593 - RNA, 32 nt, Human
aguguggcaaagccuuuggcaagcagucaaca

SEQ ID NO: 328594 - RNA, 32 nt, Human
aguguggccagcuccagggaaaaggccuugcu

SEQ ID NO: 328595 - RNA, 32 nt, Human
aguguggccccuggcuguaccugagcuuccuc

SEQ ID NO: 328596 - RNA, 32 nt, Human
aguguggccugcgagauucugaccucagaugu

SEQ ID NO: 328597 - RNA, 32 nt, Human
aguguggccugugaaccagcagcauuuuuauc

SEQ ID NO: 328598 - RNA, 32 nt, Human
aguguggcuggccccaguaccuggccaagccc

SEQ ID NO: 328599 - RNA, 32 nt, Human
aguguggcuucccacuuuuccugcauugugga

SEQ ID NO: 328600 - RNA, 32 nt, Human
agugugggaagggagagcggggcagucucggg

SEQ ID NO: 328601 - RNA, 32 nt, Human
agugugggaauggguggagcagcagcucaagg

SEQ ID NO: 328602 - RNA, 32 nt, Human
agugugggacacgguuuaacugucccagcgac

SEQ ID NO: 328603 - RNA, 32 nt, Human
agugugggagaaaaggaggagggaaggagccg

SEQ ID NO: 328604 - RNA, 32 nt, Human
agugugggagcagcuggacaccaggcuucuug

SEQ ID NO: 328605 - RNA, 32 nt, Human
agugugggaggcaguggggcagguagagccac

SEQ ID NO: 328606 - RNA, 32 nt, Human
agugugggaugugcugcaagacguaaaccuac

SEQ ID NO: 328607 - RNA, 32 nt, Human
agugugggaugugguuucugccuucuagagag

SEQ ID NO: 328608 - RNA, 21 nt, Human
agugugggcaacauggugaaa

SEQ ID NO: 328609 - RNA, 32 nt, Human
agugugggcagagagaauuauguggccucauc

SEQ ID NO: 328610 - RNA, 32 nt, Human
agugugggccuuccagcugagcccaugcaaga

SEQ ID NO: 328611 - RNA, 32 nt, Human
agugugggcuauggaaagaggugaauugcggu

SEQ ID NO: 328612 - RNA, 32 nt, Human
aguguggggaagagauaggaaccagcaggaug

SEQ ID NO: 328613 - RNA, 32 nt, Human
aguguggggagggcagguccagcucugugggc

SEQ ID NO: 328614 - RNA, 32 nt, Human
aguguggggaugcacccccagucccgagauga

SEQ ID NO: 328615 - RNA, 32 nt, Human
aguguggggauuacgggugugagccaccacgc

SEQ ID NO: 328616 - RNA, 32 nt, Human
agugugggggagggaggcuuccccagccuuaa

SEQ ID NO: 328617 - RNA, 32 nt, Human
aguguggggugaggcagugagguuaggcccag

SEQ ID NO: 328618 - RNA, 32 nt, Human
aguguggguguggccagcugaagaggcaggaa

SEQ ID NO: 328619 - RNA, 32 nt, Human
aguguggguguguguggcugcacgugucacug

SEQ ID NO: 328620 - RNA, 32 nt, Human
agugugguaagaaggaaggacaaaaggcuuua

SEQ ID NO: 328621 - RNA, 17 nt, Human
agugugguccugaacug

SEQ ID NO: 328622 - RNA, 32 nt, Human
aguguggucucaaacuccugaccucaugauuu

SEQ ID NO: 328623 - RNA, 32 nt, Human
aguguggucuuuuucugaucuuccucagcuuc

SEQ ID NO: 328624 - RNA, 32 nt, Human
aguguggugcugcccaaggcuuugggagccca

SEQ ID NO: 328625 - RNA, 32 nt, Human
aguguggugcugcuaacauugcccaggcaaca

SEQ ID NO: 328626 - RNA, 29 nt, Human
agugugguguuugguuugccuggagaugc

SEQ ID NO: 328627 - RNA, 32 nt, Human
agugugguuacuucuuucuucugccucgacuc

SEQ ID NO: 328628 - RNA, 32 nt, Human
agugugguuugcagaugaucugggcuuguuuc

SEQ ID NO: 328629 - RNA, 32 nt, Human
aguguguaagauguuaacauuuugggcagagg

SEQ ID NO: 328630 - RNA, 21 nt, Human
aguguguacccucuccaggaa

SEQ ID NO: 328631 - RNA, 29 nt, Human
aguguguacuuguguguguuugggggagu

SEQ ID NO: 328632 - RNA, 32 nt, Human
aguguguagagauggcugagugcaauggcuca

SEQ ID NO: 328633 - RNA, 32 nt, Human
aguguguaugguaagacaugcccuucuauuaa

SEQ ID NO: 328634 - RNA, 29 nt, Human
aguguguaugugugugugggaguaugugu

SEQ ID NO: 328635 - RNA, 32 nt, Human
agugugucaacuccauuguuguccucaaugga

SEQ ID NO: 328636 - RNA, 23 nt, Human
agugugucaugccugcaauccca

SEQ ID NO: 328637 - RNA, 32 nt, Human
aguguguccauggccaggucucagcccugguc

SEQ ID NO: 328638 - RNA, 32 nt, Human
aguguguccuuugagcaagaggaggaacuccu

SEQ ID NO: 328639 - RNA, 32 nt, Human
agugugugaacugcuuucaagucugacucucc

SEQ ID NO: 328640 - RNA, 32 nt, Human
agugugugagaggaggaggagagggagaauuc

SEQ ID NO: 328641 - RNA, 32 nt, Human
agugugugagugcagugcagaugagcaccauu

SEQ ID NO: 328642 - RNA, 32 nt, Human
agugugugagugugugggggaguguguauggu

SEQ ID NO: 328643 - RNA, 32 nt, Human
agugugugaguucaaggcugcagugagguaug

SEQ ID NO: 328644 - RNA, 32 nt, Human
agugugugcaagccccucagaacucaagacau

SEQ ID NO: 328645 - RNA, 29 nt, Human
agugugugcaugugugugcucaggggcug

SEQ ID NO: 328646 - RNA, 32 nt, Human
agugugugccuguagucccagcuacucgggag

SEQ ID NO: 328647 - RNA, 32 nt, Human
agugugugccuguaguucagcuacucaggggg

SEQ ID NO: 328648 - RNA, 32 nt, Human
aguguguggacccaaaacugccaagccugagu

SEQ ID NO: 328649 - RNA, 32 nt, Human
aguguguggaggagggaggagggugaagacug

SEQ ID NO: 328650 - RNA, 32 nt, Human
aguguguggauucccuuuuaagauagaaagua

SEQ ID NO: 328651 - RNA, 32 nt, Human
aguguguggcaggcccccguggaggaucaaca

SEQ ID NO: 328652 - RNA, 32 nt, Human
agugugugguagccaacaaacuaccuagaaac

SEQ ID NO: 328653 - RNA, 32 nt, Human
agugugugguguguuauuacagcugcucuaga

SEQ ID NO: 328654 - RNA, 29 nt, Human
agugugugucugugugcagccuaugccug

SEQ ID NO: 328655 - RNA, 26 nt, Human
agugugugucuguuuugguuugugag

SEQ ID NO: 328656 - RNA, 32 nt, Human
agugugugucuuuacuccuucuuccucuccau

SEQ ID NO: 328657 - RNA, 32 nt, Human
agugugugugagguauaggaaaugcugaugac

SEQ ID NO: 328658 - RNA, 32 nt, Human
aguguguguggaauguucuggccgcucccagc

SEQ ID NO: 328659 - RNA, 32 nt, Human
aguguguguggaggggagggagaagagguuaa

SEQ ID NO: 328660 - RNA, 32 nt, Human
aguguguguucaucuacccaugaggaauaaaa

SEQ ID NO: 328661 - RNA, 32 nt, Human
aguguguguuuagccaggcaugguggcccaug

SEQ ID NO: 328662 - RNA, 32 nt, Human
aguguguucacuguuggcugcauuggacaauc

SEQ ID NO: 328663 - RNA, 32 nt, Human
aguguguucagacugugcacacagaaaacagg

SEQ ID NO: 328664 - RNA, 32 nt, Human
aguguguucucaauguuguaugaaccuccuuc

SEQ ID NO: 328665 - RNA, 32 nt, Human
aguguguugaagcauacaucuuuacgcugcua

SEQ ID NO: 328666 - RNA, 32 nt, Human
aguguguugauaaaaaugagugccaguuugga

SEQ ID NO: 328667 - RNA, 32 nt, Human
aguguguugggaagacuuaaucugagcaaaac

SEQ ID NO: 328668 - RNA, 32 nt, Human
aguguguuguuccccucuauguauccauaugu

SEQ ID NO: 328669 - RNA, 32 nt, Human
aguguguuucauccuucccacucugucgagcc

SEQ ID NO: 328670 - RNA, 32 nt, Human
aguguguuucucucaccuaaaacaccauuuac

SEQ ID NO: 328671 - RNA, 32 nt, Human
aguguguuuggacaguucauaggguccacaaa

SEQ ID NO: 328672 - RNA, 22 nt, Human
aguguguuuuuaucucuuucca

SEQ ID NO: 328673 - RNA, 23 nt, Human
aguguuaaaagaaaaguuugcug

SEQ ID NO: 328674 - RNA, 32 nt, Human
aguguuaagguugguuugcaguguguaagugg

SEQ ID NO: 328675 - RNA, 32 nt, Human
aguguuacaguucccacccauuguuuggaauu

SEQ ID NO: 328676 - RNA, 32 nt, Human
aguguuacccugagccccgcaggccaacccau

SEQ ID NO: 328677 - RNA, 32 nt, Human
aguguuagaaaagucaagcagagauaugccag

SEQ ID NO: 328678 - RNA, 32 nt, Human
aguguuagaauuagaaagagauccaaauugua

SEQ ID NO: 328679 - RNA, 32 nt, Human
aguguuaggagagagaugggugaggggaccug

SEQ ID NO: 328680 - RNA, 32 nt, Human
aguguuaggauuacaggcaugagccacugcgc

SEQ ID NO: 328681 - RNA, 23 nt, Human
aguguuaggauuacaggcgugag

SEQ ID NO: 328682 - RNA, 32 nt, Human
aguguuaggauuacaggcgugagccaccacac

SEQ ID NO: 328683 - RNA, 32 nt, Human
aguguuaggauuacaggcgugagccaccgcgc

SEQ ID NO: 328684 - RNA, 32 nt, Human
aguguuaggauuaggggcaugagccaccgcac

SEQ ID NO: 328685 - RNA, 32 nt, Human
aguguuaggauuauaggcgugagccaccacgc

SEQ ID NO: 328686 - RNA, 32 nt, Human
aguguuaggguagcaugggauuacagggcccu

SEQ ID NO: 328687 - RNA, 32 nt, Human
aguguuaguuucuuugggacccaucuacccug

SEQ ID NO: 328688 - RNA, 32 nt, Human
aguguuauucaggaacauaaaaauuagagcau

SEQ ID NO: 328689 - RNA, 32 nt, Human
aguguuauuuucugauugugguguugagaguu

SEQ ID NO: 328690 - RNA, 32 nt, Human
aguguuauuuucuuucucagugacacauaaca

SEQ ID NO: 328691 - RNA, 31 nt, Human
aguguucacaacuagaauaaauaccuagagc

SEQ ID NO: 328692 - RNA, 32 nt, Human
aguguucacuaaaucugaguuuguggugacuu

SEQ ID NO: 328693 - RNA, 32 nt, Human
aguguucacucuggguccacacugccuuuaug

SEQ ID NO: 328694 - RNA, 32 nt, Human
aguguucagauaguucaguauucauuaucguu

SEQ ID NO: 328695 - RNA, 20 nt, Human
aguguucagcagggcugcug

SEQ ID NO: 328696 - RNA, 32 nt, Human
aguguucaugaucuacuguaccuauuuccucc

SEQ ID NO: 328697 - RNA, 32 nt, Human
aguguucaugugacccgcacaggccaauccug

SEQ ID NO: 328698 - RNA, 32 nt, Human
aguguuccaaagugcugauauuacaggcauaa

SEQ ID NO: 328699 - RNA, 32 nt, Human
aguguuccaaguagcugggauuacagacgccu

SEQ ID NO: 328700 - RNA, 32 nt, Human
aguguuccaguguuuucucucaaaacucugug

SEQ ID NO: 328701 - RNA, 32 nt, Human
aguguuccuacauaacaaaccugaacauguac

SEQ ID NO: 328702 - RNA, 32 nt, Human
aguguuccuauuucccccuccucccagcuccu

SEQ ID NO: 328703 - RNA, 32 nt, Human
aguguucgacuaccuuuuaccuagccacuuaa

SEQ ID NO: 328704 - RNA, 24 nt, Human
aguguucggggggugucugggcca

SEQ ID NO: 328705 - RNA, 21 nt, Human
aguguucuaacaaacuaaacu

SEQ ID NO: 328706 - RNA, 32 nt, Human
aguguucucaaaggaaucacccuuucccuacc

SEQ ID NO: 328707 - RNA, 32 nt, Human
aguguucucaacagcaaauagugggugucuaa

SEQ ID NO: 328708 - RNA, 32 nt, Human
aguguucuccagccugggcaacagagugaguc

SEQ ID NO: 328709 - RNA, 32 nt, Human
aguguucuguagugagguuacauaucaggaac

SEQ ID NO: 328710 - RNA, 32 nt, Human
aguguucuguggagaaacugcagccccacuuc

SEQ ID NO: 328711 - RNA, 32 nt, Human
aguguucuuacacguuguaucacugcauugug

SEQ ID NO: 328712 - RNA, 32 nt, Human
aguguucuuggaccucacagccaagcagcacu

SEQ ID NO: 328713 - RNA, 32 nt, Human
aguguucuuuugaaauguucaucaggaauagg

SEQ ID NO: 328714 - RNA, 32 nt, Human
aguguugacagugugugcacacugcagacagc

SEQ ID NO: 328715 - RNA, 32 nt, Human
aguguugagauuacaggcaugagccacugugc

SEQ ID NO: 328716 - RNA, 32 nt, Human
aguguugaggagcagaggugagaagagagaga

SEQ ID NO: 328717 - RNA, 32 nt, Human
aguguugaggggaccaaagccaccaagacagg

SEQ ID NO: 328718 - RNA, 32 nt, Human
aguguugcaggcacuccagccuggcgacagag

SEQ ID NO: 328719 - RNA, 32 nt, Human
aguguugcaguaaacugcuagcaggagcugua

SEQ ID NO: 328720 - RNA, 28 nt, Human
aguguugcccaggcuggagugcaguggc

SEQ ID NO: 328721 - RNA, 32 nt, Human
aguguugcccuuaaguacagugguguaauuuu

SEQ ID NO: 328722 - RNA, 32 nt, Human
aguguugcuggaucucugccugccagggaagc

SEQ ID NO: 328723 - RNA, 32 nt, Human
aguguugcuuuccuugugcuuuccuugugguu

SEQ ID NO: 328724 - RNA, 32 nt, Human
aguguuggaaccugcuuagaaccaggugugaa

SEQ ID NO: 328725 - RNA, 32 nt, Human
aguguuggaacugccucuuauuuuaggcugua

SEQ ID NO: 328726 - RNA, 32 nt, Human
aguguuggaauuacaggcgugagccaccgcgc

SEQ ID NO: 328727 - RNA, 32 nt, Human
aguguuggaauugcaggugugagccacugcac

SEQ ID NO: 328728 - RNA, 32 nt, Human
aguguuggaggaggcaggggcugaagguguca

SEQ ID NO: 328729 - RNA, 32 nt, Human
aguguuggagugaggaccuguaaggcaggccc

SEQ ID NO: 328730 - RNA, 32 nt, Human
aguguuggcagauaggugauggagaggaugau

SEQ ID NO: 328731 - RNA, 32 nt, Human
aguguuggcuuccauugaccauaugaaggcca

SEQ ID NO: 328732 - RNA, 26 nt, Human
aguguugggaaacuggauucaguggg

SEQ ID NO: 328733 - RNA, 32 nt, Human
aguguugggauaacaggcaugagccacugugc

SEQ ID NO: 328734 - RNA, 32 nt, Human
aguguugggaucacaggcgugagccaccacau

SEQ ID NO: 328735 - RNA, 32 nt, Human
aguguugggaucacaggcgugagccaccgcau

SEQ ID NO: 328736 - RNA, 32 nt, Human
aguguugggauuacaagcgugagccacugcac

SEQ ID NO: 328737 - RNA, 32 nt, Human
aguguugggauuacagccaugagccaccaugc

SEQ ID NO: 328738 - RNA, 32 nt, Human
aguguugggauuacagccgugagccaccacgc

SEQ ID NO: 328739 - RNA, 32 nt, Human
aguguugggauuacaggcaaugagccaccacg

SEQ ID NO: 328740 - RNA, 32 nt, Human
aguguugggauuacaggcacgagccacugugc

SEQ ID NO: 328741 - RNA, 32 nt, Human
aguguugggauuacaggcauaagccauugugc

SEQ ID NO: 328742 - RNA, 32 nt, Human
aguguugggauuacaggcaugagacacugccu

SEQ ID NO: 328743 - RNA, 32 nt, Human
aguguugggauuacaggcaugagccaccacuc

SEQ ID NO: 328744 - RNA, 32 nt, Human
aguguugggauuacaggcaugagccaccaugc

SEQ ID NO: 328745 - RNA, 32 nt, Human
aguguugggauuacaggcaugagccaccgcac

SEQ ID NO: 328746 - RNA, 32 nt, Human
aguguugggauuacaggcaugagccaccugaa

SEQ ID NO: 328747 - RNA, 32 nt, Human
aguguugggauuacaggcaugagccacugcgc

SEQ ID NO: 328748 - RNA, 32 nt, Human
aguguugggauuacaggcaugagccacugugc

SEQ ID NO: 328749 - RNA, 32 nt, Human
aguguugggauuacaggcaugagccgcugccu

SEQ ID NO: 328750 - RNA, 32 nt, Human
aguguugggauuacaggcaugagcuacuacau

SEQ ID NO: 328751 - RNA, 32 nt, Human
aguguugggauuacaggcgugagccaccgcac

SEQ ID NO: 328752 - RNA, 32 nt, Human
aguguugggauuacaggcgugagccaccgcgc

SEQ ID NO: 328753 - RNA, 32 nt, Human
aguguugggauuacaggcgugagccaccucac

SEQ ID NO: 328754 - RNA, 32 nt, Human
aguguugggauuacaggcgugagccacugcac

SEQ ID NO: 328755 - RNA, 32 nt, Human
aguguugggauuacaggcgugagccacugccc

SEQ ID NO: 328756 - RNA, 32 nt, Human
aguguugggauuacaggcgugagccacugcgc

SEQ ID NO: 328757 - RNA, 32 nt, Human
aguguugggauuacaggcgugagccacugugc

SEQ ID NO: 328758 - RNA, 32 nt, Human
aguguugggauuacaggcgugagccauggugc

SEQ ID NO: 328759 - RNA, 32 nt, Human
aguguugggauuacaggcgugagccauugcgc

SEQ ID NO: 328760 - RNA, 32 nt, Human
aguguugggauuacaggcgugagucaccgcgc

SEQ ID NO: 328761 - RNA, 32 nt, Human
aguguugggauuacaggcgugagucacugugc

SEQ ID NO: 328762 - RNA, 32 nt, Human
aguguugggauuacaggcgugagugaccaugc

SEQ ID NO: 328763 - RNA, 32 nt, Human
aguguugggauuacaggcuugagccaccgcac

SEQ ID NO: 328764 - RNA, 32 nt, Human
aguguugggauuacaggcuugagccaccgugc

SEQ ID NO: 328765 - RNA, 19 nt, Human
aguguugggauuacaggug

SEQ ID NO: 328766 - RNA, 32 nt, Human
aguguugggauuacaggugugaaccacugugc

SEQ ID NO: 328767 - RNA, 32 nt, Human
aguguugggauuacaggugugagccacagcac

SEQ ID NO: 328768 - RNA, 32 nt, Human
aguguugggauuacaggugugagccaccacgc

SEQ ID NO: 328769 - RNA, 32 nt, Human
aguguugggauuacaggugugagccaccgugc

SEQ ID NO: 328770 - RNA, 32 nt, Human
aguguugggauuacaggugugagccacugugc

SEQ ID NO: 328771 - RNA, 32 nt, Human
aguguugggauuacaggugugugucacugugc

SEQ ID NO: 328772 - RNA, 32 nt, Human
aguguugggauuacaugcaugagccacugugc

SEQ ID NO: 328773 - RNA, 32 nt, Human
aguguugggauuaccggcgugagccaccaugc

SEQ ID NO: 328774 - RNA, 32 nt, Human
aguguugggauuacguguguaagccacagugc

SEQ ID NO: 328775 - RNA, 32 nt, Human
aguguugggauuauaagcgugagccaccaugc

SEQ ID NO: 328776 - RNA, 32 nt, Human
aguguugggauuauaggcacgagccaccaugc

SEQ ID NO: 328777 - RNA, 32 nt, Human
aguguugggauuauaggcaugagccaccacga

SEQ ID NO: 328778 - RNA, 32 nt, Human
aguguugggauuauaggcaugagccaccgugc

SEQ ID NO: 328779 - RNA, 32 nt, Human
aguguugggauuauaggcaugagccacugcau

SEQ ID NO: 328780 - RNA, 32 nt, Human
aguguugggauuauaggcgugagccaccaugc

SEQ ID NO: 328781 - RNA, 32 nt, Human
aguguugggauuauaggcgugagccaccgcgc

SEQ ID NO: 328782 - RNA, 32 nt, Human
aguguugggauuauaggcgugagccacugugu

SEQ ID NO: 328783 - RNA, 32 nt, Human
aguguugggauuauagguaugaaccacugcac

SEQ ID NO: 328784 - RNA, 32 nt, Human
aguguugggauuauagguaugagccaccgcgc

SEQ ID NO: 328785 - RNA, 32 nt, Human
aguguugggauuauaggugugagccagcagcc

SEQ ID NO: 328786 - RNA, 32 nt, Human
aguguugggauuaugggcgugagucacuguac

SEQ ID NO: 328787 - RNA, 32 nt, Human
aguguugggauugcagauaugagccacuggcc

SEQ ID NO: 328788 - RNA, 32 nt, Human
aguguugggauugcaggcgugagccacugcuc

SEQ ID NO: 328789 - RNA, 32 nt, Human
aguguugggcagguggugggagagcgucaggc

SEQ ID NO: 328790 - RNA, 32 nt, Human
aguguuggggcugggggccagcuccaggaggg

SEQ ID NO: 328791 - RNA, 25 nt, Human
aguguuggugacccaacacuagcca

SEQ ID NO: 328792 - RNA, 32 nt, Human
aguguuggugguaggaggauggggagaggaaa

SEQ ID NO: 328793 - RNA, 32 nt, Human
aguguugguguuuuaaugccugcagacaagcu

SEQ ID NO: 328794 - RNA, 32 nt, Human
aguguugguugagggucugccaugaccaagga

SEQ ID NO: 328795 - RNA, 31 nt, Human
aguguuguacagagggaaaaagacuggugga

SEQ ID NO: 328796 - RNA, 32 nt, Human
aguguugugauaguagagaagcuuuuagucaa

SEQ ID NO: 328797 - RNA, 32 nt, Human
aguguugugauuacaggcgugagccaccacac

SEQ ID NO: 328798 - RNA, 32 nt, Human
aguguuguucaguuucacaugguacaaauaag

SEQ ID NO: 328799 - RNA, 32 nt, Human
aguguuuaacaaacaaccccaaaacuuggaug

SEQ ID NO: 328800 - RNA, 32 nt, Human
aguguuuacgcuuuaauuucuaccacaaaaua

SEQ ID NO: 328801 - RNA, 32 nt, Human
aguguuuagauucuugauaaagauggaaaugg

SEQ ID NO: 328802 - RNA, 18 nt, Human
aguguuuagcaggcuguu

SEQ ID NO: 328803 - RNA, 32 nt, Human
aguguuuagcuucaagacuggaaagggaauau

SEQ ID NO: 328804 - RNA, 32 nt, Human
aguguuuaggaaccugcccuuuggugcugggc

SEQ ID NO: 328805 - RNA, 32 nt, Human
aguguuuaguauugcugcuauuuggaguacaa

SEQ ID NO: 328806 - RNA, 32 nt, Human
aguguuuaugguuucaggaaaagaacuuugug

SEQ ID NO: 328807 - RNA, 32 nt, Human
aguguuucaaagcugcucaaucaaaagaaaug

SEQ ID NO: 328808 - RNA, 32 nt, Human
aguguuucaaugcagugugagccacucccuuc

SEQ ID NO: 328809 - RNA, 32 nt, Human
aguguuucacacauuaucucauuuaauccucu

SEQ ID NO: 328810 - RNA, 32 nt, Human
aguguuucacugucucaaccuuaucugcacag

SEQ ID NO: 328811 - RNA, 32 nt, Human
aguguuuccacccagaaauuccugggcuggaa

SEQ ID NO: 328812 - RNA, 32 nt, Human
aguguuuccaggggcacuaagagaccaaaauc

SEQ ID NO: 328813 - RNA, 32 nt, Human
aguguuucccauaauuuucuucaugcaaugac

SEQ ID NO: 328814 - RNA, 32 nt, Human
aguguuucuaggguaagggaccugcaggugua

SEQ ID NO: 328815 - RNA, 32 nt, Human
aguguuugaagaaaaagguacaaaaauggcuu

SEQ ID NO: 328816 - RNA, 32 nt, Human
aguguuugagcagugcugagcacaaagcagac

SEQ ID NO: 328817 - RNA, 32 nt, Human
aguguuugccuauguggaaacaacagcaaacu

SEQ ID NO: 328818 - RNA, 32 nt, Human
aguguuugccugacugagccugugaagaaaau

SEQ ID NO: 328819 - RNA, 32 nt, Human
aguguuugccuuugaacacaucuucuugcuga

SEQ ID NO: 328820 - RNA, 32 nt, Human
aguguuugguuuucugaccuugcgauaguuua

SEQ ID NO: 328821 - RNA, 32 nt, Human
aguguuuguaccugacaucgggauguucauug

SEQ ID NO: 328822 - RNA, 29 nt, Human
aguguuugucuuucugugccuggcuuauu

SEQ ID NO: 328823 - RNA, 32 nt, Human
aguguuuguggaaugaguccuccuaguaaagu

SEQ ID NO: 328824 - RNA, 32 nt, Human
aguguuuguggauauacaugccaagccgccac

SEQ ID NO: 328825 - RNA, 32 nt, Human
aguguuugugucugugcugcguuugugagcug

SEQ ID NO: 328826 - RNA, 32 nt, Human
aguguuuuagagauggcuuucccagugugugu

SEQ ID NO: 328827 - RNA, 32 nt, Human
aguguuuugugccuguuuaaaggcuuuuguuu

SEQ ID NO: 328828 - RNA, 32 nt, Human
aguguuuuuagaggagagaggaggaggaggag

SEQ ID NO: 328829 - RNA, 32 nt, Human
aguguuuuuguguccagcucaguaucugcaac

SEQ ID NO: 328830 - RNA, 32 nt, Human
aguuaaaaagggcagggcaucuccugugcaug

SEQ ID NO: 328831 - RNA, 32 nt, Human
aguuaaaaaugcugggagucucugcauagaua

SEQ ID NO: 328832 - RNA, 32 nt, Human
aguuaaaaccuacaggccgggugcgguggcuc

SEQ ID NO: 328833 - RNA, 32 nt, Human
aguuaaaaugccacaagcaugagugugauugu

SEQ ID NO: 328834 - RNA, 32 nt, Human
aguuaaaauuaaaaauaaauuaguauauuauu

SEQ ID NO: 328835 - RNA, 32 nt, Human
aguuaaacagugacauguugagcaccuggagg

SEQ ID NO: 328836 - RNA, 32 nt, Human
aguuaaaccaaacuacagucucagccugucau

SEQ ID NO: 328837 - RNA, 32 nt, Human
aguuaaaccaugggacaaacccauaacauguu

SEQ ID NO: 328838 - RNA, 32 nt, Human
aguuaaaccccugcuuucuguccuuugcaccu

SEQ ID NO: 328839 - RNA, 32 nt, Human
aguuaaaccuuuuaacuuccauggcccuuuag

SEQ ID NO: 328840 - RNA, 32 nt, Human
aguuaaacucauuucacuucuccugggagacg

SEQ ID NO: 328841 - RNA, 32 nt, Human
aguuaaagagcaggaugaugucugaaguggcu

SEQ ID NO: 328842 - RNA, 32 nt, Human
aguuaaagcaaauucuagauacaugguagaga

SEQ ID NO: 328843 - RNA, 32 nt, Human
aguuaaaggaagcacacaugcuagucauguga

SEQ ID NO: 328844 - RNA, 32 nt, Human
aguuaaaggcauuuugaugaugcuuuuucuug

SEQ ID NO: 328845 - RNA, 32 nt, Human
aguuaaagggccuguuucuuacuggccuguga

SEQ ID NO: 328846 - RNA, 32 nt, Human
aguuaaauacaaaaucauggugacacuuccaa

SEQ ID NO: 328847 - RNA, 32 nt, Human
aguuaaaucuuuuccagggagaaagaacuucc

SEQ ID NO: 328848 - RNA, 32 nt, Human
aguuaaauuccagggucucagaugguuaggac

SEQ ID NO: 328849 - RNA, 31 nt, Human
aguuaaauuccauacacuaggagggaguuuu

SEQ ID NO: 328850 - RNA, 32 nt, Human
aguuaacacccugagaccaucuucccacuucc

SEQ ID NO: 328851 - RNA, 32 nt, Human
aguuaacagggagaggaugggggaggggacaa

SEQ ID NO: 328852 - RNA, 32 nt, Human
aguuaacauauaguuuuaaauguauguauuau

SEQ ID NO: 328853 - RNA, 32 nt, Human
aguuaacaucuaccccaggaaaccagaucucc

SEQ ID NO: 328854 - RNA, 32 nt, Human
aguuaaccaacauucaacaugaccuuaaaacu

SEQ ID NO: 328855 - RNA, 32 nt, Human
aguuaaccacauggcugauccuggugacugaa

SEQ ID NO: 328856 - RNA, 32 nt, Human
aguuaaccaccaccaucucucuccucuucaaa

SEQ ID NO: 328857 - RNA, 32 nt, Human
aguuaaccauuuuaaagggaacaauucagugg

SEQ ID NO: 328858 - RNA, 32 nt, Human
aguuaaccuauguaacaaaccugcauuuguac

SEQ ID NO: 328859 - RNA, 32 nt, Human
aguuaaccuucagcuacuuggagauucauggc

SEQ ID NO: 328860 - RNA, 32 nt, Human
aguuaacgguaugcuuucuucuuugcuuauuu

SEQ ID NO: 328861 - RNA, 32 nt, Human
aguuaacucccaguucuucucccugagcuugg

SEQ ID NO: 328862 - RNA, 32 nt, Human
aguuaacugagaggaagggauuuggaaaccau

SEQ ID NO: 328863 - RNA, 32 nt, Human
aguuaacugccuggcuccucugggcuaggcuc

SEQ ID NO: 328864 - RNA, 32 nt, Human
aguuaacugugcugaaaaacuaauaaagaacc

SEQ ID NO: 328865 - RNA, 32 nt, Human
aguuaacuucacugcugaugcccugaguucca

SEQ ID NO: 328866 - RNA, 32 nt, Human
aguuaacuuggcaauggaacaaacaaaauuga

SEQ ID NO: 328867 - RNA, 32 nt, Human
aguuaacuuuacugcuauuuuauuaccuaaua

SEQ ID NO: 328868 - RNA, 32 nt, Human
aguuaagaaggaaagaaggaaagcaggagaaa

SEQ ID NO: 328869 - RNA, 32 nt, Human
aguuaagaagggagccuggagcuguuuucaug

SEQ ID NO: 328870 - RNA, 32 nt, Human
aguuaagacagcuguaaauggacugaucuaca

SEQ ID NO: 328871 - RNA, 32 nt, Human
aguuaagaccugccuagcagagccccagucuc

SEQ ID NO: 328872 - RNA, 32 nt, Human
aguuaagcaaaaugcuucugcacacaaaacuc

SEQ ID NO: 328873 - RNA, 32 nt, Human
aguuaagcaaacaccucugaccaaaaguaggg

SEQ ID NO: 328874 - RNA, 32 nt, Human
aguuaagcagcuauuaaaucacccgaagacac

SEQ ID NO: 328875 - RNA, 32 nt, Human
aguuaagccuuuguauuuccauguuauuccac

SEQ ID NO: 328876 - RNA, 32 nt, Human
aguuaaggaauuauuuuucauuuccagcucug

SEQ ID NO: 328877 - RNA, 32 nt, Human
aguuaaggcacaucaaacacaggagucgagag

SEQ ID NO: 328878 - RNA, 32 nt, Human
aguuaagggaaagaggaggaaguccuaagcag

SEQ ID NO: 328879 - RNA, 32 nt, Human
aguuaagggagagagacaaaacggggauugag

SEQ ID NO: 328880 - RNA, 32 nt, Human
aguuaaggugccuagcagcucagucccucaca

SEQ ID NO: 328881 - RNA, 31 nt, Human
aguuaaguaguuuucugaacggccagaagac

SEQ ID NO: 328882 - RNA, 32 nt, Human
aguuaaguauucacauacacacagaaaauacg

SEQ ID NO: 328883 - RNA, 32 nt, Human
aguuaaguccuggaacccagagcugcugugua

SEQ ID NO: 328884 - RNA, 32 nt, Human
aguuaaguucucuccaaacucuugcccacaga

SEQ ID NO: 328885 - RNA, 32 nt, Human
aguuaaguuguagcacgugaauacuuacuuac

SEQ ID NO: 328886 - RNA, 32 nt, Human
aguuaauauaaauacauaauugcauuugcucu

SEQ ID NO: 328887 - RNA, 31 nt, Human
aguuaauaugauccucuguugaagcaagaag

SEQ ID NO: 328888 - RNA, 32 nt, Human
aguuaaucaaggcaaaucagcaagcccccaaa

SEQ ID NO: 328889 - RNA, 32 nt, Human
aguuaaucacccaccauagggcaugauuaaca

SEQ ID NO: 328890 - RNA, 32 nt, Human
aguuaaucauuugaauucugaacacuggagaa

SEQ ID NO: 328891 - RNA, 32 nt, Human
aguuaauccucacaccuacuguaggagauagg

SEQ ID NO: 328892 - RNA, 32 nt, Human
aguuaaugcuaagaaaagauuuggggaagguu

SEQ ID NO: 328893 - RNA, 32 nt, Human
aguuaauggaauauuucuuuccucacuaccuc

SEQ ID NO: 328894 - RNA, 32 nt, Human
aguuaaugugugugcgcauuuauauguaggca

SEQ ID NO: 328895 - RNA, 32 nt, Human
aguuaauugaauuuuaaauuaaugaucaauaa

SEQ ID NO: 328896 - RNA, 32 nt, Human
aguuacaaaugaagcuaacaaauagcuaaaua

SEQ ID NO: 328897 - RNA, 32 nt, Human
aguuacaacuguucacaacaccugugugugug

SEQ ID NO: 328898 - RNA, 32 nt, Human
aguuacaauuacaucucuaauuuuggauaaua

SEQ ID NO: 328899 - RNA, 32 nt, Human
aguuacaauuccaguuuuccucaagaucugag

SEQ ID NO: 328900 - RNA, 32 nt, Human
aguuacacccuguuuaacccugccuucaaagg

SEQ ID NO: 328901 - RNA, 32 nt, Human
aguuacagaaaugggagacuguuucucuggcc

SEQ ID NO: 328902 - RNA, 32 nt, Human
aguuacagacaguaaugcuggaccuggacggu

SEQ ID NO: 328903 - RNA, 32 nt, Human
aguuacagccugggcaauaaagugagacccug

SEQ ID NO: 328904 - RNA, 32 nt, Human
aguuacagcucaggaaaagccugcugaauuua

SEQ ID NO: 328905 - RNA, 32 nt, Human
aguuacaggagagaguaggugguggugacgug

SEQ ID NO: 328906 - RNA, 32 nt, Human
aguuacaggucaggaaaagccugcugaauuua

SEQ ID NO: 328907 - RNA, 32 nt, Human
aguuacaggugaggacguucaggccaaggcgu

SEQ ID NO: 328908 - RNA, 32 nt, Human
aguuacauccaucugucaucugaagaaggagg

SEQ ID NO: 328909 - RNA, 21 nt, Human
aguuaccaaguucaaccugcu

SEQ ID NO: 328910 - RNA, 32 nt, Human
aguuaccacgaggggaucugugugugagcugg

SEQ ID NO: 328911 - RNA, 32 nt, Human
aguuaccacuaggcuaccaggucucuaggggc

SEQ ID NO: 328912 - RNA, 32 nt, Human
aguuaccagaguugggggccucugaguguguc

SEQ ID NO: 328913 - RNA, 32 nt, Human
aguuacccauuggauucauaugagcuaaaacu

SEQ ID NO: 328914 - RNA, 32 nt, Human
aguuaccccacuugccuugggcguguccacug

SEQ ID NO: 328915 - RNA, 32 nt, Human
aguuacccuuucuccuuuucucuucagugguu

SEQ ID NO: 328916 - RNA, 32 nt, Human
aguuaccucugaaaaggcaggaaaggugguuc

SEQ ID NO: 328917 - RNA, 32 nt, Human
aguuaccuucuuucuggccaucuugacuucug

SEQ ID NO: 328918 - RNA, 32 nt, Human
aguuacuaggguaauuauaugucauggcuugg

SEQ ID NO: 328919 - RNA, 32 nt, Human
aguuacucaaagcuaaucagauagcgaaagaa

SEQ ID NO: 328920 - RNA, 32 nt, Human
aguuacucauuuccaucuucucuucaacuuuc

SEQ ID NO: 328921 - RNA, 32 nt, Human
aguuacucuccaagaccaacagacagcuguuu

SEQ ID NO: 328922 - RNA, 32 nt, Human
aguuacugaauacgucaggaaggaggcugguu

SEQ ID NO: 328923 - RNA, 32 nt, Human
aguuacugacaauauagugccaggguuggcca

SEQ ID NO: 328924 - RNA, 32 nt, Human
aguuacugacgacaggcagagaaugagccuuu

SEQ ID NO: 328925 - RNA, 32 nt, Human
aguuacugcaauauuugagaacuguucuuuuu

SEQ ID NO: 328926 - RNA, 32 nt, Human
aguuacugcacuccagccugggugacaagagu

SEQ ID NO: 328927 - RNA, 32 nt, Human
aguuacugccauuucacgcauuuccuuuuuga

SEQ ID NO: 328928 - RNA, 32 nt, Human
aguuacugggcuuucugugcuuggccugacuu

SEQ ID NO: 328929 - RNA, 32 nt, Human
aguuacugucuauuuaaaacugcaagcaguua

SEQ ID NO: 328930 - RNA, 32 nt, Human
aguuacuuaaccucucagcugugugucaguuu

SEQ ID NO: 328931 - RNA, 32 nt, Human
aguuacuucccuuaggauaacagcccccaguu

SEQ ID NO: 328932 - RNA, 32 nt, Human
aguuacuucugggcagaugaaaagcuaccauc

SEQ ID NO: 328933 - RNA, 32 nt, Human
aguuacuugcagcugaaaacaucccaggacag

SEQ ID NO: 328934 - RNA, 32 nt, Human
aguuacuugguaucaccgccucucaccuucuc

SEQ ID NO: 328935 - RNA, 32 nt, Human
aguuacuuuagauggcaagcauguaacuuaua

SEQ ID NO: 328936 - RNA, 32 nt, Human
aguuacuuucagaguagauacaggguuuuaga

SEQ ID NO: 328937 - RNA, 32 nt, Human
aguuacuuucccaagaucuccccacaagcaag

SEQ ID NO: 328938 - RNA, 32 nt, Human
aguuacuuuuaaaaauauaaguuagggcuagg

SEQ ID NO: 328939 - RNA, 32 nt, Human
aguuacuuuucuaguccagucuggaacacagg

SEQ ID NO: 328940 - RNA, 32 nt, Human
aguuacuuuugccuaccagcagcuaucccuag

SEQ ID NO: 328941 - RNA, 32 nt, Human
aguuacuuuuuaccugcugaguccggugaacc

SEQ ID NO: 328942 - RNA, 32 nt, Human
aguuacuuuuuguagagagagcuguauuaagu

SEQ ID NO: 328943 - RNA, 32 nt, Human
aguuagaaaaauuggccucagugugaaauuuu

SEQ ID NO: 328944 - RNA, 32 nt, Human
aguuagaaaacacacuagcauuuacaaaugug

SEQ ID NO: 328945 - RNA, 32 nt, Human
aguuagaauugagagacuugaacguggagaug

SEQ ID NO: 328946 - RNA, 32 nt, Human
aguuagaccagccugggcaacauagcaagacc

SEQ ID NO: 328947 - RNA, 32 nt, Human
aguuagaccgcagagagcuggcauucacucaa

SEQ ID NO: 328948 - RNA, 32 nt, Human
aguuagacugugaaccugcagaccacuccacu

SEQ ID NO: 328949 - RNA, 32 nt, Human
aguuagagaagcaguacauuugcuuuugauag

SEQ ID NO: 328950 - RNA, 26 nt, Human
aguuagagaccagccugggcaacgua

SEQ ID NO: 328951 - RNA, 32 nt, Human
aguuagaggaggaggaggaggaggaagaggug

SEQ ID NO: 328952 - RNA, 31 nt, Human
aguuagagugagaggaaagcuggagcugugg

SEQ ID NO: 328953 - RNA, 32 nt, Human
aguuagaguuagaccugucuuuggaugaagaa

SEQ ID NO: 328954 - RNA, 32 nt, Human
aguuagaguuugagcauuauucagcauuaggg

SEQ ID NO: 328955 - RNA, 32 nt, Human
aguuagcagaagacuuccuacaauggaaugca

SEQ ID NO: 328956 - RNA, 32 nt, Human
aguuagcagauggugguuggcucccucugcuu

SEQ ID NO: 328957 - RNA, 32 nt, Human
aguuagccacuaggcugcgggugaaaugggau

SEQ ID NO: 328958 - RNA, 32 nt, Human
aguuagccaggccugggcugggcacacuccac

SEQ ID NO: 328959 - RNA, 32 nt, Human
aguuagccaguuaguccccaggccuguggcac

SEQ ID NO: 328960 - RNA, 32 nt, Human
aguuagcccucccagggauugcaguccuucac

SEQ ID NO: 328961 - RNA, 32 nt, Human
aguuagccuaccaguuggaauguggaucagug

SEQ ID NO: 328962 - RNA, 32 nt, Human
aguuagccuugauuuuagcccagagacagaug

SEQ ID NO: 328963 - RNA, 32 nt, Human
aguuagcucccaggcuccuaucucugccugag

SEQ ID NO: 328964 - RNA, 32 nt, Human
aguuagcucugacagcuucuaaaggaaaggga

SEQ ID NO: 328965 - RNA, 32 nt, Human
aguuagcugccuggaaaacucauagaaccauu

SEQ ID NO: 328966 - RNA, 32 nt, Human
aguuagcuuucuuccuggauuccucacuuuga

SEQ ID NO: 328967 - RNA, 32 nt, Human
aguuaggaaacaccagcuccugccuggggcag

SEQ ID NO: 328968 - RNA, 32 nt, Human
aguuaggaaacugaagccauaggucaggcaga

SEQ ID NO: 328969 - RNA, 32 nt, Human
aguuaggaaaugcagaauucaaagugaucucc

SEQ ID NO: 328970 - RNA, 32 nt, Human
aguuaggaagaacaguaaacagugauguuaaa

SEQ ID NO: 328971 - RNA, 32 nt, Human
aguuaggacuucaacaaaugaauuggggugag

SEQ ID NO: 328972 - RNA, 32 nt, Human
aguuaggaggcugaggcaagagaaucucuuga

SEQ ID NO: 328973 - RNA, 23 nt, Human
aguuaggcagugcaguacucagg

SEQ ID NO: 328974 - RNA, 32 nt, Human
aguuaggccugucaggucuccuugggaaaggc

SEQ ID NO: 328975 - RNA, 32 nt, Human
aguuaggcugccccgccacagagcaggcuuca

SEQ ID NO: 328976 - RNA, 32 nt, Human
aguuagggcggacgaagcaggagccgcggggc

SEQ ID NO: 328977 - RNA, 32 nt, Human
aguuaggggccaaggagagggaaggccagggc

SEQ ID NO: 328978 - RNA, 32 nt, Human
aguuaggguccugcugucugucauguugccuu

SEQ ID NO: 328979 - RNA, 32 nt, Human
aguuaggucacuugcccgcugugugaccuugg

SEQ ID NO: 328980 - RNA, 32 nt, Human
aguuaggucucagcuacucaggaggcugagau

SEQ ID NO: 328981 - RNA, 32 nt, Human
aguuagguuucucaucuggagcuguuucucag

SEQ ID NO: 328982 - RNA, 32 nt, Human
aguuaguaaggguuuuauaucucuucugucca

SEQ ID NO: 328983 - RNA, 32 nt, Human
aguuaguaaguggcagaacagggacuugaacc

SEQ ID NO: 328984 - RNA, 32 nt, Human
aguuaguccuaacuuuuaaaagaaggaaaacc

SEQ ID NO: 328985 - RNA, 32 nt, Human
aguuagucggggacaauuucccucaauguuaa

SEQ ID NO: 328986 - RNA, 32 nt, Human
aguuaguggggagacuagcaccuagguaccca

SEQ ID NO: 328987 - RNA, 32 nt, Human
aguuaguguuaauaaggaucuacugagccucg

SEQ ID NO: 328988 - RNA, 20 nt, Human
aguuaguguuucuagcauua

SEQ ID NO: 328989 - RNA, 30 nt, Human
aguuaguuauucacugugcuccuguuuccu

SEQ ID NO: 328990 - RNA, 32 nt, Human
aguuaguucucagcugagcuuccuagggccag

SEQ ID NO: 328991 - RNA, 32 nt, Human
aguuauaaaauuauuuuuaauauuuaaggccu

SEQ ID NO: 328992 - RNA, 32 nt, Human
aguuauaaagacggcaagaccaugcuauugaa

SEQ ID NO: 328993 - RNA, 32 nt, Human
aguuauacacagaaacaaacacacacgcacgu

SEQ ID NO: 328994 - RNA, 32 nt, Human
aguuauacagaauugucauacugcauuagcuu

SEQ ID NO: 328995 - RNA, 32 nt, Human
aguuauagaccagaggcugaaacccaaacuau

SEQ ID NO: 328996 - RNA, 32 nt, Human
aguuauagagguugcucagaaccuucucagca

SEQ ID NO: 328997 - RNA, 32 nt, Human
aguuauaguaacugacugguauauucauucag

SEQ ID NO: 328998 - RNA, 32 nt, Human
aguuauagucucucuucugguuaucucuauga

SEQ ID NO: 328999 - RNA, 32 nt, Human
aguuauauuuucuuuuuccuuauauagaguaa

SEQ ID NO: 329000 - RNA, 32 nt, Human
aguuaucaaaagugacuuugaccucauaaaag

SEQ ID NO: 329001 - RNA, 32 nt, Human
aguuaucacaccacugcacuucagccuggaug

SEQ ID NO: 329002 - RNA, 32 nt, Human
aguuaucagggaaagagguugaugugaacuca

SEQ ID NO: 329003 - RNA, 32 nt, Human
aguuauccucuuugccuggccuuugagaauaa

SEQ ID NO: 329004 - RNA, 32 nt, Human
aguuaucgcagauauucuagcuucauuguaag

SEQ ID NO: 329005 - RNA, 32 nt, Human
aguuaucucaaagaagcucauuaccuugcuaa

SEQ ID NO: 329006 - RNA, 22 nt, Human
aguuaucuccaaagggaagcaa

SEQ ID NO: 329007 - RNA, 32 nt, Human
aguuaucugcaagcaaagagagaggcuucaga

SEQ ID NO: 329008 - RNA, 32 nt, Human
aguuaucuguuuccuguucucuuguauagcug

SEQ ID NO: 329009 - RNA, 32 nt, Human
aguuaucuuauuccugcucuguguucucauug

SEQ ID NO: 329010 - RNA, 32 nt, Human
aguuaugaaaguacaaacuauuugugugauua

SEQ ID NO: 329011 - RNA, 31 nt, Human
aguuaugaaauacuuuuacauuuaaggagau

SEQ ID NO: 329012 - RNA, 32 nt, Human
aguuaugaaaugcaucagcaguggguugaaga

SEQ ID NO: 329013 - RNA, 32 nt, Human
aguuaugacgcccauugcccagcuucagucca

SEQ ID NO: 329014 - RNA, 32 nt, Human
aguuaugagaaaggagaaagcuugcaaugcau

SEQ ID NO: 329015 - RNA, 32 nt, Human
aguuaugaggagagaauacaaaaagcaugcac

SEQ ID NO: 329016 - RNA, 32 nt, Human
aguuaugaguagaagcaauaagaagguguccu

SEQ ID NO: 329017 - RNA, 32 nt, Human
aguuaugaucaaagaagagaguaaagcuaugu

SEQ ID NO: 329018 - RNA, 32 nt, Human
aguuaugcacugugaagaaugagaagggaaaa

SEQ ID NO: 329019 - RNA, 32 nt, Human
aguuaugcagcacaucauuauaauuuugaugu

SEQ ID NO: 329020 - RNA, 32 nt, Human
aguuaugcagcagccacaauuugcauugccag

SEQ ID NO: 329021 - RNA, 32 nt, Human
aguuaugccacuccaauauuauuauuugaugg

SEQ ID NO: 329022 - RNA, 32 nt, Human
aguuaugcccagcuccuuccuccuccuccucc

SEQ ID NO: 329023 - RNA, 32 nt, Human
aguuauggauauagaacauccuugcagacuau

SEQ ID NO: 329024 - RNA, 32 nt, Human
aguuauggccucugcacuccagccugggugac

SEQ ID NO: 329025 - RNA, 32 nt, Human
aguuauggcuucacauucauugcagugggaua

SEQ ID NO: 329026 - RNA, 32 nt, Human
aguuaugggaaagagaaugcauagaccuaucu

SEQ ID NO: 329027 - RNA, 32 nt, Human
aguuauguaagcuaaaaagcugugugaaccca

SEQ ID NO: 329028 - RNA, 32 nt, Human
aguuauguauauguuuuccauguuuuuagcua

SEQ ID NO: 329029 - RNA, 32 nt, Human
aguuauguccacuuuugguggauuucccagga

SEQ ID NO: 329030 - RNA, 32 nt, Human
aguuaugugaaggaugaaaggugggugaaagg

SEQ ID NO: 329031 - RNA, 32 nt, Human
aguuaugugaagucaccaagguucuugaccgu

SEQ ID NO: 329032 - RNA, 32 nt, Human
aguuauuaaagaauuaaaagaagaacuagacc

SEQ ID NO: 329033 - RNA, 32 nt, Human
aguuauuagggaggggagagcaaguuaaggga

SEQ ID NO: 329034 - RNA, 32 nt, Human
aguuauuauacaaccaaauacaacuuccaguu

SEQ ID NO: 329035 - RNA, 32 nt, Human
aguuauuaucuauuuguucucccuuucaggaa

SEQ ID NO: 329036 - RNA, 32 nt, Human
aguuauuccuucuuucaguucaucucacugga

SEQ ID NO: 329037 - RNA, 32 nt, Human
aguuauucucucuauaagauccacacucagca

SEQ ID NO: 329038 - RNA, 32 nt, Human
aguuauugaucauuucuuaaggaacagcauug

SEQ ID NO: 329039 - RNA, 32 nt, Human
aguuauugcagaacuuccuguccugguggaga

SEQ ID NO: 329040 - RNA, 32 nt, Human
aguuauugccuaggagugugagacugauguug

SEQ ID NO: 329041 - RNA, 32 nt, Human
aguuauugcucucaugagaugauggcuguauu

SEQ ID NO: 329042 - RNA, 32 nt, Human
aguuauuggauuaaacuacuuuagaccuuagc

SEQ ID NO: 329043 - RNA, 32 nt, Human
aguuauugggagaaggaaggacuugagccggu

SEQ ID NO: 329044 - RNA, 32 nt, Human
aguuauuguggcuucuggugaggggaaguuua

SEQ ID NO: 329045 - RNA, 32 nt, Human
aguuauuguguaccaagcauugugcuaaauac

SEQ ID NO: 329046 - RNA, 32 nt, Human
aguuauuuccgcuccccagccccacacuccuu

SEQ ID NO: 329047 - RNA, 32 nt, Human
aguuauuugcaaccucccuuuggguuuggccc

SEQ ID NO: 329048 - RNA, 32 nt, Human
aguuauuugcauaagugcaauaagaaucuguu

SEQ ID NO: 329049 - RNA, 32 nt, Human
aguuauuuucccuguuacauucagaguugagc

SEQ ID NO: 329050 - RNA, 32 nt, Human
aguuauuuuguaaacauaagcaaauaagggcu

SEQ ID NO: 329051 - RNA, 32 nt, Human
aguucaaaaccagccuggacaaucuggcgaaa

SEQ ID NO: 329052 - RNA, 32 nt, Human
aguucaaaaccagccuggccaacauggugaaa

SEQ ID NO: 329053 - RNA, 32 nt, Human
aguucaaaagaauaguagaagugauagugccg

SEQ ID NO: 329054 - RNA, 31 nt, Human
aguucaaagcgcagcuucuggaaaaggcugu

SEQ ID NO: 329055 - RNA, 32 nt, Human
aguucaaagcugugaaggauugggagauccug

SEQ ID NO: 329056 - RNA, 32 nt, Human
aguucaaagugaucagaggaaaccuaguuuua

SEQ ID NO: 329057 - RNA, 32 nt, Human
aguucaaaucugcagugcgcaaugauuauucc

SEQ ID NO: 329058 - RNA, 32 nt, Human
aguucaaauuccaggaagccacuuuuuauugg

SEQ ID NO: 329059 - RNA, 32 nt, Human
aguucaacaacaccagccugaccaacauggug

SEQ ID NO: 329060 - RNA, 32 nt, Human
aguucaaccacugcacuccacuaagcaacugg

SEQ ID NO: 329061 - RNA, 32 nt, Human
aguucaaccagccuggacaacaaagcaagacc

SEQ ID NO: 329062 - RNA, 32 nt, Human
aguucaaccuuaaaaugauguuagacaacagg

SEQ ID NO: 329063 - RNA, 32 nt, Human
aguucaacucacagccucggaacugauucaga

SEQ ID NO: 329064 - RNA, 32 nt, Human
aguucaacugauaacuacuccuccaggccccc

SEQ ID NO: 329065 - RNA, 32 nt, Human
aguucaagaccacccuggccaaccuggugaaa

SEQ ID NO: 329066 - RNA, 32 nt, Human
aguucaagaccagccuggccaacagggugaaa

SEQ ID NO: 329067 - RNA, 32 nt, Human
aguucaagaccagcugggcaccauagugagac

SEQ ID NO: 329068 - RNA, 21 nt, Human
aguucaagcccaggaccacca

SEQ ID NO: 329069 - RNA, 31 nt, Human
aguucaagccuuaauugacaugcagguguuu

SEQ ID NO: 329070 - RNA, 32 nt, Human
aguucaagcuuugugggcuuuuauagucucug

SEQ ID NO: 329071 - RNA, 18 nt, Human
aguucaaggcugcaguga

SEQ ID NO: 329072 - RNA, 32 nt, Human
aguucaaucaugugauuucacucaugaacaua

SEQ ID NO: 329073 - RNA, 32 nt, Human
aguucacaaggcagucagaagugauccaaagu

SEQ ID NO: 329074 - RNA, 32 nt, Human
aguucacaaugaauuuuuaugccuggguuucu

SEQ ID NO: 329075 - RNA, 32 nt, Human
aguucacacauaaacuguaaaucaagagaagg

SEQ ID NO: 329076 - RNA, 32 nt, Human
aguucacaccacugccauuuccuccugggcaa

SEQ ID NO: 329077 - RNA, 32 nt, Human
aguucacaccuguaaucccagcacuuugggag

SEQ ID NO: 329078 - RNA, 32 nt, Human
aguucacacuucaggagagaacuucauagcac

SEQ ID NO: 329079 - RNA, 32 nt, Human
aguucacaggauucagcucggagagcucugua

SEQ ID NO: 329080 - RNA, 32 nt, Human
aguucacaggcagaagcgagcugugacauugu

SEQ ID NO: 329081 - RNA, 32 nt, Human
aguucacagugcgcccucccucccucccaucu

SEQ ID NO: 329082 - RNA, 32 nt, Human
aguucacauucagcucagcagagcaagacccc

SEQ ID NO: 329083 - RNA, 32 nt, Human
aguucacauuggagaaaagccuuacuguacug

SEQ ID NO: 329084 - RNA, 32 nt, Human
aguucacauugggucuuuaaaucuuuuagaua

SEQ ID NO: 329085 - RNA, 32 nt, Human
aguucaccaugauccaauaugaccucaucuug

SEQ ID NO: 329086 - RNA, 21 nt, Human
aguucaccauuucaggucacu

SEQ ID NO: 329087 - RNA, 32 nt, Human
aguucaccccaaccuuugccucacggguucaa

SEQ ID NO: 329088 - RNA, 32 nt, Human
aguucaccccagggccccagagggccucauuu

SEQ ID NO: 329089 - RNA, 32 nt, Human
aguucaccccucaccuccagccuggaggagac

SEQ ID NO: 329090 - RNA, 31 nt, Human
aguucacccucacugggcccugugucccugu

SEQ ID NO: 329091 - RNA, 32 nt, Human
aguucacccucauacucucaggagacucuucu

SEQ ID NO: 329092 - RNA, 32 nt, Human
aguucaccuacccugagugaacacccccagcu

SEQ ID NO: 329093 - RNA, 32 nt, Human
aguucaccugaaccuucucuucugcacaugga

SEQ ID NO: 329094 - RNA, 32 nt, Human
aguucaccuuaacauguaaauccacaggguag

SEQ ID NO: 329095 - RNA, 32 nt, Human
aguucacuccucuccagguggagcugccgccg

SEQ ID NO: 329096 - RNA, 32 nt, Human
aguucacucugucuuccugagcaguggaagau

SEQ ID NO: 329097 - RNA, 32 nt, Human
aguucacugcaaccuccacccugcagguucaa

SEQ ID NO: 329098 - RNA, 32 nt, Human
aguucacugcaaccuccaccucccagguucaa

SEQ ID NO: 329099 - RNA, 32 nt, Human
aguucacugcaaccuccacuuccuagguucaa

SEQ ID NO: 329100 - RNA, 32 nt, Human
aguucacugcaaccucugccucccacguucaa

SEQ ID NO: 329101 - RNA, 32 nt, Human
aguucacugcaaccucugccucccggguucaa

SEQ ID NO: 329102 - RNA, 32 nt, Human
aguucacugcaaccucugccuccuaaguucag

SEQ ID NO: 329103 - RNA, 32 nt, Human
aguucacugcaaccucugccuccuggguucaa

SEQ ID NO: 329104 - RNA, 32 nt, Human
aguucacugcaacuuccgcuucccagguucaa

SEQ ID NO: 329105 - RNA, 32 nt, Human
aguucacugcaacuucugccucccgaguucaa

SEQ ID NO: 329106 - RNA, 32 nt, Human
aguucacugcaagcuccgccuccucguuucaa

SEQ ID NO: 329107 - RNA, 32 nt, Human
aguucacugcagccuccgcccuccagguucaa

SEQ ID NO: 329108 - RNA, 32 nt, Human
aguucacugcagccucgaccucccaggcucaa

SEQ ID NO: 329109 - RNA, 32 nt, Human
aguucacugcagucucugccuccuugguucaa

SEQ ID NO: 329110 - RNA, 24 nt, Human
aguucacugcccaugugauacuga

SEQ ID NO: 329111 - RNA, 32 nt, Human
aguucacugcugcuuucccuccugggcucaag

SEQ ID NO: 329112 - RNA, 32 nt, Human
aguucacuggagggcccagccuggggaaagga

SEQ ID NO: 329113 - RNA, 32 nt, Human
aguucacuguacccuguuccuccugggcucaa

SEQ ID NO: 329114 - RNA, 32 nt, Human
aguucacuuuauugugagucuuugccacauuu

SEQ ID NO: 329115 - RNA, 32 nt, Human
aguucagaaaaaugauguugaauuguguguuu

SEQ ID NO: 329116 - RNA, 32 nt, Human
aguucagaaagaaaugucuuuauacaaaagac

SEQ ID NO: 329117 - RNA, 32 nt, Human
aguucagaacuuaaguaucagugcaaauuucu

SEQ ID NO: 329118 - RNA, 32 nt, Human
aguucagaagguguguccuugaacugaggccc

SEQ ID NO: 329119 - RNA, 32 nt, Human
aguucagacacaccgugcucaggagggaccca

SEQ ID NO: 329120 - RNA, 32 nt, Human
aguucagaccaccaccgucgcucuccuaccca

SEQ ID NO: 329121 - RNA, 32 nt, Human
aguucagacuagccacauuccaagugcuuaau

SEQ ID NO: 329122 - RNA, 32 nt, Human
aguucagagaaaagagauggaagagggaggaa

SEQ ID NO: 329123 - RNA, 32 nt, Human
aguucagagccgcgcaccgcccgccgccgcag

SEQ ID NO: 329124 - RNA, 32 nt, Human
aguucagagcugcccucuccugggcauggccu

SEQ ID NO: 329125 - RNA, 32 nt, Human
aguucagauaaauugcacuuggucaacggaaa

SEQ ID NO: 329126 - RNA, 32 nt, Human
aguucagaucgagucagaggccaaggaggaga

SEQ ID NO: 329127 - RNA, 32 nt, Human
aguucagcaaagcugcgcugggcacagcaugc

SEQ ID NO: 329128 - RNA, 32 nt, Human
aguucagcaaaucuauugaagucauugagaag

SEQ ID NO: 329129 - RNA, 32 nt, Human
aguucagcaagaaguguugaguguguacaaag

SEQ ID NO: 329130 - RNA, 32 nt, Human
aguucagcccuaggggaccucuuucuccugga

SEQ ID NO: 329131 - RNA, 32 nt, Human
aguucagcuccucuguggaugcguccccagau

SEQ ID NO: 329132 - RNA, 32 nt, Human
aguucagcugcacaugaauagaacagcaauga

SEQ ID NO: 329133 - RNA, 32 nt, Human
aguucaggcacugucuaaagccccaggcuggg

SEQ ID NO: 329134 - RNA, 32 nt, Human
aguucaggcccagauuguuccaggaucaaccc

SEQ ID NO: 329135 - RNA, 32 nt, Human
aguucaggcugucucaucccuugccaggagcu

SEQ ID NO: 329136 - RNA, 32 nt, Human
  misc_feature (30)..(30): n is a, c, g, or u
aguucaggcuuagaggcuuaucgcuaagunua

SEQ ID NO: 329137 - RNA, 32 nt, Human
aguucagggauuacaggcaugagccaccaugc

SEQ ID NO: 329138 - RNA, 32 nt, Human
aguucagggcucacucauccuacuucaucagc

SEQ ID NO: 329139 - RNA, 32 nt, Human
aguucagucaucuggugcaccagcugcuggaa

SEQ ID NO: 329140 - RNA, 32 nt, Human
aguucagugagaauguuuauguuuacaacuag

SEQ ID NO: 329141 - RNA, 32 nt, Human
aguucagugcaaucuccgccuccuggguucaa

SEQ ID NO: 329142 - RNA, 32 nt, Human
aguucagugcuauuguauaucuuguuagagca

SEQ ID NO: 329143 - RNA, 32 nt, Human
aguucagugucugcgucuaagagagcacuuug

SEQ ID NO: 329144 - RNA, 32 nt, Human
aguucagugucugcgucuaagagaguacuuug

SEQ ID NO: 329145 - RNA, 19 nt, Human
aguucaguucucaccaugg

SEQ ID NO: 329146 - RNA, 32 nt, Human
aguucaguucucaccauggagugaguggccuu

SEQ ID NO: 329147 - RNA, 32 nt, Human
aguucaguugggcuuagcugggcaguucuggu

SEQ ID NO: 329148 - RNA, 32 nt, Human
aguucauagaggcagaggguggggaagggcug

SEQ ID NO: 329149 - RNA, 32 nt, Human
aguucauagguuauaagagguaaguugaacaa

SEQ ID NO: 329150 - RNA, 32 nt, Human
aguucauagugaaguuuccacugugagcggca

SEQ ID NO: 329151 - RNA, 32 nt, Human
aguucauaucuagccuggucaacauagcaaga

SEQ ID NO: 329152 - RNA, 32 nt, Human
aguucaucuagguuuuguugagcacuggccac

SEQ ID NO: 329153 - RNA, 32 nt, Human
aguucaucuccacguuuauuuuaccaagagau

SEQ ID NO: 329154 - RNA, 32 nt, Human
aguucaucucccagcugcaggcacuucagaaa

SEQ ID NO: 329155 - RNA, 19 nt, Human
aguucaucuucauugcaga

SEQ ID NO: 329156 - RNA, 32 nt, Human
aguucaucuucuaauguccucauccugguuuc

SEQ ID NO: 329157 - RNA, 32 nt, Human
aguucaugauguggauuugaauucagcuuuca

SEQ ID NO: 329158 - RNA, 32 nt, Human
aguucaugcaaccuccgccuccuggguucaag

SEQ ID NO: 329159 - RNA, 32 nt, Human
aguucaugcaaguucgaaggugccucuuguca

SEQ ID NO: 329160 - RNA, 32 nt, Human
aguucaugcaauugcacuccagccugggcaac

SEQ ID NO: 329161 - RNA, 21 nt, Human
aguucaugcccaaguccccag

SEQ ID NO: 329162 - RNA, 32 nt, Human
aguucaugcccuguaauccuagaacuuuggga

SEQ ID NO: 329163 - RNA, 32 nt, Human
aguucaugcccuguaauccuagcacuuuggga

SEQ ID NO: 329164 - RNA, 32 nt, Human
aguucaugccuguagcucucuuccuuuuguuu

SEQ ID NO: 329165 - RNA, 32 nt, Human
aguucauggcuuccuguggauucccucccucc

SEQ ID NO: 329166 - RNA, 21 nt, Human
aguucaugucugcuaucauua

SEQ ID NO: 329167 - RNA, 29 nt, Human
aguucaugucugcuaucauuauucguaga

SEQ ID NO: 329168 - RNA, 32 nt, Human
aguucaugugguucuuugugaggcagagcggg

SEQ ID NO: 329169 - RNA, 32 nt, Human
aguucauguuuuucuguagcacugggcccaaa

SEQ ID NO: 329170 - RNA, 32 nt, Human
aguucauuaccucccuaucaguucuagcauag

SEQ ID NO: 329171 - RNA, 32 nt, Human
aguucauucugggucgcagccaugaaguguca

SEQ ID NO: 329172 - RNA, 32 nt, Human
aguucauuuccaaucccagaacacauggaggg

SEQ ID NO: 329173 - RNA, 32 nt, Human
aguucauuuccagagaagguaaaccccacuua

SEQ ID NO: 329174 - RNA, 32 nt, Human
aguucauuuccugagguggauuuacugagaga

SEQ ID NO: 329175 - RNA, 32 nt, Human
aguucauuucuuugggguaguguccuuacaag

SEQ ID NO: 329176 - RNA, 32 nt, Human
aguucauuuucagcaaaccuucagagggugaa

SEQ ID NO: 329177 - RNA, 32 nt, Human
aguuccaacuccaggaagucaccauucaaaga

SEQ ID NO: 329178 - RNA, 32 nt, Human
aguuccaacuucugcuaaaauugguuaauugg

SEQ ID NO: 329179 - RNA, 24 nt, Human
aguuccaagauugacaacagagaa

SEQ ID NO: 329180 - RNA, 32 nt, Human
aguuccaagugaggacauggaagaggccaaaa

SEQ ID NO: 329181 - RNA, 32 nt, Human
aguuccaagugaugcagucucuucccagccca

SEQ ID NO: 329182 - RNA, 32 nt, Human
aguuccacaaaugguggguacaaaaagucaag

SEQ ID NO: 329183 - RNA, 32 nt, Human
aguuccacagaucaaagacaaacugaugauaa

SEQ ID NO: 329184 - RNA, 32 nt, Human
aguuccacaugcuggauuauggugguuuuaug

SEQ ID NO: 329185 - RNA, 32 nt, Human
aguuccaccaugagcucacccgugucuaugac

SEQ ID NO: 329186 - RNA, 32 nt, Human
aguuccaccgguaccagcguccuggcccacgg

SEQ ID NO: 329187 - RNA, 32 nt, Human
aguuccacgugucaaaacaauuacaguuacua

SEQ ID NO: 329188 - RNA, 32 nt, Human
aguuccacucaacaccagaucaagcaauucua

SEQ ID NO: 329189 - RNA, 32 nt, Human
aguuccacugcacuccagccuggguuacagag

SEQ ID NO: 329190 - RNA, 32 nt, Human
aguuccagaccacccuccaugcuccaccccca

SEQ ID NO: 329191 - RNA, 32 nt, Human
aguuccagcccuggugacagaggagaccccgu

SEQ ID NO: 329192 - RNA, 32 nt, Human
aguuccagcuacucaggaagcugaggcaggag

SEQ ID NO: 329193 - RNA, 32 nt, Human
aguuccagcuacucaggacacugacguaggag

SEQ ID NO: 329194 - RNA, 32 nt, Human
aguuccagcuacucaggaggcagaggugagag

SEQ ID NO: 329195 - RNA, 32 nt, Human
aguuccagcuacucaggaggcuaaggcaggag

SEQ ID NO: 329196 - RNA, 32 nt, Human
aguuccagcuacucaggaggcuaaggcgggag

SEQ ID NO: 329197 - RNA, 32 nt, Human
aguuccagcuacucaggaggcugaagugggag

SEQ ID NO: 329198 - RNA, 32 nt, Human
aguuccagcuacucaggaggcugaggcaagag

SEQ ID NO: 329199 - RNA, 32 nt, Human
aguuccagcuacucaggaggcugaggcaggag

SEQ ID NO: 329200 - RNA, 32 nt, Human
aguuccagcuacucaggaggcugaggcuagag

SEQ ID NO: 329201 - RNA, 32 nt, Human
aguuccagcuacucaggaggcugaggugggag

SEQ ID NO: 329202 - RNA, 32 nt, Human
aguuccagcuacucaguaggcugaggcagaag

SEQ ID NO: 329203 - RNA, 32 nt, Human
aguuccagcuacucggagacugaggcaggaga

SEQ ID NO: 329204 - RNA, 32 nt, Human
aguuccagcuacucgggaggcugaggcaagag

SEQ ID NO: 329205 - RNA, 32 nt, Human
aguuccagcuacucgggaggcugaggcaggau

SEQ ID NO: 329206 - RNA, 32 nt, Human
aguuccagcuacucgggaggcugaggugaaag

SEQ ID NO: 329207 - RNA, 32 nt, Human
aguuccagcuacucgggagucugaggcagagg

SEQ ID NO: 329208 - RNA, 18 nt, Human
aguuccagcuacuugaga

SEQ ID NO: 329209 - RNA, 32 nt, Human
aguuccagcuacuugagaggcugaggcaggag

SEQ ID NO: 329210 - RNA, 32 nt, Human
aguuccagcuacuugggaggcagaggcaggag

SEQ ID NO: 329211 - RNA, 32 nt, Human
aguuccagcuacuugggaggcugaagcaggag

SEQ ID NO: 329212 - RNA, 32 nt, Human
aguuccagcuacuugggaggcugagacaggcg

SEQ ID NO: 329213 - RNA, 32 nt, Human
aguuccagcuacuugggaggcugaggcagcau

SEQ ID NO: 329214 - RNA, 32 nt, Human
aguuccagcuacuugggaggcugaggcaggag

SEQ ID NO: 329215 - RNA, 32 nt, Human
aguuccagcuacuugggaggcugaggugggaa

SEQ ID NO: 329216 - RNA, 32 nt, Human
aguuccagcuacuugugaggcugaggugggag

SEQ ID NO: 329217 - RNA, 32 nt, Human
aguuccagcuggugcuucuuuauauuuagaaa

SEQ ID NO: 329218 - RNA, 32 nt, Human
aguuccaggaacacaaaccccaacaagaucca

SEQ ID NO: 329219 - RNA, 32 nt, Human
aguuccaggaagaguuuuccagccuagccuga

SEQ ID NO: 329220 - RNA, 32 nt, Human
aguuccaggagaaggaagacucuugccuuuuu

SEQ ID NO: 329221 - RNA, 32 nt, Human
aguuccaggauacaugugcaggaugugcaggu

SEQ ID NO: 329222 - RNA, 32 nt, Human
aguuccaguucugcaaagauucgucaacuuuc

SEQ ID NO: 329223 - RNA, 32 nt, Human
aguuccauacaaggagcucccuaucguccggg

SEQ ID NO: 329224 - RNA, 32 nt, Human
aguuccaucaaaagaaccagaguaguguucuu

SEQ ID NO: 329225 - RNA, 32 nt, Human
aguuccaucauguuggccaggcuggucuugaa

SEQ ID NO: 329226 - RNA, 32 nt, Human
aguuccauguacuguaaauauuuuucacauaa

SEQ ID NO: 329227 - RNA, 32 nt, Human
aguuccauugucagcacagccuaggaggguca

SEQ ID NO: 329228 - RNA, 32 nt, Human
aguuccauuuguauucuggcugggugaugagc

SEQ ID NO: 329229 - RNA, 22 nt, Human
aguucccaaauaaaucaauccu

SEQ ID NO: 329230 - RNA, 31 nt, Human
aguucccaaguguccaacaagaaggccuggu

SEQ ID NO: 329231 - RNA, 32 nt, Human
aguucccacugaggagccagcuguaggugaga

SEQ ID NO: 329232 - RNA, 32 nt, Human
aguucccagccagccaauggaugccagcacca

SEQ ID NO: 329233 - RNA, 32 nt, Human
aguucccaggaauauuugagggguuccgguga

SEQ ID NO: 329234 - RNA, 32 nt, Human
aguucccaggcuaggucauagaaggugaugca

SEQ ID NO: 329235 - RNA, 32 nt, Human
aguucccagguggaaggggugugccaggaggg

SEQ ID NO: 329236 - RNA, 32 nt, Human
aguucccaucaccaccaccaccaccaccacca

SEQ ID NO: 329237 - RNA, 32 nt, Human
aguucccaugccagcucuccccaagugcucca

SEQ ID NO: 329238 - RNA, 32 nt, Human
aguucccaugucccagccuggccuguggcugc

SEQ ID NO: 329239 - RNA, 32 nt, Human
aguuccccagcccuccacauucuuccaauggc

SEQ ID NO: 329240 - RNA, 32 nt, Human
aguuccccagccuggaggcucugguggagaac

SEQ ID NO: 329241 - RNA, 32 nt, Human
aguuccccagcuugaugguuucugagcuaagu

SEQ ID NO: 329242 - RNA, 32 nt, Human
aguuccccuccccuccccucccucuuuuuagu

SEQ ID NO: 329243 - RNA, 32 nt, Human
aguucccgccugccucccagcagccucaacag

SEQ ID NO: 329244 - RNA, 32 nt, Human
aguucccgggaggacauggacagggaaggaga

SEQ ID NO: 329245 - RNA, 32 nt, Human
aguucccgugugugccuggugugugggacgcu

SEQ ID NO: 329246 - RNA, 32 nt, Human
aguucccuacagccauccccagucaaggguga

SEQ ID NO: 329247 - RNA, 32 nt, Human
aguucccuccagcugcagagagcuucaguuug

SEQ ID NO: 329248 - RNA, 32 nt, Human
aguucccuccaggagcaaugacagucuuuauu

SEQ ID NO: 329249 - RNA, 32 nt, Human
aguucccucuuccuggccucuggaaccagccu

SEQ ID NO: 329250 - RNA, 32 nt, Human
aguucccucuuguagagccacaggguuaaaag

SEQ ID NO: 329251 - RNA, 32 nt, Human
aguucccugcccauaggcauugcccaggauag

SEQ ID NO: 329252 - RNA, 32 nt, Human
aguucccugcggccucugccuuggggaguuau

SEQ ID NO: 329253 - RNA, 32 nt, Human
aguucccuggacagagcuaaacucucgagacu

SEQ ID NO: 329254 - RNA, 32 nt, Human
aguucccuguaauccuaccaucuagggagaua

SEQ ID NO: 329255 - RNA, 32 nt, Human
aguucccuguaauccugccaucuagggagaua

SEQ ID NO: 329256 - RNA, 32 nt, Human
aguucccuguauggguggauguccucaggggc

SEQ ID NO: 329257 - RNA, 32 nt, Human
aguucccuuccaggaagccugcagcguucacg

SEQ ID NO: 329258 - RNA, 32 nt, Human
aguucccuucuuguggugccucuuucccagau

SEQ ID NO: 329259 - RNA, 32 nt, Human
aguucccuugacuucccuuuugagagcacacg

SEQ ID NO: 329260 - RNA, 32 nt, Human
aguuccgacacacgccacacaaaaaugaaccu

SEQ ID NO: 329261 - RNA, 32 nt, Human
aguuccgcacaucccuucuacccuccaacugc

SEQ ID NO: 329262 - RNA, 32 nt, Human
aguuccgcauccucaggcgccagccuguccag

SEQ ID NO: 329263 - RNA, 32 nt, Human
aguuccggcagccugcagugcugguccugcag

SEQ ID NO: 329264 - RNA, 32 nt, Human
aguuccggcagcuuuccccaggaaagggugag

SEQ ID NO: 329265 - RNA, 32 nt, Human
aguuccuagaggcaucuggcagcaagaaggug

SEQ ID NO: 329266 - RNA, 32 nt, Human
aguuccuaggcagaggggaagccccagcgccg

SEQ ID NO: 329267 - RNA, 32 nt, Human
aguuccuauuagccauuaccacugauuucuga

SEQ ID NO: 329268 - RNA, 32 nt, Human
aguuccucacucgccuccuaucaugccgauga

SEQ ID NO: 329269 - RNA, 32 nt, Human
aguuccuccaauuccaucuucucccauggaac

SEQ ID NO: 329270 - RNA, 32 nt, Human
aguuccuccaauuccauuuucucccauggaau

SEQ ID NO: 329271 - RNA, 32 nt, Human
aguuccuccagcaaagcccagaacagaguugu

SEQ ID NO: 329272 - RNA, 32 nt, Human
aguuccucccaguuccagagcaccucaggaca

SEQ ID NO: 329273 - RNA, 32 nt, Human
aguuccuccucuuccuccacgucauccuccuc

SEQ ID NO: 329274 - RNA, 32 nt, Human
aguuccucuaacuguagaguaaggauaauaau

SEQ ID NO: 329275 - RNA, 31 nt, Human
aguuccucuagccgggagguuggaggagcug

SEQ ID NO: 329276 - RNA, 32 nt, Human
aguuccucuagugcccuccacagccgcagccu

SEQ ID NO: 329277 - RNA, 32 nt, Human
aguuccucucgccagccgcauccaugcuucug

SEQ ID NO: 329278 - RNA, 32 nt, Human
aguuccucuggugggagggagaacgcacaucu

SEQ ID NO: 329279 - RNA, 32 nt, Human
aguuccugcccaggaccauguguguggaugcu

SEQ ID NO: 329280 - RNA, 32 nt, Human
aguuccugcucucauccuccccugcccugaug

SEQ ID NO: 329281 - RNA, 32 nt, Human
aguuccugcuucuguauggcaagcauaaauca

SEQ ID NO: 329282 - RNA, 32 nt, Human
aguuccugcuuugaugugacaugugacucccc

SEQ ID NO: 329283 - RNA, 32 nt, Human
aguuccugggcagaggggaaagcagcucccag

SEQ ID NO: 329284 - RNA, 32 nt, Human
aguuccuggugcucaaagaguuccaacaccug

SEQ ID NO: 329285 - RNA, 32 nt, Human
aguuccuguaacauuaccuccacacaacugca

SEQ ID NO: 329286 - RNA, 32 nt, Human
aguuccuguacaagguuccuggccugugggaa

SEQ ID NO: 329287 - RNA, 31 nt, Human
aguuccuguggccaggagguuggugacugaa

SEQ ID NO: 329288 - RNA, 32 nt, Human
aguuccugugugucuugaugucugacugguuc

SEQ ID NO: 329289 - RNA, 23 nt, Human
aguuccuuacaccaccaaagcac

SEQ ID NO: 329290 - RNA, 32 nt, Human
aguuccuuaccucccugguccccguuugucaa

SEQ ID NO: 329291 - RNA, 32 nt, Human
aguuccuuacuacccagagacuucaguguccu

SEQ ID NO: 329292 - RNA, 32 nt, Human
aguuccuucugcgcuuuguucaagaugugggu

SEQ ID NO: 329293 - RNA, 32 nt, Human
aguuccuucuucugcuauccccaaaaccucag

SEQ ID NO: 329294 - RNA, 32 nt, Human
aguuccuugcaacuuagccaugaugugagugg

SEQ ID NO: 329295 - RNA, 32 nt, Human
aguuccuuguuaggccucuccuuccgaugaaa

SEQ ID NO: 329296 - RNA, 23 nt, Human
aguuccuuguucugagucauuuu

SEQ ID NO: 329297 - RNA, 32 nt, Human
aguucgaaaccagccuggccaacauagugaaa

SEQ ID NO: 329298 - RNA, 32 nt, Human
aguucgaaaccagccuggccaacauggagaaa

SEQ ID NO: 329299 - RNA, 32 nt, Human
aguucgaaaccagccuggccaacauggggaaa

SEQ ID NO: 329300 - RNA, 32 nt, Human
aguucgaaaccagccuggccaacauggugaaa

SEQ ID NO: 329301 - RNA, 32 nt, Human
aguucgaacagcuguuugacugugagaauuag

SEQ ID NO: 329302 - RNA, 32 nt, Human
aguucgaaccagccuggccaacauggugaaac

SEQ ID NO: 329303 - RNA, 32 nt, Human
aguucgacucagaaccuugacauggccauaac

SEQ ID NO: 329304 - RNA, 32 nt, Human
aguucgagaacuaagcaaauuagcugagacca

SEQ ID NO: 329305 - RNA, 32 nt, Human
aguucgagaccaaccuccaacauggugaaacc

SEQ ID NO: 329306 - RNA, 32 nt, Human
aguucgagaccacccugaccaacauagagaaa

SEQ ID NO: 329307 - RNA, 32 nt, Human
aguucgagaccacccugggcaacacagugaga

SEQ ID NO: 329308 - RNA, 32 nt, Human
aguucgagaccagccuagccaacauggugaac

SEQ ID NO: 329309 - RNA, 32 nt, Human
aguucgagaccagccuggccaaaauagugaaa

SEQ ID NO: 329310 - RNA, 32 nt, Human
aguucgagaccagccugggcaacagagacccu

SEQ ID NO: 329311 - RNA, 32 nt, Human
aguucgagaccagccugggcaacagcaagacc

SEQ ID NO: 329312 - RNA, 32 nt, Human
aguucgagaccagccuugccaacauagugaaa

SEQ ID NO: 329313 - RNA, 32 nt, Human
aguucgagaccagcuuagccaauauggugaaa

SEQ ID NO: 329314 - RNA, 32 nt, Human
aguucgagaccagcuuaggcaacacggugaaa

SEQ ID NO: 329315 - RNA, 32 nt, Human
aguucgagaccagcuuggccaacaugucgaaa

SEQ ID NO: 329316 - RNA, 32 nt, Human
aguucgauuugccuaguaucccugcagcaauu

SEQ ID NO: 329317 - RNA, 32 nt, Human
aguucgcaugccacugcacuccagccugggcg

SEQ ID NO: 329318 - RNA, 32 nt, Human
aguucgccuuuauucugcacaggacagaauuc

SEQ ID NO: 329319 - RNA, 32 nt, Human
aguucgcucacuggauccuuccucucugauga

SEQ ID NO: 329320 - RNA, 32 nt, Human
aguucggaagacauuucucuguuugcaaggac

SEQ ID NO: 329321 - RNA, 32 nt, Human
aguucggcucugggugggcaguaggaccacca

SEQ ID NO: 329322 - RNA, 32 nt, Human
aguucggggccgcggcgggcgggcgcccggga

SEQ ID NO: 329323 - RNA, 32 nt, Human
aguucgggggcagagugggggaaucaggcuuu

SEQ ID NO: 329324 - RNA, 32 nt, Human
aguucggugugggcuuccacuaaggcacuugu

SEQ ID NO: 329325 - RNA, 32 nt, Human
aguucgguucucucccacagccagagcuggug

SEQ ID NO: 329326 - RNA, 32 nt, Human
aguucgucaccccacagaaacguacccaagau

SEQ ID NO: 329327 - RNA, 32 nt, Human
aguucgucagaacuuaaauacugaggaagaag

SEQ ID NO: 329328 - RNA, 32 nt, Human
aguucgugccaucggacuccagccugggugaa

SEQ ID NO: 329329 - RNA, 32 nt, Human
aguucgugccauuacacuccagccugggugac

SEQ ID NO: 329330 - RNA, 32 nt, Human
aguucguggucacugcacuccagccuggcuac

SEQ ID NO: 329331 - RNA, 32 nt, Human
aguucguggugacuuauggcagcccuaggaaa

SEQ ID NO: 329332 - RNA, 32 nt, Human
aguucguuacucagauaacauggcaguggccg

SEQ ID NO: 329333 - RNA, 32 nt, Human
aguucguuccaaguuacuuucugagguauuuu

SEQ ID NO: 329334 - RNA, 32 nt, Human
aguucuaaaacaauggcccaggguuuggugac

SEQ ID NO: 329335 - RNA, 32 nt, Human
aguucuaaaaugcuauuguggguuucuucugu

SEQ ID NO: 329336 - RNA, 31 nt, Human
aguucuaagagaccuccuucugggcuuaccc

SEQ ID NO: 329337 - RNA, 32 nt, Human
aguucuaauaaguggcaagcugcucugccggg

SEQ ID NO: 329338 - RNA, 32 nt, Human
aguucuaauucauauauuuaacaaacaugaug

SEQ ID NO: 329339 - RNA, 32 nt, Human
aguucuacacagaagugggagagacaaccacg

SEQ ID NO: 329340 - RNA, 32 nt, Human
aguucuacagccucaugcuggagcugagcaaa

SEQ ID NO: 329341 - RNA, 32 nt, Human
aguucuacccuuggcauacucagcauuccuca

SEQ ID NO: 329342 - RNA, 32 nt, Human
aguucuaccuuugggauagggcugcuuucccc

SEQ ID NO: 329343 - RNA, 32 nt, Human
aguucuacuuagaacuuuucauggacacaauu

SEQ ID NO: 329344 - RNA, 32 nt, Human
aguucuagagugagagaaagggagucaggcac

SEQ ID NO: 329345 - RNA, 32 nt, Human
aguucuagauugaucucugaaugugaucgacg

SEQ ID NO: 329346 - RNA, 32 nt, Human
aguucuagcuacucuggaggcugaggcaggag

SEQ ID NO: 329347 - RNA, 32 nt, Human
aguucuaggauuacaggugugagccaccacgu

SEQ ID NO: 329348 - RNA, 32 nt, Human
aguucuauauucacauaugcaaaccuccugcc

SEQ ID NO: 329349 - RNA, 32 nt, Human
aguucuaucuaagaaauggcauucuguagguu

SEQ ID NO: 329350 - RNA, 32 nt, Human
aguucuaugguuuuguuucacuucuuuucuuu

SEQ ID NO: 329351 - RNA, 32 nt, Human
aguucucaauccagggaaagggcugcuaacua

SEQ ID NO: 329352 - RNA, 32 nt, Human
aguucucacagaacuucuaucauuuuaaacug

SEQ ID NO: 329353 - RNA, 32 nt, Human
aguucucagaguggucaggauggcuugaccug

SEQ ID NO: 329354 - RNA, 32 nt, Human
aguucucaggagacauggaugguguucuaagg

SEQ ID NO: 329355 - RNA, 32 nt, Human
aguucucaucccucugucagggucaguaagga

SEQ ID NO: 329356 - RNA, 32 nt, Human
aguucucaugcugcccuugggugggcaucugu

SEQ ID NO: 329357 - RNA, 32 nt, Human
aguucuccacuccaaugauaauaguucacuua

SEQ ID NO: 329358 - RNA, 32 nt, Human
aguucuccagaacuuuucuucuguaaaggaua

SEQ ID NO: 329359 - RNA, 32 nt, Human
aguucuccagacaggguucauugaaaacuuag

SEQ ID NO: 329360 - RNA, 32 nt, Human
aguucuccagcacugagguggggcagauaacg

SEQ ID NO: 329361 - RNA, 28 nt, Human
aguucuccaguugcugccuccuugucuu

SEQ ID NO: 329362 - RNA, 32 nt, Human
aguucucccaacaacaugaaacugccuauuca

SEQ ID NO: 329363 - RNA, 32 nt, Human
aguucucccuaaggauggugcggucaauggac

SEQ ID NO: 329364 - RNA, 32 nt, Human
aguucucccugccccucagccugggggaagaa

SEQ ID NO: 329365 - RNA, 32 nt, Human
aguucuccgaguagcugggaccacauguguaa

SEQ ID NO: 329366 - RNA, 32 nt, Human
aguucuccuccacaucucccaucccagaauca

SEQ ID NO: 329367 - RNA, 32 nt, Human
aguucuccuccacuguuugaccaaauucucag

SEQ ID NO: 329368 - RNA, 20 nt, Human
aguucuccuccuugaucacc

SEQ ID NO: 329369 - RNA, 32 nt, Human
aguucuccugggacagugggcucugcauguuc

SEQ ID NO: 329370 - RNA, 32 nt, Human
aguucuccugggcuccagccuccugcaaggac

SEQ ID NO: 329371 - RNA, 32 nt, Human
aguucuccuucaggaucaugauguucgucaga

SEQ ID NO: 329372 - RNA, 32 nt, Human
aguucuccuuucucaccacucuccugcuagcc

SEQ ID NO: 329373 - RNA, 32 nt, Human
aguucucgcaucuucugcuccuaccuucuccu

SEQ ID NO: 329374 - RNA, 32 nt, Human
aguucucgcucucccuuccucccagcgggguc

SEQ ID NO: 329375 - RNA, 32 nt, Human
aguucucggauuacaggcgugagccacugcgc

SEQ ID NO: 329376 - RNA, 32 nt, Human
aguucucggccccggcuuucuuccaagaguug

SEQ ID NO: 329377 - RNA, 32 nt, Human
aguucucgggcgcgcacaggcagcucgguuug

SEQ ID NO: 329378 - RNA, 32 nt, Human
aguucucgucugucccuagcagucuuucuuca

SEQ ID NO: 329379 - RNA, 32 nt, Human
aguucucucagcccauuccccaccuccccuuc

SEQ ID NO: 329380 - RNA, 32 nt, Human
aguucucuccaccucucuaucuaugucucagu

SEQ ID NO: 329381 - RNA, 32 nt, Human
aguucucugggaacuugaaagacauuuaugcc

SEQ ID NO: 329382 - RNA, 32 nt, Human
aguucucuggguauuccuuuccuucacugugg

SEQ ID NO: 329383 - RNA, 32 nt, Human
aguucucuguggugaugaccgcucuccccugc

SEQ ID NO: 329384 - RNA, 32 nt, Human
aguucucuugugaacacuucaaacaucgcuaa

SEQ ID NO: 329385 - RNA, 32 nt, Human
aguucugaacaagacaagacugucauauugua

SEQ ID NO: 329386 - RNA, 32 nt, Human
aguucugaagucaaaggcugauguccuguuuc

SEQ ID NO: 329387 - RNA, 32 nt, Human
aguucugacccugagcccuggggaacaggaaa

SEQ ID NO: 329388 - RNA, 20 nt, Human
aguucugagcaaaucccuca

SEQ ID NO: 329389 - RNA, 32 nt, Human
aguucugcacacugaggaaaagcacuuccuga

SEQ ID NO: 329390 - RNA, 20 nt, Human
aguucugcagcaugcagcgg

SEQ ID NO: 329391 - RNA, 32 nt, Human
aguucugcagggaaaugacuuacuuguccuua

SEQ ID NO: 329392 - RNA, 32 nt, Human
aguucugccaucaccuccacuguaccaagacu

SEQ ID NO: 329393 - RNA, 32 nt, Human
aguucugccucuguccagguccuugugacccg

SEQ ID NO: 329394 - RNA, 32 nt, Human
aguucugccuugaguccugccaguguagaugg

SEQ ID NO: 329395 - RNA, 32 nt, Human
aguucugcuacaaccucuagaucugcagcuug

SEQ ID NO: 329396 - RNA, 32 nt, Human
aguucugcucgguuucccuugugaucagucca

SEQ ID NO: 329397 - RNA, 32 nt, Human
aguucugcuuccucuuauaaguacacaacuca

SEQ ID NO: 329398 - RNA, 32 nt, Human
aguucuggaaagucauugacaggggauuaacc

SEQ ID NO: 329399 - RNA, 32 nt, Human
aguucuggaaauugaaaagaagaaaaguaaag

SEQ ID NO: 329400 - RNA, 32 nt, Human
aguucuggaaggcagugggguuugagauugga

SEQ ID NO: 329401 - RNA, 32 nt, Human
aguucuggacagcugcucugcagauucuuaua

SEQ ID NO: 329402 - RNA, 32 nt, Human
aguucuggauguggaggaaccaguaggagacc

SEQ ID NO: 329403 - RNA, 30 nt, Human
aguucugggaauuuacaggcacaauacacu

SEQ ID NO: 329404 - RNA, 32 nt, Human
aguucugggaccccaccucagacaucugaccc

SEQ ID NO: 329405 - RNA, 32 nt, Human
aguucugggaggagacauugucuucagacuac

SEQ ID NO: 329406 - RNA, 32 nt, Human
aguucugggauacaugugcaggaugugcaggu

SEQ ID NO: 329407 - RNA, 32 nt, Human
aguucugggauuaaaugcgugagccaccaugc

SEQ ID NO: 329408 - RNA, 32 nt, Human
aguucugggauuacaagugugaaccaccgugc

SEQ ID NO: 329409 - RNA, 32 nt, Human
aguucugggauuacaagugugagccacugugc

SEQ ID NO: 329410 - RNA, 32 nt, Human
aguucugggauuacaggagugagccaccgcgc

SEQ ID NO: 329411 - RNA, 32 nt, Human
aguucugggauuacaggcaugagccaccaugc

SEQ ID NO: 329412 - RNA, 32 nt, Human
aguucugggauuacaggcaugagccaccgugc

SEQ ID NO: 329413 - RNA, 32 nt, Human
aguucugggauuacaggcaugagccacugugc

SEQ ID NO: 329414 - RNA, 32 nt, Human
aguucugggauuacaggcgugagccacacacu

SEQ ID NO: 329415 - RNA, 32 nt, Human
aguucugggauuacaggcgugagccaccgcgc

SEQ ID NO: 329416 - RNA, 32 nt, Human
aguucugggauuacaggcgugagccauggugc

SEQ ID NO: 329417 - RNA, 32 nt, Human
aguucugggauuacaggcuugagccacugcgc

SEQ ID NO: 329418 - RNA, 32 nt, Human
aguucugggauuacaggggugagccacugugc

SEQ ID NO: 329419 - RNA, 32 nt, Human
aguucugggauuacaggguguugagccacucu

SEQ ID NO: 329420 - RNA, 32 nt, Human
aguucugggauuacagguaugagccacaacac

SEQ ID NO: 329421 - RNA, 19 nt, Human
aguucugggauuacaggug

SEQ ID NO: 329422 - RNA, 32 nt, Human
aguucugggauuacaggugugagccaccgcgc

SEQ ID NO: 329423 - RNA, 32 nt, Human
aguucugggauuacaggugugagccaccgugc

SEQ ID NO: 329424 - RNA, 32 nt, Human
aguucugggauuacgggcgugagccacuucac

SEQ ID NO: 329425 - RNA, 32 nt, Human
aguucugggauuauaggugcgagccacugugc

SEQ ID NO: 329426 - RNA, 32 nt, Human
aguucugggauuaugggugugagccaccacac

SEQ ID NO: 329427 - RNA, 32 nt, Human
aguucugggcugggagcugugaccuccccaac

SEQ ID NO: 329428 - RNA, 32 nt, Human
aguucugggugaggcaggagcugggaggggug

SEQ ID NO: 329429 - RNA, 32 nt, Human
aguucugguccuggccaggccaugcuacacua

SEQ ID NO: 329430 - RNA, 32 nt, Human
aguucuguacuuccaguuucuaaaaugcacug

SEQ ID NO: 329431 - RNA, 32 nt, Human
aguucuguauuuguaaauucugucuuucaaaa

SEQ ID NO: 329432 - RNA, 16 nt, Human
aguucugucugaacug

SEQ ID NO: 329433 - RNA, 32 nt, Human
aguucuguggucugcauguccauguuugggac

SEQ ID NO: 329434 - RNA, 32 nt, Human
aguucuguggugcugcucggggauggacucca

SEQ ID NO: 329435 - RNA, 32 nt, Human
aguucuguguuagucaugcacacacauaccua

SEQ ID NO: 329436 - RNA, 32 nt, Human
aguucuguuugaucucuuucuagauucucuag

SEQ ID NO: 329437 - RNA, 32 nt, Human
aguucuuaauuuccucuccuccuggggaauuu

SEQ ID NO: 329438 - RNA, 32 nt, Human
aguucuuagcuccagguuuugggguaaaccaa

SEQ ID NO: 329439 - RNA, 32 nt, Human
aguucuuaguaacaggggcagcuccugaauuc

SEQ ID NO: 329440 - RNA, 32 nt, Human
aguucuuagucauugauuuuuguguuuaaaaa

SEQ ID NO: 329441 - RNA, 32 nt, Human
aguucuuauaguguacuccaccuuuuacuuuu

SEQ ID NO: 329442 - RNA, 32 nt, Human
aguucuuauguuuaucuugcuuuucauguguc

SEQ ID NO: 329443 - RNA, 32 nt, Human
aguucuuauucugaguacaguacucuuuguca

SEQ ID NO: 329444 - RNA, 32 nt, Human
aguucuucaccacuuuauaucaaggguugucu

SEQ ID NO: 329445 - RNA, 32 nt, Human
aguucuucaguuauauuuacauguguuguaaa

SEQ ID NO: 329446 - RNA, 32 nt, Human
aguucuuccaaaggcuggagaagugaacaagg

SEQ ID NO: 329447 - RNA, 32 nt, Human
aguucuuccacacaucuccugaaucacuccaa

SEQ ID NO: 329448 - RNA, 24 nt, Human
aguucuuccaccuagcucagcuga

SEQ ID NO: 329449 - RNA, 32 nt, Human
aguucuuccagauuuuaacuguguuaauaguu

SEQ ID NO: 329450 - RNA, 32 nt, Human
aguucuucccgcagugcucccaucuugugaau

SEQ ID NO: 329451 - RNA, 32 nt, Human
aguucuuccgggaggacgacgguggagccgau

SEQ ID NO: 329452 - RNA, 32 nt, Human
aguucuucucuuuccuccuccuuuucuucucu

SEQ ID NO: 329453 - RNA, 32 nt, Human
aguucuugagagaaggagaggaagauacagca

SEQ ID NO: 329454 - RNA, 32 nt, Human
aguucuuggaccaguuugcagagugaagauca

SEQ ID NO: 329455 - RNA, 23 nt, Human
aguucuuggucccuccagaacca

SEQ ID NO: 329456 - RNA, 32 nt, Human
aguucuuuagagaaucuccauacuguauuuca

SEQ ID NO: 329457 - RNA, 32 nt, Human
aguucuuuagggauagacugaauggcugguau

SEQ ID NO: 329458 - RNA, 32 nt, Human
aguucuuucaggccaaaaagcaaauggauuuc

SEQ ID NO: 329459 - RNA, 32 nt, Human
aguucuuucaucucccuccuccaggucggagu

SEQ ID NO: 329460 - RNA, 32 nt, Human
aguucuuuccucuuucugcucugccaucuuca

SEQ ID NO: 329461 - RNA, 32 nt, Human
aguucuuucucccaguguccgaccucacuguc

SEQ ID NO: 329462 - RNA, 32 nt, Human
aguucuuugaaaugugcuggaagacuuaaauu

SEQ ID NO: 329463 - RNA, 32 nt, Human
aguucuuuggagggaaaacuuugcugaauugu

SEQ ID NO: 329464 - RNA, 32 nt, Human
aguucuuuguggacucuacccuucccuucaag

SEQ ID NO: 329465 - RNA, 32 nt, Human
aguucuuuuauguuuuaguuuacccucacagc

SEQ ID NO: 329466 - RNA, 32 nt, Human
aguugaaaaagcuaucaaggaccaugauuuua

SEQ ID NO: 329467 - RNA, 32 nt, Human
aguugaaaaagcuucaacucucaaggacucau

SEQ ID NO: 329468 - RNA, 32 nt, Human
aguugaaaacauggggcugcucaccagcggag

SEQ ID NO: 329469 - RNA, 32 nt, Human
aguugaaacacuauauuuaucuugucaguuuu

SEQ ID NO: 329470 - RNA, 32 nt, Human
aguugaaacagaauuaaaaauauuucucaaac

SEQ ID NO: 329471 - RNA, 32 nt, Human
aguugaaacccuccucugccagccuggggucc

SEQ ID NO: 329472 - RNA, 32 nt, Human
aguugaaagaguagagaucuguuucuccaagg

SEQ ID NO: 329473 - RNA, 32 nt, Human
aguugaaauuucacaguguuguccucacugug

SEQ ID NO: 329474 - RNA, 32 nt, Human
aguugaacauuaugugagcaaaauuuaagcuu

SEQ ID NO: 329475 - RNA, 22 nt, Human
aguugaaccaguugguucuaga

SEQ ID NO: 329476 - RNA, 32 nt, Human
aguugaacccaggagguggagguugcagugag

SEQ ID NO: 329477 - RNA, 32 nt, Human
aguugaaccuaaacauagaaauugccugacga

SEQ ID NO: 329478 - RNA, 32 nt, Human
aguugaacucagguauuggaagggcuuccguu

SEQ ID NO: 329479 - RNA, 32 nt, Human
aguugaagaaaauaagcaacuugaagaaggua

SEQ ID NO: 329480 - RNA, 32 nt, Human
aguugaagaagaguguggaggaagcuauuacc

SEQ ID NO: 329481 - RNA, 32 nt, Human
aguugaagacagcuucccaugccgguacacag

SEQ ID NO: 329482 - RNA, 32 nt, Human
aguugaagagaaaugcucacugcacaaggaga

SEQ ID NO: 329483 - RNA, 20 nt, Human
aguugaagagguuaguugga

SEQ ID NO: 329484 - RNA, 32 nt, Human
aguugaagcuuaugcuaaucuguauguuacac

SEQ ID NO: 329485 - RNA, 32 nt, Human
aguugaaggaagagagugcauggcaccuggug

SEQ ID NO: 329486 - RNA, 32 nt, Human
aguugaaggaggcagaagggagagugaugcac

SEQ ID NO: 329487 - RNA, 32 nt, Human
aguugaaggaggcagagaagggguuggugaua

SEQ ID NO: 329488 - RNA, 31 nt, Human
aguugaagugagagaguuuggugauacuguc

SEQ ID NO: 329489 - RNA, 32 nt, Human
aguugaauccagccugaacgugggugcuugug

SEQ ID NO: 329490 - RNA, 32 nt, Human
aguugaauccuucucccugccuaccugcagca

SEQ ID NO: 329491 - RNA, 32 nt, Human
aguugaaugcuucuuuuuccuucaauguuguu

SEQ ID NO: 329492 - RNA, 32 nt, Human
aguugaauuauuuccaaaaugaaacaggcuuc

SEQ ID NO: 329493 - RNA, 32 nt, Human
aguugaauugaaugucuauaaggucuaaaggu

SEQ ID NO: 329494 - RNA, 32 nt, Human
aguugacagagguuuaccucccuacuuucuua

SEQ ID NO: 329495 - RNA, 32 nt, Human
aguugacccaggaguacagucucaaguaguuc

SEQ ID NO: 329496 - RNA, 32 nt, Human
aguugaccuccacggggugacauggugugugu

SEQ ID NO: 329497 - RNA, 32 nt, Human
aguugaccucucccgaccucuggagcaguuga

SEQ ID NO: 329498 - RNA, 32 nt, Human
aguugaccugacuuccuucuugaaaugacugu

SEQ ID NO: 329499 - RNA, 32 nt, Human
aguugaccuucaaauauucaagcuauucugca

SEQ ID NO: 329500 - RNA, 32 nt, Human
aguugacucucaugagcugauuggagucagcu

SEQ ID NO: 329501 - RNA, 32 nt, Human
aguugacuucaugguggaguauaaaguuguuu

SEQ ID NO: 329502 - RNA, 32 nt, Human
aguugagaaaacaaacuugcuaaucacuuuac

SEQ ID NO: 329503 - RNA, 32 nt, Human
aguugagaaagaagagaagaagaaaaucaacc

SEQ ID NO: 329504 - RNA, 32 nt, Human
aguugagaaaugugaccuuuuaggcaaagaac

SEQ ID NO: 329505 - RNA, 31 nt, Human
aguugagaacaaucuuccacuuagaagcaau

SEQ ID NO: 329506 - RNA, 32 nt, Human
aguugagaccacaggcaugcgccaccaugccc

SEQ ID NO: 329507 - RNA, 32 nt, Human
aguugagaccagccugaacaacauggugaaac

SEQ ID NO: 329508 - RNA, 32 nt, Human
aguugagaccagccuggccaacauggugaaac

SEQ ID NO: 329509 - RNA, 32 nt, Human
aguugagagcuggggcaggagccccagccggg

SEQ ID NO: 329510 - RNA, 32 nt, Human
aguugagaggcagaaagagaucaaguccuugg

SEQ ID NO: 329511 - RNA, 32 nt, Human
aguugagagggugggggacacagagagaauag

SEQ ID NO: 329512 - RNA, 32 nt, Human
aguugagaucgcacuccagccugggugacaga

SEQ ID NO: 329513 - RNA, 32 nt, Human
aguugagaugaauucuguacccaaagcagaau

SEQ ID NO: 329514 - RNA, 32 nt, Human
aguugagauguuucagcuugaagaaccaaaac

SEQ ID NO: 329515 - RNA, 32 nt, Human
aguugagauuggagagcagcgccgucuguacu

SEQ ID NO: 329516 - RNA, 32 nt, Human
aguugagauuguaccacugcacuccagucugg

SEQ ID NO: 329517 - RNA, 32 nt, Human
aguugagcacagaacccucagcucuggugcgg

SEQ ID NO: 329518 - RNA, 32 nt, Human
aguugagcagagguuugagcccacaccucacc

SEQ ID NO: 329519 - RNA, 32 nt, Human
aguugagcagggccaacggccaugaagaacgu

SEQ ID NO: 329520 - RNA, 32 nt, Human
aguugagcugacauauacugggugggguggaa

SEQ ID NO: 329521 - RNA, 32 nt, Human
aguugaggcaggaggauugcuugagugcaaga

SEQ ID NO: 329522 - RNA, 32 nt, Human
aguugaggccaaugaagagaucauugaugaug

SEQ ID NO: 329523 - RNA, 32 nt, Human
aguugagggaacugugggagcaguuagacagc

SEQ ID NO: 329524 - RNA, 32 nt, Human
aguugagggaaggagacugugccccuccuggc

SEQ ID NO: 329525 - RNA, 32 nt, Human
aguugagggcugggaaugaaaccuauagccuu

SEQ ID NO: 329526 - RNA, 32 nt, Human
aguugaggguggguggagggguuugcagugug

SEQ ID NO: 329527 - RNA, 21 nt, Human
aguugagugagaggaguugag

SEQ ID NO: 329528 - RNA, 32 nt, Human
aguugaguggugcccaagugagucacauccag

SEQ ID NO: 329529 - RNA, 32 nt, Human
aguugaguuaagggauggcuuucacagagcau

SEQ ID NO: 329530 - RNA, 32 nt, Human
aguugaguuuuuaaucucacuuuggguuuccu

SEQ ID NO: 329531 - RNA, 32 nt, Human
aguugauaaucgucaucagaacauggacuuuc

SEQ ID NO: 329532 - RNA, 32 nt, Human
aguugauaccugcuggcaggaaauggcuguuu

SEQ ID NO: 329533 - RNA, 32 nt, Human
aguugaucaugaggacaguagcauuaaauaag

SEQ ID NO: 329534 - RNA, 24 nt, Human
aguugaugaauaucagggcugaga

SEQ ID NO: 329535 - RNA, 32 nt, Human
aguugauggggccagaugagccagcauuccag

SEQ ID NO: 329536 - RNA, 32 nt, Human
aguugauugcagguccuccuggggccagaagg

SEQ ID NO: 329537 - RNA, 32 nt, Human
aguugcaagcagggaggggcaaauacaacugc

SEQ ID NO: 329538 - RNA, 32 nt, Human
aguugcacagcucaugugcccaggaagcugag

SEQ ID NO: 329539 - RNA, 32 nt, Human
aguugcacagcugccugguaggugacuggagg

SEQ ID NO: 329540 - RNA, 32 nt, Human
aguugcacaggagagaaagaagaaguugucca

SEQ ID NO: 329541 - RNA, 32 nt, Human
aguugcaccauguuggccaggcuggucuugaa

SEQ ID NO: 329542 - RNA, 32 nt, Human
aguugcaccauugcacuccacccugggcgaca

SEQ ID NO: 329543 - RNA, 32 nt, Human
aguugcacccugugaagugucugacaaaggca

SEQ ID NO: 329544 - RNA, 32 nt, Human
aguugcagaaagaagaaaggaaagggaaagaa

SEQ ID NO: 329545 - RNA, 32 nt, Human
aguugcagacgacuuguccugccaccaccaug

SEQ ID NO: 329546 - RNA, 32 nt, Human
aguugcagacuugcuacuggcaagagugaagc

SEQ ID NO: 329547 - RNA, 22 nt, Human
aguugcagagaugcaaaagaga

SEQ ID NO: 329548 - RNA, 32 nt, Human
aguugcagaggaggguggagugagagugucau

SEQ ID NO: 329549 - RNA, 32 nt, Human
aguugcagaucguggguguuggcgucuccgcu

SEQ ID NO: 329550 - RNA, 32 nt, Human
aguugcagauguggcuuuuacuuuuuaaaugg

SEQ ID NO: 329551 - RNA, 32 nt, Human
aguugcagcccugcugcugccugccuggacuu

SEQ ID NO: 329552 - RNA, 32 nt, Human
aguugcagccucaguuuuccaguggcucgugg

SEQ ID NO: 329553 - RNA, 32 nt, Human
aguugcagcuacucauggggcuaaggugggag

SEQ ID NO: 329554 - RNA, 32 nt, Human
aguugcagcuucaagaaaguaaagccaguaag

SEQ ID NO: 329555 - RNA, 32 nt, Human
aguugcagcuugcccuuguccagaccuauguu

SEQ ID NO: 329556 - RNA, 32 nt, Human
aguugcaggcagcagaaggcgaggagcgugug

SEQ ID NO: 329557 - RNA, 32 nt, Human
aguugcauggcuuuugacaagacaacugcucc

SEQ ID NO: 329558 - RNA, 32 nt, Human
aguugccaauaugccagcuuggacaucagugu

SEQ ID NO: 329559 - RNA, 32 nt, Human
aguugccaaucacuaaugcuguuacuaacuuu

SEQ ID NO: 329560 - RNA, 32 nt, Human
aguugccagccaccaacuuucuugccucaacu

SEQ ID NO: 329561 - RNA, 32 nt, Human
aguugcccacacugguaauacacacaucugcu

SEQ ID NO: 329562 - RNA, 32 nt, Human
aguugcccagaugaacuggccucugccuuugg

SEQ ID NO: 329563 - RNA, 22 nt, Human
aguugcccaggcuggagugcag

SEQ ID NO: 329564 - RNA, 25 nt, Human
aguugcccaggcuggagugcagugg

SEQ ID NO: 329565 - RNA, 32 nt, Human
aguugccccaacagcaaagacaacagucuggu

SEQ ID NO: 329566 - RNA, 32 nt, Human
aguugcccgaguagcugggacuacaggcaugu

SEQ ID NO: 329567 - RNA, 32 nt, Human
aguugcccuggccuuggggcccccaggaugcc

SEQ ID NO: 329568 - RNA, 32 nt, Human
aguugccuccacccugucccaacagcugacag

SEQ ID NO: 329569 - RNA, 32 nt, Human
aguugccuccaggucuucccagggugacgagg

SEQ ID NO: 329570 - RNA, 32 nt, Human
aguugccucuccuccuccucuuccccaacccc

SEQ ID NO: 329571 - RNA, 32 nt, Human
aguugccugaggacagcagugcaguugacaug

SEQ ID NO: 329572 - RNA, 32 nt, Human
aguugccuggacaacauacagccucuggaaac

SEQ ID NO: 329573 - RNA, 32 nt, Human
aguugccugggauuucugucaugggugucccu

SEQ ID NO: 329574 - RNA, 32 nt, Human
aguugccuguaauccuagcuacucaggaggcu

SEQ ID NO: 329575 - RNA, 32 nt, Human
aguugccuguaaucucaacuacuugggaggcu

SEQ ID NO: 329576 - RNA, 32 nt, Human
aguugccugucaaaggcuggagggcaggagga

SEQ ID NO: 329577 - RNA, 32 nt, Human
aguugccuuccugggcacuuguuuauccauuu

SEQ ID NO: 329578 - RNA, 32 nt, Human
aguugccuucugaaagggcacaguuuuaagga

SEQ ID NO: 329579 - RNA, 32 nt, Human
aguugccuugauauacuucauuccuacacuug

SEQ ID NO: 329580 - RNA, 32 nt, Human
aguugccuugcuggcugugagaauuuuauaug

SEQ ID NO: 329581 - RNA, 32 nt, Human
aguugcgacuccugugcucucuuuucaguguc

SEQ ID NO: 329582 - RNA, 32 nt, Human
aguugcuaggugauucugacacugcuggcuug

SEQ ID NO: 329583 - RNA, 32 nt, Human
aguugcuccuuugcaguuuccacaccauggcu

SEQ ID NO: 329584 - RNA, 31 nt, Human
aguugcucuagcuagaaagccaaggcucuuu

SEQ ID NO: 329585 - RNA, 32 nt, Human
aguugcucuaguaacccaaagaagugaaggag

SEQ ID NO: 329586 - RNA, 23 nt, Human
aguugcugagaagagugugcugg

SEQ ID NO: 329587 - RNA, 32 nt, Human
aguugcugagaaggggagagacucccuccucu

SEQ ID NO: 329588 - RNA, 32 nt, Human
aguugcugagagggcucgaggggugggcuggu

SEQ ID NO: 329589 - RNA, 32 nt, Human
aguugcugcacaggagcccaagcacaagggca

SEQ ID NO: 329590 - RNA, 32 nt, Human
aguugcugccuaagccccauccuuuguucucc

SEQ ID NO: 329591 - RNA, 32 nt, Human
aguugcugcuauucuuugccugccccuggggu

SEQ ID NO: 329592 - RNA, 32 nt, Human
aguugcugcuuggcauaaugagccucagcuuc

SEQ ID NO: 329593 - RNA, 32 nt, Human
aguugcugcuuuguuugucuaauugacucauu

SEQ ID NO: 329594 - RNA, 32 nt, Human
aguugcuggagcugggcugagaacugggcugc

SEQ ID NO: 329595 - RNA, 32 nt, Human
aguugcugggaauccaugaaucaaagacuugc

SEQ ID NO: 329596 - RNA, 20 nt, Human
aguugcugggauuacaggug

SEQ ID NO: 329597 - RNA, 32 nt, Human
aguugcugggauuacaggugugagccacagug

SEQ ID NO: 329598 - RNA, 32 nt, Human
aguugcugggauugcgggcaugguggcgugag

SEQ ID NO: 329599 - RNA, 22 nt, Human
aguugcugguauauuuaaauca

SEQ ID NO: 329600 - RNA, 32 nt, Human
aguugcugguuauuugaaaauaguaacaaaaa

SEQ ID NO: 329601 - RNA, 32 nt, Human
aguugcuguaggauucuaaauccaggugauug

SEQ ID NO: 329602 - RNA, 32 nt, Human
aguugcugucuuauucucuuuauuucucauug

SEQ ID NO: 329603 - RNA, 32 nt, Human
aguugcuuaccugucugugccucaguuuccuc

SEQ ID NO: 329604 - RNA, 17 nt, Human
aguugcuuacugaacug

SEQ ID NO: 329605 - RNA, 32 nt, Human
aguugcuuagguaugaauagggacuugcagua

SEQ ID NO: 329606 - RNA, 32 nt, Human
aguugcuuaguacaggcuucucacuuccuaca

SEQ ID NO: 329607 - RNA, 32 nt, Human
aguugcuucauaggcauucaugacauuuuagu

SEQ ID NO: 329608 - RNA, 32 nt, Human
aguugcuucugagacgccuucgcuucuguccu

SEQ ID NO: 329609 - RNA, 32 nt, Human
aguugcuuuaucucccacgggcuccccaagaa

SEQ ID NO: 329610 - RNA, 32 nt, Human
aguugcuuucaaaggccagaaaugcccauuau

SEQ ID NO: 329611 - RNA, 32 nt, Human
aguugcuuucauccuccuuuuguucugcauug

SEQ ID NO: 329612 - RNA, 32 nt, Human
aguugcuuugcuguuagccuguuggaccuucg

SEQ ID NO: 329613 - RNA, 32 nt, Human
aguuggaaaaacaaaaucugcaagcuuugaau

SEQ ID NO: 329614 - RNA, 32 nt, Human
aguuggaaacuguccagaggagcccagcgcug

SEQ ID NO: 329615 - RNA, 32 nt, Human
aguuggaagaaccaguucuggagcucaggccu

SEQ ID NO: 329616 - RNA, 32 nt, Human
aguuggaagaggagacugggaggcagcaagag

SEQ ID NO: 329617 - RNA, 32 nt, Human
aguuggaagaggagggauuagaaacaggagga

SEQ ID NO: 329618 - RNA, 32 nt, Human
aguuggaagaggaguaagcaaauuggggucug

SEQ ID NO: 329619 - RNA, 32 nt, Human
aguuggaagaugaggaagaagaggaggaagau

SEQ ID NO: 329620 - RNA, 32 nt, Human
aguuggaauuacaggugcaugccaccaugccu

SEQ ID NO: 329621 - RNA, 32 nt, Human
aguuggaauuauaggcaugugccaccacaccc

SEQ ID NO: 329622 - RNA, 32 nt, Human
aguuggaccccucaccuggccuccagggaaga

SEQ ID NO: 329623 - RNA, 32 nt, Human
aguuggacuggcuaccccuccuggccacccag

SEQ ID NO: 329624 - RNA, 32 nt, Human
aguuggacuguggccucaggaggcaguggcuu

SEQ ID NO: 329625 - RNA, 32 nt, Human
aguuggacuucagucuugccuaggcgauuuug

SEQ ID NO: 329626 - RNA, 32 nt, Human
aguuggagaacgaucucugccuuucaguucug

SEQ ID NO: 329627 - RNA, 32 nt, Human
aguuggagagagcagagguucgccuggaaggg

SEQ ID NO: 329628 - RNA, 32 nt, Human
aguuggaggaagagaacaggagccugaaggcu

SEQ ID NO: 329629 - RNA, 32 nt, Human
aguuggaggccaggguaccacaugucacaggc

SEQ ID NO: 329630 - RNA, 32 nt, Human
aguuggagggaggcagggaaucuggcuugauu

SEQ ID NO: 329631 - RNA, 32 nt, Human
aguuggaggugucuggguguuuggagguggcc

SEQ ID NO: 329632 - RNA, 32 nt, Human
aguuggaguagggaagguuuaauaguaaaaua

SEQ ID NO: 329633 - RNA, 32 nt, Human
aguuggaguauuugcauuuuuauuuuuaucaa

SEQ ID NO: 329634 - RNA, 32 nt, Human
aguuggagugcaauggcacaaucuagcucacu

SEQ ID NO: 329635 - RNA, 32 nt, Human
aguuggaguuagagcagaagaaaaugaaauua

SEQ ID NO: 329636 - RNA, 32 nt, Human
aguuggaguugacugcucauacccaggaagag

SEQ ID NO: 329637 - RNA, 32 nt, Human
aguuggauacagccgggcacaguggcucacac

SEQ ID NO: 329638 - RNA, 32 nt, Human
aguuggaucugcaguugggggcguggcggggc

SEQ ID NO: 329639 - RNA, 32 nt, Human
aguuggauguuguccuguuggugaggaaggga

SEQ ID NO: 329640 - RNA, 32 nt, Human
aguuggauuguacaaauuacugcaaauguaua

SEQ ID NO: 329641 - RNA, 32 nt, Human
aguuggauuugucgcagacaaugaguuaagga

SEQ ID NO: 329642 - RNA, 32 nt, Human
aguuggcacuacaggugcccgccaccacgcuc

SEQ ID NO: 329643 - RNA, 32 nt, Human
aguuggcacugcaggugcaggccaacccuuua

SEQ ID NO: 329644 - RNA, 32 nt, Human
aguuggcagagaauggaaagaaagcaaugguc

SEQ ID NO: 329645 - RNA, 32 nt, Human
aguuggcagaugggaaauaugaggcucagaga

SEQ ID NO: 329646 - RNA, 32 nt, Human
aguuggcauaaaagacacagguuacaacacga

SEQ ID NO: 329647 - RNA, 30 nt, Human
aguuggccaagccauagggcacagcaccuc

SEQ ID NO: 329648 - RNA, 32 nt, Human
aguuggccaauacuggugcccaaccuggauua

SEQ ID NO: 329649 - RNA, 32 nt, Human
aguuggccauauuuaccucagccugggcgcug

SEQ ID NO: 329650 - RNA, 32 nt, Human
aguuggcccaagaaacauaaacauauaaccac

SEQ ID NO: 329651 - RNA, 22 nt, Human
aguuggccccagcgcagaguag

SEQ ID NO: 329652 - RNA, 32 nt, Human
aguuggccuagagcaggccacugugagcucag

SEQ ID NO: 329653 - RNA, 32 nt, Human
aguuggccucuccuugaggugggcacagccug

SEQ ID NO: 329654 - RNA, 32 nt, Human
aguuggcggaggaggagaaggaaggggccggg

SEQ ID NO: 329655 - RNA, 32 nt, Human
aguuggcuagaagaaaguaaaaagaacaacac

SEQ ID NO: 329656 - RNA, 32 nt, Human
aguuggcucuacgcgagguuuguuaauaaaag

SEQ ID NO: 329657 - RNA, 32 nt, Human
aguuggcucucccacagucuuugaggugaauu

SEQ ID NO: 329658 - RNA, 32 nt, Human
aguuggcugaggaaggggaagauuaguaagaa

SEQ ID NO: 329659 - RNA, 32 nt, Human
aguuggcugcauuuucuuaucugaucacaaug

SEQ ID NO: 329660 - RNA, 32 nt, Human
aguuggcugggaagaaagaugagugaaauaac

SEQ ID NO: 329661 - RNA, 32 nt, Human
aguuggcuuuuggaagucugaaggugagcauu

SEQ ID NO: 329662 - RNA, 32 nt, Human
aguugggaauacaggcaugcgcuaccacgucc

SEQ ID NO: 329663 - RNA, 32 nt, Human
aguugggacagagaccauauggccugcaaagu

SEQ ID NO: 329664 - RNA, 32 nt, Human
aguugggaccauaggugcacaccaccacaccu

SEQ ID NO: 329665 - RNA, 32 nt, Human
aguugggaccugagggacagaggaucggaaug

SEQ ID NO: 329666 - RNA, 32 nt, Human
aguugggacuacaggaauacaccaccacacau

SEQ ID NO: 329667 - RNA, 32 nt, Human
aguugggacuacaggcauauaccaccacuuuc

SEQ ID NO: 329668 - RNA, 32 nt, Human
aguugggacuacaggcaugcgccaccacgccc

SEQ ID NO: 329669 - RNA, 32 nt, Human
aguugggaggcugaggcgggcagaucaucugg

SEQ ID NO: 329670 - RNA, 21 nt, Human
aguugggaucucacuauguug

SEQ ID NO: 329671 - RNA, 32 nt, Human
aguugggaucugccuuuuucauccagagcucu

SEQ ID NO: 329672 - RNA, 32 nt, Human
aguugggauuacaggcacaugccaccauacgc

SEQ ID NO: 329673 - RNA, 32 nt, Human
aguugggauuacaggcacaugccaccaugccc

SEQ ID NO: 329674 - RNA, 32 nt, Human
aguugggauuacaggcacccgccaccacgccc

SEQ ID NO: 329675 - RNA, 32 nt, Human
aguugggauuacaggcaccugccaccaugccu

SEQ ID NO: 329676 - RNA, 32 nt, Human
aguugggauuacaggcaugcauccccaugccc

SEQ ID NO: 329677 - RNA, 32 nt, Human
aguugggauuacaggcgcccaccaccaugccc

SEQ ID NO: 329678 - RNA, 32 nt, Human
aguugggauuacaggcgccugccaccacaccu

SEQ ID NO: 329679 - RNA, 32 nt, Human
aguugggauuacgggcaugcaccaccaugccu

SEQ ID NO: 329680 - RNA, 32 nt, Human
aguugggauuccagcccaguuggacgcugaag

SEQ ID NO: 329681 - RNA, 32 nt, Human
aguugggcaacagagaaccaucccuauuuugu

SEQ ID NO: 329682 - RNA, 32 nt, Human
aguugggcccccaucccuccccuugccacauc

SEQ ID NO: 329683 - RNA, 32 nt, Human
aguugggccgggacgggauccgggaggcuucu

SEQ ID NO: 329684 - RNA, 32 nt, Human
aguugggcgaacuguacuccaugugaauuacc

SEQ ID NO: 329685 - RNA, 32 nt, Human
aguugggcgagggagagcccccggccggcugc

SEQ ID NO: 329686 - RNA, 24 nt, Human
aguugggcggaucacaaggucagg

SEQ ID NO: 329687 - RNA, 25 nt, Human
aguugggcgucccggagcucaggga

SEQ ID NO: 329688 - RNA, 32 nt, Human
aguugggcugcuuguuaaaaaugcaggccagg

SEQ ID NO: 329689 - RNA, 32 nt, Human
aguugggcuguauuuuucaaagguggggagag

SEQ ID NO: 329690 - RNA, 32 nt, Human
aguuggggaggaagagugggagggagggcugg

SEQ ID NO: 329691 - RNA, 32 nt, Human
aguuggggauccagcaggagacccucugcaca

SEQ ID NO: 329692 - RNA, 32 nt, Human
aguuggggaugaagcauggguauucgagaucu

SEQ ID NO: 329693 - RNA, 32 nt, Human
aguuggggcaggaagagggggcuuccagggag

SEQ ID NO: 329694 - RNA, 17 nt, Human
aguuggggcugguccca

SEQ ID NO: 329695 - RNA, 32 nt, Human
aguugggggaggcagagccagcagguggacag

SEQ ID NO: 329696 - RNA, 32 nt, Human
aguugggguaaaaccauuugaggcagaucgcg

SEQ ID NO: 329697 - RNA, 21 nt, Human
aguuggggucucacuguguug

SEQ ID NO: 329698 - RNA, 32 nt, Human
aguuggggugcuugggugaucucugcuucauu

SEQ ID NO: 329699 - RNA, 32 nt, Human
aguuggguccuugccuggauuuugacacagca

SEQ ID NO: 329700 - RNA, 32 nt, Human
aguugggucuacaggcacgcaccaccacaccc

SEQ ID NO: 329701 - RNA, 32 nt, Human
aguugggucucugaagacgggggugaggugag

SEQ ID NO: 329702 - RNA, 32 nt, Human
aguugggugggaaaggagagaggagccagcca

SEQ ID NO: 329703 - RNA, 32 nt, Human
aguuggguuucugcguccaugugaagcauccu

SEQ ID NO: 329704 - RNA, 32 nt, Human
aguugguaaaggccccuuuucaggaaaguuug

SEQ ID NO: 329705 - RNA, 32 nt, Human
aguugguaaagucacuggaaagggaagaaugc

SEQ ID NO: 329706 - RNA, 23 nt, Human
aguugguacagaaggccaugcca

SEQ ID NO: 329707 - RNA, 32 nt, Human
aguugguacagauggcauugucccagucuguu

SEQ ID NO: 329708 - RNA, 32 nt, Human
aguugguauccugaagaacuugccuggcacac

SEQ ID NO: 329709 - RNA, 32 nt, Human
aguuggucagcagaggaggcuggggacaggca

SEQ ID NO: 329710 - RNA, 32 nt, Human
aguuggucuggaacuccugaccucgugaucca

SEQ ID NO: 329711 - RNA, 32 nt, Human
aguuggugagccagaggcuugacagagcuguu

SEQ ID NO: 329712 - RNA, 32 nt, Human
aguuggugccaaugcauuccagccuggaugau

SEQ ID NO: 329713 - RNA, 32 nt, Human
aguuggugggggaagagcaggaguuggaggcc

SEQ ID NO: 329714 - RNA, 32 nt, Human
aguugguguccaagacuuaucuugagacucuu

SEQ ID NO: 329715 - RNA, 32 nt, Human
aguugguucagaaacaucacaggcaaaaggug

SEQ ID NO: 329716 - RNA, 32 nt, Human
aguugguuggguaguagguugcauuaugagua

SEQ ID NO: 329717 - RNA, 32 nt, Human
aguugguuucugcuuuuaauuuacuuguacaa

SEQ ID NO: 329718 - RNA, 32 nt, Human
aguugguuucuuucuuucucuuaccugaaaug

SEQ ID NO: 329719 - RNA, 32 nt, Human
aguugguuuuuccaggcccagcuccugccuuu

SEQ ID NO: 329720 - RNA, 32 nt, Human
aguuguaaaacugggaagaggcuggaagaaga

SEQ ID NO: 329721 - RNA, 32 nt, Human
aguuguacagauaguuuauaagcacaauauuu

SEQ ID NO: 329722 - RNA, 32 nt, Human
aguuguacccuugagccuugacucaagggcug

SEQ ID NO: 329723 - RNA, 32 nt, Human
aguuguacccuuuaacucuauuuuguccuuga

SEQ ID NO: 329724 - RNA, 32 nt, Human
aguuguacuguugccaggacacauggccauaa

SEQ ID NO: 329725 - RNA, 32 nt, Human
aguuguagagccauccuaggugccauccccuu

SEQ ID NO: 329726 - RNA, 32 nt, Human
aguuguaguccaagcacacacaaauagugcca

SEQ ID NO: 329727 - RNA, 32 nt, Human
aguuguauaccugauuguaacaaucaucuuuu

SEQ ID NO: 329728 - RNA, 32 nt, Human
aguuguauagcaguugcaccccuugaagguuu

SEQ ID NO: 329729 - RNA, 32 nt, Human
aguuguaucuagacccuuaucauauaugugau

SEQ ID NO: 329730 - RNA, 32 nt, Human
aguuguaugagaaaguuggccuuuggacuuag

SEQ ID NO: 329731 - RNA, 26 nt, Human
aguuguaugcaguuaugguugggggg

SEQ ID NO: 329732 - RNA, 21 nt, Human
aguugucaccauuaugucuua

SEQ ID NO: 329733 - RNA, 32 nt, Human
aguugucacuauacccagauagacuacucauc

SEQ ID NO: 329734 - RNA, 32 nt, Human
aguugucaggcuccucccagguuauguuuuca

SEQ ID NO: 329735 - RNA, 32 nt, Human
aguugucaugcaccaugagacaaagcccaagc

SEQ ID NO: 329736 - RNA, 32 nt, Human
aguuguccacggucaauucagugcuuccauug

SEQ ID NO: 329737 - RNA, 32 nt, Human
aguuguccaucuguccaucccaacagcaagac

SEQ ID NO: 329738 - RNA, 32 nt, Human
aguuguccuaggaacugauguggagaaguuac

SEQ ID NO: 329739 - RNA, 32 nt, Human
aguuguccucaaggucauccuggagaugggau

SEQ ID NO: 329740 - RNA, 32 nt, Human
aguuguccuggugccuccaucagacucucccu

SEQ ID NO: 329741 - RNA, 32 nt, Human
aguugucgcccuggaauaggguccugcagggu

SEQ ID NO: 329742 - RNA, 32 nt, Human
aguugucgugcuccuguuucugagguugucgu

SEQ ID NO: 329743 - RNA, 32 nt, Human
aguugucuaaccacugaaaacuaccuagccag

SEQ ID NO: 329744 - RNA, 32 nt, Human
aguugucuagcuacuuaaaacccucagaagua

SEQ ID NO: 329745 - RNA, 32 nt, Human
aguugucucuccccagcuagauuguaagcucc

SEQ ID NO: 329746 - RNA, 32 nt, Human
aguugucuguccaggcccuuagggaaguuguc

SEQ ID NO: 329747 - RNA, 32 nt, Human
aguugucuucuaaggcuggggcugcuugcccu

SEQ ID NO: 329748 - RNA, 32 nt, Human
aguugucuuuacaaccuccccaucaucucuuc

SEQ ID NO: 329749 - RNA, 32 nt, Human
aguugugaaagaaaagcuucucagggaacugc

SEQ ID NO: 329750 - RNA, 32 nt, Human
aguugugaaauuugagaauuuguaagacuaau

SEQ ID NO: 329751 - RNA, 32 nt, Human
aguugugacugguuuagaaguggauacacagg

SEQ ID NO: 329752 - RNA, 32 nt, Human
aguugugauucugucuucucuuuauaacauga

SEQ ID NO: 329753 - RNA, 32 nt, Human
aguugugccaaagggcugcacagugguaucca

SEQ ID NO: 329754 - RNA, 32 nt, Human
aguugugccacaaaaaggaaacucagcgacau

SEQ ID NO: 329755 - RNA, 32 nt, Human
aguugugcccucaagugguccuaaguagaagu

SEQ ID NO: 329756 - RNA, 32 nt, Human
aguugugcccucugcugacacuaggucaggag

SEQ ID NO: 329757 - RNA, 32 nt, Human
aguugugccgaggacugucaccauugggcagg

SEQ ID NO: 329758 - RNA, 32 nt, Human
aguugugcugggauagcgcaggaagguggguc

SEQ ID NO: 329759 - RNA, 32 nt, Human
aguuguggaaacauugguccaugccgugagcc

SEQ ID NO: 329760 - RNA, 32 nt, Human
aguuguggagagugcaacaguagcauaggacc

SEQ ID NO: 329761 - RNA, 32 nt, Human
aguuguggagccacaacagaggcuucagacca

SEQ ID NO: 329762 - RNA, 32 nt, Human
aguuguggaggaggugaaagaaagggacccac

SEQ ID NO: 329763 - RNA, 19 nt, Human
aguuguggccucuaccauu

SEQ ID NO: 329764 - RNA, 32 nt, Human
aguugugggacuccagucgggauaucagucgg

SEQ ID NO: 329765 - RNA, 32 nt, Human
aguugugguguccagugugcagcagcccuggg

SEQ ID NO: 329766 - RNA, 32 nt, Human
aguuguguauguugaagcuguuguuucaaaag

SEQ ID NO: 329767 - RNA, 32 nt, Human
aguugugucucgucuucugucuccaugugguu

SEQ ID NO: 329768 - RNA, 20 nt, Human
aguugugucucucucuguca

SEQ ID NO: 329769 - RNA, 32 nt, Human
aguugugucuugucuucugucuccaugugguu

SEQ ID NO: 329770 - RNA, 32 nt, Human
aguuguguucagacacacacaucacagcuuga

SEQ ID NO: 329771 - RNA, 32 nt, Human
aguuguguuuuccaggugagccgagcaguucu

SEQ ID NO: 329772 - RNA, 24 nt, Human
aguuguuaacuaaauuaacauugg

SEQ ID NO: 329773 - RNA, 21 nt, Human
aguuguuaacuucuacauuca

SEQ ID NO: 329774 - RNA, 32 nt, Human
aguuguuagaagugggacacuccaaccacauu

SEQ ID NO: 329775 - RNA, 23 nt, Human
aguuguuaggccaggugcaaugg

SEQ ID NO: 329776 - RNA, 32 nt, Human
aguuguuagggcugaggaaccaaucaagguag

SEQ ID NO: 329777 - RNA, 32 nt, Human
aguuguuaugaauacuaauacaucacuuuuua

SEQ ID NO: 329778 - RNA, 32 nt, Human
aguuguucaaagagauggcuuugaauuccagc

SEQ ID NO: 329779 - RNA, 32 nt, Human
aguuguucagcccugagaauuuugagccacau

SEQ ID NO: 329780 - RNA, 32 nt, Human
aguuguucccaaucugccguuaccaucaacgc

SEQ ID NO: 329781 - RNA, 32 nt, Human
aguuguucucaggggugcuggggcagagugga

SEQ ID NO: 329782 - RNA, 32 nt, Human
aguuguucucauaguaaugaguucucacaaga

SEQ ID NO: 329783 - RNA, 32 nt, Human
aguuguucuugaacaccugaggccuuccugug

SEQ ID NO: 329784 - RNA, 32 nt, Human
aguuguugcaauauuugauuauccauuugguu

SEQ ID NO: 329785 - RNA, 32 nt, Human
aguuguugcacuccugaaauucuauuaacauu

SEQ ID NO: 329786 - RNA, 32 nt, Human
aguuguugcuauacauguuggaaauguguuuu

SEQ ID NO: 329787 - RNA, 32 nt, Human
aguuguugcuccuauguuccuuggagcaaaug

SEQ ID NO: 329788 - RNA, 32 nt, Human
aguuguugcuuuggaauagauggagcugcccc

SEQ ID NO: 329789 - RNA, 32 nt, Human
aguuguugggagcugagccggagccagaacuc

SEQ ID NO: 329790 - RNA, 32 nt, Human
aguuguugugcaaguugacaaaugccaaauag

SEQ ID NO: 329791 - RNA, 32 nt, Human
aguuguugugucucucagcgcuuguuggguuc

SEQ ID NO: 329792 - RNA, 32 nt, Human
aguuguuuacauaugagucgggaccaaagaga

SEQ ID NO: 329793 - RNA, 32 nt, Human
aguuguuucauucaaguguuuauaggaaucca

SEQ ID NO: 329794 - RNA, 32 nt, Human
aguuguuucucaucuucauaauaccaguguga

SEQ ID NO: 329795 - RNA, 32 nt, Human
aguuguuuugaugccuccccacccucacccua

SEQ ID NO: 329796 - RNA, 32 nt, Human
aguuguuuuuauuuucuuccuuugguguuuau

SEQ ID NO: 329797 - RNA, 32 nt, Human
aguuguuuuugaaaaggaaauaaacuuugaug

SEQ ID NO: 329798 - RNA, 32 nt, Human
aguuuaaaacuagaagcagcagaaaacuagcu

SEQ ID NO: 329799 - RNA, 18 nt, Human
aguuuaaaaggcugugcc

SEQ ID NO: 329800 - RNA, 32 nt, Human
aguuuaaacaagaucuuccacagcagacuuca

SEQ ID NO: 329801 - RNA, 32 nt, Human
aguuuaaacaaggugaaacaagauucuuuuuc

SEQ ID NO: 329802 - RNA, 32 nt, Human
aguuuaaagcugcuguuccucuaccucagugg

SEQ ID NO: 329803 - RNA, 32 nt, Human
aguuuaaaggaaguauuccucuaaagguucaa

SEQ ID NO: 329804 - RNA, 21 nt, Human
aguuuaaauauuugagcuuua

SEQ ID NO: 329805 - RNA, 19 nt, Human
aguuuaaaucucuaccaca

SEQ ID NO: 329806 - RNA, 32 nt, Human
aguuuaaauuagugcauacaucaugucauuuc

SEQ ID NO: 329807 - RNA, 32 nt, Human
aguuuaacaaaugacuccaccuauuuuuccag

SEQ ID NO: 329808 - RNA, 32 nt, Human
aguuuaacugauucaaacucuguuuauuucau

SEQ ID NO: 329809 - RNA, 32 nt, Human
aguuuaaguuauuguuuaauguaaucaguuuu

SEQ ID NO: 329810 - RNA, 32 nt, Human
aguuuaaucccccauuccaaaaguccaggcca

SEQ ID NO: 329811 - RNA, 32 nt, Human
aguuuaaucuuuuucuuuaccuccaugguuuu

SEQ ID NO: 329812 - RNA, 32 nt, Human
aguuuaaugccaccuuccucugucugccaugg

SEQ ID NO: 329813 - RNA, 32 nt, Human
aguuuaaugccuagcagagaacugccuuaaaa

SEQ ID NO: 329814 - RNA, 31 nt, Human
aguuuaauggaggauucagccaagaacagcu

SEQ ID NO: 329815 - RNA, 32 nt, Human
aguuuaauuagcuuuccaaccaaccaaauuuc

SEQ ID NO: 329816 - RNA, 32 nt, Human
aguuuaauuuccuucagcuguggugauguuga

SEQ ID NO: 329817 - RNA, 32 nt, Human
aguuuacaaucacuaggauggcuacaauaaaa

SEQ ID NO: 329818 - RNA, 32 nt, Human
aguuuacacaugggagcugccugccugcugcu

SEQ ID NO: 329819 - RNA, 32 nt, Human
aguuuacagaagaggucgcggggugagccucu

SEQ ID NO: 329820 - RNA, 32 nt, Human
aguuuacagcuguacuuuccagaucuucuaug

SEQ ID NO: 329821 - RNA, 32 nt, Human
aguuuacagugagccgagauccugccacugca

SEQ ID NO: 329822 - RNA, 32 nt, Human
aguuuacauccauucaugccucuuucagaacu

SEQ ID NO: 329823 - RNA, 32 nt, Human
aguuuacaucccucauucacaguguaaagcag

SEQ ID NO: 329824 - RNA, 32 nt, Human
aguuuaccuauguaacaaaccugcacuuauac

SEQ ID NO: 329825 - RNA, 32 nt, Human
aguuuaccuauguaacaaaccugcacuuguac

SEQ ID NO: 329826 - RNA, 32 nt, Human
aguuuaccuauguaacaaaccugcacuuguau

SEQ ID NO: 329827 - RNA, 32 nt, Human
auagaaacuguaggcugggugggcaggaauag

SEQ ID NO: 329828 - RNA, 32 nt, Human
auagaaagacccuuagaugucuucucacgcaa

SEQ ID NO: 329829 - RNA, 32 nt, Human
auagaaagaguuaagaaggcucgagaagagca

SEQ ID NO: 329830 - RNA, 32 nt, Human
auagaaagauucacacuggcgagaaacccuau

SEQ ID NO: 329831 - RNA, 32 nt, Human
auagaaagcacuacugcacuuaguagcuaugu

SEQ ID NO: 329832 - RNA, 32 nt, Human
auagaaagcucugccuugccagucuccuaaau

SEQ ID NO: 329833 - RNA, 24 nt, Human
auagaaagcugaagaacacuagaa

SEQ ID NO: 329834 - RNA, 21 nt, Human
auagaaagggggaaggaggac

SEQ ID NO: 329835 - RNA, 32 nt, Human
auagaaagugaacaggaagcaaacaggaagug

SEQ ID NO: 329836 - RNA, 32 nt, Human
auagaaaugucaguagaacucauugagggugc

SEQ ID NO: 329837 - RNA, 32 nt, Human
auagaaccaaaaacgccagucaugggaggcag

SEQ ID NO: 329838 - RNA, 32 nt, Human
auagaaccaugaggcaaccacucugggcaccu

SEQ ID NO: 329839 - RNA, 32 nt, Human
auagaaccauggaaaauucugauguccucucu

SEQ ID NO: 329840 - RNA, 32 nt, Human
auagaacccagaggaggagagaacccgggacu

SEQ ID NO: 329841 - RNA, 32 nt, Human
auagaacccaggagguggagacugcagugagc

SEQ ID NO: 329842 - RNA, 32 nt, Human
auagaacccaggaugugaggguggggguggag

SEQ ID NO: 329843 - RNA, 32 nt, Human
auagaacgaguuaagaaggcucgaaaagagca

SEQ ID NO: 329844 - RNA, 32 nt, Human
auagaacgaguuaagaaggcucgagaagagca

SEQ ID NO: 329845 - RNA, 32 nt, Human
auagaacucaacuauugcuuuucagggaaauc

SEQ ID NO: 329846 - RNA, 32 nt, Human
auagaacucaaugcagaugcauugguuauuac

SEQ ID NO: 329847 - RNA, 32 nt, Human
auagaacugugcacaggaacagcuuccagagc

SEQ ID NO: 329848 - RNA, 22 nt, Human
auagaagaagaggugguugcug

SEQ ID NO: 329849 - RNA, 32 nt, Human
auagaagaaggagggaaggaaguagggaggca

SEQ ID NO: 329850 - RNA, 32 nt, Human
auagaagaccagaaaggcgaccaccuugugaa

SEQ ID NO: 329851 - RNA, 32 nt, Human
auagaagaggcaucaugcugaagagggagggg

SEQ ID NO: 329852 - RNA, 32 nt, Human
auagaagauaugggcuuuuggaagcacugauu

SEQ ID NO: 329853 - RNA, 32 nt, Human
auagaagaucugccuccccuguggaaauuggg

SEQ ID NO: 329854 - RNA, 32 nt, Human
auagaagauuuacuauuauuccagccauguaa

SEQ ID NO: 329855 - RNA, 32 nt, Human
auagaagcaugagugaaugacaucccagagau

SEQ ID NO: 329856 - RNA, 32 nt, Human
auagaagcucucccgcuaauguuuccaucaug

SEQ ID NO: 329857 - RNA, 32 nt, Human
auagaaggaagcaggagugauuaguucggguu

SEQ ID NO: 329858 - RNA, 32 nt, Human
auagaaggagguuucugaggcugacagaaaca

SEQ ID NO: 329859 - RNA, 32 nt, Human
auagaagggacagggucuguguuacagacugc

SEQ ID NO: 329860 - RNA, 32 nt, Human
auagaagguuuguuugacagaggagaaaaauu

SEQ ID NO: 329861 - RNA, 32 nt, Human
auagaaguguuucauccuuucaaaaccauuuc

SEQ ID NO: 329862 - RNA, 32 nt, Human
auagaauacagcauggaaaauaucaguguauu

SEQ ID NO: 329863 - RNA, 32 nt, Human
auagaauacuauucauuaaccuagaaacugag

SEQ ID NO: 329864 - RNA, 24 nt, Human
auagaauagagaccaguuugcuuu

SEQ ID NO: 329865 - RNA, 32 nt, Human
auagaauauuuugcugcacaugcaucaacaaa

SEQ ID NO: 329866 - RNA, 32 nt, Human
auagaauccacccaagaaaauuuucuuagcau

SEQ ID NO: 329867 - RNA, 31 nt, Human
auagaaucccacuggaauaccacauagcuuu

SEQ ID NO: 329868 - RNA, 32 nt, Human
auagaauccuggcaaugccauggaccuuaaga

SEQ ID NO: 329869 - RNA, 32 nt, Human
auagaaucuaagaguugauuguggaaaacacg

SEQ ID NO: 329870 - RNA, 32 nt, Human
auagaaucuaagguaauggcaagagcaaaggu

SEQ ID NO: 329871 - RNA, 32 nt, Human
auagaaugaguuaagaaggcucgagaagagca

SEQ ID NO: 329872 - RNA, 23 nt, Human
auagaauggaagggggaucauca

SEQ ID NO: 329873 - RNA, 32 nt, Human
auagaauggugcuucugaucaccugugacaug

SEQ ID NO: 329874 - RNA, 32 nt, Human
auagaaugucaguucuuuucucucagcacguu

SEQ ID NO: 329875 - RNA, 32 nt, Human
auagaauguuaaguuucaagaaaguuuaccuu

SEQ ID NO: 329876 - RNA, 32 nt, Human
auagaauuaaugaucagagcaaguuuaauuuu

SEQ ID NO: 329877 - RNA, 32 nt, Human
auagaauuaauuuucagccauguggaccauau

SEQ ID NO: 329878 - RNA, 32 nt, Human
auagaauucuauacccccaaccccuuguguca

SEQ ID NO: 329879 - RNA, 32 nt, Human
auagaauugucucucaacucugcuuuucucca

SEQ ID NO: 329880 - RNA, 32 nt, Human
auagaauugugagagaauguuuugaaaggcca

SEQ ID NO: 329881 - RNA, 32 nt, Human
auagaauuuuucaauguuuucuugagaugcaa

SEQ ID NO: 329882 - RNA, 32 nt, Human
auagacaaugaaguccagccugagguggcuuc

SEQ ID NO: 329883 - RNA, 32 nt, Human
auagacacaccaagaaguggauguauauaaua

SEQ ID NO: 329884 - RNA, 32 nt, Human
auagacacauugagguauggcagagaagacac

SEQ ID NO: 329885 - RNA, 19 nt, Human
auagacaccucugagccca

SEQ ID NO: 329886 - RNA, 32 nt, Human
auagacacgguuucaccauguuggccaggcug

SEQ ID NO: 329887 - RNA, 32 nt, Human
auagacacucagacacccucacaaacacagua

SEQ ID NO: 329888 - RNA, 32 nt, Human
auagacaggaucuugcuaugcuguccaggcug

SEQ ID NO: 329889 - RNA, 32 nt, Human
auagacaggcuuccaaacccugggaagaaagc

SEQ ID NO: 329890 - RNA, 32 nt, Human
auagacaggggcuugcuauaguguccaggcug

SEQ ID NO: 329891 - RNA, 32 nt, Human
auagacauaaaaggacucacuggagagauacu

SEQ ID NO: 329892 - RNA, 32 nt, Human
auagacaugaaagguccccacagagcaagaga

SEQ ID NO: 329893 - RNA, 32 nt, Human
auagacaugaaccaccucaucugguuucaauc

SEQ ID NO: 329894 - RNA, 32 nt, Human
auagacaugaacccuggaaauucuccaacccu

SEQ ID NO: 329895 - RNA, 32 nt, Human
auagacaugugggagaaaaagugaggauggau

SEQ ID NO: 329896 - RNA, 32 nt, Human
auagacauguuccucucugaacauuuagaagg

SEQ ID NO: 329897 - RNA, 32 nt, Human
auagacauucugauccccacucccagguauga

SEQ ID NO: 329898 - RNA, 32 nt, Human
auagaccaccaccacccacucacacucugccu

SEQ ID NO: 329899 - RNA, 32 nt, Human
auagaccacuggcugcugaaauacuuuucuug

SEQ ID NO: 329900 - RNA, 22 nt, Human
auagaccaggcgccacugggga

SEQ ID NO: 329901 - RNA, 32 nt, Human
auagacccaagugcaucaugcaagcauaugau

SEQ ID NO: 329902 - RNA, 22 nt, Human
auagacccaauacccauguaga

SEQ ID NO: 329903 - RNA, 32 nt, Human
auagacccacuugggccuucaugccauggccu

SEQ ID NO: 329904 - RNA, 32 nt, Human
auagacccguuagaaaccagcauucuaaagca

SEQ ID NO: 329905 - RNA, 32 nt, Human
auagacccucaagagcccccaagagacaggag

SEQ ID NO: 329906 - RNA, 32 nt, Human
auagacccucgagggcuuguguccauuuggcc

SEQ ID NO: 329907 - RNA, 32 nt, Human
auagaccucaucuagaugucauggccuacauu

SEQ ID NO: 329908 - RNA, 32 nt, Human
auagaccucugcaccuuucacacucauacucc

SEQ ID NO: 329909 - RNA, 32 nt, Human
auagaccugcagcugcaguucuccauguccca

SEQ ID NO: 329910 - RNA, 32 nt, Human
auagacuagagaaaccguccucuuuuuccauc

SEQ ID NO: 329911 - RNA, 32 nt, Human
auagacucaacucaucugcccaaccaaguaug

SEQ ID NO: 329912 - RNA, 32 nt, Human
auagacuccaugccuucucucucccugcaaag

SEQ ID NO: 329913 - RNA, 21 nt, Human
auagacuccuaaggacaaggg

SEQ ID NO: 329914 - RNA, 32 nt, Human
auagacucggguacugugaugauggcugcagu

SEQ ID NO: 329915 - RNA, 32 nt, Human
auagacucugcuacuucaaagcagaaggccaa

SEQ ID NO: 329916 - RNA, 19 nt, Human
auagacugaacagcaggga

SEQ ID NO: 329917 - RNA, 32 nt, Human
auagacugaagaggagcaagaacagaaacagg

SEQ ID NO: 329918 - RNA, 32 nt, Human
auagacugaaggucaggagcuauaguggagug

SEQ ID NO: 329919 - RNA, 32 nt, Human
auagacugcaggaaagcgaagguggagagaga

SEQ ID NO: 329920 - RNA, 32 nt, Human
auagacuuaauuagagaaauuuagacccagaa

SEQ ID NO: 329921 - RNA, 32 nt, Human
auagacuuagcugggugcaguggcucacaccu

SEQ ID NO: 329922 - RNA, 32 nt, Human
auagacuuaggugugagaaugaggugggaggu

SEQ ID NO: 329923 - RNA, 32 nt, Human
auagacuuguucacccuucauguccucaacuc

SEQ ID NO: 329924 - RNA, 32 nt, Human
auagagaaaugaggagguaacagaagagcagu

SEQ ID NO: 329925 - RNA, 32 nt, Human
auagagaacaaaaggaaaagauuguuaccacc

SEQ ID NO: 329926 - RNA, 32 nt, Human
auagagaaggaagggcuucagugaccggcugc

SEQ ID NO: 329927 - RNA, 32 nt, Human
auagagacaacaaaagcacauacucuuuaaag

SEQ ID NO: 329928 - RNA, 32 nt, Human
auagagacaccgaggagccucaguucugcuug

SEQ ID NO: 329929 - RNA, 32 nt, Human
auagagacagaggaacaaaaagagcagcagug

SEQ ID NO: 329930 - RNA, 32 nt, Human
auagagaccaucagauagaagcagggaaggua

SEQ ID NO: 329931 - RNA, 32 nt, Human
auagagaccaucauugcuaacauggugaaacc

SEQ ID NO: 329932 - RNA, 32 nt, Human
auagagaccauccuggccaacacggugaaacc

SEQ ID NO: 329933 - RNA, 32 nt, Human
auagagaccauccuggccaacauggugaaacc

SEQ ID NO: 329934 - RNA, 32 nt, Human
auagagaccaucuuugccaacauggugaaacu

SEQ ID NO: 329935 - RNA, 21 nt, Human
auagagacccccaaaagggaa

SEQ ID NO: 329936 - RNA, 32 nt, Human
auagagagaaagggagccgcugugcugguggg

SEQ ID NO: 329937 - RNA, 32 nt, Human
auagagagacucugcggcccagauucuucagg

SEQ ID NO: 329938 - RNA, 32 nt, Human
auagagagguccagaugucacaugugccaauu

SEQ ID NO: 329939 - RNA, 32 nt, Human
auagagauacacuugcgcuccacagcacugua

SEQ ID NO: 329940 - RNA, 21 nt, Human
auagagauauauaugcuguaa

SEQ ID NO: 329941 - RNA, 32 nt, Human
auagagaucccaacuugaaacaacagccagug

SEQ ID NO: 329942 - RNA, 32 nt, Human
auagagaucgagcuucaggacagagcagccaa

SEQ ID NO: 329943 - RNA, 32 nt, Human
auagagaugguuucacuauguuggccaggcug

SEQ ID NO: 329944 - RNA, 32 nt, Human
auagagauugauuucaagggaguuacauuauu

SEQ ID NO: 329945 - RNA, 32 nt, Human
auagagcacagcaaagaucugccagccccagg

SEQ ID NO: 329946 - RNA, 32 nt, Human
auagagcacccuuccuccugggccagagcugg

SEQ ID NO: 329947 - RNA, 32 nt, Human
auagagcaggguggaagcugcaaguacuggga

SEQ ID NO: 329948 - RNA, 32 nt, Human
auagagccauguguucaguuguggaccugucc

SEQ ID NO: 329949 - RNA, 32 nt, Human
auagagcccuggucaaguucucuccaccucuc

SEQ ID NO: 329950 - RNA, 32 nt, Human
auagagcuagcuggugugguugcagugaccuu

SEQ ID NO: 329951 - RNA, 25 nt, Human
auagagcucugcuagaagucagcca

SEQ ID NO: 329952 - RNA, 32 nt, Human
auagagcuguucaucauggauauuucugcugc

SEQ ID NO: 329953 - RNA, 32 nt, Human
auagagcuucauuccauaccaaagacuuauca

SEQ ID NO: 329954 - RNA, 32 nt, Human
auagagcuugcuggauggaaccugaauuugga

SEQ ID NO: 329955 - RNA, 32 nt, Human
auagaggaagugaaaugccuccacggcugugu

SEQ ID NO: 329956 - RNA, 32 nt, Human
auagaggagaaaggaagaaacacaauggcagg

SEQ ID NO: 329957 - RNA, 32 nt, Human
auagaggagacagauccucucuccuuggauau

SEQ ID NO: 329958 - RNA, 32 nt, Human
auagaggaggugcugaggaguuggugguagca

SEQ ID NO: 329959 - RNA, 32 nt, Human
auagaggaguguuuccucuuuauuuuugcuga

SEQ ID NO: 329960 - RNA, 32 nt, Human
auagaggaugcugacaauaaggacuuggaagu

SEQ ID NO: 329961 - RNA, 32 nt, Human
auagaggcaggcaagccguggauuuugcacau

SEQ ID NO: 329962 - RNA, 32 nt, Human
auagaggcauugaaggguuuuucuuagaugcc

SEQ ID NO: 329963 - RNA, 32 nt, Human
auagaggcauuguagaauagcaguucagacac

SEQ ID NO: 329964 - RNA, 32 nt, Human
auagaggccaaauccagggaccaggcccuaau

SEQ ID NO: 329965 - RNA, 32 nt, Human
auagagggaagagaaaucaaaggggcucucgc

SEQ ID NO: 329966 - RNA, 32 nt, Human
auagagggaagagaaaugaagaaugcaaagug

SEQ ID NO: 329967 - RNA, 32 nt, Human
auagagggaagaggaagaggaggacgaacaga

SEQ ID NO: 329968 - RNA, 32 nt, Human
auagaggggaaagauggccggaggaggaaaag

SEQ ID NO: 329969 - RNA, 32 nt, Human
auagaggggaggcagggagagcuugugggacc

SEQ ID NO: 329970 - RNA, 32 nt, Human
auagaggguauauugcauuuacauuuguaaaa

SEQ ID NO: 329971 - RNA, 32 nt, Human
auagaggucagagacaucaaguuuaauuagaa

SEQ ID NO: 329972 - RNA, 32 nt, Human
auagaggucugggaggaccaggaaacagccuc

SEQ ID NO: 329973 - RNA, 32 nt, Human
auagaggugaugaagacacagaacaggcucag

SEQ ID NO: 329974 - RNA, 32 nt, Human
auagagguguggaaccugaggggccagcaggc

SEQ ID NO: 329975 - RNA, 32 nt, Human
auagaguagguugaacuggccagaccuagaca

SEQ ID NO: 329976 - RNA, 32 nt, Human
auagaguccagaucuugccuccagagauuugc

SEQ ID NO: 329977 - RNA, 32 nt, Human
auagagucuugcuauguuguccaggcugacac

SEQ ID NO: 329978 - RNA, 32 nt, Human
auagagugagcuccuccccaguaccugguaau

SEQ ID NO: 329979 - RNA, 32 nt, Human
auagagugcuuuggugggaguauuuugauuac

SEQ ID NO: 329980 - RNA, 32 nt, Human
auagaguggaaucucuuggaugcagcuucaag

SEQ ID NO: 329981 - RNA, 32 nt, Human
auagagugggaggcagggugcgguggcucaug

SEQ ID NO: 329982 - RNA, 32 nt, Human
auagaguuagguaagaaaguguggaaaguaua

SEQ ID NO: 329983 - RNA, 32 nt, Human
auagaguuuacugaaagguuuuuaaaguccug

SEQ ID NO: 329984 - RNA, 32 nt, Human
auagauaacagcuugaacauuaugaaaugcua

SEQ ID NO: 329985 - RNA, 32 nt, Human
auagauaaccaccuuuaauauuacacugcuua

SEQ ID NO: 329986 - RNA, 32 nt, Human
auagauaaccucuauagggacagaagccucac

SEQ ID NO: 329987 - RNA, 32 nt, Human
auagauaagaucaugagacaguagaagcgaug

SEQ ID NO: 329988 - RNA, 32 nt, Human
auagauaauguucuccacugacacaaaagaag

SEQ ID NO: 329989 - RNA, 32 nt, Human
auagauagggucucacuauauugcccagcuca

SEQ ID NO: 329990 - RNA, 32 nt, Human
auagauagugauauauuucauuuuuaauuugu

SEQ ID NO: 329991 - RNA, 32 nt, Human
auagauauagccaaauuccuucccccaaaaga

SEQ ID NO: 329992 - RNA, 32 nt, Human
auagauaucuucaugccauuacagcuuucuag

SEQ ID NO: 329993 - RNA, 32 nt, Human
auagaucaugaggccuaaaaugaauaaggaaa

SEQ ID NO: 329994 - RNA, 32 nt, Human
auagauccccugccaggcccaggaugauagga

SEQ ID NO: 329995 - RNA, 32 nt, Human
auagauccuccucagcaaggugugugaugccc

SEQ ID NO: 329996 - RNA, 32 nt, Human
auagaucggaguagagaucugccaaguugccu

SEQ ID NO: 329997 - RNA, 32 nt, Human
auagaucguaauaguuguagaagauugguugg

SEQ ID NO: 329998 - RNA, 32 nt, Human
auagaugaaaaauguguuuacugcuuucaguc

SEQ ID NO: 329999 - RNA, 32 nt, Human
auagaugaaugcuuucauuugaguuucauucu

SEQ ID NO: 330000 - RNA, 32 nt, Human
auagaugagagguucccauggagcucacauga

SEQ ID NO: 330001 - RNA, 32 nt, Human
auagaugaggcaugccugggaaaugcucccuu

SEQ ID NO: 330002 - RNA, 32 nt, Human
auagaugcccuaguccacuuuaucuuuguucc

SEQ ID NO: 330003 - RNA, 32 nt, Human
auagaugccugaccaguguccucuucccucag

SEQ ID NO: 330004 - RNA, 32 nt, Human
auagaugcgcaggcacgcacacacaaaacaag

SEQ ID NO: 330005 - RNA, 32 nt, Human
auagaugcuauccuuuaucacgauguucaauu

SEQ ID NO: 330006 - RNA, 32 nt, Human
auagaugcugucuauaauagugaacagucacc

SEQ ID NO: 330007 - RNA, 32 nt, Human
auagauggaggcuaaaaaugaagguuuuucuu

SEQ ID NO: 330008 - RNA, 32 nt, Human
auagauggaguggcugggcaugggggcucaca

SEQ ID NO: 330009 - RNA, 32 nt, Human
auagaugggguuucaccauguuggccaggaug

SEQ ID NO: 330010 - RNA, 32 nt, Human
auagaugugagacagauuugagagagcauuua

SEQ ID NO: 330011 - RNA, 32 nt, Human
auagauguggcuccucauaauucuccaacuuu

SEQ ID NO: 330012 - RNA, 32 nt, Human
auagauuaguuaaugguuuuucuugaauucga

SEQ ID NO: 330013 - RNA, 31 nt, Human
auagauuaguuucagugguucucauuucacu

SEQ ID NO: 330014 - RNA, 32 nt, Human
auagauuauaucuggagugaaggauccugcca

SEQ ID NO: 330015 - RNA, 32 nt, Human
auagauuauucaggacuguccuuuaguucugu

SEQ ID NO: 330016 - RNA, 32 nt, Human
auagauuauuuuauagcuuauuuuggauauuu

SEQ ID NO: 330017 - RNA, 32 nt, Human
auagauucaaugccauccccaucaagcuacca

SEQ ID NO: 330018 - RNA, 32 nt, Human
auagauucauucuuuuauuucuacucauucau

SEQ ID NO: 330019 - RNA, 32 nt, Human
auagauuccuucugcugggucuggaaagucug

SEQ ID NO: 330020 - RNA, 32 nt, Human
auagauucuccauuaagaaauaauucccuuuu

SEQ ID NO: 330021 - RNA, 32 nt, Human
auagauucuuccagauguuuuguuuuauacag

SEQ ID NO: 330022 - RNA, 32 nt, Human
auagauugaggcuacucucaggcaagugagcu

SEQ ID NO: 330023 - RNA, 32 nt, Human
auagauugcaggaaagcgaagguggagagaga

SEQ ID NO: 330024 - RNA, 32 nt, Human
auagauugcuacccuggggcacaauaugugcc

SEQ ID NO: 330025 - RNA, 32 nt, Human
auagauugugccugggguugcuaauucucugc

SEQ ID NO: 330026 - RNA, 32 nt, Human
auagauuguuccuaucccccucuccuugaugu

SEQ ID NO: 330027 - RNA, 32 nt, Human
auagauuuagucgaguggggcaggccugccuc

SEQ ID NO: 330028 - RNA, 32 nt, Human
auagcaaaauugaggccaagggccaagagaau

SEQ ID NO: 330029 - RNA, 32 nt, Human
auagcaaacugaggcugaguagggaacagacc

SEQ ID NO: 330030 - RNA, 19 nt, Human
auagcaaagcuguucucca

SEQ ID NO: 330031 - RNA, 32 nt, Human
auagcaacgagaugaauguauccaacauuuca

SEQ ID NO: 330032 - RNA, 32 nt, Human
auagcaagaaaugcagugucugccuguuacag

SEQ ID NO: 330033 - RNA, 32 nt, Human
auagcaagacucugucucaaaauaauaauaau

SEQ ID NO: 330034 - RNA, 32 nt, Human
auagcaaggacgaccuucccugcuccaugccc

SEQ ID NO: 330035 - RNA, 32 nt, Human
auagcaaggagcaaauuuccacaaagugcuug

SEQ ID NO: 330036 - RNA, 32 nt, Human
auagcaaucacauuaugaagcugcagugauac

SEQ ID NO: 330037 - RNA, 32 nt, Human
auagcaauugcacuccggccugggcaacaaga

SEQ ID NO: 330038 - RNA, 32 nt, Human
auagcaauuuucuguggcacugagaaaccaug

SEQ ID NO: 330039 - RNA, 32 nt, Human
auagcacagaagguaaaauggaagggcugcua

SEQ ID NO: 330040 - RNA, 32 nt, Human
auagcaccacugcacuccagccugggagacag

SEQ ID NO: 330041 - RNA, 32 nt, Human
auagcaccacugcacuccagccugggcaacag

SEQ ID NO: 330042 - RNA, 32 nt, Human
auagcaccacugcacuccagccugggugacag

SEQ ID NO: 330043 - RNA, 32 nt, Human
auagcaccacugcacuccaggcugggugacag

SEQ ID NO: 330044 - RNA, 32 nt, Human
auagcaccacugcacuuuagccugggcgacaa

SEQ ID NO: 330045 - RNA, 32 nt, Human
auagcaccacugcaguccagccugggcgacag

SEQ ID NO: 330046 - RNA, 32 nt, Human
auagcaccacugcaugcaagccugggcaauag

SEQ ID NO: 330047 - RNA, 32 nt, Human
auagcaccacugcgcuccagccugggugagga

SEQ ID NO: 330048 - RNA, 32 nt, Human
auagcaccauugcacuccagccugggcgacuc

SEQ ID NO: 330049 - RNA, 32 nt, Human
auagcaccuggagccucuggaggaagaggagg

SEQ ID NO: 330050 - RNA, 32 nt, Human
auagcacguucgcaaaguacgcucaaagccga

SEQ ID NO: 330051 - RNA, 32 nt, Human
auagcacuaagcugugugccugccugggagac

SEQ ID NO: 330052 - RNA, 32 nt, Human
auagcacuccagccuuagccugggcgacagag

SEQ ID NO: 330053 - RNA, 32 nt, Human
auagcacucccaggccacuuuggucucagugu

SEQ ID NO: 330054 - RNA, 32 nt, Human
auagcacugcaauaaacauacaugugcaugug

SEQ ID NO: 330055 - RNA, 32 nt, Human
auagcacuggacuccagaguuggucugcacgc

SEQ ID NO: 330056 - RNA, 32 nt, Human
auagcacugggauuuugccucccagccaaaau

SEQ ID NO: 330057 - RNA, 32 nt, Human
auagcacuggggaaagcagaacuccauucuca

SEQ ID NO: 330058 - RNA, 32 nt, Human
auagcacugggugugagaaugaucaaggaucu

SEQ ID NO: 330059 - RNA, 32 nt, Human
auagcacuuuucacuucuguguguuuuuaaaa

SEQ ID NO: 330060 - RNA, 32 nt, Human
auagcagaaagaacuuuaaagcucaggagggu

SEQ ID NO: 330061 - RNA, 32 nt, Human
auagcagaaugagagccaaggacuagaaaaac

SEQ ID NO: 330062 - RNA, 32 nt, Human
auagcagacaaugcccucccaaguacugaaau

SEQ ID NO: 330063 - RNA, 32 nt, Human
auagcagaguacaaaccagcugccucacuucu

SEQ ID NO: 330064 - RNA, 32 nt, Human
auagcagaucccuggagagggggcagguccca

SEQ ID NO: 330065 - RNA, 32 nt, Human
auagcagauguaacaccccugagaccccgauu

SEQ ID NO: 330066 - RNA, 32 nt, Human
auagcagauucugucaaccacauuucauaaag

SEQ ID NO: 330067 - RNA, 32 nt, Human
auagcagcgcacugcaaccuggaccuccuggg

SEQ ID NO: 330068 - RNA, 32 nt, Human
auagcagcuagugcggggcauccucauccugu

SEQ ID NO: 330069 - RNA, 32 nt, Human
auagcaggacuuuuagaugaaaaguauucuua

SEQ ID NO: 330070 - RNA, 32 nt, Human
auagcaggagccaaaauaguagaggaggggag

SEQ ID NO: 330071 - RNA, 32 nt, Human
auagcaggcguaaauaccuacuguauacaaug

SEQ ID NO: 330072 - RNA, 32 nt, Human
auagcagggaaugaauuuugaaacuaagcaac

SEQ ID NO: 330073 - RNA, 32 nt, Human
auagcagggaaugagucccucuaaacuauucc

SEQ ID NO: 330074 - RNA, 32 nt, Human
auagcagggacuagggagggaggcagggaacg

SEQ ID NO: 330075 - RNA, 32 nt, Human
auagcagggcugggcucugucuuccuggucau

SEQ ID NO: 330076 - RNA, 32 nt, Human
auagcaggggcugcaguagccauguuaacaug

SEQ ID NO: 330077 - RNA, 32 nt, Human
auagcaguccagaguccauggccccgccuagg

SEQ ID NO: 330078 - RNA, 32 nt, Human
auagcaucagccauggcaggaaugcacaggac

SEQ ID NO: 330079 - RNA, 32 nt, Human
auagcaucugcauucugggaaggaaagcugag

SEQ ID NO: 330080 - RNA, 32 nt, Human
auagcaucuggggacaaguggagccagguaga

SEQ ID NO: 330081 - RNA, 32 nt, Human
auagcaucuuugucauagccuugggagccagg

SEQ ID NO: 330082 - RNA, 32 nt, Human
auagcaugccuguccuaaguuacaguaguuug

SEQ ID NO: 330083 - RNA, 32 nt, Human
auagcaugggaggcucuggaagcuguggcauu

SEQ ID NO: 330084 - RNA, 32 nt, Human
auagcaugggcaagaaaaggcaucaaagaagu

SEQ ID NO: 330085 - RNA, 32 nt, Human
auagcaugggcaagaaaaggcaucaaagaggu

SEQ ID NO: 330086 - RNA, 32 nt, Human
auagcauguacagcacaaagcguuugcucuaa

SEQ ID NO: 330087 - RNA, 32 nt, Human
auagcauuugcccuguggggugcaguguuacc

SEQ ID NO: 330088 - RNA, 32 nt, Human
auagccaacuccaucuagauacaaauuagcag

SEQ ID NO: 330089 - RNA, 25 nt, Human
auagccaauguuaauuguacugcua

SEQ ID NO: 330090 - RNA, 32 nt, Human
auagccacauuuaacuccagccuuggguuuga

SEQ ID NO: 330091 - RNA, 32 nt, Human
auagccaccauuuuguccaagccugggcaugg

SEQ ID NO: 330092 - RNA, 32 nt, Human
auagccacugcacuccagccugggcaacauag

SEQ ID NO: 330093 - RNA, 32 nt, Human
auagccacugcacuccagccugggcaauauag

SEQ ID NO: 330094 - RNA, 32 nt, Human
auagccacugcacuccaucuugggcaacacag

SEQ ID NO: 330095 - RNA, 32 nt, Human
auagccacugcacucuagucuggggaacauau

SEQ ID NO: 330096 - RNA, 32 nt, Human
auagccacugcacuucagccugggcaacauag

SEQ ID NO: 330097 - RNA, 32 nt, Human
auagccacugcacuugagccucuugggaaaca

SEQ ID NO: 330098 - RNA, 32 nt, Human
auagccacugcauaccaaccugggcaauauag

SEQ ID NO: 330099 - RNA, 32 nt, Human
auagccacuggcagcuuugaagaacgggacac

SEQ ID NO: 330100 - RNA, 32 nt, Human
auagccagacaggacgugcaaacaggucucau

SEQ ID NO: 330101 - RNA, 32 nt, Human
auagccagacgccucaccuucucuccauucua

SEQ ID NO: 330102 - RNA, 32 nt, Human
auagccagagaaggagaagcucccauccaaau

SEQ ID NO: 330103 - RNA, 32 nt, Human
auagccagcucuccugauuucccuaacucugc

SEQ ID NO: 330104 - RNA, 32 nt, Human
auagccagugaggagccaggcacacaacuugg

SEQ ID NO: 330105 - RNA, 32 nt, Human
auagccauaagaaaauaucugcuauacaggaa

SEQ ID NO: 330106 - RNA, 32 nt, Human
auagccauaauuuuaccagccuuucugucaua

SEQ ID NO: 330107 - RNA, 32 nt, Human
auagccaugagcuccaauuaccucagagcucc

SEQ ID NO: 330108 - RNA, 31 nt, Human
auagccaugccuuuuggucugaagcuccgcc

SEQ ID NO: 330109 - RNA, 32 nt, Human
auagccauuugaagaaggaggaauuuuagaag

SEQ ID NO: 330110 - RNA, 32 nt, Human
auagccauuuuucaaagguuucuggcucaccc

SEQ ID NO: 330111 - RNA, 32 nt, Human
auagcccaagagagccugcuguguagucacaa

SEQ ID NO: 330112 - RNA, 22 nt, Human
auagcccaaggugacauuuccc

SEQ ID NO: 330113 - RNA, 32 nt, Human
auagcccacugcagccuccaccucccaggcuc

SEQ ID NO: 330114 - RNA, 32 nt, Human
auagcccagcaucuagaaauccuaugaaacgu

SEQ ID NO: 330115 - RNA, 32 nt, Human
auagcccaggcaggaguacaguggcacaaucu

SEQ ID NO: 330116 - RNA, 32 nt, Human
auagcccaucaagcuccugcccuggcugggcc

SEQ ID NO: 330117 - RNA, 32 nt, Human
auagcccaucacaggcucuucacccuuggcag

SEQ ID NO: 330118 - RNA, 32 nt, Human
auagccccacugcacuccagccugggugacag

SEQ ID NO: 330119 - RNA, 32 nt, Human
auagccccaggagugggcuuuagucuccaaua

SEQ ID NO: 330120 - RNA, 32 nt, Human
auagccccagguuccagguagacauuggaauc

SEQ ID NO: 330121 - RNA, 32 nt, Human
auagccccaguaggacaaacgggcucgggucu

SEQ ID NO: 330122 - RNA, 32 nt, Human
auagcccccuccaucauccuucaccuccuauc

SEQ ID NO: 330123 - RNA, 32 nt, Human
auagccccggacugaguccccuccagucgagg

SEQ ID NO: 330124 - RNA, 26 nt, Human
auagccccuggcucuggcaucucucc

SEQ ID NO: 330125 - RNA, 32 nt, Human
auagcccgaagucucauggcagucccaaagga

SEQ ID NO: 330126 - RNA, 32 nt, Human
auagcccuacuccugccuccccaaaucagaua

SEQ ID NO: 330127 - RNA, 32 nt, Human
auagcccuugcucucccaugcccaccccacuu

SEQ ID NO: 330128 - RNA, 32 nt, Human
auagccgccauguugauuucacauuaaacugu

SEQ ID NO: 330129 - RNA, 32 nt, Human
auagccggcuaaaucuggaaugugagugcuac

SEQ ID NO: 330130 - RNA, 32 nt, Human
auagccguuccuucccccucuaggccuuguau

SEQ ID NO: 330131 - RNA, 32 nt, Human
auagccuacauuuguauuuauuuucuauucca

SEQ ID NO: 330132 - RNA, 32 nt, Human
auagccuagagaaaccaaggcaaaugguugcu

SEQ ID NO: 330133 - RNA, 23 nt, Human
auagccuaggugacagagugaga

SEQ ID NO: 330134 - RNA, 32 nt, Human
auagccuccagcggaaugcugaguuugucaug

SEQ ID NO: 330135 - RNA, 28 nt, Human
auagccucgggugcugccuguagucaug

SEQ ID NO: 330136 - RNA, 32 nt, Human
auagccuggccgagccugggaaccaccugggg

SEQ ID NO: 330137 - RNA, 32 nt, Human
auagccuggcgggggcuggcagagccacaccc

SEQ ID NO: 330138 - RNA, 32 nt, Human
auagccugggcaacauagcaagaccccaucuc

SEQ ID NO: 330139 - RNA, 32 nt, Human
auagccuguuugaaaacuggaaaggagagcac

SEQ ID NO: 330140 - RNA, 32 nt, Human
auagcgagguggaggaagggaggcacugggga

SEQ ID NO: 330141 - RNA, 32 nt, Human
auagcgccacugcacugcacgccagccuaggc

SEQ ID NO: 330142 - RNA, 32 nt, Human
auagcgccacugcaguccggccugggugaaag

SEQ ID NO: 330143 - RNA, 32 nt, Human
auagcgccauugcacuccagccugagcgacag

SEQ ID NO: 330144 - RNA, 32 nt, Human
auagcgccauugcacuccagccugggcaacaa

SEQ ID NO: 330145 - RNA, 32 nt, Human
auagcgccauugcacuccagccugggcgacug

SEQ ID NO: 330146 - RNA, 32 nt, Human
auagcgcccacuuuccagggcugugcuaagga

SEQ ID NO: 330147 - RNA, 32 nt, Human
auagcggacuccuccuuucuccuccgaggugg

SEQ ID NO: 330148 - RNA, 32 nt, Human
auagcggcacugcacuccagccugggugacaa

SEQ ID NO: 330149 - RNA, 32 nt, Human
auagcggcauugcacuccagccugggcaacaa

SEQ ID NO: 330150 - RNA, 32 nt, Human
auagcggucaggcccagcaggagcuuggcaca

SEQ ID NO: 330151 - RNA, 32 nt, Human
auagcguaaccauacccccaccucugcuugcu

SEQ ID NO: 330152 - RNA, 32 nt, Human
auagcguaaguuuggaaaguuuagcaaaauca

SEQ ID NO: 330153 - RNA, 32 nt, Human
auagcgugaacccagaagguggagguagcagu

SEQ ID NO: 330154 - RNA, 32 nt, Human
auagcgugaggugcuucucucagucccaauua

SEQ ID NO: 330155 - RNA, 32 nt, Human
auagcuaaaaacaaaagcccauaaaguuggag

SEQ ID NO: 330156 - RNA, 32 nt, Human
auagcuaacucauguaaaaucccuucuccuuu

SEQ ID NO: 330157 - RNA, 32 nt, Human
auagcuaaggaaauuugcuuuuggagaaugua

SEQ ID NO: 330158 - RNA, 32 nt, Human
auagcuaaguagggucuugaggaugcaggggu

SEQ ID NO: 330159 - RNA, 32 nt, Human
auagcuagagaagggaaagacuuuaucauccc

SEQ ID NO: 330160 - RNA, 31 nt, Human
auagcuaggcacuuuauuacucuuuugaacu

SEQ ID NO: 330161 - RNA, 18 nt, Human
auagcuaggccugcaggu

SEQ ID NO: 330162 - RNA, 32 nt, Human
auagcuauccuuggagcuuauguuucagacaa

SEQ ID NO: 330163 - RNA, 32 nt, Human
auagcuaugaaagagaaaggugacaggcacaa

SEQ ID NO: 330164 - RNA, 32 nt, Human
auagcuauugcacuccagccuuggcaacauaa

SEQ ID NO: 330165 - RNA, 32 nt, Human
auagcuauuuugauaggauuugcucacauagu

SEQ ID NO: 330166 - RNA, 32 nt, Human
auagcucaacagugaaaguagcagggaaagag

SEQ ID NO: 330167 - RNA, 32 nt, Human
auagcucacaccuguaaucccagccuggaaug

SEQ ID NO: 330168 - RNA, 32 nt, Human
auagcucacauugagcuuuuggcuccagguga

SEQ ID NO: 330169 - RNA, 32 nt, Human
auagcucacugcaaaucuaacuucaucauggu

SEQ ID NO: 330170 - RNA, 32 nt, Human
auagcucacugcagacuccaacuccuggccuc

SEQ ID NO: 330171 - RNA, 32 nt, Human
auagcucacugcagccucaaacucuuuggcuc

SEQ ID NO: 330172 - RNA, 32 nt, Human
auagcucacugcagccucauacuccugggcuc

SEQ ID NO: 330173 - RNA, 32 nt, Human
auagcucacugcagccuccaacuccuggguuc

SEQ ID NO: 330174 - RNA, 32 nt, Human
auagcucacugcagccucgaacuccugggcuc

SEQ ID NO: 330175 - RNA, 32 nt, Human
auagcucacugcagccucgaacucuugggcuu

SEQ ID NO: 330176 - RNA, 32 nt, Human
auagcucacugcagccucgaaucccugggcuc

SEQ ID NO: 330177 - RNA, 32 nt, Human
auagcucacugcagccuggaauuccugggcuc

SEQ ID NO: 330178 - RNA, 32 nt, Human
auagcucacugcagccuucaacuucugggcuc

SEQ ID NO: 330179 - RNA, 32 nt, Human
auagcucacugcagccuugacccccucccuga

SEQ ID NO: 330180 - RNA, 32 nt, Human
auagcucacugcagccuuuaacuacugggcuc

SEQ ID NO: 330181 - RNA, 32 nt, Human
auagcucacugcagcuuugaccucccagaccc

SEQ ID NO: 330182 - RNA, 32 nt, Human
auagcucacugccagagcagccuggguuccca

SEQ ID NO: 330183 - RNA, 32 nt, Human
auagcucagaaacauuuguaaaagcaagguuu

SEQ ID NO: 330184 - RNA, 32 nt, Human
auagcucagccaaaucucuguuuuauguccug

SEQ ID NO: 330185 - RNA, 32 nt, Human
auagcucagugugcccuugaauccauacaguu

SEQ ID NO: 330186 - RNA, 32 nt, Human
auagcuccaagugucacacaccagaacauuaa

SEQ ID NO: 330187 - RNA, 32 nt, Human
auagcuccagccaggccagaccgagggcugcu

SEQ ID NO: 330188 - RNA, 32 nt, Human
auagcucccugccuccccacugccccuaaagc

SEQ ID NO: 330189 - RNA, 32 nt, Human
auagcucgcuaaaagauucaagcaagggacau

SEQ ID NO: 330190 - RNA, 32 nt, Human
auagcucggugcuauuuugguuuugcauuucc

SEQ ID NO: 330191 - RNA, 32 nt, Human
auagcucuaacuucuguauaccaauaaaauaa

SEQ ID NO: 330192 - RNA, 32 nt, Human
auagcucuauauugaaugaaagccacugugcu

SEQ ID NO: 330193 - RNA, 32 nt, Human
auagcucucuccugcuaccagucugugccuua

SEQ ID NO: 330194 - RNA, 32 nt, Human
auagcucugcauuuacagcagcuccugcucag

SEQ ID NO: 330195 - RNA, 32 nt, Human
auagcucugcggagguggaaguuggggagcuu

SEQ ID NO: 330196 - RNA, 32 nt, Human
auagcucugguggcucaugccuguaauccagc

SEQ ID NO: 330197 - RNA, 32 nt, Human
auagcucuuccccaccuccucauuuuaguaaa

SEQ ID NO: 330198 - RNA, 32 nt, Human
auagcucuuugggucccacuguuccauuuuau

SEQ ID NO: 330199 - RNA, 32 nt, Human
auagcucuuuuucuguuuuuccuugcucauuu

SEQ ID NO: 330200 - RNA, 32 nt, Human
auagcugaagugaggugucuggguuagacaau

SEQ ID NO: 330201 - RNA, 32 nt, Human
auagcugagccaagugagugaguuugcagaaa

SEQ ID NO: 330202 - RNA, 21 nt, Human
auagcugaugauucuguagua

SEQ ID NO: 330203 - RNA, 32 nt, Human
auagcugcauaucuuuuuccucugcuucauuu

SEQ ID NO: 330204 - RNA, 32 nt, Human
auagcugcgccccagcaaggagggucaugggc

SEQ ID NO: 330205 - RNA, 32 nt, Human
auagcugcugccuccuaaucuuccugcuagug

SEQ ID NO: 330206 - RNA, 32 nt, Human
auagcuggaauuacaggugugagccaccaugc

SEQ ID NO: 330207 - RNA, 21 nt, Human
auagcuggagcaaaccugggg

SEQ ID NO: 330208 - RNA, 32 nt, Human
auagcuggccugagaaggcagugcaagcccca

SEQ ID NO: 330209 - RNA, 32 nt, Human
auagcugggaggagaggaagauggauaauuaa

SEQ ID NO: 330210 - RNA, 32 nt, Human
auagcugggaggcugcagagggugcugggagc

SEQ ID NO: 330211 - RNA, 32 nt, Human
auagcugggauuacaggugcacgccaccaugc

SEQ ID NO: 330212 - RNA, 32 nt, Human
auagcugggauuacaggugcaugccaccacac

SEQ ID NO: 330213 - RNA, 32 nt, Human
auagcugggauuacaguugccugccaccacgc

SEQ ID NO: 330214 - RNA, 32 nt, Human
auagcugggauuauaggugccugccaccaugc

SEQ ID NO: 330215 - RNA, 32 nt, Human
auagcuggugaaggacaccuccauccauucca

SEQ ID NO: 330216 - RNA, 32 nt, Human
auagcuguaaggacagucaccuugcaaguggg

SEQ ID NO: 330217 - RNA, 32 nt, Human
auagcuguaggggagcacugagagucugacag

SEQ ID NO: 330218 - RNA, 20 nt, Human
auagcuguaguuuuaaucuu

SEQ ID NO: 330219 - RNA, 32 nt, Human
auagcuguuggaguaaaguugcaguggaagcu

SEQ ID NO: 330220 - RNA, 32 nt, Human
auagcuuaugccuaggagguugaggcugcagu

SEQ ID NO: 330221 - RNA, 32 nt, Human
auagcuuccaauaaagcagccucauucugagg

SEQ ID NO: 330222 - RNA, 32 nt, Human
auagcuuccccauccaaaacauaaaguuauag

SEQ ID NO: 330223 - RNA, 32 nt, Human
auagcuucuuccaggucauagugucugccccc

SEQ ID NO: 330224 - RNA, 32 nt, Human
auagcuugaacccaggagacagagguugcagu

SEQ ID NO: 330225 - RNA, 32 nt, Human
auagcuugaacccaggagguggagguugcagu

SEQ ID NO: 330226 - RNA, 32 nt, Human
auagcuugaacccaguggcggaggcugcagug

SEQ ID NO: 330227 - RNA, 32 nt, Human
auagcuugaacccgggaggcggagauugcggu

SEQ ID NO: 330228 - RNA, 32 nt, Human
auagcuugggcuguuccuucucugauacggga

SEQ ID NO: 330229 - RNA, 32 nt, Human
auagcuugugcuucugaggugcacugaauuca

SEQ ID NO: 330230 - RNA, 32 nt, Human
auagcuuucaauuguucuuucuggaagacuuu

SEQ ID NO: 330231 - RNA, 32 nt, Human
auagcuuucauccugaaauuucagccaugaau

SEQ ID NO: 330232 - RNA, 32 nt, Human
auagcuuuccaaaaugaaaguuacuugaggca

SEQ ID NO: 330233 - RNA, 32 nt, Human
auagcuuuccccacagcucagccuggggccug

SEQ ID NO: 330234 - RNA, 22 nt, Human
auagcuuucgggggaggagaga

SEQ ID NO: 330235 - RNA, 32 nt, Human
auagcuuuuuaacuuuguuugcacugggugug

SEQ ID NO: 330236 - RNA, 32 nt, Human
auaggaaaacagccuguugcaugguaagagug

SEQ ID NO: 330237 - RNA, 32 nt, Human
auaggaaaagguaacuagaaguuguacgaagu

SEQ ID NO: 330238 - RNA, 23 nt, Human
auaggaaacagugaccauuuuca

SEQ ID NO: 330239 - RNA, 23 nt, Human
auaggaaacugaaacucugugga

SEQ ID NO: 330240 - RNA, 32 nt, Human
auaggaaagaggaggaugaggucugggguucu

SEQ ID NO: 330241 - RNA, 32 nt, Human
auaggaaagauacaucagauuuacagauuaug

SEQ ID NO: 330242 - RNA, 32 nt, Human
auaggaaaugucccccaucucccuuccugcac

SEQ ID NO: 330243 - RNA, 32 nt, Human
auaggaacgucaaagcucuguauaccuacuaa

SEQ ID NO: 330244 - RNA, 32 nt, Human
auaggaacuuguagggcucauuuugguuucau

SEQ ID NO: 330245 - RNA, 32 nt, Human
auaggaagagaaggagaugcucacagauacaa

SEQ ID NO: 330246 - RNA, 32 nt, Human
auaggaagagggcuagaaaccuaacugauucu

SEQ ID NO: 330247 - RNA, 32 nt, Human
auaggaagcuccugggcuuagcugugggaagc

SEQ ID NO: 330248 - RNA, 32 nt, Human
auaggaagggcauuccaggcagagggaaaccu

SEQ ID NO: 330249 - RNA, 32 nt, Human
auaggaaguacauucuagaggaaagguuuuug

SEQ ID NO: 330250 - RNA, 32 nt, Human
auaggaaucucuauuugcuguauuuauugugu

SEQ ID NO: 330251 - RNA, 32 nt, Human
auaggaauguugcuaugaggacagauucauca

SEQ ID NO: 330252 - RNA, 31 nt, Human
auaggaauuuacuucuuuuccuugaauggag

SEQ ID NO: 330253 - RNA, 31 nt, Human
auaggaauuuacuucuuuuccuugaguggaa

SEQ ID NO: 330254 - RNA, 32 nt, Human
auaggaauuugagaaagguguaagaaauagga

SEQ ID NO: 330255 - RNA, 32 nt, Human
auaggacagaacccuuucagggcugaagaaag

SEQ ID NO: 330256 - RNA, 32 nt, Human
auaggacaucuggcucccagcauccaaauuaa

SEQ ID NO: 330257 - RNA, 32 nt, Human
auaggacauuuuccuuucuucuuucuguuuuc

SEQ ID NO: 330258 - RNA, 28 nt, Human
auaggaccaauaaauccuuuggaagagc

SEQ ID NO: 330259 - RNA, 32 nt, Human
auaggacugcccugcagggacaguuacuuaac

SEQ ID NO: 330260 - RNA, 32 nt, Human
auaggacugcccugcagggacaguuauuuaac

SEQ ID NO: 330261 - RNA, 24 nt, Human
auaggagaagagagagaucgcugu

SEQ ID NO: 330262 - RNA, 32 nt, Human
auaggagaagaggaggaggaggagcggggucc

SEQ ID NO: 330263 - RNA, 22 nt, Human
auaggagaagugagaauacugu

SEQ ID NO: 330264 - RNA, 32 nt, Human
auaggagacuccuguaccuuucuucguuuuac

SEQ ID NO: 330265 - RNA, 32 nt, Human
auaggagaugagcaauggcagcuuuggggacc

SEQ ID NO: 330266 - RNA, 32 nt, Human
auaggaggagagaaaauggggaugccaagaau

SEQ ID NO: 330267 - RNA, 32 nt, Human
auaggaggaggcagaggggugccuggaguuuc

SEQ ID NO: 330268 - RNA, 32 nt, Human
auaggaggcugaggcaggagaaucacuugaac

SEQ ID NO: 330269 - RNA, 32 nt, Human
auaggagggagagagggaaggggcugaggaaa

SEQ ID NO: 330270 - RNA, 23 nt, Human
auaggaguacgcugccugggagg

SEQ ID NO: 330271 - RNA, 32 nt, Human
auaggagucagauacaaaaagaaaaaucacug

SEQ ID NO: 330272 - RNA, 20 nt, Human
auaggagucauguccagagg

SEQ ID NO: 330273 - RNA, 31 nt, Human
auaggagugaagagagaaaagacuaacagga

SEQ ID NO: 330274 - RNA, 32 nt, Human
auaggagugaucucaagugagauagcagagca

SEQ ID NO: 330275 - RNA, 32 nt, Human
auaggagugauggcccaucacauucaguuuuc

SEQ ID NO: 330276 - RNA, 32 nt, Human
auaggaguuacuggagugaagcuccuauguga

SEQ ID NO: 330277 - RNA, 32 nt, Human
auaggaguucacuucaucuucucagcucccau

SEQ ID NO: 330278 - RNA, 32 nt, Human
auaggaguucauccugaaaagcugugacucau

SEQ ID NO: 330279 - RNA, 32 nt, Human
auaggaguugcuuacugaacugaauaucuuug

SEQ ID NO: 330280 - RNA, 32 nt, Human
auaggaguuugagaccagccuggguaacaugg

SEQ ID NO: 330281 - RNA, 32 nt, Human
auaggauaacauucgaugucccugccauuagu

SEQ ID NO: 330282 - RNA, 32 nt, Human
auaggauauugaggcaggagaaucgcuugaac

SEQ ID NO: 330283 - RNA, 32 nt, Human
auaggaucccaaaauucaucucuaaugugguu

SEQ ID NO: 330284 - RNA, 32 nt, Human
auaggaucccaugaggaugguccccuucaccu

SEQ ID NO: 330285 - RNA, 32 nt, Human
auaggaucucacuauguugcccaggcuguucu

SEQ ID NO: 330286 - RNA, 32 nt, Human
auaggaucuggguuuagaguguguaucauuaa

SEQ ID NO: 330287 - RNA, 32 nt, Human
auaggaugaucaccuccaguccuucggacuua

SEQ ID NO: 330288 - RNA, 32 nt, Human
auaggauuauccugcugccaucaugucuuggu

SEQ ID NO: 330289 - RNA, 32 nt, Human
auaggcaaagagaguugaucacuuccaggguc

SEQ ID NO: 330290 - RNA, 32 nt, Human
auaggcaagguagaugaaguugcuuugccagu

SEQ ID NO: 330291 - RNA, 32 nt, Human
auaggcaccaaagaaggcccagagagguuuaa

SEQ ID NO: 330292 - RNA, 32 nt, Human
auaggcacuugggaugucugagaucagugccu

SEQ ID NO: 330293 - RNA, 31 nt, Human
auaggcagaggagaaugucagaugcucagcu

SEQ ID NO: 330294 - RNA, 32 nt, Human
auaggcagcuggagagaucugugugacacaag

SEQ ID NO: 330295 - RNA, 32 nt, Human
auaggcaggaguaagggugggucuggguauau

SEQ ID NO: 330296 - RNA, 32 nt, Human
auaggcagucuucugcagacuuaacauguuuu

SEQ ID NO: 330297 - RNA, 32 nt, Human
auaggcaugguggcaaguaccuguagucucag

SEQ ID NO: 330298 - RNA, 32 nt, Human
auaggccaacccagacacagugcgguaccaga

SEQ ID NO: 330299 - RNA, 32 nt, Human
auaggccaaggaaaucugcauguauuuuugga

SEQ ID NO: 330300 - RNA, 32 nt, Human
auaggccacauccuuggggucuucuuauuacc

SEQ ID NO: 330301 - RNA, 32 nt, Human
auaggccagaaagugcuccaaauguccacuug

SEQ ID NO: 330302 - RNA, 32 nt, Human
auaggccaggcugguagcuucaccuuaccugg

SEQ ID NO: 330303 - RNA, 32 nt, Human
auaggccagggcauguguaugugucugcuaau

SEQ ID NO: 330304 - RNA, 32 nt, Human
auaggccaucaucagcugcaucagccuucaag

SEQ ID NO: 330305 - RNA, 32 nt, Human
auaggcccaggcuauccaggcugcaguggagc

SEQ ID NO: 330306 - RNA, 32 nt, Human
auaggcccugaggcacacagcccagccccuug

SEQ ID NO: 330307 - RNA, 32 nt, Human
auaggccuagaacuucucaucagcuccuguuu

SEQ ID NO: 330308 - RNA, 32 nt, Human
auaggccucagggugcacacaggauggcagga

SEQ ID NO: 330309 - RNA, 24 nt, Human
auaggccuccaagggcuccaggga

SEQ ID NO: 330310 - RNA, 32 nt, Human
auaggccucuggggcugagaugugaggaggag

SEQ ID NO: 330311 - RNA, 32 nt, Human
auaggccuguaaucguagcgcuuugagaggcu

SEQ ID NO: 330312 - RNA, 32 nt, Human
auaggccuguaauuccagcuacucuggcugcu

SEQ ID NO: 330313 - RNA, 32 nt, Human
auaggcgguucggagccaguucugccuaacuu

SEQ ID NO: 330314 - RNA, 32 nt, Human
auaggcgugguggcucaugccuauaaucccag

SEQ ID NO: 330315 - RNA, 32 nt, Human
auaggcucaaacacucagucuaaugccauguc

SEQ ID NO: 330316 - RNA, 32 nt, Human
auaggcucagaacuuuuacaggucgcgcugca

SEQ ID NO: 330317 - RNA, 32 nt, Human
auaggcuccccuaggcuacugucaguaaaagg

SEQ ID NO: 330318 - RNA, 32 nt, Human
auaggcucugauuuccggggcagccuuucaga

SEQ ID NO: 330319 - RNA, 32 nt, Human
auaggcugaggcagguggauugcuugagcucg

SEQ ID NO: 330320 - RNA, 32 nt, Human
auaggcugggagacugaagacucagcccgggu

SEQ ID NO: 330321 - RNA, 32 nt, Human
auaggcuggggugggaggguggagaauaagug

SEQ ID NO: 330322 - RNA, 32 nt, Human
auaggcuuuaugcucaaaugucauagucuccu

SEQ ID NO: 330323 - RNA, 32 nt, Human
auaggcuuuaugcucacaucauugucccauac

SEQ ID NO: 330324 - RNA, 22 nt, Human
auaggcuuucacagacugggga

SEQ ID NO: 330325 - RNA, 32 nt, Human
auaggcuuuguugaugaaaaacgacaauugaa

SEQ ID NO: 330326 - RNA, 32 nt, Human
auaggcuuuucuucccuuggggcucaugcucc

SEQ ID NO: 330327 - RNA, 19 nt, Human
auagggaaacacugucuca

SEQ ID NO: 330328 - RNA, 32 nt, Human
auagggaaaccugacaucucauuuucucagug

SEQ ID NO: 330329 - RNA, 32 nt, Human
auagggaaaggccauaaacaaagacagacuug

SEQ ID NO: 330330 - RNA, 32 nt, Human
auagggaaauaagguuccaaagaaaaccuuac

SEQ ID NO: 330331 - RNA, 32 nt, Human
auagggaaaucauuagguuucucuccagaugg

SEQ ID NO: 330332 - RNA, 32 nt, Human
auagggaaauuagguaacuuuccccagguaac

SEQ ID NO: 330333 - RNA, 32 nt, Human
auagggaagagaaagaaauggaagcacagcuu

SEQ ID NO: 330334 - RNA, 32 nt, Human
auagggaagucacgaaggauugcuugacauca

SEQ ID NO: 330335 - RNA, 32 nt, Human
auagggacagaagccucacaggucaagacugg

SEQ ID NO: 330336 - RNA, 32 nt, Human
auagggacccauucuacacagagcaggacugc

SEQ ID NO: 330337 - RNA, 32 nt, Human
auagggacgagcucaccacacaacaaccaagg

SEQ ID NO: 330338 - RNA, 32 nt, Human
auagggacugaauauggacccugcugaaagca

SEQ ID NO: 330339 - RNA, 32 nt, Human
auagggacuugcaguaugagggcugccauucu

SEQ ID NO: 330340 - RNA, 32 nt, Human
auagggagagaccccagagagcuuguucccuc

SEQ ID NO: 330341 - RNA, 32 nt, Human
auagggagagcuccucucggugaacaguccaa

SEQ ID NO: 330342 - RNA, 32 nt, Human
auagggagagguggcuguuaacagugggcugc

SEQ ID NO: 330343 - RNA, 32 nt, Human
auagggagagugaaggagggauaugugguaga

SEQ ID NO: 330344 - RNA, 32 nt, Human
auagggagcagucagacacagggagauuaaga

SEQ ID NO: 330345 - RNA, 32 nt, Human
auagggagcuccuuugggaucauagaaaagaa

SEQ ID NO: 330346 - RNA, 32 nt, Human
auagggaggaggaggcuucagccaucagcaau

SEQ ID NO: 330347 - RNA, 32 nt, Human
auagggaggcccaagaaaaggaagagagacgc

SEQ ID NO: 330348 - RNA, 32 nt, Human
auagggagggaggggacauaaagggaaugcau

SEQ ID NO: 330349 - RNA, 32 nt, Human
auagggagucuccaaaccaaagccugguggcc

SEQ ID NO: 330350 - RNA, 32 nt, Human
auagggaguuaagugguacuuucacaauccaa

SEQ ID NO: 330351 - RNA, 32 nt, Human
auagggauagaagaguugaaaagggaaagcaa

SEQ ID NO: 330352 - RNA, 32 nt, Human
auagggaucuggagguagaaucaagacgaaug

SEQ ID NO: 330353 - RNA, 32 nt, Human
auagggauuuaugaauggggcuuucaccuucu

SEQ ID NO: 330354 - RNA, 32 nt, Human
auagggcaaucaggacaaaaucugacuuucga

SEQ ID NO: 330355 - RNA, 32 nt, Human
auagggcagccgcggcggcgguggcacagcag

SEQ ID NO: 330356 - RNA, 32 nt, Human
auagggcaggagucuggccaggagcccaaggu

SEQ ID NO: 330357 - RNA, 32 nt, Human
auagggcagggggccucacugccuuguugguc

SEQ ID NO: 330358 - RNA, 32 nt, Human
auagggcauaagagagaagaagauguacuuac

SEQ ID NO: 330359 - RNA, 32 nt, Human
auagggccaccugaacuagccucgccuguccc

SEQ ID NO: 330360 - RNA, 32 nt, Human
auagggcccagcaaucccacuccuggggauag

SEQ ID NO: 330361 - RNA, 31 nt, Human
auagggcccaggaaaaugcagaugcugacga

SEQ ID NO: 330362 - RNA, 32 nt, Human
auagggcccugccuugccuugccuucccggca

SEQ ID NO: 330363 - RNA, 32 nt, Human
auagggcccuggaaggagugcagcaguuacug

SEQ ID NO: 330364 - RNA, 32 nt, Human
auagggcgcagaggagagaacuuccgaaggca

SEQ ID NO: 330365 - RNA, 32 nt, Human
auagggcucagcccaggcagccagcuuugggc

SEQ ID NO: 330366 - RNA, 32 nt, Human
auagggcucugcccucccccugucagcauggc

SEQ ID NO: 330367 - RNA, 32 nt, Human
auagggcugauaguccaaccaggggacagggu

SEQ ID NO: 330368 - RNA, 32 nt, Human
auagggcuggggacuggggaaggggagggugu

SEQ ID NO: 330369 - RNA, 32 nt, Human
auaggggaaauggcacuuaauagagguuuaau

SEQ ID NO: 330370 - RNA, 32 nt, Human
auaggggagagggaacagagcccagugaaaug

SEQ ID NO: 330371 - RNA, 32 nt, Human
auaggggaggcugaagcaggaggaucacuuga

SEQ ID NO: 330372 - RNA, 32 nt, Human
auaggggagguggagauuccagggguggguga

SEQ ID NO: 330373 - RNA, 32 nt, Human
auaggggagugagguauggccacugaggauuu

SEQ ID NO: 330374 - RNA, 32 nt, Human
auaggggaucucacccacccaguucagcagcg

SEQ ID NO: 330375 - RNA, 32 nt, Human
auaggggauguauucuaaaaacugacagaaaa

SEQ ID NO: 330376 - RNA, 32 nt, Human
auaggggcaaaaauuugacauugucagaaugu

SEQ ID NO: 330377 - RNA, 32 nt, Human
auaggggcagguuguauggcagaugcaccuga

SEQ ID NO: 330378 - RNA, 32 nt, Human
auaggggcauugaaauuuacucccaccaccag

SEQ ID NO: 330379 - RNA, 32 nt, Human
auaggggccaugggagccggcgccaaguagcc

SEQ ID NO: 330380 - RNA, 32 nt, Human
auaggggcucucuccccucucccaucucaaga

SEQ ID NO: 330381 - RNA, 32 nt, Human
auaggggcuggcacacaguaggagcucagugc

SEQ ID NO: 330382 - RNA, 32 nt, Human
auagggggaccagcuucugccagaaguuggug

SEQ ID NO: 330383 - RNA, 32 nt, Human
auagggggcucaaguucugcccuggugagcug

SEQ ID NO: 330384 - RNA, 32 nt, Human
auagggguuggaaggaaaaccuucaagaccua

SEQ ID NO: 330385 - RNA, 32 nt, Human
auaggguaucugagaagaugggugauucuucu

SEQ ID NO: 330386 - RNA, 32 nt, Human
auagggucacugggcgcuuggguguucguugc

SEQ ID NO: 330387 - RNA, 32 nt, Human
auagggucucucuauguugcccuagcucgucu

SEQ ID NO: 330388 - RNA, 32 nt, Human
auagggucuguuucacaggccauuucugugaa

SEQ ID NO: 330389 - RNA, 32 nt, Human
auagggucuugcacuccagcccaggcgagaga

SEQ ID NO: 330390 - RNA, 32 nt, Human
auagggucuugcuauguugcccaggcuggucu

SEQ ID NO: 330391 - RNA, 32 nt, Human
auagggucuugcuauguugcccaggcugguug

SEQ ID NO: 330392 - RNA, 32 nt, Human
auagggucuuucuauguugcccaggcucgucu

SEQ ID NO: 330393 - RNA, 32 nt, Human
auagggugagugugagggcugucaggcagcgu

SEQ ID NO: 330394 - RNA, 32 nt, Human
auagggugggaguggggguuugggagacgggu

SEQ ID NO: 330395 - RNA, 32 nt, Human
auaggguguccaccucuccccggugcucgccu

SEQ ID NO: 330396 - RNA, 32 nt, Human
auaggguguuugauauuucuucauauguuaag

SEQ ID NO: 330397 - RNA, 32 nt, Human
auaggguuggacucaucucagcagaauauggc

SEQ ID NO: 330398 - RNA, 32 nt, Human
auaggguuucauuacauugcucaggcuggucu

SEQ ID NO: 330399 - RNA, 32 nt, Human
auaggguuuuuggagggcuccucugggaaaug

SEQ ID NO: 330400 - RNA, 32 nt, Human
auagguaagaaagguuaaagagaaaugacuuu

SEQ ID NO: 330401 - RNA, 28 nt, Human
auagguacaagugcugcuuugucagccu

SEQ ID NO: 330402 - RNA, 32 nt, Human
auagguacagaaacugagguucagagaaguga

SEQ ID NO: 330403 - RNA, 32 nt, Human
auagguagauagagugccuuucuguuucuuuu

SEQ ID NO: 330404 - RNA, 24 nt, Human
auagguaucuagagcuuaaugcua

SEQ ID NO: 330405 - RNA, 32 nt, Human
auagguauucuccucauuuugugaaagaaaug

SEQ ID NO: 330406 - RNA, 32 nt, Human
auaggucacagaguugcugggccuaccgcagg

SEQ ID NO: 330407 - RNA, 32 nt, Human
auaggucacaucugguugguggaaaacuaggu

SEQ ID NO: 330408 - RNA, 32 nt, Human
auaggucacauuuugggaguucagaggaggcc

SEQ ID NO: 330409 - RNA, 32 nt, Human
auaggucacugcagccucaaacucccaaauga

SEQ ID NO: 330410 - RNA, 32 nt, Human
auaggucagcuccaccuggagugcgaauugcc

SEQ ID NO: 330411 - RNA, 32 nt, Human
auaggucagguaaaguucuaggcacagggaau

SEQ ID NO: 330412 - RNA, 32 nt, Human
auaggucagucuuagaaauacacugcuaaugu

SEQ ID NO: 330413 - RNA, 32 nt, Human
auaggucauuaacuugaaacucuuaucaaaau

SEQ ID NO: 330414 - RNA, 32 nt, Human
auaggucauuuuugucuguggcauuuuuacug

SEQ ID NO: 330415 - RNA, 32 nt, Human
auagguccacacacaggugguguuacuguccc

SEQ ID NO: 330416 - RNA, 32 nt, Human
auaggucugcacugcaacuucuguauccuucc

SEQ ID NO: 330417 - RNA, 32 nt, Human
auaggugaaagccauacaggcagcugcugcaa

SEQ ID NO: 330418 - RNA, 32 nt, Human
auaggugaagaguggcugggguuugaaccuuu

SEQ ID NO: 330419 - RNA, 32 nt, Human
auaggugacacacuuccaacacugugaauugc

SEQ ID NO: 330420 - RNA, 32 nt, Human
auaggugacaguguuaaccgugaaaacuugag

SEQ ID NO: 330421 - RNA, 32 nt, Human
auaggugacugcacugcagcccacauggagag

SEQ ID NO: 330422 - RNA, 32 nt, Human
auaggugauggccuggugggguggcucaugcc

SEQ ID NO: 330423 - RNA, 32 nt, Human
auaggugcagcaaaccaccauggcacacguuu

SEQ ID NO: 330424 - RNA, 32 nt, Human
auaggugcagcaaaccaccauggcacauguau

SEQ ID NO: 330425 - RNA, 32 nt, Human
auaggugcagcaaaccaccauggugcauguau

SEQ ID NO: 330426 - RNA, 32 nt, Human
auaggugcccaccaccaugccuggcugauuuu

SEQ ID NO: 330427 - RNA, 32 nt, Human
auaggugcccgccaccagacccggcuaauuuu

SEQ ID NO: 330428 - RNA, 32 nt, Human
auaggugccugccaccaugcccggcuaauuuu

SEQ ID NO: 330429 - RNA, 32 nt, Human
auagguggaaacaggaaugauagaaucauaaa

SEQ ID NO: 330430 - RNA, 32 nt, Human
auagguggaugugccaagaugcuggugaacuu

SEQ ID NO: 330431 - RNA, 32 nt, Human
auagguggcugcagaggcgaggugacggcgcg

SEQ ID NO: 330432 - RNA, 32 nt, Human
auaggugggacuguaucucacagaacccuggu

SEQ ID NO: 330433 - RNA, 32 nt, Human
auaggugggggaaaaugaauuuuguaugcuga

SEQ ID NO: 330434 - RNA, 32 nt, Human
auagguggguguauucuggucugcaccacacc

SEQ ID NO: 330435 - RNA, 32 nt, Human
auagguuaaaauggcugaaaaugugaucuuug

SEQ ID NO: 330436 - RNA, 32 nt, Human
auagguuaaauggugcagguaccucauagcca

SEQ ID NO: 330437 - RNA, 32 nt, Human
auagguuaugaagaaaaaugcaaaguagcaau

SEQ ID NO: 330438 - RNA, 32 nt, Human
auagguucugguagcuucugugccuggguagu

SEQ ID NO: 330439 - RNA, 32 nt, Human
auagguuggggucccaguaggagggcucaggg

SEQ ID NO: 330440 - RNA, 32 nt, Human
auagguuguaaacugaaugcugugauaauacu

SEQ ID NO: 330441 - RNA, 32 nt, Human
auagguuucauaauucuaacauccacaccaua

SEQ ID NO: 330442 - RNA, 32 nt, Human
auaguaaaagcaguaaaacagccccaggcagg

SEQ ID NO: 330443 - RNA, 26 nt, Human
auaguaaaauuguuaguaaaucauua

SEQ ID NO: 330444 - RNA, 32 nt, Human
auaguaaauuacauuucuaaucccagaggacu

SEQ ID NO: 330445 - RNA, 32 nt, Human
auaguaaccaaggagcagugaacagcagcuac

SEQ ID NO: 330446 - RNA, 32 nt, Human
auaguaacuuuucuaaggauugaauaaauuga

SEQ ID NO: 330447 - RNA, 21 nt, Human
auaguaagggcucaguaaaua

SEQ ID NO: 330448 - RNA, 21 nt, Human
auaguaaguguacaguaaaua

SEQ ID NO: 330449 - RNA, 32 nt, Human
auaguaaguuucuguguaacccaucucaauua

SEQ ID NO: 330450 - RNA, 32 nt, Human
auaguaauaauacaaaaauuagcugggcgugg

SEQ ID NO: 330451 - RNA, 32 nt, Human
auaguaauaauagugacagaggaugugaguua

SEQ ID NO: 330452 - RNA, 32 nt, Human
auaguaauauccauccuauguuugucccacua

SEQ ID NO: 330453 - RNA, 32 nt, Human
auaguaauuuggaaacuguuggaagguggcac

SEQ ID NO: 330454 - RNA, 32 nt, Human
auaguacacuagcaaaauggguaauaaacuag

SEQ ID NO: 330455 - RNA, 32 nt, Human
auaguacacuggcuguuuucugccagcaacug

SEQ ID NO: 330456 - RNA, 32 nt, Human
auaguacauaguuugaaaagcacuuggccguc

SEQ ID NO: 330457 - RNA, 32 nt, Human
auaguacaugucuauuuaacagcaccgauucc

SEQ ID NO: 330458 - RNA, 31 nt, Human
auaguacauuuucccuuccauuuaaaauguc

SEQ ID NO: 330459 - RNA, 32 nt, Human
auaguaccacugcacuccagccugggcaacag

SEQ ID NO: 330460 - RNA, 32 nt, Human
auaguaccacugcacuccagccugggcgacag

SEQ ID NO: 330461 - RNA, 32 nt, Human
auaguacuccacuuccggacuccuggacugca

SEQ ID NO: 330462 - RNA, 32 nt, Human
auaguacucuggaagguggcuugagguggagg

SEQ ID NO: 330463 - RNA, 32 nt, Human
auaguacuugcagcuagauggaugcuuuuagc

SEQ ID NO: 330464 - RNA, 32 nt, Human
auaguacuuuauccucccuuuucuaucucuuu

SEQ ID NO: 330465 - RNA, 32 nt, Human
auaguagaagcagcaaguagcaaacuucagga

SEQ ID NO: 330466 - RNA, 32 nt, Human
auaguagaucauaccaucuagguuuguguaag

SEQ ID NO: 330467 - RNA, 23 nt, Human
auaguagguguucaauaaauauu

SEQ ID NO: 330468 - RNA, 32 nt, Human
auaguagugaccgaggaauugugucuuaugcg

SEQ ID NO: 330469 - RNA, 32 nt, Human
auaguagugugaucauagcucacugcagccuc

SEQ ID NO: 330470 - RNA, 32 nt, Human
auaguauacaaaaggagugaaaagccaagagg

SEQ ID NO: 330471 - RNA, 32 nt, Human
auaguauacauuuuauaaugaugaacuuauaa

SEQ ID NO: 330472 - RNA, 32 nt, Human
auaguauagcugaaaugcaucuguuaaaaaug

SEQ ID NO: 330473 - RNA, 32 nt, Human
auaguauauugccuguauuucuaccucuagua

SEQ ID NO: 330474 - RNA, 31 nt, Human
auaguaucaauaaauauuuguguuaaugaga

SEQ ID NO: 330475 - RNA, 32 nt, Human
auaguaucaccugaagcauacuuacauuaucc

SEQ ID NO: 330476 - RNA, 32 nt, Human
auaguaucuuuguuuuccuuugcuguuccuca

SEQ ID NO: 330477 - RNA, 31 nt, Human
auaguauggacaacuuuuugccacuaacuga

SEQ ID NO: 330478 - RNA, 32 nt, Human
auaguauuccaugguguauauguacuauguuu

SEQ ID NO: 330479 - RNA, 32 nt, Human
auaguauuuaacagugaauccuuuguauaaug

SEQ ID NO: 330480 - RNA, 24 nt, Human
auagucaaagauuuuguacugcua

SEQ ID NO: 330481 - RNA, 32 nt, Human
auagucaacaucuugaacuauauuucaaauga

SEQ ID NO: 330482 - RNA, 31 nt, Human
auagucaccuuuuaaauccuguugaaaagcc

SEQ ID NO: 330483 - RNA, 32 nt, Human
auagucacugagaguggggaagaugggacagc

SEQ ID NO: 330484 - RNA, 32 nt, Human
auagucacuguagaauauaucuccaggaucug

SEQ ID NO: 330485 - RNA, 32 nt, Human
auagucacuuagauucccuauuuggaaaauug

SEQ ID NO: 330486 - RNA, 32 nt, Human
auagucacuugccaccaugcccggcuaauuua

SEQ ID NO: 330487 - RNA, 32 nt, Human
auagucacuuugccagcucaaaagaaaacaau

SEQ ID NO: 330488 - RNA, 32 nt, Human
auagucagcuacuucugaaacugcagcagugg

SEQ ID NO: 330489 - RNA, 32 nt, Human
auagucagcugacuaaagacuguguguguugu

SEQ ID NO: 330490 - RNA, 32 nt, Human
auagucaggccuggguggagggaguggcaagu

SEQ ID NO: 330491 - RNA, 31 nt, Human
auagucaguagcagagaaaagcagaucccaa

SEQ ID NO: 330492 - RNA, 32 nt, Human
auagucaguuuuauugacauuguuagaugaaa

SEQ ID NO: 330493 - RNA, 32 nt, Human
auagucaucccuccugcacugcuccuuuccaa

SEQ ID NO: 330494 - RNA, 31 nt, Human
auagucauggucaccacacagcuuguucguu

SEQ ID NO: 330495 - RNA, 32 nt, Human
auaguccaaugccacggaaagaggccaccagc

SEQ ID NO: 330496 - RNA, 32 nt, Human
auaguccagcagaggagugugggggaaggggg

SEQ ID NO: 330497 - RNA, 32 nt, Human
auagucccagcacucugagaggcucaggcaga

SEQ ID NO: 330498 - RNA, 32 nt, Human
auagucccagcacuuugggaggcugagguggg

SEQ ID NO: 330499 - RNA, 32 nt, Human
auagucccaugucaaaggaacuuuugagugau

SEQ ID NO: 330500 - RNA, 32 nt, Human
auaguccccuggacugagucccccaggccuuc

SEQ ID NO: 330501 - RNA, 32 nt, Human
auagucccugcuuccgugacacuugagugaac

SEQ ID NO: 330502 - RNA, 32 nt, Human
auaguccucuuuguggcaacagaucucagaua

SEQ ID NO: 330503 - RNA, 32 nt, Human
auaguccugccugagguugcagugagccgagc

SEQ ID NO: 330504 - RNA, 32 nt, Human
auagucgucucuucaucagucucccccgacga

SEQ ID NO: 330505 - RNA, 32 nt, Human
auagucucagcuacucagaggcugaggcagga

SEQ ID NO: 330506 - RNA, 32 nt, Human
auagucucauugaaaaaggaacauuugaguga

SEQ ID NO: 330507 - RNA, 32 nt, Human
auagucucuuccaacagucugcuccucagccu

SEQ ID NO: 330508 - RNA, 32 nt, Human
auagucugaggcugggccucugccuuugugaa

SEQ ID NO: 330509 - RNA, 32 nt, Human
auagucugggucagacccaucucucccuuacc

SEQ ID NO: 330510 - RNA, 32 nt, Human
auagucuguuucaaugcuacaauguuugcugg

SEQ ID NO: 330511 - RNA, 32 nt, Human
auagucuguuucccuggaacauuccugugguu

SEQ ID NO: 330512 - RNA, 32 nt, Human
auagucuuaguuaucuuuugaguaagaaaagc

SEQ ID NO: 330513 - RNA, 32 nt, Human
auagucuuauagaaaaaggaaaggugaugagc

SEQ ID NO: 330514 - RNA, 32 nt, Human
auagucuugguugggacuauugccucaggguu

SEQ ID NO: 330515 - RNA, 32 nt, Human
auagucuugucucaccaaccccagcccaucau

SEQ ID NO: 330516 - RNA, 32 nt, Human
auagucuuuauccuaaguucugaggagccaua

SEQ ID NO: 330517 - RNA, 32 nt, Human
auagucuuucuccaauguguccuccaagcaag

SEQ ID NO: 330518 - RNA, 32 nt, Human
auagugaacucaucagaauggcugguuugcag

SEQ ID NO: 330519 - RNA, 32 nt, Human
auagugaagggugggcuuggaggaacgggcug

SEQ ID NO: 330520 - RNA, 32 nt, Human
auagugacucuuuuaucugugugucuuuugcu

SEQ ID NO: 330521 - RNA, 32 nt, Human
auagugagcuaaaccucaaauuucuaucaccc

SEQ ID NO: 330522 - RNA, 32 nt, Human
auagugaggcuggccaagcugcacuggucgga

SEQ ID NO: 330523 - RNA, 32 nt, Human
auagugagggcggccagcaggaagaaacucag

SEQ ID NO: 330524 - RNA, 32 nt, Human
auagugagucacuaguauuuugcuucaagccu

SEQ ID NO: 330525 - RNA, 32 nt, Human
auagugagugggaaagagagugagagccugug

SEQ ID NO: 330526 - RNA, 32 nt, Human
auagugaguugggaggauggggagacagcuaa

SEQ ID NO: 330527 - RNA, 32 nt, Human
auagugaugcagauuaccuuucugcuccugaa

SEQ ID NO: 330528 - RNA, 32 nt, Human
auagugauuucaggccuuuuguuuucuuaaaa

SEQ ID NO: 330529 - RNA, 32 nt, Human
auagugcaaaugcuuuuauuagccaauaggaa

SEQ ID NO: 330530 - RNA, 32 nt, Human
auagugcaaauuugccagcuuggagauagaaa

SEQ ID NO: 330531 - RNA, 32 nt, Human
auagugcacagcaagagcuacauccaaguguc

SEQ ID NO: 330532 - RNA, 32 nt, Human
auagugcagccucagccccaggcacagcgccg

SEQ ID NO: 330533 - RNA, 32 nt, Human
auagugccacaauaaacauacacgugcaugug

SEQ ID NO: 330534 - RNA, 32 nt, Human
auagugccacagcucuccagccugggcgacag

SEQ ID NO: 330535 - RNA, 32 nt, Human
auagugccacugcaauucagccugggugacau

SEQ ID NO: 330536 - RNA, 32 nt, Human
auagugccacugcacuacagcccgggcgacag

SEQ ID NO: 330537 - RNA, 32 nt, Human
auagugccacugcacuccagccugggcaacac

SEQ ID NO: 330538 - RNA, 32 nt, Human
auagugccacugcacuccagccugggugacag

SEQ ID NO: 330539 - RNA, 32 nt, Human
auagugccacugcacuucagccugggugacag

SEQ ID NO: 330540 - RNA, 32 nt, Human
auagugccacugcacuucagcuugggcaacag

SEQ ID NO: 330541 - RNA, 32 nt, Human
auagugccacugcauuccggccugggcgacag

SEQ ID NO: 330542 - RNA, 32 nt, Human
auagugccacugugcuccagccuggaugacgg

SEQ ID NO: 330543 - RNA, 32 nt, Human
auagugccaggagucgaguuuccaauaacuuc

SEQ ID NO: 330544 - RNA, 32 nt, Human
auagugccaucgcacuccagccuggacaacag

SEQ ID NO: 330545 - RNA, 32 nt, Human
auagugccauugcacuccggccugggcaacag

SEQ ID NO: 330546 - RNA, 32 nt, Human
auagugccauuguacuccagcuugggcaacag

SEQ ID NO: 330547 - RNA, 32 nt, Human
auagugccgcugcacuccauucugggcaagag

SEQ ID NO: 330548 - RNA, 32 nt, Human
auagugcuauuugguuucuccaugauuucacu

SEQ ID NO: 330549 - RNA, 32 nt, Human
auagugcugccuggcccuccccacaaugccag

SEQ ID NO: 330550 - RNA, 32 nt, Human
auagugcuucaaaagaaauauuuuugaugaac

SEQ ID NO: 330551 - RNA, 32 nt, Human
auaguggacuggauggguuaggaggaccaggu

SEQ ID NO: 330552 - RNA, 32 nt, Human
auaguggagagaaaccuugaaaguguaaugag

SEQ ID NO: 330553 - RNA, 32 nt, Human
auaguggagcucauuuacaaauaggcaugccu

SEQ ID NO: 330554 - RNA, 32 nt, Human
auaguggcaaagccuucacuucacaccucaug

SEQ ID NO: 330555 - RNA, 32 nt, Human
auaguggcaggcaccuguaaucccagcuacuc

SEQ ID NO: 330556 - RNA, 32 nt, Human
auaguggcaggcaggagagagcaugugcaggg

SEQ ID NO: 330557 - RNA, 32 nt, Human
auaguggcugaaggcagaguuuacuguuaucc

SEQ ID NO: 330558 - RNA, 32 nt, Human
auaguggcugucaucccagcacuuuaggaggc

SEQ ID NO: 330559 - RNA, 32 nt, Human
auagugggcuaccugauucgucucucaaucaa

SEQ ID NO: 330560 - RNA, 32 nt, Human
auaguggguagaaaggagagaaaaacccacug

SEQ ID NO: 330561 - RNA, 25 nt, Human
auagugguggacaaggcucugguuu

SEQ ID NO: 330562 - RNA, 32 nt, Human
auaguggugggaacagacaaauaaggaagcgg

SEQ ID NO: 330563 - RNA, 32 nt, Human
auagugguucuuucuggauugaagacaaacuu

SEQ ID NO: 330564 - RNA, 32 nt, Human
auagugguucuuucuggauugaaggaaaacuu

SEQ ID NO: 330565 - RNA, 32 nt, Human
auagugguuuuucuaugcuauaugaaaauagu

SEQ ID NO: 330566 - RNA, 32 nt, Human
auaguguaacagcaccagcagaucugccugug

SEQ ID NO: 330567 - RNA, 32 nt, Human
auagugucccucuccauguccaggaaacuugu

SEQ ID NO: 330568 - RNA, 32 nt, Human
auaguguuacucucuugugauauuguguugau

SEQ ID NO: 330569 - RNA, 32 nt, Human
auaguguugcauaugagccugcccucacuccc

SEQ ID NO: 330570 - RNA, 32 nt, Human
auaguuaaaaacuuaagguuuauuuuagacuu

SEQ ID NO: 330571 - RNA, 32 nt, Human
auaguuaaaauggcuguaagaauaguuuuaua

SEQ ID NO: 330572 - RNA, 32 nt, Human
auaguuaaacgacuuuucaggagauuuagaaa

SEQ ID NO: 330573 - RNA, 32 nt, Human
auaguuacauacacaguuuucucuccacacau

SEQ ID NO: 330574 - RNA, 32 nt, Human
auaguuaccuuaaacaauguuuucucaacuuc

SEQ ID NO: 330575 - RNA, 32 nt, Human
auaguuacuagcaacagaaacugaucucaaau

SEQ ID NO: 330576 - RNA, 32 nt, Human
auaguuacuguacuauacuuuuuauuguuacu

SEQ ID NO: 330577 - RNA, 32 nt, Human
auaguucaagccugaauuucaaugagauggga

SEQ ID NO: 330578 - RNA, 32 nt, Human
auaguucacggguuacggcacacacgcguuac

SEQ ID NO: 330579 - RNA, 32 nt, Human
auaguucagaaacacuuuuuaucugcaaggca

SEQ ID NO: 330580 - RNA, 32 nt, Human
auaguucauacauauaaaugguggugaaauaa

SEQ ID NO: 330581 - RNA, 32 nt, Human
auaguuccuguuacuuuuuagcauuagcugcc

SEQ ID NO: 330582 - RNA, 32 nt, Human
auaguucuaaaagccauggcccagggacuggu

SEQ ID NO: 330583 - RNA, 32 nt, Human
auaguugaagauuaacuuuuccuaacauugug

SEQ ID NO: 330584 - RNA, 32 nt, Human
auaguugagggagcagggagagaaagacugga

SEQ ID NO: 330585 - RNA, 32 nt, Human
auaguugaguauggguuagaaaucauugaaau

SEQ ID NO: 330586 - RNA, 32 nt, Human
auaguugaucagauuucaaggucuggggagua

SEQ ID NO: 330587 - RNA, 32 nt, Human
auaguugaugguaggacauuuuagacuuuguu

SEQ ID NO: 330588 - RNA, 32 nt, Human
auaguugcaaccacuaaauccaaaaaggacac

SEQ ID NO: 330589 - RNA, 32 nt, Human
auaguuguauacaaaugagcaagguauuuguu

SEQ ID NO: 330590 - RNA, 32 nt, Human
auaguugugcaugccuggcacaacaucaagcc

SEQ ID NO: 330591 - RNA, 32 nt, Human
auaguuguggguggagagaggagugaguuugu

SEQ ID NO: 330592 - RNA, 32 nt, Human
auaguuguugacuguuaauauggaccugcuag

SEQ ID NO: 330593 - RNA, 32 nt, Human
auaguuuaacagucaggaaggcuaaacugguc

SEQ ID NO: 330594 - RNA, 32 nt, Human
auaguuuaacccagcaacuuuccuuuuuauaa

SEQ ID NO: 330595 - RNA, 32 nt, Human
auaguuuacaauauuauguuuccuaauuaaaa

SEQ ID NO: 330596 - RNA, 32 nt, Human
auaguuuacagcuguacuuuccagaucuucua

SEQ ID NO: 330597 - RNA, 32 nt, Human
auaguuuauguccuacuagauacacugcaaac

SEQ ID NO: 330598 - RNA, 32 nt, Human
auaguuucacuggguugcgguuauuuuccugg

SEQ ID NO: 330599 - RNA, 32 nt, Human
auaguuuccaggcugcaaugcugaaucuugcu

SEQ ID NO: 330600 - RNA, 32 nt, Human
auaguuucccccauccuuucauugacauuauu

SEQ ID NO: 330601 - RNA, 32 nt, Human
auaguuuccuuuuccucuucuagaacuuaccu

SEQ ID NO: 330602 - RNA, 32 nt, Human
auaguuucuggccccucacuuuguugcugggg

SEQ ID NO: 330603 - RNA, 24 nt, Human
auaguuugaauucaguaaauauua

SEQ ID NO: 330604 - RNA, 32 nt, Human
auaguuugagcugguauuuacccccuggguuu

SEQ ID NO: 330605 - RNA, 32 nt, Human
auaguuugcaguuucugggaagcaauugaaac

SEQ ID NO: 330606 - RNA, 32 nt, Human
auaguuuggcugcuccugugcugucaccugca

SEQ ID NO: 330607 - RNA, 32 nt, Human
auaguuuuaacaacaggaaacacuuguaggac

SEQ ID NO: 330608 - RNA, 32 nt, Human
auaguuuuauuuuuaaguuaucuuuaaguuua

SEQ ID NO: 330609 - RNA, 32 nt, Human
auaguuuucucccaauuuccauaucuuacuca

SEQ ID NO: 330610 - RNA, 32 nt, Human
auaguuuucuuccucuucuccuugggccaguu

SEQ ID NO: 330611 - RNA, 32 nt, Human
auaguuuugggucauuuaaagggacuugagga

SEQ ID NO: 330612 - RNA, 32 nt, Human
auaguuuuucccauuggucuuuaacuaagacu

SEQ ID NO: 330613 - RNA, 32 nt, Human
auauaaaaaccaccacccuccagccugggcaa

SEQ ID NO: 330614 - RNA, 32 nt, Human
auauaaaaaggagauaguuauauagauagaug

SEQ ID NO: 330615 - RNA, 32 nt, Human
auauaaaaauuagcaggacaugguggcucaug

SEQ ID NO: 330616 - RNA, 32 nt, Human
auauaaaaauuagcagggcaugguggugcaug

SEQ ID NO: 330617 - RNA, 32 nt, Human
auauaaaaauuagccaaguaugguggcauaug

SEQ ID NO: 330618 - RNA, 32 nt, Human
auauaaaaauuagccaggcaugguggcaccug

SEQ ID NO: 330619 - RNA, 32 nt, Human
auauaaaaauuagccaggcauggugguguggg

SEQ ID NO: 330620 - RNA, 32 nt, Human
auauaaaaauuagccgggcauggugaugcaug

SEQ ID NO: 330621 - RNA, 32 nt, Human
auauaaaaauuagccgugcaugguggcaugcg

SEQ ID NO: 330622 - RNA, 32 nt, Human
auauaaaaauuagcuggaugugguggugcaca

SEQ ID NO: 330623 - RNA, 32 nt, Human
auauaaaaauuagcuggguaugguggcacacg

SEQ ID NO: 330624 - RNA, 32 nt, Human
auauaaaaauuagcugggugugguggcaggag

SEQ ID NO: 330625 - RNA, 32 nt, Human
auauaaaaauuagcugggugugguggcgggca

SEQ ID NO: 330626 - RNA, 32 nt, Human
auauaaaaauuagcugggugugguggugggug

SEQ ID NO: 330627 - RNA, 32 nt, Human
auauaaaaauuagugaggcaugguggcacaug

SEQ ID NO: 330628 - RNA, 32 nt, Human
auauaaaaauuggcgaaaagaagccauacgcc

SEQ ID NO: 330629 - RNA, 32 nt, Human
auauaaaacaguucuguauaccaaaguggcua

SEQ ID NO: 330630 - RNA, 32 nt, Human
auauaaaacauacaguuuauuccacacagcag

SEQ ID NO: 330631 - RNA, 32 nt, Human
auauaaaagaacaccagagaucagaaauucaa

SEQ ID NO: 330632 - RNA, 32 nt, Human
auauaaaagcagcccuggaaugaugucuuccc

SEQ ID NO: 330633 - RNA, 32 nt, Human
auauaaaagcuuagauuguagcuguucuaaaa

SEQ ID NO: 330634 - RNA, 22 nt, Human
auauaaacaucacacacacaga

SEQ ID NO: 330635 - RNA, 32 nt, Human
auauaaacguuuguggcaagaggacaguucug

SEQ ID NO: 330636 - RNA, 32 nt, Human
auauaaacucuggcucaccuugcccaguggug

SEQ ID NO: 330637 - RNA, 32 nt, Human
auauaaagacagggauaugagugaagaaaaca

SEQ ID NO: 330638 - RNA, 32 nt, Human
auauaaagcucauguaccugugacccuuauag

SEQ ID NO: 330639 - RNA, 32 nt, Human
auauaaauaccagcaagaucacucugagauac

SEQ ID NO: 330640 - RNA, 32 nt, Human
auauaaauauauuauaucaaucuuaacuuuuu

SEQ ID NO: 330641 - RNA, 32 nt, Human
auauaaaucaagcuauaagucuuuggacccuc

SEQ ID NO: 330642 - RNA, 32 nt, Human
auauaaaugagagguuuggcuucaucucaguu

SEQ ID NO: 330643 - RNA, 32 nt, Human
auauaaauguacuuuuccuuccagaaaaauuu

SEQ ID NO: 330644 - RNA, 32 nt, Human
auauaacaaagaguuguguaaaugucucucau

SEQ ID NO: 330645 - RNA, 32 nt, Human
auauaacacauagagauuggcuuuugucacuc

SEQ ID NO: 330646 - RNA, 32 nt, Human
auauaacagagccuugauccagaagccagagg

SEQ ID NO: 330647 - RNA, 32 nt, Human
auauaacaucuauuuuuccugauacugugccu

SEQ ID NO: 330648 - RNA, 32 nt, Human
auauaacauuagaauguguguacuggaaaugc

SEQ ID NO: 330649 - RNA, 32 nt, Human
auauaacauuugaacucuuuacacaccugaac

SEQ ID NO: 330650 - RNA, 32 nt, Human
auauaaccaguauuuuacuucaaaagccaaaa

SEQ ID NO: 330651 - RNA, 32 nt, Human
auauaaccagugggauacaguuuaggaaaugg

SEQ ID NO: 330652 - RNA, 32 nt, Human
auauaacccccuccucuggacuuaaaucaccu

SEQ ID NO: 330653 - RNA, 32 nt, Human
auauaacucauacucaaggaacuccagaaggg

SEQ ID NO: 330654 - RNA, 32 nt, Human
auauaacuccacuguacaucauccuuugagua

SEQ ID NO: 330655 - RNA, 32 nt, Human
auauaacuccugucuuaaaaucugcagaauau

SEQ ID NO: 330656 - RNA, 32 nt, Human
auauaacucuuaagggcauuccugacccaaga

SEQ ID NO: 330657 - RNA, 32 nt, Human
auauaacuggugguauugugggcagagaucuu

SEQ ID NO: 330658 - RNA, 32 nt, Human
auauaacuucuauaauucaaagcuauucuuac

SEQ ID NO: 330659 - RNA, 32 nt, Human
auauaagagccaaacucuuuuccauuccaucu

SEQ ID NO: 330660 - RNA, 32 nt, Human
auauaagauguauaauauaaggcuccacaaau

SEQ ID NO: 330661 - RNA, 32 nt, Human
auauaagauguguugcuuuucucucauuauaa

SEQ ID NO: 330662 - RNA, 32 nt, Human
auauaagcacaaaauuucugacuaucuugcgg

SEQ ID NO: 330663 - RNA, 32 nt, Human
auauaagccagccugaucuaccaacaugccac

SEQ ID NO: 330664 - RNA, 32 nt, Human
auauaagccgagcucagcaucuugccacacac

SEQ ID NO: 330665 - RNA, 32 nt, Human
auauaagcucccggaaggcagggauguugaag

SEQ ID NO: 330666 - RNA, 32 nt, Human
auauaagcugaacucuauuauggggaauggau

SEQ ID NO: 330667 - RNA, 32 nt, Human
auauaaggcccaauucacccacuguguaucuu

SEQ ID NO: 330668 - RNA, 32 nt, Human
auauaagggccugggaugcauuuauuuuauca

SEQ ID NO: 330669 - RNA, 32 nt, Human
auauaaguauuuuggaauuaucucccaguuug

SEQ ID NO: 330670 - RNA, 32 nt, Human
auauaagugauuaacuucuucuaaucuauaac

SEQ ID NO: 330671 - RNA, 23 nt, Human
auauaauaacauuuuuuaacuac

SEQ ID NO: 330672 - RNA, 32 nt, Human
auauaauaagcuuuugcuguagauugccuagu

SEQ ID NO: 330673 - RNA, 32 nt, Human
auauaauagugaucauaaagaauaaagacucg

SEQ ID NO: 330674 - RNA, 32 nt, Human
auauaauaugguagaaaaggcuaaaucauacu

SEQ ID NO: 330675 - RNA, 32 nt, Human
auauaaucccaaguauccucucuccuuccuug

SEQ ID NO: 330676 - RNA, 32 nt, Human
auauaaucuucacuaucuccccuuaacucaga

SEQ ID NO: 330677 - RNA, 32 nt, Human
auauaaugaacuguauuuuuacaaugaucgcc

SEQ ID NO: 330678 - RNA, 32 nt, Human
auauaaugacuuagcccagcggccugcagaca

SEQ ID NO: 330679 - RNA, 32 nt, Human
auauaaugagucuaauguaauuuugaucaacu

SEQ ID NO: 330680 - RNA, 32 nt, Human
auauaaugggcuucacuaaccuucccuaggca

SEQ ID NO: 330681 - RNA, 32 nt, Human
auauaaugugugaccgugauauagugagaaag

SEQ ID NO: 330682 - RNA, 32 nt, Human
auauaauuauauggucauucugaccccagcuc

SEQ ID NO: 330683 - RNA, 31 nt, Human
auauaauugguggaaaggguggguggauaca

SEQ ID NO: 330684 - RNA, 32 nt, Human
auauaauuuaacagaaguugugaaacuaaaau

SEQ ID NO: 330685 - RNA, 32 nt, Human
auauaauuuccauccagggaaggaaguguccc

SEQ ID NO: 330686 - RNA, 32 nt, Human
auauacaacuuuuauaucauguaucaaaccag

SEQ ID NO: 330687 - RNA, 32 nt, Human
auauacaagcagcaacuucacugugugguggu

SEQ ID NO: 330688 - RNA, 20 nt, Human
auauacaaggcaucuaccca

SEQ ID NO: 330689 - RNA, 32 nt, Human
auauacaaguauaaaauuuacacauuucugag

SEQ ID NO: 330690 - RNA, 32 nt, Human
auauacacaaacaacauguacagaaauagaag

SEQ ID NO: 330691 - RNA, 32 nt, Human
auauacacaaacauguauaugugcacacacau

SEQ ID NO: 330692 - RNA, 27 nt, Human
auauacacacacauaaacguauacaca

SEQ ID NO: 330693 - RNA, 25 nt, Human
auauacacacacauacguauacaca

SEQ ID NO: 330694 - RNA, 25 nt, Human
auauacacacauauauauacucaca

SEQ ID NO: 330695 - RNA, 25 nt, Human
auauacacacauauauauguacaua

SEQ ID NO: 330696 - RNA, 32 nt, Human
auauacacacauauguaggauguaugcaugug

SEQ ID NO: 330697 - RNA, 32 nt, Human
auauacacagagaacagaaauauuccuacugu

SEQ ID NO: 330698 - RNA, 32 nt, Human
auauacaccaaacuguuaaaugugguuucucu

SEQ ID NO: 330699 - RNA, 32 nt, Human
auauacaccaauauauucauauauacucacac

SEQ ID NO: 330700 - RNA, 32 nt, Human
auauacaccaugggauacuaugcagccauaga

SEQ ID NO: 330701 - RNA, 32 nt, Human
auauacacugaucacugaagcugucagugaga

SEQ ID NO: 330702 - RNA, 32 nt, Human
auauacacuuuucaaaaugcuuuggugggaag

SEQ ID NO: 330703 - RNA, 32 nt, Human
auauacagaaaaagauuuccaccugucacgua

SEQ ID NO: 330704 - RNA, 32 nt, Human
auauacagaccuccagauuauuuucuauauuu

SEQ ID NO: 330705 - RNA, 32 nt, Human
auauacagagauaaagcuaaacguaauuauua

SEQ ID NO: 330706 - RNA, 32 nt, Human
auauacagaggaagaacagggugaugagggua

SEQ ID NO: 330707 - RNA, 32 nt, Human
auauacagaugguccucgauuuacauuguggu

SEQ ID NO: 330708 - RNA, 32 nt, Human
auauacagccugaacucaggaggcagaaauca

SEQ ID NO: 330709 - RNA, 32 nt, Human
auauacauaacauacacacaauauguauuccu

SEQ ID NO: 330710 - RNA, 32 nt, Human
auauacauaagaauuccacuaagaaaugccaa

SEQ ID NO: 330711 - RNA, 32 nt, Human
auauacauaccuuuguguauagacaagcccau

SEQ ID NO: 330712 - RNA, 32 nt, Human
auauacaucuucuuccuuuugguuucuugauc

SEQ ID NO: 330713 - RNA, 22 nt, Human
auauacauggaauauuguaaaa

SEQ ID NO: 330714 - RNA, 32 nt, Human
auauacauguauauacacacagacacaugcau

SEQ ID NO: 330715 - RNA, 32 nt, Human
auauacauguauauacacgugcauauaacaua

SEQ ID NO: 330716 - RNA, 32 nt, Human
auauaccaaggcagaggagcccauagccauga

SEQ ID NO: 330717 - RNA, 32 nt, Human
auauaccacaguuuauuucucccuucauccuu

SEQ ID NO: 330718 - RNA, 32 nt, Human
auauaccacccaggccugcgaggagcgugguc

SEQ ID NO: 330719 - RNA, 32 nt, Human
auauacccaacaacuggaauuguuuacacaug

SEQ ID NO: 330720 - RNA, 32 nt, Human
auauacccaauuuuucuuuuuauugguauuag

SEQ ID NO: 330721 - RNA, 32 nt, Human
auauacccaguaaugggauggcugagucaaga

SEQ ID NO: 330722 - RNA, 32 nt, Human
auauacccaguaaugggauggcugggucaaau

SEQ ID NO: 330723 - RNA, 32 nt, Human
auauaccugccuggcaucaguuugugcugauu

SEQ ID NO: 330724 - RNA, 32 nt, Human
auauaccuggcuuugcuuagcuuguugaagaa

SEQ ID NO: 330725 - RNA, 32 nt, Human
auauaccuguaaccccaacuacuuggguggcu

SEQ ID NO: 330726 - RNA, 32 nt, Human
auauaccuguaauccuagcuauucaaggggcu

SEQ ID NO: 330727 - RNA, 32 nt, Human
auauaccuguagucccagcuacucaggaagcu

SEQ ID NO: 330728 - RNA, 32 nt, Human
auauacgauauacaaaaaucagugguauuuuc

SEQ ID NO: 330729 - RNA, 32 nt, Human
auauacuaaaaucauuugucuaaaaauuuaag

SEQ ID NO: 330730 - RNA, 32 nt, Human
auauacuaaagauccagacaucagggcugggc

SEQ ID NO: 330731 - RNA, 22 nt, Human
auauacuauauguguguauaua

SEQ ID NO: 330732 - RNA, 32 nt, Human
auauacuauauuguggaaaagacugaagaaua

SEQ ID NO: 330733 - RNA, 32 nt, Human
auauacuaucaaauuauguugugugcauuaga

SEQ ID NO: 330734 - RNA, 19 nt, Human
auauacuaugaaaagugca

SEQ ID NO: 330735 - RNA, 32 nt, Human
auauacucgagcacucuccauauaaugccucc

SEQ ID NO: 330736 - RNA, 32 nt, Human
auauacugguggcacuggccagguaccauacg

SEQ ID NO: 330737 - RNA, 32 nt, Human
auauacugugaagccugguucacauucaugcu

SEQ ID NO: 330738 - RNA, 32 nt, Human
auauacuguggccauggagagaucauccacuu

SEQ ID NO: 330739 - RNA, 32 nt, Human
auauacuuccaucauugcaauguggagcuuca

SEQ ID NO: 330740 - RNA, 32 nt, Human
auauacuuggagcuuuaaaaauuaaaaggaga

SEQ ID NO: 330741 - RNA, 32 nt, Human
auauagaagaguuggcuuuaaaauguuugcaa

SEQ ID NO: 330742 - RNA, 32 nt, Human
auauagacauuuucaggcacgugcuuugcacc

SEQ ID NO: 330743 - RNA, 32 nt, Human
auauagagaugcauucacagggguuggcuggg

SEQ ID NO: 330744 - RNA, 32 nt, Human
auauagagcuccagggacugucuuuucuguau

SEQ ID NO: 330745 - RNA, 32 nt, Human
auauagagguaagggaguuccuuacuuacuau

SEQ ID NO: 330746 - RNA, 32 nt, Human
auauagaguagaauugggauagaguauugaag

SEQ ID NO: 330747 - RNA, 32 nt, Human
auauagaguguuucuaggguaagggaccugca

SEQ ID NO: 330748 - RNA, 32 nt, Human
auauagauacauauaugaaagaaggcuuuuau

SEQ ID NO: 330749 - RNA, 32 nt, Human
auauagcacagaaguccuccacacugccuggg

SEQ ID NO: 330750 - RNA, 32 nt, Human
auauagcacagcugucaucucauuuuggacac

SEQ ID NO: 330751 - RNA, 32 nt, Human
auauagcacaugcucucugggggccacagggu

SEQ ID NO: 330752 - RNA, 32 nt, Human
auauagcacuguaacggaaaaugauucuguua

SEQ ID NO: 330753 - RNA, 32 nt, Human
auauagcauauauguguauauguaugugugug

SEQ ID NO: 330754 - RNA, 32 nt, Human
auauagccaggagcugcugaauuugugccccu

SEQ ID NO: 330755 - RNA, 32 nt, Human
auauagcucucauggucugcuccaacugccau

SEQ ID NO: 330756 - RNA, 32 nt, Human
auauaggaaagaaagccaagauuuagguaaug

SEQ ID NO: 330757 - RNA, 32 nt, Human
auauaggacacugucuuccuucaagaggguua

SEQ ID NO: 330758 - RNA, 32 nt, Human
auauaggaggcagagguugcagugagccgagg

SEQ ID NO: 330759 - RNA, 32 nt, Human
auauaggaggcugaggcaggagaaucacuuga

SEQ ID NO: 330760 - RNA, 32 nt, Human
auauaggauuccagaauacuccuguugugguc

SEQ ID NO: 330761 - RNA, 32 nt, Human
auauaggcacuggguuguuucuauaucaucau

SEQ ID NO: 330762 - RNA, 32 nt, Human
auauaggcauuaaccacacacuuuaaugggua

SEQ ID NO: 330763 - RNA, 32 nt, Human
auauagggauagaagugguagagccaaaaguu

SEQ ID NO: 330764 - RNA, 32 nt, Human
auauagggcuuccuuugguaucaaaguacuuu

SEQ ID NO: 330765 - RNA, 32 nt, Human
auauaggucuguccaaauucauacaacuugug

SEQ ID NO: 330766 - RNA, 32 nt, Human
auauagguuaacauaggauucaagaggaugac

SEQ ID NO: 330767 - RNA, 32 nt, Human
auauaguaaccaguaaccacagcuagcuguaa

SEQ ID NO: 330768 - RNA, 32 nt, Human
auauaguaggcagaaagcuaguaagucacuua

SEQ ID NO: 330769 - RNA, 32 nt, Human
auauaguauuaggccaggcaugguggcucaua

SEQ ID NO: 330770 - RNA, 32 nt, Human
auauagucucaacuaauaggugcaauuuggga

SEQ ID NO: 330771 - RNA, 32 nt, Human
auauagugauguauauucucuucuacucuuca

SEQ ID NO: 330772 - RNA, 30 nt, Human
auauaguuacuacaaucagaaagcaguuau

SEQ ID NO: 330773 - RNA, 32 nt, Human
auauaguucuucaugaagaccucacaguggaa

SEQ ID NO: 330774 - RNA, 32 nt, Human
auauaguugcagaauucgagucacaaauagcg

SEQ ID NO: 330775 - RNA, 32 nt, Human
auauaguuuguacugagcuauugaagucccau

SEQ ID NO: 330776 - RNA, 32 nt, Human
auauaguuuuauucuccuaaaaucucaggagg

SEQ ID NO: 330777 - RNA, 32 nt, Human
auauauaaaacaauuugggggccaggcacgau

SEQ ID NO: 330778 - RNA, 32 nt, Human
auauauaaaauccugcauacuucauuuccugu

SEQ ID NO: 330779 - RNA, 32 nt, Human
auauauaaaauguacuaauuagcuuuaaacac

SEQ ID NO: 330780 - RNA, 32 nt, Human
auauauaaaauuauauucacuacuuuugaaca

SEQ ID NO: 330781 - RNA, 32 nt, Human
auauauaaaugaugauaguaguaccuacagua

SEQ ID NO: 330782 - RNA, 23 nt, Human
auauauaaauguuauguuauaua

SEQ ID NO: 330783 - RNA, 32 nt, Human
auauauaacugaccacgcucacccucauccag

SEQ ID NO: 330784 - RNA, 32 nt, Human
auauauaagcuacacaugauguaaaaaccuua

SEQ ID NO: 330785 - RNA, 32 nt, Human
auauauaagcuucaguaccauuugcucugaag

SEQ ID NO: 330786 - RNA, 32 nt, Human
auauauacaaauauuuguaucuucuggaggug

SEQ ID NO: 330787 - RNA, 32 nt, Human
auauauacacacacauauacacaugccuucua

SEQ ID NO: 330788 - RNA, 32 nt, Human
auauauacacauauauacauauauucacuaua

SEQ ID NO: 330789 - RNA, 25 nt, Human
auauauacauaauauauauuauaua

SEQ ID NO: 330790 - RNA, 32 nt, Human
auauauacauauauacauauuauguaugguug

SEQ ID NO: 330791 - RNA, 24 nt, Human
auauauaccaagccccuagucuua

SEQ ID NO: 330792 - RNA, 32 nt, Human
auauauaccaaggacuuacagacaaaauuaag

SEQ ID NO: 330793 - RNA, 32 nt, Human
auauauacuauacaauauguuuauugcacuuc

SEQ ID NO: 330794 - RNA, 32 nt, Human
auauauacuggauuagggcaagagaaggaauc

SEQ ID NO: 330795 - RNA, 32 nt, Human
auauauagccuuuaacacuaugcaacuuugua

SEQ ID NO: 330796 - RNA, 32 nt, Human
auauauaggcauuaaccacacacuuuaauggg

SEQ ID NO: 330797 - RNA, 32 nt, Human
auauauaguguauagaagcgauuuaaguuaca

SEQ ID NO: 330798 - RNA, 25 nt, Human
auauauauaaauguuauguuauaua

SEQ ID NO: 330799 - RNA, 24 nt, Human
auauauaugaauauauauuauaua

SEQ ID NO: 330800 - RNA, 27 nt, Human
auauauauggaauauguauauuauaua

SEQ ID NO: 330801 - RNA, 25 nt, Human
auauauauggcacauguauuauaua

SEQ ID NO: 330802 - RNA, 24 nt, Human
auauauauguaauauacauauaua

SEQ ID NO: 330803 - RNA, 23 nt, Human
auauauauguacauguguauaua

SEQ ID NO: 330804 - RNA, 23 nt, Human
auauauauguauauaugcauaua

SEQ ID NO: 330805 - RNA, 25 nt, Human
auauauauguauauauguauguaua

SEQ ID NO: 330806 - RNA, 25 nt, Human
auauauauguauauguauauauaua

SEQ ID NO: 330807 - RNA, 24 nt, Human
auauauauguauauguuuuauaua

SEQ ID NO: 330808 - RNA, 25 nt, Human
auauauauguauguauauauguaua

SEQ ID NO: 330809 - RNA, 24 nt, Human
auauauauguauguauguauguau

SEQ ID NO: 330810 - RNA, 23 nt, Human
auauauauguauguguauauaua

SEQ ID NO: 330811 - RNA, 23 nt, Human
auauauauguguauguauauaua

SEQ ID NO: 330812 - RNA, 23 nt, Human
auauauauguguguauauauaua

SEQ ID NO: 330813 - RNA, 25 nt, Human
auauauauguguguguauauauaua

SEQ ID NO: 330814 - RNA, 23 nt, Human
auauauauguuauauauuacaua

SEQ ID NO: 330815 - RNA, 22 nt, Human
auauauauguuuuauauauaua

SEQ ID NO: 330816 - RNA, 26 nt, Human
auauauauguuuuuuguauauguaua

SEQ ID NO: 330817 - RNA, 32 nt, Human
auauaucaccuaugcuauuaaguuaccuacca

SEQ ID NO: 330818 - RNA, 32 nt, Human
auauaucacugcauauuuuuacccuuauuuuu

SEQ ID NO: 330819 - RNA, 32 nt, Human
auauaucauuguuuucugucuuccucauuaga

SEQ ID NO: 330820 - RNA, 32 nt, Human
auauauccagcugagagaucacacuacaaggc

SEQ ID NO: 330821 - RNA, 32 nt, Human
auauauccugaacaucaaacuaucccaggaaa

SEQ ID NO: 330822 - RNA, 32 nt, Human
auauaucuacaaagccagaugcucugucuuca

SEQ ID NO: 330823 - RNA, 32 nt, Human
auauaucuacccagacuagauguaguauuuug

SEQ ID NO: 330824 - RNA, 32 nt, Human
auauaucuuauccaauucauuaugucaauuca

SEQ ID NO: 330825 - RNA, 32 nt, Human
auauaucuucuaaaauuccucaucucaaggcc

SEQ ID NO: 330826 - RNA, 32 nt, Human
auauaucuuguuaugggguuccuuccaaagac

SEQ ID NO: 330827 - RNA, 32 nt, Human
auauaugaaagaaauuauggagauaaguuaga

SEQ ID NO: 330828 - RNA, 32 nt, Human
auauaugaaugcagaagggcugugcuggaccc

SEQ ID NO: 330829 - RNA, 32 nt, Human
auauaugacuauuacuuauacaugcacaugca

SEQ ID NO: 330830 - RNA, 32 nt, Human
auauaugacucagugcagacuggucucucuua

SEQ ID NO: 330831 - RNA, 23 nt, Human
auauaugagauauauauuauaua

SEQ ID NO: 330832 - RNA, 32 nt, Human
auauaugcaaaaguggaauggcugggucacau

SEQ ID NO: 330833 - RNA, 32 nt, Human
auauauggcaaaaccccugcuaguuccccaaa

SEQ ID NO: 330834 - RNA, 32 nt, Human
auauauggcaaaguccacccucaggccuuaua

SEQ ID NO: 330835 - RNA, 32 nt, Human
auauauggcaggcuucccuggugccgauguaa

SEQ ID NO: 330836 - RNA, 32 nt, Human
auauauguacauauauacacaaacauguauau

SEQ ID NO: 330837 - RNA, 23 nt, Human
auauauguacauguguauguaca

SEQ ID NO: 330838 - RNA, 32 nt, Human
auauauguagcacacacacauagauguauaua

SEQ ID NO: 330839 - RNA, 32 nt, Human
auauauguauaugcugugucauacucauaauc

SEQ ID NO: 330840 - RNA, 21 nt, Human
auauauguauguacauguaca

SEQ ID NO: 330841 - RNA, 23 nt, Human
auauauguauguaugaauguaca

SEQ ID NO: 330842 - RNA, 23 nt, Human
auauauguauguguauguguaua

SEQ ID NO: 330843 - RNA, 23 nt, Human
auauauguguguauauauguaca

SEQ ID NO: 330844 - RNA, 32 nt, Human
auauauguuaugugcauuucuagaaauacaua

SEQ ID NO: 330845 - RNA, 32 nt, Human
auauauguuucauuuaaucuucacaaaagauc

SEQ ID NO: 330846 - RNA, 32 nt, Human
auauauuaaaccuucagauuaaugacuggcua

SEQ ID NO: 330847 - RNA, 32 nt, Human
auauauuaagcuuuugcuguagauugccuagu

SEQ ID NO: 330848 - RNA, 32 nt, Human
auauauuacuaguaucagaaacuacaguuuug

SEQ ID NO: 330849 - RNA, 32 nt, Human
auauauuagccuagccauuauguuagccuuug

SEQ ID NO: 330850 - RNA, 32 nt, Human
auauauuagcuguacuccuagaagaacaauug

SEQ ID NO: 330851 - RNA, 32 nt, Human
auauauuaguuauuugaauacaggcauacacc

SEQ ID NO: 330852 - RNA, 32 nt, Human
auauauuauaaauauugcucaucaaaaugucu

SEQ ID NO: 330853 - RNA, 32 nt, Human
auauauuauauagagagagggaggagagcgag

SEQ ID NO: 330854 - RNA, 22 nt, Human
auauauuauauuauauuauaua

SEQ ID NO: 330855 - RNA, 32 nt, Human
auauauuauuguuucaugaugacucuugauga

SEQ ID NO: 330856 - RNA, 32 nt, Human
auauauucaaaaccacccagcaguagguuuug

SEQ ID NO: 330857 - RNA, 31 nt, Human
auauauucaauaaaaaccaauuugaagacaa

SEQ ID NO: 330858 - RNA, 32 nt, Human
auauauucacuacuuuguauacuuugcaaauu

SEQ ID NO: 330859 - RNA, 32 nt, Human
auauauucacuggguggcaagacacugcaaga

SEQ ID NO: 330860 - RNA, 32 nt, Human
auauauucagccuggcuucaaauuguaagcau

SEQ ID NO: 330861 - RNA, 32 nt, Human
auauauucaggaguuggaauguuguaguuacc

SEQ ID NO: 330862 - RNA, 32 nt, Human
auauauucauucuuugagcauguacagggugg

SEQ ID NO: 330863 - RNA, 32 nt, Human
auauauucauuucaaagaguguuugguuccug

SEQ ID NO: 330864 - RNA, 32 nt, Human
auauauuccuucagacuucugaacuuuugcau

SEQ ID NO: 330865 - RNA, 32 nt, Human
auauauucuccauacccugcuucaccaaaauu

SEQ ID NO: 330866 - RNA, 32 nt, Human
auauauucucugcucuuuguauucuccuuuga

SEQ ID NO: 330867 - RNA, 32 nt, Human
auauauucuuaacuagcuucuggguccuaagu

SEQ ID NO: 330868 - RNA, 32 nt, Human
auauauugcccaggugaaagggaucucagugg

SEQ ID NO: 330869 - RNA, 32 nt, Human
auauauugcuuuguuaauuuguuuuuauauuu

SEQ ID NO: 330870 - RNA, 32 nt, Human
auauauuggagucuuuaaaaauguugaagaau

SEQ ID NO: 330871 - RNA, 32 nt, Human
auauauuggucuuaagugugacuuucucucug

SEQ ID NO: 330872 - RNA, 32 nt, Human
auauauuuaacaaaccugaauguggccguguu

SEQ ID NO: 330873 - RNA, 32 nt, Human
auauauuuagagauguuuucuuccauaaggag

SEQ ID NO: 330874 - RNA, 22 nt, Human
auauauuucacagcuucaggca

SEQ ID NO: 330875 - RNA, 32 nt, Human
auauauuugcuagauuucuaaagaauguguuc

SEQ ID NO: 330876 - RNA, 32 nt, Human
auauauuugucccaucuauaacauauuuaaau

SEQ ID NO: 330877 - RNA, 32 nt, Human
auauauuuucuuucucuuccuccuuccucuuc

SEQ ID NO: 330878 - RNA, 32 nt, Human
auauauuuugaaauggagucuugcucugucac

SEQ ID NO: 330879 - RNA, 32 nt, Human
auaucaaaaccucauucugcaaaguuuuugaa

SEQ ID NO: 330880 - RNA, 32 nt, Human
auaucaaaauuagcugggcacgguggugcgca

SEQ ID NO: 330881 - RNA, 32 nt, Human
auaucaaacaugugcugagggugacaggauau

SEQ ID NO: 330882 - RNA, 32 nt, Human
auaucaaaugacaagguuucucuccuucagag

SEQ ID NO: 330883 - RNA, 32 nt, Human
auaucaacaaauuggaacagcagagcaaggug

SEQ ID NO: 330884 - RNA, 32 nt, Human
auaucaacagaacucuagccaaaggcaagccc

SEQ ID NO: 330885 - RNA, 32 nt, Human
auaucaacaguaguucaaggugccaucuuaaa

SEQ ID NO: 330886 - RNA, 32 nt, Human
auaucaacuagcgcaagugaauacugaagauu

SEQ ID NO: 330887 - RNA, 32 nt, Human
auaucaacuauucuaaauacagguaaugguau

SEQ ID NO: 330888 - RNA, 32 nt, Human
auaucaacucauugccuguaaucccagcacuu

SEQ ID NO: 330889 - RNA, 32 nt, Human
auaucaacugacuuaauucugccucuuuaaaa

SEQ ID NO: 330890 - RNA, 32 nt, Human
auaucaagauguggcccaagggguuaaguggg

SEQ ID NO: 330891 - RNA, 32 nt, Human
auaucaagcugaaaaugucaccccuaucugga

SEQ ID NO: 330892 - RNA, 32 nt, Human
auaucaaguacauaucuuaauuuuggaugaau

SEQ ID NO: 330893 - RNA, 32 nt, Human
auaucaaguccauguuauucucucacagugua

SEQ ID NO: 330894 - RNA, 28 nt, Human
auaucaauccaugcugccugaucccugu

SEQ ID NO: 330895 - RNA, 32 nt, Human
auaucaauggaaaaggagaaggaccuccugca

SEQ ID NO: 330896 - RNA, 32 nt, Human
auaucaaugugguggagaaagggaagggguug

SEQ ID NO: 330897 - RNA, 32 nt, Human
auaucaauuuauuuuauaccacugaaccgugc

SEQ ID NO: 330898 - RNA, 32 nt, Human
auaucacaacccagaaguaaccaccuuuaaaa

SEQ ID NO: 330899 - RNA, 32 nt, Human
auaucacaauagauuucucaagguaagagaaa

SEQ ID NO: 330900 - RNA, 32 nt, Human
auaucacacauacucuuccuguguccaugugu

SEQ ID NO: 330901 - RNA, 32 nt, Human
auaucacacccagguaucacugugcuguccuu

SEQ ID NO: 330902 - RNA, 32 nt, Human
auaucacaucaugccagggaaagagagaugga

SEQ ID NO: 330903 - RNA, 32 nt, Human
auaucacaucuauuugucugucugcucauugu

SEQ ID NO: 330904 - RNA, 32 nt, Human
auaucacauguacccuagaaauauguauaauu

SEQ ID NO: 330905 - RNA, 32 nt, Human
auaucaccaggcaccugcagaagaggaaaauc

SEQ ID NO: 330906 - RNA, 32 nt, Human
auaucacccaggcuggagugcaguggcgcgau

SEQ ID NO: 330907 - RNA, 32 nt, Human
auaucacgaccagacggcgggucuccaucuuc

SEQ ID NO: 330908 - RNA, 32 nt, Human
auaucacuaugacugaagguacuucagcuuaa

SEQ ID NO: 330909 - RNA, 32 nt, Human
auaucacugacacuccagacuaaagcagaguc

SEQ ID NO: 330910 - RNA, 32 nt, Human
auaucacugcacuccagccuggcugacagagu

SEQ ID NO: 330911 - RNA, 32 nt, Human
auaucacugccuucucugggcuucaguguccu

SEQ ID NO: 330912 - RNA, 32 nt, Human
auaucacugcucaagucaagccuccuaaaacc

SEQ ID NO: 330913 - RNA, 32 nt, Human
auaucacuggacccaacaccuaggugauggga

SEQ ID NO: 330914 - RNA, 32 nt, Human
auaucacuguucugaauaucugugccauaguu

SEQ ID NO: 330915 - RNA, 21 nt, Human
auaucacuuccuuagcagcca

SEQ ID NO: 330916 - RNA, 32 nt, Human
auaucacuuugacagaggagaagauugaggga

SEQ ID NO: 330917 - RNA, 32 nt, Human
auaucagaagaacagaugaaguugccauccac

SEQ ID NO: 330918 - RNA, 32 nt, Human
auaucagacaacuucgcuuagcucuccagggu

SEQ ID NO: 330919 - RNA, 32 nt, Human
auaucagacaggcuccucccacagcugcaaug

SEQ ID NO: 330920 - RNA, 32 nt, Human
auaucagaccuacaggcugcuggcaggauuug

SEQ ID NO: 330921 - RNA, 32 nt, Human
auaucagagaggagaugccagagcagacagcc

SEQ ID NO: 330922 - RNA, 32 nt, Human
auaucagagccccagacagcacugccucuucc

SEQ ID NO: 330923 - RNA, 32 nt, Human
auaucagauaucuuuauauagcacuuuuaugu

SEQ ID NO: 330924 - RNA, 32 nt, Human
auaucagccugagucuccugugcccacauccc

SEQ ID NO: 330925 - RNA, 31 nt, Human
auaucagccuucucugggccuugugugugga

SEQ ID NO: 330926 - RNA, 32 nt, Human
auaucagcuacuugggagacugaggcaggaga

SEQ ID NO: 330927 - RNA, 32 nt, Human
auaucagcuauuuccugucuuacuugaaaagu

SEQ ID NO: 330928 - RNA, 32 nt, Human
auaucagguuggucuaagacuuuuggugaaca

SEQ ID NO: 330929 - RNA, 32 nt, Human
auaucagugaacucaacuuugcagugaggugg

SEQ ID NO: 330930 - RNA, 32 nt, Human
auaucaguggaccagauuuggcccaaggggua

SEQ ID NO: 330931 - RNA, 32 nt, Human
auaucaguuaugacgcccauugcccagcuuca

SEQ ID NO: 330932 - RNA, 32 nt, Human
auaucauacaacugauaaaagacuuuaagaac

SEQ ID NO: 330933 - RNA, 32 nt, Human
auaucauauauuuaggggaaagacuuaagccu

SEQ ID NO: 330934 - RNA, 32 nt, Human
auaucauaugcuucaccauucuguaaagggcc

SEQ ID NO: 330935 - RNA, 32 nt, Human
auaucaucagcccuccaucuaaugugauugcu

SEQ ID NO: 330936 - RNA, 32 nt, Human
auaucaucagcuuuccugauucugaggcuuug

SEQ ID NO: 330937 - RNA, 32 nt, Human
auaucauccagaaauaaagacacguacacuaa

SEQ ID NO: 330938 - RNA, 32 nt, Human
auaucauccagauaacugaaacucuuaucaau

SEQ ID NO: 330939 - RNA, 32 nt, Human
auaucauccuucuucagggagauaaggaaaaa

SEQ ID NO: 330940 - RNA, 32 nt, Human
auaucaucuaaauagaugcagaaaaauggaau

SEQ ID NO: 330941 - RNA, 32 nt, Human
auaucaugccacugcacuccagccugggugac

SEQ ID NO: 330942 - RNA, 32 nt, Human
auaucaugccccuguacuccagccugggugac

SEQ ID NO: 330943 - RNA, 32 nt, Human
auaucaugggccagaaggcaaaguuguuuuga

SEQ ID NO: 330944 - RNA, 32 nt, Human
auaucaugggcucugcagaacauaucaaaaua

SEQ ID NO: 330945 - RNA, 32 nt, Human
auaucauuaauccugcauuacuuagaucccau

SEQ ID NO: 330946 - RNA, 32 nt, Human
auauccaacagccuuucuggauuucucagagu

SEQ ID NO: 330947 - RNA, 32 nt, Human
auauccaaccugguuaaaugaaugaaagaaaa

SEQ ID NO: 330948 - RNA, 32 nt, Human
auauccacaaauguaaaaaugcaagaucaagg

SEQ ID NO: 330949 - RNA, 32 nt, Human
auauccacacagauacccacagaugccgcgug

SEQ ID NO: 330950 - RNA, 32 nt, Human
auauccaccucaccaaauucuaguucagccaa

SEQ ID NO: 330951 - RNA, 32 nt, Human
auauccagagggcgaaagauaucucuccauug

SEQ ID NO: 330952 - RNA, 32 nt, Human
auauccagcgagucccugacccuuucugcgaa

SEQ ID NO: 330953 - RNA, 32 nt, Human
auauccaggccaugcgcacccaggaggagcag

SEQ ID NO: 330954 - RNA, 32 nt, Human
auauccagugagugccagugugagggagcagg

SEQ ID NO: 330955 - RNA, 32 nt, Human
auauccauaagaauugagcgcuauggguguua

SEQ ID NO: 330956 - RNA, 32 nt, Human
auauccauguacuguaguuuuucuucaacauc

SEQ ID NO: 330957 - RNA, 32 nt, Human
auauccauuuugcuucccagcacuuuuuagga

SEQ ID NO: 330958 - RNA, 32 nt, Human
auaucccacaguuuccucaucccuucaccugu

SEQ ID NO: 330959 - RNA, 32 nt, Human
auaucccacauccuggaucuuuguuggguauu

SEQ ID NO: 330960 - RNA, 32 nt, Human
auaucccacucccagauugcacauuuggaaga

SEQ ID NO: 330961 - RNA, 25 nt, Human
auaucccagagaccacagagcaacu

SEQ ID NO: 330962 - RNA, 32 nt, Human
auaucccaggguggugacagcagauggagcua

SEQ ID NO: 330963 - RNA, 32 nt, Human
auauccccagaacguuaaagugaagauggaag

SEQ ID NO: 330964 - RNA, 32 nt, Human
auaucccccaaaaugaaguuaccuuccaaguu

SEQ ID NO: 330965 - RNA, 32 nt, Human
auaucccccauccugggcuuuucccagaggag

SEQ ID NO: 330966 - RNA, 32 nt, Human
auauccccugcucuaucuuggguuucuuaauu

SEQ ID NO: 330967 - RNA, 32 nt, Human
auaucccucacacccagcccccauuaccuagg

SEQ ID NO: 330968 - RNA, 32 nt, Human
auaucccugauggcuaaugauguugcccaucu

SEQ ID NO: 330969 - RNA, 32 nt, Human
auaucccugcaccccgcccauucuuugcucuc

SEQ ID NO: 330970 - RNA, 32 nt, Human
auauccgccauggagaaaucuuggccaggaug

SEQ ID NO: 330971 - RNA, 32 nt, Human
auauccuaaacaguacauuuuacuaagaaauu

SEQ ID NO: 330972 - RNA, 32 nt, Human
auauccuaccagcugcucuucagacacacaug

SEQ ID NO: 330973 - RNA, 32 nt, Human
auauccuacuccugggccuuacaugucgccug

SEQ ID NO: 330974 - RNA, 32 nt, Human
auauccuagagaaaaagacuaaugguauuuca

SEQ ID NO: 330975 - RNA, 32 nt, Human
auauccuagagggaagcgacagcagugcuucu

SEQ ID NO: 330976 - RNA, 32 nt, Human
auauccucacagcaagcacagcucucuuucag

SEQ ID NO: 330977 - RNA, 32 nt, Human
auauccucagcaccuaaaacagugcuugacau

SEQ ID NO: 330978 - RNA, 32 nt, Human
auauccucagggcagagguguuaagugagaag

SEQ ID NO: 330979 - RNA, 32 nt, Human
auauccucccacacuaagguuccccuggcccc

SEQ ID NO: 330980 - RNA, 32 nt, Human
auauccucuacaaauaggcuggcuccagcccg

SEQ ID NO: 330981 - RNA, 32 nt, Human
auauccugacugcaauccccuugcuguuccug

SEQ ID NO: 330982 - RNA, 32 nt, Human
auauccugccuggaugggguugcugugauuuu

SEQ ID NO: 330983 - RNA, 32 nt, Human
auauccugcucacaucugaaucuccuuguugu

SEQ ID NO: 330984 - RNA, 32 nt, Human
auauccuggguguccugaguguuuacagcagg

SEQ ID NO: 330985 - RNA, 32 nt, Human
auauccugguuuaccuggcacaacaaaguauc

SEQ ID NO: 330986 - RNA, 32 nt, Human
auauccugugaagaaaaucuuugcagggcacc

SEQ ID NO: 330987 - RNA, 32 nt, Human
auauccuguggcugagagggcugcagggaagu

SEQ ID NO: 330988 - RNA, 32 nt, Human
auauccuguuacugguaauucugguaccaaaa

SEQ ID NO: 330989 - RNA, 32 nt, Human
auauccuuaucagagcuaagggugggugcuca

SEQ ID NO: 330990 - RNA, 32 nt, Human
auauccuugaagacaagaaugcacccuucaag

SEQ ID NO: 330991 - RNA, 32 nt, Human
auauccuuuagcucagaaauucuaucuucggg

SEQ ID NO: 330992 - RNA, 32 nt, Human
auauccuuuccucugcuccugcccacucugcu

SEQ ID NO: 330993 - RNA, 32 nt, Human
auaucgagaguguguguauauguauuauagga

SEQ ID NO: 330994 - RNA, 32 nt, Human
auaucgauaucagcuuuugugauggcauugug

SEQ ID NO: 330995 - RNA, 32 nt, Human
auaucgauggcuuagcuugggcucagaggccu

SEQ ID NO: 330996 - RNA, 32 nt, Human
auaucgcaccacagcgcuccagccuggucgac

SEQ ID NO: 330997 - RNA, 32 nt, Human
auaucgcaccacugcacuccagccugggcaac

SEQ ID NO: 330998 - RNA, 32 nt, Human
auaucgcaccauuguacuccagccugugugac

SEQ ID NO: 330999 - RNA, 32 nt, Human
auaucgccacugcacuccagccugggugacag

SEQ ID NO: 331000 - RNA, 32 nt, Human
auaucgccguuguuccuucuguacuaaaguau

SEQ ID NO: 331001 - RNA, 32 nt, Human
auaucgcgucacugaaucuuuauagggaccca

SEQ ID NO: 331002 - RNA, 32 nt, Human
auaucgcuggggagggacaggccaugaggaga

SEQ ID NO: 331003 - RNA, 32 nt, Human
auaucggaacagacacagauaaguguguuucc

SEQ ID NO: 331004 - RNA, 32 nt, Human
auaucggcuccucauccaaagaacaacugcug

SEQ ID NO: 331005 - RNA, 32 nt, Human
auaucgguucucagugucuauuucaagauaca

SEQ ID NO: 331006 - RNA, 32 nt, Human
auaucgguuucauuaaguuggacuaaugcucu

SEQ ID NO: 331007 - RNA, 32 nt, Human
auaucgucaguuugaccaaguauuccaagagg

SEQ ID NO: 331008 - RNA, 32 nt, Human
auaucgugccacugcacuccagccuggaggac

SEQ ID NO: 331009 - RNA, 32 nt, Human
auaucgugccacugcauuccagccugggugac

SEQ ID NO: 331010 - RNA, 32 nt, Human
auaucgugccuagguuauguggugacuauuug

SEQ ID NO: 331011 - RNA, 32 nt, Human
auaucguuuuccauacagcagugccuauauag

SEQ ID NO: 331012 - RNA, 32 nt, Human
auaucuaauccuuccuauagaaagaacaguau

SEQ ID NO: 331013 - RNA, 32 nt, Human
auaucuacagagcagaggcaggaccuuuggca

SEQ ID NO: 331014 - RNA, 32 nt, Human
auaucuagcauucuuuccagacagcauccucc

SEQ ID NO: 331015 - RNA, 32 nt, Human
auaucuaggaggacucuucucucccaaacuac

SEQ ID NO: 331016 - RNA, 32 nt, Human
auaucuauauagaauagacauaucccacugua

SEQ ID NO: 331017 - RNA, 32 nt, Human
auaucuauauuauuucuuucucgucucaucaa

SEQ ID NO: 331018 - RNA, 32 nt, Human
auaucuaucuaacauuuaucuaucaucuauuc

SEQ ID NO: 331019 - RNA, 32 nt, Human
auaucucaaagacguggauuuucauuucagua

SEQ ID NO: 331020 - RNA, 32 nt, Human
auaucucaaggaaaccuaagagaaaguguucu

SEQ ID NO: 331021 - RNA, 32 nt, Human
auaucucaggcugcuggucccuccucaaucaa

SEQ ID NO: 331022 - RNA, 32 nt, Human
auaucucagucuucccucuguuucucugguga

SEQ ID NO: 331023 - RNA, 32 nt, Human
auaucucaucucuucuuuuaaaccauuuucuu

SEQ ID NO: 331024 - RNA, 32 nt, Human
auaucucaugguuuccuuuuccucuugacugu

SEQ ID NO: 331025 - RNA, 32 nt, Human
auaucucccaugggaauccuguccugccucga

SEQ ID NO: 331026 - RNA, 32 nt, Human
auaucucccugucguaggcagcuucuucggag

SEQ ID NO: 331027 - RNA, 32 nt, Human
auaucuccuacuucacugagguuugugaggac

SEQ ID NO: 331028 - RNA, 32 nt, Human
auaucuccuaguaacauuuuccauuuuuguuu

SEQ ID NO: 331029 - RNA, 32 nt, Human
auaucuccuccaucacuuccccuagcuccacu

SEQ ID NO: 331030 - RNA, 32 nt, Human
auaucucuagagacacagcagaaaaauacugg

SEQ ID NO: 331031 - RNA, 32 nt, Human
auaucucuauuccugcuagauaccuuuucagu

SEQ ID NO: 331032 - RNA, 32 nt, Human
auaucucucccaggauguucucaaggcauaca

SEQ ID NO: 331033 - RNA, 32 nt, Human
auaucucucuggaggacaaaugacagaagggu

SEQ ID NO: 331034 - RNA, 32 nt, Human
auaucucugggcaaagauaaagcaagcuuacu

SEQ ID NO: 331035 - RNA, 32 nt, Human
auaucucugugucucuccaucauuccaaagcu

SEQ ID NO: 331036 - RNA, 32 nt, Human
auaucucuguuuucaccucccuccaacccuac

SEQ ID NO: 331037 - RNA, 32 nt, Human
auaucucuuccuucuaguuggcuguauuucuu

SEQ ID NO: 331038 - RNA, 32 nt, Human
auaucucuuugcccuuccuacuccucauagca

SEQ ID NO: 331039 - RNA, 32 nt, Human
auaucugaaaacagcauuucuaagggugguaa

SEQ ID NO: 331040 - RNA, 32 nt, Human
auaucugaagucagagcauccacuccaaagca

SEQ ID NO: 331041 - RNA, 32 nt, Human
auaucugagaacugcucuggguggugagaugu

SEQ ID NO: 331042 - RNA, 32 nt, Human
auaucugcacacaucuuauucagcaucagaga

SEQ ID NO: 331043 - RNA, 32 nt, Human
auaucugcagugucuucuuccugggccuacac

SEQ ID NO: 331044 - RNA, 32 nt, Human
auaucugcaucgcuucccaccuccgggccuuu

SEQ ID NO: 331045 - RNA, 32 nt, Human
auaucugcauuucaagacuggguuaucuuugu

SEQ ID NO: 331046 - RNA, 25 nt, Human
auaucugccaccaguacauaccauu

SEQ ID NO: 331047 - RNA, 32 nt, Human
auaucugccauccagugguggaaauguggagu

SEQ ID NO: 331048 - RNA, 32 nt, Human
auaucugccuccagggaggggaggggauggga

SEQ ID NO: 331049 - RNA, 32 nt, Human
auaucugccugggggcagauauuauccccauu

SEQ ID NO: 331050 - RNA, 32 nt, Human
auaucugcugcucugcucaccaauugcugcug

SEQ ID NO: 331051 - RNA, 32 nt, Human
auaucugcugggcuuccaggagagaugggauc

SEQ ID NO: 331052 - RNA, 32 nt, Human
auaucugcuguacaacuucuuuuguuuguaac

SEQ ID NO: 331053 - RNA, 32 nt, Human
auaucugcuugugaagguucugucuuuaccac

SEQ ID NO: 331054 - RNA, 32 nt, Human
auaucuggcaauuuacaauugcccucaucuac

SEQ ID NO: 331055 - RNA, 32 nt, Human
auaucuggcaggcagaaagaagucugugauga

SEQ ID NO: 331056 - RNA, 32 nt, Human
auaucuggcuucacuacucagaagauugugug

SEQ ID NO: 331057 - RNA, 32 nt, Human
auaucugguuuaucuggguauuacaugcguuu

SEQ ID NO: 331058 - RNA, 32 nt, Human
auaucugucccaccgaaugcucccucuaacac

SEQ ID NO: 331059 - RNA, 32 nt, Human
auaucugucuuugcacaaauguaccaaucgac

SEQ ID NO: 331060 - RNA, 32 nt, Human
auaucugugcacaucuuauucaacaucagagu

SEQ ID NO: 331061 - RNA, 32 nt, Human
auaucugugugcccuagggcucagaggggccu

SEQ ID NO: 331062 - RNA, 32 nt, Human
auaucuguucacaucuuacucaacaucagaga

SEQ ID NO: 331063 - RNA, 32 nt, Human
auaucuuaaagauggauuggcccaguaucugg

SEQ ID NO: 331064 - RNA, 32 nt, Human
auaucuuacacuuugguaaagcagaaaaccag

SEQ ID NO: 331065 - RNA, 32 nt, Human
auaucuuagaacaaaagguauccucuugaaaa

SEQ ID NO: 331066 - RNA, 32 nt, Human
auaucuucaccucuauucuugggaaacacccu

SEQ ID NO: 331067 - RNA, 32 nt, Human
auaucuucaugguggggcagguuauuggaugc

SEQ ID NO: 331068 - RNA, 32 nt, Human
auaucuuccauagcucugcagauucuuggaug

SEQ ID NO: 331069 - RNA, 32 nt, Human
auaucuucuccagggaugucaacugaccuaaa

SEQ ID NO: 331070 - RNA, 32 nt, Human
auaucuucucccccagggaucuucuauuuaag

SEQ ID NO: 331071 - RNA, 32 nt, Human
auaucuucuccucuccccuugugaagaggacc

SEQ ID NO: 331072 - RNA, 32 nt, Human
auaucuucuucugcaagaccuggggcuauuuu

SEQ ID NO: 331073 - RNA, 32 nt, Human
auaucuugaacuguuuauugcucagaacuuaa

SEQ ID NO: 331074 - RNA, 32 nt, Human
auaucuugcaugucuaaucccuucuuggcauc

SEQ ID NO: 331075 - RNA, 18 nt, Human
auaucuuggccucuccca

SEQ ID NO: 331076 - RNA, 32 nt, Human
auaucuuggggagacgucaacuucugaaguga

SEQ ID NO: 331077 - RNA, 32 nt, Human
auaucuuguuuaccuggucuccagaaaaagaa

SEQ ID NO: 331078 - RNA, 32 nt, Human
auaucuuuauuaaucacuauuguuccagcagu

SEQ ID NO: 331079 - RNA, 32 nt, Human
auaucuuucaguuauuaaaugauagauaaugc

SEQ ID NO: 331080 - RNA, 32 nt, Human
auaucuuucauaauauaauuuucuaacaaugc

SEQ ID NO: 331081 - RNA, 32 nt, Human
auaucuuucccaaagauaucuaauuuggauuc

SEQ ID NO: 331082 - RNA, 32 nt, Human
auaucuuuccuacuagacacucucauuuuuau

SEQ ID NO: 331083 - RNA, 32 nt, Human
auaucuuuuucaacguuaucuuagcucuacua

SEQ ID NO: 331084 - RNA, 32 nt, Human
auaucuuuuugaaagauuauacuucuuuaccu

SEQ ID NO: 331085 - RNA, 32 nt, Human
auaugaaaaaccauauuagagauuaccuggga

SEQ ID NO: 331086 - RNA, 32 nt, Human
auaugaaaagagagacuggccuagcuucccag

SEQ ID NO: 331087 - RNA, 32 nt, Human
auaugaaaauuagccgugcaugguggugcauc

SEQ ID NO: 331088 - RNA, 32 nt, Human
auaugaaaauuagcugggcaugguggcacaug

SEQ ID NO: 331089 - RNA, 32 nt, Human
auaugaaaauuagcugggcuugguggcucaug

SEQ ID NO: 331090 - RNA, 32 nt, Human
auaugaaaauucaccagcuguaggauucaaaa

SEQ ID NO: 331091 - RNA, 32 nt, Human
auaugaaacaucuucucccaacacugcuuuaa

SEQ ID NO: 331092 - RNA, 32 nt, Human
auaugaaacugaagcggaagaaauaugaagag

SEQ ID NO: 331093 - RNA, 32 nt, Human
auaugaaaggugccauggaagaggcuacaggg

SEQ ID NO: 331094 - RNA, 32 nt, Human
auaugaaauauguuuuagaacugugaauagag

SEQ ID NO: 331095 - RNA, 32 nt, Human
auaugaaaucagauuucaacacuuacuuuguc

SEQ ID NO: 331096 - RNA, 32 nt, Human
auaugaaauguuccuuggcagcuggacugcug

SEQ ID NO: 331097 - RNA, 32 nt, Human
auaugaaauuuccaaaacaggcaaauccauaa

SEQ ID NO: 331098 - RNA, 31 nt, Human
auaugaagaacucauacauguugaaagcucc

SEQ ID NO: 331099 - RNA, 32 nt, Human
auaugaagaccaggaaccaauuucagguucua

SEQ ID NO: 331100 - RNA, 32 nt, Human
auaugaagacuauccaguucucaguuugaauu

SEQ ID NO: 331101 - RNA, 32 nt, Human
auaugaagagcgagagaaaagagaggacagcg

SEQ ID NO: 331102 - RNA, 32 nt, Human
auaugaagccauauguuuaaagagauacuuga

SEQ ID NO: 331103 - RNA, 32 nt, Human
auaugaagugaagggcucugacccuggaagug

SEQ ID NO: 331104 - RNA, 32 nt, Human
auaugaauauuuugaaauaacucugaaagaug

SEQ ID NO: 331105 - RNA, 32 nt, Human
auaugaauguccugaaggaaaccacuggcuug

SEQ ID NO: 331106 - RNA, 32 nt, Human
auaugaauuccaacacugcuuccaagagacau

SEQ ID NO: 331107 - RNA, 32 nt, Human
auaugacaggcugagagcaccuccccaaacac

SEQ ID NO: 331108 - RNA, 32 nt, Human
auaugacaucauccugaagaacuucgagaagc

SEQ ID NO: 331109 - RNA, 32 nt, Human
auaugacaugggugagaaugauuacaucagag

SEQ ID NO: 331110 - RNA, 32 nt, Human
auaugacauguauauguacacacucaugugaa

SEQ ID NO: 331111 - RNA, 32 nt, Human
auaugaccaagcucauauccuuaccuugcaag

SEQ ID NO: 331112 - RNA, 32 nt, Human
auaugaccucccuaaaacacugaagguuauuu

SEQ ID NO: 331113 - RNA, 32 nt, Human
auaugaccuuuaacccuuacauuuauaugauu

SEQ ID NO: 331114 - RNA, 32 nt, Human
auaugacuccacccuccccguuuuugcugaca

SEQ ID NO: 331115 - RNA, 32 nt, Human
auaugacugaacacuuguauguguuuguuaaa

SEQ ID NO: 331116 - RNA, 32 nt, Human
auaugacuuagaaccagguggcuggucaccug

SEQ ID NO: 331117 - RNA, 32 nt, Human
auaugacuucaugaggacagugauguguguuc

SEQ ID NO: 331118 - RNA, 32 nt, Human
auaugagaaugauaacaaagguguacaugacc

SEQ ID NO: 331119 - RNA, 32 nt, Human
auaugagauagagagacaauaauuucuugcaa

SEQ ID NO: 331120 - RNA, 31 nt, Human
auaugagauauuaaaauaagcacagaaaauc

SEQ ID NO: 331121 - RNA, 32 nt, Human
auaugagcaacaccccucauuccacccccaua

SEQ ID NO: 331122 - RNA, 32 nt, Human
auaugagcauuuuucuggagaaaggaccauag

SEQ ID NO: 331123 - RNA, 32 nt, Human
auaugagccacuggccuggccuucagcaguuc

SEQ ID NO: 331124 - RNA, 32 nt, Human
auaugagcccagggcucccaaaagcaauuguc

SEQ ID NO: 331125 - RNA, 32 nt, Human
auaugaggacccccuguucuuccucccaacga

SEQ ID NO: 331126 - RNA, 32 nt, Human
auaugaggaggcagaggcagcacccaggagaa

SEQ ID NO: 331127 - RNA, 32 nt, Human
auaugagggagauugaggcugcagugagcugu

SEQ ID NO: 331128 - RNA, 32 nt, Human
auaugagguauuaccuuucuuuaguucaccug

SEQ ID NO: 331129 - RNA, 32 nt, Human
auaugagguccccagcaggggcuggcugugca

SEQ ID NO: 331130 - RNA, 32 nt, Human
auaugaguaaaggguauaaaaguauuccuugu

SEQ ID NO: 331131 - RNA, 32 nt, Human
auaugagucuaugcuuuugagcucuuuaggca

SEQ ID NO: 331132 - RNA, 32 nt, Human
auaugagugaggcucccagcuuggguguggcc

SEQ ID NO: 331133 - RNA, 32 nt, Human
auaugaguggaguaaagaucucugccaaaugu

SEQ ID NO: 331134 - RNA, 27 nt, Human
auaugaguuacgggcagcagagcuggg

SEQ ID NO: 331135 - RNA, 32 nt, Human
auaugauauugcaguuuuacuaggcaaaucuu

SEQ ID NO: 331136 - RNA, 31 nt, Human
auaugaucaauaaaccuuuuaaagagaaaaa

SEQ ID NO: 331137 - RNA, 32 nt, Human
auaugauccagcaauuccucucccagguauau

SEQ ID NO: 331138 - RNA, 32 nt, Human
auaugaucucugcuggcucugauccucauuug

SEQ ID NO: 331139 - RNA, 32 nt, Human
auaugaugaaauuuugauuucucugaaucuca

SEQ ID NO: 331140 - RNA, 32 nt, Human
auaugauguaaaagagaaaacaugcuucagcu

SEQ ID NO: 331141 - RNA, 32 nt, Human
auaugaugucauguacacaggugcugccucuc

SEQ ID NO: 331142 - RNA, 27 nt, Human
auaugaugucccauguggauguuugug

SEQ ID NO: 331143 - RNA, 32 nt, Human
auaugauuauuccugaauguacagacagaagu

SEQ ID NO: 331144 - RNA, 32 nt, Human
auaugcaaaacaugcauguuuguuacauaggu

SEQ ID NO: 331145 - RNA, 32 nt, Human
auaugcaaaagcaguuccgcugggaaccccca

SEQ ID NO: 331146 - RNA, 32 nt, Human
auaugcaauaauauacaaagcacuuugagcuu

SEQ ID NO: 331147 - RNA, 19 nt, Human
auaugcacacacagaugca

SEQ ID NO: 331148 - RNA, 32 nt, Human
auaugcacacauauauaggcaguugcaugccu

SEQ ID NO: 331149 - RNA, 32 nt, Human
auaugcacacuuccauuaccagucuccaacga

SEQ ID NO: 331150 - RNA, 32 nt, Human
auaugcacagccguucacauccagggcacaga

SEQ ID NO: 331151 - RNA, 32 nt, Human
auaugcacgagagagacagaggaggaaagaga

SEQ ID NO: 331152 - RNA, 32 nt, Human
auaugcagaauaacuguaauugugcuagaguu

SEQ ID NO: 331153 - RNA, 19 nt, Human
auaugcagaauggcauuug

SEQ ID NO: 331154 - RNA, 32 nt, Human
auaugcagaccaacaggucuuugcauuccuuu

SEQ ID NO: 331155 - RNA, 32 nt, Human
auaugcagccaagguugagagucacugaauua

SEQ ID NO: 331156 - RNA, 32 nt, Human
auaugcagggacaggauaaaauaacuuucuag

SEQ ID NO: 331157 - RNA, 32 nt, Human
auaugcaucuugauuuggagagaggcuaauau

SEQ ID NO: 331158 - RNA, 32 nt, Human
auaugcaugaauucauucuccuuuugagaagu

SEQ ID NO: 331159 - RNA, 32 nt, Human
auaugcauguuauuuuucuuuacaaagugugg

SEQ ID NO: 331160 - RNA, 32 nt, Human
auaugcauguuccugagaacagcacuuagucc

SEQ ID NO: 331161 - RNA, 32 nt, Human
auaugcauucacucccaggaauacucauucgu

SEQ ID NO: 331162 - RNA, 32 nt, Human
auaugcauuuuauuuacuucuuugaccaaaaa

SEQ ID NO: 331163 - RNA, 32 nt, Human
auaugccaaaggacagacuagggagaaggcag

SEQ ID NO: 331164 - RNA, 32 nt, Human
auaugccauauguauaacaagaaauaugaggu

SEQ ID NO: 331165 - RNA, 32 nt, Human
auaugccaugcugggaggccacugagaaugcu

SEQ ID NO: 331166 - RNA, 32 nt, Human
auaugccauguggggugggugaugccaguaga

SEQ ID NO: 331167 - RNA, 32 nt, Human
auaugcccaagaggggaagagguggaaucgga

SEQ ID NO: 331168 - RNA, 27 nt, Human
auaugcccaucacuccaaaaggaaaac

SEQ ID NO: 331169 - RNA, 32 nt, Human
auaugcccauucucucuuucuggaguuuuucc

SEQ ID NO: 331170 - RNA, 32 nt, Human
auaugcccucaaguaaaagaaaagccgaaagg

SEQ ID NO: 331171 - RNA, 32 nt, Human
auaugcccuccuccucugcuuggcagaaggug

SEQ ID NO: 331172 - RNA, 32 nt, Human
auaugccgccgcggcccucuggcucuaggcca

SEQ ID NO: 331173 - RNA, 32 nt, Human
auaugccuauagucccagcuacuugggaggcu

SEQ ID NO: 331174 - RNA, 24 nt, Human
auaugccuggagucgucuguccaa

SEQ ID NO: 331175 - RNA, 32 nt, Human
auaugccuguaauucaguguauuucaguuccg

SEQ ID NO: 331176 - RNA, 32 nt, Human
auaugccuguaguaccugcaccccagagggag

SEQ ID NO: 331177 - RNA, 32 nt, Human
auaugccuguagucccagcuacucaggagguu

SEQ ID NO: 331178 - RNA, 32 nt, Human
auaugccuguggucccagcuacugaggaggcu

SEQ ID NO: 331179 - RNA, 32 nt, Human
auaugccuuccagggaaaaccuugaauuuuuc

SEQ ID NO: 331180 - RNA, 32 nt, Human
auaugcggcaguggugccgccuggugaaugaa

SEQ ID NO: 331181 - RNA, 32 nt, Human
auaugcuagcuggauacuacuacuaaugucac

SEQ ID NO: 331182 - RNA, 32 nt, Human
auaugcugaagccucuguccacacaugcacac

SEQ ID NO: 331183 - RNA, 32 nt, Human
auaugcugcuucuguuuaacagugaugcaaca

SEQ ID NO: 331184 - RNA, 32 nt, Human
auaugcugcuuuggagguguagugaacgugug

SEQ ID NO: 331185 - RNA, 32 nt, Human
auaugcuggaagaggaggugucccagugagcc

SEQ ID NO: 331186 - RNA, 32 nt, Human
auaugcuggacugcauucacacauggcaugaa

SEQ ID NO: 331187 - RNA, 32 nt, Human
auaugcugggagcugucaccuccacuccuagg

SEQ ID NO: 331188 - RNA, 32 nt, Human
auaugcugucuggacaggcacacacaugcaga

SEQ ID NO: 331189 - RNA, 32 nt, Human
auaugcuuuaucccaaaacaaagcagauaacg

SEQ ID NO: 331190 - RNA, 32 nt, Human
auaugcuuuauguaugcauauguauguagaua

SEQ ID NO: 331191 - RNA, 32 nt, Human
auaugcuuuuugauguuuuccucugcuccagc

SEQ ID NO: 331192 - RNA, 32 nt, Human
auauggaaaggauacacacuuuguagaaacaa

SEQ ID NO: 331193 - RNA, 32 nt, Human
auauggaaauuagcugggcaugacggcgggug

SEQ ID NO: 331194 - RNA, 32 nt, Human
auauggaacauuuucuguguguacauguacau

SEQ ID NO: 331195 - RNA, 32 nt, Human
auauggaagacugaagccggaagaacacagaa

SEQ ID NO: 331196 - RNA, 32 nt, Human
auauggacacagauucucaugccauuccagau

SEQ ID NO: 331197 - RNA, 32 nt, Human
auauggacaguuagcauuuaccaauauguauc

SEQ ID NO: 331198 - RNA, 32 nt, Human
auauggacucaguuuucuugcagaucaaauuu

SEQ ID NO: 331199 - RNA, 32 nt, Human
auauggagaaagagacgccucuggccuugggg

SEQ ID NO: 331200 - RNA, 27 nt, Human
auauggagagaagccauauacacauaa

SEQ ID NO: 331201 - RNA, 32 nt, Human
auauggagagugaaacaaagugcagacauuca

SEQ ID NO: 331202 - RNA, 32 nt, Human
auauggagcaaaauuagaggaggcacgagaag

SEQ ID NO: 331203 - RNA, 32 nt, Human
auauggagcccuuuuaaacuugucaucuuuau

SEQ ID NO: 331204 - RNA, 32 nt, Human
auauggagcuuuggagguucagagaagagaac

SEQ ID NO: 331205 - RNA, 32 nt, Human
auauggagguccuggagcacaccaagaaauga

SEQ ID NO: 331206 - RNA, 32 nt, Human
auauggaguagacugcauacagaucucuuuau

SEQ ID NO: 331207 - RNA, 32 nt, Human
auauggaguaguuuucucuagcaaagaguggc

SEQ ID NO: 331208 - RNA, 32 nt, Human
auauggagucucugcccugagaucuuccccau

SEQ ID NO: 331209 - RNA, 32 nt, Human
auauggaugagguggagagugggaagcaggag

SEQ ID NO: 331210 - RNA, 32 nt, Human
auauggcagccaccagccacacuggcuuuuga

SEQ ID NO: 331211 - RNA, 32 nt, Human
auauggcagugguuccauaagauuacaauacu

SEQ ID NO: 331212 - RNA, 31 nt, Human
auauggccaguggucuccaugccaagugcag

SEQ ID NO: 331213 - RNA, 32 nt, Human
auauggcggggaggaggaggagaaggcggcgg

SEQ ID NO: 331214 - RNA, 32 nt, Human
auauggcguuuugucuguguugcuguuuaggu

SEQ ID NO: 331215 - RNA, 32 nt, Human
auauggcuaaacccuuuccugauugagaguua

SEQ ID NO: 331216 - RNA, 32 nt, Human
auauggcuagcacugaaggccagucaguuuaa

SEQ ID NO: 331217 - RNA, 32 nt, Human
auauggcucacugcagccucgacaccuggguu

SEQ ID NO: 331218 - RNA, 32 nt, Human
auauggcugcuccagccccacuucuuagcauu

SEQ ID NO: 331219 - RNA, 32 nt, Human
auauggcugggcaggcacaggcagugaggccg

SEQ ID NO: 331220 - RNA, 32 nt, Human
auauggcuucagugugucaagaagaccugaaa

SEQ ID NO: 331221 - RNA, 32 nt, Human
auauggcuuucauacagccagcuccuguuuuu

SEQ ID NO: 331222 - RNA, 32 nt, Human
auaugggaaggcagagguaccugggaccuugc

SEQ ID NO: 331223 - RNA, 32 nt, Human
auaugggaagugaaaauaguuaacaccuugca

SEQ ID NO: 331224 - RNA, 32 nt, Human
auaugggcuucaucaacuccuucuggcuggaa

SEQ ID NO: 331225 - RNA, 32 nt, Human
auauggggacacagcaagaagaaugccaucug

SEQ ID NO: 331226 - RNA, 32 nt, Human
auauggggagagauggaagaggaccgggagga

SEQ ID NO: 331227 - RNA, 32 nt, Human
auauggggauucugcucucuuuucuuauuuac

SEQ ID NO: 331228 - RNA, 32 nt, Human
auauggggcgauagagacacauguggggugga

SEQ ID NO: 331229 - RNA, 32 nt, Human
auauggggcuuuagcaaguuugagcauaggcu

SEQ ID NO: 331230 - RNA, 32 nt, Human
auauggguggguguuuuguugcagcugcugau

SEQ ID NO: 331231 - RNA, 32 nt, Human
auaugguagaauccuucuuuacuuuuuaaguc

SEQ ID NO: 331232 - RNA, 32 nt, Human
auaugguagccacauuuugaauccucuaccac

SEQ ID NO: 331233 - RNA, 32 nt, Human
auaugguauacaaaagcagcugaaauaugcug

SEQ ID NO: 331234 - RNA, 32 nt, Human
auaugguauaccuccugaccccucucucccuc

SEQ ID NO: 331235 - RNA, 32 nt, Human
auaugguccuaauuccaugucaccaacaacac

SEQ ID NO: 331236 - RNA, 32 nt, Human
auauggugaaacccugucuguacuaaaauaca

SEQ ID NO: 331237 - RNA, 32 nt, Human
auauggugaaucugaacguacaucucacuggu

SEQ ID NO: 331238 - RNA, 32 nt, Human
auauggugacaauagucaucuccuagggcuca

SEQ ID NO: 331239 - RNA, 18 nt, Human
auauggugaccuuacaga

SEQ ID NO: 331240 - RNA, 32 nt, Human
auauggugauaugccaaaauauuuaugucaau

SEQ ID NO: 331241 - RNA, 27 nt, Human
auaugguggacaaagacacagagagag

SEQ ID NO: 331242 - RNA, 32 nt, Human
auaugguggacaaagacacagagagagacauu

SEQ ID NO: 331243 - RNA, 32 nt, Human
auaugguggagguggaggauaugaugguuaca

SEQ ID NO: 331244 - RNA, 32 nt, Human
auaugguggccggaggggcugccuuauauuug

SEQ ID NO: 331245 - RNA, 32 nt, Human
auaugguggucuguaacauuuuuccagcucau

SEQ ID NO: 331246 - RNA, 32 nt, Human
auaugguggugguggcagcugggcaggucucc

SEQ ID NO: 331247 - RNA, 21 nt, Human
auaugguguacguguguguac

SEQ ID NO: 331248 - RNA, 32 nt, Human
auaugguguccucugugccaguuuuguaccuu

SEQ ID NO: 331249 - RNA, 32 nt, Human
auaugguguucuguuguaugaauaauaccuca

SEQ ID NO: 331250 - RNA, 32 nt, Human
auaugguucuuauucacugagucucauggaga

SEQ ID NO: 331251 - RNA, 32 nt, Human
auaugguuggagaacaacaacuuuagagagag

SEQ ID NO: 331252 - RNA, 32 nt, Human
auaugguuuacuucucgaacauugguuaugac

SEQ ID NO: 331253 - RNA, 32 nt, Human
auaugguuuccagagaaaaggccaauaccuaa

SEQ ID NO: 331254 - RNA, 32 nt, Human
auaugguuuggcucugugugcuucacucugcc

SEQ ID NO: 331255 - RNA, 32 nt, Human
auauguaaacagagaaaaaggaaaguaaaaau

SEQ ID NO: 331256 - RNA, 32 nt, Human
auauguaaacugcucuuuuguuuccaaccccu

SEQ ID NO: 331257 - RNA, 32 nt, Human
auauguaaauacugcugaccucggccgccccu

SEQ ID NO: 331258 - RNA, 32 nt, Human
auauguacaacaaacuacuuucuucuucacuu

SEQ ID NO: 331259 - RNA, 32 nt, Human
auauguacacauauguaugcaaguauguauau

SEQ ID NO: 331260 - RNA, 32 nt, Human
auauguacauaccuugcuuuuucuauuuaaca

SEQ ID NO: 331261 - RNA, 32 nt, Human
auauguagacuuugucuuaugugucaaaaguc

SEQ ID NO: 331262 - RNA, 32 nt, Human
auauguagagacauauguggcuucauugguaa

SEQ ID NO: 331263 - RNA, 32 nt, Human
auauguagcacacacacauagauguauauagg

SEQ ID NO: 331264 - RNA, 32 nt, Human
auauguagcagcuucauugcuauuggaaaaau

SEQ ID NO: 331265 - RNA, 32 nt, Human
auauguagccacaaacacugaccucauguagg

SEQ ID NO: 331266 - RNA, 32 nt, Human
auauguagcuaacccuucguugugcacaugua

SEQ ID NO: 331267 - RNA, 32 nt, Human
auauguaggcugaguacaaaauaaucucaaau

SEQ ID NO: 331268 - RNA, 32 nt, Human
auauguaguauuauuauuuccuuauaugugua

SEQ ID NO: 331269 - RNA, 32 nt, Human
auauguaguucugaagauguugaauaaucauu

SEQ ID NO: 331270 - RNA, 32 nt, Human
auauguaucaaagcaagcugugccucgaccac

SEQ ID NO: 331271 - RNA, 32 nt, Human
auauguaucugacuaaaaauguugcaggcauc

SEQ ID NO: 331272 - RNA, 32 nt, Human
auauguaucuucauacacguuuggaaauguuu

SEQ ID NO: 331273 - RNA, 32 nt, Human
auauguauuauggagcugcuuccucucuccag

SEQ ID NO: 331274 - RNA, 31 nt, Human
auauguauuuguuuuauacauuuaaggcuua

SEQ ID NO: 331275 - RNA, 32 nt, Human
auauguauuuucaacucucaaaggacaagauu

SEQ ID NO: 331276 - RNA, 32 nt, Human
auaugucaacacaaaccagauccucaaauagc

SEQ ID NO: 331277 - RNA, 31 nt, Human
auaugucacaauguauccuguugaaaggacc

SEQ ID NO: 331278 - RNA, 32 nt, Human
auaugucacagaacuuuucacuuguauacuac

SEQ ID NO: 331279 - RNA, 27 nt, Human
auaugucacccaccaucucccacaagg

SEQ ID NO: 331280 - RNA, 32 nt, Human
auaugucacuugccucuggacacugguuauuu

SEQ ID NO: 331281 - RNA, 32 nt, Human
auaugucauauauacacauacauacguguaua

SEQ ID NO: 331282 - RNA, 32 nt, Human
auaugucuauacccaccacggucuccaucaaa

SEQ ID NO: 331283 - RNA, 32 nt, Human
auaugucuauuccaggauucagucuagaaacu

SEQ ID NO: 331284 - RNA, 32 nt, Human
auaugucugcuccuuuccccuuccuuuuaagu

SEQ ID NO: 331285 - RNA, 32 nt, Human
auaugugaacugccugugggguuuccaaggaa

SEQ ID NO: 331286 - RNA, 32 nt, Human
auaugugaauacagggaagcaccaacagacca

SEQ ID NO: 331287 - RNA, 32 nt, Human
auaugugagaggcagagagggcgaguggcugc

SEQ ID NO: 331288 - RNA, 32 nt, Human
auaugugaucagcuuucaaagcauuuacaagu

SEQ ID NO: 331289 - RNA, 32 nt, Human
auaugugcaaaacugcuacugaguggggagcu

SEQ ID NO: 331290 - RNA, 32 nt, Human
auaugugcaagugcccuugacagagaggcugg

SEQ ID NO: 331291 - RNA, 32 nt, Human
auaugugcagggagauuccuccccacagaguu

SEQ ID NO: 331292 - RNA, 32 nt, Human
auaugugcagugucagcaccaccuggaagguu

SEQ ID NO: 331293 - RNA, 32 nt, Human
auaugugccaaugugacaacauguggaaagcc

SEQ ID NO: 331294 - RNA, 32 nt, Human
auaugugcccgccaccagacccggcuaauauu

SEQ ID NO: 331295 - RNA, 32 nt, Human
auaugugccuguuucuggacaauggaggcgaa

SEQ ID NO: 331296 - RNA, 32 nt, Human
auaugugcucauaucuuacucaacaucagaga

SEQ ID NO: 331297 - RNA, 32 nt, Human
auauguggaaagccaggucagccagaccuguu

SEQ ID NO: 331298 - RNA, 32 nt, Human
auauguggaagacaucccuuuaggguguuaaa

SEQ ID NO: 331299 - RNA, 32 nt, Human
auauguggcaaaguccacccucaggccuuaua

SEQ ID NO: 331300 - RNA, 32 nt, Human
auaugugggaaagccuuugguugucccaguuu

SEQ ID NO: 331301 - RNA, 32 nt, Human
auaugugggugagggcauggaggagggugagu

SEQ ID NO: 331302 - RNA, 32 nt, Human
auauguggugccugucauaagcuccagagagc

SEQ ID NO: 331303 - RNA, 31 nt, Human
auauguguauauacauuuauauacgugcaca

SEQ ID NO: 331304 - RNA, 32 nt, Human
auauguguguaauuauaaggaaguucugacau

SEQ ID NO: 331305 - RNA, 32 nt, Human
auauguguguauaggcugggugcgguggcuca

SEQ ID NO: 331306 - RNA, 32 nt, Human
auauguguguguggguauguguuuauuuccag

SEQ ID NO: 331307 - RNA, 32 nt, Human
auauguguguuuguuucagcagcacuuaaaaa

SEQ ID NO: 331308 - RNA, 32 nt, Human
auauguguguuuucuuuucuuuuguuuuuggc

SEQ ID NO: 331309 - RNA, 32 nt, Human
auauguguucauguggacacacacagacacac

SEQ ID NO: 331310 - RNA, 20 nt, Human
auauguguuguacacugugg

SEQ ID NO: 331311 - RNA, 32 nt, Human
auauguguuuuugcacccuauuuucuguagug

SEQ ID NO: 331312 - RNA, 32 nt, Human
auauguuacuccucaugcugguuggaaucaug

SEQ ID NO: 331313 - RNA, 32 nt, Human
auauguucagcacacucaucucuuucuaauug

SEQ ID NO: 331314 - RNA, 32 nt, Human
auauguucauaucuaugggaaaaaucuaaaau

SEQ ID NO: 331315 - RNA, 32 nt, Human
auauguucauauggaucuuauguauguugguu

SEQ ID NO: 331316 - RNA, 32 nt, Human
auauguugaccuuagagaauugugaauauugu

SEQ ID NO: 331317 - RNA, 32 nt, Human
auauguugcaaacuuagccauauguagagugg

SEQ ID NO: 331318 - RNA, 32 nt, Human
auauguugccuggggcugggcgcgguggcuca

SEQ ID NO: 331319 - RNA, 32 nt, Human
auauguuguaucaagugaauguuaauaaguca

SEQ ID NO: 331320 - RNA, 32 nt, Human
auauguuugaccacuuugcugacuguauugaa

SEQ ID NO: 331321 - RNA, 32 nt, Human
auauguuugcaauauuuguuuuaagcacuuug

SEQ ID NO: 331322 - RNA, 32 nt, Human
auauguuuggguccuaaacagcuuuuuaaaau

SEQ ID NO: 331323 - RNA, 32 nt, Human
auauguuuuaaucucccuugucccucagaaua

SEQ ID NO: 331324 - RNA, 32 nt, Human
auauguuuugagauuggaaaguguucuugggc

SEQ ID NO: 331325 - RNA, 32 nt, Human
auauguuuugguauaguuaccaggacacuuac

SEQ ID NO: 331326 - RNA, 32 nt, Human
auauguuuuuggagaaagguggaaaugaagca

SEQ ID NO: 331327 - RNA, 32 nt, Human
auauuaaaacauuuuauacuuuauggcaaaug

SEQ ID NO: 331328 - RNA, 32 nt, Human
auauuaaacaugugggugauaugaggcagcag

SEQ ID NO: 331329 - RNA, 32 nt, Human
auauuaaaccaaucuugcauuccuagaauaaa

SEQ ID NO: 331330 - RNA, 32 nt, Human
auauuaaacuuuucuuccccuuccuaguucug

SEQ ID NO: 331331 - RNA, 32 nt, Human
auauuaaagugaucauuaagaauccagaagcu

SEQ ID NO: 331332 - RNA, 32 nt, Human
auauuaaagugugcuggacaugguggcucaug

SEQ ID NO: 331333 - RNA, 32 nt, Human
auauuaaauacugugacacucugagaaaguuu

SEQ ID NO: 331334 - RNA, 32 nt, Human
auauuaacuaacaucuucaaugugccauagac

SEQ ID NO: 331335 - RNA, 32 nt, Human
auauuaacugacugucaaaagcaacuguguaa

SEQ ID NO: 331336 - RNA, 32 nt, Human
auauuaacuggaaugcugccucuuggguucuc

SEQ ID NO: 331337 - RNA, 32 nt, Human
auauuaagaaaaucugugucuuuuuaauauuc

SEQ ID NO: 331338 - RNA, 32 nt, Human
auauuaagcauguagauagagagugaacugcu

SEQ ID NO: 331339 - RNA, 32 nt, Human
auauuaagguauaauuuacauaucauagugau

SEQ ID NO: 331340 - RNA, 32 nt, Human
auauuaagguguuccugguaaugaaggcaugu

SEQ ID NO: 331341 - RNA, 32 nt, Human
auauuaauuugagcuaauggauuguuaauucu

SEQ ID NO: 331342 - RNA, 32 nt, Human
auauuacaauugccaucuacugaguuccuaug

SEQ ID NO: 331343 - RNA, 32 nt, Human
auauuacacaccagucauuucaacauccaaaa

SEQ ID NO: 331344 - RNA, 32 nt, Human
auauuacagauggaaagaaugaggcucaggga

SEQ ID NO: 331345 - RNA, 32 nt, Human
auauuacagaugggcaaauuaaggcauaagaa

SEQ ID NO: 331346 - RNA, 32 nt, Human
auauuacauacaugcuuugaaguuucuggaaa

SEQ ID NO: 331347 - RNA, 32 nt, Human
auauuacauacauguaauaaaaacuaagcauu

SEQ ID NO: 331348 - RNA, 32 nt, Human
auauuacauuuugcuuuuaugacauucacgag

SEQ ID NO: 331349 - RNA, 32 nt, Human
auauuaccccuuccacuccaguaggggacacc

SEQ ID NO: 331350 - RNA, 21 nt, Human
auauuacccgcugacccagcc

SEQ ID NO: 331351 - RNA, 32 nt, Human
auauuaccuagaaaauuuauuuccccacuguu

SEQ ID NO: 331352 - RNA, 32 nt, Human
auauuaccucuucuuggucagaauucuauucu

SEQ ID NO: 331353 - RNA, 32 nt, Human
auauuaccuugacagaaucaugggacuuugag

SEQ ID NO: 331354 - RNA, 32 nt, Human
auauuacucagcacagagaugggggcccgguu

SEQ ID NO: 331355 - RNA, 32 nt, Human
auauuacugguacaucuuccacaugccaggcc

SEQ ID NO: 331356 - RNA, 32 nt, Human
auauuacuugcacgaaguacuugauguauggu

SEQ ID NO: 331357 - RNA, 32 nt, Human
auauuagcaacaaaaucccguaauucuuuugg

SEQ ID NO: 331358 - RNA, 32 nt, Human
auauuagcauuacagaagacacacacaucaca

SEQ ID NO: 331359 - RNA, 32 nt, Human
auauuagcccauuugaaaacgccugggaaguu

SEQ ID NO: 331360 - RNA, 32 nt, Human
auauuaggagggguuucucucaagaggcgaca

SEQ ID NO: 331361 - RNA, 32 nt, Human
auauuagggacugugguauaauuauuuuaaua

SEQ ID NO: 331362 - RNA, 32 nt, Human
auauuagggucccagacccaagauaaagaacc

SEQ ID NO: 331363 - RNA, 32 nt, Human
auauuagucauccuaaguauaccauuuaugua

SEQ ID NO: 331364 - RNA, 32 nt, Human
auauuauaaagugaugcaaacagaaauuccac

SEQ ID NO: 331365 - RNA, 32 nt, Human
auauuauacaauauacuuguauagcaguuucu

SEQ ID NO: 331366 - RNA, 32 nt, Human
auauuauacauacuguuuggaacuuugcauuu

SEQ ID NO: 331367 - RNA, 32 nt, Human
auauuauauacaacacaggcuuugaucuuggg

SEQ ID NO: 331368 - RNA, 32 nt, Human
auauuauauuucccuaacucugaagauguaua

SEQ ID NO: 331369 - RNA, 32 nt, Human
auauuaucacacacaaaggucucuauauuaac

SEQ ID NO: 331370 - RNA, 32 nt, Human
auauuauccaucaucucuuuuuggacacuucu

SEQ ID NO: 331371 - RNA, 32 nt, Human
auauuaucccuaauaccugccacccaacucuu

SEQ ID NO: 331372 - RNA, 32 nt, Human
auauuaucccuaauaccugccaccccacucuu

SEQ ID NO: 331373 - RNA, 32 nt, Human
auauuaucccuacuaccugccaccccacuguu

SEQ ID NO: 331374 - RNA, 32 nt, Human
auauuaucuauaaccagccuuuguuaacaaag

SEQ ID NO: 331375 - RNA, 32 nt, Human
auauuaucuugcccaacuggaccuuuacucac

SEQ ID NO: 331376 - RNA, 32 nt, Human
auauuaugaaaaaugaggaggccaggcaauaa

SEQ ID NO: 331377 - RNA, 32 nt, Human
auauuaugaaaagagaccuggaagugaguuca

SEQ ID NO: 331378 - RNA, 32 nt, Human
auauuaugcccaguuucugccucugagggaaa

SEQ ID NO: 331379 - RNA, 32 nt, Human
auauuaugcuuugcaauaaaucacagccuuuu

SEQ ID NO: 331380 - RNA, 32 nt, Human
auauuaugcuuuggcaaucaucugaccaugua

SEQ ID NO: 331381 - RNA, 32 nt, Human
auauuauggggaaagugaugccagcaguuccu

SEQ ID NO: 331382 - RNA, 32 nt, Human
auauuaugugugugaguuuacauaauucguau

SEQ ID NO: 331383 - RNA, 32 nt, Human
auauuauuauuuccagcuuagacauuguucuu

SEQ ID NO: 331384 - RNA, 32 nt, Human
auauuauucagcaaucaaagaaaaugaagaac

SEQ ID NO: 331385 - RNA, 32 nt, Human
auauuauugcagaauuuaucuuguucauaaug

SEQ ID NO: 331386 - RNA, 32 nt, Human
auauuauugccaacacacuuuaucucucugug

SEQ ID NO: 331387 - RNA, 32 nt, Human
auauuauuuagccagcaggaguggaguuuggu

SEQ ID NO: 331388 - RNA, 32 nt, Human
auauucaaaaccaguacaagaacugcugccug

SEQ ID NO: 331389 - RNA, 32 nt, Human
auauucaaaagaugcugcagagacagcucccc

SEQ ID NO: 331390 - RNA, 32 nt, Human
auauucaacagaaauccaccauauaaaccaua

SEQ ID NO: 331391 - RNA, 32 nt, Human
auauucaagaugaccugauuuaacaccuuuca

SEQ ID NO: 331392 - RNA, 32 nt, Human
auauucaauagcaagugcaugcaccagaaauu

SEQ ID NO: 331393 - RNA, 32 nt, Human
auauucacacaccaccaccaccacuugccaau

SEQ ID NO: 331394 - RNA, 32 nt, Human
auauucacagaauuggcagagggggucuauuu

SEQ ID NO: 331395 - RNA, 32 nt, Human
auauucaccaccuucucggcugccucagcaca

SEQ ID NO: 331396 - RNA, 32 nt, Human
auauucaccuuuauagcaacagaaaacagaca

SEQ ID NO: 331397 - RNA, 32 nt, Human
auauucacuguugccuuauaaaacuguuaggg

SEQ ID NO: 331398 - RNA, 32 nt, Human
auauucagacacauauggucagccucaugaag

SEQ ID NO: 331399 - RNA, 32 nt, Human
auauucagagacugaagugcuggccucagcaa

SEQ ID NO: 331400 - RNA, 32 nt, Human
auauucagcagucuguuccuucacacggcaau

SEQ ID NO: 331401 - RNA, 32 nt, Human
auauucaggaccaacucucucccuccccucau

SEQ ID NO: 331402 - RNA, 32 nt, Human
auauucaggagaagaggacagacacggcaccu

SEQ ID NO: 331403 - RNA, 32 nt, Human
auauucagguguagcuaauugcucuggugugg

SEQ ID NO: 331404 - RNA, 32 nt, Human
auauucagguuucaggaaugagccuuguaaua

SEQ ID NO: 331405 - RNA, 32 nt, Human
auauucagucaccaauucugcucacuucuugc

SEQ ID NO: 331406 - RNA, 32 nt, Human
auauucauaggaguuccauuuguauucuggcu

SEQ ID NO: 331407 - RNA, 32 nt, Human
auauucaucagugcugcccucacuuuggaucu

SEQ ID NO: 331408 - RNA, 32 nt, Human
auauuccaaauacuuucacucccuucacuuua

SEQ ID NO: 331409 - RNA, 32 nt, Human
auauuccaccugccaagcaagagaugcuuuca

SEQ ID NO: 331410 - RNA, 32 nt, Human
auauuccaccuguaauagcacuuuggaacugu

SEQ ID NO: 331411 - RNA, 32 nt, Human
auauuccagacaccugcccuaauccucagccu

SEQ ID NO: 331412 - RNA, 32 nt, Human
auauuccagagcugaugugaugggcugugcag

SEQ ID NO: 331413 - RNA, 32 nt, Human
auauuccagugaauaaaauacaaaagcauugu

SEQ ID NO: 331414 - RNA, 32 nt, Human
auauuccauagagaagaaagaugggauagcuc

SEQ ID NO: 331415 - RNA, 32 nt, Human
auauucccaagaggaguuaagauugggauaag

SEQ ID NO: 331416 - RNA, 32 nt, Human
auauucccagcacuuugagaggucaaaguggg

SEQ ID NO: 331417 - RNA, 32 nt, Human
auauucccagcaguaaccacuuccauuaaugu

SEQ ID NO: 331418 - RNA, 32 nt, Human
auauucccaguaaauuuauauagcagugaaga

SEQ ID NO: 331419 - RNA, 32 nt, Human
auauuccuauuucauauauucucucccuguug

SEQ ID NO: 331420 - RNA, 32 nt, Human
auauuccucuucaauucugcugucuaaaagaa

SEQ ID NO: 331421 - RNA, 32 nt, Human
auauuccucuugcauuucacuugaguggaggu

SEQ ID NO: 331422 - RNA, 32 nt, Human
auauuccuguaagauacaggugugguuagaca

SEQ ID NO: 331423 - RNA, 32 nt, Human
auauucguugaucaccuccuauuucccaggca

SEQ ID NO: 331424 - RNA, 32 nt, Human
auauucuacuagaaauacaaagaagagcuggu

SEQ ID NO: 331425 - RNA, 32 nt, Human
auauucuagcuacucaggaggcugagauggga

SEQ ID NO: 331426 - RNA, 32 nt, Human
auauucuauuaaaaaguaaauuggcugggugu

SEQ ID NO: 331427 - RNA, 32 nt, Human
auauucucagcagccuaaggugguggccugcu

SEQ ID NO: 331428 - RNA, 32 nt, Human
auauucucugaaagcaaugagaacaaagacac

SEQ ID NO: 331429 - RNA, 32 nt, Human
auauucucuuucaugcugaauuuacuaugacc

SEQ ID NO: 331430 - RNA, 32 nt, Human
auauucugaacaaagcuauaggguuuuaaguu

SEQ ID NO: 331431 - RNA, 32 nt, Human
auauucugaauacauuauuuccauucauuuag

SEQ ID NO: 331432 - RNA, 32 nt, Human
auauucugacucugaaagaagacagucccuug

SEQ ID NO: 331433 - RNA, 32 nt, Human
auauucugaguauaguauauuaacuggcauug

SEQ ID NO: 331434 - RNA, 32 nt, Human
auauucugcaaaugucucuuggaacacacugc

SEQ ID NO: 331435 - RNA, 32 nt, Human
auauucuggaaacauggcuacacacacccuug

SEQ ID NO: 331436 - RNA, 32 nt, Human
auauucuggccagagaacugagguccuuggau

SEQ ID NO: 331437 - RNA, 32 nt, Human
auauucuguaccacauacacuucuguggacuu

SEQ ID NO: 331438 - RNA, 32 nt, Human
auauucuuaucaaguacugcagaaggagcaga

SEQ ID NO: 331439 - RNA, 31 nt, Human
auauucuucaagaaauaauguugaaagccua

SEQ ID NO: 331440 - RNA, 32 nt, Human
auauucuucauaauggaggacaauguuuugca

SEQ ID NO: 331441 - RNA, 32 nt, Human
auauucuucaucugaggagcaucuauauguuu

SEQ ID NO: 331442 - RNA, 32 nt, Human
auauucuucuucuccugcccuuggacaucaga

SEQ ID NO: 331443 - RNA, 32 nt, Human
auauucuugguucuuaaaaucuaucacuuuuc

SEQ ID NO: 331444 - RNA, 32 nt, Human
auauucuuucaugguuucugcaaugagaggaa

SEQ ID NO: 331445 - RNA, 32 nt, Human
auauucuuucccucagcucuugggggccagaa

SEQ ID NO: 331446 - RNA, 32 nt, Human
auauugaaaacacacaccacacaucacacaca

SEQ ID NO: 331447 - RNA, 32 nt, Human
auauugaaagugguuugagauagugguauaag

SEQ ID NO: 331448 - RNA, 32 nt, Human
auauugaaguaguuugaugauuuguuuggcau

SEQ ID NO: 331449 - RNA, 32 nt, Human
auauugaagucucaacugucucuguucacaag

SEQ ID NO: 331450 - RNA, 32 nt, Human
auauugacuaaaucaagaucugugauugaaca

SEQ ID NO: 331451 - RNA, 32 nt, Human
auauugacuaaauccagaucugugauugaaca

SEQ ID NO: 331452 - RNA, 32 nt, Human
auauugacugccucugccugucgcaugagaac

SEQ ID NO: 331453 - RNA, 32 nt, Human
auauugagauuaauacaugaaaaugcuuaaaa

SEQ ID NO: 331454 - RNA, 32 nt, Human
auauugagccaucuguaucuacauauauuaaa

SEQ ID NO: 331455 - RNA, 32 nt, Human
auauugagcugaguuuucauuuugauuuuguu

SEQ ID NO: 331456 - RNA, 32 nt, Human
auauugaggaagcacaggacauccaaggguac

SEQ ID NO: 331457 - RNA, 22 nt, Human
auauugagggagacagcgcuaa

SEQ ID NO: 331458 - RNA, 32 nt, Human
auauugagggagcgcagagcacugggccuggc

SEQ ID NO: 331459 - RNA, 32 nt, Human
auauugagugccugucauaggucagguaaagu

SEQ ID NO: 331460 - RNA, 32 nt, Human
auauugaucugaaucuaggauucuauucuagu

SEQ ID NO: 331461 - RNA, 32 nt, Human
auauugaugccauuuaagggauggaugcaacc

SEQ ID NO: 331462 - RNA, 32 nt, Human
auauugaugggcuuggaugaacuggggcaggg

SEQ ID NO: 331463 - RNA, 32 nt, Human
auauugauucuuaacauuggcuuuucagucau

SEQ ID NO: 331464 - RNA, 32 nt, Human
auauugauugcuuuuaguuucagcuuucaauc

SEQ ID NO: 331465 - RNA, 32 nt, Human
auauugcaaauacauguuuccucaugaaaucu

SEQ ID NO: 331466 - RNA, 32 nt, Human
auauugcaccauugcacuccugccugggcaac

SEQ ID NO: 331467 - RNA, 31 nt, Human
auauugcagcauauuuuacauuugaauacaa

SEQ ID NO: 331468 - RNA, 32 nt, Human
auauugcagugucucuaaaggaggcaaauugg

SEQ ID NO: 331469 - RNA, 32 nt, Human
auauugccauuaugcuugacaugguuuccaaa

SEQ ID NO: 331470 - RNA, 32 nt, Human
auauugcccaggcuggucucgaaugccugggc

SEQ ID NO: 331471 - RNA, 32 nt, Human
auauugcccaggcuggucuucuggcuucugga

SEQ ID NO: 331472 - RNA, 32 nt, Human
auauugcccuucuucccuuagaagaacugcug

SEQ ID NO: 331473 - RNA, 32 nt, Human
auauugccuaggcuggaaugcagugguuauuc

SEQ ID NO: 331474 - RNA, 32 nt, Human
auauugccucacaacccugcuuacauugaaaa

SEQ ID NO: 331475 - RNA, 32 nt, Human
auauugccugcucuuuucuagucaaaccugau

SEQ ID NO: 331476 - RNA, 32 nt, Human
auauugccuggacacacacaugugcacagaua

SEQ ID NO: 331477 - RNA, 32 nt, Human
auauugcuagagcugggacucuggugagcauc

SEQ ID NO: 331478 - RNA, 29 nt, Human
auauugcugcaauaaacauacauguacag

SEQ ID NO: 331479 - RNA, 32 nt, Human
auauugcugcuuccucuuccuuugaagcauca

SEQ ID NO: 331480 - RNA, 32 nt, Human
auauugcugugcuccccaccacccccauggca

SEQ ID NO: 331481 - RNA, 32 nt, Human
auauugcuuugccuuuucuuauauggaaaauc

SEQ ID NO: 331482 - RNA, 32 nt, Human
auauuggaaaggcgccgccgccgccuccgccu

SEQ ID NO: 331483 - RNA, 21 nt, Human
auauuggaaaucagcugcuga

SEQ ID NO: 331484 - RNA, 24 nt, Human
auauuggaaucuauuuaacugcua

SEQ ID NO: 331485 - RNA, 32 nt, Human
auauuggacagaaguacaccaaauacggcauu

SEQ ID NO: 331486 - RNA, 32 nt, Human
auauuggacuucccagccucccaaaccaugag

SEQ ID NO: 331487 - RNA, 32 nt, Human
auauuggagagaagcauuacaagugaaggugg

SEQ ID NO: 331488 - RNA, 32 nt, Human
auauuggauggcagaacaugccaagccugugg

SEQ ID NO: 331489 - RNA, 32 nt, Human
auauuggcacagauuucauuugagagaacuca

SEQ ID NO: 331490 - RNA, 32 nt, Human
auauuggcauguaaacagcacagacaccguaa

SEQ ID NO: 331491 - RNA, 32 nt, Human
auauuggccuagaggggcugacuggggaggag

SEQ ID NO: 331492 - RNA, 32 nt, Human
auauuggccuuuugcuauccuuccugcuaugc

SEQ ID NO: 331493 - RNA, 32 nt, Human
auauuggcggaaaaacagcccuagaguuccag

SEQ ID NO: 331494 - RNA, 32 nt, Human
auauuggcuauugugaaaaaugaugcuauaaa

SEQ ID NO: 331495 - RNA, 32 nt, Human
auauuggcucacugcaaccucugccuucuggg

SEQ ID NO: 331496 - RNA, 32 nt, Human
auauuggcucacugcagccucugcuccccagu

SEQ ID NO: 331497 - RNA, 32 nt, Human
auauuggcucuggccucuuuagggaggcccau

SEQ ID NO: 331498 - RNA, 32 nt, Human
auauugggaggaggggaaagagaagcccagac

SEQ ID NO: 331499 - RNA, 32 nt, Human
auauuggggaauagaagggauugaggaaacau

SEQ ID NO: 331500 - RNA, 32 nt, Human
auauugggggaggaagagagggaggcacguag

SEQ ID NO: 331501 - RNA, 32 nt, Human
auauugggguggcgaaggggaggcgggggccc

SEQ ID NO: 331502 - RNA, 32 nt, Human
auauuggucccugguggaaauucaaaguuauc

SEQ ID NO: 331503 - RNA, 31 nt, Human
auauuggugguguccaucgugggcagcggac

SEQ ID NO: 331504 - RNA, 32 nt, Human
auauuguaacuugcauguauccauaccuggau

SEQ ID NO: 331505 - RNA, 32 nt, Human
auauuguaggaugccuuucuauuucaauuggu

SEQ ID NO: 331506 - RNA, 32 nt, Human
auauuguauaaccacacacauuauucauuguu

SEQ ID NO: 331507 - RNA, 32 nt, Human
auauuguaugcauguaucaaaauaucacaugu

SEQ ID NO: 331508 - RNA, 32 nt, Human
auauuguauuaaaaauuuaaaauagguauuuu

SEQ ID NO: 331509 - RNA, 32 nt, Human
auauugucagcuuucaguguagugagauuauu

SEQ ID NO: 331510 - RNA, 32 nt, Human
auauuguccgguugcucucucagaaucucgcg

SEQ ID NO: 331511 - RNA, 32 nt, Human
auauuguccuagaugcuggagugagauuauau

SEQ ID NO: 331512 - RNA, 32 nt, Human
auauuguccuccaugccccuccagaaggaccu

SEQ ID NO: 331513 - RNA, 32 nt, Human
auauugugaacugccuucucuucaucccaaca

SEQ ID NO: 331514 - RNA, 32 nt, Human
auauugugcaguuucaaaagaacuauuuaaaa

SEQ ID NO: 331515 - RNA, 32 nt, Human
auauugugcauauggcagacccugcccagcgu

SEQ ID NO: 331516 - RNA, 32 nt, Human
auauugugccacugcacuccagccugggcgac

SEQ ID NO: 331517 - RNA, 32 nt, Human
auauugugcucuuuuaaaugccaauuacaguc

SEQ ID NO: 331518 - RNA, 32 nt, Human
auauuguuaaaagucucucaaauuaggccaga

SEQ ID NO: 331519 - RNA, 32 nt, Human
auauuguuaaacugguucaaagaaauaaacug

SEQ ID NO: 331520 - RNA, 32 nt, Human
auauuguucuuccuccuuagaauuuagagaua

SEQ ID NO: 331521 - RNA, 32 nt, Human
auauuguuucauucuucucucuuccugucacc

SEQ ID NO: 331522 - RNA, 32 nt, Human
auauuguuugcagacacacaagaaaucuggcu

SEQ ID NO: 331523 - RNA, 32 nt, Human
auauuguuugcccaucauugugcaauaugcug

SEQ ID NO: 331524 - RNA, 32 nt, Human
auauuuaaaaacaaaacuuuuaaacuuccuau

SEQ ID NO: 331525 - RNA, 32 nt, Human
auauuuaaaauacuucauuccuuaacucuccc

SEQ ID NO: 331526 - RNA, 32 nt, Human
auauuuaaaggcagauguacgcuuuaaauugg

SEQ ID NO: 331527 - RNA, 32 nt, Human
auauuuaauuugugcuuaugugguguuuggug

SEQ ID NO: 331528 - RNA, 32 nt, Human
auauuuacacauauuuccaaauauuuauuuca

SEQ ID NO: 331529 - RNA, 32 nt, Human
auauuuacagaagaaaagcaugcauaucauua

SEQ ID NO: 331530 - RNA, 32 nt, Human
auauuuacucgucacuuucaaaccagaagcau

SEQ ID NO: 331531 - RNA, 32 nt, Human
auauuuacugaccacaccaauauucaauugaa

SEQ ID NO: 331532 - RNA, 32 nt, Human
auauuuagacccuguuuccuuucaggaggguc

SEQ ID NO: 331533 - RNA, 32 nt, Human
auauuuagacuuuuuguuguuguuguuguuuu

SEQ ID NO: 331534 - RNA, 32 nt, Human
auauuuagccuggccugagacaggacaggaag

SEQ ID NO: 331535 - RNA, 32 nt, Human
auauuuagcuuuuucacccauuucuuuaugaa

SEQ ID NO: 331536 - RNA, 32 nt, Human
auauuuauacagugacauauacucaugccaug

SEQ ID NO: 331537 - RNA, 32 nt, Human
auauuuauaggaauacuucaguuuuuccuuuu

SEQ ID NO: 331538 - RNA, 32 nt, Human
auauuuauccgcuggcuccuguuuccaauuga

SEQ ID NO: 331539 - RNA, 32 nt, Human
auauuuauccugcuuagaauuuacagaacuuc

SEQ ID NO: 331540 - RNA, 32 nt, Human
auauuuaucucaguuucccaaaggacaagcua

SEQ ID NO: 331541 - RNA, 32 nt, Human
auauuuaugggcugaggaaaacaauuaccagg

SEQ ID NO: 331542 - RNA, 32 nt, Human
auauuuaugguacuauuaugugggugaugccu

SEQ ID NO: 331543 - RNA, 32 nt, Human
auauuuauguaauaauuucuuaaaaccauuca

SEQ ID NO: 331544 - RNA, 32 nt, Human
auauuuauguuuuuacauuggaaauugucuuc

SEQ ID NO: 331545 - RNA, 32 nt, Human
auauuuauugaauuccuagaugcaguauggau

SEQ ID NO: 331546 - RNA, 32 nt, Human
auauuuauugagcugaaagagcaugagcccag

SEQ ID NO: 331547 - RNA, 32 nt, Human
auauuuauuuguacaguuaguauucuaaugaa

SEQ ID NO: 331548 - RNA, 32 nt, Human
auauuucaaagacugaauauuuucaaagaaaa

SEQ ID NO: 331549 - RNA, 32 nt, Human
auauuucaauaguuauccccaggccuggcacg

SEQ ID NO: 331550 - RNA, 32 nt, Human
auauuucaauccauugccaucauuguucuuau

SEQ ID NO: 331551 - RNA, 32 nt, Human
auauuucauguuagacauuugauaccuuuugg

SEQ ID NO: 331552 - RNA, 32 nt, Human
auauuucauucucucuuuacucccacuuuuua

SEQ ID NO: 331553 - RNA, 32 nt, Human
auauuucauuuucagcacagugcaaaaguucu

SEQ ID NO: 331554 - RNA, 21 nt, Human
auauuuccauaguaucacaua

SEQ ID NO: 331555 - RNA, 32 nt, Human
auauuuccaucuuccuccaguuggccuuucca

SEQ ID NO: 331556 - RNA, 32 nt, Human
auauuuccgccuuuugcuaagcuaauauauag

SEQ ID NO: 331557 - RNA, 32 nt, Human
auauuuccguguauuauaguguuuuccuugua

SEQ ID NO: 331558 - RNA, 32 nt, Human
auauuuccuaccucucccuccugugaguccca

SEQ ID NO: 331559 - RNA, 32 nt, Human
auauuuccuaucuggcauuuccaucuugcccc

SEQ ID NO: 331560 - RNA, 32 nt, Human
auauuuccuguuuuucccuuugcccacccugc

SEQ ID NO: 331561 - RNA, 32 nt, Human
auauuuccuucauucuaaaguuguucccuggc

SEQ ID NO: 331562 - RNA, 32 nt, Human
auauuuccuucauucuaaaguuguucucuggc

SEQ ID NO: 331563 - RNA, 32 nt, Human
auauuuccuucucucuuuacucccacuuuuua

SEQ ID NO: 331564 - RNA, 32 nt, Human
auauuuccuucucuucuuuuuacagaagucag

SEQ ID NO: 331565 - RNA, 32 nt, Human
auauuuccuuucuucuuuccuuauucauccca

SEQ ID NO: 331566 - RNA, 32 nt, Human
auauuucuagggguguacuuguuggggucagg

SEQ ID NO: 331567 - RNA, 32 nt, Human
auauuucucaucugcacuauguuuccauuugu

SEQ ID NO: 331568 - RNA, 32 nt, Human
auauuucuccauccuuuauucccuggugcuca

SEQ ID NO: 331569 - RNA, 32 nt, Human
auauuucucucuauuugcuaauauugcauugc

SEQ ID NO: 331570 - RNA, 32 nt, Human
auauuucuguaacucauucucuuggugcucac

SEQ ID NO: 331571 - RNA, 31 nt, Human
auauuucuuaauaaauaaauuuggaacuauu

SEQ ID NO: 331572 - RNA, 32 nt, Human
auauuucuucauuuucuuuuggaggaccgacu

SEQ ID NO: 331573 - RNA, 32 nt, Human
auauuucuuccagccuuugauuacaaauuugu

SEQ ID NO: 331574 - RNA, 32 nt, Human
auauuucuuuuuaaagaaucuuuuuaagauua

SEQ ID NO: 331575 - RNA, 32 nt, Human
auauuugaaugguuagcuauacaggcaauuaa

SEQ ID NO: 331576 - RNA, 32 nt, Human
auauuugacaggcuuauggaaggacuacagca

SEQ ID NO: 331577 - RNA, 32 nt, Human
auauuugagacggggucucccuguguuaccca

SEQ ID NO: 331578 - RNA, 32 nt, Human
auauuugagucagugggcuggaaaaggcagac

SEQ ID NO: 331579 - RNA, 32 nt, Human
auauuugaucacuuugauucucuguucuuuuc

SEQ ID NO: 331580 - RNA, 32 nt, Human
auauuugcagaauguuuuaaagugaauuguug

SEQ ID NO: 331581 - RNA, 32 nt, Human
auauuugcagguauuauaccauuuuucuauuc

SEQ ID NO: 331582 - RNA, 32 nt, Human
auauuugcaguugggguagaagaaagaaaucu

SEQ ID NO: 331583 - RNA, 32 nt, Human
auauuugcauuccucuuaucaggcauuuucau

SEQ ID NO: 331584 - RNA, 32 nt, Human
auauuugcguaugguguuccucugccucagag

SEQ ID NO: 331585 - RNA, 32 nt, Human
auauuugcuaucguuuuacuccagucauucga

SEQ ID NO: 331586 - RNA, 32 nt, Human
auauuugcucugcuuagcaaagaaaauaucac

SEQ ID NO: 331587 - RNA, 32 nt, Human
auauuuggaaccugcauuaguuccagcaauga

SEQ ID NO: 331588 - RNA, 32 nt, Human
auauuuggagagcuacaccaucaaaggugcca

SEQ ID NO: 331589 - RNA, 32 nt, Human
auauuuggcgucucucaggagcucaggaagua

SEQ ID NO: 331590 - RNA, 32 nt, Human
auauuuggcugcagauucaaauaggcaguucu

SEQ ID NO: 331591 - RNA, 32 nt, Human
auauuugggagugacugcaagcauuuuuccau

SEQ ID NO: 331592 - RNA, 32 nt, Human
auauuuggggaugucauacauuugauauugcu

SEQ ID NO: 331593 - RNA, 21 nt, Human
auauuugguauauuuaaggua

SEQ ID NO: 331594 - RNA, 28 nt, Human
auauuuguaagugcugcuuuauucuuca

SEQ ID NO: 331595 - RNA, 21 nt, Human
auauuuguaauuaauuauaua

SEQ ID NO: 331596 - RNA, 32 nt, Human
auauuuguguaauuuuuggugggugaaaggaa

SEQ ID NO: 331597 - RNA, 32 nt, Human
auauuuguguacauauuauauguauguauauu

SEQ ID NO: 331598 - RNA, 32 nt, Human
auauuuguuaaauauuuacauaugaaauuuaa

SEQ ID NO: 331599 - RNA, 32 nt, Human
auauuuguugacugaauaaaugaaugcacaac

SEQ ID NO: 331600 - RNA, 32 nt, Human
auauuuuaaauacccaucuucauuaaaguaua

SEQ ID NO: 331601 - RNA, 32 nt, Human
auauuuuaaccagcccacccagcagucaguac

SEQ ID NO: 331602 - RNA, 32 nt, Human
auauuuuaaggagagggauuugguguaauuca

SEQ ID NO: 331603 - RNA, 32 nt, Human
auauuuuaaggagcucccaaaauguguuaccu

SEQ ID NO: 331604 - RNA, 32 nt, Human
auauuuuaauuucaagcuuauuuuggagagau

SEQ ID NO: 331605 - RNA, 32 nt, Human
auauuuuaccauuuacaaagagauuaacuaca

SEQ ID NO: 331606 - RNA, 32 nt, Human
auauuuuagcuuuuagcuagacauuuauaggu

SEQ ID NO: 331607 - RNA, 32 nt, Human
auauuuuaggagauuauauugguucugccucu

SEQ ID NO: 331608 - RNA, 32 nt, Human
auauuuuaguauguauuucacuuuaugacuga

SEQ ID NO: 331609 - RNA, 32 nt, Human
auauuuuauaugccaucauagacuucauacug

SEQ ID NO: 331610 - RNA, 32 nt, Human
auauuuuaucaaccuuuccaucaugucuguuu

SEQ ID NO: 331611 - RNA, 32 nt, Human
auauuuuaucucuguuuguagagagcuaacgu

SEQ ID NO: 331612 - RNA, 32 nt, Human
auauuuucauaauuucuuucucacuuuuagca

SEQ ID NO: 331613 - RNA, 32 nt, Human
auauuuucauucuauaauuauguuacauaaaa

SEQ ID NO: 331614 - RNA, 32 nt, Human
auauuuucauucuguaauuauguuacauaaaa

SEQ ID NO: 331615 - RNA, 32 nt, Human
auauuuucccgcauaaccguauccaaugcuag

SEQ ID NO: 331616 - RNA, 32 nt, Human
auauuuucccucucaaaaccagaacaucaaca

SEQ ID NO: 331617 - RNA, 32 nt, Human
auauuuucccuucaucuaacauugauugaaca

SEQ ID NO: 331618 - RNA, 32 nt, Human
auauuuuccucaauuaugacugcccagauuua

SEQ ID NO: 331619 - RNA, 32 nt, Human
auauuuuccuuuguuaaaggaggaaccguaac

SEQ ID NO: 331620 - RNA, 32 nt, Human
auauuuucuaagaccaguuuuagaugacucuu

SEQ ID NO: 331621 - RNA, 32 nt, Human
auauuuucucucucauuugcaucauacagcuc

SEQ ID NO: 331622 - RNA, 32 nt, Human
auauuuucugugcaucacacacaugcuuuucu

SEQ ID NO: 331623 - RNA, 32 nt, Human
auauuuucuguugaggaaagauaaaaauguau

SEQ ID NO: 331624 - RNA, 32 nt, Human
auauuuucuuucccauucaucuugcccucccc

SEQ ID NO: 331625 - RNA, 28 nt, Human
auauuuugaugaccaaguuuucuggaag

SEQ ID NO: 331626 - RNA, 32 nt, Human
auauuuuggauucuuaugagccagucuuuucu

SEQ ID NO: 331627 - RNA, 32 nt, Human
auauuuugguaaaauauucaccacuuauaaug

SEQ ID NO: 331628 - RNA, 32 nt, Human
auauuuuguaacuuccaugugaggguuuucag

SEQ ID NO: 331629 - RNA, 32 nt, Human
auauuuugugaagccuguauucaccuuuuuca

SEQ ID NO: 331630 - RNA, 32 nt, Human
auauuuuguuucugcugcuucuguccaccuua

SEQ ID NO: 331631 - RNA, 32 nt, Human
auauuuuuaaaaauuuacaucaagagaggcag

SEQ ID NO: 331632 - RNA, 32 nt, Human
auauuuuuaaugauguuagguuugggggugug

SEQ ID NO: 331633 - RNA, 32 nt, Human
auauuuuuacauauauuuucucauuuuaucuu

SEQ ID NO: 331634 - RNA, 32 nt, Human
auauuuuuaucaguuaaugucauuuuagcugg

SEQ ID NO: 331635 - RNA, 32 nt, Human
auauuuuucccuuguugagaucuucuuuugua

SEQ ID NO: 331636 - RNA, 32 nt, Human
auauuuuuccucauagauuuuuccaccaucag

SEQ ID NO: 331637 - RNA, 32 nt, Human
auauuuuucuuuacuaaucauuuuggauuuuu

SEQ ID NO: 331638 - RNA, 32 nt, Human
auauuuuugacccauuggcaacaaauagacua

SEQ ID NO: 331639 - RNA, 32 nt, Human
auauuuuugcagaugaaguauguauguauguu

SEQ ID NO: 331640 - RNA, 32 nt, Human
auauuuuugcauucauauuuuugaggucuuga

SEQ ID NO: 331641 - RNA, 32 nt, Human
auauuuuugcauuuaaaaguaucaccuaucau

SEQ ID NO: 331642 - RNA, 32 nt, Human
auauuuuugccagcauuucguaaaugugcaua

SEQ ID NO: 331643 - RNA, 32 nt, Human
auauuuuuggcauaucuguugcuacucugagu

SEQ ID NO: 331644 - RNA, 32 nt, Human
auauuuuugggaggcagagaggggcaggcuug

SEQ ID NO: 331645 - RNA, 32 nt, Human
aucaaaaagcuuauccaccacgaucaaguugg

SEQ ID NO: 331646 - RNA, 32 nt, Human
aucaaaacauaacacaucacagcacucaguag

SEQ ID NO: 331647 - RNA, 32 nt, Human
aucaaaaccagccuggccaacauggugaaacc

SEQ ID NO: 331648 - RNA, 32 nt, Human
aucaaaaccauccuggcuaacauggugaaacc

SEQ ID NO: 331649 - RNA, 32 nt, Human
aucaaaacuacucacuccaccugggccccugc

SEQ ID NO: 331650 - RNA, 32 nt, Human
aucaaaagccuccacaucacagaagcuacccc

SEQ ID NO: 331651 - RNA, 32 nt, Human
aucaaaaggaaggggaaaaagguuuuugaagu

SEQ ID NO: 331652 - RNA, 32 nt, Human
aucaaaagucuacauaacuaauacagcugagc

SEQ ID NO: 331653 - RNA, 32 nt, Human
aucaaaaguggagaaugaggccaggcguggug

SEQ ID NO: 331654 - RNA, 32 nt, Human
aucaaaaguguacggcuuccugugcugcuugu

SEQ ID NO: 331655 - RNA, 32 nt, Human
aucaaaaguguauagaauauuauaguuuaaaa

SEQ ID NO: 331656 - RNA, 32 nt, Human
aucaaaaugaucauccaucuuuuguauaauga

SEQ ID NO: 331657 - RNA, 31 nt, Human
aucaaaaugauucucaacucuucuacugaag

SEQ ID NO: 331658 - RNA, 31 nt, Human
aucaaacaagugucuuuuacuuaagaagaaa

SEQ ID NO: 331659 - RNA, 32 nt, Human
aucaaacagcacagcucugggggaugucaaua

SEQ ID NO: 331660 - RNA, 32 nt, Human
aucaaacagcucccagaucugccugcagagcu

SEQ ID NO: 331661 - RNA, 19 nt, Human
aucaaacagcuuucaauca

SEQ ID NO: 331662 - RNA, 32 nt, Human
aucaaaccaaaaacuagagggggcagggccag

SEQ ID NO: 331663 - RNA, 32 nt, Human
aucaaaccacuccacaagcacagggagaugcg

SEQ ID NO: 331664 - RNA, 32 nt, Human
aucaaacccagagcggaaggagggagcucuga

SEQ ID NO: 331665 - RNA, 32 nt, Human
aucaaaccccuccaggauucccgcaggccggu

SEQ ID NO: 331666 - RNA, 31 nt, Human
aucaaacuccgccucccggguucaagcgauu

SEQ ID NO: 331667 - RNA, 32 nt, Human
aucaaacuccucaucuuuauggagauuacauu

SEQ ID NO: 331668 - RNA, 32 nt, Human
aucaaacugaaugaacuuuucucugcacugug

SEQ ID NO: 331669 - RNA, 32 nt, Human
aucaaacugagauuucaagucguacuauggaa

SEQ ID NO: 331670 - RNA, 32 nt, Human
aucaaacuuugucccuacuuuauucucucuag

SEQ ID NO: 331671 - RNA, 32 nt, Human
aucaaagaaccacagccgcugugggaggauua

SEQ ID NO: 331672 - RNA, 32 nt, Human
aucaaagacaccaucggaacagcagcgcccgc

SEQ ID NO: 331673 - RNA, 32 nt, Human
aucaaagagcugugcaaccucuucgaggccca

SEQ ID NO: 331674 - RNA, 32 nt, Human
aucaaagaggcugaggcuggcacaggacaugc

SEQ ID NO: 331675 - RNA, 32 nt, Human
aucaaagaugacaaagaggaguggaagaagac

SEQ ID NO: 331676 - RNA, 32 nt, Human
aucaaagauguggguucagaugaggaggauga

SEQ ID NO: 331677 - RNA, 32 nt, Human
aucaaagcaguuaacuuuaagacugagcaccu

SEQ ID NO: 331678 - RNA, 32 nt, Human
aucaaagccagccuauuuugacauuucauguc

SEQ ID NO: 331679 - RNA, 32 nt, Human
aucaaagcucacugcagccuugaacuccuagg

SEQ ID NO: 331680 - RNA, 32 nt, Human
aucaaagcucacugcagccuugaauuccuggg

SEQ ID NO: 331681 - RNA, 32 nt, Human
aucaaagcuguggagucgaccuccgggaacca

SEQ ID NO: 331682 - RNA, 31 nt, Human
aucaaaggaacauuugcuucacugggugaua

SEQ ID NO: 331683 - RNA, 32 nt, Human
aucaaaggaaccugggggaggaugcaggaggc

SEQ ID NO: 331684 - RNA, 32 nt, Human
aucaaaggagacaucggauggccaggccucag

SEQ ID NO: 331685 - RNA, 32 nt, Human
aucaaaggagauuauuguggaauuuucagauu

SEQ ID NO: 331686 - RNA, 32 nt, Human
aucaaagguaaucaaaguaagaugauucuucu

SEQ ID NO: 331687 - RNA, 32 nt, Human
aucaaaguuaauuuccuggucuugaggauugu

SEQ ID NO: 331688 - RNA, 32 nt, Human
aucaaauaacuagacauauaucagaaacuuua

SEQ ID NO: 331689 - RNA, 32 nt, Human
aucaaauacuauaugcaagaaaucauagcaaa

SEQ ID NO: 331690 - RNA, 32 nt, Human
aucaaauacuucaauguagauauuucuuaagu

SEQ ID NO: 331691 - RNA, 21 nt, Human
aucaaaucaguguaauuaaca

SEQ ID NO: 331692 - RNA, 21 nt, Human
aucaaaucaguguaauuagca

SEQ ID NO: 331693 - RNA, 32 nt, Human
aucaaaucucagaaagaaugucaaaucagaug

SEQ ID NO: 331694 - RNA, 32 nt, Human
aucaaaugacaagguuucucuccuucagagag

SEQ ID NO: 331695 - RNA, 32 nt, Human
aucaaaugaguauugagaagccacagaaauau

SEQ ID NO: 331696 - RNA, 32 nt, Human
aucaaaugaguauuguaaaagacuaauauaaa

SEQ ID NO: 331697 - RNA, 32 nt, Human
aucaaauggauacgcuggcagcaaagaguggu

SEQ ID NO: 331698 - RNA, 32 nt, Human
aucaaauguaucacauuuucucauguugaaca

SEQ ID NO: 331699 - RNA, 32 nt, Human
aucaaaugugcuguuuucuacucaagauccag

SEQ ID NO: 331700 - RNA, 32 nt, Human
aucaaauguuuauugggguucagcuuuguuuu

SEQ ID NO: 331701 - RNA, 32 nt, Human
aucaaauuacacaccauguuuucuaucauucu

SEQ ID NO: 331702 - RNA, 23 nt, Human
aucaaauuagcuggucucugaau

SEQ ID NO: 331703 - RNA, 32 nt, Human
aucaaauuaguaaaccaaaggaaaaguacuga

SEQ ID NO: 331704 - RNA, 32 nt, Human
aucaaauuauggacccaugaagggggcaguuu

SEQ ID NO: 331705 - RNA, 32 nt, Human
aucaaauucuaaggagcuugaucaggagggcu

SEQ ID NO: 331706 - RNA, 32 nt, Human
aucaaauuguguuggguaucaguaucuucucu

SEQ ID NO: 331707 - RNA, 32 nt, Human
aucaaauuugcacuucaugaggauuuacacau

SEQ ID NO: 331708 - RNA, 32 nt, Human
aucaaauuuggguuuccuggccccagaacuuc

SEQ ID NO: 331709 - RNA, 32 nt, Human
aucaacaaaagguuauggaagaaugguuuaug

SEQ ID NO: 331710 - RNA, 32 nt, Human
aucaacaagcaacccacccgaggggacugccu

SEQ ID NO: 331711 - RNA, 23 nt, Human
aucaacaaguuauuuucaacuca

SEQ ID NO: 331712 - RNA, 32 nt, Human
aucaacaauagaagaagaagaaaacaugucag

SEQ ID NO: 331713 - RNA, 32 nt, Human
aucaacaaugaggaaaauuacugaagaauaag

SEQ ID NO: 331714 - RNA, 32 nt, Human
aucaacacauucacuccaacaccuggguauaa

SEQ ID NO: 331715 - RNA, 32 nt, Human
aucaacaccagcugcugcccagcuacuuugga

SEQ ID NO: 331716 - RNA, 32 nt, Human
aucaacaccugucugcaaucucuugugauaga

SEQ ID NO: 331717 - RNA, 32 nt, Human
aucaacacuaaauggugugacuuggccuguuc

SEQ ID NO: 331718 - RNA, 32 nt, Human
aucaacacugauuuuauaaucugacaauaaau

SEQ ID NO: 331719 - RNA, 32 nt, Human
aucaacagaucaaugacauaggauccgaagug

SEQ ID NO: 331720 - RNA, 32 nt, Human
aucaacagaucagugccgacaugguaaggcca

SEQ ID NO: 331721 - RNA, 32 nt, Human
aucaacagcugcagggggaccccagugccaac

SEQ ID NO: 331722 - RNA, 32 nt, Human
aucaacaugccuggcacucuagcacuugagga

SEQ ID NO: 331723 - RNA, 31 nt, Human
aucaacaugccuuuggcuagagauuuacuac

SEQ ID NO: 331724 - RNA, 32 nt, Human
aucaacauugaauaucaguugacagaauggug

SEQ ID NO: 331725 - RNA, 32 nt, Human
aucaacauuguggcuggcucucgagucucuuc

SEQ ID NO: 331726 - RNA, 32 nt, Human
aucaacauuguggcugucaagaaugaucauga

SEQ ID NO: 331727 - RNA, 22 nt, Human
aucaaccaaccuggguaacaug

SEQ ID NO: 331728 - RNA, 32 nt, Human
aucaaccagcauggugaggacaccuucaaccg

SEQ ID NO: 331729 - RNA, 32 nt, Human
aucaaccaggagacugugggaggaugugagcu

SEQ ID NO: 331730 - RNA, 32 nt, Human
aucaaccagguggcauuggaggcguggcgcag

SEQ ID NO: 331731 - RNA, 32 nt, Human
aucaaccaugaucucuaucugagguccuguau

SEQ ID NO: 331732 - RNA, 32 nt, Human
aucaaccccuggcucaugcccacccuugguua

SEQ ID NO: 331733 - RNA, 32 nt, Human
aucaacccgacauuccuuucuuauaccaaugu

SEQ ID NO: 331734 - RNA, 20 nt, Human
aucaaccuacuuucaacuua

SEQ ID NO: 331735 - RNA, 32 nt, Human
aucaaccucagguucccaauagcugaaccgcu

SEQ ID NO: 331736 - RNA, 32 nt, Human
aucaaccucuagacagggaacagcuucaggau

SEQ ID NO: 331737 - RNA, 22 nt, Human
aucaaccucucaggugaaggug

SEQ ID NO: 331738 - RNA, 32 nt, Human
aucaaccugaauucagagaagccuucuuaguc

SEQ ID NO: 331739 - RNA, 24 nt, Human
aucaaccuggccaacauacugaaa

SEQ ID NO: 331740 - RNA, 32 nt, Human
aucaaccugggcaagagagugagacccugacu

SEQ ID NO: 331741 - RNA, 32 nt, Human
aucaacggaacacuaucucagcaguagcaauu

SEQ ID NO: 331742 - RNA, 32 nt, Human
aucaacggcagggaagacagagcagaggccuc

SEQ ID NO: 331743 - RNA, 32 nt, Human
aucaacgucuuuuguccagccucuuuuucuuc

SEQ ID NO: 331744 - RNA, 32 nt, Human
aucaacuacccauuuccucauucuccauguua

SEQ ID NO: 331745 - RNA, 32 nt, Human
aucaacuagguauuuaagacugauaauuuuac

SEQ ID NO: 331746 - RNA, 32 nt, Human
aucaacucacauauguucaaaaccaaaauaau

SEQ ID NO: 331747 - RNA, 18 nt, Human
aucaacuccugucucucu

SEQ ID NO: 331748 - RNA, 32 nt, Human
aucaacucucuauuucaaguacacuuauccuu

SEQ ID NO: 331749 - RNA, 32 nt, Human
aucaacucugcccguuggcugccugagccagg

SEQ ID NO: 331750 - RNA, 32 nt, Human
aucaacugagauauuuccugcuucuuaacaag

SEQ ID NO: 331751 - RNA, 32 nt, Human
aucaacugagccaaaugucugugugcaauugu

SEQ ID NO: 331752 - RNA, 22 nt, Human
aucaacugaggccucucaacca

SEQ ID NO: 331753 - RNA, 32 nt, Human
aucaacugaguggguguuuggaagaggaagga

SEQ ID NO: 331754 - RNA, 32 nt, Human
aucaacuggggucaggaguucaaaaccagccu

SEQ ID NO: 331755 - RNA, 32 nt, Human
aucaacugguuuaauauagccaauuguuuuau

SEQ ID NO: 331756 - RNA, 19 nt, Human
aucaacugucagucacuca

SEQ ID NO: 331757 - RNA, 17 nt, Human
aucaacugugucucuuu

SEQ ID NO: 331758 - RNA, 32 nt, Human
aucaacuuacaaaggauggcaggucuuaagaa

SEQ ID NO: 331759 - RNA, 32 nt, Human
aucaacuugaagcaagcuuucucucauaacgu

SEQ ID NO: 331760 - RNA, 32 nt, Human
aucaacuugcaauaccucacagagccaguuca

SEQ ID NO: 331761 - RNA, 32 nt, Human
aucaacuuuagaggagggaaagggguggcucu

SEQ ID NO: 331762 - RNA, 32 nt, Human
aucaacuuugggggaaauguaagauucugagc

SEQ ID NO: 331763 - RNA, 32 nt, Human
aucaacuuuucauaguacaugaccugcauucc

SEQ ID NO: 331764 - RNA, 32 nt, Human
aucaacuuuuuauugccuucucaccagcugca

SEQ ID NO: 331765 - RNA, 32 nt, Human
aucaagaaaaccugcuuguucacaaaagucau

SEQ ID NO: 331766 - RNA, 32 nt, Human
aucaagaacugucauccaccucuaaggaagca

SEQ ID NO: 331767 - RNA, 32 nt, Human
aucaagaagcacaucaucaccaaugacaucau

SEQ ID NO: 331768 - RNA, 17 nt, Human
aucaagaaggccucucu

SEQ ID NO: 331769 - RNA, 25 nt, Human
aucaagaagucagaauauaauugaa

SEQ ID NO: 331770 - RNA, 32 nt, Human
aucaagacaaacauguuagauaacaaaacacu

SEQ ID NO: 331771 - RNA, 32 nt, Human
aucaagaccagccugaccaacguggcgaaacc

SEQ ID NO: 331772 - RNA, 32 nt, Human
aucaagaccagccuggccaacauagugaaacc

SEQ ID NO: 331773 - RNA, 32 nt, Human
aucaagaccagccugggaaauauagcaagacc

SEQ ID NO: 331774 - RNA, 32 nt, Human
aucaagaccagcugggccaacaugguuaaacc

SEQ ID NO: 331775 - RNA, 32 nt, Human
aucaagaccagucugggcaacauagcaagacu

SEQ ID NO: 331776 - RNA, 32 nt, Human
aucaagaccauagugaccaacauagugaaacc

SEQ ID NO: 331777 - RNA, 32 nt, Human
aucaagaccauccuggccaacacagugaaacc

SEQ ID NO: 331778 - RNA, 32 nt, Human
aucaagaccauccuggccaacaugaugaaacc

SEQ ID NO: 331779 - RNA, 32 nt, Human
aucaagaccauccuggccaacauggcaaaacc

SEQ ID NO: 331780 - RNA, 32 nt, Human
aucaagaccauccuggccaacauggugaaacc

SEQ ID NO: 331781 - RNA, 32 nt, Human
aucaagaccauccuggccaacauggugaaacg

SEQ ID NO: 331782 - RNA, 32 nt, Human
aucaagaccauccuggcuaacauggugaaacc

SEQ ID NO: 331783 - RNA, 32 nt, Human
aucaagaccauccuugaucuuuaguagagacg

SEQ ID NO: 331784 - RNA, 32 nt, Human
aucaagaccaucuggcuaacagggugaaaccc

SEQ ID NO: 331785 - RNA, 32 nt, Human
aucaagaccauucuggccaacauggugaaacc

SEQ ID NO: 331786 - RNA, 32 nt, Human
aucaagacuauccuggccaacauggugaaacc

SEQ ID NO: 331787 - RNA, 32 nt, Human
aucaagacugagggucaucuugcagucugcuu

SEQ ID NO: 331788 - RNA, 32 nt, Human
aucaagacuguccuggacaacauggugaaacc

SEQ ID NO: 331789 - RNA, 32 nt, Human
aucaagagagcagcacucggagaggguguuug

SEQ ID NO: 331790 - RNA, 32 nt, Human
aucaagagaggcagucauucacgaugguuuug

SEQ ID NO: 331791 - RNA, 32 nt, Human
aucaagagccaucugcuuuccaggugaacauu

SEQ ID NO: 331792 - RNA, 32 nt, Human
aucaagagcuuacauaauuuuaaccaguucug

SEQ ID NO: 331793 - RNA, 32 nt, Human
aucaagagguggaaucuacaucccucuguugu

SEQ ID NO: 331794 - RNA, 32 nt, Human
aucaagagguugaagcugcagugagcugugau

SEQ ID NO: 331795 - RNA, 32 nt, Human
aucaagaucaaagauucuccccaucucacaga

SEQ ID NO: 331796 - RNA, 32 nt, Human
aucaagaucagugucagauauuguugagggaa

SEQ ID NO: 331797 - RNA, 32 nt, Human
aucaagaucagugucagauauuguugagggag

SEQ ID NO: 331798 - RNA, 32 nt, Human
aucaagaucauccuggccaacauggugaaacc

SEQ ID NO: 331799 - RNA, 32 nt, Human
aucaagaucuuugggaaggaacacuaaagaug

SEQ ID NO: 331800 - RNA, 32 nt, Human
aucaagaugaugggaggcaagggccuuaaaca

SEQ ID NO: 331801 - RNA, 32 nt, Human
aucaagauuacgaggcaucaccucucaaucag

SEQ ID NO: 331802 - RNA, 32 nt, Human
aucaagcaaauggugugucauugaaagucuua

SEQ ID NO: 331803 - RNA, 32 nt, Human
aucaagcaacagacuugauccagcagugucga

SEQ ID NO: 331804 - RNA, 32 nt, Human
aucaagcaauuugucuuugaaaguugauuauu

SEQ ID NO: 331805 - RNA, 32 nt, Human
aucaagcacacaguaagauuucauaagagacu

SEQ ID NO: 331806 - RNA, 32 nt, Human
aucaagcagacuguugggguugaaaggaggcu

SEQ ID NO: 331807 - RNA, 32 nt, Human
aucaagccaaaaagaaauuccauacucgccua

SEQ ID NO: 331808 - RNA, 32 nt, Human
aucaagccacugcacuccagccugggcgacag

SEQ ID NO: 331809 - RNA, 32 nt, Human
aucaagccacugcuucagccuguuggccaggg

SEQ ID NO: 331810 - RNA, 32 nt, Human
aucaagccagccugaccaacauggugaaaccc

SEQ ID NO: 331811 - RNA, 24 nt, Human
aucaagccaucgauuguguacuuu

SEQ ID NO: 331812 - RNA, 32 nt, Human
aucaagccauugcacuccagccugggcaacaa

SEQ ID NO: 331813 - RNA, 32 nt, Human
aucaagccauuguacuccagccuggacaacaa

SEQ ID NO: 331814 - RNA, 32 nt, Human
aucaagccuaguuucaaacccaucugaaauag

SEQ ID NO: 331815 - RNA, 29 nt, Human
aucaagccugugugugugcaugcuugggc

SEQ ID NO: 331816 - RNA, 32 nt, Human
aucaagcguauuccguuuucuuccugcaugau

SEQ ID NO: 331817 - RNA, 32 nt, Human
aucaagcuccacccuccuggccucauacagaa

SEQ ID NO: 331818 - RNA, 32 nt, Human
aucaagcugaagugaagccagugaagagccca

SEQ ID NO: 331819 - RNA, 32 nt, Human
aucaagcuggguaaucauggcagaagguggau

SEQ ID NO: 331820 - RNA, 32 nt, Human
aucaagcuuagugagcagugagcacugaaaca

SEQ ID NO: 331821 - RNA, 32 nt, Human
aucaaggaaagccaggccuugugggcccccuu

SEQ ID NO: 331822 - RNA, 32 nt, Human
aucaaggaaagccuggugaagccuuuacuugu

SEQ ID NO: 331823 - RNA, 32 nt, Human
aucaaggaaagggagagaaaauaauguuggag

SEQ ID NO: 331824 - RNA, 32 nt, Human
aucaaggaacaugcauuacaacuuuccuaauc

SEQ ID NO: 331825 - RNA, 32 nt, Human
aucaaggaccacugcgcccccuggccacccca

SEQ ID NO: 331826 - RNA, 32 nt, Human
aucaaggaccaugauuuuauuccuucauauag

SEQ ID NO: 331827 - RNA, 32 nt, Human
aucaaggagaagaaaagagugacuagaagacu

SEQ ID NO: 331828 - RNA, 32 nt, Human
aucaaggagaggaggaugaacagaaagaggga

SEQ ID NO: 331829 - RNA, 31 nt, Human
aucaaggagcauuguguacaugcagaagugc

SEQ ID NO: 331830 - RNA, 32 nt, Human
aucaaggaucacaaacuacagccugcaggcca

SEQ ID NO: 331831 - RNA, 32 nt, Human
aucaaggcaaaaagcauucauagauacaugca

SEQ ID NO: 331832 - RNA, 19 nt, Human
aucaaggcacuucaacuca

SEQ ID NO: 331833 - RNA, 32 nt, Human
aucaaggcagcacggcccacccaggccuccca

SEQ ID NO: 331834 - RNA, 32 nt, Human
aucaaggccagccugggaacauggaguggcag

SEQ ID NO: 331835 - RNA, 32 nt, Human
aucaaggccauccuggccaacauggugaaacc

SEQ ID NO: 331836 - RNA, 32 nt, Human
aucaaggcccagccagagguuaccaagguagg

SEQ ID NO: 331837 - RNA, 32 nt, Human
aucaaggcccugagggcagcaggaugguggcc

SEQ ID NO: 331838 - RNA, 32 nt, Human
aucaaggcgggagggccugcagugauucagca

SEQ ID NO: 331839 - RNA, 32 nt, Human
aucaaggcucacugcaaccucaaccuucuggu

SEQ ID NO: 331840 - RNA, 32 nt, Human
aucaaggcucacugcagccucaaccuucuggg

SEQ ID NO: 331841 - RNA, 32 nt, Human
aucaaggcucacugcagccuggaccuccuggu

SEQ ID NO: 331842 - RNA, 32 nt, Human
aucaaggcucacugcagccuugaacaccugga

SEQ ID NO: 331843 - RNA, 32 nt, Human
aucaaggcucaguuuauugguccucugguguu

SEQ ID NO: 331844 - RNA, 32 nt, Human
aucaaggcuuuaagagacucacugugaugccu

SEQ ID NO: 331845 - RNA, 32 nt, Human
aucaagggaggaaaaggucaccagggagaacu

SEQ ID NO: 331846 - RNA, 32 nt, Human
aucaagggccgguacaacuaccugccaggggu

SEQ ID NO: 331847 - RNA, 32 nt, Human
aucaagggccucuuccccucuuccugccagcu

SEQ ID NO: 331848 - RNA, 32 nt, Human
aucaaggucgcagacagccaaaagucaucaga

SEQ ID NO: 331849 - RNA, 32 nt, Human
aucaaggugccagcaugguuucuggugagggc

SEQ ID NO: 331850 - RNA, 32 nt, Human
aucaaggugcugcuugguuugcucugagugca

SEQ ID NO: 331851 - RNA, 32 nt, Human
aucaagguugacuucucauccuuuuugggaag

SEQ ID NO: 331852 - RNA, 32 nt, Human
aucaaguaugguaggggagggcaggcuugggg

SEQ ID NO: 331853 - RNA, 32 nt, Human
aucaagucaccacacuccagccugggugacag

SEQ ID NO: 331854 - RNA, 32 nt, Human
aucaagucauucuuuuugaaucuacuuuguau

SEQ ID NO: 331855 - RNA, 32 nt, Human
aucaaguccaacuucagaaacccgaagccugu

SEQ ID NO: 331856 - RNA, 32 nt, Human
aucaagugaauuggccccggucucacauuuuc

SEQ ID NO: 331857 - RNA, 20 nt, Human
aucaagugagacccaagcaa

SEQ ID NO: 331858 - RNA, 32 nt, Human
aucaagugaguugcuuucuggacuuuuuccau

SEQ ID NO: 331859 - RNA, 32 nt, Human
aucaagugauuguauaagcagaaacaagcugu

SEQ ID NO: 331860 - RNA, 32 nt, Human
aucaagugcacagccacccaggaaggcgacgc

SEQ ID NO: 331861 - RNA, 32 nt, Human
aucaagugccuagggaaaauuccaauggauga

SEQ ID NO: 331862 - RNA, 32 nt, Human
aucaaguggaaucacuggaaucccagaaacuu

SEQ ID NO: 331863 - RNA, 32 nt, Human
aucaaguggaggcggaggaggaggcggaggag

SEQ ID NO: 331864 - RNA, 32 nt, Human
aucaaguucacuuccaaaggcggaauucaugg

SEQ ID NO: 331865 - RNA, 32 nt, Human
aucaaguuccccagucagcagcuacuugguag

SEQ ID NO: 331866 - RNA, 32 nt, Human
aucaaguuuucugccugacaagauccaguauc

SEQ ID NO: 331867 - RNA, 32 nt, Human
aucaauaaaggaguagugcaguuuaagacaac

SEQ ID NO: 331868 - RNA, 32 nt, Human
aucaauaagaaauguucaggagagaggaaaga

SEQ ID NO: 331869 - RNA, 32 nt, Human
aucaauaagccuugccucuuuaaacuacuuau

SEQ ID NO: 331870 - RNA, 32 nt, Human
aucaauacaguauuuugauguauugcaaaaau

SEQ ID NO: 331871 - RNA, 32 nt, Human
aucaauacccuugugauuucuuaugccugucu

SEQ ID NO: 331872 - RNA, 32 nt, Human
aucaauagaagguuuucucugauuuucuucuc

SEQ ID NO: 331873 - RNA, 32 nt, Human
aucaauagcaaacccacugccauauuaguuau

SEQ ID NO: 331874 - RNA, 32 nt, Human
aucaauagguccaaucugcucucaaggccuug

SEQ ID NO: 331875 - RNA, 32 nt, Human
aucaauauaucaccuaccaucauuucauuacu

SEQ ID NO: 331876 - RNA, 32 nt, Human
aucaauaugaccacacuccagccaaggacaaa

SEQ ID NO: 331877 - RNA, 32 nt, Human
aucaauauggugcugguucaaaccagagaauu

SEQ ID NO: 331878 - RNA, 32 nt, Human
aucaaucaaauucccuuaaauuuguauggcac

SEQ ID NO: 331879 - RNA, 32 nt, Human
aucaaucaaucacuguccuggccaguugcagu

SEQ ID NO: 331880 - RNA, 32 nt, Human
aucaaucaaucagcauauacauuucagccaaa

SEQ ID NO: 331881 - RNA, 32 nt, Human
aucaaucacacagcaagcuuuucaaaggagga

SEQ ID NO: 331882 - RNA, 32 nt, Human
aucaaucacugaucccagccccuauaaaaggg

SEQ ID NO: 331883 - RNA, 32 nt, Human
aucaaucaguacaucgaccacaugcagagcga

SEQ ID NO: 331884 - RNA, 32 nt, Human
aucaaucugggcaagaagcaggauccugaguc

SEQ ID NO: 331885 - RNA, 20 nt, Human
aucaaugaaauucaaugaaa

SEQ ID NO: 331886 - RNA, 32 nt, Human
aucaaugaacuuacacauacuagcagcauuau

SEQ ID NO: 331887 - RNA, 32 nt, Human
aucaaugacagagaaggcagauagcagcaugc

SEQ ID NO: 331888 - RNA, 32 nt, Human
aucaaugaucauaucaauuggcagugacuuug

SEQ ID NO: 331889 - RNA, 24 nt, Human
aucaaugauuucaccauucuucca

SEQ ID NO: 331890 - RNA, 32 nt, Human
aucaaugcaagccugguuggaccauuguccau

SEQ ID NO: 331891 - RNA, 32 nt, Human
aucaaugcagaacagcuguggagacucuaacc

SEQ ID NO: 331892 - RNA, 32 nt, Human
aucaaugccaacaacauaaauuacaucacuga

SEQ ID NO: 331893 - RNA, 23 nt, Human
aucaaugcuuguuuuuccuggug

SEQ ID NO: 331894 - RNA, 32 nt, Human
aucaauggaagacagucgggaucuuuugcuuc

SEQ ID NO: 331895 - RNA, 32 nt, Human
aucaauggcuuuuugccgcucuaccucuugug

SEQ ID NO: 331896 - RNA, 29 nt, Human
aucaaugggaaugaacaaaaagaaugagg

SEQ ID NO: 331897 - RNA, 32 nt, Human
aucaaugugaaagucagggucacagcuggucu

SEQ ID NO: 331898 - RNA, 21 nt, Human
aucaauguggagccccagagg

SEQ ID NO: 331899 - RNA, 32 nt, Human
aucaauguuauucucccucccaccacuuccca

SEQ ID NO: 331900 - RNA, 32 nt, Human
aucaauuaaaggagacaaaaagaggcagagcg

SEQ ID NO: 331901 - RNA, 32 nt, Human
aucaauuaccacaccaucucccaugaagaaag

SEQ ID NO: 331902 - RNA, 32 nt, Human
aucaauuauuuuuagagaguaauguauaauuu

SEQ ID NO: 331903 - RNA, 32 nt, Human
aucaauucaccuuuaugcaugggcaccaaagu

SEQ ID NO: 331904 - RNA, 32 nt, Human
aucaauucuaaaaacuucaagcacuuaaugga

SEQ ID NO: 331905 - RNA, 32 nt, Human
aucaauugaaccuaggagguugaggcuauagu

SEQ ID NO: 331906 - RNA, 32 nt, Human
aucaauuguaggucauguauuuuacuauaugu

SEQ ID NO: 331907 - RNA, 32 nt, Human
aucaauuguucacaaugugguggaaauuaaaa

SEQ ID NO: 331908 - RNA, 32 nt, Human
aucaauuuguguguuaugcccuuucccccagu

SEQ ID NO: 331909 - RNA, 32 nt, Human
aucaauuuuacaccucauaugucuucuuaguu

SEQ ID NO: 331910 - RNA, 32 nt, Human
aucaauuuuccagagaacuuaaacuucuaaua

SEQ ID NO: 331911 - RNA, 32 nt, Human
aucacaaaaauaaguuaaaaagaaauauuugu

SEQ ID NO: 331912 - RNA, 32 nt, Human
aucacaaaaugcucucauaagaauuauugcau

SEQ ID NO: 331913 - RNA, 32 nt, Human
aucacaaagaugaucuuucuucuuuuaacuug

SEQ ID NO: 331914 - RNA, 32 nt, Human
aucacaaaguagacauauacacacacauauau

SEQ ID NO: 331915 - RNA, 32 nt, Human
aucacaaaguagugguuuaaauacuuuguugu

SEQ ID NO: 331916 - RNA, 17 nt, Human
aucacaaaugccucucu

SEQ ID NO: 331917 - RNA, 32 nt, Human
aucacaaauucuguucauuggaaaggguuuua

SEQ ID NO: 331918 - RNA, 19 nt, Human
aucacaacaccccauuucu

SEQ ID NO: 331919 - RNA, 32 nt, Human
aucacaacgucaguuuuccuaucugcaaaagg

SEQ ID NO: 331920 - RNA, 32 nt, Human
aucacaagaacacacacauauacacgaauaga

SEQ ID NO: 331921 - RNA, 25 nt, Human
aucacaagacuaugccauuggggua

SEQ ID NO: 331922 - RNA, 32 nt, Human
aucacaagagcccaggagguugagaaugcagu

SEQ ID NO: 331923 - RNA, 32 nt, Human
aucacaagagugaaaauugccagcacaggauu

SEQ ID NO: 331924 - RNA, 32 nt, Human
aucacaagccuuugagaacagccuggccuuca

SEQ ID NO: 331925 - RNA, 32 nt, Human
aucacaagcuuggcauugcucucugccacacg

SEQ ID NO: 331926 - RNA, 32 nt, Human
aucacaaggccgaguggacucucaccugaggg

SEQ ID NO: 331927 - RNA, 32 nt, Human
aucacaaguuugccagccuccaccuucuaacc

SEQ ID NO: 331928 - RNA, 32 nt, Human
aucacaaucauacaugguguguuuggagcagg

SEQ ID NO: 331929 - RNA, 32 nt, Human
aucacaaucauuuugaaucccucuuccucacu

SEQ ID NO: 331930 - RNA, 32 nt, Human
aucacaaugcuggugccagggaagggaaggaa

SEQ ID NO: 331931 - RNA, 32 nt, Human
aucacaauguuagcuuucuaauuccauaaaag

SEQ ID NO: 331932 - RNA, 32 nt, Human
aucacacacagccccggcacacagcaggggcu

SEQ ID NO: 331933 - RNA, 32 nt, Human
aucacacacaugcacacacacauaugcaccca

SEQ ID NO: 331934 - RNA, 32 nt, Human
aucacacacaugcacacacguguagcucacac

SEQ ID NO: 331935 - RNA, 23 nt, Human
aucacacaccagggccugucaug

SEQ ID NO: 331936 - RNA, 32 nt, Human
aucacacaggcugggugcaguggcucaugccu

SEQ ID NO: 331937 - RNA, 32 nt, Human
aucacacagucagcuaaaagcacuguggggaa

SEQ ID NO: 331938 - RNA, 24 nt, Human
aucacacauuuguugaggcugcug

SEQ ID NO: 331939 - RNA, 32 nt, Human
aucacacauuuuaaauaaguucagagaacuga

SEQ ID NO: 331940 - RNA, 20 nt, Human
aucacacauuuuucuguaua

SEQ ID NO: 331941 - RNA, 22 nt, Human
aucacaccacaguacuccagcc

SEQ ID NO: 331942 - RNA, 32 nt, Human
aucacaccacaguacuccagccuaggugacag

SEQ ID NO: 331943 - RNA, 22 nt, Human
aucacaccaccacacuccagcc

SEQ ID NO: 331944 - RNA, 32 nt, Human
aucacaccaccacuccagccugggcgagagcg

SEQ ID NO: 331945 - RNA, 32 nt, Human
aucacaccaccgcacuccacccugggaagcaa

SEQ ID NO: 331946 - RNA, 22 nt, Human
aucacaccaccucacuccagcc

SEQ ID NO: 331947 - RNA, 32 nt, Human
aucacaccaccucacuccagccugggcaacau

SEQ ID NO: 331948 - RNA, 22 nt, Human
aucacaccacuacacuccagcc

SEQ ID NO: 331949 - RNA, 23 nt, Human
aucacaccacuacacuccagcca

SEQ ID NO: 331950 - RNA, 32 nt, Human
aucacaccacuacacuccagccuaggcaacag

SEQ ID NO: 331951 - RNA, 32 nt, Human
aucacaccacuacacuccagccuggacaacag

SEQ ID NO: 331952 - RNA, 32 nt, Human
aucacaccacuacacuccagccugggcgacag

SEQ ID NO: 331953 - RNA, 32 nt, Human
aucacaccacuacacuccagccugggcgagac

SEQ ID NO: 331954 - RNA, 32 nt, Human
aucacaccacuccacuccagucuggacaacag

SEQ ID NO: 331955 - RNA, 22 nt, Human
aucacaccacugcaauccagcc

SEQ ID NO: 331956 - RNA, 32 nt, Human
aucacaccacugcaauccagccucgguaacac

SEQ ID NO: 331957 - RNA, 32 nt, Human
aucacaccacugcaauccagccugggcgacaa

SEQ ID NO: 331958 - RNA, 32 nt, Human
aucacaccacugcaccccagccugggugacag

SEQ ID NO: 331959 - RNA, 32 nt, Human
aucacaccacugcacuacagccucggcaauag

SEQ ID NO: 331960 - RNA, 21 nt, Human
aucacaccacugcacucagcc

SEQ ID NO: 331961 - RNA, 32 nt, Human
aucacaccacugcacucagccugggugacaga

SEQ ID NO: 331962 - RNA, 22 nt, Human
aucacaccacugcacuccaacc

SEQ ID NO: 331963 - RNA, 32 nt, Human
aucacaccacugcacuccaaccuggacaacag

SEQ ID NO: 331964 - RNA, 32 nt, Human
aucacaccacugcacuccaaccugggaaacgc

SEQ ID NO: 331965 - RNA, 22 nt, Human
aucacaccacugcacuccagcc

SEQ ID NO: 331966 - RNA, 23 nt, Human
aucacaccacugcacuccagcca

SEQ ID NO: 331967 - RNA, 32 nt, Human
aucacaccacugcacuccagccagggcaacag

SEQ ID NO: 331968 - RNA, 32 nt, Human
aucacaccacugcacuccagcccaggugacag

SEQ ID NO: 331969 - RNA, 32 nt, Human
aucacaccacugcacuccagccuaggcaacag

SEQ ID NO: 331970 - RNA, 32 nt, Human
aucacaccacugcacuccagccuggacaacag

SEQ ID NO: 331971 - RNA, 32 nt, Human
aucacaccacugcacuccagccuggacgacag

SEQ ID NO: 331972 - RNA, 32 nt, Human
aucacaccacugcacuccagccuggcaacaga

SEQ ID NO: 331973 - RNA, 32 nt, Human
aucacaccacugcacuccagccuggcgacaga

SEQ ID NO: 331974 - RNA, 32 nt, Human
aucacaccacugcacuccagccugggagagag

SEQ ID NO: 331975 - RNA, 32 nt, Human
aucacaccacugcacuccagccugggcaacaa

SEQ ID NO: 331976 - RNA, 32 nt, Human
aucacaccacugcacuccagccugggcaacag

SEQ ID NO: 331977 - RNA, 32 nt, Human
aucacaccacugcacuccagccugggcaacug

SEQ ID NO: 331978 - RNA, 32 nt, Human
aucacaccacugcacuccagccugggcaauag

SEQ ID NO: 331979 - RNA, 32 nt, Human
aucacaccacugcacuccagccugggcgacag

SEQ ID NO: 331980 - RNA, 32 nt, Human
aucacaccacugcacuccagccugggcggcag

SEQ ID NO: 331981 - RNA, 32 nt, Human
aucacaccacugcacuccagccugggggacag

SEQ ID NO: 331982 - RNA, 32 nt, Human
aucacaccacugcacuccagccuggggugaua

SEQ ID NO: 331983 - RNA, 32 nt, Human
aucacaccacugcacuccagccuggguaaaaa

SEQ ID NO: 331984 - RNA, 32 nt, Human
aucacaccacugcacuccagccugggugacag

SEQ ID NO: 331985 - RNA, 32 nt, Human
aucacaccacugcacuccagccugggugauag

SEQ ID NO: 331986 - RNA, 32 nt, Human
aucacaccacugcacuccagccuggguggcag

SEQ ID NO: 331987 - RNA, 32 nt, Human
aucacaccacugcacuccagccugggugucag

SEQ ID NO: 331988 - RNA, 32 nt, Human
aucacaccacugcacuccagccuggucaacag

SEQ ID NO: 331989 - RNA, 32 nt, Human
aucacaccacugcacuccagccuggugacaga

SEQ ID NO: 331990 - RNA, 32 nt, Human
aucacaccacugcacuccagccugugcgacag

SEQ ID NO: 331991 - RNA, 32 nt, Human
aucacaccacugcacuccagccuuggcgacaa

SEQ ID NO: 331992 - RNA, 32 nt, Human
aucacaccacugcacuccagccuuggcgacag

SEQ ID NO: 331993 - RNA, 32 nt, Human
aucacaccacugcacuccagccuuggugacag

SEQ ID NO: 331994 - RNA, 32 nt, Human
aucacaccacugcacuccagcuugggggauag

SEQ ID NO: 331995 - RNA, 32 nt, Human
aucacaccacugcacuccagucugggcaccag

SEQ ID NO: 331996 - RNA, 23 nt, Human
aucacaccacugcacuccaucca

SEQ ID NO: 331997 - RNA, 32 nt, Human
aucacaccacugcacuccauccagccugggug

SEQ ID NO: 331998 - RNA, 32 nt, Human
aucacaccacugcacuccggccugggcgacag

SEQ ID NO: 331999 - RNA, 22 nt, Human
aucacaccacugcacucuagcc

SEQ ID NO: 332000 - RNA, 32 nt, Human
aucacaccacugcacucuagccugggcaacag

SEQ ID NO: 332001 - RNA, 32 nt, Human
aucacaccacugcacucuagccugggugacag

SEQ ID NO: 332002 - RNA, 22 nt, Human
aucacaccacugcacucuggcc

SEQ ID NO: 332003 - RNA, 22 nt, Human
aucacaccacugcacuguagcc

SEQ ID NO: 332004 - RNA, 22 nt, Human
aucacaccacugcacuucagcc

SEQ ID NO: 332005 - RNA, 32 nt, Human
aucacaccacugcacuucagccuggaugacag

SEQ ID NO: 332006 - RNA, 32 nt, Human
aucacaccacugcacuucagccugggcaacag

SEQ ID NO: 332007 - RNA, 32 nt, Human
aucacaccacugcacuucauccuaggcaacag

SEQ ID NO: 332008 - RNA, 22 nt, Human
aucacaccacugcauuccagcc

SEQ ID NO: 332009 - RNA, 32 nt, Human
aucacaccacugcauuccagccugggcacuag

SEQ ID NO: 332010 - RNA, 32 nt, Human
aucacaccacugcauuccagccugggugacag

SEQ ID NO: 332011 - RNA, 32 nt, Human
aucacaccacugcauucccgccugggcagcag

SEQ ID NO: 332012 - RNA, 32 nt, Human
aucacaccacugcauucuggccugggugacag

SEQ ID NO: 332013 - RNA, 32 nt, Human
aucacaccacugcgcucuagccuggacaacaa

SEQ ID NO: 332014 - RNA, 32 nt, Human
aucacaccacugcgcucuagccugggcaacaa

SEQ ID NO: 332015 - RNA, 23 nt, Human
aucacaccacuggcacuccagcc

SEQ ID NO: 332016 - RNA, 32 nt, Human
aucacaccacuggcacuccagccugggcaaca

SEQ ID NO: 332017 - RNA, 22 nt, Human
aucacaccacuguacuccagcc

SEQ ID NO: 332018 - RNA, 32 nt, Human
aucacaccacuguacuccagcccggcacucca

SEQ ID NO: 332019 - RNA, 32 nt, Human
aucacaccacuguacuccagccugagugacaa

SEQ ID NO: 332020 - RNA, 32 nt, Human
aucacaccacuguacuccagccuggaugacag

SEQ ID NO: 332021 - RNA, 32 nt, Human
aucacaccacuguacuccagccugggcaacag

SEQ ID NO: 332022 - RNA, 32 nt, Human
aucacaccacuguacuccagccugggugacaa

SEQ ID NO: 332023 - RNA, 32 nt, Human
aucacaccacuguacuccagccuggugacaga

SEQ ID NO: 332024 - RNA, 22 nt, Human
aucacaccacuguauuccagcc

SEQ ID NO: 332025 - RNA, 32 nt, Human
aucacaccacuguauuccagccugggugacug

SEQ ID NO: 332026 - RNA, 32 nt, Human
aucacaccacugugcucuagccuggacaacaa

SEQ ID NO: 332027 - RNA, 32 nt, Human
aucacaccagccuaaccaacaugaugaaacuc

SEQ ID NO: 332028 - RNA, 22 nt, Human
aucacaccaguacacuccagcc

SEQ ID NO: 332029 - RNA, 22 nt, Human
aucacaccagugcacuccagcc

SEQ ID NO: 332030 - RNA, 32 nt, Human
aucacaccagugcacuccagccugggcgacag

SEQ ID NO: 332031 - RNA, 32 nt, Human
aucacaccaucgcacuccagccuaggcaacaa

SEQ ID NO: 332032 - RNA, 32 nt, Human
aucacaccauugcacuccaaccugggcaacaa

SEQ ID NO: 332033 - RNA, 22 nt, Human
aucacaccauugcacuccagcc

SEQ ID NO: 332034 - RNA, 32 nt, Human
aucacaccauugcacuccagccuagauaacaa

SEQ ID NO: 332035 - RNA, 32 nt, Human
aucacaccauugcacuccagccuaggcaacaa

SEQ ID NO: 332036 - RNA, 32 nt, Human
aucacaccauugcacuccagccuaggcauggu

SEQ ID NO: 332037 - RNA, 32 nt, Human
aucacaccauugcacuccagccugagcaacag

SEQ ID NO: 332038 - RNA, 32 nt, Human
aucacaccauugcacuccagccugggaaacaa

SEQ ID NO: 332039 - RNA, 32 nt, Human
aucacaccauugcacuccagccugggcaaaaa

SEQ ID NO: 332040 - RNA, 32 nt, Human
aucacaccauugcacuccagccugggcaacaa

SEQ ID NO: 332041 - RNA, 32 nt, Human
aucacaccauugcacuccagccugggcaacag

SEQ ID NO: 332042 - RNA, 32 nt, Human
aucacaccauugcacuccagccugggcgacaa

SEQ ID NO: 332043 - RNA, 32 nt, Human
aucacaccauugcacuccagccugggcgacag

SEQ ID NO: 332044 - RNA, 32 nt, Human
aucacaccauugcacuccagcuugggcaacaa

SEQ ID NO: 332045 - RNA, 32 nt, Human
aucacaccauugcacugcagccugggugaaga

SEQ ID NO: 332046 - RNA, 32 nt, Human
aucacaccauugcacuucagccugggcgacac

SEQ ID NO: 332047 - RNA, 22 nt, Human
aucacaccauugcccuccagcc

SEQ ID NO: 332048 - RNA, 32 nt, Human
aucacaccauugcccuccagccugggugacag

SEQ ID NO: 332049 - RNA, 32 nt, Human
aucacaccauugcgcuucagccugggcaacaa

SEQ ID NO: 332050 - RNA, 32 nt, Human
aucacaccauugcuguccagccugggugacag

SEQ ID NO: 332051 - RNA, 32 nt, Human
aucacaccauuuccuguuucuuuauaacccga

SEQ ID NO: 332052 - RNA, 32 nt, Human
aucacaccgcugcacucaagccugggugacag

SEQ ID NO: 332053 - RNA, 21 nt, Human
aucacaccguccuccacgcca

SEQ ID NO: 332054 - RNA, 32 nt, Human
aucacaccucacugcagccucaaucuuagcug

SEQ ID NO: 332055 - RNA, 32 nt, Human
aucacaccucacugcagccuuggccucucagg

SEQ ID NO: 332056 - RNA, 32 nt, Human
aucacaccuccaggcgccucugguuggacauu

SEQ ID NO: 332057 - RNA, 32 nt, Human
aucacaccugacugcacuccagccuggguggc

SEQ ID NO: 332058 - RNA, 32 nt, Human
aucacaccugcaaucccagcacuuugggaggc

SEQ ID NO: 332059 - RNA, 32 nt, Human
aucacaccuggaugaacuaucacuuucaaaug

SEQ ID NO: 332060 - RNA, 32 nt, Human
aucacaccuggucaacuuucuuuugauuagug

SEQ ID NO: 332061 - RNA, 32 nt, Human
aucacaccuguaaucccagcacuuugggaggc

SEQ ID NO: 332062 - RNA, 32 nt, Human
aucacaccuguaaucccagcacuuugggaggu

SEQ ID NO: 332063 - RNA, 32 nt, Human
aucacaccuguaaucccagcacuuugggauua

SEQ ID NO: 332064 - RNA, 30 nt, Human
aucacaccugugaguggcucccagcacuuu

SEQ ID NO: 332065 - RNA, 32 nt, Human
aucacacgccacugcacuccagccugggugac

SEQ ID NO: 332066 - RNA, 32 nt, Human
aucacacuacugcacuccagccugggcaacag

SEQ ID NO: 332067 - RNA, 32 nt, Human
aucacacuacugcacuccagccugggcgacaa

SEQ ID NO: 332068 - RNA, 32 nt, Human
aucacacuacugcacuccugcaugggcgacug

SEQ ID NO: 332069 - RNA, 32 nt, Human
aucacacuacugcauuccagccugagcaacag

SEQ ID NO: 332070 - RNA, 32 nt, Human
aucacacuauugcacuccagccugggcgacag

SEQ ID NO: 332071 - RNA, 32 nt, Human
aucacacuccagccuaggcgacagagugagac

SEQ ID NO: 332072 - RNA, 32 nt, Human
aucacacuccugccuuaacugcucugaguaug

SEQ ID NO: 332073 - RNA, 32 nt, Human
aucacacugccgcacugaagccuggaugacag

SEQ ID NO: 332074 - RNA, 28 nt, Human
aucacacugugcccugcaccucccacca

SEQ ID NO: 332075 - RNA, 32 nt, Human
aucacacugugcccugcaccucccaccaaggg

SEQ ID NO: 332076 - RNA, 32 nt, Human
aucacacuuuggcuuugauucuggguggguac

SEQ ID NO: 332077 - RNA, 32 nt, Human
aucacagaaagugggagcuuggaggaucccuc

SEQ ID NO: 332078 - RNA, 32 nt, Human
aucacagaagagucucuacagagaugugaugc

SEQ ID NO: 332079 - RNA, 32 nt, Human
aucacagacagccucuuuaugagguuuucuaa

SEQ ID NO: 332080 - RNA, 32 nt, Human
aucacagacccaccacacagcccagcagcccu

SEQ ID NO: 332081 - RNA, 32 nt, Human
aucacagagauggacaguuacaauuuauugcu

SEQ ID NO: 332082 - RNA, 32 nt, Human
aucacagagccagaagccagagggccagggau

SEQ ID NO: 332083 - RNA, 21 nt, Human
aucacagagcccuucuuggua

SEQ ID NO: 332084 - RNA, 32 nt, Human
aucacagaggacuugaucuauuucucagguua

SEQ ID NO: 332085 - RNA, 32 nt, Human
aucacagagugucaggaugcagcugggcaccu

SEQ ID NO: 332086 - RNA, 19 nt, Human
aucacagaugcaacuucuu

SEQ ID NO: 332087 - RNA, 32 nt, Human
aucacagcacauuuauaaaagauguguguuuc

SEQ ID NO: 332088 - RNA, 32 nt, Human
aucacagcauuuuuaaagcuuucccucaaaaa

SEQ ID NO: 332089 - RNA, 32 nt, Human
aucacagccaggcggcauucccugccacagug

SEQ ID NO: 332090 - RNA, 32 nt, Human
aucacagcccgccugcacuccugagggccccu

SEQ ID NO: 332091 - RNA, 32 nt, Human
aucacagcgcugugggagaagcuucuagaagg

SEQ ID NO: 332092 - RNA, 32 nt, Human
aucacagcuacucaggagacugaagcaggaga

SEQ ID NO: 332093 - RNA, 32 nt, Human
aucacagcucacagcaacuucaaacuccugag

SEQ ID NO: 332094 - RNA, 32 nt, Human
aucacagcucacugcaaccucaaacuccuggg

SEQ ID NO: 332095 - RNA, 32 nt, Human
aucacagcucacugcaaccucaauccugggcu

SEQ ID NO: 332096 - RNA, 32 nt, Human
aucacagcucacugcaaccucuacucccaggc

SEQ ID NO: 332097 - RNA, 32 nt, Human
aucacagcucacugcaaccuuacuccuaggcu

SEQ ID NO: 332098 - RNA, 32 nt, Human
aucacagcucacugcagcccugaacuccuggg

SEQ ID NO: 332099 - RNA, 32 nt, Human
aucacagcucacugcagccucaaacuccuggg

SEQ ID NO: 332100 - RNA, 32 nt, Human
aucacagcucacugcagccucaaccucugaag

SEQ ID NO: 332101 - RNA, 32 nt, Human
aucacagcucacugcagccucaaccuggguuc

SEQ ID NO: 332102 - RNA, 32 nt, Human
aucacagcucacugcagccuccaccuccuggg

SEQ ID NO: 332103 - RNA, 32 nt, Human
aucacagcucacugcagccuccaucuccuagg

SEQ ID NO: 332104 - RNA, 32 nt, Human
aucacagcucacugcagccucgaccuccugcg

SEQ ID NO: 332105 - RNA, 32 nt, Human
aucacagcucacugcagccucgaccuccugga

SEQ ID NO: 332106 - RNA, 32 nt, Human
aucacagcucacugcagccucgaccuccuggg

SEQ ID NO: 332107 - RNA, 32 nt, Human
aucacagcucacugcagccucgacuucccagg

SEQ ID NO: 332108 - RNA, 32 nt, Human
aucacagcucacugcagccuggaccuccuggc

SEQ ID NO: 332109 - RNA, 32 nt, Human
aucacagcucacugcagccuugaacugugcug

SEQ ID NO: 332110 - RNA, 32 nt, Human
aucacagcucacugcagccuugaccucccggg

SEQ ID NO: 332111 - RNA, 32 nt, Human
aucacagcucacugcagccuugaccuccuggg

SEQ ID NO: 332112 - RNA, 32 nt, Human
aucacagcucacugcagccuugagcuccuggg

SEQ ID NO: 332113 - RNA, 32 nt, Human
aucacagcucacugcagccuuguccucccagg

SEQ ID NO: 332114 - RNA, 32 nt, Human
aucacagcucacugcagguucagccuucugag

SEQ ID NO: 332115 - RNA, 32 nt, Human
aucacagcucacugcagucucgaacuccugga

SEQ ID NO: 332116 - RNA, 32 nt, Human
aucacagcucacugcugccucgaccuccguca

SEQ ID NO: 332117 - RNA, 32 nt, Human
aucacagcucacuguagccucuaacucccagg

SEQ ID NO: 332118 - RNA, 32 nt, Human
aucacagcucacuguagccuugaucuccuggg

SEQ ID NO: 332119 - RNA, 32 nt, Human
aucacagcuggcaucuggaggaagggccaaca

SEQ ID NO: 332120 - RNA, 32 nt, Human
aucacagcuguuacucacugagcaccagccag

SEQ ID NO: 332121 - RNA, 32 nt, Human
aucacagcuucaggaagccuucucaagugugc

SEQ ID NO: 332122 - RNA, 32 nt, Human
aucacagcuuuuccuggggcuggugagucugu

SEQ ID NO: 332123 - RNA, 32 nt, Human
aucacaggagccacugcacuccagccugggug

SEQ ID NO: 332124 - RNA, 32 nt, Human
aucacaggaggguaaaucuuugcuggaguuau

SEQ ID NO: 332125 - RNA, 32 nt, Human
aucacaggcaugagccaccgaacccagccuua

SEQ ID NO: 332126 - RNA, 32 nt, Human
aucacaggcaugagccacugugcccagccacg

SEQ ID NO: 332127 - RNA, 32 nt, Human
aucacaggccuggguggguggguugggggaag

SEQ ID NO: 332128 - RNA, 32 nt, Human
aucacaggcgccagccacugcgcccggcccag

SEQ ID NO: 332129 - RNA, 32 nt, Human
aucacaggcgugagccaccgcacccagccuuu

SEQ ID NO: 332130 - RNA, 32 nt, Human
aucacaggcgugagccaccgcauccggccuca

SEQ ID NO: 332131 - RNA, 32 nt, Human
aucacaggcgugagccaccgugcccggccucc

SEQ ID NO: 332132 - RNA, 32 nt, Human
aucacaggcgugagccacugcgcccagcccac

SEQ ID NO: 332133 - RNA, 32 nt, Human
aucacaggcgugagcuaucacaccuggcccca

SEQ ID NO: 332134 - RNA, 32 nt, Human
aucacaggcugcaggcuagagggggcaguuau

SEQ ID NO: 332135 - RNA, 32 nt, Human
aucacaggcuuagggacggcacuaacuuucuc

SEQ ID NO: 332136 - RNA, 32 nt, Human
aucacagggcccucggugaagcagaaaggcgg

SEQ ID NO: 332137 - RNA, 32 nt, Human
aucacaggggagggaauuaggagcagggcagc

SEQ ID NO: 332138 - RNA, 32 nt, Human
aucacaggggugagccaccgcgcccagcccuc

SEQ ID NO: 332139 - RNA, 32 nt, Human
aucacaggguguacaaucucugccuuccaggu

SEQ ID NO: 332140 - RNA, 32 nt, Human
aucacaggucacugcagcccugaccuccuggg

SEQ ID NO: 332141 - RNA, 32 nt, Human
aucacaggugggagccacugugccuggccagu

SEQ ID NO: 332142 - RNA, 32 nt, Human
aucacaggugugcaccaccaugcccagcuaau

SEQ ID NO: 332143 - RNA, 32 nt, Human
aucacagguuacguguucuguucuaugccuaa

SEQ ID NO: 332144 - RNA, 31 nt, Human
aucacagguuacuagaauacacauuugcugu

SEQ ID NO: 332145 - RNA, 32 nt, Human
aucacagugaaacacaacacaaaaggccauaa

SEQ ID NO: 332146 - RNA, 32 nt, Human
aucacagugauuugucaugaaaagccauauau

SEQ ID NO: 332147 - RNA, 32 nt, Human
aucacagugcccaugccauacaugccaguugg

SEQ ID NO: 332148 - RNA, 32 nt, Human
aucacagugcuguuuuuaaugccugagaaaug

SEQ ID NO: 332149 - RNA, 32 nt, Human
aucacaguggggcacgaaggaggaggccauuc

SEQ ID NO: 332150 - RNA, 32 nt, Human
aucacaguuacaaaagcgacagucuucuauuu

SEQ ID NO: 332151 - RNA, 32 nt, Human
aucacaguucacugcagccucaaccucuccag

SEQ ID NO: 332152 - RNA, 32 nt, Human
aucacaguucuuuccucuuucugcucugccau

SEQ ID NO: 332153 - RNA, 32 nt, Human
aucacaguugacugacagcuccugggguucau

SEQ ID NO: 332154 - RNA, 32 nt, Human
aucacaguuggccacucagcugugcugaguag

SEQ ID NO: 332155 - RNA, 32 nt, Human
aucacaguuuaccaccaccaacuaugucacag

SEQ ID NO: 332156 - RNA, 32 nt, Human
aucacaguuucugcucuucagaaguuucaccc

SEQ ID NO: 332157 - RNA, 32 nt, Human
aucacaguuuuuccuggaauugccagcugaca

SEQ ID NO: 332158 - RNA, 23 nt, Human
aucacauacggaggucuugugua

SEQ ID NO: 332159 - RNA, 32 nt, Human
aucacaucaaggagucaggggaaagugacugg

SEQ ID NO: 332160 - RNA, 32 nt, Human
aucacaucacugcacuccagccuggguaacag

SEQ ID NO: 332161 - RNA, 32 nt, Human
aucacaucacugcacuccauccugggugacag

SEQ ID NO: 332162 - RNA, 32 nt, Human
aucacaucacugcaguccagccugggugacag

SEQ ID NO: 332163 - RNA, 32 nt, Human
aucacaucacuuccauggcauggauguucaca

SEQ ID NO: 332164 - RNA, 32 nt, Human
aucacaucccaaagcuucagcaucaaaaauac

SEQ ID NO: 332165 - RNA, 32 nt, Human
aucacaugaacccaggagguugaagcugcggu

SEQ ID NO: 332166 - RNA, 32 nt, Human
aucacaugaauccaggagguggagguugcagu

SEQ ID NO: 332167 - RNA, 32 nt, Human
aucacaugagcccaggagguugaggcugcagu

SEQ ID NO: 332168 - RNA, 32 nt, Human
aucacaugcucaaugacucucuggugagcgag

SEQ ID NO: 332169 - RNA, 32 nt, Human
aucacauguaccacugcugcuuugauggagcu

SEQ ID NO: 332170 - RNA, 32 nt, Human
aucacauuaaaauguuguaaaacagcaaagcu

SEQ ID NO: 332171 - RNA, 32 nt, Human
aucacauucaccucuaccuccaccaucaccau

SEQ ID NO: 332172 - RNA, 32 nt, Human
aucacauuccuagcccacucucaucauuacug

SEQ ID NO: 332173 - RNA, 32 nt, Human
aucacauucuuuuagauuuagacaucucugag

SEQ ID NO: 332174 - RNA, 32 nt, Human
aucacauuguugaguuauaccugugaugggcu

SEQ ID NO: 332175 - RNA, 32 nt, Human
aucacauuucaaauucacccuacauuccucuc

SEQ ID NO: 332176 - RNA, 32 nt, Human
aucacauuuucagucuguaaauuuuucaaacu

SEQ ID NO: 332177 - RNA, 32 nt, Human
aucaccaaaaagcaaccaacuuagccagcuuu

SEQ ID NO: 332178 - RNA, 32 nt, Human
aucaccaaaaagcaaccaacuuagccaguuuu

SEQ ID NO: 332179 - RNA, 32 nt, Human
aucaccaaaagacgaggcggcaaagauccagc

SEQ ID NO: 332180 - RNA, 32 nt, Human
aucaccaaaggccaggaguuugaggcugcagu

SEQ ID NO: 332181 - RNA, 32 nt, Human
aucaccaacaugagcuuccccuuguccgacca

SEQ ID NO: 332182 - RNA, 32 nt, Human
aucaccaagcaugcaccaaacacugcuuuagg

SEQ ID NO: 332183 - RNA, 32 nt, Human
aucaccaagggugggaugggagggcagagggg

SEQ ID NO: 332184 - RNA, 32 nt, Human
aucaccaagggugggaugggagggcaggggaa

SEQ ID NO: 332185 - RNA, 32 nt, Human
aucaccaaguuugugaguucucaucaaggguu

SEQ ID NO: 332186 - RNA, 32 nt, Human
aucaccaaucauaguguacccaucuuuaauuu

SEQ ID NO: 332187 - RNA, 32 nt, Human
aucaccacaaauauaucuggcugaucagguug

SEQ ID NO: 332188 - RNA, 32 nt, Human
aucaccacacugucuuccgcaguggcugaacu

SEQ ID NO: 332189 - RNA, 32 nt, Human
aucaccacaugccuucacuccagaguguucuc

SEQ ID NO: 332190 - RNA, 32 nt, Human
aucaccaccaacaacagcagcagcagcagcca

SEQ ID NO: 332191 - RNA, 21 nt, Human
aucaccaccauaccaagguca

SEQ ID NO: 332192 - RNA, 32 nt, Human
aucaccaccuuccaucaucauaacucuuuuca

SEQ ID NO: 332193 - RNA, 32 nt, Human
aucaccaccuugucaccaacaggaugauguca

SEQ ID NO: 332194 - RNA, 32 nt, Human
aucaccacucacugcggccucaaccuucaggg

SEQ ID NO: 332195 - RNA, 19 nt, Human
aucaccacuguccaaggca

SEQ ID NO: 332196 - RNA, 32 nt, Human
aucaccagacaaccccaggcggaaguggcggu

SEQ ID NO: 332197 - RNA, 32 nt, Human
aucaccagagccaccaagccugccagaggggu

SEQ ID NO: 332198 - RNA, 32 nt, Human
aucaccagcaagcucugcuccucauucggggg

SEQ ID NO: 332199 - RNA, 32 nt, Human
aucaccagccugggcgacagagugagacuccu

SEQ ID NO: 332200 - RNA, 32 nt, Human
aucaccaggauggaacacaggucuugcaggau

SEQ ID NO: 332201 - RNA, 32 nt, Human
aucaccaggcuggagugcaguggugcgauguu

SEQ ID NO: 332202 - RNA, 32 nt, Human
aucaccaggugcaggcccccacccucggagau

SEQ ID NO: 332203 - RNA, 32 nt, Human
aucaccaggugggagugcaguggcacaaucuc

SEQ ID NO: 332204 - RNA, 32 nt, Human
aucaccaguucugccacccucggcccucccug

SEQ ID NO: 332205 - RNA, 17 nt, Human
aucaccaucaccaccaa

SEQ ID NO: 332206 - RNA, 22 nt, Human
aucaccaucaccaccagcagca

SEQ ID NO: 332207 - RNA, 31 nt, Human
aucaccaucacuacucaaguuggagaaauag

SEQ ID NO: 332208 - RNA, 32 nt, Human
aucaccaucugucaucucacuaccaccaugcu

SEQ ID NO: 332209 - RNA, 32 nt, Human
aucaccaugacugcugucagccuggaucgaua

SEQ ID NO: 332210 - RNA, 32 nt, Human
aucaccauuuauucauaccuacucugaaugac

SEQ ID NO: 332211 - RNA, 32 nt, Human
aucaccauuucuaacagaugccuguggcauug

SEQ ID NO: 332212 - RNA, 32 nt, Human
aucacccacaaacccacccugugcccacccuc

SEQ ID NO: 332213 - RNA, 32 nt, Human
aucacccacugcacuggccuugcucucccgca

SEQ ID NO: 332214 - RNA, 32 nt, Human
aucacccagcucugagugguuggugggaccuc

SEQ ID NO: 332215 - RNA, 19 nt, Human
aucacccagggugcagcca

SEQ ID NO: 332216 - RNA, 32 nt, Human
aucacccauacccacacauacaucuaguaugu

SEQ ID NO: 332217 - RNA, 32 nt, Human
aucaccccacugcauuccagccugggugacag

SEQ ID NO: 332218 - RNA, 32 nt, Human
aucaccccacuguccuccagccugggcaacag

SEQ ID NO: 332219 - RNA, 32 nt, Human
aucaccccagaagagaguacaggagccaggau

SEQ ID NO: 332220 - RNA, 32 nt, Human
aucaccccagagaaauuucuggaaucugauug

SEQ ID NO: 332221 - RNA, 32 nt, Human
aucaccccauugcacuccagccuggacaacaa

SEQ ID NO: 332222 - RNA, 32 nt, Human
aucaccccauuucacuccagccugggcgacaa

SEQ ID NO: 332223 - RNA, 32 nt, Human
aucaccccuccccucuucccucccccucaucc

SEQ ID NO: 332224 - RNA, 32 nt, Human
aucaccccugagcaucccucuggacucagagg

SEQ ID NO: 332225 - RNA, 32 nt, Human
aucaccccuuccuccuuccucuucucaaaaug

SEQ ID NO: 332226 - RNA, 32 nt, Human
aucacccuacuucccugaggcugcugaggucg

SEQ ID NO: 332227 - RNA, 32 nt, Human
aucacccuccuccucugcccagaccugggggc

SEQ ID NO: 332228 - RNA, 32 nt, Human
aucacccucugucaacaaccauggggaagauc

SEQ ID NO: 332229 - RNA, 32 nt, Human
aucacccucuucagacuggagucagugggaac

SEQ ID NO: 332230 - RNA, 32 nt, Human
aucacccugcuccccuacugcauuccuuugug

SEQ ID NO: 332231 - RNA, 22 nt, Human
aucacccugcucuccugcuaca

SEQ ID NO: 332232 - RNA, 32 nt, Human
aucacccuuccuggucuacagauggaagcugc

SEQ ID NO: 332233 - RNA, 32 nt, Human
aucaccgaauggcagagauugguguggggauc

SEQ ID NO: 332234 - RNA, 32 nt, Human
aucaccgacuggcuggagucaucuuccugccc

SEQ ID NO: 332235 - RNA, 32 nt, Human
aucaccgcaagaacaaguuccaguguggcuuu

SEQ ID NO: 332236 - RNA, 32 nt, Human
aucaccgccacugccaccccucccagacugug

SEQ ID NO: 332237 - RNA, 32 nt, Human
aucaccgccaugagccucuuugcgagugaccu

SEQ ID NO: 332238 - RNA, 21 nt, Human
aucaccuaaacugucuuccaa

SEQ ID NO: 332239 - RNA, 32 nt, Human
aucaccuaaggccaggaggucaaggcugcggu

SEQ ID NO: 332240 - RNA, 32 nt, Human
aucaccuacaaacucucacacgcccuagaaga

SEQ ID NO: 332241 - RNA, 32 nt, Human
aucaccuacucuccacuaauagaugcuaugcu

SEQ ID NO: 332242 - RNA, 32 nt, Human
aucaccucacugcacgcuagccugggcaacag

SEQ ID NO: 332243 - RNA, 32 nt, Human
aucaccuccaccauacuccaucaguuagagcu

SEQ ID NO: 332244 - RNA, 32 nt, Human
aucaccuccagccugacucccugucugcccuu

SEQ ID NO: 332245 - RNA, 32 nt, Human
aucaccuccaucucugcaaauacagcccgagg

SEQ ID NO: 332246 - RNA, 32 nt, Human
aucaccucucugcuuagccacuggcuuaaacu

SEQ ID NO: 332247 - RNA, 32 nt, Human
aucaccucugagacccaacuugcucauaaaca

SEQ ID NO: 332248 - RNA, 32 nt, Human
aucaccucugcgggacucgggugcaggaaggg

SEQ ID NO: 332249 - RNA, 29 nt, Human
aucaccucuggccucucaucccccacucu

SEQ ID NO: 332250 - RNA, 32 nt, Human
aucaccucugggacugugccuugcucaccgaa

SEQ ID NO: 332251 - RNA, 32 nt, Human
aucaccucuguaauuuuucagcucucuguaua

SEQ ID NO: 332252 - RNA, 32 nt, Human
  misc_feature (27)..(27): n is a, c, g, or u
aucaccucuugaaccaggacccuucanacaua

SEQ ID NO: 332253 - RNA, 32 nt, Human
aucaccugaacccaggaggcagagguugcagu

SEQ ID NO: 332254 - RNA, 32 nt, Human
aucaccugaccuucuccaggacugucuucuca

SEQ ID NO: 332255 - RNA, 32 nt, Human
aucaccugagauugggaguucgagaccagccu

SEQ ID NO: 332256 - RNA, 32 nt, Human
aucaccugagcccaggagguggaggcugcagu

SEQ ID NO: 332257 - RNA, 32 nt, Human
aucaccugagccugggaaguggagguugcagu

SEQ ID NO: 332258 - RNA, 32 nt, Human
aucaccugagccugggaggcugaggcgggaga

SEQ ID NO: 332259 - RNA, 32 nt, Human
aucaccugagccugggaggucgaggcugcagc

SEQ ID NO: 332260 - RNA, 32 nt, Human
aucaccugaggccaggaagaccagccuggcca

SEQ ID NO: 332261 - RNA, 32 nt, Human
aucaccugagguauggcaaacauggugaaacg

SEQ ID NO: 332262 - RNA, 32 nt, Human
aucaccugaggucagcaguuugagacuagccu

SEQ ID NO: 332263 - RNA, 32 nt, Human
aucaccugaggucaggaguuugagacuagccu

SEQ ID NO: 332264 - RNA, 32 nt, Human
aucaccugaguccaggaggucgaggcugcagu

SEQ ID NO: 332265 - RNA, 26 nt, Human
aucaccugcugagccaguuucccugg

SEQ ID NO: 332266 - RNA, 32 nt, Human
aucaccugcugccccgcagaccccugucccuu

SEQ ID NO: 332267 - RNA, 32 nt, Human
aucaccugcuguaugccgaucaucucagaaag

SEQ ID NO: 332268 - RNA, 32 nt, Human
aucaccugggccacugcaaagacuucacuggg

SEQ ID NO: 332269 - RNA, 32 nt, Human
aucaccugggcuggagugcgauggcaugaucu

SEQ ID NO: 332270 - RNA, 32 nt, Human
aucaccuggggucaggaguucaagaccagccu

SEQ ID NO: 332271 - RNA, 28 nt, Human
aucaccuggggugcugccucucacacau

SEQ ID NO: 332272 - RNA, 32 nt, Human
aucaccugugcugcuuuccuccaccuucuccg

SEQ ID NO: 332273 - RNA, 32 nt, Human
aucaccuuaccaucagagcagugcagugcucu

SEQ ID NO: 332274 - RNA, 32 nt, Human
aucaccuugucaagggcucuguuuacaucuau

SEQ ID NO: 332275 - RNA, 32 nt, Human
aucaccuuuggugggggcagggccugguggca

SEQ ID NO: 332276 - RNA, 32 nt, Human
aucacgacacugcacuccagccugggcaacgg

SEQ ID NO: 332277 - RNA, 32 nt, Human
aucacgaccauccuggcuaacauggugguacc

SEQ ID NO: 332278 - RNA, 32 nt, Human
aucacgagccacuuccacuccuggguggccug

SEQ ID NO: 332279 - RNA, 32 nt, Human
aucacgauccugcacuccagccugggcaacag

SEQ ID NO: 332280 - RNA, 22 nt, Human
aucacgccacagcacuccagcc

SEQ ID NO: 332281 - RNA, 32 nt, Human
aucacgccacagcacuccagccugggcgacag

SEQ ID NO: 332282 - RNA, 32 nt, Human
auccugggagagcaaggagccagcaagucuag

SEQ ID NO: 332283 - RNA, 32 nt, Human
auccugggagcaaggcccugcagcuccacgag

SEQ ID NO: 332284 - RNA, 32 nt, Human
auccugggaggcagagguuguagugagccgag

SEQ ID NO: 332285 - RNA, 32 nt, Human
auccugggagggaggacuagaggcucaggggg

SEQ ID NO: 332286 - RNA, 32 nt, Human
auccugggaggugggagcuggaauggggagca

SEQ ID NO: 332287 - RNA, 32 nt, Human
auccugggcaagucacuuaaccucuuuaggcc

SEQ ID NO: 332288 - RNA, 32 nt, Human
auccugggcucaagugauccuccugccugggc

SEQ ID NO: 332289 - RNA, 32 nt, Human
auccugggcucccucuugauuaguaggugaca

SEQ ID NO: 332290 - RNA, 32 nt, Human
auccugggcucugagcuaggugcauugcucug

SEQ ID NO: 332291 - RNA, 32 nt, Human
auccuggggagaauggaggagcacacagaggc

SEQ ID NO: 332292 - RNA, 32 nt, Human
auccuggggccccagcucuggguccucaugua

SEQ ID NO: 332293 - RNA, 32 nt, Human
auccuggggcucccuucaucuccagggagucc

SEQ ID NO: 332294 - RNA, 32 nt, Human
auccugggggacccaauguaggagcugccuug

SEQ ID NO: 332295 - RNA, 32 nt, Human
auccuggguagauagagcagggcagcgacgga

SEQ ID NO: 332296 - RNA, 32 nt, Human
auccuggguggguggagcuggggagggcaugg

SEQ ID NO: 332297 - RNA, 32 nt, Human
auccuggguguacaguggugaaauggggagug

SEQ ID NO: 332298 - RNA, 32 nt, Human
auccugggugucucugagacccaucuccugcc

SEQ ID NO: 332299 - RNA, 32 nt, Human
auccuggguuccaaaggggcagguaauggcaa

SEQ ID NO: 332300 - RNA, 32 nt, Human
auccugguaguuuaaaugugccugauucaucu

SEQ ID NO: 332301 - RNA, 32 nt, Human
auccuggucagcugccccaaugugaccugggg

SEQ ID NO: 332302 - RNA, 32 nt, Human
auccuggucauuuaaaugugccugauucaucu

SEQ ID NO: 332303 - RNA, 32 nt, Human
auccuggucuacaaccuggucuauguggagaa

SEQ ID NO: 332304 - RNA, 32 nt, Human
auccuggugaagccacacccagccggccuggu

SEQ ID NO: 332305 - RNA, 29 nt, Human
auccuggugguucuuacaucccccucugc

SEQ ID NO: 332306 - RNA, 32 nt, Human
auccugguguuucucuguaucuucucacuucu

SEQ ID NO: 332307 - RNA, 32 nt, Human
auccugguuaccacucuuuuacugugcacaua

SEQ ID NO: 332308 - RNA, 32 nt, Human
auccugguucacugcacccucugccucccagg

SEQ ID NO: 332309 - RNA, 24 nt, Human
auccugguuucugaagacacaucc

SEQ ID NO: 332310 - RNA, 32 nt, Human
auccuguaagucuaaggauggcacaauggcaa

SEQ ID NO: 332311 - RNA, 32 nt, Human
auccuguacaagugcucaguuccaaugugccc

SEQ ID NO: 332312 - RNA, 32 nt, Human
auccuguccacucagaguucugagggggccag

SEQ ID NO: 332313 - RNA, 32 nt, Human
auccugucccacagcccugccuggauuuguau

SEQ ID NO: 332314 - RNA, 32 nt, Human
auccugucuguuccuguucuucucccagccuc

SEQ ID NO: 332315 - RNA, 32 nt, Human
auccugucuuccacggcucuccugucccaccu

SEQ ID NO: 332316 - RNA, 32 nt, Human
auccugucuucuucugugcugccugguuugac

SEQ ID NO: 332317 - RNA, 32 nt, Human
auccugucuugggaacuacuccaccucacugu

SEQ ID NO: 332318 - RNA, 32 nt, Human
auccugucuuugggggcaaugugucaaaaguc

SEQ ID NO: 332319 - RNA, 20 nt, Human
auccugugacuguguacugg

SEQ ID NO: 332320 - RNA, 32 nt, Human
auccugugagccuggcuccccaggagggcccc

SEQ ID NO: 332321 - RNA, 32 nt, Human
auccugugcaggggccaccugggagauagcag

SEQ ID NO: 332322 - RNA, 32 nt, Human
auccugugcaucaccauuguguccugugcucc

SEQ ID NO: 332323 - RNA, 32 nt, Human
auccugugcuugagggucuccuuuccuguucu

SEQ ID NO: 332324 - RNA, 32 nt, Human
auccuguggagggagaggagagcccagucauu

SEQ ID NO: 332325 - RNA, 32 nt, Human
auccuguggcauuauccccuggagucauauag

SEQ ID NO: 332326 - RNA, 32 nt, Human
auccugugggccacugcacaucugccucucuc

SEQ ID NO: 332327 - RNA, 32 nt, Human
auccugugugccugacagccagucugcuguaa

SEQ ID NO: 332328 - RNA, 32 nt, Human
auccuguuagucacugugguucaucaaauaaa

SEQ ID NO: 332329 - RNA, 32 nt, Human
auccuguucccauggguuuucugcaggggaag

SEQ ID NO: 332330 - RNA, 32 nt, Human
auccuguuguguuccuggagaagcuacagccu

SEQ ID NO: 332331 - RNA, 32 nt, Human
auccuguuuccucugcugacccagcugggagg

SEQ ID NO: 332332 - RNA, 32 nt, Human
auccuguuugccguuuccaccaugacugaagg

SEQ ID NO: 332333 - RNA, 32 nt, Human
auccuuaaaauacaaaugcuauaaaaauuccu

SEQ ID NO: 332334 - RNA, 32 nt, Human
auccuuaaaggauacacacaugacaggaagga

SEQ ID NO: 332335 - RNA, 32 nt, Human
auccuuaaauccugggcucugagcuaggugca

SEQ ID NO: 332336 - RNA, 32 nt, Human
auccuuaaauuuuuaugacacccuuuguaauc

SEQ ID NO: 332337 - RNA, 32 nt, Human
auccuuaacacaucugugguccagaagagcgc

SEQ ID NO: 332338 - RNA, 32 nt, Human
auccuuaaccaccgcauaugcaugccaggcug

SEQ ID NO: 332339 - RNA, 31 nt, Human
auccuuaccccuccugggccuccguuguguu

SEQ ID NO: 332340 - RNA, 32 nt, Human
auccuuagagucuauugaaacugcaaagaucc

SEQ ID NO: 332341 - RNA, 32 nt, Human
auccuuagcugaagcggggagacucacucucc

SEQ ID NO: 332342 - RNA, 32 nt, Human
auccuuaggccucccucucccuucccucuguc

SEQ ID NO: 332343 - RNA, 32 nt, Human
auccuuagguucuccccuucccccuggugccc

SEQ ID NO: 332344 - RNA, 32 nt, Human
auccuuaucacauccugcugggcaaaggccca

SEQ ID NO: 332345 - RNA, 32 nt, Human
auccuuaugcccacacugggagaggucugauu

SEQ ID NO: 332346 - RNA, 32 nt, Human
auccuuauucacucugaauguuuccccucuac

SEQ ID NO: 332347 - RNA, 32 nt, Human
auccuucagaccccuccagacauccaaucaga

SEQ ID NO: 332348 - RNA, 32 nt, Human
auccuucagcagagaggagcugacaggguacc

SEQ ID NO: 332349 - RNA, 32 nt, Human
auccuucagccugucuuguuucuucuuuaugu

SEQ ID NO: 332350 - RNA, 32 nt, Human
auccuucagccuugcuaaacugugaguucuca

SEQ ID NO: 332351 - RNA, 32 nt, Human
auccuucagggcauucugcccagcacaccuuu

SEQ ID NO: 332352 - RNA, 32 nt, Human
auccuucagguuccagucuggcuaucucuguc

SEQ ID NO: 332353 - RNA, 32 nt, Human
auccuucaguggcucucaucaccuucaggaaa

SEQ ID NO: 332354 - RNA, 32 nt, Human
auccuucauggaggccagagggccguggucua

SEQ ID NO: 332355 - RNA, 32 nt, Human
auccuucauucugaauaagauggcaguguucu

SEQ ID NO: 332356 - RNA, 32 nt, Human
auccuucauuuucugugagguaaagaagugga

SEQ ID NO: 332357 - RNA, 32 nt, Human
auccuuccacagugaccccaguuuuuauuucu

SEQ ID NO: 332358 - RNA, 32 nt, Human
auccuuccacccuugacugccaaaaaugugug

SEQ ID NO: 332359 - RNA, 32 nt, Human
auccuuccagagaagucucugggaccuuuugu

SEQ ID NO: 332360 - RNA, 22 nt, Human
auccuuccauuucuucugcaca

SEQ ID NO: 332361 - RNA, 32 nt, Human
auccuuccauuugauccucacaacagccaugu

SEQ ID NO: 332362 - RNA, 32 nt, Human
auccuucccacacuccuccaugguugcccucc

SEQ ID NO: 332363 - RNA, 32 nt, Human
auccuuccccaaagagaucucuggccuuuuac

SEQ ID NO: 332364 - RNA, 32 nt, Human
auccuuccccucaagccugggcucauggagcc

SEQ ID NO: 332365 - RNA, 32 nt, Human
auccuuccuaucucuccaugggacuagacugc

SEQ ID NO: 332366 - RNA, 32 nt, Human
auccuuccucagcacacccccaaccaauccac

SEQ ID NO: 332367 - RNA, 32 nt, Human
auccuuccucauuguggcaaggaguuucuuuc

SEQ ID NO: 332368 - RNA, 32 nt, Human
auccuuccuccaccuagcucgccaucucgccc

SEQ ID NO: 332369 - RNA, 32 nt, Human
auccuuccugcucaagguaugugugcccaugg

SEQ ID NO: 332370 - RNA, 32 nt, Human
auccuuccugugguugcuggagcugcuggcag

SEQ ID NO: 332371 - RNA, 18 nt, Human
auccuuccuucccaccca

SEQ ID NO: 332372 - RNA, 32 nt, Human
auccuucggaaggccuuccuggaaucccaccu

SEQ ID NO: 332373 - RNA, 32 nt, Human
auccuucggaguagcugggauuacaggcaggu

SEQ ID NO: 332374 - RNA, 32 nt, Human
auccuucuaaaaaggggaaauuuggacacaga

SEQ ID NO: 332375 - RNA, 32 nt, Human
auccuucuaaagugcugggauuacagguguga

SEQ ID NO: 332376 - RNA, 32 nt, Human
auccuucuaccucugcuaugcugaaccccuca

SEQ ID NO: 332377 - RNA, 32 nt, Human
auccuucucugagaccugcaccaauaagacua

SEQ ID NO: 332378 - RNA, 32 nt, Human
auccuucucugccucuuaacuccuucacgagg

SEQ ID NO: 332379 - RNA, 32 nt, Human
auccuucucuuuggacaucuucccaagaaacu

SEQ ID NO: 332380 - RNA, 32 nt, Human
auccuucugcuuguuuacaacuaugaucuucu

SEQ ID NO: 332381 - RNA, 32 nt, Human
auccuucuggaaggcauagaacacgguuacag

SEQ ID NO: 332382 - RNA, 32 nt, Human
auccuucugggcggugaaggggagaggcagcc

SEQ ID NO: 332383 - RNA, 32 nt, Human
auccuucuggggagaaguagggggaggaauau

SEQ ID NO: 332384 - RNA, 32 nt, Human
auccuucugucucuuuguuucugagcuuuccu

SEQ ID NO: 332385 - RNA, 32 nt, Human
auccuucuuacagcucuccaugaugccucaga

SEQ ID NO: 332386 - RNA, 32 nt, Human
auccuucuuagaagcuucgaacucaaaaucau

SEQ ID NO: 332387 - RNA, 32 nt, Human
auccuucuucacuuaggaagaguguugugaaa

SEQ ID NO: 332388 - RNA, 32 nt, Human
auccuucuuccucugccucccaaguagcuggg

SEQ ID NO: 332389 - RNA, 32 nt, Human
auccuucuuccucugcuguuggaugagaguga

SEQ ID NO: 332390 - RNA, 32 nt, Human
auccuucuuucuucuuuucacgauaacuuugg

SEQ ID NO: 332391 - RNA, 32 nt, Human
auccuucuuucuucuuuucaugauaaauuugu

SEQ ID NO: 332392 - RNA, 32 nt, Human
auccuugacuuagauucugguggagagaagug

SEQ ID NO: 332393 - RNA, 32 nt, Human
auccuugagcccaggagguugaggcugcagug

SEQ ID NO: 332394 - RNA, 32 nt, Human
auccuugaggccaggagguugaggcugcagug

SEQ ID NO: 332395 - RNA, 31 nt, Human
auccuugcacuuucuguuaucagggcccaaa

SEQ ID NO: 332396 - RNA, 19 nt, Human
auccuugcagcugaggagg

SEQ ID NO: 332397 - RNA, 32 nt, Human
auccuugccccaccccuugcuuccagaaaggg

SEQ ID NO: 332398 - RNA, 32 nt, Human
auccuugccugcugaacccagccugggccugg

SEQ ID NO: 332399 - RNA, 32 nt, Human
auccuugcucccaacgucuacuucuccuaccu

SEQ ID NO: 332400 - RNA, 32 nt, Human
auccuugcugcuuuauccuccuggaccuucag

SEQ ID NO: 332401 - RNA, 32 nt, Human
auccuugcuguggagcucuggaacacucucua

SEQ ID NO: 332402 - RNA, 32 nt, Human
auccuugcugugguagagguccucuacccauu

SEQ ID NO: 332403 - RNA, 31 nt, Human
auccuugcuucucuguggccugugccauggg

SEQ ID NO: 332404 - RNA, 32 nt, Human
auccuugcuucucuguggccugugccaugggg

SEQ ID NO: 332405 - RNA, 32 nt, Human
auccuuggacccacaguggagugcugguccgu

SEQ ID NO: 332406 - RNA, 32 nt, Human
auccuuggagcaguaguuuuuauacuuaugua

SEQ ID NO: 332407 - RNA, 32 nt, Human
auccuuggagcuuauguuucagacaagaauua

SEQ ID NO: 332408 - RNA, 32 nt, Human
auccuuggaggaggaggaagaggaggccacug

SEQ ID NO: 332409 - RNA, 32 nt, Human
auccuugggauuaaaguuuugguuacaaauug

SEQ ID NO: 332410 - RNA, 32 nt, Human
auccuugggcccagcuguagcggacaggugca

SEQ ID NO: 332411 - RNA, 32 nt, Human
auccuuggucacugccagcagaggucugggca

SEQ ID NO: 332412 - RNA, 32 nt, Human
auccuuguacagcaaucuccuccuccacugcc

SEQ ID NO: 332413 - RNA, 30 nt, Human
auccuuguacucuccaagcuccugucuuuc

SEQ ID NO: 332414 - RNA, 32 nt, Human
auccuugucugggucuaccaggaacgcuucau

SEQ ID NO: 332415 - RNA, 32 nt, Human
auccuuuaaacccaaggaagguggugucuauc

SEQ ID NO: 332416 - RNA, 32 nt, Human
auccuuuaagucugcuuaauuacuugaaaauu

SEQ ID NO: 332417 - RNA, 32 nt, Human
auccuuuacaauuuguaaaauucuaugaauuc

SEQ ID NO: 332418 - RNA, 32 nt, Human
auccuuuaguacaguguuuccacucuuucugc

SEQ ID NO: 332419 - RNA, 32 nt, Human
auccuuuauccagcacagcuuuaccaagcagc

SEQ ID NO: 332420 - RNA, 32 nt, Human
auccuuuauuuuuguaccauggggugggcccc

SEQ ID NO: 332421 - RNA, 32 nt, Human
auccuuucaaaccaaccaaacuacuauuagau

SEQ ID NO: 332422 - RNA, 31 nt, Human
auccuuucaauaaacaagacuuguagaaaau

SEQ ID NO: 332423 - RNA, 32 nt, Human
auccuuucaauacuugcugaacuugaaaaccu

SEQ ID NO: 332424 - RNA, 32 nt, Human
auccuuucauuucucagcucccuggauuccuu

SEQ ID NO: 332425 - RNA, 32 nt, Human
auccuuuccaccaugcucuccccuucaucaag

SEQ ID NO: 332426 - RNA, 32 nt, Human
auccuuuccucuagaagaccugagucuuccug

SEQ ID NO: 332427 - RNA, 32 nt, Human
auccuuuccugccugugcucucuccccuguuu

SEQ ID NO: 332428 - RNA, 32 nt, Human
auccuuucuaccucuggcugaaggaguggugc

SEQ ID NO: 332429 - RNA, 32 nt, Human
auccuuucuccacacagcaaugacauuuauca

SEQ ID NO: 332430 - RNA, 32 nt, Human
auccuuucuccaccauggacucaaucugagaa

SEQ ID NO: 332431 - RNA, 32 nt, Human
auccuuucuccucccucuccuuuuccugccac

SEQ ID NO: 332432 - RNA, 32 nt, Human
auccuuucuccuucugaacuagccguugcuca

SEQ ID NO: 332433 - RNA, 32 nt, Human
auccuuucugucuccagcuguuucuuggaacc

SEQ ID NO: 332434 - RNA, 32 nt, Human
auccuuugcauccuuccuccacagacauggcc

SEQ ID NO: 332435 - RNA, 32 nt, Human
auccuuugcuucauauucccuaccuggccccc

SEQ ID NO: 332436 - RNA, 32 nt, Human
auccuuuguacaaaugaaaauuacucuuaauu

SEQ ID NO: 332437 - RNA, 32 nt, Human
auccuuuuacuuuuugccccuuccacuuugag

SEQ ID NO: 332438 - RNA, 32 nt, Human
auccuuuuauauuuuucccuuccccacccccu

SEQ ID NO: 332439 - RNA, 32 nt, Human
auccuuuuaucucaguuauuugcccaucacaa

SEQ ID NO: 332440 - RNA, 32 nt, Human
auccuuuuccccucagccacugcaagcuggag

SEQ ID NO: 332441 - RNA, 32 nt, Human
auccuuuuccuucauucugucaccuuccacca

SEQ ID NO: 332442 - RNA, 32 nt, Human
auccuuuuccuugacuucucaacccagccuga

SEQ ID NO: 332443 - RNA, 32 nt, Human
auccuuuucuauuuucuugaugcuguuuacaa

SEQ ID NO: 332444 - RNA, 32 nt, Human
auccuuuugaaucucuccccugccucaccuuu

SEQ ID NO: 332445 - RNA, 32 nt, Human
aucgaaaaaccccaggccugagaaauaaagua

SEQ ID NO: 332446 - RNA, 32 nt, Human
aucgaaaacuuggagucggaggccguguucga

SEQ ID NO: 332447 - RNA, 32 nt, Human
aucgaaaagaugagcauucugggcgugcggag

SEQ ID NO: 332448 - RNA, 32 nt, Human
aucgaaacaauccuggccaacauggugaaacc

SEQ ID NO: 332449 - RNA, 32 nt, Human
aucgaaacaccguuggccgagccugggcggga

SEQ ID NO: 332450 - RNA, 32 nt, Human
aucgaaacgacagcgcuggaggagacucagga

SEQ ID NO: 332451 - RNA, 32 nt, Human
aucgaaacugagagcuccugggcaggcucggc

SEQ ID NO: 332452 - RNA, 19 nt, Human
aucgaaagggaccaagcag

SEQ ID NO: 332453 - RNA, 32 nt, Human
aucgaaaucagccuggccaagaugaugaagcc

SEQ ID NO: 332454 - RNA, 32 nt, Human
aucgaaccauuguacuccagccugggugacag

SEQ ID NO: 332455 - RNA, 22 nt, Human
aucgaacucugcacuucucucu

SEQ ID NO: 332456 - RNA, 32 nt, Human
aucgaacucugcacuucucucuccuuuacgag

SEQ ID NO: 332457 - RNA, 23 nt, Human
aucgaagacugagugacaggaau

SEQ ID NO: 332458 - RNA, 32 nt, Human
aucgaagagcaggggguugugaauuuccaggu

SEQ ID NO: 332459 - RNA, 32 nt, Human
aucgaagcuauacuugagaaaggugaaucuga

SEQ ID NO: 332460 - RNA, 32 nt, Human
aucgaaggccaggagucguggagcuccagugc

SEQ ID NO: 332461 - RNA, 32 nt, Human
aucgaaggcccaauaaauauuuguagaauaaa

SEQ ID NO: 332462 - RNA, 32 nt, Human
aucgaagugaaacauuugucucuaauacucaa

SEQ ID NO: 332463 - RNA, 32 nt, Human
aucgaauagaauagggguaaaagggaggagga

SEQ ID NO: 332464 - RNA, 32 nt, Human
aucgacaaugagcaccaccaucaaugaccacc

SEQ ID NO: 332465 - RNA, 32 nt, Human
aucgacacacaaaacagugcacauuuaguuca

SEQ ID NO: 332466 - RNA, 32 nt, Human
aucgacagcaugcuggccaacguggugaaacc

SEQ ID NO: 332467 - RNA, 32 nt, Human
aucgaccccugccucuguacccacuugaucua

SEQ ID NO: 332468 - RNA, 32 nt, Human
aucgacuuuuacagauuguggccagugaggau

SEQ ID NO: 332469 - RNA, 32 nt, Human
aucgagaacagccuggcuaacacggugaaacc

SEQ ID NO: 332470 - RNA, 32 nt, Human
aucgagacaauccuggccaacauggugaaacc

SEQ ID NO: 332471 - RNA, 32 nt, Human
aucgagaccacccuggcuaacauggugaaagc

SEQ ID NO: 332472 - RNA, 32 nt, Human
aucgagaccagccugaccaacauggugaaacc

SEQ ID NO: 332473 - RNA, 32 nt, Human
aucgagaccagccuggccaacauaguaaaacc

SEQ ID NO: 332474 - RNA, 32 nt, Human
aucgagaccagccuggccaacauggcgaaacc

SEQ ID NO: 332475 - RNA, 32 nt, Human
aucgagaccagccuggccaacauggugaaacc

SEQ ID NO: 332476 - RNA, 32 nt, Human
aucgagaccagccuggccaacguggugaaacc

SEQ ID NO: 332477 - RNA, 32 nt, Human
aucgagaccagccuggccaauauggugaaacc

SEQ ID NO: 332478 - RNA, 32 nt, Human
aucgagaccagccuggcuaacacagugaaacc

SEQ ID NO: 332479 - RNA, 32 nt, Human
aucgagaccagccuggcuaacacggugaaacc

SEQ ID NO: 332480 - RNA, 32 nt, Human
aucgagaccaucccggcuaacauggugaaacc

SEQ ID NO: 332481 - RNA, 32 nt, Human
aucgagaccauccuagccaacaucgugaaacc

SEQ ID NO: 332482 - RNA, 32 nt, Human
aucgagaccauccugcccaacauggugaaacc

SEQ ID NO: 332483 - RNA, 32 nt, Human
aucgagaccauccuggauaacacggagaaacc

SEQ ID NO: 332484 - RNA, 32 nt, Human
aucgagaccauccuggccaaaauggugaaacc

SEQ ID NO: 332485 - RNA, 32 nt, Human
aucgagaccauccuggccaacacggugaaacc

SEQ ID NO: 332486 - RNA, 32 nt, Human
aucgagaccauccuggccaacaucgugaaacc

SEQ ID NO: 332487 - RNA, 32 nt, Human
aucgagaccauccuggccaacaugaugaaacc

SEQ ID NO: 332488 - RNA, 32 nt, Human
aucgagaccauccuggccaacauggugaaaca

SEQ ID NO: 332489 - RNA, 32 nt, Human
aucgagaccauccuggccaacauggugaaacc

SEQ ID NO: 332490 - RNA, 32 nt, Human
aucgagaccauccuggccaacauuguaaaacc

SEQ ID NO: 332491 - RNA, 32 nt, Human
aucgagaccauccuggccaaccaugaugaaac

SEQ ID NO: 332492 - RNA, 32 nt, Human
aucgagaccauccuggccaacguggugaaacc

SEQ ID NO: 332493 - RNA, 32 nt, Human
aucgagaccauccuggccaacguggugaagcc

SEQ ID NO: 332494 - RNA, 32 nt, Human
aucgagaccauccuggccaauauggugaaacc

SEQ ID NO: 332495 - RNA, 32 nt, Human
aucgagaccauccuggcgaacauggugaaacc

SEQ ID NO: 332496 - RNA, 32 nt, Human
aucgagaccauccuggcgaacauggugagacc

SEQ ID NO: 332497 - RNA, 32 nt, Human
aucgagaccauccuggcuaacaugguaaaacc

SEQ ID NO: 332498 - RNA, 32 nt, Human
aucgagaccauccuggcuaacauggugaaacc

SEQ ID NO: 332499 - RNA, 32 nt, Human
aucgagaccauccuguuuaacacggggaaacc

SEQ ID NO: 332500 - RNA, 32 nt, Human
aucgagaccaucguggcuaacauggugaaacc

SEQ ID NO: 332501 - RNA, 32 nt, Human
aucgagaccaucuuggccaacauggugaaacc

SEQ ID NO: 332502 - RNA, 32 nt, Human
aucgagaccaucuuggcuaacauggugaaacc

SEQ ID NO: 332503 - RNA, 32 nt, Human
aucgagaccaugcuggcuaacauggugaaacc

SEQ ID NO: 332504 - RNA, 32 nt, Human
aucgagaccauggugaaaccccgucucuacua

SEQ ID NO: 332505 - RNA, 32 nt, Human
aucgagaccauucuggccaacauagugaaacc

SEQ ID NO: 332506 - RNA, 32 nt, Human
aucgagaccgcccuggcuaacauggugaaaca

SEQ ID NO: 332507 - RNA, 32 nt, Human
aucgagaccggguggagaaugaggcagaaaaa

SEQ ID NO: 332508 - RNA, 32 nt, Human
aucgagaccguccuggccgacauggugaaacc

SEQ ID NO: 332509 - RNA, 32 nt, Human
aucgagacgauccuggccaacacggugaaacc

SEQ ID NO: 332510 - RNA, 32 nt, Human
aucgagagggcucccaaacaucugcagcugau

SEQ ID NO: 332511 - RNA, 32 nt, Human
aucgagaucagccuggccaacauggugaaacc

SEQ ID NO: 332512 - RNA, 32 nt, Human
aucgagaugccuaugaggagaucgugaggcug

SEQ ID NO: 332513 - RNA, 32 nt, Human
aucgagccacugcacuccagccugggcaacag

SEQ ID NO: 332514 - RNA, 32 nt, Human
aucgagccacugcacuccagccugggcagcug

SEQ ID NO: 332515 - RNA, 32 nt, Human
aucgagccacugcacuccagccugggcgacag

SEQ ID NO: 332516 - RNA, 32 nt, Human
aucgagccacugcacuccagccugggugacag

SEQ ID NO: 332517 - RNA, 32 nt, Human
aucgagccacugcacuccagccugggugauga

SEQ ID NO: 332518 - RNA, 32 nt, Human
aucgagccacugcacuccugggcaacagagca

SEQ ID NO: 332519 - RNA, 32 nt, Human
aucgagccacugcauuccagccugggcgaaag

SEQ ID NO: 332520 - RNA, 32 nt, Human
aucgagccauugcacuccagccuggacagcag

SEQ ID NO: 332521 - RNA, 32 nt, Human
aucgagccauugcacuccagccugggcaacaa

SEQ ID NO: 332522 - RNA, 32 nt, Human
aucgagccggcccagcuucugaagggagaugu

SEQ ID NO: 332523 - RNA, 32 nt, Human
aucgagcuccaagcuggugcccugccaagcuu

SEQ ID NO: 332524 - RNA, 32 nt, Human
aucgagcuggacugacuggccaggccacgugg

SEQ ID NO: 332525 - RNA, 32 nt, Human
aucgaggaaccagagccauggacucuacacug

SEQ ID NO: 332526 - RNA, 32 nt, Human
aucgaggacucuccaaacccccaaagcagaga

SEQ ID NO: 332527 - RNA, 32 nt, Human
aucgaggaugcuggcccugcggcugcucaacg

SEQ ID NO: 332528 - RNA, 32 nt, Human
aucgaggcacauacuucaccacugucacagga

SEQ ID NO: 332529 - RNA, 32 nt, Human
aucgaggcugcaggauaugcucagacucuaga

SEQ ID NO: 332530 - RNA, 32 nt, Human
aucgaggcuguauuuccaucucuauggggucc

SEQ ID NO: 332531 - RNA, 32 nt, Human
aucgagggagcugagccgagagaaagagccgc

SEQ ID NO: 332532 - RNA, 32 nt, Human
aucgagggagggagggagaagagucacacaca

SEQ ID NO: 332533 - RNA, 32 nt, Human
aucgaggugaccugggcugagucccgggagug

SEQ ID NO: 332534 - RNA, 32 nt, Human
aucgaggugaccugggcugaguccugggagug

SEQ ID NO: 332535 - RNA, 32 nt, Human
aucgaguaguaacagccacuccaacucuccac

SEQ ID NO: 332536 - RNA, 32 nt, Human
aucgagucccuccuccucuucucccaugccuu

SEQ ID NO: 332537 - RNA, 32 nt, Human
aucgaguuacugcacuccagccugggugacaa

SEQ ID NO: 332538 - RNA, 32 nt, Human
aucgauacuguuucugugccuuauguuuuucg

SEQ ID NO: 332539 - RNA, 32 nt, Human
aucgauagcccaggcaggaguacaguggcaca

SEQ ID NO: 332540 - RNA, 32 nt, Human
aucgaucaagugcugugggagcuguuuuaagg

SEQ ID NO: 332541 - RNA, 32 nt, Human
aucgaugacaggcugguccugaggauacagcu

SEQ ID NO: 332542 - RNA, 32 nt, Human
aucgaugagccccugaccccuggguucugagg

SEQ ID NO: 332543 - RNA, 32 nt, Human
aucgaugcaugccacaacaugggugaaccuag

SEQ ID NO: 332544 - RNA, 32 nt, Human
aucgauggagaugcuucuagccucccaguagg

SEQ ID NO: 332545 - RNA, 32 nt, Human
aucgauucacguguaagccucuaccuccugca

SEQ ID NO: 332546 - RNA, 32 nt, Human
aucgauuuccuaaaggaccgugagugauauac

SEQ ID NO: 332547 - RNA, 32 nt, Human
aucgcaaaauuauucugaagcuucugcaguca

SEQ ID NO: 332548 - RNA, 32 nt, Human
aucgcaaagaggaugcgaaagggauggaggac

SEQ ID NO: 332549 - RNA, 32 nt, Human
aucgcaacacugcacuccagccugggcgacag

SEQ ID NO: 332550 - RNA, 32 nt, Human
aucgcaacacugcacuccagccugggugacag

SEQ ID NO: 332551 - RNA, 32 nt, Human
aucgcaccacagcgcuccagccuggucgacag

SEQ ID NO: 332552 - RNA, 32 nt, Human
aucgcaccaccacacuccagccugggugacag

SEQ ID NO: 332553 - RNA, 32 nt, Human
aucgcaccacggcacuccagccuggcgacaga

SEQ ID NO: 332554 - RNA, 32 nt, Human
aucgcaccacugaacuccagccugggcgacaa

SEQ ID NO: 332555 - RNA, 32 nt, Human
aucgcaccacugcacccaaaccuggggagaga

SEQ ID NO: 332556 - RNA, 32 nt, Human
aucgcaccacugcaccccagccugggcaacaa

SEQ ID NO: 332557 - RNA, 32 nt, Human
aucgcaccacugcaccccagcgugggcaacag

SEQ ID NO: 332558 - RNA, 32 nt, Human
aucgcaccacugcacgcacuccagccugggug

SEQ ID NO: 332559 - RNA, 32 nt, Human
aucgcaccacugcacuacagccugggcgacag

SEQ ID NO: 332560 - RNA, 32 nt, Human
aucgcaccacugcacucaagccugggcgacag

SEQ ID NO: 332561 - RNA, 32 nt, Human
aucgcaccacugcacuccaaccugggcaacag

SEQ ID NO: 332562 - RNA, 32 nt, Human
aucgcaccacugcacuccaaccugggugacga

SEQ ID NO: 332563 - RNA, 32 nt, Human
aucgcaccacugcacuccaaucugggcaagag

SEQ ID NO: 332564 - RNA, 32 nt, Human
aucgcaccacugcacuccagcacuccagccug

SEQ ID NO: 332565 - RNA, 32 nt, Human
aucgcaccacugcacuccagccuaggcgacgg

SEQ ID NO: 332566 - RNA, 32 nt, Human
aucgcaccacugcacuccagccuggaagacca

SEQ ID NO: 332567 - RNA, 32 nt, Human
aucgcaccacugcacuccagccuggacaacag

SEQ ID NO: 332568 - RNA, 32 nt, Human
aucgcaccacugcacuccagccugggagacag

SEQ ID NO: 332569 - RNA, 32 nt, Human
aucgcaccacugcacuccagccugggagauac

SEQ ID NO: 332570 - RNA, 32 nt, Human
aucgcaccacugcacuccagccugggcaacaa

SEQ ID NO: 332571 - RNA, 32 nt, Human
aucgcaccacugcacuccagccugggcaacac

SEQ ID NO: 332572 - RNA, 32 nt, Human
aucgcaccacugcacuccagccugggcaacag

SEQ ID NO: 332573 - RNA, 32 nt, Human
aucgcaccacugcacuccagccugggcaacau

SEQ ID NO: 332574 - RNA, 32 nt, Human
aucgcaccacugcacuccagccugggcgaaag

SEQ ID NO: 332575 - RNA, 32 nt, Human
aucgcaccacugcacuccagccugggcgacaa

SEQ ID NO: 332576 - RNA, 32 nt, Human
aucgcaccacugcacuccagccugggcgacag

SEQ ID NO: 332577 - RNA, 32 nt, Human
aucgcaccacugcacuccagccugggcggcag

SEQ ID NO: 332578 - RNA, 32 nt, Human
aucgcaccacugcacuccagccugggcuacag

SEQ ID NO: 332579 - RNA, 32 nt, Human
aucgcaccacugcacuccagccugggugacaa

SEQ ID NO: 332580 - RNA, 32 nt, Human
aucgcaccacugcacuccagccugggugacag

SEQ ID NO: 332581 - RNA, 32 nt, Human
aucgcaccacugcacuccagccugggugaugg

SEQ ID NO: 332582 - RNA, 32 nt, Human
aucgcaccacugcacuccagccuggguuacag

SEQ ID NO: 332583 - RNA, 32 nt, Human
aucgcaccacugcacuccagccuggucgacag

SEQ ID NO: 332584 - RNA, 32 nt, Human
aucgcaccacugcacuccagccuggugacaga

SEQ ID NO: 332585 - RNA, 32 nt, Human
aucgcaccacugcacuccagccugguuacaga

SEQ ID NO: 332586 - RNA, 32 nt, Human
aucgcaccacugcacuccagcucgggugacaa

SEQ ID NO: 332587 - RNA, 32 nt, Human
aucgcaccacugcacuccagcuuggaggaaag

SEQ ID NO: 332588 - RNA, 32 nt, Human
aucgcaccacugcacuccagcuugguucaugg

SEQ ID NO: 332589 - RNA, 32 nt, Human
aucgcaccacugcacuccagucuggcaacaga

SEQ ID NO: 332590 - RNA, 32 nt, Human
aucgcaccacugcacucccgcuuggcaauaga

SEQ ID NO: 332591 - RNA, 32 nt, Human
aucgcaccacugcacucuagccugggugaaag

SEQ ID NO: 332592 - RNA, 32 nt, Human
aucgcaccacugcacucuagccugggugaccg

SEQ ID NO: 332593 - RNA, 32 nt, Human
aucgcaccacugcacucuagccuuggcaacag

SEQ ID NO: 332594 - RNA, 32 nt, Human
aucgcaccacugcacucuagcuugggcaacag

SEQ ID NO: 332595 - RNA, 32 nt, Human
aucgcaccacugcacugcagccuggcaacaag

SEQ ID NO: 332596 - RNA, 32 nt, Human
aucgcaccacugcacuucagccugggugacag

SEQ ID NO: 332597 - RNA, 32 nt, Human
aucgcaccacugcauuccagccugggcaacag

SEQ ID NO: 332598 - RNA, 32 nt, Human
aucgcaccacugcauuccagccugggugacag

SEQ ID NO: 332599 - RNA, 32 nt, Human
aucgcaccacugcauugcagccuggugacaga

SEQ ID NO: 332600 - RNA, 32 nt, Human
aucgcaccacugcccuccagccuaggugacag

SEQ ID NO: 332601 - RNA, 32 nt, Human
aucgcaccacugcucuccagccuggcgacaga

SEQ ID NO: 332602 - RNA, 32 nt, Human
aucgcaccacuguacuccagccugggcaacag

SEQ ID NO: 332603 - RNA, 32 nt, Human
aucgcaccacuguacuccagccugggcgacgg

SEQ ID NO: 332604 - RNA, 32 nt, Human
aucgcaccacuguacuccagccugggugacag

SEQ ID NO: 332605 - RNA, 32 nt, Human
aucgcaccacuguacuccagccugggugacug

SEQ ID NO: 332606 - RNA, 32 nt, Human
aucgcaccacuguauuccagccuggaugacaa

SEQ ID NO: 332607 - RNA, 32 nt, Human
aucgcaccagugcacuccagccuuggugacaa

SEQ ID NO: 332608 - RNA, 32 nt, Human
aucgcaccauuacacuccagccugggcaacag

SEQ ID NO: 332609 - RNA, 32 nt, Human
aucgcaccauugcacuccagcccgggcaacaa

SEQ ID NO: 332610 - RNA, 32 nt, Human
aucgcaccauugcacuccagccuaggcaaaaa

SEQ ID NO: 332611 - RNA, 32 nt, Human
aucgcaccauugcacuccagccugagugacag

SEQ ID NO: 332612 - RNA, 32 nt, Human
aucgcaccauugcacuccagccuggaugauag

SEQ ID NO: 332613 - RNA, 32 nt, Human
aucgcaccauugcacuccagccuggcgaccga

SEQ ID NO: 332614 - RNA, 32 nt, Human
aucgcaccauugcacuccagccugggcaacaa

SEQ ID NO: 332615 - RNA, 32 nt, Human
aucgcaccauugcacuccagccugggcaacag

SEQ ID NO: 332616 - RNA, 32 nt, Human
aucgcaccauugcacuccagccugggcaacga

SEQ ID NO: 332617 - RNA, 32 nt, Human
aucgcaccauugcacuccagccugugcaacaa

SEQ ID NO: 332618 - RNA, 32 nt, Human
aucgcaccauugcacuccagcugggagacaca

SEQ ID NO: 332619 - RNA, 32 nt, Human
aucgcaccauugcacuccugccugggcaacaa

SEQ ID NO: 332620 - RNA, 32 nt, Human
aucgcaccauugcacuucagccugggcaacaa

SEQ ID NO: 332621 - RNA, 32 nt, Human
aucgcaccauugcauuccagccugggcaacaa

SEQ ID NO: 332622 - RNA, 32 nt, Human
aucgcaccauugcccuccagccugggcaacaa

SEQ ID NO: 332623 - RNA, 32 nt, Human
aucgcaccauuguacuccagccugggcaacaa

SEQ ID NO: 332624 - RNA, 32 nt, Human
aucgcaccauuguacuccagccugugugacag

SEQ ID NO: 332625 - RNA, 32 nt, Human
aucgcaccccugcacuccagccugggcaacag

SEQ ID NO: 332626 - RNA, 32 nt, Human
aucgcaccgcugcacuccagccuggcaacaga

SEQ ID NO: 332627 - RNA, 32 nt, Human
aucgcaccgcugcacuccagccugggcaacag

SEQ ID NO: 332628 - RNA, 32 nt, Human
aucgcaccgcugcacuccagccugggcaagag

SEQ ID NO: 332629 - RNA, 32 nt, Human
aucgcaccgcugcacuccagccugggugacag

SEQ ID NO: 332630 - RNA, 32 nt, Human
aucgcaccgcugcccuccagccugggcaacaa

SEQ ID NO: 332631 - RNA, 32 nt, Human
aucgcacuacugcacuccagccugggugacag

SEQ ID NO: 332632 - RNA, 32 nt, Human
aucgcacuccagccugggugacagagugagau

SEQ ID NO: 332633 - RNA, 32 nt, Human
aucgcagacagucaggcuucaggcugucugac

SEQ ID NO: 332634 - RNA, 32 nt, Human
aucgcagagaaaaaccacaugagaaaauuuuu

SEQ ID NO: 332635 - RNA, 32 nt, Human
aucgcagcacuguacuccagccugggcgaugg

SEQ ID NO: 332636 - RNA, 32 nt, Human
aucgcagcacuuugggaggcagcagcuggcgg

SEQ ID NO: 332637 - RNA, 32 nt, Human
aucgcagcucacugcaaucucugccuccuggg

SEQ ID NO: 332638 - RNA, 32 nt, Human
aucgcagcucacuguagccucuaucuccuggg

SEQ ID NO: 332639 - RNA, 32 nt, Human
aucgcagcucacuguagcuuugaccucucagg

SEQ ID NO: 332640 - RNA, 32 nt, Human
aucgcaggagugggaggguagcgagccagcug

SEQ ID NO: 332641 - RNA, 32 nt, Human
aucgcagggaaucuaccucuucacugggggca

SEQ ID NO: 332642 - RNA, 32 nt, Human
aucgcaggugugagccaccacacccggcccug

SEQ ID NO: 332643 - RNA, 32 nt, Human
aucgcaguugcuccggaucuuugcacacacuc

SEQ ID NO: 332644 - RNA, 32 nt, Human
aucgcaucacugcaguccagccuggaugacag

SEQ ID NO: 332645 - RNA, 32 nt, Human
aucgcaugcuacugcacuccagccugggagac

SEQ ID NO: 332646 - RNA, 32 nt, Human
aucgcauguagugcuuucuuuggaccaucauc

SEQ ID NO: 332647 - RNA, 32 nt, Human
aucgcauuacugcacuccagccuggguaacag

SEQ ID NO: 332648 - RNA, 32 nt, Human
aucgcauucccuccucuccaucuugaugccga

SEQ ID NO: 332649 - RNA, 32 nt, Human
aucgccaagagagacguggagaggagagcggu

SEQ ID NO: 332650 - RNA, 32 nt, Human
aucgccacagccccagacagggagugagugag

SEQ ID NO: 332651 - RNA, 32 nt, Human
aucgccacucuaugggggucugucuuuuaacu

SEQ ID NO: 332652 - RNA, 32 nt, Human
aucgccacugcacuccagccugggaaauagag

SEQ ID NO: 332653 - RNA, 32 nt, Human
aucgccacugcacuccagccugggugacagag

SEQ ID NO: 332654 - RNA, 32 nt, Human
aucgccacugccaccugccucccgcugaaucu

SEQ ID NO: 332655 - RNA, 32 nt, Human
aucgccagccagguuguuucucagccaucaaa

SEQ ID NO: 332656 - RNA, 32 nt, Human
aucgccagccuccuccuggaccucuuggcccc

SEQ ID NO: 332657 - RNA, 32 nt, Human
aucgccaguuggggaugaaaucacagagccug

SEQ ID NO: 332658 - RNA, 32 nt, Human
aucgcccaaauuuggaacugcuugucccaugc

SEQ ID NO: 332659 - RNA, 32 nt, Human
aucgcccaacagacccaugaacaaaguggcca

SEQ ID NO: 332660 - RNA, 32 nt, Human
aucgcccacugcacuccagguugggcuacaga

SEQ ID NO: 332661 - RNA, 32 nt, Human
aucgcccaggccugggaugcagugaugugauc

SEQ ID NO: 332662 - RNA, 32 nt, Human
aucgccccacuacacuccagccuggucaacag

SEQ ID NO: 332663 - RNA, 32 nt, Human
aucgccccacugcacuccagccuggcaauaga

SEQ ID NO: 332664 - RNA, 32 nt, Human
aucgccccacugcacuccagccugggcgacag

SEQ ID NO: 332665 - RNA, 32 nt, Human
aucgccccacugcacuccagccuggugacucc

SEQ ID NO: 332666 - RNA, 32 nt, Human
aucgccccauuguacuccagccuggggaacaa

SEQ ID NO: 332667 - RNA, 32 nt, Human
aucgccccuccugcccccuugugcacacccag

SEQ ID NO: 332668 - RNA, 32 nt, Human
aucgcccugcugcacuccagccugggcaacag

SEQ ID NO: 332669 - RNA, 32 nt, Human
aucgcccugcugcacuccagccugggugacag

SEQ ID NO: 332670 - RNA, 32 nt, Human
aucgccgauuggggguuggauugcggauuugg

SEQ ID NO: 332671 - RNA, 32 nt, Human
aucgccuacugucugcggguucuuuuaccugc

SEQ ID NO: 332672 - RNA, 32 nt, Human
aucgccucauuucuacaggggcaccuuggccu

SEQ ID NO: 332673 - RNA, 32 nt, Human
aucgccuccucccuccccaagauggcguccuu

SEQ ID NO: 332674 - RNA, 32 nt, Human
aucgccucuuguucggauuuuugcuacuaccg

SEQ ID NO: 332675 - RNA, 32 nt, Human
aucgccugaacccagaagcggagguugcagug

SEQ ID NO: 332676 - RNA, 32 nt, Human
aucgccugaacccagaggcggagguuguagug

SEQ ID NO: 332677 - RNA, 32 nt, Human
aucgccugaacccaggaggcggagguugcagg

SEQ ID NO: 332678 - RNA, 32 nt, Human
aucgccugagcccaggaggucaaggcuacagu

SEQ ID NO: 332679 - RNA, 32 nt, Human
aucgccugagcccaggagguggagguugcagu

SEQ ID NO: 332680 - RNA, 32 nt, Human
aucgccugcaccugccaucggggccaugugga

SEQ ID NO: 332681 - RNA, 32 nt, Human
aucgccugccuucugaccuuuuccuugauuca

SEQ ID NO: 332682 - RNA, 32 nt, Human
aucgccugcucgcuuccccuucccaggcccgu

SEQ ID NO: 332683 - RNA, 32 nt, Human
aucgccugggaggugaggugugugugacccac

SEQ ID NO: 332684 - RNA, 32 nt, Human
aucgccuucuccccuccauccagccuggcguc

SEQ ID NO: 332685 - RNA, 32 nt, Human
aucgcgacacugcacuccagccugggcaacag

SEQ ID NO: 332686 - RNA, 32 nt, Human
aucgcgacacugcacuccagccugggugacgg

SEQ ID NO: 332687 - RNA, 32 nt, Human
aucgcgacacugcgcuccagccugggcaacaa

SEQ ID NO: 332688 - RNA, 32 nt, Human
aucgcgcagcugcacuccagccugggcaacag

SEQ ID NO: 332689 - RNA, 32 nt, Human
aucgcgccaaugcacuccagccugggcgacag

SEQ ID NO: 332690 - RNA, 32 nt, Human
aucgcgccacccacuccagcccgggugacaga

SEQ ID NO: 332691 - RNA, 32 nt, Human
aucgcgccaccgcauuccagccugggcgacag

SEQ ID NO: 332692 - RNA, 32 nt, Human
aucgcgccaccgcccuccagccugggcgacag

SEQ ID NO: 332693 - RNA, 32 nt, Human
aucgcgccacggcacuccagccugggagacag

SEQ ID NO: 332694 - RNA, 32 nt, Human
aucgcgccacuacuccagccugggugacaaag

SEQ ID NO: 332695 - RNA, 32 nt, Human
aucgcgccacuauacuccagccugggcaacag

SEQ ID NO: 332696 - RNA, 32 nt, Human
aucgcgccacucacuacacuucagcuugggcg

SEQ ID NO: 332697 - RNA, 32 nt, Human
aucgcgccacugcaacccagccugggugacag

SEQ ID NO: 332698 - RNA, 32 nt, Human
aucgcgccacugcacucaagccugggcaacac

SEQ ID NO: 332699 - RNA, 32 nt, Human
aucgcgccacugcacuccaaccugggugacag

SEQ ID NO: 332700 - RNA, 32 nt, Human
aucgcgccacugcacuccacccuggguaacgg

SEQ ID NO: 332701 - RNA, 32 nt, Human
aucgcgccacugcacuccagcagucugggcga

SEQ ID NO: 332702 - RNA, 32 nt, Human
aucgcgccacugcacuccagcccgggugacag

SEQ ID NO: 332703 - RNA, 32 nt, Human
aucgcgccacugcacuccagccuagacgacag

SEQ ID NO: 332704 - RNA, 32 nt, Human
aucgcgccacugcacuccagccuaggggacag

SEQ ID NO: 332705 - RNA, 32 nt, Human
aucgcgccacugcacuccagccuaggugacag

SEQ ID NO: 332706 - RNA, 32 nt, Human
aucgcgccacugcacuccagccucggcaacag

SEQ ID NO: 332707 - RNA, 32 nt, Human
aucgcgccacugcacuccagccucggugacag

SEQ ID NO: 332708 - RNA, 32 nt, Human
aucgcgccacugcacuccagccuggacgacag

SEQ ID NO: 332709 - RNA, 32 nt, Human
aucgcgccacugcacuccagccuggcaacaga

SEQ ID NO: 332710 - RNA, 32 nt, Human
aucgcgccacugcacuccagccuggcgacaaa

SEQ ID NO: 332711 - RNA, 32 nt, Human
aucgcgccacugcacuccagccuggcgacaga

SEQ ID NO: 332712 - RNA, 32 nt, Human
aucgcgccacugcacuccagccugggcaacaa

SEQ ID NO: 332713 - RNA, 32 nt, Human
aucgcgccacugcacuccagccugggcaacag

SEQ ID NO: 332714 - RNA, 32 nt, Human
aucgcgccacugcacuccagccugggcgacac

SEQ ID NO: 332715 - RNA, 32 nt, Human
aucgcgccacugcacuccagccugggcgacag

SEQ ID NO: 332716 - RNA, 32 nt, Human
aucgcgccacugcacuccagccugggcgacgg

SEQ ID NO: 332717 - RNA, 32 nt, Human
aucgcgccacugcacuccagccugggcgagag

SEQ ID NO: 332718 - RNA, 32 nt, Human
aucgcgccacugcacuccagccugggcgauag

SEQ ID NO: 332719 - RNA, 32 nt, Human
aucgcgccacugcacuccagccuggguaacag

SEQ ID NO: 332720 - RNA, 32 nt, Human
aucgcgccacugcacuccagccugggugacac

SEQ ID NO: 332721 - RNA, 32 nt, Human
aucgcgccacugcacuccagccugggugacag

SEQ ID NO: 332722 - RNA, 32 nt, Human
aucgcgccacugcacuccagccugggugauag

SEQ ID NO: 332723 - RNA, 32 nt, Human
aucgcgccacugcacuccagccuggugacaga

SEQ ID NO: 332724 - RNA, 32 nt, Human
aucgcgccacugcacuccagcuugggcaacag

SEQ ID NO: 332725 - RNA, 32 nt, Human
aucgcgccacugcacuccaggccugggugaca

SEQ ID NO: 332726 - RNA, 32 nt, Human
aucgcgccacugcacuccaggcugggcaacgg

SEQ ID NO: 332727 - RNA, 32 nt, Human
aucgcgccacugcacuccaggcugggcgacag

SEQ ID NO: 332728 - RNA, 32 nt, Human
aucgcgccacugcacuccagucugggcaacag

SEQ ID NO: 332729 - RNA, 32 nt, Human
aucgcgccacugcacuccaguuugggcaacag

SEQ ID NO: 332730 - RNA, 32 nt, Human
aucgcgccacugcacuccggccugaugacaga

SEQ ID NO: 332731 - RNA, 32 nt, Human
aucgcgccacugcacuccugccugggacacaa

SEQ ID NO: 332732 - RNA, 32 nt, Human
aucgcgccacugcacuccugccugggcaacug

SEQ ID NO: 332733 - RNA, 32 nt, Human
aucgcgccacugcacucuagccggagugacag

SEQ ID NO: 332734 - RNA, 32 nt, Human
aucgcgccacugcacucuagccugagugacag

SEQ ID NO: 332735 - RNA, 32 nt, Human
aucgcgccacugcacucuagccugggccauag

SEQ ID NO: 332736 - RNA, 32 nt, Human
aucgcgccacugcacucuagccugggugacag

SEQ ID NO: 332737 - RNA, 32 nt, Human
aucgcgccacugcacuucagccuggacaacag

SEQ ID NO: 332738 - RNA, 32 nt, Human
aucgcgccacugcaguccagccugggcaacaa

SEQ ID NO: 332739 - RNA, 32 nt, Human
aucgcgccacugcauuccagccuggacgacag

SEQ ID NO: 332740 - RNA, 32 nt, Human
aucgcgccacugcccuccagccugggcgacag

SEQ ID NO: 332741 - RNA, 32 nt, Human
aucgcgccacugcgcuucagccugggagacag

SEQ ID NO: 332742 - RNA, 32 nt, Human
aucgcgccacugcucuccagccuggguggcag

SEQ ID NO: 332743 - RNA, 32 nt, Human
aucgcgccacuggacuccagccuggacaacag

SEQ ID NO: 332744 - RNA, 32 nt, Human
aucgcgccacugggcuccagccugggcgacag

SEQ ID NO: 332745 - RNA, 32 nt, Human
aucgcgccacuguacuccagccuggacaacag

SEQ ID NO: 332746 - RNA, 32 nt, Human
aucgcgccacuguacuccagccugggcaacag

SEQ ID NO: 332747 - RNA, 32 nt, Human
aucgcgccacuguacuccagccugggugacag

SEQ ID NO: 332748 - RNA, 32 nt, Human
aucgcgccacugugcuccagccugggcaacag

SEQ ID NO: 332749 - RNA, 32 nt, Human
aucgcgccaguacacuccagccuggguaacag

SEQ ID NO: 332750 - RNA, 32 nt, Human
aucgcgccagugcacuccagccugggcaagaa

SEQ ID NO: 332751 - RNA, 32 nt, Human
aucgcgccaucgcacuccagccugggcaacaa

SEQ ID NO: 332752 - RNA, 32 nt, Human
aucgcgccaucgcacuccagccugggugacaa

SEQ ID NO: 332753 - RNA, 32 nt, Human
aucgcgccauugcacuccaaccuggacgacag

SEQ ID NO: 332754 - RNA, 32 nt, Human
aucgcgccauugcacuccagccuggacaacaa

SEQ ID NO: 332755 - RNA, 32 nt, Human
aucgcgccauugcacuccagccuggccuauaa

SEQ ID NO: 332756 - RNA, 32 nt, Human
aucgcgccauugcacuccagccuggcugacag

SEQ ID NO: 332757 - RNA, 32 nt, Human
aucgcgccauugcacuccagccugggcaacaa

SEQ ID NO: 332758 - RNA, 32 nt, Human
aucgcgccauugcacuccagccugggcaacga

SEQ ID NO: 332759 - RNA, 32 nt, Human
aucgcgccauugcacuccagccugggcaacuc

SEQ ID NO: 332760 - RNA, 32 nt, Human
aucgcgccauugcacuccagccugggcgacaa

SEQ ID NO: 332761 - RNA, 32 nt, Human
aucgcgccauugcacuccagccugggcgacag

SEQ ID NO: 332762 - RNA, 32 nt, Human
aucgcgccauugcacuccagccugggcggcag

SEQ ID NO: 332763 - RNA, 32 nt, Human
aucgcgccauugcacuccagccugggggacaa

SEQ ID NO: 332764 - RNA, 32 nt, Human
aucgcgccauugcacuccagccuggguaacaa

SEQ ID NO: 332765 - RNA, 32 nt, Human
aucgcgccauugcacuccagccugggugacag

SEQ ID NO: 332766 - RNA, 32 nt, Human
aucgcgccauugcacuccagccugggugacga

SEQ ID NO: 332767 - RNA, 32 nt, Human
aucgcgccauugcacuccauccuggacaacag

SEQ ID NO: 332768 - RNA, 32 nt, Human
aucgcgccauugcacucccgccugggcgacuc

SEQ ID NO: 332769 - RNA, 32 nt, Human
aucgcgccauugcacuccggccuggggacaag

SEQ ID NO: 332770 - RNA, 32 nt, Human
aucgcgccauuguacuccagccugggcgauga

SEQ ID NO: 332771 - RNA, 32 nt, Human
aucgcgccccugcacuccagccugggugacag

SEQ ID NO: 332772 - RNA, 32 nt, Human
aucgcgcccggccaacuuuucuuuagaaaaau

SEQ ID NO: 332773 - RNA, 32 nt, Human
aucgcgccgcggcgguuccuguccuuacaguu

SEQ ID NO: 332774 - RNA, 32 nt, Human
aucgcgccgcugcacuccagccugggccacac

SEQ ID NO: 332775 - RNA, 32 nt, Human
aucgcgccgcugcacuccagccugggcgacag

SEQ ID NO: 332776 - RNA, 32 nt, Human
aucgcgccgcugcacuccagccugggcggcag

SEQ ID NO: 332777 - RNA, 32 nt, Human
aucgcgccgcugcacuccagccugggugacag

SEQ ID NO: 332778 - RNA, 32 nt, Human
aucgcgccgcugcauuccagccugggugacag

SEQ ID NO: 332779 - RNA, 32 nt, Human
aucgcgccguugcacuccagccugggcaacaa

SEQ ID NO: 332780 - RNA, 32 nt, Human
aucgcgccucacuucaucccagucccgggcga

SEQ ID NO: 332781 - RNA, 32 nt, Human
aucgcgccuuugcacuccagccuggaagacaa

SEQ ID NO: 332782 - RNA, 32 nt, Human
aucgcgcuacugcacuccagccugggcgacag

SEQ ID NO: 332783 - RNA, 32 nt, Human
aucgcgcuacugcacuccagccugggugacag

SEQ ID NO: 332784 - RNA, 32 nt, Human
aucgcgcuacugcauuccagccugggcgccga

SEQ ID NO: 332785 - RNA, 32 nt, Human
aucgcgcuauugcacuccagccugggugacag

SEQ ID NO: 332786 - RNA, 32 nt, Human
aucgcgcugcagcuggcucacuuccgggggua

SEQ ID NO: 332787 - RNA, 32 nt, Human
aucgcgcugcugcacuccagccugggugacag

SEQ ID NO: 332788 - RNA, 32 nt, Human
aucgcgcugggaagccacgugggagccgugcg

SEQ ID NO: 332789 - RNA, 32 nt, Human
aucgcggcgcugcacucuagccugggugacag

SEQ ID NO: 332790 - RNA, 32 nt, Human
aucgcggcggucgcggccuuggggaugggcgg

SEQ ID NO: 332791 - RNA, 24 nt, Human
aucgcggcucaccgcaaccuccgc

SEQ ID NO: 332792 - RNA, 32 nt, Human
aucgcggcucaccgcaaccuccgccuccuggg

SEQ ID NO: 332793 - RNA, 22 nt, Human
aucgcggcucacugcaaccucc

SEQ ID NO: 332794 - RNA, 32 nt, Human
aucgcggcucacugcaaccuccaccucccagg

SEQ ID NO: 332795 - RNA, 32 nt, Human
aucgcggcucacugcaaccuccaccucccggg

SEQ ID NO: 332796 - RNA, 32 nt, Human
aucgcggcucacugcaaccuggaacuccuggg

SEQ ID NO: 332797 - RNA, 32 nt, Human
aucgcggcucacugcagccuccauccucuggg

SEQ ID NO: 332798 - RNA, 32 nt, Human
aucgcguaccacacuccagccugggugacaga

SEQ ID NO: 332799 - RNA, 32 nt, Human
aucgcgucacugcacuccagccuggacaacag

SEQ ID NO: 332800 - RNA, 32 nt, Human
aucgcgucacugcacuccagccugggagacag

SEQ ID NO: 332801 - RNA, 32 nt, Human
aucgcgucacugcacuccagccugggcgacag

SEQ ID NO: 332802 - RNA, 32 nt, Human
aucgcgucauugcacuccagccugggcaacaa

SEQ ID NO: 332803 - RNA, 32 nt, Human
aucgcgugaacccaggaggcggaggcugcagu

SEQ ID NO: 332804 - RNA, 32 nt, Human
aucgcgugaacccaggaggcggcgguugcagu

SEQ ID NO: 332805 - RNA, 32 nt, Human
aucgcuaccauccaggaguaucagagccugaa

SEQ ID NO: 332806 - RNA, 32 nt, Human
aucgcuagggcugcagggugcuugcuucggaa

SEQ ID NO: 332807 - RNA, 32 nt, Human
aucgcucauggaggagauggccagggcggacc

SEQ ID NO: 332808 - RNA, 32 nt, Human
aucgcuccacugcacuccagcccaggugacag

SEQ ID NO: 332809 - RNA, 32 nt, Human
aucgcuccacugcacuccagccugggugacag

SEQ ID NO: 332810 - RNA, 32 nt, Human
aucgcuccauugcacuccagccugggugacag

SEQ ID NO: 332811 - RNA, 32 nt, Human
aucgcucccacugcacuccagccugggcgaca

SEQ ID NO: 332812 - RNA, 32 nt, Human
aucgcucccaggcugagacccaccuuggcucu

SEQ ID NO: 332813 - RNA, 32 nt, Human
aucgcuccucugacaucuccccggccauuucu

SEQ ID NO: 332814 - RNA, 32 nt, Human
aucgcucgaacccaggagguggagguugcagu

SEQ ID NO: 332815 - RNA, 32 nt, Human
aucgcucuacccaggcgguggugucgaucuac

SEQ ID NO: 332816 - RNA, 32 nt, Human
aucgcucuccuugccagcuuucuccucagggu

SEQ ID NO: 332817 - RNA, 32 nt, Human
aucgcucugucgcccagguuugagugcaaugg

SEQ ID NO: 332818 - RNA, 32 nt, Human
aucgcugccuccuggguucaagcaauucuccu

SEQ ID NO: 332819 - RNA, 32 nt, Human
aucgcugcucaccgcaaccuccgccuuccagg

SEQ ID NO: 332820 - RNA, 32 nt, Human
aucgcuggagaaagaggagccccuggaccagu

SEQ ID NO: 332821 - RNA, 29 nt, Human
aucgcuggucuguguucuccuggauuugg

SEQ ID NO: 332822 - RNA, 32 nt, Human
aucgcugguggagguggcggagagcaaggugg

SEQ ID NO: 332823 - RNA, 32 nt, Human
aucgcugucuccuccgcaaagcauuuuaacuc

SEQ ID NO: 332824 - RNA, 32 nt, Human
aucgcuuaaccccaggagguggggguuguugu

SEQ ID NO: 332825 - RNA, 32 nt, Human
aucgcuuaagcccaggagguucaggcugcagu

SEQ ID NO: 332826 - RNA, 32 nt, Human
aucgcuucccuucacugaauucccuucaaagc

SEQ ID NO: 332827 - RNA, 32 nt, Human
aucgcuugaacccaagaggcagagguugcagu

SEQ ID NO: 332828 - RNA, 32 nt, Human
aucgcuugaacccaagaggcggagguugcagu

SEQ ID NO: 332829 - RNA, 32 nt, Human
aucgcuugaacccaagagguggagguugcggu

SEQ ID NO: 332830 - RNA, 32 nt, Human
aucgcuugaacccagaaagcggagguugcagu

SEQ ID NO: 332831 - RNA, 32 nt, Human
aucgcuugaacccagaaggcggaaguugcagu

SEQ ID NO: 332832 - RNA, 32 nt, Human
aucgcuugaacccagauagcagagguugcagu

SEQ ID NO: 332833 - RNA, 32 nt, Human
aucgcuugaacccaggaagcagagguugcagu

SEQ ID NO: 332834 - RNA, 32 nt, Human
aucgcuugaacccaggaagcagugguugagau

SEQ ID NO: 332835 - RNA, 32 nt, Human
aucgcuugaacccaggaaguagagguugcagu

SEQ ID NO: 332836 - RNA, 32 nt, Human
aucgcuugaacccaggaaguggagguugcagu

SEQ ID NO: 332837 - RNA, 32 nt, Human
aucgcuugaacccaggagacagagguugcagu

SEQ ID NO: 332838 - RNA, 32 nt, Human
aucgcuugaacccaggagacagggguugcagu

SEQ ID NO: 332839 - RNA, 32 nt, Human
aucgcuugaacccaggagacgagguugcagug

SEQ ID NO: 332840 - RNA, 32 nt, Human
aucgcuugaacccaggagacggugguugcagu

SEQ ID NO: 332841 - RNA, 32 nt, Human
aucgcuugaacccaggagauggagauugcagu

SEQ ID NO: 332842 - RNA, 32 nt, Human
aucgcuugaacccaggagauugagguuguagu

SEQ ID NO: 332843 - RNA, 32 nt, Human
aucgcuugaacccaggaggcacagauugcagu

SEQ ID NO: 332844 - RNA, 32 nt, Human
aucgcuugaacccaggaggcagaaguugcagu

SEQ ID NO: 332845 - RNA, 32 nt, Human
aucgcuugaacccaggaggcagagauugcagu

SEQ ID NO: 332846 - RNA, 32 nt, Human
aucgcuugaacccaggaggcagagauugcggu

SEQ ID NO: 332847 - RNA, 32 nt, Human
aucgcuugaacccaggaggcagagguugcagu

SEQ ID NO: 332848 - RNA, 32 nt, Human
aucgcuugaacccaggaggcagaguuugcagu

SEQ ID NO: 332849 - RNA, 32 nt, Human
aucgcuugaacccaggaggcagugauugcagu

SEQ ID NO: 332850 - RNA, 32 nt, Human
aucgcuugaacccaggaggcggagauugcagu

SEQ ID NO: 332851 - RNA, 32 nt, Human
aucgcuugaacccaggaggcggagcuugcagu

SEQ ID NO: 332852 - RNA, 32 nt, Human
aucgcuugaacccaggaggcggaggcugcagu

SEQ ID NO: 332853 - RNA, 32 nt, Human
aucgcuugaacccaggaggcggagguugcagu

SEQ ID NO: 332854 - RNA, 32 nt, Human
aucgcuugaacccaggaggcggagguugcggu

SEQ ID NO: 332855 - RNA, 32 nt, Human
aucgcuugaacccaggagguagaagcugcagu

SEQ ID NO: 332856 - RNA, 32 nt, Human
aucgcuugaacccaggagguagaggcugcagu

SEQ ID NO: 332857 - RNA, 32 nt, Human
aucgcuugaacccaggagguagagguugcagu

SEQ ID NO: 332858 - RNA, 32 nt, Human
aucgcuugaacccaggaggugaagguugcagu

SEQ ID NO: 332859 - RNA, 32 nt, Human
aucgcuugaacccaggaggugcagguugcagu

SEQ ID NO: 332860 - RNA, 32 nt, Human
aucgcuugaacccaggagguggagguagcagu

SEQ ID NO: 332861 - RNA, 32 nt, Human
aucgcuugaacccaggagguggagguugcagu

SEQ ID NO: 332862 - RNA, 32 nt, Human
aucgcuugaacccaggagguggggguugcacc

SEQ ID NO: 332863 - RNA, 32 nt, Human
aucgcuugaacccaggagucagagguuucagu

SEQ ID NO: 332864 - RNA, 32 nt, Human
aucgcuugaacccaggagucggagguugcagu

SEQ ID NO: 332865 - RNA, 32 nt, Human
aucgcuugaacccaggaguucaagucugcagu

SEQ ID NO: 332866 - RNA, 32 nt, Human
aucgcuugaacccagguuguggagguuguagu

SEQ ID NO: 332867 - RNA, 32 nt, Human
aucgcuugaaccccagaggcagagguugcggu

SEQ ID NO: 332868 - RNA, 32 nt, Human
aucgcuugaaccccggaggcggagguugcagu

SEQ ID NO: 332869 - RNA, 32 nt, Human
aucgcuugaaccccggagguagagguugcagu

SEQ ID NO: 332870 - RNA, 32 nt, Human
aucgcuugaacccgagagacggagguugcagu

SEQ ID NO: 332871 - RNA, 32 nt, Human
aucgcuugaacccgagaggcggagguugcagu

SEQ ID NO: 332872 - RNA, 32 nt, Human
aucgcuugaacccgagagguggagguugcagu

SEQ ID NO: 332873 - RNA, 32 nt, Human
aucgcuugaacccgggaagcagagguugcagu

SEQ ID NO: 332874 - RNA, 32 nt, Human
aucgcuugaacccgggaagcggagguugcagu

SEQ ID NO: 332875 - RNA, 32 nt, Human
aucgcuugaacccgggaaggcggaaguugcag

SEQ ID NO: 332876 - RNA, 32 nt, Human
aucgcuugaacccgggaggcaaagguugcagu

SEQ ID NO: 332877 - RNA, 32 nt, Human
aucgcuugaacccgggaggcagaaguugcagu

SEQ ID NO: 332878 - RNA, 32 nt, Human
aucgcuugaacccgggaggcagagauugcagu

SEQ ID NO: 332879 - RNA, 32 nt, Human
aucgcuugaacccgggaggcagaggcugcagu

SEQ ID NO: 332880 - RNA, 32 nt, Human
aucgcuugaacccgggaggcagagguaguagu

SEQ ID NO: 332881 - RNA, 32 nt, Human
aucgcuugaacccgggaggcagagguggcugu

SEQ ID NO: 332882 - RNA, 32 nt, Human
aucgcuugaacccgggaggcagagguuacagu

SEQ ID NO: 332883 - RNA, 32 nt, Human
aucgcuugaacccgggaggcagagguugcagu

SEQ ID NO: 332884 - RNA, 32 nt, Human
aucgcuugaacccgggaggcagagguugcggu

SEQ ID NO: 332885 - RNA, 32 nt, Human
aucgcuugaacccgggaggcggagcuugcagu

SEQ ID NO: 332886 - RNA, 32 nt, Human
aucgcuugaacccgggaggcggagguugcagu

SEQ ID NO: 332887 - RNA, 32 nt, Human
aucgcuugaacccgggaggcggagguuguagu

SEQ ID NO: 332888 - RNA, 32 nt, Human
aucgcuugaacccgggagguggagauugcagu

SEQ ID NO: 332889 - RNA, 32 nt, Human
aucgcuugaacccgggagguggagguugcagc

SEQ ID NO: 332890 - RNA, 32 nt, Human
aucgcuugaacccgggagguggagguugcagu

SEQ ID NO: 332891 - RNA, 32 nt, Human
aucgcuugaacccgggagguggagguugcggu

SEQ ID NO: 332892 - RNA, 32 nt, Human
aucgcuugaacccgggagguguagguugcagu

SEQ ID NO: 332893 - RNA, 32 nt, Human
aucgcuugaacccgggcggcggagauugcagu

SEQ ID NO: 332894 - RNA, 32 nt, Human
aucgcuugaacccgguaggcagagguugcagu

SEQ ID NO: 332895 - RNA, 32 nt, Human
aucgcuugaacccuagaggcggaguuugcagu

SEQ ID NO: 332896 - RNA, 32 nt, Human
aucgcuugaacccuggagguggagguggaggu

SEQ ID NO: 332897 - RNA, 32 nt, Human
aucgcuugagcccaggaggcugaggcugcagu

SEQ ID NO: 332898 - RNA, 32 nt, Human
aucgcuugagcccaggaggucagggcugcagu

SEQ ID NO: 332899 - RNA, 32 nt, Human
aucgcuugagcccaggagguggagguugcagu

SEQ ID NO: 332900 - RNA, 31 nt, Human
aucgcuugagcccaggcaguuggagaccagu

SEQ ID NO: 332901 - RNA, 32 nt, Human
aucgcuugagccugggagguugaggcuucugu

SEQ ID NO: 332902 - RNA, 32 nt, Human
aucgcuugagccugggcaguugaggcuguagu

SEQ ID NO: 332903 - RNA, 32 nt, Human
aucgcuugaggccaggaguuagagacugcagu

SEQ ID NO: 332904 - RNA, 32 nt, Human
aucgcuugaucucaggagguugaggcugcagu

SEQ ID NO: 332905 - RNA, 32 nt, Human
aucgcuugggcccaggagguggagguugcagu

SEQ ID NO: 332906 - RNA, 32 nt, Human
aucggaaaccacuggcugcagcuucgggaugu

SEQ ID NO: 332907 - RNA, 32 nt, Human
aucggaaagggcggcuggaggcucccggagcg

SEQ ID NO: 332908 - RNA, 32 nt, Human
aucggaacaagccccuccuccuggggcugccc

SEQ ID NO: 332909 - RNA, 32 nt, Human
aucggaaguggugccuucagcacagaagaaga

SEQ ID NO: 332910 - RNA, 32 nt, Human
aucggaaucugccuugcacaggagacuuaaaa

SEQ ID NO: 332911 - RNA, 32 nt, Human
aucggaccaagcugcauggaggccacaauggg

SEQ ID NO: 332912 - RNA, 32 nt, Human
aucggacggcggaauguggcagaugaaaugug

SEQ ID NO: 332913 - RNA, 32 nt, Human
aucggacucagcauucagauaucaaagcagac

SEQ ID NO: 332914 - RNA, 32 nt, Human
aucggacuccagccugggugaaggagugagac

SEQ ID NO: 332915 - RNA, 32 nt, Human
aucggacuucugggccuguaaucccaguuugg

SEQ ID NO: 332916 - RNA, 32 nt, Human
aucggacuugcagcuucauuuugggcugccuu

SEQ ID NO: 332917 - RNA, 32 nt, Human
aucggagacgcugcgccugcucagaagguagc

SEQ ID NO: 332918 - RNA, 32 nt, Human
aucggagagcgccuggccgagauggaggacua

SEQ ID NO: 332919 - RNA, 32 nt, Human
aucggagcuagaugaaaaggcaaugcaggcag

SEQ ID NO: 332920 - RNA, 32 nt, Human
aucggaggagugaaccugggcuaagaguuugg

SEQ ID NO: 332921 - RNA, 32 nt, Human
aucggagggugcagcauacaccuaccacucag

SEQ ID NO: 332922 - RNA, 32 nt, Human
aucggaggugggcgggguugcagugacuggug

SEQ ID NO: 332923 - RNA, 32 nt, Human
aucggaugccugcgugccucccagaagugggu

SEQ ID NO: 332924 - RNA, 32 nt, Human
aucggaugcugaacagggagaugaaaggaggu

SEQ ID NO: 332925 - RNA, 32 nt, Human
aucggcagccgucaccccacaccccagcccau

SEQ ID NO: 332926 - RNA, 32 nt, Human
aucggcagggagaggaaggcgcgggaggggga

SEQ ID NO: 332927 - RNA, 21 nt, Human
aucggcagugccagggcagca

SEQ ID NO: 332928 - RNA, 32 nt, Human
aucggccaacagccagcccuugccagcugacg

SEQ ID NO: 332929 - RNA, 32 nt, Human
aucggccacugcacuccgggcugggcgacaga

SEQ ID NO: 332930 - RNA, 32 nt, Human
aucggccaugagguucuccuuuacuuacaaua

SEQ ID NO: 332931 - RNA, 32 nt, Human
aucggccaugccacugccuugcucugggccug

SEQ ID NO: 332932 - RNA, 32 nt, Human
aucggcccccacagaguggcccgcgggccucc

SEQ ID NO: 332933 - RNA, 32 nt, Human
aucggcccgcagcuggcuggcccagugcuccu

SEQ ID NO: 332934 - RNA, 23 nt, Human
aucggccgccaucgccgccgccg

SEQ ID NO: 332935 - RNA, 32 nt, Human
aucggccggccucgaacccccacagcuggagg

SEQ ID NO: 332936 - RNA, 32 nt, Human
aucggccugagcuuagucacauggccacaccc

SEQ ID NO: 332937 - RNA, 32 nt, Human
aucggccugaggcugggacauuacaugaaauc

SEQ ID NO: 332938 - RNA, 32 nt, Human
aucggccugccuguguuucccucuuaggugca

SEQ ID NO: 332939 - RNA, 18 nt, Human
aucggcgcaccuggggcg

SEQ ID NO: 332940 - RNA, 32 nt, Human
aucggcguccugugccccucugcuccggcacg

SEQ ID NO: 332941 - RNA, 32 nt, Human
aucggcucaaaaccgcuugccucgcaggggcu

SEQ ID NO: 332942 - RNA, 32 nt, Human
aucggcugacacugcugccuccagcuaguuau

SEQ ID NO: 332943 - RNA, 32 nt, Human
aucgggaacuccugcuucuccuugccucgaaa

SEQ ID NO: 332944 - RNA, 32 nt, Human
aucgggccacggcacuccagccugggugacag

SEQ ID NO: 332945 - RNA, 32 nt, Human
aucgggccacugcacuccagcuugggugacag

SEQ ID NO: 332946 - RNA, 32 nt, Human
aucgggccccaugucugugcugucuaguuugu

SEQ ID NO: 332947 - RNA, 32 nt, Human
aucgggccgcugcacuccagccugggggacag

SEQ ID NO: 332948 - RNA, 32 nt, Human
aucgggccuacagaugcucucccuugaaucga

SEQ ID NO: 332949 - RNA, 32 nt, Human
aucgggcuccuuuugcuugcugaggcccuaga

SEQ ID NO: 332950 - RNA, 32 nt, Human
aucggggaagcauggggauccgggagaagcac

SEQ ID NO: 332951 - RNA, 32 nt, Human
aucggggaggcagagcuugcagucagccgaga

SEQ ID NO: 332952 - RNA, 32 nt, Human
aucggggcacagacuuccuuuuacuucuuccu

SEQ ID NO: 332953 - RNA, 32 nt, Human
aucggggcucacugccuccugcccuucucucc

SEQ ID NO: 332954 - RNA, 32 nt, Human
aucggggugcaauggcaugcaucuguaaccca

SEQ ID NO: 332955 - RNA, 32 nt, Human
aucgggugcguacagaagaacacacaccgcuc

SEQ ID NO: 332956 - RNA, 32 nt, Human
aucgggugcucaauaaauauuugucgaaugaa

SEQ ID NO: 332957 - RNA, 32 nt, Human
aucggguggacuagcugggaucuccgcauugg

SEQ ID NO: 332958 - RNA, 32 nt, Human
aucggguguaggugaaaggcaucuuucugaau

SEQ ID NO: 332959 - RNA, 32 nt, Human
aucgguacaugguuguacaaguaucaauggac

SEQ ID NO: 332960 - RNA, 32 nt, Human
aucggucacuucuccaggcugcccuaaauuag

SEQ ID NO: 332961 - RNA, 32 nt, Human
aucggucucaccuggacggacgauccgcucag

SEQ ID NO: 332962 - RNA, 32 nt, Human
aucggugagccccugccauggucaccugucag

SEQ ID NO: 332963 - RNA, 32 nt, Human
aucggugcuguacugcauacccugccagcugu

SEQ ID NO: 332964 - RNA, 32 nt, Human
aucggugcuuugcuguccaucuucccaugcug

SEQ ID NO: 332965 - RNA, 32 nt, Human
aucgguggcacuguagccugcgucauggcuca

SEQ ID NO: 332966 - RNA, 32 nt, Human
aucgguggcucaugccuguaauccuagcacuu

SEQ ID NO: 332967 - RNA, 32 nt, Human
aucggugguauugcaggaauuuuucaaaaaca

SEQ ID NO: 332968 - RNA, 32 nt, Human
aucggugguuuacaccuguaaucccagcacuu

SEQ ID NO: 332969 - RNA, 32 nt, Human
aucgguuaugguuggagaagcauuucaagaaa

SEQ ID NO: 332970 - RNA, 32 nt, Human
aucgguucuccucacucuccagccuguuggcu

SEQ ID NO: 332971 - RNA, 32 nt, Human
aucgguugaacccguguggcagagguugcggu

SEQ ID NO: 332972 - RNA, 32 nt, Human
aucgguugagcccaggagguuguggcugcagu

SEQ ID NO: 332973 - RNA, 32 nt, Human
aucgguugaggccaggaguuugaggcugcagu

SEQ ID NO: 332974 - RNA, 32 nt, Human
aucgguuuuguuguacuugggacuaaacauuc

SEQ ID NO: 332975 - RNA, 32 nt, Human
aucguaaauguucugaagacgagcagcuggag

SEQ ID NO: 332976 - RNA, 32 nt, Human
aucguaacucucugucuugaccaauaauuuug

SEQ ID NO: 332977 - RNA, 32 nt, Human
aucguacaaacacauauauaacuacaaaagga

SEQ ID NO: 332978 - RNA, 21 nt, Human
aucguacauuuugcuugcgug

SEQ ID NO: 332979 - RNA, 32 nt, Human
aucguaccacuacacuccagccugggcaacgg

SEQ ID NO: 332980 - RNA, 32 nt, Human
aucguaccacugcacuccagccuaggugacag

SEQ ID NO: 332981 - RNA, 32 nt, Human
aucguaccacugcacuccagccuggaugacag

SEQ ID NO: 332982 - RNA, 32 nt, Human
aucguaccacugcacuccagccugggcgacag

SEQ ID NO: 332983 - RNA, 32 nt, Human
aucguaccacugcacuccagccugggcuacag

SEQ ID NO: 332984 - RNA, 32 nt, Human
aucguaccacugcacuccagccugggugacag

SEQ ID NO: 332985 - RNA, 32 nt, Human
aucguaccacugcacuccagucugggcgacag

SEQ ID NO: 332986 - RNA, 32 nt, Human
aucguaccacugcacucuggccugggcaacaa

SEQ ID NO: 332987 - RNA, 32 nt, Human
aucguaccauugcacuccagccugggcaacaa

SEQ ID NO: 332988 - RNA, 32 nt, Human
aucguacccagccugggcaacagugcgagguu

SEQ ID NO: 332989 - RNA, 32 nt, Human
aucguaccgcugcacuccagccugggugauag

SEQ ID NO: 332990 - RNA, 32 nt, Human
aucguaccuauugcacuccauccuggaugaaa

SEQ ID NO: 332991 - RNA, 32 nt, Human
aucguacuacugcacuccagcauggaagacag

SEQ ID NO: 332992 - RNA, 32 nt, Human
aucguacuuccaggaacagugaggcugauggg

SEQ ID NO: 332993 - RNA, 32 nt, Human
aucguagaaggagugaaagaagaaaagaagac

SEQ ID NO: 332994 - RNA, 32 nt, Human
aucguagagagggacgugagaagcagcuuccc

SEQ ID NO: 332995 - RNA, 32 nt, Human
aucguaggacagugaagaugcugcuggaauug

SEQ ID NO: 332996 - RNA, 32 nt, Human
aucguagucggggaagacucuacugaauaaga

SEQ ID NO: 332997 - RNA, 32 nt, Human
aucguaucuccaagucccucucacaggacaug

SEQ ID NO: 332998 - RNA, 32 nt, Human
aucgucaagacaucacuuggauuucuuaaucu

SEQ ID NO: 332999 - RNA, 32 nt, Human
aucgucaccuucuccaccgugggcuacgguga

SEQ ID NO: 333000 - RNA, 32 nt, Human
aucgucccacugcacuccagcccgggcaacag

SEQ ID NO: 333001 - RNA, 32 nt, Human
aucgucccacugcacuccagccugggcaacag

SEQ ID NO: 333002 - RNA, 32 nt, Human
aucguccccgggaggcagcuggggcagcagca

SEQ ID NO: 333003 - RNA, 32 nt, Human
aucguccucaugggcggaaugaacccacacaa

SEQ ID NO: 333004 - RNA, 32 nt, Human
aucguccugcagcugccggcaaaaccaucaac

SEQ ID NO: 333005 - RNA, 24 nt, Human
aucguccugcugaagcaggccaca

SEQ ID NO: 333006 - RNA, 32 nt, Human
aucguccugcugcugcugccguuccgguguca

SEQ ID NO: 333007 - RNA, 32 nt, Human
aucguccuggcuccccagaguaucuucccacu

SEQ ID NO: 333008 - RNA, 32 nt, Human
aucgucucaaagaacuuuugcuggagagaauc

SEQ ID NO: 333009 - RNA, 32 nt, Human
aucgucucagcccaaaaucugcuuaaacugau

SEQ ID NO: 333010 - RNA, 32 nt, Human
aucgucucugagauuaccuucuugcccuuucc

SEQ ID NO: 333011 - RNA, 32 nt, Human
aucgucugcugcauacuugacuagccuggacu

SEQ ID NO: 333012 - RNA, 32 nt, Human
aucgucuggggagggcaccaguggaaagcccc

SEQ ID NO: 333013 - RNA, 32 nt, Human
aucgucuguuucaucaagaggagucgcggcgg

SEQ ID NO: 333014 - RNA, 32 nt, Human
aucgucuguuuccccggccuugcccccgcccg

SEQ ID NO: 333015 - RNA, 32 nt, Human
aucgucuuauccccauaauccuugccaucccu

SEQ ID NO: 333016 - RNA, 32 nt, Human
aucgucuucccaucuggguuuuuggguuuuuc

SEQ ID NO: 333017 - RNA, 32 nt, Human
aucgugacacugcacuccagccugggcgacag

SEQ ID NO: 333018 - RNA, 32 nt, Human
aucgugacacugcacuucagccuggcugacag

SEQ ID NO: 333019 - RNA, 32 nt, Human
aucgugacauggccuccagccugggugaccga

SEQ ID NO: 333020 - RNA, 32 nt, Human
aucgugaucaguaaagacuggaagagagggac

SEQ ID NO: 333021 - RNA, 32 nt, Human
aucgugauuucggccuauuuccuugccaggcc

SEQ ID NO: 333022 - RNA, 32 nt, Human
aucgugcaucacucucccuucugccuccuuca

SEQ ID NO: 333023 - RNA, 29 nt, Human
aucgugcaucuguguguccugggagcugc

SEQ ID NO: 333024 - RNA, 32 nt, Human
aucgugccaaugcacuccauccugggcaaaaa

SEQ ID NO: 333025 - RNA, 32 nt, Human
aucgugccaccuacacuccagccugggugaca

SEQ ID NO: 333026 - RNA, 32 nt, Human
aucgugccacgcacugcaaccugggugacaga

SEQ ID NO: 333027 - RNA, 32 nt, Human
aucgugccacuacacuccagccugggcaaaag

SEQ ID NO: 333028 - RNA, 32 nt, Human
aucgugccacuacacuccagccugggggacag

SEQ ID NO: 333029 - RNA, 32 nt, Human
aucgugccacuacacuccagccugggugacag

SEQ ID NO: 333030 - RNA, 32 nt, Human
aucgugccacuccacuccagccugggcaacag

SEQ ID NO: 333031 - RNA, 32 nt, Human
aucgugccacugaccuccagccugggggacag

SEQ ID NO: 333032 - RNA, 32 nt, Human
aucgugccacugcacaccauccuggaugacag

SEQ ID NO: 333033 - RNA, 32 nt, Human
aucgugccacugcaccacuccagccugggcaa

SEQ ID NO: 333034 - RNA, 32 nt, Human
aucgugccacugcaccccagccugggcaacag

SEQ ID NO: 333035 - RNA, 32 nt, Human
aucgugccacugcaccguagccugggugauaa

SEQ ID NO: 333036 - RNA, 32 nt, Human
aucgugccacugcacgccagccugggcaacag

SEQ ID NO: 333037 - RNA, 32 nt, Human
aucgugccacugcacuacaaccugggugauag

SEQ ID NO: 333038 - RNA, 32 nt, Human
aucgugccacugcacucaagccugggugacag

SEQ ID NO: 333039 - RNA, 32 nt, Human
aucgugccacugcacucaagccuggugacaga

SEQ ID NO: 333040 - RNA, 32 nt, Human
aucgugccacugcacuccaaccugggugagag

SEQ ID NO: 333041 - RNA, 32 nt, Human
aucgugccacugcacuccagacugggggagag

SEQ ID NO: 333042 - RNA, 32 nt, Human
aucgugccacugcacuccagacuuggugacag

SEQ ID NO: 333043 - RNA, 32 nt, Human
aucgugccacugcacuccagagccugggcgac

SEQ ID NO: 333044 - RNA, 32 nt, Human
aucgugccacugcacuccagcccaggcaacag

SEQ ID NO: 333045 - RNA, 32 nt, Human
aucgugccacugcacuccagccugaagacaga

SEQ ID NO: 333046 - RNA, 32 nt, Human
aucgugccacugcacuccagccugagcaacag

SEQ ID NO: 333047 - RNA, 32 nt, Human
aucgugccacugcacuccagccugcgggacag

SEQ ID NO: 333048 - RNA, 32 nt, Human
aucgugccacugcacuccagccuggacaacgg

SEQ ID NO: 333049 - RNA, 32 nt, Human
aucgugccacugcacuccagccuggaggacag

SEQ ID NO: 333050 - RNA, 32 nt, Human
aucgugccacugcacuccagccuggauuacag

SEQ ID NO: 333051 - RNA, 32 nt, Human
aucgugccacugcacuccagccuggcgacaca

SEQ ID NO: 333052 - RNA, 32 nt, Human
aucgugccacugcacuccagccugggagacag

SEQ ID NO: 333053 - RNA, 32 nt, Human
aucgugccacugcacuccagccugggcaacaa

SEQ ID NO: 333054 - RNA, 32 nt, Human
aucgugccacugcacuccagccugggcaacag

SEQ ID NO: 333055 - RNA, 32 nt, Human
aucgugccacugcacuccagccugggcaccac

SEQ ID NO: 333056 - RNA, 32 nt, Human
aucgugccacugcacuccagccugggcaccag

SEQ ID NO: 333057 - RNA, 32 nt, Human
aucgugccacugcacuccagccugggccacag

SEQ ID NO: 333058 - RNA, 32 nt, Human
aucgugccacugcacuccagccugggcgacaa

SEQ ID NO: 333059 - RNA, 32 nt, Human
aucgugccacugcacuccagccugggcgacag

SEQ ID NO: 333060 - RNA, 32 nt, Human
aucgugccacugcacuccagccugggcgacga

SEQ ID NO: 333061 - RNA, 32 nt, Human
aucgugccacugcacuccagccugggcuacaa

SEQ ID NO: 333062 - RNA, 32 nt, Human
aucgugccacugcacuccagccuggggaacag

SEQ ID NO: 333063 - RNA, 32 nt, Human
aucgugccacugcacuccagccugggggacag

SEQ ID NO: 333064 - RNA, 32 nt, Human
aucgugccacugcacuccagccugggugacaa

SEQ ID NO: 333065 - RNA, 32 nt, Human
aucgugccacugcacuccagccugggugacac

SEQ ID NO: 333066 - RNA, 32 nt, Human
aucgugccacugcacuccagccugggugacag

SEQ ID NO: 333067 - RNA, 32 nt, Human
aucgugccacugcacuccagccugggugauag

SEQ ID NO: 333068 - RNA, 32 nt, Human
aucgugccacugcacuccagccuggguggaca

SEQ ID NO: 333069 - RNA, 32 nt, Human
aucgugccacugcacuccagccuggucaacag

SEQ ID NO: 333070 - RNA, 32 nt, Human
aucgugccacugcacuccagccuggugacaga

SEQ ID NO: 333071 - RNA, 32 nt, Human
aucgugccacugcacuccagccuggugagagc

SEQ ID NO: 333072 - RNA, 32 nt, Human
aucgugccacugcacuccagccugguugacag

SEQ ID NO: 333073 - RNA, 32 nt, Human
aucgugccacugcacuccagccuugagacaga

SEQ ID NO: 333074 - RNA, 32 nt, Human
aucgugccacugcacuccagccuuggugacag

SEQ ID NO: 333075 - RNA, 32 nt, Human
aucgugccacugcacuccagcuugggcaacaa

SEQ ID NO: 333076 - RNA, 32 nt, Human
aucgugccacugcacuccaggcugggcgacag

SEQ ID NO: 333077 - RNA, 32 nt, Human
aucgugccacugcacuccaggcugggugacag

SEQ ID NO: 333078 - RNA, 32 nt, Human
aucgugccacugcacuccagucugggcaacag

SEQ ID NO: 333079 - RNA, 32 nt, Human
aucgugccacugcacuccagucugggugacag

SEQ ID NO: 333080 - RNA, 32 nt, Human
aucgugccacugcacuccauccuggacgacag

SEQ ID NO: 333081 - RNA, 32 nt, Human
aucgugccacugcacucccagccugggcaacg

SEQ ID NO: 333082 - RNA, 32 nt, Human
aucgugccacugcacuccggccugggugaugg

SEQ ID NO: 333083 - RNA, 32 nt, Human
aucgugccacugcacucuagccggggcgacag

SEQ ID NO: 333084 - RNA, 32 nt, Human
aucgugccacugcacucuagccugggcgacag

SEQ ID NO: 333085 - RNA, 32 nt, Human
aucgugccacugcacucuagccugggugacag

SEQ ID NO: 333086 - RNA, 32 nt, Human
aucgugccacugcacucuauccuggguaacag

SEQ ID NO: 333087 - RNA, 32 nt, Human
aucgugccacugcacuucagccugggugacag

SEQ ID NO: 333088 - RNA, 32 nt, Human
aucgugccacugcaguccagccuaggcaacag

SEQ ID NO: 333089 - RNA, 32 nt, Human
aucgugccacugcauuccagccugagcgacag

SEQ ID NO: 333090 - RNA, 32 nt, Human
aucgugccacugcauuccagccugggagagag

SEQ ID NO: 333091 - RNA, 32 nt, Human
aucgugccacugcauuccagccugggcgacag

SEQ ID NO: 333092 - RNA, 32 nt, Human
aucgugccacugcauuccagccugggugacag

SEQ ID NO: 333093 - RNA, 32 nt, Human
aucgugccacugcauuccagccugguugacag

SEQ ID NO: 333094 - RNA, 32 nt, Human
aucgugccacugcgcuccagccugggugacag

SEQ ID NO: 333095 - RNA, 32 nt, Human
aucgugccacugcgcuccagccuggguggcag

SEQ ID NO: 333096 - RNA, 32 nt, Human
aucgugccacugcucuccagccugggugacag

SEQ ID NO: 333097 - RNA, 32 nt, Human
aucgugccacuguacaucaccagccugggcga

SEQ ID NO: 333098 - RNA, 32 nt, Human
aucgugccacuguacucuagccuggaagacag

SEQ ID NO: 333099 - RNA, 32 nt, Human
aucgugccacuucacuccagccugggcaaaag

SEQ ID NO: 333100 - RNA, 32 nt, Human
aucgugccagugcacuccagccugggugacag

SEQ ID NO: 333101 - RNA, 32 nt, Human
aucgugccauuacacuccagccugggcgaaag

SEQ ID NO: 333102 - RNA, 32 nt, Human
aucgugccauuccacuccagccugggcaacga

SEQ ID NO: 333103 - RNA, 32 nt, Human
aucgugccauugcacuacagccugggcaacaa

SEQ ID NO: 333104 - RNA, 32 nt, Human
aucgugccauugcacuccagcccggaugacag

SEQ ID NO: 333105 - RNA, 32 nt, Human
aucgugccauugcacuccagccuaggcaacaa

SEQ ID NO: 333106 - RNA, 32 nt, Human
aucgugccauugcacuccagccuaggcaagaa

SEQ ID NO: 333107 - RNA, 32 nt, Human
aucgugccauugcacuccagccuaggcaauaa

SEQ ID NO: 333108 - RNA, 32 nt, Human
aucgugccauugcacuccagccuggaugacaa

SEQ ID NO: 333109 - RNA, 32 nt, Human
aucgugccauugcacuccagccuggccacaga

SEQ ID NO: 333110 - RNA, 32 nt, Human
aucgugccauugcacuccagccuggcgacaag

SEQ ID NO: 333111 - RNA, 32 nt, Human
aucgugccauugcacuccagccuggcgacaga

SEQ ID NO: 333112 - RNA, 32 nt, Human
aucgugccauugcacuccagccugggcaacaa

SEQ ID NO: 333113 - RNA, 32 nt, Human
aucgugccauugcacuccagccugggcaacag

SEQ ID NO: 333114 - RNA, 32 nt, Human
aucgugccauugcacuccagccugggcaauag

SEQ ID NO: 333115 - RNA, 32 nt, Human
aucgugccauugcacuccagccugggcgacaa

SEQ ID NO: 333116 - RNA, 32 nt, Human
aucgugccauugcacuccagccugggugacag

SEQ ID NO: 333117 - RNA, 32 nt, Human
aucgugccauugcacuccagucugggagacaa

SEQ ID NO: 333118 - RNA, 32 nt, Human
aucgugccauugcacuccagucuggguaagaa

SEQ ID NO: 333119 - RNA, 32 nt, Human
aucgugccauugcacuccggccugggcaacaa

SEQ ID NO: 333120 - RNA, 32 nt, Human
aucgugccauugcauuccagccugggagacgg

SEQ ID NO: 333121 - RNA, 32 nt, Human
aucgugccauugcgcuccagccuaggugacag

SEQ ID NO: 333122 - RNA, 32 nt, Human
aucgugccauugcgcuccagccugggcaacaa

SEQ ID NO: 333123 - RNA, 32 nt, Human
aucgugccauugugcuccagccugggcaacaa

SEQ ID NO: 333124 - RNA, 32 nt, Human
aucgugccauugugcuccagccugggcaacag

SEQ ID NO: 333125 - RNA, 32 nt, Human
aucgugcccaggaggcgagaaagggcugggcg

SEQ ID NO: 333126 - RNA, 32 nt, Human
aucgugccgcugcauccagccugagcaacaga

SEQ ID NO: 333127 - RNA, 32 nt, Human
aucgugccguugcacuccagccugggcaacaa

SEQ ID NO: 333128 - RNA, 32 nt, Human
aucgugccguugcacuccagccugggcgacaa

SEQ ID NO: 333129 - RNA, 32 nt, Human
aucgugccucugcacuccaaccugggugaugg

SEQ ID NO: 333130 - RNA, 32 nt, Human
aucgugccuguacuguacuccagccugggaaa

SEQ ID NO: 333131 - RNA, 32 nt, Human
aucgugcuacugcacuccagccccagcugggu

SEQ ID NO: 333132 - RNA, 32 nt, Human
aucgugcuacugcacuccagccugggcaacac

SEQ ID NO: 333133 - RNA, 32 nt, Human
aucgugcuacugcacuccagccugggggacag

SEQ ID NO: 333134 - RNA, 32 nt, Human
aucgugcuacugcacuccagucugggugacag

SEQ ID NO: 333135 - RNA, 32 nt, Human
aucgugcuacugcaguccagccugggcuacag

SEQ ID NO: 333136 - RNA, 32 nt, Human
aucgugcuauugcacuccagccugggcgacag

SEQ ID NO: 333137 - RNA, 32 nt, Human
aucgugcugcagcuggacgacauccagcaugc

SEQ ID NO: 333138 - RNA, 32 nt, Human
aucgugcugcugcacuccagccugggcaauag

SEQ ID NO: 333139 - RNA, 32 nt, Human
aucguggccacugcaauccagccugggcgaua

SEQ ID NO: 333140 - RNA, 32 nt, Human
aucguggcucacugaagccuccgcuuccuggg

SEQ ID NO: 333141 - RNA, 32 nt, Human
aucguggcucacugcagccuccaucucccggg

SEQ ID NO: 333142 - RNA, 32 nt, Human
aucgugggcaucuccccuuaugauuacuaaau

SEQ ID NO: 333143 - RNA, 32 nt, Human
aucgugggcuugggggacagcaagaaagcugc

SEQ ID NO: 333144 - RNA, 32 nt, Human
aucgugguggggugggacaggaguauaguugu

SEQ ID NO: 333145 - RNA, 32 nt, Human
aucgugucacuacacuccaggcugggugacag

SEQ ID NO: 333146 - RNA, 32 nt, Human
aucgugucacugcacuccagccuggcgacaga

SEQ ID NO: 333147 - RNA, 32 nt, Human
aucgugucacugcacuccagccugggcgacag

SEQ ID NO: 333148 - RNA, 32 nt, Human
aucgugucacugcacuccagccugggugacaa

SEQ ID NO: 333149 - RNA, 32 nt, Human
aucgugucacugcacuccagccuggugacaga

SEQ ID NO: 333150 - RNA, 32 nt, Human
aucgugucagugcacggcuagccugggcaaca

SEQ ID NO: 333151 - RNA, 32 nt, Human
aucgugucuggcccaaucucugugucaucauu

SEQ ID NO: 333152 - RNA, 32 nt, Human
aucguguucaccacuguaugccaaggcuuuuc

SEQ ID NO: 333153 - RNA, 32 nt, Human
aucguguucccugagagacgcccucaaauuuu

SEQ ID NO: 333154 - RNA, 32 nt, Human
aucguguugacagcaaagaaacagagugcuaa

SEQ ID NO: 333155 - RNA, 32 nt, Human
aucguuaaagaaucuggagugaagcacaaggg

SEQ ID NO: 333156 - RNA, 32 nt, Human
aucguuaaagcugaaggaagaggaucaccuuc

SEQ ID NO: 333157 - RNA, 32 nt, Human
aucguuacaguuggagaggauggucgaauaaa

SEQ ID NO: 333158 - RNA, 32 nt, Human
aucguucggggcgcaguccucuccccggcugg

SEQ ID NO: 333159 - RNA, 21 nt, Human
aucguucugcacuucagcuuc

SEQ ID NO: 333160 - RNA, 23 nt, Human
aucguucuggaaagccucacuuc

SEQ ID NO: 333161 - RNA, 21 nt, Human
aucguucuuaacacgcauuuc

SEQ ID NO: 333162 - RNA, 32 nt, Human
aucguuucucaggcugcccaaggcucuucugu

SEQ ID NO: 333163 - RNA, 32 nt, Human
aucguuugaacccaggaggcggagguugcagu

SEQ ID NO: 333164 - RNA, 32 nt, Human
aucguuugaacccaggaggcugagguugcagu

SEQ ID NO: 333165 - RNA, 32 nt, Human
aucguuugaacccgggaagcggagguugcagg

SEQ ID NO: 333166 - RNA, 32 nt, Human
aucguuugaacccgggaggcggaggcugcagu

SEQ ID NO: 333167 - RNA, 32 nt, Human
aucguuugagcucaggagguugggucugcagu

SEQ ID NO: 333168 - RNA, 32 nt, Human
aucguuuguacccagagucggcauggccaccu

SEQ ID NO: 333169 - RNA, 32 nt, Human
aucguuuuacaugucacaccuaacucaacaua

SEQ ID NO: 333170 - RNA, 32 nt, Human
aucuaaaaagcccaguggcucuuuaguuuggc

SEQ ID NO: 333171 - RNA, 32 nt, Human
aucuaaaaauuagcugggcacaguggcucccu

SEQ ID NO: 333172 - RNA, 32 nt, Human
aucuaaaaauuagcugggugugguggugcaug

SEQ ID NO: 333173 - RNA, 32 nt, Human
aucuaaaaucauagcccuuucuugucacugcu

SEQ ID NO: 333174 - RNA, 32 nt, Human
aucuaaaauguucuguuucuagugccaguucu

SEQ ID NO: 333175 - RNA, 32 nt, Human
aucuaaacaggccuugcugggcuucccagcuc

SEQ ID NO: 333176 - RNA, 32 nt, Human
aucuaaaccugaaaaaugaauugauauucuga

SEQ ID NO: 333177 - RNA, 32 nt, Human
aucuaaagcaauagacuagaacugaauuaucu

SEQ ID NO: 333178 - RNA, 32 nt, Human
aucuaaaggauaagcacagugccuaauguaca

SEQ ID NO: 333179 - RNA, 32 nt, Human
aucuaaauggggacaaggcagguggaggggag

SEQ ID NO: 333180 - RNA, 32 nt, Human
aucuaacagacauaccugcagcuuuggcucuu

SEQ ID NO: 333181 - RNA, 32 nt, Human
aucuaaccaagauaugcaaaagaugcauucag

SEQ ID NO: 333182 - RNA, 32 nt, Human
aucuaaccggcucccucgccagucccgggggc

SEQ ID NO: 333183 - RNA, 32 nt, Human
aucuaacgggacuagggugggauagggaggaa

SEQ ID NO: 333184 - RNA, 32 nt, Human
aucuaacucaagcugaucgucuugcccucuau

SEQ ID NO: 333185 - RNA, 32 nt, Human
aucuaacugcgcucccccaaccccucgcccug

SEQ ID NO: 333186 - RNA, 32 nt, Human
aucuaacuugagccucacaguaacccuguaaa

SEQ ID NO: 333187 - RNA, 32 nt, Human
aucuaagaagcagagguugcagugagcugaga

SEQ ID NO: 333188 - RNA, 32 nt, Human
aucuaagacuccaaggcaccaaggucucuucu

SEQ ID NO: 333189 - RNA, 32 nt, Human
aucuaagagagagguuaaucacacuauagagg

SEQ ID NO: 333190 - RNA, 32 nt, Human
aucuaagaucuuugaacaccuggaccuuuaca

SEQ ID NO: 333191 - RNA, 32 nt, Human
aucuaagcagagggaaguaaaccucucaccgc

SEQ ID NO: 333192 - RNA, 32 nt, Human
aucuaagcaguuuucacccccucagaaaccac

SEQ ID NO: 333193 - RNA, 32 nt, Human
aucuaagcauuuuuguucucagcuucacagag

SEQ ID NO: 333194 - RNA, 32 nt, Human
aucuaagcucuuguaagugaguuaauuuaaaa

SEQ ID NO: 333195 - RNA, 32 nt, Human
aucuaagcuggcagaggcagggagagagaaac

SEQ ID NO: 333196 - RNA, 30 nt, Human
aucuaaggaugucacagggccaacuugagg

SEQ ID NO: 333197 - RNA, 32 nt, Human
aucuaaggcccacguaaccagucguuucaaau

SEQ ID NO: 333198 - RNA, 32 nt, Human
aucuaaggggucuggggaguccugcccugcaa

SEQ ID NO: 333199 - RNA, 22 nt, Human
aucuaaggucacugcaagcucc

SEQ ID NO: 333200 - RNA, 32 nt, Human
aucuaaggugguaguucucuacucacaucuuu

SEQ ID NO: 333201 - RNA, 32 nt, Human
aucuaaguaaaauguuuugaaguuuaucagaa

SEQ ID NO: 333202 - RNA, 32 nt, Human
aucuaaguaaacauguauuacucaaaguaaua

SEQ ID NO: 333203 - RNA, 32 nt, Human
aucuaaguucccagaggguuuguuuauuucua

SEQ ID NO: 333204 - RNA, 32 nt, Human
aucuaauaaaagucuaguuuaaaagaggagcg

SEQ ID NO: 333205 - RNA, 32 nt, Human
aucuaaucuuucucauaauuaucuccuucuag

SEQ ID NO: 333206 - RNA, 32 nt, Human
aucuaaugagccuguccggagcagaacacccc

SEQ ID NO: 333207 - RNA, 32 nt, Human
aucuaaugcauccuauauccaguaaguagaau

SEQ ID NO: 333208 - RNA, 32 nt, Human
aucuaaugccucugcugaucugccaggaggag

SEQ ID NO: 333209 - RNA, 32 nt, Human
aucuaauggaaaggagaguugacugaaguugg

SEQ ID NO: 333210 - RNA, 32 nt, Human
aucuaauuaaauggcaucagcacuuuaaccaa

SEQ ID NO: 333211 - RNA, 32 nt, Human
aucuaauuacuuuuauauuaaagccacuucca

SEQ ID NO: 333212 - RNA, 32 nt, Human
aucuaauugauacaauuguagaacaaaauguc

SEQ ID NO: 333213 - RNA, 32 nt, Human
aucuaauuucauccucaccccacccuccaggg

SEQ ID NO: 333214 - RNA, 32 nt, Human
aucuaauuucucuuggcagauuugcauauuuc

SEQ ID NO: 333215 - RNA, 32 nt, Human
aucuacaauuaaacaauauuuccucuuggccg

SEQ ID NO: 333216 - RNA, 32 nt, Human
aucuacacguacuccggccuuuucuguguggu

SEQ ID NO: 333217 - RNA, 32 nt, Human
aucuacacucaguuucauuacagggaaggaac

SEQ ID NO: 333218 - RNA, 32 nt, Human
aucuacacuccuuucucaaggcugacuuugua

SEQ ID NO: 333219 - RNA, 32 nt, Human
aucuacacugauuuuggacuguuaccuaaguu

SEQ ID NO: 333220 - RNA, 32 nt, Human
aucuacacugcugcccacuccucucuccagcu

SEQ ID NO: 333221 - RNA, 32 nt, Human
aucuacagagcagcaagucuccccacuccacc

SEQ ID NO: 333222 - RNA, 32 nt, Human
aucuacagagcauccacugaacaacauacauu

SEQ ID NO: 333223 - RNA, 32 nt, Human
aucuacagcacugguguaaaagaagggucugc

SEQ ID NO: 333224 - RNA, 32 nt, Human
aucuacaggagagagacugagaggaagaaggc

SEQ ID NO: 333225 - RNA, 32 nt, Human
aucuacauccaccauuuguuaugcaguguucc

SEQ ID NO: 333226 - RNA, 32 nt, Human
aucuaccaggugcagggaagcacuccacaccc

SEQ ID NO: 333227 - RNA, 32 nt, Human
aucuaccaugaagaaggucaagaagaaaaggu

SEQ ID NO: 333228 - RNA, 32 nt, Human
aucuacccaagaaacaugaacacagggaguca

SEQ ID NO: 333229 - RNA, 32 nt, Human
aucuacccaagaaggcucggcacgggcaccaa

SEQ ID NO: 333230 - RNA, 32 nt, Human
aucuacccuccacggcccugaggccuuaucag

SEQ ID NO: 333231 - RNA, 32 nt, Human
aucuaccucugccucucucuuauaaggacacu

SEQ ID NO: 333232 - RNA, 32 nt, Human
aucuacgacagaaacauagcuacaaacgacuu

SEQ ID NO: 333233 - RNA, 32 nt, Human
aucuacggaguccaccccucccucucuagaac

SEQ ID NO: 333234 - RNA, 32 nt, Human
aucuacguaacagaagccuuaaccaucagaac

SEQ ID NO: 333235 - RNA, 32 nt, Human
aucuacguuguugcuuucuaaaaugaauguga

SEQ ID NO: 333236 - RNA, 32 nt, Human
aucuacuaaaaauacaaaaauuagccaggcau

SEQ ID NO: 333237 - RNA, 32 nt, Human
aucuacuaaaaauacaaaaauuagccggacgu

SEQ ID NO: 333238 - RNA, 32 nt, Human
aucuacuaaaaauacaaaaauuagccgggcau

SEQ ID NO: 333239 - RNA, 32 nt, Human
aucuacuaaaaauacaaaaauuagucaacugc

SEQ ID NO: 333240 - RNA, 28 nt, Human
aucuacuaaaauacaaaaauuagccggg

SEQ ID NO: 333241 - RNA, 32 nt, Human
aucuacuaaaguacaaaggaauucuuuggaag

SEQ ID NO: 333242 - RNA, 32 nt, Human
aucuacuauuuuuauauacgguguauuccucu

SEQ ID NO: 333243 - RNA, 32 nt, Human
aucuacucaccauccuuccucagcacaccccc

SEQ ID NO: 333244 - RNA, 32 nt, Human
aucuacucccccaagugacuccaggugccccc

SEQ ID NO: 333245 - RNA, 32 nt, Human
aucuacucuccucaucucuaacagcucaggau

SEQ ID NO: 333246 - RNA, 32 nt, Human
aucuacucuuauacugacauucccaguaaaac

SEQ ID NO: 333247 - RNA, 32 nt, Human
aucuacugaacaaauauugggauaacuccaaa

SEQ ID NO: 333248 - RNA, 32 nt, Human
aucuacugaggaccauccuggagccucacgcu

SEQ ID NO: 333249 - RNA, 32 nt, Human
aucuacugaggcaggagaauugcuugacccag

SEQ ID NO: 333250 - RNA, 32 nt, Human
aucuacuugugagcuaucugccccaggcaggc

SEQ ID NO: 333251 - RNA, 32 nt, Human
aucuacuuucucuauaaauuugcccuuucugg

SEQ ID NO: 333252 - RNA, 32 nt, Human
aucuacuuuuccacuccagagugggaaaaauu

SEQ ID NO: 333253 - RNA, 32 nt, Human
aucuagaaaagcuuucacauugaagaucaacu

SEQ ID NO: 333254 - RNA, 32 nt, Human
aucuagaaacaugaaauuaguauuccaaagag

SEQ ID NO: 333255 - RNA, 32 nt, Human
aucuagaaaccagcagcuacuggcucaaauuc

SEQ ID NO: 333256 - RNA, 32 nt, Human
aucuagaaaguguggggaaacuuuaaacccaa

SEQ ID NO: 333257 - RNA, 32 nt, Human
aucuagaaaugagagacaucugaauggggcag

SEQ ID NO: 333258 - RNA, 32 nt, Human
aucuagaacagccuggucaacauggugaaacc

SEQ ID NO: 333259 - RNA, 32 nt, Human
aucuagaacagcuuccacuuuggcagugaggu

SEQ ID NO: 333260 - RNA, 32 nt, Human
aucuagaaccugggaaugugacuuuaauuugg

SEQ ID NO: 333261 - RNA, 32 nt, Human
aucuagaacuauacuguccaguaccauagccu

SEQ ID NO: 333262 - RNA, 32 nt, Human
aucuagaagacugucagcuuccaaacauuaau

SEQ ID NO: 333263 - RNA, 32 nt, Human
aucuagaagguaugggguagagcuugacaggg

SEQ ID NO: 333264 - RNA, 32 nt, Human
aucuagaaguaguaguuugauucugguuuccc

SEQ ID NO: 333265 - RNA, 32 nt, Human
aucuagaauccaugugacuugcagccuaccug

SEQ ID NO: 333266 - RNA, 32 nt, Human
aucuagacacgagggaaacagugcaaagcuag

SEQ ID NO: 333267 - RNA, 32 nt, Human
aucuagacacuagcgauuauguguuuucucug

SEQ ID NO: 333268 - RNA, 32 nt, Human
aucuagaccagggauccccaccccugggcugc

SEQ ID NO: 333269 - RNA, 32 nt, Human
aucuagacucacugcaaccuccaccuccugug

SEQ ID NO: 333270 - RNA, 32 nt, Human
aucuagagcccauguucuuuaacugcaacacu

SEQ ID NO: 333271 - RNA, 32 nt, Human
aucuagaguagguucauuccugggcuucacag

SEQ ID NO: 333272 - RNA, 32 nt, Human
aucuagauucuacauguuaccauugguuuauu

SEQ ID NO: 333273 - RNA, 32 nt, Human
aucuagcaaggacucuuucgugucacaccuua

SEQ ID NO: 333274 - RNA, 32 nt, Human
aucuagcaccagcauuucucucaccaggugaa

SEQ ID NO: 333275 - RNA, 32 nt, Human
aucuagccucaagcucuggcugaacuuugugg

SEQ ID NO: 333276 - RNA, 32 nt, Human
aucuagccugcccugccugccugcccugggcg

SEQ ID NO: 333277 - RNA, 32 nt, Human
aucuagcucacugcaacccugcaaccucugcc

SEQ ID NO: 333278 - RNA, 32 nt, Human
aucuaggaauuguugguguucaagagggagcu

SEQ ID NO: 333279 - RNA, 32 nt, Human
aucuaggacaugcagacucacugugagcgaga

SEQ ID NO: 333280 - RNA, 32 nt, Human
aucuaggagaggggagggcagagggggugagg

SEQ ID NO: 333281 - RNA, 32 nt, Human
aucuaggaggcagagguugcagugaacugaga

SEQ ID NO: 333282 - RNA, 32 nt, Human
aucuaggaggcugggagccaggugacaggaug

SEQ ID NO: 333283 - RNA, 32 nt, Human
aucuaggagguaagagagucagcuucaauacu

SEQ ID NO: 333284 - RNA, 32 nt, Human
aucuaggcacuuccuccagccucaggcagcca

SEQ ID NO: 333285 - RNA, 32 nt, Human
aucuaggcacuuuggaauuugaccucacagau

SEQ ID NO: 333286 - RNA, 32 nt, Human
aucuaggcagagugccuuagucagggaccacg

SEQ ID NO: 333287 - RNA, 32 nt, Human
aucuaggcucaccacaaccucugccuuccagg

SEQ ID NO: 333288 - RNA, 22 nt, Human
aucuaggcucacugcaaccucc

SEQ ID NO: 333289 - RNA, 32 nt, Human
aucuaggcucacugcaaccuccaccucccagg

SEQ ID NO: 333290 - RNA, 32 nt, Human
aucuaggcucacugcaaccuccuucucccagg

SEQ ID NO: 333291 - RNA, 32 nt, Human
aucuaggcucacugcaaccucugucuccaggg

SEQ ID NO: 333292 - RNA, 32 nt, Human
aucuaggcucacugcaaccuucaccgcccagg

SEQ ID NO: 333293 - RNA, 32 nt, Human
aucuaggcucacugcaacuuccgccucccggg

SEQ ID NO: 333294 - RNA, 32 nt, Human
aucuaggcuuaucuccuugucuugaaauccau

SEQ ID NO: 333295 - RNA, 32 nt, Human
aucuagggagacucaagagggagaagugacuc

SEQ ID NO: 333296 - RNA, 32 nt, Human
aucuaggggagccugggcugcgugcaugucga

SEQ ID NO: 333297 - RNA, 32 nt, Human
aucuaggucuacuccauuccuccuggcccacc

SEQ ID NO: 333298 - RNA, 32 nt, Human
aucuagguguccaccugcgucuguggaagaag

SEQ ID NO: 333299 - RNA, 32 nt, Human
aucuagguuauccaauucuuugauauguaauu

SEQ ID NO: 333300 - RNA, 32 nt, Human
aucuagucagugucucuggguuuugguagcag

SEQ ID NO: 333301 - RNA, 32 nt, Human
aucuagucuugaccucuccagcaucccagccu

SEQ ID NO: 333302 - RNA, 32 nt, Human
aucuagugagggagacaggugcagaugaggug

SEQ ID NO: 333303 - RNA, 32 nt, Human
aucuagugcauggaccuccuuguugacugcug

SEQ ID NO: 333304 - RNA, 23 nt, Human
aucuagugcucacaugaucugaa

SEQ ID NO: 333305 - RNA, 32 nt, Human
aucuaguggaaagacaagacagauaacagaua

SEQ ID NO: 333306 - RNA, 32 nt, Human
aucuaguggaggacagggcaagggaggaaaga

SEQ ID NO: 333307 - RNA, 32 nt, Human
aucuaguggggauguggagaaccuuugugucu

SEQ ID NO: 333308 - RNA, 32 nt, Human
aucuagugugcucagggcuugguacaaugagc

SEQ ID NO: 333309 - RNA, 32 nt, Human
aucuaguguguaucugcuccucucggacugug

SEQ ID NO: 333310 - RNA, 32 nt, Human
aucuauaaaaugagagaaaauauuugcaaucc

SEQ ID NO: 333311 - RNA, 32 nt, Human
aucuauacagaaaugcugcuggaugaauggaa

SEQ ID NO: 333312 - RNA, 32 nt, Human
aucuauagaaaaguagagugagggugaauuua

SEQ ID NO: 333313 - RNA, 32 nt, Human
aucuauagacccaguaaugucauuuauagcua

SEQ ID NO: 333314 - RNA, 32 nt, Human
aucuauagccacagccugaagcuuugaccacu

SEQ ID NO: 333315 - RNA, 32 nt, Human
aucuauagguugucucugcuguucauuguuuc

SEQ ID NO: 333316 - RNA, 32 nt, Human
aucuauagugcauuuggcaugugcgucuuugg

SEQ ID NO: 333317 - RNA, 32 nt, Human
aucuauauaauagaaacgcacacacacgaaaa

SEQ ID NO: 333318 - RNA, 32 nt, Human
aucuauauguguauuauguauguaugugugca

SEQ ID NO: 333319 - RNA, 32 nt, Human
aucuauauuaaaaauaacaaaaauuagccagg

SEQ ID NO: 333320 - RNA, 32 nt, Human
aucuaucaaacugucugcauuagugcaauuaa

SEQ ID NO: 333321 - RNA, 32 nt, Human
aucuaucaaugcguggcagagaacagcacggg

SEQ ID NO: 333322 - RNA, 32 nt, Human
aucuaucacaccacugugcucuagccugggug

SEQ ID NO: 333323 - RNA, 32 nt, Human
aucuaucacccagucaugugcacugaauguuc

SEQ ID NO: 333324 - RNA, 32 nt, Human
aucuaucauaagcagaccuaagcacaguuuua

SEQ ID NO: 333325 - RNA, 32 nt, Human
aucuauccaauacauuaaggaaaagucccacu

SEQ ID NO: 333326 - RNA, 32 nt, Human
aucuaucugaagauggaggcuuaucggugagu

SEQ ID NO: 333327 - RNA, 32 nt, Human
aucuaucuggcuggcagggaaggaaagaacuu

SEQ ID NO: 333328 - RNA, 32 nt, Human
aucuaucugucuuugcaagcagucuucagguu

SEQ ID NO: 333329 - RNA, 28 nt, Human
aucuaucuuccuguagccucaucaaucc

SEQ ID NO: 333330 - RNA, 32 nt, Human
aucuaugaaggacagggagcagcucuggucug

SEQ ID NO: 333331 - RNA, 29 nt, Human
aucuaugacuccaggucuucagcacccac

SEQ ID NO: 333332 - RNA, 32 nt, Human
aucuaugacuuaucuaaucugccuaucaaucu

SEQ ID NO: 333333 - RNA, 32 nt, Human
aucuaugcagccaagcucagcacuuugucaca

SEQ ID NO: 333334 - RNA, 32 nt, Human
aucuaugcagccaagcucggcacuuuguagca

SEQ ID NO: 333335 - RNA, 32 nt, Human
aucuaugccccacuucuucucuugccucaccu

SEQ ID NO: 333336 - RNA, 32 nt, Human
aucuaugcucacuguagccuugaccuucuggg

SEQ ID NO: 333337 - RNA, 32 nt, Human
aucuauggcacugacuacaggccauguccagg

SEQ ID NO: 333338 - RNA, 32 nt, Human
aucuauggcugggcccuuccuucccucuucuu

SEQ ID NO: 333339 - RNA, 32 nt, Human
aucuaugggaagcagacaucugagggagcaaa

SEQ ID NO: 333340 - RNA, 32 nt, Human
aucuaugggaggaaacugaagcucaggaggcu

SEQ ID NO: 333341 - RNA, 32 nt, Human
aucuaugguuucauuccuccccuggcucuucu

SEQ ID NO: 333342 - RNA, 32 nt, Human
aucuauguagaauauaaaggaagccugaacca

SEQ ID NO: 333343 - RNA, 32 nt, Human
aucuaugucauauuuugccacugccuuucaga

SEQ ID NO: 333344 - RNA, 32 nt, Human
aucuaugucuucaagcagcagaaccuggagca

SEQ ID NO: 333345 - RNA, 32 nt, Human
aucuaugugggauauugaguauccauugaaau

SEQ ID NO: 333346 - RNA, 32 nt, Human
aucuauguuaucugaguauauguuuggguaac

SEQ ID NO: 333347 - RNA, 32 nt, Human
aucuauuaaaggcaauagccaauaaaacauuu

SEQ ID NO: 333348 - RNA, 32 nt, Human
aucuauuaaggaagaacaaggaagggaaugau

SEQ ID NO: 333349 - RNA, 32 nt, Human
aucuauuacugaggaaaaccagaggaagccug

SEQ ID NO: 333350 - RNA, 32 nt, Human
aucuauuauucccccgaauuucuugguuccuu

SEQ ID NO: 333351 - RNA, 32 nt, Human
aucuauucguuugagccugagacacucuuuga

SEQ ID NO: 333352 - RNA, 32 nt, Human
aucuauucucuccaaaaaugcacccaacuagc

SEQ ID NO: 333353 - RNA, 32 nt, Human
aucuauucucucugaagucuucuaccuggagg

SEQ ID NO: 333354 - RNA, 32 nt, Human
aucuauugacaugcccacaaaacagguuuauu

SEQ ID NO: 333355 - RNA, 31 nt, Human
aucuauugacuucucucuaugggagguuaga

SEQ ID NO: 333356 - RNA, 32 nt, Human
aucuauugagccagcagcuguuguaccuguua

SEQ ID NO: 333357 - RNA, 32 nt, Human
aucuauuguugacucacauuuagauugauucc

SEQ ID NO: 333358 - RNA, 32 nt, Human
aucuauuuaaagacauuuauauuaauuugaaa

SEQ ID NO: 333359 - RNA, 32 nt, Human
aucuauuucagguuguggcucuugguucuagg

SEQ ID NO: 333360 - RNA, 32 nt, Human
aucuauuuugaaucuguaaauauuuuaaaugu

SEQ ID NO: 333361 - RNA, 22 nt, Human
aucucaaaaacauuaaguugag

SEQ ID NO: 333362 - RNA, 32 nt, Human
aucucaaaagaaaagaaagaaagggaaguaga

SEQ ID NO: 333363 - RNA, 32 nt, Human
aucucaaacccugcauccauccuuccuccagc

SEQ ID NO: 333364 - RNA, 32 nt, Human
aucucaaagacguggauuuucauuucaguaag

SEQ ID NO: 333365 - RNA, 32 nt, Human
aucucaaagccaccagcguucuugccuagugu

SEQ ID NO: 333366 - RNA, 32 nt, Human
aucucaaauacaguacauuuacauuacuguag

SEQ ID NO: 333367 - RNA, 32 nt, Human
aucucaacucaccgcaaccuccgccucccggg

SEQ ID NO: 333368 - RNA, 32 nt, Human
aucucaacucaccgcaaccuccuccucuuggg

SEQ ID NO: 333369 - RNA, 22 nt, Human
aucucaacucacugcaaccucc

SEQ ID NO: 333370 - RNA, 32 nt, Human
aucucaacucacugcaaccuccacccgccggg

SEQ ID NO: 333371 - RNA, 24 nt, Human
aucucaacucacugcaaccucugc

SEQ ID NO: 333372 - RNA, 32 nt, Human
aucucaacucacugcaaccucugcccuucagg

SEQ ID NO: 333373 - RNA, 24 nt, Human
aucucaacucacugcaagcuccgc

SEQ ID NO: 333374 - RNA, 32 nt, Human
aucucaacucacugcaagcuccgccuccuggg

SEQ ID NO: 333375 - RNA, 32 nt, Human
aucucaacucauugcaaccuccaccugccggg

SEQ ID NO: 333376 - RNA, 22 nt, Human
aucucaagacuaucuuaagcua

SEQ ID NO: 333377 - RNA, 32 nt, Human
aucucaagacuccucccuuagcuacucaggag

SEQ ID NO: 333378 - RNA, 32 nt, Human
aucucaagccuugccuugucucugccucggaa

SEQ ID NO: 333379 - RNA, 32 nt, Human
aucucaagcgagcauaugaacugugugacaac

SEQ ID NO: 333380 - RNA, 32 nt, Human
aucucaaggaucuuccaugggaagaugugaca

SEQ ID NO: 333381 - RNA, 32 nt, Human
aucucaagugguaaguuguuugugcuuuaggc

SEQ ID NO: 333382 - RNA, 32 nt, Human
aucucaaguucuuccauuuucucccccacgag

SEQ ID NO: 333383 - RNA, 32 nt, Human
aucucaauaaaaggaaugcucuggcugcuggg

SEQ ID NO: 333384 - RNA, 32 nt, Human
aucucaaucucagcuacucgggaggcugaggc

SEQ ID NO: 333385 - RNA, 32 nt, Human
aucucaauguaagggugguuuggcaacaccuc

SEQ ID NO: 333386 - RNA, 32 nt, Human
aucucaauguagguaauaguucaugccauuca

SEQ ID NO: 333387 - RNA, 32 nt, Human
aucucacacagcaucggaaaauucauacugau

SEQ ID NO: 333388 - RNA, 32 nt, Human
aucucacagaagauguaugaaaagucauggcc

SEQ ID NO: 333389 - RNA, 32 nt, Human
aucucacaggagccugagaacuccuccuccug

SEQ ID NO: 333390 - RNA, 32 nt, Human
aucucacagggcuaucuucugcauuuaaagaa

SEQ ID NO: 333391 - RNA, 32 nt, Human
aucucaccacacugcuuuacagucuuccugaa

SEQ ID NO: 333392 - RNA, 32 nt, Human
aucucaccacuacacuccagccugggugacag

SEQ ID NO: 333393 - RNA, 32 nt, Human
aucucaccacugaacuccagccugggcgacag

SEQ ID NO: 333394 - RNA, 32 nt, Human
aucucaccacugcacuccagccugggcagcag

SEQ ID NO: 333395 - RNA, 32 nt, Human
aucucaccacuguacuccagccugggugacag

SEQ ID NO: 333396 - RNA, 32 nt, Human
aucucaccaugcacuccagccuagacaacagg

SEQ ID NO: 333397 - RNA, 32 nt, Human
aucucaccauuacacuccagccugggcgacaa

SEQ ID NO: 333398 - RNA, 32 nt, Human
aucucaccauugcacuccagccugggcgacug

SEQ ID NO: 333399 - RNA, 32 nt, Human
aucucaccccugcacuccagccugggcaacag

SEQ ID NO: 333400 - RNA, 32 nt, Human
aucucacccuguagacucacacacgacuccaa

SEQ ID NO: 333401 - RNA, 32 nt, Human
aucucaccgggcggcacuggccagcgccagcc

SEQ ID NO: 333402 - RNA, 24 nt, Human
aucucaccucacugcaaccuccgc

SEQ ID NO: 333403 - RNA, 32 nt, Human
aucucaccucacugcaaccuccgccuccuggg

SEQ ID NO: 333404 - RNA, 32 nt, Human
aucucaccucacugcaaccucugccucccggg

SEQ ID NO: 333405 - RNA, 32 nt, Human
aucucaccucacugcaagcucugccucccggg

SEQ ID NO: 333406 - RNA, 32 nt, Human
aucucaccuccaccagaccuccggacuaccug

SEQ ID NO: 333407 - RNA, 32 nt, Human
aucucaccuuacugcaaccaccacuuccuggg

SEQ ID NO: 333408 - RNA, 32 nt, Human
aucucacgccuguagucccagcacuuugggag

SEQ ID NO: 333409 - RNA, 32 nt, Human
aucucacggaccauccggucaccagaagugaa

SEQ ID NO: 333410 - RNA, 32 nt, Human
aucucacuccaccccacuuugucccugauguc

SEQ ID NO: 333411 - RNA, 32 nt, Human
aucucacuccaucacucaggcuggaguacagu

SEQ ID NO: 333412 - RNA, 32 nt, Human
aucucacugcaaccuccaccucccagguucaa

SEQ ID NO: 333413 - RNA, 32 nt, Human
aucucacugcaaccuccaucuccugucucagc

SEQ ID NO: 333414 - RNA, 32 nt, Human
aucucacugcaaccuccgccuuccaguugcaa

SEQ ID NO: 333415 - RNA, 32 nt, Human
aucucacugcaaccucugccucccgggcuuga

SEQ ID NO: 333416 - RNA, 32 nt, Human
aucucacugcaagcuccacuuccuggguucau

SEQ ID NO: 333417 - RNA, 32 nt, Human
aucucacugcaagcucugccucccagguucac

SEQ ID NO: 333418 - RNA, 32 nt, Human
aucucacugcauccuccgccucccggguucaa

SEQ ID NO: 333419 - RNA, 32 nt, Human
aucucacuggacugcagacccggccugguggg

SEQ ID NO: 333420 - RNA, 32 nt, Human
aucucacuggcuuaggacucagucccacaaga

SEQ ID NO: 333421 - RNA, 32 nt, Human
aucucacugucucccaggcuggaauguagggu

SEQ ID NO: 333422 - RNA, 32 nt, Human
aucucacuguugccuugaacuccugggcucaa

SEQ ID NO: 333423 - RNA, 21 nt, Human
aucucacuuaauucucuauga

SEQ ID NO: 333424 - RNA, 32 nt, Human
aucucacuucuucacauuuaccaaaaugucua

SEQ ID NO: 333425 - RNA, 32 nt, Human
aucucacuuuucuaauuuacaggcuggaacag

SEQ ID NO: 333426 - RNA, 32 nt, Human
aucucagaauguccccaccaauccccgccaca

SEQ ID NO: 333427 - RNA, 24 nt, Human
aucucagacagugaaagugaaaug

SEQ ID NO: 333428 - RNA, 22 nt, Human
aucucagacagugacugaaaug

SEQ ID NO: 333429 - RNA, 32 nt, Human
aucucagagaaugcggacuccuauguucaugu

SEQ ID NO: 333430 - RNA, 32 nt, Human
aucucagauauaacaugucuucuuuccauugg

SEQ ID NO: 333431 - RNA, 32 nt, Human
aucucagaucacugcaaccuccaccucccagg

SEQ ID NO: 333432 - RNA, 32 nt, Human
aucucagaucacugcaaccucugccucccggg

SEQ ID NO: 333433 - RNA, 32 nt, Human
aucucagaucacugcaaccucugccuccuggg

SEQ ID NO: 333434 - RNA, 22 nt, Human
aucucagauugugagguaaaug

SEQ ID NO: 333435 - RNA, 25 nt, Human
aucucagauuguggggguguggaug

SEQ ID NO: 333436 - RNA, 32 nt, Human
aucucagcacuuugggaggcucaggcgggagg

SEQ ID NO: 333437 - RNA, 32 nt, Human
aucucagccagaaaaaccaacuccucaucuug

SEQ ID NO: 333438 - RNA, 24 nt, Human
aucucagccagagagagugaacug

SEQ ID NO: 333439 - RNA, 32 nt, Human
aucucagccagcccugcucucucccucuuccc

SEQ ID NO: 333440 - RNA, 32 nt, Human
aucucagccagccuccagcaccuucccucuca

SEQ ID NO: 333441 - RNA, 32 nt, Human
aucucagccccaugggcucuaauugauuggga

SEQ ID NO: 333442 - RNA, 22 nt, Human
aucucagccccugcagcucugc

SEQ ID NO: 333443 - RNA, 32 nt, Human
aucucagcccucucaggagcagucuuccauca

SEQ ID NO: 333444 - RNA, 32 nt, Human
aucucagccugagacgcacagagaggucucuu

SEQ ID NO: 333445 - RNA, 32 nt, Human
aucucagcggcauuaagcugugccugagcgag

SEQ ID NO: 333446 - RNA, 31 nt, Human
aucucagcuacucaggagguugaggcaggag

SEQ ID NO: 333447 - RNA, 32 nt, Human
aucucagcuacuugggagacugaggcaggaga

SEQ ID NO: 333448 - RNA, 32 nt, Human
aucucagcuacuugggaggcugggcagaagaa

SEQ ID NO: 333449 - RNA, 32 nt, Human
aucucagcucacagcaaccuccgccucccagg

SEQ ID NO: 333450 - RNA, 32 nt, Human
aucucagcucacagcaaccuccgccucccggg

SEQ ID NO: 333451 - RNA, 32 nt, Human
aucucagcucacagcaaccucugccuccuggg

SEQ ID NO: 333452 - RNA, 32 nt, Human
aucucagcucaccaaaucucugccucccaggc

SEQ ID NO: 333453 - RNA, 32 nt, Human
aucucagcucaccacaaccucugccuccccgg

SEQ ID NO: 333454 - RNA, 32 nt, Human
aucucagcucaccgcaaccuccaccuccaggg

SEQ ID NO: 333455 - RNA, 32 nt, Human
aucucagcucaccgcaaccuccaccuccuggg

SEQ ID NO: 333456 - RNA, 32 nt, Human
aucucagcucaccgcaaccuccacucgcaggu

SEQ ID NO: 333457 - RNA, 32 nt, Human
aucucagcucaccgcaaccuccgccucccggg

SEQ ID NO: 333458 - RNA, 32 nt, Human
aucucagcucaccgcaaccucugccucccaga

SEQ ID NO: 333459 - RNA, 32 nt, Human
aucucagcucacggcaaccuccgccucccggg

SEQ ID NO: 333460 - RNA, 32 nt, Human
aucucagcucacuacaaccuccgccucccaug

SEQ ID NO: 333461 - RNA, 32 nt, Human
aucucagcucacuacaaccucugccacuggga

SEQ ID NO: 333462 - RNA, 32 nt, Human
aucucagcucacuacaaccucugccucccagg

SEQ ID NO: 333463 - RNA, 32 nt, Human
aucucagcucacuacaaccucugccuucuggu

SEQ ID NO: 333464 - RNA, 22 nt, Human
aucucagcucacuacaagcucc

SEQ ID NO: 333465 - RNA, 32 nt, Human
aucucagcucacuacaagcuccccuucccagg

SEQ ID NO: 333466 - RNA, 32 nt, Human
aucucagcucacucugcaaccuccacuuccca

SEQ ID NO: 333467 - RNA, 32 nt, Human
aucucagcucacugaagccucgaccuccagaa

SEQ ID NO: 333468 - RNA, 32 nt, Human
aucucagcucacugcaaacuccaccucccagg

SEQ ID NO: 333469 - RNA, 24 nt, Human
aucucagcucacugcaaacucugc

SEQ ID NO: 333470 - RNA, 32 nt, Human
aucucagcucacugcaaacucugccucccgaa

SEQ ID NO: 333471 - RNA, 32 nt, Human
aucucagcucacugcaacaccgccucccgggu

SEQ ID NO: 333472 - RNA, 32 nt, Human
aucucagcucacugcaacauccaccuccuggg

SEQ ID NO: 333473 - RNA, 24 nt, Human
aucucagcucacugcaacauccgc

SEQ ID NO: 333474 - RNA, 32 nt, Human
aucucagcucacugcaacauccgccucugggg

SEQ ID NO: 333475 - RNA, 24 nt, Human
aucucagcucacugcaaccacugc

SEQ ID NO: 333476 - RNA, 32 nt, Human
aucucagcucacugcaaccacugccucccagg

SEQ ID NO: 333477 - RNA, 32 nt, Human
aucucagcucacugcaacccccgccuccuggg

SEQ ID NO: 333478 - RNA, 32 nt, Human
aucucagcucacugcaaccuacgccuucuggg

SEQ ID NO: 333479 - RNA, 21 nt, Human
aucucagcucacugcaaccuc

SEQ ID NO: 333480 - RNA, 22 nt, Human
aucucagcucacugcaaccucc

SEQ ID NO: 333481 - RNA, 32 nt, Human
aucucagcucacugcaaccuccaccucccaga

SEQ ID NO: 333482 - RNA, 32 nt, Human
aucucagcucacugcaaccuccaccucccagg

SEQ ID NO: 333483 - RNA, 32 nt, Human
aucucagcucacugcaaccuccaccucccggg

SEQ ID NO: 333484 - RNA, 32 nt, Human
aucucagcucacugcaaccuccaccucccugg

SEQ ID NO: 333485 - RNA, 32 nt, Human
aucucagcucacugcaaccuccaccuccgggu

SEQ ID NO: 333486 - RNA, 32 nt, Human
aucucagcucacugcaaccuccaccuccuggg

SEQ ID NO: 333487 - RNA, 32 nt, Human
aucucagcucacugcaaccuccaccucgcagg

SEQ ID NO: 333488 - RNA, 32 nt, Human
aucucagcucacugcaaccuccaccucucagg

SEQ ID NO: 333489 - RNA, 32 nt, Human
aucucagcucacugcaaccuccaccucuuaug

SEQ ID NO: 333490 - RNA, 32 nt, Human
aucucagcucacugcaaccuccaccuugcgug

SEQ ID NO: 333491 - RNA, 32 nt, Human
aucucagcucacugcaaccuccaucuccaggu

SEQ ID NO: 333492 - RNA, 32 nt, Human
aucucagcucacugcaaccuccaucucccgga

SEQ ID NO: 333493 - RNA, 32 nt, Human
aucucagcucacugcaaccuccaucuccugga

SEQ ID NO: 333494 - RNA, 32 nt, Human
aucucagcucacugcaaccucccccuccuggg

SEQ ID NO: 333495 - RNA, 24 nt, Human
aucucagcucacugcaaccuccgc

SEQ ID NO: 333496 - RNA, 32 nt, Human
aucucagcucacugcaaccuccgcaucccggg

SEQ ID NO: 333497 - RNA, 32 nt, Human
aucucagcucacugcaaccuccgcccccuggg

SEQ ID NO: 333498 - RNA, 32 nt, Human
aucucagcucacugcaaccuccgccucccaag

SEQ ID NO: 333499 - RNA, 32 nt, Human
aucucagcucacugcaaccuccgccucccagg

SEQ ID NO: 333500 - RNA, 32 nt, Human
aucucagcucacugcaaccuccgccucccggg

SEQ ID NO: 333501 - RNA, 32 nt, Human
aucucagcucacugcaaccuccgccuccugag

SEQ ID NO: 333502 - RNA, 32 nt, Human
aucucagcucacugcaaccuccgccuccuggg

SEQ ID NO: 333503 - RNA, 32 nt, Human
aucucagcucacugcaaccuccgccugcuggg

SEQ ID NO: 333504 - RNA, 24 nt, Human
aucucagcucacugcaaccuccgu

SEQ ID NO: 333505 - RNA, 32 nt, Human
aucucagcucacugcaaccuccgucuccaggg

SEQ ID NO: 333506 - RNA, 32 nt, Human
aucucagcucacugcaaccuccguuuccuggg

SEQ ID NO: 333507 - RNA, 32 nt, Human
aucucagcucacugcaaccuccuccucccggg

SEQ ID NO: 333508 - RNA, 32 nt, Human
aucucagcucacugcaaccuccuccuucuggg

SEQ ID NO: 333509 - RNA, 32 nt, Human
aucucagcucacugcaaccucgaccucuuggg

SEQ ID NO: 333510 - RNA, 24 nt, Human
aucucagcucacugcaaccucggc

SEQ ID NO: 333511 - RNA, 22 nt, Human
aucucagcucacugcaaccucu

SEQ ID NO: 333512 - RNA, 32 nt, Human
aucucagcucacugcaaccucuaccuccuggg

SEQ ID NO: 333513 - RNA, 32 nt, Human
aucucagcucacugcaaccucucucucccggg

SEQ ID NO: 333514 - RNA, 24 nt, Human
aucucagcucacugcaaccucugc

SEQ ID NO: 333515 - RNA, 32 nt, Human
aucucagcucacugcaaccucugccuccagag

SEQ ID NO: 333516 - RNA, 32 nt, Human
aucucagcucacugcaaccucugccucccagg

SEQ ID NO: 333517 - RNA, 32 nt, Human
aucucagcucacugcaaccucugccucccgga

SEQ ID NO: 333518 - RNA, 32 nt, Human
aucucagcucacugcaaccucugccucccggg

SEQ ID NO: 333519 - RNA, 32 nt, Human
aucucagcucacugcaaccucugccucccugg

SEQ ID NO: 333520 - RNA, 32 nt, Human
aucucagcucacugcaaccucugccuccugag

SEQ ID NO: 333521 - RNA, 32 nt, Human
aucucagcucacugcaaccucugccuccugga

SEQ ID NO: 333522 - RNA, 32 nt, Human
aucucagcucacugcaaccucugccuccuggg

SEQ ID NO: 333523 - RNA, 32 nt, Human
aucucagcucacugcaaccucugccuccuggu

SEQ ID NO: 333524 - RNA, 32 nt, Human
aucucagcucacugcaaccucugccuucugga

SEQ ID NO: 333525 - RNA, 32 nt, Human
aucucagcucacugcaaccucugcuucccggg

SEQ ID NO: 333526 - RNA, 32 nt, Human
aucucagcucacugcaaccucugucucccggg

SEQ ID NO: 333527 - RNA, 32 nt, Human
aucucagcucacugcaaccucugucuccuggg

SEQ ID NO: 333528 - RNA, 24 nt, Human
aucucagcucacugcaaccugugc

SEQ ID NO: 333529 - RNA, 32 nt, Human
aucucagcucacugcaaccugugccucccggc

SEQ ID NO: 333530 - RNA, 32 nt, Human
aucucagcucacugcaaccuucaccucccagg

SEQ ID NO: 333531 - RNA, 24 nt, Human
aucucagcucacugcaaccuuugu

SEQ ID NO: 333532 - RNA, 32 nt, Human
aucucagcucacugcaaccuuugucucccggg

SEQ ID NO: 333533 - RNA, 22 nt, Human
aucucagcucacugcaacgucc

SEQ ID NO: 333534 - RNA, 32 nt, Human
aucucagcucacugcaacguccaccuccuggg

SEQ ID NO: 333535 - RNA, 32 nt, Human
aucucagcucacugcaacguccaccucuugag

SEQ ID NO: 333536 - RNA, 24 nt, Human
aucucagcucacugcaacgucugc

SEQ ID NO: 333537 - RNA, 32 nt, Human
aucucagcucacugcaacgucugccucccggg

SEQ ID NO: 333538 - RNA, 22 nt, Human
aucucagcucacugcaacuucc

SEQ ID NO: 333539 - RNA, 32 nt, Human
aucucagcucacugcaacuuccaccucccagg

SEQ ID NO: 333540 - RNA, 24 nt, Human
aucucagcucacugcaacuuccgc

SEQ ID NO: 333541 - RNA, 32 nt, Human
aucucagcucacugcaacuuccgcaucccagg

SEQ ID NO: 333542 - RNA, 24 nt, Human
aucucagcucacugcaacuucugc

SEQ ID NO: 333543 - RNA, 32 nt, Human
aucucagcucacugcaacuucugccucccagg

SEQ ID NO: 333544 - RNA, 32 nt, Human
aucucagcucacugcaacuucugccuccuggg

SEQ ID NO: 333545 - RNA, 32 nt, Human
aucucagcucacugcaacuucugccuccuggu

SEQ ID NO: 333546 - RNA, 22 nt, Human
aucucagcucacugcaagcucc

SEQ ID NO: 333547 - RNA, 32 nt, Human
aucucagcucacugcaagcuccaacucccggg

SEQ ID NO: 333548 - RNA, 32 nt, Human
aucucagcucacugcaagcuccaccucccggg

SEQ ID NO: 333549 - RNA, 32 nt, Human
aucucagcucacugcaagcuccaccuuccggg

SEQ ID NO: 333550 - RNA, 24 nt, Human
aucucagcucacugcaagcuccgc

SEQ ID NO: 333551 - RNA, 32 nt, Human
aucucagcucacugcaagcuccgccucccagg

SEQ ID NO: 333552 - RNA, 32 nt, Human
aucucagcucacugcaagcuccgccucccggg

SEQ ID NO: 333553 - RNA, 32 nt, Human
aucucagcucacugcaagcuccgccuccuccc

SEQ ID NO: 333554 - RNA, 32 nt, Human
aucucagcucacugcaagcuccgccuccuggg

SEQ ID NO: 333555 - RNA, 22 nt, Human
aucucagcucacugcaagcucu

SEQ ID NO: 333556 - RNA, 32 nt, Human
aucucagcucacugcaagcucuaccucuuggu

SEQ ID NO: 333557 - RNA, 24 nt, Human
aucucagcucacugcaagcucugc

SEQ ID NO: 333558 - RNA, 32 nt, Human
aucucagcucacugcaagcucugccucccggg

SEQ ID NO: 333559 - RNA, 32 nt, Human
aucucagcucacugcaagcucugccucccgug

SEQ ID NO: 333560 - RNA, 32 nt, Human
aucucagcucacugcaagcucugccucucagg

SEQ ID NO: 333561 - RNA, 22 nt, Human
aucucagcucacugcaaucucc

SEQ ID NO: 333562 - RNA, 32 nt, Human
aucucagcucacugcaaucuccaccuccuggg

SEQ ID NO: 333563 - RNA, 32 nt, Human
aucucagcucacugcaaucuucaccuccuagg

SEQ ID NO: 333564 - RNA, 24 nt, Human
aucucagcucacugcacccuccgc

SEQ ID NO: 333565 - RNA, 32 nt, Human
aucucagcucacugcacccuccgccucucggg

SEQ ID NO: 333566 - RNA, 32 nt, Human
aucucagcucacugcacccuugaccucccaua

SEQ ID NO: 333567 - RNA, 24 nt, Human
aucucagcucacugcagccacugc

SEQ ID NO: 333568 - RNA, 32 nt, Human
aucucagcucacugcagccacugccucccagg

SEQ ID NO: 333569 - RNA, 32 nt, Human
aucucagcucacugcagcccccgccucccagg

SEQ ID NO: 333570 - RNA, 21 nt, Human
aucucagcucacugcagccuc

SEQ ID NO: 333571 - RNA, 32 nt, Human
aucucagcucacugcagccucaacugccccag

SEQ ID NO: 333572 - RNA, 22 nt, Human
aucucagcucacugcagccucc

SEQ ID NO: 333573 - RNA, 32 nt, Human
aucucagcucacugcagccuccaacucucugg

SEQ ID NO: 333574 - RNA, 32 nt, Human
aucucagcucacugcagccuccaccucccagg

SEQ ID NO: 333575 - RNA, 32 nt, Human
aucucagcucacugcagccuccacuuccuggg

SEQ ID NO: 333576 - RNA, 32 nt, Human
aucucagcucacugcagccuccgucucccagg

SEQ ID NO: 333577 - RNA, 22 nt, Human
aucucagcucacugcagccucg

SEQ ID NO: 333578 - RNA, 24 nt, Human
aucucagcucacugcagccucugc

SEQ ID NO: 333579 - RNA, 32 nt, Human
aucucagcucacugcagccucugccacccaga

SEQ ID NO: 333580 - RNA, 32 nt, Human
aucucagcucacugcagccucugccucccggg

SEQ ID NO: 333581 - RNA, 32 nt, Human
aucucagcucacugcagccucugccuccugag

SEQ ID NO: 333582 - RNA, 32 nt, Human
aucucagcucacugcagccucugucucccggg

SEQ ID NO: 333583 - RNA, 32 nt, Human
aucucagcucacugcagccuugaccuccuggg

SEQ ID NO: 333584 - RNA, 24 nt, Human
aucucagcucacugcaggcucugc

SEQ ID NO: 333585 - RNA, 32 nt, Human
aucucagcucacugcaggcucugccuccuggg

SEQ ID NO: 333586 - RNA, 24 nt, Human
aucucagcucacugcagucucugc

SEQ ID NO: 333587 - RNA, 32 nt, Human
aucucagcucacugcagucucugccucccggg

SEQ ID NO: 333588 - RNA, 24 nt, Human
aucucagcucacugcauccuccgc

SEQ ID NO: 333589 - RNA, 24 nt, Human
aucucagcucacugcauccucugc

SEQ ID NO: 333590 - RNA, 32 nt, Human
aucucagcucacugcauccucugccucccggg

SEQ ID NO: 333591 - RNA, 24 nt, Human
aucucagcucacugccaccucugc

SEQ ID NO: 333592 - RNA, 32 nt, Human
aucucagcucacugccaccucugccucccagg

SEQ ID NO: 333593 - RNA, 32 nt, Human
aucucagcucacugccaccuuugccuccuggg

SEQ ID NO: 333594 - RNA, 22 nt, Human
aucucagcucacugcgaccucc

SEQ ID NO: 333595 - RNA, 32 nt, Human
aucucagcucacugcgaccuccaccucccaug

SEQ ID NO: 333596 - RNA, 32 nt, Human
aucucagcucacugcgaccugcaccuccuggg

SEQ ID NO: 333597 - RNA, 32 nt, Human
aucucagcucacugcggccuugaacuccuggg

SEQ ID NO: 333598 - RNA, 32 nt, Human
aucucagcucacuggcaacaucugccucccgg

SEQ ID NO: 333599 - RNA, 24 nt, Human
aucucagcucacuguaaccucugc

SEQ ID NO: 333600 - RNA, 32 nt, Human
aucucagcucacuguaaccucugccucccugc

SEQ ID NO: 333601 - RNA, 32 nt, Human
aucucagcucacuguaccuuugccguggguuc

SEQ ID NO: 333602 - RNA, 23 nt, Human
aucucagcucacuguacuccagc

SEQ ID NO: 333603 - RNA, 32 nt, Human
aucucagcucacuguacuccagcccggguuca

SEQ ID NO: 333604 - RNA, 22 nt, Human
aucucagcucacuguaggcucu

SEQ ID NO: 333605 - RNA, 32 nt, Human
aucucagcucacuguaggcucuaccucauggg

SEQ ID NO: 333606 - RNA, 24 nt, Human
aucucagcucacuguauccucugc

SEQ ID NO: 333607 - RNA, 24 nt, Human
aucucagcucacugugaccuccgc

SEQ ID NO: 333608 - RNA, 32 nt, Human
aucucagcucacugugaccuccgccuccuggg

SEQ ID NO: 333609 - RNA, 32 nt, Human
aucucagcucagugcaaccuccgccacccggg

SEQ ID NO: 333610 - RNA, 32 nt, Human
aucucagcucagugcaaccuccgcccccuggg

SEQ ID NO: 333611 - RNA, 32 nt, Human
aucucagcucagugcaaccuccgccucccgag

SEQ ID NO: 333612 - RNA, 32 nt, Human
aucucagcucauugcaaccucggcucacugua

SEQ ID NO: 333613 - RNA, 32 nt, Human
aucucagcucauugcaaccucugccuaacggg

SEQ ID NO: 333614 - RNA, 32 nt, Human
aucucagcucauugcaaccucugucucccagg

SEQ ID NO: 333615 - RNA, 24 nt, Human
aucucagcucauugcagccuccgc

SEQ ID NO: 333616 - RNA, 32 nt, Human
aucucagcuccaugcaaccucugccuccuggg

SEQ ID NO: 333617 - RNA, 32 nt, Human
aucucagcucccugcaaccuccaccuccuggg

SEQ ID NO: 333618 - RNA, 32 nt, Human
aucucagcucccugcaaccuccgccucccggg

SEQ ID NO: 333619 - RNA, 32 nt, Human
aucucagcucgccgcaaccuccgccucccagg

SEQ ID NO: 333620 - RNA, 32 nt, Human
aucucagcucgcuacaaccucuaccucccagc

SEQ ID NO: 333621 - RNA, 32 nt, Human
aucucagcucgcugcaacccccaccucccagg

SEQ ID NO: 333622 - RNA, 32 nt, Human
aucucagcucgcugcaaccuccaccuccuggg

SEQ ID NO: 333623 - RNA, 32 nt, Human
aucucagcucgcugcaaccuccaccuuccggg

SEQ ID NO: 333624 - RNA, 24 nt, Human
aucucagcucgcugcaagcuccgc

SEQ ID NO: 333625 - RNA, 32 nt, Human
aucucagcucugccacacaccuuuacaccccc

SEQ ID NO: 333626 - RNA, 32 nt, Human
aucucagcugcugcaaccuccaccucccgggu

SEQ ID NO: 333627 - RNA, 32 nt, Human
aucucagcuuaaugcaaccucuaccucccagg

SEQ ID NO: 333628 - RNA, 32 nt, Human
aucucagcuuacugcaaccucugccucccggg

SEQ ID NO: 333629 - RNA, 32 nt, Human
aucucagcuuacugcaaccucugucucccggg

SEQ ID NO: 333630 - RNA, 32 nt, Human
aucucagcuuacugcacccucugccucccggu

SEQ ID NO: 333631 - RNA, 26 nt, Human
aucucagcuuauaugaaagucaagug

SEQ ID NO: 333632 - RNA, 32 nt, Human
aucucagcuuauuacaaccucugccuccuggg

SEQ ID NO: 333633 - RNA, 32 nt, Human
aucucaggaagcacuggacacaguguucugca

SEQ ID NO: 333634 - RNA, 24 nt, Human
aucucaggaccagauaguggagug

SEQ ID NO: 333635 - RNA, 32 nt, Human
aucucaggacucuugacugcagguuccucuga

SEQ ID NO: 333636 - RNA, 32 nt, Human
aucucaggagguugaggcugcagugaauuaug

SEQ ID NO: 333637 - RNA, 21 nt, Human
aucucaggauaaaguuugcua

SEQ ID NO: 333638 - RNA, 24 nt, Human
aucucaggcaauccacccaccuca

SEQ ID NO: 333639 - RNA, 32 nt, Human
aucucaggccugaagggucuagaagcccacug

SEQ ID NO: 333640 - RNA, 32 nt, Human
aucucaggccugaccuugaccugaguaugucu

SEQ ID NO: 333641 - RNA, 20 nt, Human
aucucaggcggcagugaagu

SEQ ID NO: 333642 - RNA, 22 nt, Human
aucucaggcucuaggugcaaug

SEQ ID NO: 333643 - RNA, 22 nt, Human
aucucaggcuggagugcagugg

SEQ ID NO: 333644 - RNA, 32 nt, Human
aucucaggcugucggugaggcugcagucacua

SEQ ID NO: 333645 - RNA, 32 nt, Human
aucucagggaauguccaucuggagcuggcaag

SEQ ID NO: 333646 - RNA, 22 nt, Human
aucucagggagggaaggggaug

SEQ ID NO: 333647 - RNA, 32 nt, Human
aucucagggcgcgacuuccggggcgacgggcg

SEQ ID NO: 333648 - RNA, 32 nt, Human
aucucaggggaaauguggcucucuccaccuug

SEQ ID NO: 333649 - RNA, 32 nt, Human
aucucaggggaaauguggcucucuccaucuug

SEQ ID NO: 333650 - RNA, 32 nt, Human
aucucaggguagcugcccugaccucggagcag

SEQ ID NO: 333651 - RNA, 32 nt, Human
aucucaggucacugcaaccucugccucccagg

SEQ ID NO: 333652 - RNA, 32 nt, Human
aucucaggucacugcaaccucugccuccuggg

SEQ ID NO: 333653 - RNA, 32 nt, Human
aucucaggugaucuacccuccucggccuccca

SEQ ID NO: 333654 - RNA, 32 nt, Human
aucucagguggguggagcaguggugggagaag

SEQ ID NO: 333655 - RNA, 32 nt, Human
aucucagucauacccaaugcucaguggaucau

SEQ ID NO: 333656 - RNA, 32 nt, Human
aucucaguccacugcaaccucugcccucccgg

SEQ ID NO: 333657 - RNA, 32 nt, Human
aucucagugaauuuucaguucagaccuuuuca

SEQ ID NO: 333658 - RNA, 18 nt, Human
aucucagugacugugaaa

SEQ ID NO: 333659 - RNA, 32 nt, Human
aucucaguggggcccguguccacccacacauc

SEQ ID NO: 333660 - RNA, 32 nt, Human
aucucaguguuaacugacugcugacuuggagu

SEQ ID NO: 333661 - RNA, 22 nt, Human
aucucaguucacugcaaccucc

SEQ ID NO: 333662 - RNA, 32 nt, Human
aucucaguucacugcaaccuccacccugcagg

SEQ ID NO: 333663 - RNA, 32 nt, Human
aucucaguucacugcaaccuccacuuccuagg

SEQ ID NO: 333664 - RNA, 32 nt, Human
aucucaguucacugcaaccucugccucccacg

SEQ ID NO: 333665 - RNA, 32 nt, Human
aucucaguucacugcaaccucugccucccggg

SEQ ID NO: 333666 - RNA, 32 nt, Human
aucucaguucacugcaaccucugccuccuaag

SEQ ID NO: 333667 - RNA, 32 nt, Human
aucucaguucacugcaaccucugccuccuggg

SEQ ID NO: 333668 - RNA, 32 nt, Human
aucucaguucacugcaacuucugccucccgag

SEQ ID NO: 333669 - RNA, 24 nt, Human
aucucaguucacugcaagcuccgc

SEQ ID NO: 333670 - RNA, 32 nt, Human
aucucaguucacugcaagcuccgccuccucgu

SEQ ID NO: 333671 - RNA, 32 nt, Human
aucucaguucacugcagucucugccuccuugg

SEQ ID NO: 333672 - RNA, 32 nt, Human
aucucaguucaugcaaccuccgccuccugggu

SEQ ID NO: 333673 - RNA, 32 nt, Human
aucucauagguacaaucaucucuuuuaaugga

SEQ ID NO: 333674 - RNA, 32 nt, Human
aucucaucaagaaggauugaagggauaacuau

SEQ ID NO: 333675 - RNA, 32 nt, Human
aucucaucagccagggaagaguaagugggauc

SEQ ID NO: 333676 - RNA, 32 nt, Human
aucucaucaucuccuaauaucugcagaggggc

SEQ ID NO: 333677 - RNA, 32 nt, Human
aucucaucccucaagguggccaccccagauga

SEQ ID NO: 333678 - RNA, 32 nt, Human
aucucauccuuuccucuagcuuuucuauuuuu

SEQ ID NO: 333679 - RNA, 32 nt, Human
aucucaucgccagccuccuccuggaccucuug

SEQ ID NO: 333680 - RNA, 32 nt, Human
aucucaucucacugcaaccuccaccucccagg

SEQ ID NO: 333681 - RNA, 32 nt, Human
aucucaucucagugcaaccuccaccucucacg

SEQ ID NO: 333682 - RNA, 32 nt, Human
aucucaucucccugcaaccuccgccuccuggg

SEQ ID NO: 333683 - RNA, 32 nt, Human
aucucaucugcaggcugggaggcagggcugga

SEQ ID NO: 333684 - RNA, 32 nt, Human
aucucaucuuuccuccugucuuagaagaacag

SEQ ID NO: 333685 - RNA, 32 nt, Human
aucucaugaacccaggaggcagagguugcagu

SEQ ID NO: 333686 - RNA, 24 nt, Human
aucucaugaauuuugacuuauuga

SEQ ID NO: 333687 - RNA, 23 nt, Human
aucucaugaggauuucuuuauga

SEQ ID NO: 333688 - RNA, 22 nt, Human
aucucaugagugugccccaugg

SEQ ID NO: 333689 - RNA, 32 nt, Human
aucucaugauucccuacaucugacauaaggaa

SEQ ID NO: 333690 - RNA, 32 nt, Human
aucucaugccuauaaucccagcacuuugggag

SEQ ID NO: 333691 - RNA, 32 nt, Human
aucucaugcuugcaaacuacacaaugcugcag

SEQ ID NO: 333692 - RNA, 32 nt, Human
aucucaugucacggcaaccuccgccucccagg

SEQ ID NO: 333693 - RNA, 32 nt, Human
aucucauucucucuccuuuuccaucuggacca

SEQ ID NO: 333694 - RNA, 32 nt, Human
aucucauucuucccucuucauuucuggccuau

SEQ ID NO: 333695 - RNA, 32 nt, Human
aucucauugcuuucuuuccuuugcagaauuau

SEQ ID NO: 333696 - RNA, 32 nt, Human
aucucauuggcccaagggagcugcagugguag

SEQ ID NO: 333697 - RNA, 32 nt, Human
aucucauuguagcuucaaccuccugagcucaa

SEQ ID NO: 333698 - RNA, 32 nt, Human
aucucauuuccuucaaccuugccuccucauac

SEQ ID NO: 333699 - RNA, 32 nt, Human
aucuccaacaaacuccagcagaccugcagcag

SEQ ID NO: 333700 - RNA, 32 nt, Human
aucuccaaccagugccuuccgcagcugcacgg

SEQ ID NO: 333701 - RNA, 32 nt, Human
aucuccaaccaugcccuaagacauaugguaac

SEQ ID NO: 333702 - RNA, 32 nt, Human
aucuccaaggccugcgggaaaaacuugccuuu

SEQ ID NO: 333703 - RNA, 32 nt, Human
aucuccaauugccucuugcaggcugagucccu

SEQ ID NO: 333704 - RNA, 32 nt, Human
aucuccaccucccagguucaagcaauucuccu

SEQ ID NO: 333705 - RNA, 32 nt, Human
aucuccaccucccggauucaagcaguuuuccu

SEQ ID NO: 333706 - RNA, 32 nt, Human
aucuccaccuccuggguucaagcaauuuucuu

SEQ ID NO: 333707 - RNA, 32 nt, Human
aucuccaccuccuggguucaagcgauucuccu

SEQ ID NO: 333708 - RNA, 32 nt, Human
aucuccacucacugcaacuuccgccuccuggg

SEQ ID NO: 333709 - RNA, 32 nt, Human
aucuccacucacugcagccuccgccucugggg

SEQ ID NO: 333710 - RNA, 32 nt, Human
aucuccacucacugcaggcuccgccucccggg

SEQ ID NO: 333711 - RNA, 32 nt, Human
aucuccacugauugcccccuugcuggccaagc

SEQ ID NO: 333712 - RNA, 32 nt, Human
aucuccacugcacugcugugggcugaacugug

SEQ ID NO: 333713 - RNA, 32 nt, Human
aucuccagaagaggggagcagaguccgagcuu

SEQ ID NO: 333714 - RNA, 32 nt, Human
aucuccagaagcagcacuaggguuugaguuuc

SEQ ID NO: 333715 - RNA, 32 nt, Human
aucuccagagcuaguucccugcccucacaccc

SEQ ID NO: 333716 - RNA, 32 nt, Human
aucuccagcaucuucuuccccuucccuggccc

SEQ ID NO: 333717 - RNA, 32 nt, Human
aucuccagccugccuggaaaugcugugggcuc

SEQ ID NO: 333718 - RNA, 32 nt, Human
aucuccagggcugccccuguagguugcuuaaa

SEQ ID NO: 333719 - RNA, 32 nt, Human
aucuccagggucucauucuguugcccaggcug

SEQ ID NO: 333720 - RNA, 32 nt, Human
aucuccagugccuggcacacaguagguguuca

SEQ ID NO: 333721 - RNA, 32 nt, Human
aucuccaguucuggacagugcagguugccaag

SEQ ID NO: 333722 - RNA, 32 nt, Human
aucuccaguucuggacucgugcccccacuccc

SEQ ID NO: 333723 - RNA, 32 nt, Human
aucuccaguucuuggaggguuccggugagaag

SEQ ID NO: 333724 - RNA, 32 nt, Human
aucuccaguuuauagaccagaaccagagcuca

SEQ ID NO: 333725 - RNA, 32 nt, Human
aucuccauccuccucaagcugccugugcaccc

SEQ ID NO: 333726 - RNA, 32 nt, Human
aucuccaucucccggguucaagcgauucuccu

SEQ ID NO: 333727 - RNA, 32 nt, Human
aucuccaucucccggguucaagcgauuuuccu

SEQ ID NO: 333728 - RNA, 32 nt, Human
aucuccaucugcacagagguccuggcuggacc

SEQ ID NO: 333729 - RNA, 32 nt, Human
aucuccaucuuucugcccugcauaccagcccu

SEQ ID NO: 333730 - RNA, 31 nt, Human
aucuccaugaucaucucagccaacaugcauc

SEQ ID NO: 333731 - RNA, 32 nt, Human
aucuccaugccagcagggugccuuuuauauca

SEQ ID NO: 333732 - RNA, 32 nt, Human
aucuccaugccagcagggugccuuuuauauga

SEQ ID NO: 333733 - RNA, 32 nt, Human
aucuccaugggaacaggaccauaggaugaugu

SEQ ID NO: 333734 - RNA, 32 nt, Human
aucuccauuccucugcccucuugagccagcac

SEQ ID NO: 333735 - RNA, 32 nt, Human
aucuccauuguuaagagaucacugugagguag

SEQ ID NO: 333736 - RNA, 32 nt, Human
aucucccaaagcucugaucccugccaugggaa

SEQ ID NO: 333737 - RNA, 32 nt, Human
aucucccaacuucucccuuuuggacccugccg

SEQ ID NO: 333738 - RNA, 32 nt, Human
aucucccaacuuguccauuuuguugcauauuc

SEQ ID NO: 333739 - RNA, 32 nt, Human
aucucccaccacacuuacugucuuccuuuauc

SEQ ID NO: 333740 - RNA, 19 nt, Human
aucucccacuuucacaccu

SEQ ID NO: 333741 - RNA, 32 nt, Human
aucucccagcagaagaaggaugugcggaugcu

SEQ ID NO: 333742 - RNA, 32 nt, Human
aucucccaggauccaugagguccagugcuguc

SEQ ID NO: 333743 - RNA, 32 nt, Human
aucucccaggauccaugagguccaguguuguc

SEQ ID NO: 333744 - RNA, 32 nt, Human
aucucccagggcuuccuccaagggccaaaaau

SEQ ID NO: 333745 - RNA, 32 nt, Human
aucucccaguccccaucucuuuuuccccacac

SEQ ID NO: 333746 - RNA, 32 nt, Human
aucucccauauguaugcuguaugcuaugcuaa

SEQ ID NO: 333747 - RNA, 32 nt, Human
aucucccauccuguuggccacacccagcucca

SEQ ID NO: 333748 - RNA, 32 nt, Human
aucucccaucuuuugaaaaaccuggaagugag

SEQ ID NO: 333749 - RNA, 32 nt, Human
aucucccauggggaggugaugguggggagaug

SEQ ID NO: 333750 - RNA, 28 nt, Human
aucuccccaagugcacacuuuauccacc

SEQ ID NO: 333751 - RNA, 32 nt, Human
aucuccccagacagcacuucaggcugggaaag

SEQ ID NO: 333752 - RNA, 32 nt, Human
aucuccccagcauaaccaaaucuuacuaaacu

SEQ ID NO: 333753 - RNA, 22 nt, Human
aucuccccaggagggugagaug

SEQ ID NO: 333754 - RNA, 32 nt, Human
aucuccccagucaagggcaaguuuacagagau

SEQ ID NO: 333755 - RNA, 32 nt, Human
aucuccccaucuucacccaacucccaaugccc

SEQ ID NO: 333756 - RNA, 32 nt, Human
aucuccccauuuccucuccuuccccaccacca

SEQ ID NO: 333757 - RNA, 32 nt, Human
aucucccccggcucugggacccuucccgccga

SEQ ID NO: 333758 - RNA, 32 nt, Human
aucucccccuaccacaaaccaggcuggaaccc

SEQ ID NO: 333759 - RNA, 32 nt, Human
aucucccccucuccaucuccucugucuccccc

SEQ ID NO: 333760 - RNA, 23 nt, Human
aucuccccucucaggaccaguca

SEQ ID NO: 333761 - RNA, 32 nt, Human
aucuccccucuccccucucccguucuuccucc

SEQ ID NO: 333762 - RNA, 32 nt, Human
aucuccccugcuccucugcugguggugggcua

SEQ ID NO: 333763 - RNA, 32 nt, Human
aucuccccugggaaguggggaugagaggagaa

SEQ ID NO: 333764 - RNA, 32 nt, Human
aucuccccuucccacaucacucaaggcauaag

SEQ ID NO: 333765 - RNA, 32 nt, Human
aucuccccuucccagccccuccuucauccccu

SEQ ID NO: 333766 - RNA, 32 nt, Human
aucuccccuuccucuucuugauggacauuuau

SEQ ID NO: 333767 - RNA, 32 nt, Human
aucucccuccaacaaacccuggcuccagcccc

SEQ ID NO: 333768 - RNA, 32 nt, Human
aucucccuccacccccucccacccaucuccuc

SEQ ID NO: 333769 - RNA, 23 nt, Human
aucucccuccaggaagcugcugc

SEQ ID NO: 333770 - RNA, 32 nt, Human
aucucccuccaggcagcccuuggcuggucccu

SEQ ID NO: 333771 - RNA, 32 nt, Human
aucucccucuucuccccuccuuucacaccgag

SEQ ID NO: 333772 - RNA, 32 nt, Human
aucucccugcaaccuccgccuccuggguugaa

SEQ ID NO: 333773 - RNA, 32 nt, Human
aucucccugccuccugccggcuccuugguucu

SEQ ID NO: 333774 - RNA, 32 nt, Human
aucucccugccuggcccccaaccucagggcuc

SEQ ID NO: 333775 - RNA, 32 nt, Human
aucucccugccugggcuggcugugaggccacc

SEQ ID NO: 333776 - RNA, 32 nt, Human
aucucccugcuccccucaacccccucccaccc

SEQ ID NO: 333777 - RNA, 32 nt, Human
aucucccugcugcggcagagccacugaguuca

SEQ ID NO: 333778 - RNA, 32 nt, Human
aucucccuggcagcagaugagguggcuucaca

SEQ ID NO: 333779 - RNA, 32 nt, Human
aucucccuggcuucagcaauuuguaguuauuu

SEQ ID NO: 333780 - RNA, 32 nt, Human
aucucccuggggagcccgggugggcaggaaca

SEQ ID NO: 333781 - RNA, 32 nt, Human
aucucccuggggcaggaaguggguggacuugg

SEQ ID NO: 333782 - RNA, 32 nt, Human
aucucccuggugcuuaugcucuuaauugccac

SEQ ID NO: 333783 - RNA, 32 nt, Human
aucucccuuaagcauccucuucuccaaccucc

SEQ ID NO: 333784 - RNA, 32 nt, Human
aucucccuucaggcggagguugcagugagccg

SEQ ID NO: 333785 - RNA, 32 nt, Human
aucucccuugacuuacccauaaugucuuucug

SEQ ID NO: 333786 - RNA, 32 nt, Human
aucucccuugcucuccuggggaacccuaaacc

SEQ ID NO: 333787 - RNA, 32 nt, Human
aucucccuuuaaguuuuugcugcagcaauuug

SEQ ID NO: 333788 - RNA, 32 nt, Human
aucucccuuucucuucaguuccuuccuuguuc

SEQ ID NO: 333789 - RNA, 32 nt, Human
aucuccgacaggggcugaguugcuggagcugg

SEQ ID NO: 333790 - RNA, 32 nt, Human
aucuccgacuccugacuuuggaagcccccaaa

SEQ ID NO: 333791 - RNA, 32 nt, Human
aucuccgagaacauggcaucacagaucauugu

SEQ ID NO: 333792 - RNA, 32 nt, Human
aucuccgaggagaagaaagaaugauggacagu

SEQ ID NO: 333793 - RNA, 32 nt, Human
aucuccgcaguguccaaaccuaguuucccaug

SEQ ID NO: 333794 - RNA, 32 nt, Human
aucuccgccucccaggcucaagcaauucuccu

SEQ ID NO: 333795 - RNA, 32 nt, Human
aucuccgccucccagguucaagcgauucuccu

SEQ ID NO: 333796 - RNA, 32 nt, Human
aucuccgccucccagguucaagcgauucucuu

SEQ ID NO: 333797 - RNA, 32 nt, Human
aucuccgccuccccaguucaagcgauucuccu

SEQ ID NO: 333798 - RNA, 32 nt, Human
aucuccgccucccggguucaagugauucuccu

SEQ ID NO: 333799 - RNA, 32 nt, Human
aucuccgccuccuggguucaaaugauucuccu

SEQ ID NO: 333800 - RNA, 32 nt, Human
aucuccgccuccuggguucaagggauucuccu

SEQ ID NO: 333801 - RNA, 32 nt, Human
aucuccgcuaagcccagggauccacuugugug

SEQ ID NO: 333802 - RNA, 32 nt, Human
aucuccgcucacugcaacauccgccucccgga

SEQ ID NO: 333803 - RNA, 22 nt, Human
aucuccgcucacugcaaccucc

SEQ ID NO: 333804 - RNA, 32 nt, Human
aucuccgcucacugcaaccuccaccuccuggc

SEQ ID NO: 333805 - RNA, 24 nt, Human
aucuccgcucacugcaaccuccgc

SEQ ID NO: 333806 - RNA, 32 nt, Human
aucuccgcucacugcaaccucugccucccggu

SEQ ID NO: 333807 - RNA, 24 nt, Human
aucuccgcucacugcaagcuccgc

SEQ ID NO: 333808 - RNA, 32 nt, Human
aucuccgcucacugcaagcuccgccucccggg

SEQ ID NO: 333809 - RNA, 32 nt, Human
aucuccgcucacugcaagcuccgccucgcgag

SEQ ID NO: 333810 - RNA, 32 nt, Human
aucuccgcucacugcaagcucugccuccuggg

SEQ ID NO: 333811 - RNA, 32 nt, Human
aucuccgcucacugcagccuccgccuccuggg

SEQ ID NO: 333812 - RNA, 32 nt, Human
aucuccgcucacugccaccuccgccucucuag

SEQ ID NO: 333813 - RNA, 32 nt, Human
aucuccgcucgcagcaaccucugccucccagg

SEQ ID NO: 333814 - RNA, 32 nt, Human
aucuccgcucgcugcaaccaccaucuccuggg

SEQ ID NO: 333815 - RNA, 32 nt, Human
aucuccgggaggcccugguuaaaggaggcuaa

SEQ ID NO: 333816 - RNA, 32 nt, Human
aucuccgggcagccaccaccuccucggucugc

SEQ ID NO: 333817 - RNA, 32 nt, Human
aucuccgucgugaacauggcccugccaccauu

SEQ ID NO: 333818 - RNA, 32 nt, Human
aucuccgugcucuucuuugacaacagcgacaa

SEQ ID NO: 333819 - RNA, 32 nt, Human
aucuccguucacugcaaucucugccuccuggg

SEQ ID NO: 333820 - RNA, 32 nt, Human
aucuccguucacugcagccuccaccuccccgg

SEQ ID NO: 333821 - RNA, 32 nt, Human
aucuccuaauuuguuucuucugucuuuauguu

SEQ ID NO: 333822 - RNA, 32 nt, Human
aucuccuacaggaaggugaggagguggcaggu

SEQ ID NO: 333823 - RNA, 32 nt, Human
aucuccuacuccucaguaaaugcucacaugaa

SEQ ID NO: 333824 - RNA, 32 nt, Human
aucuccuagaagcagccggcacaggagggaag

SEQ ID NO: 333825 - RNA, 32 nt, Human
aucuccuagccuggccuucauccaguucaccc

SEQ ID NO: 333826 - RNA, 21 nt, Human
aucuccucaacucugaguguu

SEQ ID NO: 333827 - RNA, 32 nt, Human
aucuccucaauccugucuccccagcggcucug

SEQ ID NO: 333828 - RNA, 32 nt, Human
aucuccucacuccuuuuucucuccuuaccuuu

SEQ ID NO: 333829 - RNA, 32 nt, Human
aucuccuccucaccuuuuguugcuaucggcag

SEQ ID NO: 333830 - RNA, 32 nt, Human
aucuccuccucuucuuccuguccaugccggcc

SEQ ID NO: 333831 - RNA, 32 nt, Human
aucuccucugucucccccgucucauggcucuc

SEQ ID NO: 333832 - RNA, 32 nt, Human
aucuccucuucucccuucuccucccuuagccc

SEQ ID NO: 333833 - RNA, 32 nt, Human
aucuccucuuucuccaccaccucgggccccgg

SEQ ID NO: 333834 - RNA, 32 nt, Human
aucuccugaagaaaaaugaaaagcuacuuaga

SEQ ID NO: 333835 - RNA, 32 nt, Human
aucuccugaccuucugaucugccugccucggc

SEQ ID NO: 333836 - RNA, 32 nt, Human
aucuccugaccuugugaucugccugccucagc

SEQ ID NO: 333837 - RNA, 32 nt, Human
aucuccugaccuugugaucugccugccucggc

SEQ ID NO: 333838 - RNA, 32 nt, Human
aucuccugaccuugugaucugccugccuuggc

SEQ ID NO: 333839 - RNA, 32 nt, Human
aucuccugagugaccugaaaaggucaucucac

SEQ ID NO: 333840 - RNA, 32 nt, Human
aucuccugccuuucugcucacuuuccugccug

SEQ ID NO: 333841 - RNA, 32 nt, Human
aucuccuggaaggcuguugugauuuccaucua

SEQ ID NO: 333842 - RNA, 32 nt, Human
aucuccuggacgcagaggugacagugggagcu

SEQ ID NO: 333843 - RNA, 32 nt, Human
aucuccuggaggcugguucugcugccucuaca

SEQ ID NO: 333844 - RNA, 32 nt, Human
aucuccugggagugagggagaaacagggagcu

SEQ ID NO: 333845 - RNA, 32 nt, Human
aucuccugucaucacgaucaauuaauguuuuc

SEQ ID NO: 333846 - RNA, 32 nt, Human
aucuccugugacugcuccucuccagcaacccu

SEQ ID NO: 333847 - RNA, 32 nt, Human
aucuccugugcaugggcucgaagggagagcca

SEQ ID NO: 333848 - RNA, 32 nt, Human
aucuccuguggacgaacaucugggguggaagu

SEQ ID NO: 333849 - RNA, 32 nt, Human
aucuccuguuucuguuccuguguucauagauu

SEQ ID NO: 333850 - RNA, 23 nt, Human
aucuccuuaaauaaaauaaaaua

SEQ ID NO: 333851 - RNA, 31 nt, Human
aucuccuucauuaggauaguuggagagggau

SEQ ID NO: 333852 - RNA, 22 nt, Human
aucuccuucauucugggcagug

SEQ ID NO: 333853 - RNA, 32 nt, Human
aucuccuuccuugccaaagcaugucccaacau

SEQ ID NO: 333854 - RNA, 32 nt, Human
aucuccuucucccuccuguccuguccuugccc

SEQ ID NO: 333855 - RNA, 32 nt, Human
aucuccuucuccucucugccugccuccucccu

SEQ ID NO: 333856 - RNA, 32 nt, Human
aucuccuucucuucgcuccacaggucuauaaa

SEQ ID NO: 333857 - RNA, 32 nt, Human
aucuccuucuuuccucacgcccuuccaaggcu

SEQ ID NO: 333858 - RNA, 32 nt, Human
aucuccuugcguccuugggcaucuccgggcau

SEQ ID NO: 333859 - RNA, 19 nt, Human
aucuccuuucaaaguagug

SEQ ID NO: 333860 - RNA, 32 nt, Human
aucuccuuugacuucaugaucugcauccuagg

SEQ ID NO: 333861 - RNA, 32 nt, Human
aucucgaaggcgccuucuccuccugggagauc

SEQ ID NO: 333862 - RNA, 32 nt, Human
aucucgacaggcuccuggaauguguuuugcuu

SEQ ID NO: 333863 - RNA, 24 nt, Human
aucucgacucacugcaaaaucugc

SEQ ID NO: 333864 - RNA, 32 nt, Human
aucucgacucacugcaaaaucugccucccggg

SEQ ID NO: 333865 - RNA, 22 nt, Human
aucucgacucacugcaaccucc

SEQ ID NO: 333866 - RNA, 32 nt, Human
aucucgacucacugcaaccuccaccucccagg

SEQ ID NO: 333867 - RNA, 24 nt, Human
aucucgacucacugcaaccuucgc

SEQ ID NO: 333868 - RNA, 32 nt, Human
aucucgacucacugcaaccuucgccucccagg

SEQ ID NO: 333869 - RNA, 22 nt, Human
aucucgacucacugcaacuucc

SEQ ID NO: 333870 - RNA, 32 nt, Human
aucucgacucacugcaacuuccaccuccugga

SEQ ID NO: 333871 - RNA, 24 nt, Human
aucucgacucacugcaagcuccgc

SEQ ID NO: 333872 - RNA, 32 nt, Human
aucucgacucacugcaagcuccgccucccggg

SEQ ID NO: 333873 - RNA, 32 nt, Human
aucucgacucacugcagccuccgccuccuggg

SEQ ID NO: 333874 - RNA, 19 nt, Human
aucucgacucacugcagcu

SEQ ID NO: 333875 - RNA, 32 nt, Human
aucucgacucacugcagcuaucucucgccuca

SEQ ID NO: 333876 - RNA, 32 nt, Human
aucucgaguagcugggauuacaggcaugcacc

SEQ ID NO: 333877 - RNA, 32 nt, Human
aucucgagucacugcagccugugucuccuggg

SEQ ID NO: 333878 - RNA, 32 nt, Human
aucucgaucuugccauaacuuuacaggguaac

SEQ ID NO: 333879 - RNA, 32 nt, Human
aucucgauuaauaaccugccagucccagauca

SEQ ID NO: 333880 - RNA, 32 nt, Human
aucucgcaguuaccccagcaagaggguguuau

SEQ ID NO: 333881 - RNA, 32 nt, Human
aucucgccaauaauucuugucuuugaguguug

SEQ ID NO: 333882 - RNA, 32 nt, Human
aucucgccacugcacuccaggcugggcgacag

SEQ ID NO: 333883 - RNA, 32 nt, Human
aucucgccacugcgcuccagccugggcaacag

SEQ ID NO: 333884 - RNA, 32 nt, Human
aucucgccacugugcuccagccugggcaacag

SEQ ID NO: 333885 - RNA, 32 nt, Human
aucucgccauugcacuccauucugggcaacaa

SEQ ID NO: 333886 - RNA, 32 nt, Human
aucucgcccugccuccacuugccuugugauau

SEQ ID NO: 333887 - RNA, 32 nt, Human
aucucgcccugccuccauuuaccuugugauau

SEQ ID NO: 333888 - RNA, 24 nt, Human
aucucgccucacugcaaccuccgc

SEQ ID NO: 333889 - RNA, 32 nt, Human
aucucgccucacugcaaccuccgccucccagg

SEQ ID NO: 333890 - RNA, 32 nt, Human
aucucgccucacugcaaccuucaccuaccgag

SEQ ID NO: 333891 - RNA, 32 nt, Human
aucucgccucacugcaacuugcgccucccggg

SEQ ID NO: 333892 - RNA, 32 nt, Human
aucucgcucacugcaaccuccaccucccaggu

SEQ ID NO: 333893 - RNA, 32 nt, Human
aucucgcucacugcaaccuccgccucccgggu

SEQ ID NO: 333894 - RNA, 32 nt, Human
aucucgcucugcacuccagccuaggugacaga

SEQ ID NO: 333895 - RNA, 32 nt, Human
aucucgcugugccucaguuucucccucuucua

SEQ ID NO: 333896 - RNA, 32 nt, Human
aucucggaaaacaaacaaaagaauggucccca

SEQ ID NO: 333897 - RNA, 32 nt, Human
aucucggacuccugaccuugugaucugccugu

SEQ ID NO: 333898 - RNA, 32 nt, Human
aucucggaucacugcaaccuccaccuccuagg

SEQ ID NO: 333899 - RNA, 32 nt, Human
aucucggaucauauggagcucaugucagccgu

SEQ ID NO: 333900 - RNA, 32 nt, Human
aucucggaugaaagggcucccuuguccucagg

SEQ ID NO: 333901 - RNA, 32 nt, Human
aucucggcacacugcaaccuucgccucccaga

SEQ ID NO: 333902 - RNA, 32 nt, Human
aucucggcaugaggccccuucucccaggaggg

SEQ ID NO: 333903 - RNA, 32 nt, Human
aucucggcccacugcaaccucugccuccuggg

SEQ ID NO: 333904 - RNA, 22 nt, Human
aucucggcccacugcagccucg

SEQ ID NO: 333905 - RNA, 32 nt, Human
aucucggcccgcugcagccucugccucuuggg

SEQ ID NO: 333906 - RNA, 32 nt, Human
aucucggcucaaugcagcuuugccuccccagc

SEQ ID NO: 333907 - RNA, 32 nt, Human
aucucggcucacagcaaccucucugccuccag

SEQ ID NO: 333908 - RNA, 32 nt, Human
aucucggcucacagcaaccucugccucccgga

SEQ ID NO: 333909 - RNA, 24 nt, Human
aucucggcucaccacaacauccgc

SEQ ID NO: 333910 - RNA, 22 nt, Human
aucucggcucaccacaaccucc

SEQ ID NO: 333911 - RNA, 24 nt, Human
aucucggcucaccacaaccuccgc

SEQ ID NO: 333912 - RNA, 24 nt, Human
aucucggcucaccacaaucgcugc

SEQ ID NO: 333913 - RNA, 24 nt, Human
aucucggcucaccccaaccuccgc

SEQ ID NO: 333914 - RNA, 24 nt, Human
aucucggcucaccgcaaaguccgc

SEQ ID NO: 333915 - RNA, 22 nt, Human
aucucggcucaccgcaaccucc

SEQ ID NO: 333916 - RNA, 32 nt, Human
aucucggcucaccgcaaccuccaccuuccugg

SEQ ID NO: 333917 - RNA, 24 nt, Human
aucucggcucaccgcaaccuccgc

SEQ ID NO: 333918 - RNA, 32 nt, Human
aucucggcucaccgcaaccuccgccucccagg

SEQ ID NO: 333919 - RNA, 32 nt, Human
aucucggcucaccgcaaccuccgccucccgga

SEQ ID NO: 333920 - RNA, 32 nt, Human
aucucggcucaccgcaaccuccgccucccggg

SEQ ID NO: 333921 - RNA, 32 nt, Human
aucucggcucaccgcaaccuccucuucugggu

SEQ ID NO: 333922 - RNA, 24 nt, Human
aucucggcucaccgcaaccucugc

SEQ ID NO: 333923 - RNA, 32 nt, Human
aucucggcucaccgcaaccucugccucccagg

SEQ ID NO: 333924 - RNA, 32 nt, Human
aucucggcucaccgcaaccucugccucccggg

SEQ ID NO: 333925 - RNA, 32 nt, Human
aucucggcucaccgcaaccucugccuccuggg

SEQ ID NO: 333926 - RNA, 32 nt, Human
aucucggcucaccgcaaccucugcuuccuggc

SEQ ID NO: 333927 - RNA, 24 nt, Human
aucucggcucaccgcaagcuccgc

SEQ ID NO: 333928 - RNA, 21 nt, Human
aucucggcucaccgcagccuc

SEQ ID NO: 333929 - RNA, 24 nt, Human
aucucggcucacggcaacccccgc

SEQ ID NO: 333930 - RNA, 22 nt, Human
aucucggcucacggcaaccucc

SEQ ID NO: 333931 - RNA, 32 nt, Human
aucucggcucacggcaaccuccaccucccggg

SEQ ID NO: 333932 - RNA, 24 nt, Human
aucucggcucacggcaccguccgc

SEQ ID NO: 333933 - RNA, 32 nt, Human
aucucggcucacgguaaccucugccucccagg

SEQ ID NO: 333934 - RNA, 21 nt, Human
aucucggcucacuacaaccuc

SEQ ID NO: 333935 - RNA, 22 nt, Human
aucucggcucacuacaaccucc

SEQ ID NO: 333936 - RNA, 24 nt, Human
aucucggcucacuacaaccucugc

SEQ ID NO: 333937 - RNA, 32 nt, Human
aucucggcucacuacaaccucugccucccagg

SEQ ID NO: 333938 - RNA, 24 nt, Human
aucucggcucacuacaacuuccgc

SEQ ID NO: 333939 - RNA, 32 nt, Human
aucucggcucacuacaagcucugccucccggg

SEQ ID NO: 333940 - RNA, 24 nt, Human
aucucggcucacuacagccucugc

SEQ ID NO: 333941 - RNA, 24 nt, Human
aucucggcucacuccaagcucugc

SEQ ID NO: 333942 - RNA, 32 nt, Human
aucucggcucacuccaccuccaccucccaggu

SEQ ID NO: 333943 - RNA, 24 nt, Human
aucucggcucacugaaaccucugc

SEQ ID NO: 333944 - RNA, 32 nt, Human
aucucggcucacugaaaccucugccucccggg

SEQ ID NO: 333945 - RNA, 32 nt, Human
aucucggcucacugaaaccucugccuuccagg

SEQ ID NO: 333946 - RNA, 32 nt, Human
aucucggcucacugaaaccugugccuccccgg

SEQ ID NO: 333947 - RNA, 32 nt, Human
aucucggcucacugaaacuucugccucccggg

SEQ ID NO: 333948 - RNA, 32 nt, Human
aucucggcucacugaaccuccgccucccaggu

SEQ ID NO: 333949 - RNA, 22 nt, Human
aucucggcucacugcaaaccgc

SEQ ID NO: 333950 - RNA, 32 nt, Human
aucucggcucacugcaaaccgccucccggguu

SEQ ID NO: 333951 - RNA, 24 nt, Human
aucucggcucacugcaaacuccgc

SEQ ID NO: 333952 - RNA, 32 nt, Human
aucucggcucacugcaaacuccgccucccagg

SEQ ID NO: 333953 - RNA, 32 nt, Human
aucucggcucacugcaaacuccgccucccggg

SEQ ID NO: 333954 - RNA, 32 nt, Human
aucucggcucacugcaaacuccgccuuccagg

SEQ ID NO: 333955 - RNA, 24 nt, Human
aucucggcucacugcaaacucugc

SEQ ID NO: 333956 - RNA, 32 nt, Human
aucucggcucacugcaaacucugccucccagg

SEQ ID NO: 333957 - RNA, 32 nt, Human
aucucggcucacugcaaacucugccucccggg

SEQ ID NO: 333958 - RNA, 32 nt, Human
aucucggcucacugcaaacucugccuccugga

SEQ ID NO: 333959 - RNA, 24 nt, Human
aucucggcucacugcaaaucuccg

SEQ ID NO: 333960 - RNA, 32 nt, Human
aucucggcucacugcaaaucuccgccucccag

SEQ ID NO: 333961 - RNA, 32 nt, Human
aucucggcucacugcaacauccaccuccuggg

SEQ ID NO: 333962 - RNA, 24 nt, Human
aucucggcucacugcaacaucugc

SEQ ID NO: 333963 - RNA, 22 nt, Human
aucucggcucacugcaaccacc

SEQ ID NO: 333964 - RNA, 32 nt, Human
aucucggcucacugcaaccaccaucucccagg

SEQ ID NO: 333965 - RNA, 32 nt, Human
aucucggcucacugcaaccacugccucccagg

SEQ ID NO: 333966 - RNA, 22 nt, Human
aucucggcucacugcaaccccc

SEQ ID NO: 333967 - RNA, 32 nt, Human
aucucggcucacugcaacccccaucucccagg

SEQ ID NO: 333968 - RNA, 32 nt, Human
aucucggcucacugcaaccuagguggaggucu

SEQ ID NO: 333969 - RNA, 21 nt, Human
aucucggcucacugcaaccuc

SEQ ID NO: 333970 - RNA, 32 nt, Human
aucucggcucacugcaaccucaccucccgggu

SEQ ID NO: 333971 - RNA, 22 nt, Human
aucucggcucacugcaaccucc

SEQ ID NO: 333972 - RNA, 32 nt, Human
aucucggcucacugcaaccuccaacucccugg

SEQ ID NO: 333973 - RNA, 32 nt, Human
aucucggcucacugcaaccuccacaucccaug

SEQ ID NO: 333974 - RNA, 32 nt, Human
aucucggcucacugcaaccuccacccccgggg

SEQ ID NO: 333975 - RNA, 32 nt, Human
aucucggcucacugcaaccuccaccucacagg

SEQ ID NO: 333976 - RNA, 32 nt, Human
aucucggcucacugcaaccuccaccucccaga

SEQ ID NO: 333977 - RNA, 32 nt, Human
aucucggcucacugcaaccuccaccucccagg

SEQ ID NO: 333978 - RNA, 32 nt, Human
aucucggcucacugcaaccuccaccuccccag

SEQ ID NO: 333979 - RNA, 32 nt, Human
aucucggcucacugcaaccuccaccuccccgg

SEQ ID NO: 333980 - RNA, 32 nt, Human
aucucggcucacugcaaccuccaccucccgag

SEQ ID NO: 333981 - RNA, 32 nt, Human
aucucggcucacugcaaccuccaccucccgga

SEQ ID NO: 333982 - RNA, 32 nt, Human
aucucggcucacugcaaccuccaccucccggg

SEQ ID NO: 333983 - RNA, 32 nt, Human
aucucggcucacugcaaccuccaccuccuagg

SEQ ID NO: 333984 - RNA, 32 nt, Human
aucucggcucacugcaaccuccaccuccugga

SEQ ID NO: 333985 - RNA, 32 nt, Human
aucucggcucacugcaaccuccaccuccuggc

SEQ ID NO: 333986 - RNA, 32 nt, Human
aucucggcucacugcaaccuccaccuccuggg

SEQ ID NO: 333987 - RNA, 32 nt, Human
aucucggcucacugcaaccuccaccuccuggu

SEQ ID NO: 333988 - RNA, 32 nt, Human
aucucggcucacugcaaccuccaccucucggc

SEQ ID NO: 333989 - RNA, 32 nt, Human
aucucggcucacugcaaccuccaccuucaggg

SEQ ID NO: 333990 - RNA, 32 nt, Human
aucucggcucacugcaaccuccacuucuuggg

SEQ ID NO: 333991 - RNA, 32 nt, Human
aucucggcucacugcaaccuccagcucccagg

SEQ ID NO: 333992 - RNA, 32 nt, Human
aucucggcucacugcaaccucccugccugauu

SEQ ID NO: 333993 - RNA, 23 nt, Human
aucucggcucacugcaaccuccg

SEQ ID NO: 333994 - RNA, 32 nt, Human
aucucggcucacugcaaccuccgacuccuggg

SEQ ID NO: 333995 - RNA, 24 nt, Human
aucucggcucacugcaaccuccgc

SEQ ID NO: 333996 - RNA, 32 nt, Human
aucucggcucacugcaaccuccgcccccuggg

SEQ ID NO: 333997 - RNA, 32 nt, Human
aucucggcucacugcaaccuccgccuaccggg

SEQ ID NO: 333998 - RNA, 32 nt, Human
aucucggcucacugcaaccuccgccucccaag

SEQ ID NO: 333999 - RNA, 32 nt, Human
aucucggcucacugcaaccuccgccucccagg

SEQ ID NO: 334000 - RNA, 32 nt, Human
aucucggcucacugcaaccuccgccucccagu

SEQ ID NO: 334001 - RNA, 32 nt, Human
aucucggcucacugcaaccuccgccucccggc

SEQ ID NO: 334002 - RNA, 32 nt, Human
aucucggcucacugcaaccuccgccucccggg

SEQ ID NO: 334003 - RNA, 32 nt, Human
aucucggcucacugcaaccuccgccucccggu

SEQ ID NO: 334004 - RNA, 32 nt, Human
aucucggcucacugcaaccuccgccuccugag

SEQ ID NO: 334005 - RNA, 32 nt, Human
aucucggcucacugcaaccuccgccuccuggg

SEQ ID NO: 334006 - RNA, 32 nt, Human
aucucggcucacugcaaccuccgccuccuugg

SEQ ID NO: 334007 - RNA, 32 nt, Human
aucucggcucacugcaaccuccgccuuccuga

SEQ ID NO: 334008 - RNA, 32 nt, Human
aucucggcucacugcaaccuccgccuugcugg

SEQ ID NO: 334009 - RNA, 32 nt, Human
aucucggcucacugcaaccuccgccuuuccac

SEQ ID NO: 334010 - RNA, 32 nt, Human
aucucggcucacugcaaccuccgcucccuggg

SEQ ID NO: 334011 - RNA, 24 nt, Human
aucucggcucacugcaaccuccgu

SEQ ID NO: 334012 - RNA, 32 nt, Human
aucucggcucacugcaaccuccgucucccagg

SEQ ID NO: 334013 - RNA, 32 nt, Human
aucucggcucacugcaaccuccuccucccggg

SEQ ID NO: 334014 - RNA, 23 nt, Human
aucucggcucacugcaaccucgc

SEQ ID NO: 334015 - RNA, 32 nt, Human
aucucggcucacugcaaccucgccucccuggu

SEQ ID NO: 334016 - RNA, 22 nt, Human
aucucggcucacugcaaccucu

SEQ ID NO: 334017 - RNA, 32 nt, Human
aucucggcucacugcaaccucuaccucccagg

SEQ ID NO: 334018 - RNA, 32 nt, Human
aucucggcucacugcaaccucuaccuccugga

SEQ ID NO: 334019 - RNA, 32 nt, Human
aucucggcucacugcaaccucuaccuccuggg

SEQ ID NO: 334020 - RNA, 24 nt, Human
aucucggcucacugcaaccucugc

SEQ ID NO: 334021 - RNA, 32 nt, Human
aucucggcucacugcaaccucugccaucagga

SEQ ID NO: 334022 - RNA, 32 nt, Human
aucucggcucacugcaaccucugccucacggg

SEQ ID NO: 334023 - RNA, 32 nt, Human
aucucggcucacugcaaccucugccucccagg

SEQ ID NO: 334024 - RNA, 32 nt, Human
aucucggcucacugcaaccucugccucccgag

SEQ ID NO: 334025 - RNA, 32 nt, Human
aucucggcucacugcaaccucugccucccgca

SEQ ID NO: 334026 - RNA, 32 nt, Human
aucucggcucacugcaaccucugccucccgga

SEQ ID NO: 334027 - RNA, 32 nt, Human
aucucggcucacugcaaccucugccucccggg

SEQ ID NO: 334028 - RNA, 32 nt, Human
aucucggcucacugcaaccucugccucccgug

SEQ ID NO: 334029 - RNA, 32 nt, Human
aucucggcucacugcaaccucugccuccuagg

SEQ ID NO: 334030 - RNA, 32 nt, Human
aucucggcucacugcaaccucugccuccugag

SEQ ID NO: 334031 - RNA, 32 nt, Human
aucucggcucacugcaaccucugccuccugga

SEQ ID NO: 334032 - RNA, 32 nt, Human
aucucggcucacugcaaccucugccuccuggg

SEQ ID NO: 334033 - RNA, 32 nt, Human
aucucggcucacugcaaccucugccucuuggg

SEQ ID NO: 334034 - RNA, 32 nt, Human
aucucggcucacugcaaccucugcuucccggg

SEQ ID NO: 334035 - RNA, 32 nt, Human
aucucggcucacugcaaccucugucuccugag

SEQ ID NO: 334036 - RNA, 32 nt, Human
aucucggcucacugcaaccucuugccucccag

SEQ ID NO: 334037 - RNA, 24 nt, Human
aucucggcucacugcaaccuucgc

SEQ ID NO: 334038 - RNA, 32 nt, Human
aucucggcucacugcaaccuucgccucugggu

SEQ ID NO: 334039 - RNA, 24 nt, Human
aucucggcucacugcaacguccgc

SEQ ID NO: 334040 - RNA, 32 nt, Human
aucucggcucacugcaacguccgccucccggg

SEQ ID NO: 334041 - RNA, 22 nt, Human
aucucggcucacugcaacuacc

SEQ ID NO: 334042 - RNA, 32 nt, Human
aucucggcucacugcaacuaccaccuccuggg

SEQ ID NO: 334043 - RNA, 21 nt, Human
aucucggcucacugcaacucc

SEQ ID NO: 334044 - RNA, 32 nt, Human
aucucggcucacugcaacuccaccucccgggu

SEQ ID NO: 334045 - RNA, 32 nt, Human
aucucggcucacugcaacucugccucccgggu

SEQ ID NO: 334046 - RNA, 21 nt, Human
aucucggcucacugcaacuuc

SEQ ID NO: 334047 - RNA, 24 nt, Human
aucucggcucacugcaacuuccgc

SEQ ID NO: 334048 - RNA, 32 nt, Human
aucucggcucacugcaacuuccgccucccggu

SEQ ID NO: 334049 - RNA, 32 nt, Human
aucucggcucacugcaacuuccgccuccuggg

SEQ ID NO: 334050 - RNA, 32 nt, Human
aucucggcucacugcaacuucuaccaccuagg

SEQ ID NO: 334051 - RNA, 24 nt, Human
aucucggcucacugcaacuucugc

SEQ ID NO: 334052 - RNA, 32 nt, Human
aucucggcucacugcaacuucugccucccggg

SEQ ID NO: 334053 - RNA, 32 nt, Human
aucucggcucacugcaacuucugccuccuagg

SEQ ID NO: 334054 - RNA, 24 nt, Human
aucucggcucacugcaagauccgc

SEQ ID NO: 334055 - RNA, 32 nt, Human
aucucggcucacugcaagauccgccucccggg

SEQ ID NO: 334056 - RNA, 22 nt, Human
aucucggcucacugcaagcccc

SEQ ID NO: 334057 - RNA, 32 nt, Human
aucucggcucacugcaagccccaccucccaag

SEQ ID NO: 334058 - RNA, 32 nt, Human
aucucggcucacugcaagccccaccuucugag

SEQ ID NO: 334059 - RNA, 24 nt, Human
aucucggcucacugcaagcccugc

SEQ ID NO: 334060 - RNA, 32 nt, Human
aucucggcucacugcaagcccugccuccuggg

SEQ ID NO: 334061 - RNA, 24 nt, Human
aucucggcucacugcaagcucagc

SEQ ID NO: 334062 - RNA, 32 nt, Human
aucucggcucacugcaagcucagccuccccga

SEQ ID NO: 334063 - RNA, 22 nt, Human
aucucggcucacugcaagcucc

SEQ ID NO: 334064 - RNA, 32 nt, Human
aucucggcucacugcaagcuccaccucccagg

SEQ ID NO: 334065 - RNA, 32 nt, Human
aucucggcucacugcaagcuccaccucccggg

SEQ ID NO: 334066 - RNA, 32 nt, Human
aucucggcucacugcaagcuccaccuccuggg

SEQ ID NO: 334067 - RNA, 32 nt, Human
aucucggcucacugcaagcuccaucucccagg

SEQ ID NO: 334068 - RNA, 23 nt, Human
aucucggcucacugcaagcuccg

SEQ ID NO: 334069 - RNA, 24 nt, Human
aucucggcucacugcaagcuccgc

SEQ ID NO: 334070 - RNA, 32 nt, Human
aucucggcucacugcaagcuccgccucccaga

SEQ ID NO: 334071 - RNA, 32 nt, Human
aucucggcucacugcaagcuccgccucccagg

SEQ ID NO: 334072 - RNA, 32 nt, Human
aucucggcucacugcaagcuccgccucccggg

SEQ ID NO: 334073 - RNA, 32 nt, Human
aucucggcucacugcaagcuccgccuccuggg

SEQ ID NO: 334074 - RNA, 32 nt, Human
aucucggcucacugcaagcuccgccucucggg

SEQ ID NO: 334075 - RNA, 32 nt, Human
aucucggcucacugcaagcuccggcucccagg

SEQ ID NO: 334076 - RNA, 24 nt, Human
aucucggcucacugcaagcucggc

SEQ ID NO: 334077 - RNA, 32 nt, Human
aucucggcucacugcaagcucggccuccuggg

SEQ ID NO: 334078 - RNA, 24 nt, Human
aucucggcucacugcaagcucugc

SEQ ID NO: 334079 - RNA, 32 nt, Human
aucucggcucacugcaagcucugccucccagg

SEQ ID NO: 334080 - RNA, 32 nt, Human
aucucggcucacugcaagcucugccucccggg

SEQ ID NO: 334081 - RNA, 32 nt, Human
aucucggcucacugcaagcucugccucccggu

SEQ ID NO: 334082 - RNA, 32 nt, Human
aucucggcucacugcaagcucugccucccgug

SEQ ID NO: 334083 - RNA, 32 nt, Human
aucucggcucacugcaagcucugccuccuggg

SEQ ID NO: 334084 - RNA, 32 nt, Human
aucucggcucacugcaagcucugccucucggg

SEQ ID NO: 334085 - RNA, 32 nt, Human
aucucggcucacugcaagcucugcguccuggg

SEQ ID NO: 334086 - RNA, 32 nt, Human
aucucggcucacugcaagcucugcuucccagg

SEQ ID NO: 334087 - RNA, 24 nt, Human
aucucggcucacugcaagcuucgc

SEQ ID NO: 334088 - RNA, 32 nt, Human
aucucggcucacugcaagcuucgccucccggg

SEQ ID NO: 334089 - RNA, 24 nt, Human
aucucggcucacugcaaguuccgc

SEQ ID NO: 334090 - RNA, 32 nt, Human
aucucggcucacugcaaguuccgccucccggg

SEQ ID NO: 334091 - RNA, 24 nt, Human
aucucggcucacugcaaucuaggu

SEQ ID NO: 334092 - RNA, 32 nt, Human
aucucggcucacugcaaucuagguggaggucu

SEQ ID NO: 334093 - RNA, 24 nt, Human
aucucggcucacugcaaucuccgc

SEQ ID NO: 334094 - RNA, 32 nt, Human
aucucggcucacugcaaucuccgccucccagg

SEQ ID NO: 334095 - RNA, 24 nt, Human
aucucggcucacugcaaucucugc

SEQ ID NO: 334096 - RNA, 32 nt, Human
aucucggcucacugcaaucucugccucccaag

SEQ ID NO: 334097 - RNA, 32 nt, Human
aucucggcucacugcaaucucugccucccagg

SEQ ID NO: 334098 - RNA, 32 nt, Human
aucucggcucacugcaaucucugccucccgga

SEQ ID NO: 334099 - RNA, 32 nt, Human
aucucggcucacugcaaucucugccucccggg

SEQ ID NO: 334100 - RNA, 32 nt, Human
aucucggcucacugcaaucucugccuccuggg

SEQ ID NO: 334101 - RNA, 24 nt, Human
aucucggcucacugcaauuugcgu

SEQ ID NO: 334102 - RNA, 24 nt, Human
aucucggcucacugcacccuccgu

SEQ ID NO: 334103 - RNA, 32 nt, Human
aucucggcucacugcacccucugccucuuggg

SEQ ID NO: 334104 - RNA, 23 nt, Human
aucucggcucacugcaccuccgc

SEQ ID NO: 334105 - RNA, 32 nt, Human
aucucggcucacugcaccuccgccucccaggu

SEQ ID NO: 334106 - RNA, 23 nt, Human
aucucggcucacugcaccucugc

SEQ ID NO: 334107 - RNA, 32 nt, Human
aucucggcucacugcaccucugccuccuggau

SEQ ID NO: 334108 - RNA, 24 nt, Human
aucucggcucacugcaccuucugc

SEQ ID NO: 334109 - RNA, 32 nt, Human
aucucggcucacugcaccuucugccuaccgag

SEQ ID NO: 334110 - RNA, 18 nt, Human
aucucggcucacugcagc

SEQ ID NO: 334111 - RNA, 32 nt, Human
aucucggcucacugcagcacugucucggcuca

SEQ ID NO: 334112 - RNA, 32 nt, Human
aucucggcucacugcagccccugccucccagg

SEQ ID NO: 334113 - RNA, 21 nt, Human
aucucggcucacugcagccuc

SEQ ID NO: 334114 - RNA, 32 nt, Human
aucucggcucacugcagccucaaccuccuggg

SEQ ID NO: 334115 - RNA, 22 nt, Human
aucucggcucacugcagccucc

SEQ ID NO: 334116 - RNA, 24 nt, Human
aucucggcucacugcagccuccgc

SEQ ID NO: 334117 - RNA, 32 nt, Human
aucucggcucacugcagccuccgccucccagg

SEQ ID NO: 334118 - RNA, 32 nt, Human
aucucggcucacugcagccuccgccucccugg

SEQ ID NO: 334119 - RNA, 32 nt, Human
aucucggcucacugcagccuccgccugccggg

SEQ ID NO: 334120 - RNA, 32 nt, Human
aucucggcucacugcagccucugccucccggg

SEQ ID NO: 334121 - RNA, 22 nt, Human
aucucggcucacugcagccuuc

SEQ ID NO: 334122 - RNA, 32 nt, Human
aucucggcucacugcagccuucaccucccggg

SEQ ID NO: 334123 - RNA, 32 nt, Human
aucucggcucacugcagccuugacuucccagg

SEQ ID NO: 334124 - RNA, 32 nt, Human
aucucggcucacugcagccuugacuuccuggg

SEQ ID NO: 334125 - RNA, 32 nt, Human
aucucggcucacugcagccuuugccucccggg

SEQ ID NO: 334126 - RNA, 32 nt, Human
aucucggcucacugcagcgucgacauuucggg

SEQ ID NO: 334127 - RNA, 24 nt, Human
aucucggcucacugcaggcucugc

SEQ ID NO: 334128 - RNA, 32 nt, Human
aucucggcucacugcaggcucugccuccuggg

SEQ ID NO: 334129 - RNA, 32 nt, Human
aucucggcucacugcagucaccuccucucagg

SEQ ID NO: 334130 - RNA, 21 nt, Human
aucucggcucacugcagucuc

SEQ ID NO: 334131 - RNA, 22 nt, Human
aucucggcucacugcagucuuc

SEQ ID NO: 334132 - RNA, 22 nt, Human
aucucggcucacugcauccucc

SEQ ID NO: 334133 - RNA, 32 nt, Human
aucucggcucacugcauccuccaccuccuggg

SEQ ID NO: 334134 - RNA, 24 nt, Human
aucucggcucacugcauccuccgc

SEQ ID NO: 334135 - RNA, 32 nt, Human
aucucggcucacugcauccuccgccucccggg

SEQ ID NO: 334136 - RNA, 24 nt, Human
aucucggcucacugcauccucugc

SEQ ID NO: 334137 - RNA, 32 nt, Human
aucucggcucacugcauccucugccucccggg

SEQ ID NO: 334138 - RNA, 32 nt, Human
aucucggcucacugcauccucugccuccuggg

SEQ ID NO: 334139 - RNA, 24 nt, Human
aucucggcucacugcaucuuccgc

SEQ ID NO: 334140 - RNA, 32 nt, Human
aucucggcucacugcaucuuccgccucccggg

SEQ ID NO: 334141 - RNA, 21 nt, Human
aucucggcucacugccaccuc

SEQ ID NO: 334142 - RNA, 22 nt, Human
aucucggcucacugccaccucc

SEQ ID NO: 334143 - RNA, 32 nt, Human
aucucggcucacugccaccucucccucauggu

SEQ ID NO: 334144 - RNA, 32 nt, Human
aucucggcucacugccaccucugccucccagg

SEQ ID NO: 334145 - RNA, 24 nt, Human
aucucggcucacugcgaccuccgu

SEQ ID NO: 334146 - RNA, 32 nt, Human
aucucggcucacugcgaccuccgucucccggg

SEQ ID NO: 334147 - RNA, 24 nt, Human
aucucggcucacugcgaccucugc

SEQ ID NO: 334148 - RNA, 32 nt, Human
aucucggcucacugcgaccucugccucccagg

SEQ ID NO: 334149 - RNA, 32 nt, Human
aucucggcucacugcgaccucugcuuccuggg

SEQ ID NO: 334150 - RNA, 32 nt, Human
aucucggcucacugcgagcuccaccucucggg

SEQ ID NO: 334151 - RNA, 32 nt, Human
aucucggcucacugcgagcucugccuccuggg

SEQ ID NO: 334152 - RNA, 32 nt, Human
aucucggcucacuguaaccuccaccuccuggg

SEQ ID NO: 334153 - RNA, 24 nt, Human
aucucggcucacuguaaccuccgc

SEQ ID NO: 334154 - RNA, 32 nt, Human
aucucggcucacuguaaccuccgccuccugaa

SEQ ID NO: 334155 - RNA, 32 nt, Human
aucucggcucacuguaaccuccgccuccuggg

SEQ ID NO: 334156 - RNA, 32 nt, Human
aucucggcucacuguaaccucugccuccugcc

SEQ ID NO: 334157 - RNA, 32 nt, Human
aucucggcucacuguaaccuucaccuacuggg

SEQ ID NO: 334158 - RNA, 24 nt, Human
aucucggcucacuguaagcuccgc

SEQ ID NO: 334159 - RNA, 32 nt, Human
aucucggcucacuguaagcuccgccucccggg

SEQ ID NO: 334160 - RNA, 24 nt, Human
aucucggcucacuguaaucuccgc

SEQ ID NO: 334161 - RNA, 32 nt, Human
aucucggcucacuguaaucuccgccuccuggg

SEQ ID NO: 334162 - RNA, 32 nt, Human
aucucggcucacuguaccucugucucccuggu

SEQ ID NO: 334163 - RNA, 21 nt, Human
aucucggcucacuguagccuc

SEQ ID NO: 334164 - RNA, 32 nt, Human
aucucggcucacuguagccucaaccugccagg

SEQ ID NO: 334165 - RNA, 24 nt, Human
aucucggcucacuguagccucugc

SEQ ID NO: 334166 - RNA, 24 nt, Human
aucucggcucacugugaccuccgc

SEQ ID NO: 334167 - RNA, 32 nt, Human
aucucggcucacugugaccucugccuccuggg

SEQ ID NO: 334168 - RNA, 32 nt, Human
aucucggcucacuugcacccuccgucucucgg

SEQ ID NO: 334169 - RNA, 32 nt, Human
aucucggcucagugcaaccucugccucccagg

SEQ ID NO: 334170 - RNA, 24 nt, Human
aucucggcucauagcaagcuccgc

SEQ ID NO: 334171 - RNA, 32 nt, Human
aucucggcucaucacaaccucugcuuccuggg

SEQ ID NO: 334172 - RNA, 24 nt, Human
aucucggcucauggcaagcuccgc

SEQ ID NO: 334173 - RNA, 22 nt, Human
aucucggcucauugcaaccucc

SEQ ID NO: 334174 - RNA, 32 nt, Human
aucucggcucauugcaaccuccaccuuccaga

SEQ ID NO: 334175 - RNA, 24 nt, Human
aucucggcucauugcaaccuccgc

SEQ ID NO: 334176 - RNA, 32 nt, Human
aucucggcucauugcaaccuccgccucccggg

SEQ ID NO: 334177 - RNA, 32 nt, Human
aucucggcucauugcaaccuccgccuccuggg

SEQ ID NO: 334178 - RNA, 32 nt, Human
aucucggcucauugcaaccuccgccuuccggg

SEQ ID NO: 334179 - RNA, 32 nt, Human
aucucggcucauugcaaccucugcuuccuggg

SEQ ID NO: 334180 - RNA, 24 nt, Human
aucucggcucauugcaagcuccgc

SEQ ID NO: 334181 - RNA, 22 nt, Human
aucucggcucccugcaaccucc

SEQ ID NO: 334182 - RNA, 32 nt, Human
aucucggcucccugcaaccuccaccucccggg

SEQ ID NO: 334183 - RNA, 32 nt, Human
aucucggcucccugcaaccuucgccucccggg

SEQ ID NO: 334184 - RNA, 22 nt, Human
aucucggcucgcuacaaccucc

SEQ ID NO: 334185 - RNA, 24 nt, Human
aucucggcucgcugcaaacucugc

SEQ ID NO: 334186 - RNA, 32 nt, Human
aucucggcucgcugcaaacucugccucccagg

SEQ ID NO: 334187 - RNA, 32 nt, Human
aucucggcucgcugcaaccuccgccucccggg

SEQ ID NO: 334188 - RNA, 32 nt, Human
aucucggcucgcugcaaccuccuccuccuggg

SEQ ID NO: 334189 - RNA, 32 nt, Human
aucucggcucgcugcagccucugccuccuggg

SEQ ID NO: 334190 - RNA, 22 nt, Human
aucucggcucuaugcaaccucc

SEQ ID NO: 334191 - RNA, 32 nt, Human
aucucggcucuaugcaaccuccaccuccuggg

SEQ ID NO: 334192 - RNA, 24 nt, Human
aucucggcucucugcaaccuccgc

SEQ ID NO: 334193 - RNA, 32 nt, Human
aucucggcucucugcaaccuccgccucccagg

SEQ ID NO: 334194 - RNA, 32 nt, Human
aucucggcucucugcaaccucugccucccggg

SEQ ID NO: 334195 - RNA, 32 nt, Human
aucucggcucucugcaaccucugucucccggg

SEQ ID NO: 334196 - RNA, 32 nt, Human
aucucggcugacugcaaccacugccuccaggg

SEQ ID NO: 334197 - RNA, 22 nt, Human
aucucggcugacugcaaccucc

SEQ ID NO: 334198 - RNA, 32 nt, Human
aucucggcugacugcaaccuccaccucccggg

SEQ ID NO: 334199 - RNA, 32 nt, Human
aucucggcugacugcaaccuccaccuccuggg

SEQ ID NO: 334200 - RNA, 32 nt, Human
aucucggcuuacuacgaccucugccuccuggg

SEQ ID NO: 334201 - RNA, 32 nt, Human
aucucggcuuacugaaaccucugccucccagg

SEQ ID NO: 334202 - RNA, 32 nt, Human
aucucggcuuacugcaaccuccaccucccagg

SEQ ID NO: 334203 - RNA, 24 nt, Human
aucucggcuuacugcaaccuccgc

SEQ ID NO: 334204 - RNA, 32 nt, Human
aucucggcuuacugcaaccuccgccuacuggg

SEQ ID NO: 334205 - RNA, 32 nt, Human
aucucggcuuacugcaaccuuugccucccagg

SEQ ID NO: 334206 - RNA, 32 nt, Human
aucucggcuuacugcaacuuccagcuccuggg

SEQ ID NO: 334207 - RNA, 24 nt, Human
aucucggcuuauggcaaccuccgc

SEQ ID NO: 334208 - RNA, 32 nt, Human
aucucggcuuauggcaaccuccgccucccggg

SEQ ID NO: 334209 - RNA, 24 nt, Human
aucucggcuuauugcaaccuccgc

SEQ ID NO: 334210 - RNA, 32 nt, Human
aucucggcuuauugcaaccuccgcuuccuggg

SEQ ID NO: 334211 - RNA, 22 nt, Human
aucucggcuuccugcaaccucc

SEQ ID NO: 334212 - RNA, 32 nt, Human
aucucgggaggcagagguugcagugagccgag

SEQ ID NO: 334213 - RNA, 32 nt, Human
aucucggggugaggaccagaccuuguucauaa

SEQ ID NO: 334214 - RNA, 24 nt, Human
aucucgggucacugcaaccuccgc

SEQ ID NO: 334215 - RNA, 32 nt, Human
aucucgggucacugcaaccuccgccucccggg

SEQ ID NO: 334216 - RNA, 32 nt, Human
aucucgggucacugcaaccucuaccuccaggg

SEQ ID NO: 334217 - RNA, 24 nt, Human
aucucgggucacugcaagcucugc

SEQ ID NO: 334218 - RNA, 32 nt, Human
aucucgggucacugcaagcucugccucccaag

SEQ ID NO: 334219 - RNA, 32 nt, Human
aucucgggugacugcaaccacugccucccagg

SEQ ID NO: 334220 - RNA, 32 nt, Human
aucucggugcagauggugcuuuccugaguggg

SEQ ID NO: 334221 - RNA, 32 nt, Human
aucucgguggaacuucagaaacgcugggcagu

SEQ ID NO: 334222 - RNA, 32 nt, Human
aucucggugucuuuccugcuuccaugagagcc

SEQ ID NO: 334223 - RNA, 32 nt, Human
aucucgguucacugcaacauucaccucccagg

SEQ ID NO: 334224 - RNA, 22 nt, Human
aucucgguucacugcaaccucc

SEQ ID NO: 334225 - RNA, 32 nt, Human
aucucgguucacugcaaccuccaccucccgag

SEQ ID NO: 334226 - RNA, 32 nt, Human
aucucgguucacugcaaccuccaccucucaga

SEQ ID NO: 334227 - RNA, 24 nt, Human
aucucgguucacugcaaccuccgc

SEQ ID NO: 334228 - RNA, 32 nt, Human
aucucgguucacugcaaccuccgccuccaggu

SEQ ID NO: 334229 - RNA, 32 nt, Human
aucucgguucacugcaaccuccgccucccggu

SEQ ID NO: 334230 - RNA, 32 nt, Human
aucucgguucacugcaaccucugccacccaug

SEQ ID NO: 334231 - RNA, 32 nt, Human
aucucgguucacugcaaccucugccucccagg

SEQ ID NO: 334232 - RNA, 32 nt, Human
aucucgguucacugcaaccucugccuccuggg

SEQ ID NO: 334233 - RNA, 32 nt, Human
aucucgguucacugcaaccuuggccuccuagg

SEQ ID NO: 334234 - RNA, 32 nt, Human
aucucgguucacugcagccuccaccucccgag

SEQ ID NO: 334235 - RNA, 32 nt, Human
aucucgguucacugcagccucugccuucuggg

SEQ ID NO: 334236 - RNA, 24 nt, Human
aucucgguucauugcaaccuccgc

SEQ ID NO: 334237 - RNA, 32 nt, Human
aucucgguucauugcaaccuccgccucccgag

SEQ ID NO: 334238 - RNA, 32 nt, Human
aucucgguucauugcaaccuccgccuccugcg

SEQ ID NO: 334239 - RNA, 32 nt, Human
aucucguccucuguccccaacuucuuaagcac

SEQ ID NO: 334240 - RNA, 24 nt, Human
aucucgucucacugcaaccuccgc

SEQ ID NO: 334241 - RNA, 32 nt, Human
aucucgucucacugcaaccuccgccucccaga

SEQ ID NO: 334242 - RNA, 32 nt, Human
aucucgucucacugcaaccucugccuccuggg

SEQ ID NO: 334243 - RNA, 32 nt, Human
aucucgugauccgccugccucugccucccaaa

SEQ ID NO: 334244 - RNA, 32 nt, Human
aucucguuagucugcauuccacagcuucucag

SEQ ID NO: 334245 - RNA, 32 nt, Human
aucucguuucuccucuuuccuccugcuucaug

SEQ ID NO: 334246 - RNA, 32 nt, Human
aucucguuucucuuggacaagcacagggaucu

SEQ ID NO: 334247 - RNA, 32 nt, Human
aucucuaaacagagacuggcccugccacugac

SEQ ID NO: 334248 - RNA, 32 nt, Human
aucucuaaaugcagauuccagaaaaauuacag

SEQ ID NO: 334249 - RNA, 32 nt, Human
aucucuaaaugcagcaaaacacugccugaaaa

SEQ ID NO: 334250 - RNA, 32 nt, Human
aucucuaacuagggccccagaggcugcuuaug

SEQ ID NO: 334251 - RNA, 32 nt, Human
aucucuaauuguaauccccacaugucgaggga

SEQ ID NO: 334252 - RNA, 32 nt, Human
aucucuacaaaaagacacaaaaauuagacagg

SEQ ID NO: 334253 - RNA, 32 nt, Human
aucucuacaaaaauacaaaauuagccagguau

SEQ ID NO: 334254 - RNA, 32 nt, Human
aucucuacagaaaguaaaagaaaaugagccag

SEQ ID NO: 334255 - RNA, 32 nt, Human
aucucuacauagaaaaacggaauuacaguugc

SEQ ID NO: 334256 - RNA, 32 nt, Human
aucucuacauagaaucuucagagccacaggcu

SEQ ID NO: 334257 - RNA, 32 nt, Human
aucucuaccacuccaaucgauguuuaguguga

SEQ ID NO: 334258 - RNA, 32 nt, Human
aucucuacuaaaaaguacaaaaauuagcuggg

SEQ ID NO: 334259 - RNA, 32 nt, Human
aucucuacuaaaaauacacaaaauuagcuggg

SEQ ID NO: 334260 - RNA, 32 nt, Human
aucucuacuaaaaauaccaaaaauuagccgag

SEQ ID NO: 334261 - RNA, 32 nt, Human
aucucuacuaaaacauacaaaaauuagccggg

SEQ ID NO: 334262 - RNA, 32 nt, Human
aucucuacuaaauacaaaaauuagcugggcgu

SEQ ID NO: 334263 - RNA, 22 nt, Human
aucucuacucacugcaaccucc

SEQ ID NO: 334264 - RNA, 32 nt, Human
aucucuacucacugcaaccuccaccucccggg

SEQ ID NO: 334265 - RNA, 32 nt, Human
aucucuacucacugcagccucaaucuccuggu

SEQ ID NO: 334266 - RNA, 32 nt, Human
aucucuacugcaaaauacaaaaauuagccggg

SEQ ID NO: 334267 - RNA, 32 nt, Human
aucucuacuuaaaaaugcaaaaauuagccgga

SEQ ID NO: 334268 - RNA, 30 nt, Human
aucucuagccucuuuguguuuuuguuguug

SEQ ID NO: 334269 - RNA, 24 nt, Human
aucucuagcuggaaaauccagaca

SEQ ID NO: 334270 - RNA, 30 nt, Human
aucucuaggcagcacagggcacagagcccu

SEQ ID NO: 334271 - RNA, 32 nt, Human
aucucuauauggcagcauuuuugaggcuuuau

SEQ ID NO: 334272 - RNA, 32 nt, Human
aucucuauccuucuucugguccuuccuagaaa

SEQ ID NO: 334273 - RNA, 32 nt, Human
aucucuauuugaagaaaaaguagagacaaaag

SEQ ID NO: 334274 - RNA, 32 nt, Human
aucucucaaacggcaacauuccucagaaacca

SEQ ID NO: 334275 - RNA, 32 nt, Human
aucucucaagccaccagcugccagccaccacg

SEQ ID NO: 334276 - RNA, 32 nt, Human
aucucucagggugccggcaccaugaagaucug

SEQ ID NO: 334277 - RNA, 32 nt, Human
aucucucauagcuuucuuuuccauuuuccccu

SEQ ID NO: 334278 - RNA, 32 nt, Human
aucucucauggugaaaucugcucuguacauca

SEQ ID NO: 334279 - RNA, 32 nt, Human
aucucucaugguugagaagugguggaggaugg

SEQ ID NO: 334280 - RNA, 32 nt, Human
aucucucauucuguauagaauucuugccgcca

SEQ ID NO: 334281 - RNA, 32 nt, Human
aucucuccacucccuguucaguugguucuuuu

SEQ ID NO: 334282 - RNA, 32 nt, Human
aucucuccagcacaguaagcaccaggagucca

SEQ ID NO: 334283 - RNA, 32 nt, Human
aucucuccagccugaauugucuucucuguguu

SEQ ID NO: 334284 - RNA, 32 nt, Human
aucucuccaugucacgcgcuccugggccagcc

SEQ ID NO: 334285 - RNA, 32 nt, Human
aucucucccacuguauggccgugccuagaccg

SEQ ID NO: 334286 - RNA, 32 nt, Human
aucucucccagagaacuacuggauuuccucau

SEQ ID NO: 334287 - RNA, 32 nt, Human
aucucuccccaucacuugccuugguagucacu

SEQ ID NO: 334288 - RNA, 32 nt, Human
aucucuccuccacaaagauuccuagacuuugg

SEQ ID NO: 334289 - RNA, 32 nt, Human
aucucuccucuacaguuuggaggugauggugc

SEQ ID NO: 334290 - RNA, 32 nt, Human
aucucuccuuccucccccucccuccccuuccc

SEQ ID NO: 334291 - RNA, 32 nt, Human
aucucucgggccagggagguugaggcugcagu

SEQ ID NO: 334292 - RNA, 32 nt, Human
aucucucguuuagcuaccaauuggagcaguuu

SEQ ID NO: 334293 - RNA, 32 nt, Human
aucucucuccacuuccccuuguccaguuccuc

SEQ ID NO: 334294 - RNA, 32 nt, Human
aucucucucugucacccaggcuggagugcagu

SEQ ID NO: 334295 - RNA, 32 nt, Human
aucucucugucaccucacccuucccugugcca

SEQ ID NO: 334296 - RNA, 32 nt, Human
aucucucuguccucuucuccccucucucagau

SEQ ID NO: 334297 - RNA, 32 nt, Human
aucucucuguucucucuccugccuccuccucc

SEQ ID NO: 334298 - RNA, 32 nt, Human
aucucucuucauuccuggaaugagccauggac

SEQ ID NO: 334299 - RNA, 32 nt, Human
aucucucuuccucccuuacuccgugcucccau

SEQ ID NO: 334300 - RNA, 32 nt, Human
aucucucuugcuuuuccccacagggucaaggu

SEQ ID NO: 334301 - RNA, 32 nt, Human
aucucugaaauccuuccuucucuuucccccua

SEQ ID NO: 334302 - RNA, 32 nt, Human
aucucugaaugucagaacccugucuuuuaaaa

SEQ ID NO: 334303 - RNA, 32 nt, Human
aucucugaccucagcuguggcucuuggugcug

SEQ ID NO: 334304 - RNA, 32 nt, Human
aucucugacuaaaaauacuuaaauuugguuug

SEQ ID NO: 334305 - RNA, 32 nt, Human
aucucugagagacguguggaagaggcugugaa

SEQ ID NO: 334306 - RNA, 32 nt, Human
aucucugaggacaucaccaucaucucaggaug

SEQ ID NO: 334307 - RNA, 32 nt, Human
aucucugaucccaagcccauaguuccucacug

SEQ ID NO: 334308 - RNA, 31 nt, Human
aucucugaugcuucuuuagauuuaagaguuc

SEQ ID NO: 334309 - RNA, 32 nt, Human
aucucugaugggagagggugaggaaaucagcu

SEQ ID NO: 334310 - RNA, 32 nt, Human
aucucugcacagaugagugccaccccagcguc

SEQ ID NO: 334311 - RNA, 32 nt, Human
aucucugcagaacaaccagcuggaaaagaucu

SEQ ID NO: 334312 - RNA, 32 nt, Human
aucucugcagggacuggccuuggccuagggaa

SEQ ID NO: 334313 - RNA, 32 nt, Human
aucucugcagggccgccagggagaccuggaca

SEQ ID NO: 334314 - RNA, 18 nt, Human
aucucugcaugccuuucu

SEQ ID NO: 334315 - RNA, 32 nt, Human
aucucugccaacaccaugaggcuuaaggugcu

SEQ ID NO: 334316 - RNA, 32 nt, Human
aucucugccaacccuuccccuguccucggguu

SEQ ID NO: 334317 - RNA, 32 nt, Human
aucucugcccaggacugggugccugcaucgcc

SEQ ID NO: 334318 - RNA, 32 nt, Human
aucucugcccccuccucuccccaggccucugg

SEQ ID NO: 334319 - RNA, 32 nt, Human
aucucugccgaggcugcuggaaucgacugggg

SEQ ID NO: 334320 - RNA, 32 nt, Human
aucucugccugggaaacaggcuucauucagca

SEQ ID NO: 334321 - RNA, 32 nt, Human
aucucugccuuccggguucaagugauucucgu

SEQ ID NO: 334322 - RNA, 32 nt, Human
aucucugccuuugccuguguguguucuggggg

SEQ ID NO: 334323 - RNA, 32 nt, Human
aucucugcguuucagugaccuaccuuaaaaca

SEQ ID NO: 334324 - RNA, 32 nt, Human
aucucugcuauuugggagacugaggcaggaga

SEQ ID NO: 334325 - RNA, 32 nt, Human
aucucugcucacuacaaccucugccucccagg

SEQ ID NO: 334326 - RNA, 24 nt, Human
aucucugcucacuacaagcucugc

SEQ ID NO: 334327 - RNA, 32 nt, Human
aucucugcucacuacaagcucugccucccgag

SEQ ID NO: 334328 - RNA, 24 nt, Human
aucucugcucacugaaagcuccgc

SEQ ID NO: 334329 - RNA, 32 nt, Human
aucucugcucacugaaagcuccgccucccggg

SEQ ID NO: 334330 - RNA, 24 nt, Human
aucucugcucacugcaaccuccgc

SEQ ID NO: 334331 - RNA, 32 nt, Human
aucucugcucacugcaaccuccgccucccggg

SEQ ID NO: 334332 - RNA, 32 nt, Human
aucucugcucacugcaaccucugccuccuggg

SEQ ID NO: 334333 - RNA, 24 nt, Human
aucucugcucacugcaagccccgc

SEQ ID NO: 334334 - RNA, 32 nt, Human
aucucugcucacugcaagcucagccucucggg

SEQ ID NO: 334335 - RNA, 24 nt, Human
aucucugcucacugcaagcuccgc

SEQ ID NO: 334336 - RNA, 32 nt, Human
aucucugcucacugcaagcuccgccaucuggg

SEQ ID NO: 334337 - RNA, 32 nt, Human
aucucugcucacugcaagcuccgccucccggg

SEQ ID NO: 334338 - RNA, 32 nt, Human
aucucugcucacugcaagcuccgccuccuggg

SEQ ID NO: 334339 - RNA, 32 nt, Human
aucucugcucacuguaaccucugccuccuggg

SEQ ID NO: 334340 - RNA, 32 nt, Human
aucucugcuccagaaaagauggcagccucuuu

SEQ ID NO: 334341 - RNA, 32 nt, Human
aucucugcucccacccuugccugccucuaacc

SEQ ID NO: 334342 - RNA, 32 nt, Human
aucucugcucccugcaaccuccaccucccggg

SEQ ID NO: 334343 - RNA, 24 nt, Human
aucucugcucccugcaagcuccgc

SEQ ID NO: 334344 - RNA, 32 nt, Human
aucucugcucuuugucagagauuugcaaagac

SEQ ID NO: 334345 - RNA, 32 nt, Human
aucucugcugggugguugggugaugugggggc

SEQ ID NO: 334346 - RNA, 32 nt, Human
aucucugcuucauuugugccucccucaccaug

SEQ ID NO: 334347 - RNA, 32 nt, Human
aucucugcuucccggguucaagcaauucuucu

SEQ ID NO: 334348 - RNA, 32 nt, Human
aucucuggagagaaagaggagagccucacggg

SEQ ID NO: 334349 - RNA, 32 nt, Human
aucucuggagccagagagaacaacaggcaggg

SEQ ID NO: 334350 - RNA, 32 nt, Human
aucucuggagccagcuucuagagguaggaaag

SEQ ID NO: 334351 - RNA, 32 nt, Human
aucucuggaggcagaaugagggagugagcagc

SEQ ID NO: 334352 - RNA, 32 nt, Human
aucucuggaguccuggcuuccagaaacaggau

SEQ ID NO: 334353 - RNA, 32 nt, Human
aucucuggaugccacagaccugagcagcauug

SEQ ID NO: 334354 - RNA, 32 nt, Human
aucucuggauuucaugaagguguaauaucguu

SEQ ID NO: 334355 - RNA, 32 nt, Human
aucucuggccauauccugccccucgcucgguc

SEQ ID NO: 334356 - RNA, 32 nt, Human
aucucuggccuuacccugccuuccugccucca

SEQ ID NO: 334357 - RNA, 32 nt, Human
aucucuggcucaccgcaaccuccgccucccag

SEQ ID NO: 334358 - RNA, 32 nt, Human
aucucuggcuuucuucucuccugcucaggacc

SEQ ID NO: 334359 - RNA, 32 nt, Human
aucucugggaauagggccaggaaaucugcccu

SEQ ID NO: 334360 - RNA, 32 nt, Human
aucucugggcuccgggguggcagugaggacca

SEQ ID NO: 334361 - RNA, 32 nt, Human
aucucuggggcccacucucuucugucuuccca

SEQ ID NO: 334362 - RNA, 32 nt, Human
aucucuggggguggggacaggggcgggggcag

SEQ ID NO: 334363 - RNA, 32 nt, Human
aucucuggucacagcaacagcccagcaggcag

SEQ ID NO: 334364 - RNA, 32 nt, Human
aucucuguauauguguuugugaaacugggaua

SEQ ID NO: 334365 - RNA, 32 nt, Human
aucucuguccacugcaaccuccacauccuggg

SEQ ID NO: 334366 - RNA, 32 nt, Human
aucucugucuuccucaagcuugguugugccug

SEQ ID NO: 334367 - RNA, 32 nt, Human
aucucugugacaugaaugcacacaucacaaug

SEQ ID NO: 334368 - RNA, 32 nt, Human
aucucugugacucugugccaaacuguguuucc

SEQ ID NO: 334369 - RNA, 32 nt, Human
aucucugugcaggaaccaagauggggcugaag

SEQ ID NO: 334370 - RNA, 32 nt, Human
aucucugugguuacaagaaacagccacugacc

SEQ ID NO: 334371 - RNA, 32 nt, Human
aucucuguguacacaaacagguacaaaccagc

SEQ ID NO: 334372 - RNA, 32 nt, Human
aucucuguucacugcaaccgccucccgugcuc

SEQ ID NO: 334373 - RNA, 32 nt, Human
aucucuguuccuuuuggcucuaauaugcuaca

SEQ ID NO: 334374 - RNA, 32 nt, Human
aucucuguugguuugucugucucugucuuccu

SEQ ID NO: 334375 - RNA, 32 nt, Human
aucucuguugugggcagcagggccagguccug

SEQ ID NO: 334376 - RNA, 32 nt, Human
aucucuucagugaucauaauagaucaucaaug

SEQ ID NO: 334377 - RNA, 30 nt, Human
aucucuucauccucgcaaagccagcuccac

SEQ ID NO: 334378 - RNA, 32 nt, Human
aucucuucauuucucuguacacugguuucucu

SEQ ID NO: 334379 - RNA, 32 nt, Human
aucucuuccacauuccuccuucuuauaagagc

SEQ ID NO: 334380 - RNA, 32 nt, Human
aucucuuccaucuggcuguuucuaaguugcau

SEQ ID NO: 334381 - RNA, 32 nt, Human
aucucuuccccagcuacagaggaaucuuuucu

SEQ ID NO: 334382 - RNA, 32 nt, Human
aucucuuccccuguuuucacaauggaggacuc

SEQ ID NO: 334383 - RNA, 32 nt, Human
aucucuuccuuuaguuuuucugagguagugca

SEQ ID NO: 334384 - RNA, 32 nt, Human
aucucuuccuuuccuuucccuuucuuuucuuu

SEQ ID NO: 334385 - RNA, 32 nt, Human
aucucuuccuuuuccuccucaucuuuucuccc

SEQ ID NO: 334386 - RNA, 32 nt, Human
aucucuucucaccucuuuccuagucaguauau

SEQ ID NO: 334387 - RNA, 22 nt, Human
aucucuucucacugcaaccucc

SEQ ID NO: 334388 - RNA, 32 nt, Human
aucucuucugcuucccaucccugcugccugga

SEQ ID NO: 334389 - RNA, 32 nt, Human
aucucuugaacccaggaggccgagguugcagu

SEQ ID NO: 334390 - RNA, 32 nt, Human
aucucuugaacccaggagguggaggaugcagu

SEQ ID NO: 334391 - RNA, 32 nt, Human
aucucuugaacccaggagguggagguugcagu

SEQ ID NO: 334392 - RNA, 32 nt, Human
aucucuugaacccgggaggcggagguugcagu

SEQ ID NO: 334393 - RNA, 32 nt, Human
aucucuugaacccgggaggugggaguuguagu

SEQ ID NO: 334394 - RNA, 32 nt, Human
aucucuugaacccgggaguuggagguugcagu

SEQ ID NO: 334395 - RNA, 32 nt, Human
aucucuugaacucuggagucugcucaccuucc

SEQ ID NO: 334396 - RNA, 32 nt, Human
aucucuugaacucuggguucucccagccccuu

SEQ ID NO: 334397 - RNA, 32 nt, Human
aucucuugaccucgugaucugccugccucagc

SEQ ID NO: 334398 - RNA, 32 nt, Human
aucucuugaccucgugaucugccugccuuggc

SEQ ID NO: 334399 - RNA, 32 nt, Human
aucucuugacucuccagaacaacucuaugagg

SEQ ID NO: 334400 - RNA, 32 nt, Human
aucucuugagccugagaaguggagauugcaau

SEQ ID NO: 334401 - RNA, 32 nt, Human
aucucuugccacuuccccucucuggcucugga

SEQ ID NO: 334402 - RNA, 32 nt, Human
aucucuugcggacuucucugccugguuuugug

SEQ ID NO: 334403 - RNA, 32 nt, Human
aucucuuggacuccagccuguaugcacagacc

SEQ ID NO: 334404 - RNA, 32 nt, Human
aucucuuggauguuuaggaaggaagacuuggc

SEQ ID NO: 334405 - RNA, 32 nt, Human
aucucuuggcauaccacugccucccagggaac

SEQ ID NO: 334406 - RNA, 32 nt, Human
aucucuuggucuccucucuuccucacucccuu

SEQ ID NO: 334407 - RNA, 32 nt, Human
aucucuugguucccucuuucugcugccagcuc

SEQ ID NO: 334408 - RNA, 32 nt, Human
aucucuuguccacuaaguaucuuguuaaaugc

SEQ ID NO: 334409 - RNA, 32 nt, Human
aucucuuguguauguuuuacuuauguauacca

SEQ ID NO: 334410 - RNA, 32 nt, Human
aucucuuuaccuccuuuucucuuucacggggc

SEQ ID NO: 334411 - RNA, 32 nt, Human
aucucuuuccaaucacuuguucauacaacagc

SEQ ID NO: 334412 - RNA, 32 nt, Human
aucucuuuccugccuuugcccugcacuguucc

SEQ ID NO: 334413 - RNA, 32 nt, Human
aucucuuucucucuuuccaucucccuugguug

SEQ ID NO: 334414 - RNA, 32 nt, Human
aucucuuucucuuccucccuucugccaucacu

SEQ ID NO: 334415 - RNA, 32 nt, Human
aucucuuugugcaaacaccaggaagcccuggu

SEQ ID NO: 334416 - RNA, 32 nt, Human
aucucuuuuauaggccugauaaaacucuucuc

SEQ ID NO: 334417 - RNA, 32 nt, Human
aucucuuuuggcucggaggccugugauauuuc

SEQ ID NO: 334418 - RNA, 32 nt, Human
aucucuuuuucagaauuuugagucuguaauuc

SEQ ID NO: 334419 - RNA, 32 nt, Human
aucugaaacagcuucaugggguggacucuaac

SEQ ID NO: 334420 - RNA, 32 nt, Human
aucugaaaccaccaguaccaccaccacuaccc

SEQ ID NO: 334421 - RNA, 32 nt, Human
aucugaaaggagcaaggaacagcaaggaauua

SEQ ID NO: 334422 - RNA, 32 nt, Human
aucugaaaugaucuuaauuacuagaagaucug

SEQ ID NO: 334423 - RNA, 32 nt, Human
aucugaacaacaacacuuuaagcuguuuuucu

SEQ ID NO: 334424 - RNA, 22 nt, Human
aucugaacacagaaggugugaa

SEQ ID NO: 334425 - RNA, 32 nt, Human
aucugaacacaugaaucuuuuugaucagagua

SEQ ID NO: 334426 - RNA, 32 nt, Human
aucugaacagaagaggacuuaggagagaucug

SEQ ID NO: 334427 - RNA, 32 nt, Human
aucugaacaggguuagucagcaaaauaaaauc

SEQ ID NO: 334428 - RNA, 32 nt, Human
aucugaacaugccucucucuugcuuacaaaug

SEQ ID NO: 334429 - RNA, 32 nt, Human
aucugaaccagcuguguccagacugaggcccc

SEQ ID NO: 334430 - RNA, 32 nt, Human
aucugaacccaggagacagguugcagugagcc

SEQ ID NO: 334431 - RNA, 32 nt, Human
aucugaacgugccucucucuugcuuacaaaug

SEQ ID NO: 334432 - RNA, 32 nt, Human
aucugaacuccuuggcuucuuuacuuaguuca

SEQ ID NO: 334433 - RNA, 32 nt, Human
aucugaacuguuuuguaaaucaucuuaucccc

SEQ ID NO: 334434 - RNA, 32 nt, Human
aucugaacuuccguuuccccagggccuccagc

SEQ ID NO: 334435 - RNA, 32 nt, Human
aucugaagagcagaaaauguguuaauaggagc

SEQ ID NO: 334436 - RNA, 32 nt, Human
aucugaagagcagcucaaagucuccaguggaa

SEQ ID NO: 334437 - RNA, 23 nt, Human
aucugaagcagcaaccccacuga

SEQ ID NO: 334438 - RNA, 32 nt, Human
aucugaagcagcagagugaacugcagagucag

SEQ ID NO: 334439 - RNA, 32 nt, Human
aucugaaggaagaaagcagcagcuggacaaug

SEQ ID NO: 334440 - RNA, 32 nt, Human
aucugaaggccaggcuuaccucugauucugau

SEQ ID NO: 334441 - RNA, 32 nt, Human
aucugaaggcugaaagagcccugggcuuggaa

SEQ ID NO: 334442 - RNA, 32 nt, Human
aucugaagggcggccugggaaggggcccugug

SEQ ID NO: 334443 - RNA, 32 nt, Human
aucugaaggggcgggguuagagccaagcugca

SEQ ID NO: 334444 - RNA, 32 nt, Human
aucugaaguguucacacuuacacauguaggac

SEQ ID NO: 334445 - RNA, 32 nt, Human
aucugaaguucaagggcgagccugggcuacag

SEQ ID NO: 334446 - RNA, 32 nt, Human
aucugaaucauguucuggguaaggggacgagg

SEQ ID NO: 334447 - RNA, 32 nt, Human
aucugaaucccaugggugugagggugaugggu

SEQ ID NO: 334448 - RNA, 32 nt, Human
aucugaauguguuucuggaaauggaccagcau

SEQ ID NO: 334449 - RNA, 32 nt, Human
aucugaauucuugcuucucucuccuuuuccuu

SEQ ID NO: 334450 - RNA, 32 nt, Human
aucugaauucuuuauguauauuccuagcuaua

SEQ ID NO: 334451 - RNA, 32 nt, Human
aucugacaaacuauugaccuucucccagagau

SEQ ID NO: 334452 - RNA, 32 nt, Human
aucugacaccuugccuugcucuugccaccagg

SEQ ID NO: 334453 - RNA, 32 nt, Human
aucugacagacaccagcucagccaggugauug

SEQ ID NO: 334454 - RNA, 32 nt, Human
aucugacaggaggcagagcucaggcgguaaug

SEQ ID NO: 334455 - RNA, 32 nt, Human
aucugacaucagcucuguucaugagugcucag

SEQ ID NO: 334456 - RNA, 32 nt, Human
aucugaccgcgggcucugcccaggaagaccga

SEQ ID NO: 334457 - RNA, 32 nt, Human
aucugacggcgcagguccuccccuucuguguc

SEQ ID NO: 334458 - RNA, 32 nt, Human
aucugacgucaucuugucucgaagucucuuuu

SEQ ID NO: 334459 - RNA, 32 nt, Human
aucugacuauggcaaggaucucugucacugag

SEQ ID NO: 334460 - RNA, 21 nt, Human
aucugacucuggcuucugcuu

SEQ ID NO: 334461 - RNA, 32 nt, Human
aucugacugguuuccccauguccucccauuca

SEQ ID NO: 334462 - RNA, 32 nt, Human
aucugacugucaccacugccaguggcugugga

SEQ ID NO: 334463 - RNA, 32 nt, Human
aucugacuuaaguccucucucccuccacuagu

SEQ ID NO: 334464 - RNA, 32 nt, Human
aucugacuucaguugugcccauguuauaaugu

SEQ ID NO: 334465 - RNA, 32 nt, Human
aucugacuugccacuagcacaggaagcucagg

SEQ ID NO: 334466 - RNA, 32 nt, Human
aucugacuuuucagaagaaaauaaacaaaugc

SEQ ID NO: 334467 - RNA, 32 nt, Human
aucugacuuuucccucuucaguugccugguau

SEQ ID NO: 334468 - RNA, 32 nt, Human
aucugagaauacugucuuuccauauggcuaag

SEQ ID NO: 334469 - RNA, 32 nt, Human
aucugagacaggaccuugccacgcuggccucu

SEQ ID NO: 334470 - RNA, 32 nt, Human
aucugagagagagucuguggauuggggguaac

SEQ ID NO: 334471 - RNA, 32 nt, Human
aucugagagauggaggcugcagugagccgaga

SEQ ID NO: 334472 - RNA, 32 nt, Human
aucugagaggguggguggcagaggggagcaga

SEQ ID NO: 334473 - RNA, 32 nt, Human
aucugagagugacuggggagccuuugguguuu

SEQ ID NO: 334474 - RNA, 32 nt, Human
aucugagauagaagaaugcuguggucaauuag

SEQ ID NO: 334475 - RNA, 32 nt, Human
aucugagcaaaucuuccucuagcuucaggagg

SEQ ID NO: 334476 - RNA, 32 nt, Human
aucugagcacagacagagggugcugugggucu

SEQ ID NO: 334477 - RNA, 32 nt, Human
aucugagcagccgccacccgcuccccagugcc

SEQ ID NO: 334478 - RNA, 32 nt, Human
aucugagcaggacaaggccccuguugcugaug

SEQ ID NO: 334479 - RNA, 32 nt, Human
aucugagccauugcaggccucugccugcugcc

SEQ ID NO: 334480 - RNA, 32 nt, Human
aucugagcccccuucagagggugggacagggg

SEQ ID NO: 334481 - RNA, 32 nt, Human
aucugagccucaggagguugaggcugcaguga

SEQ ID NO: 334482 - RNA, 32 nt, Human
aucugagcucacugcaaccucugacucccaga

SEQ ID NO: 334483 - RNA, 32 nt, Human
aucugagcucacugcaaccucugccucccaag

SEQ ID NO: 334484 - RNA, 32 nt, Human
aucugagcuggaaacucuucacugccaagucu

SEQ ID NO: 334485 - RNA, 32 nt, Human
aucugaggaaugcagaaaaaccagggcaggac

SEQ ID NO: 334486 - RNA, 23 nt, Human
aucugaggacccagccucaggga

SEQ ID NO: 334487 - RNA, 32 nt, Human
aucugaggagaaaggagagccaguccgagucc

SEQ ID NO: 334488 - RNA, 32 nt, Human
aucugaggagcuccauaaagagguucaagaag

SEQ ID NO: 334489 - RNA, 32 nt, Human
aucugaggcuccuucacuuucucuccauggga

SEQ ID NO: 334490 - RNA, 32 nt, Human
aucugaggcuucuguugcugauacaagaggca

SEQ ID NO: 334491 - RNA, 32 nt, Human
aucugagggaaagacacaccaagcaaagggaa

SEQ ID NO: 334492 - RNA, 32 nt, Human
aucugagggcugcuccccuuuuagaauuuacc

SEQ ID NO: 334493 - RNA, 32 nt, Human
aucugagguauuaagaaauggagagaaaaaua

SEQ ID NO: 334494 - RNA, 32 nt, Human
aucugaggucacugcaaccuccaccucccggg

SEQ ID NO: 334495 - RNA, 32 nt, Human
aucugaggugugaguagagccugggggagagu

SEQ ID NO: 334496 - RNA, 31 nt, Human
aucugaguguguauaagcacagcaggacacc

SEQ ID NO: 334497 - RNA, 32 nt, Human
aucugaguucccaguacacuagucuccccuua

SEQ ID NO: 334498 - RNA, 32 nt, Human
aucugaguugggaguaaggcccccagggacac

SEQ ID NO: 334499 - RNA, 32 nt, Human
aucugaguuuucaguaaaaugauuauggaauu

SEQ ID NO: 334500 - RNA, 24 nt, Human
aucugauagaaacacuagcaccag

SEQ ID NO: 334501 - RNA, 32 nt, Human
aucugauauuuuuacagucugaucuuuugacu

SEQ ID NO: 334502 - RNA, 32 nt, Human
aucugaucacacuugugccaacuugauucaua

SEQ ID NO: 334503 - RNA, 32 nt, Human
aucugaucagcuguggugugaggacuucucag

SEQ ID NO: 334504 - RNA, 32 nt, Human
aucugaucccccauagacuuggggauggacag

SEQ ID NO: 334505 - RNA, 32 nt, Human
aucugaugaaggauaaagaaguauuugaugug

SEQ ID NO: 334506 - RNA, 32 nt, Human
aucugaugagcuucuuucuucuggcaucauua

SEQ ID NO: 334507 - RNA, 32 nt, Human
aucugauguucucagaaggggguggauuuaaa

SEQ ID NO: 334508 - RNA, 32 nt, Human
aucugauguugauccugucucagucuccccac

SEQ ID NO: 334509 - RNA, 26 nt, Human
aucugauuaaaaugcuuccucccagc

SEQ ID NO: 334510 - RNA, 32 nt, Human
aucugauuccucugcugucccugccaggagcu

SEQ ID NO: 334511 - RNA, 31 nt, Human
aucugauuugcucuuugccaugcagaccugu

SEQ ID NO: 334512 - RNA, 32 nt, Human
aucugcaacccuggggaggaccccaacucacc

SEQ ID NO: 334513 - RNA, 32 nt, Human
aucugcaacuaucaaaaaugaggggaaaaggu

SEQ ID NO: 334514 - RNA, 23 nt, Human
aucugcaacuucauuuuccccca

SEQ ID NO: 334515 - RNA, 32 nt, Human
aucugcaagccaaggagagaggcugcaggaga

SEQ ID NO: 334516 - RNA, 32 nt, Human
aucugcaaggcugaacaacagccccugggguu

SEQ ID NO: 334517 - RNA, 32 nt, Human
aucugcaagggcugcaggagaacauucacgag

SEQ ID NO: 334518 - RNA, 18 nt, Human
aucugcaagucccugaca

SEQ ID NO: 334519 - RNA, 32 nt, Human
aucugcacaaaugcaauguuuacaagaacugg

SEQ ID NO: 334520 - RNA, 32 nt, Human
aucugcacagucccuguccuagugcaggacuu

SEQ ID NO: 334521 - RNA, 32 nt, Human
aucugcaccaugggccaaguuucucagaaaau

SEQ ID NO: 334522 - RNA, 32 nt, Human
aucugcaccccuggcccugcucugggcuucag

SEQ ID NO: 334523 - RNA, 32 nt, Human
aucugcagacuccugagggcuagaggacagag

SEQ ID NO: 334524 - RNA, 19 nt, Human
aucugcagaggccaaguaa

SEQ ID NO: 334525 - RNA, 32 nt, Human
aucugcagaguuuugagggcugugcugaccuu

SEQ ID NO: 334526 - RNA, 32 nt, Human
aucugcagccuccaccaggccuugaguagcuu

SEQ ID NO: 334527 - RNA, 32 nt, Human
aucugcagccuccucugugacuccccuuucuc

SEQ ID NO: 334528 - RNA, 32 nt, Human
aucugcagcucucagaggacgacugggcagcc

SEQ ID NO: 334529 - RNA, 32 nt, Human
aucugcaggaagcagagagagcagggcuguuc

SEQ ID NO: 334530 - RNA, 32 nt, Human
aucugcaggagaagacauuuuagugaaauugu

SEQ ID NO: 334531 - RNA, 32 nt, Human
aucugcagggcacagccagggaaggaaauggu

SEQ ID NO: 334532 - RNA, 32 nt, Human
aucugcagguccccagccuggguaaagauggc

SEQ ID NO: 334533 - RNA, 21 nt, Human
aucugcagguggaaggaggug

SEQ ID NO: 334534 - RNA, 32 nt, Human
aucugcagugaugcaauaaccagcauaauaaa

SEQ ID NO: 334535 - RNA, 32 nt, Human
aucugcagugccagcuucuccuucucggugac

SEQ ID NO: 334536 - RNA, 32 nt, Human
aucugcagugccuggcacaucacuggaaaaac

SEQ ID NO: 334537 - RNA, 32 nt, Human
aucugcaguguugaggccagucacuguuggaa

SEQ ID NO: 334538 - RNA, 32 nt, Human
aucugcauaagucugauucuauuucuaugacu

SEQ ID NO: 334539 - RNA, 32 nt, Human
aucugcauagagcuggucucacuguggcgcag

SEQ ID NO: 334540 - RNA, 32 nt, Human
aucugcauauucuggaucauagauguucuuag

SEQ ID NO: 334541 - RNA, 32 nt, Human
aucugcauccagggcuggaggaccgauguaca

SEQ ID NO: 334542 - RNA, 32 nt, Human
aucugcaucugggaccgaccuccugggcuggc

SEQ ID NO: 334543 - RNA, 32 nt, Human
aucugcauggggcucagaggcuguaagaacug

SEQ ID NO: 334544 - RNA, 32 nt, Human
aucugcauuucuaacaggcuccugcccccaag

SEQ ID NO: 334545 - RNA, 32 nt, Human
aucugccaaacauuauauuacuaauaaaacuu

SEQ ID NO: 334546 - RNA, 20 nt, Human
aucugccaacaccagaacuu

SEQ ID NO: 334547 - RNA, 32 nt, Human
aucugccaauagacccaggacgaguaagagag

SEQ ID NO: 334548 - RNA, 32 nt, Human
aucugccacaaaccuguggcggcuucagaucu

SEQ ID NO: 334549 - RNA, 32 nt, Human
aucugccacauagaaggcucucaacaucaugu

SEQ ID NO: 334550 - RNA, 32 nt, Human
aucugccacccagguucaagugauucucgugu

SEQ ID NO: 334551 - RNA, 21 nt, Human
aucugccaccggaaauaccau

SEQ ID NO: 334552 - RNA, 32 nt, Human
aucugccacugcacuccagccuggcgacagag

SEQ ID NO: 334553 - RNA, 32 nt, Human
aucugccacugcugcugacugccacuaccagc

SEQ ID NO: 334554 - RNA, 32 nt, Human
aucugccauauaaaggagauguuucucauucg

SEQ ID NO: 334555 - RNA, 32 nt, Human
aucugccauugauguccagccucugacaugcu

SEQ ID NO: 334556 - RNA, 32 nt, Human
aucugcccaagguaaggagcagaggaggcaug

SEQ ID NO: 334557 - RNA, 32 nt, Human
aucugcccaauaaagcagaaacaugcugaauu

SEQ ID NO: 334558 - RNA, 22 nt, Human
aucugcccaccucagccuccca

SEQ ID NO: 334559 - RNA, 32 nt, Human
aucugcccaguaaauaccagcucguagcaguu

SEQ ID NO: 334560 - RNA, 32 nt, Human
aucugcccauuuccugucuacauucuccuccc

SEQ ID NO: 334561 - RNA, 32 nt, Human
aucugccccagcugccuccacagacugcuguc

SEQ ID NO: 334562 - RNA, 32 nt, Human
aucugcccccugcgccuggccuccgagggcuu

SEQ ID NO: 334563 - RNA, 22 nt, Human
aucugcccgccucugccuccca

SEQ ID NO: 334564 - RNA, 32 nt, Human
aucugcccuccccaaacaucucccucccuacc

SEQ ID NO: 334565 - RNA, 32 nt, Human
aucugcccugcaccaguggccuccaggaaguu

SEQ ID NO: 334566 - RNA, 32 nt, Human
aucugcccuucugucggaccccaggguacguc

SEQ ID NO: 334567 - RNA, 21 nt, Human
aucugccgccaaauacaucca

SEQ ID NO: 334568 - RNA, 32 nt, Human
aucugccguccgggcccugccaggcuugccag

SEQ ID NO: 334569 - RNA, 32 nt, Human
aucugccuauguuuuccuuucucaugcuuuua

SEQ ID NO: 334570 - RNA, 32 nt, Human
aucugccuccaggaccauucaggcuguugaca

SEQ ID NO: 334571 - RNA, 32 nt, Human
aucugccuccuucugugccugccuggcugccc

SEQ ID NO: 334572 - RNA, 32 nt, Human
aucugccucuggcugccugcguccucucggug

SEQ ID NO: 334573 - RNA, 32 nt, Human
aucugccugauccaccuccuccucccaccaca

SEQ ID NO: 334574 - RNA, 32 nt, Human
aucugccugcagcgucacaccgauggccuggc

SEQ ID NO: 334575 - RNA, 32 nt, Human
aucugccugccccucacacacuugcuccccaa

SEQ ID NO: 334576 - RNA, 32 nt, Human
aucugccugccucccaggcagcugcugccuca

SEQ ID NO: 334577 - RNA, 32 nt, Human
aucugccugccugcggccugucuguguuuguc

SEQ ID NO: 334578 - RNA, 32 nt, Human
aucugccugccuggaaagaugagaacacuguu

SEQ ID NO: 334579 - RNA, 32 nt, Human
aucugccuggccccaucuaccuucccuggaag

SEQ ID NO: 334580 - RNA, 32 nt, Human
aucugccuguagucccagcuacucgggaggcu

SEQ ID NO: 334581 - RNA, 32 nt, Human
aucugccuguccggggcaccaggcugggacag

SEQ ID NO: 334582 - RNA, 32 nt, Human
aucugccugugcugggacuuccuguacuaccc

SEQ ID NO: 334583 - RNA, 32 nt, Human
aucugccuucuccaaauuuuaugagcagucug

SEQ ID NO: 334584 - RNA, 32 nt, Human
aucugcgccuccauuuucuaucugcacuuuuu

SEQ ID NO: 334585 - RNA, 31 nt, Human
aucugcggggcgauaggaugggugagucaga

SEQ ID NO: 334586 - RNA, 32 nt, Human
aucugcguggugcugggauguggggacucugg

SEQ ID NO: 334587 - RNA, 32 nt, Human
aucugcguguaugucaaggaagugagaugcca

SEQ ID NO: 334588 - RNA, 32 nt, Human
aucugcguuccuucuggacucuccaaguaagc

SEQ ID NO: 334589 - RNA, 32 nt, Human
aucugcuaaaacugauggcuacauggaaaaag

SEQ ID NO: 334590 - RNA, 32 nt, Human
aucugcuaggacccugcagcugugcugccgcc

SEQ ID NO: 334591 - RNA, 32 nt, Human
aucugcuaugugaggacucuggagagaaauga

SEQ ID NO: 334592 - RNA, 32 nt, Human
aucugcucaagaggauccccucugaucuacag

SEQ ID NO: 334593 - RNA, 21 nt, Human
aucugcuccccucaacucuca

SEQ ID NO: 334594 - RNA, 32 nt, Human
aucugcucuccucagccucccaaaguacuggg

SEQ ID NO: 334595 - RNA, 32 nt, Human
aucugcucugagccaagguucuccaaguagcu

SEQ ID NO: 334596 - RNA, 32 nt, Human
aucugcucugcucucggugaccuugcaacuuc

SEQ ID NO: 334597 - RNA, 32 nt, Human
aucugcucugucacuucaccuuagcucagugc

SEQ ID NO: 334598 - RNA, 32 nt, Human
aucugcucuguucaccuucauccaggccuuug

SEQ ID NO: 334599 - RNA, 32 nt, Human
aucugcugaaaugacacguuuauucuucaucu

SEQ ID NO: 334600 - RNA, 32 nt, Human
aucugcugaacagugaccuccaccaccuuggg

SEQ ID NO: 334601 - RNA, 32 nt, Human
aucugcugagccuuugcucaaauauagcagcu

SEQ ID NO: 334602 - RNA, 32 nt, Human
aucugcugcaggcaggaaggcaugugagugua

SEQ ID NO: 334603 - RNA, 32 nt, Human
aucugcugcaucugaagagcuggguccagcuu

SEQ ID NO: 334604 - RNA, 32 nt, Human
aucugcugccagaaaauguaaaccugaguuga

SEQ ID NO: 334605 - RNA, 32 nt, Human
aucugcugcuuuugauguugcaagacaaauau

SEQ ID NO: 334606 - RNA, 32 nt, Human
aucugcuggccuagggccuggagaccuucucc

SEQ ID NO: 334607 - RNA, 32 nt, Human
aucugcuggcuucagcccuggcagcugagaaa

SEQ ID NO: 334608 - RNA, 32 nt, Human
aucugcugggccagucccuauggcaagcacag

SEQ ID NO: 334609 - RNA, 32 nt, Human
aucugcugggcucugccuuaaacacacauugc

SEQ ID NO: 334610 - RNA, 32 nt, Human
aucugcuguaacuuccagugcaagauaauuca

SEQ ID NO: 334611 - RNA, 32 nt, Human
aucugcuuagaauguggcccugguuucuuuuc

SEQ ID NO: 334612 - RNA, 32 nt, Human
aucugcuucaaccuuaggauguuuucagacca

SEQ ID NO: 334613 - RNA, 32 nt, Human
aucugcuuccaaggcuccgcuucagaggcggc

SEQ ID NO: 334614 - RNA, 32 nt, Human
aucugcuuccagaugagccagugccucgcaug

SEQ ID NO: 334615 - RNA, 32 nt, Human
aucugcuucucagacccaaucacuguggccag

SEQ ID NO: 334616 - RNA, 32 nt, Human
aucugcuucugucccuggcuugaguccugggc

SEQ ID NO: 334617 - RNA, 32 nt, Human
aucugcuugaagcacauuuugcuaauguuuua

SEQ ID NO: 334618 - RNA, 32 nt, Human
aucugcuugugaagguucugucuuuaccacca

SEQ ID NO: 334619 - RNA, 32 nt, Human
aucugcuuuaauuuuaaaaucaucacuaacag

SEQ ID NO: 334620 - RNA, 32 nt, Human
aucugcuuuacaugauacuaugcaaugcuugu

SEQ ID NO: 334621 - RNA, 32 nt, Human
aucugcuuuacucaaaugaugaucucauccac

SEQ ID NO: 334622 - RNA, 32 nt, Human
aucugcuuuauucccauugcugucugcaggcu

SEQ ID NO: 334623 - RNA, 32 nt, Human
aucugcuuucaccaagcugucucuccaccgug

SEQ ID NO: 334624 - RNA, 32 nt, Human
aucugcuuucuauggcaucugaagggaacuaa

SEQ ID NO: 334625 - RNA, 32 nt, Human
aucugcuuugggccgcagcagugcuggguguu

SEQ ID NO: 334626 - RNA, 32 nt, Human
aucuggaaaaacagaccagaaggcuucucuuc

SEQ ID NO: 334627 - RNA, 32 nt, Human
aucuggaaagaaaggaaggaaaacaaaggcgg

SEQ ID NO: 334628 - RNA, 32 nt, Human
aucuggaaagugauuuaucaggaugugagcac

SEQ ID NO: 334629 - RNA, 32 nt, Human
aucuggaacgcugugggcaucuucugcccaug

SEQ ID NO: 334630 - RNA, 32 nt, Human
aucuggaagagagauucugaucugcccaccuc

SEQ ID NO: 334631 - RNA, 32 nt, Human
aucuggaagaggaagaagagaggaaugagaaa

SEQ ID NO: 334632 - RNA, 32 nt, Human
aucuggaagccuuucuggauuaauccagugau

SEQ ID NO: 334633 - RNA, 32 nt, Human
aucuggaaggcagagguugcagugagauugca

SEQ ID NO: 334634 - RNA, 32 nt, Human
aucuggaaggcaggcaggacgggggcguuggg

SEQ ID NO: 334635 - RNA, 32 nt, Human
aucuggaaguucugggauucagguuguuauua

SEQ ID NO: 334636 - RNA, 32 nt, Human
aucuggaauaccaagaggacauguauugaaac

SEQ ID NO: 334637 - RNA, 31 nt, Human
aucuggacaaaugccaccacagcaggugggg

SEQ ID NO: 334638 - RNA, 32 nt, Human
aucuggacaacccaauugagccacuuuaucuc

SEQ ID NO: 334639 - RNA, 32 nt, Human
aucuggacagucaaacucuucccacugcgcca

SEQ ID NO: 334640 - RNA, 32 nt, Human
aucuggaccaagcaaggaagccggcaggagcc

SEQ ID NO: 334641 - RNA, 32 nt, Human
aucuggaccaguuucccugcugugcuguggcc

SEQ ID NO: 334642 - RNA, 32 nt, Human
aucuggaccgaggugugggaguguggagcagg

SEQ ID NO: 334643 - RNA, 32 nt, Human
aucuggacgaucugucucucugcuccaaagaa

SEQ ID NO: 334644 - RNA, 32 nt, Human
aucuggacuccuggauaggcagcuggaccaac

SEQ ID NO: 334645 - RNA, 32 nt, Human
aucuggagaacagcugggccuccucacucagg

SEQ ID NO: 334646 - RNA, 32 nt, Human
aucuggagagcauccuaacugcauuucaacuc

SEQ ID NO: 334647 - RNA, 32 nt, Human
aucuggagaucuggacugcugccccuuagaua

SEQ ID NO: 334648 - RNA, 32 nt, Human
aucuggagccccugaagaccagucccacccac

SEQ ID NO: 334649 - RNA, 32 nt, Human
aucuggaggagagagucggagagcagaaacca

SEQ ID NO: 334650 - RNA, 32 nt, Human
aucuggaggcgggggccagggcgaagguauaa

SEQ ID NO: 334651 - RNA, 32 nt, Human
aucuggagggcagggguugaggggccaccacc

SEQ ID NO: 334652 - RNA, 32 nt, Human
aucuggaggguacagaggugaauggcuuuggu

SEQ ID NO: 334653 - RNA, 32 nt, Human
aucuggauaagaaugcaaugcacugcuugguu

SEQ ID NO: 334654 - RNA, 32 nt, Human
aucuggaucagauucugggggcucagaaacgu

SEQ ID NO: 334655 - RNA, 32 nt, Human
aucuggaugugaagagaaagagaaaaacaaaa

SEQ ID NO: 334656 - RNA, 32 nt, Human
aucuggauuccugguucccugaaggaggagag

SEQ ID NO: 334657 - RNA, 32 nt, Human
aucuggcaaaggcagagaccaaacuucauacc

SEQ ID NO: 334658 - RNA, 32 nt, Human
aucuggcaaucagaagcccaaacugccuuuga

SEQ ID NO: 334659 - RNA, 32 nt, Human
aucuggcacaaggugugccugggaaacccugg

SEQ ID NO: 334660 - RNA, 32 nt, Human
aucuggcacacggggcagagcagagaagcuca

SEQ ID NO: 334661 - RNA, 32 nt, Human
aucuggcagaaguuuccagaaggaggucacuu

SEQ ID NO: 334662 - RNA, 32 nt, Human
aucuggcagauggugccucugccugcucuucu

SEQ ID NO: 334663 - RNA, 32 nt, Human
aucuggcagcaugcaaaugauacauuggaaau

SEQ ID NO: 334664 - RNA, 32 nt, Human
aucuggcaggaggcagagcucaggugggaaug

SEQ ID NO: 334665 - RNA, 32 nt, Human
aucuggcagggugggauggaggagaagaauuu

SEQ ID NO: 334666 - RNA, 32 nt, Human
aucuggcagugagacugaggaugaggacagca

SEQ ID NO: 334667 - RNA, 32 nt, Human
aucuggcaugaggaaauauggagagggaauua

SEQ ID NO: 334668 - RNA, 32 nt, Human
aucuggcauggaguaggugcucaccaguguuu

SEQ ID NO: 334669 - RNA, 32 nt, Human
aucuggcaugggacaggaagggcagagaaggg

SEQ ID NO: 334670 - RNA, 32 nt, Human
aucuggccauggcggacacucagcauuuguug

SEQ ID NO: 334671 - RNA, 32 nt, Human
aucuggccauugcacuccagcgugggcaacag

SEQ ID NO: 334672 - RNA, 19 nt, Human
aucuggcccauggcuguca

SEQ ID NO: 334673 - RNA, 32 nt, Human
aucuggccccagagaagggcagagggaaaggg

SEQ ID NO: 334674 - RNA, 32 nt, Human
aucuggcccuggaccuucugauuugcacagug

SEQ ID NO: 334675 - RNA, 32 nt, Human
aucuggcccuggccagcucugcauuugacaaa

SEQ ID NO: 334676 - RNA, 32 nt, Human
aucuggccucagacaacuacugguggcaagcu

SEQ ID NO: 334677 - RNA, 32 nt, Human
aucuggccuggcugggaggcuugggggcagga

SEQ ID NO: 334678 - RNA, 32 nt, Human
aucuggcgugaggaaauacggagagggaaacu

SEQ ID NO: 334679 - RNA, 32 nt, Human
aucuggcguucuguuuaggguacaccaauaug

SEQ ID NO: 334680 - RNA, 32 nt, Human
aucuggcucacugcagccuccgccucccgggu

SEQ ID NO: 334681 - RNA, 32 nt, Human
aucuggcucacugcauccucaacuuccugggc

SEQ ID NO: 334682 - RNA, 32 nt, Human
aucuggcuccguuucuggugcuucuggaaguc

SEQ ID NO: 334683 - RNA, 32 nt, Human
aucuggcucugcccucaacacgcccugaagcu

SEQ ID NO: 334684 - RNA, 32 nt, Human
aucuggcugggaaaggggaccaggagugcagg

SEQ ID NO: 334685 - RNA, 32 nt, Human
aucuggcugggaucaagaaaccucuuuucacu

SEQ ID NO: 334686 - RNA, 32 nt, Human
aucuggcugggaugugaagggcagcacucccu

SEQ ID NO: 334687 - RNA, 32 nt, Human
aucuggcugugaugaaugaggucuaggaaaua

SEQ ID NO: 334688 - RNA, 32 nt, Human
aucuggcuguuucccaggcugaagugcagugg

SEQ ID NO: 334689 - RNA, 32 nt, Human
aucugggaagagaaauggagaauaagcagcac

SEQ ID NO: 334690 - RNA, 32 nt, Human
aucugggaagcauaguuuauuugcaaguguuc

SEQ ID NO: 334691 - RNA, 32 nt, Human
aucugggaagcggagguugcagugagcugaga

SEQ ID NO: 334692 - RNA, 32 nt, Human
aucugggaaugaggcaguggguggagagagaa

SEQ ID NO: 334693 - RNA, 32 nt, Human
aucugggaccacaggcgugcaccaccaugcau

SEQ ID NO: 334694 - RNA, 32 nt, Human
aucugggaccucuauugcuggagggaggcugc

SEQ ID NO: 334695 - RNA, 32 nt, Human
aucugggacgugaggagugccucugccuggac

SEQ ID NO: 334696 - RNA, 32 nt, Human
aucugggacuacagaugcgugccaccaagccu

SEQ ID NO: 334697 - RNA, 32 nt, Human
aucugggacuacaggcaugcgccaccacgccc

SEQ ID NO: 334698 - RNA, 32 nt, Human
aucugggagagaaggugacacagcugggccca

SEQ ID NO: 334699 - RNA, 32 nt, Human
aucugggagagggaagggagguguugggcucc

SEQ ID NO: 334700 - RNA, 32 nt, Human
aucugggagagguggaggaggggaugaccaaa

SEQ ID NO: 334701 - RNA, 32 nt, Human
aucugggagauccugcauuucuaacaagcucc

SEQ ID NO: 334702 - RNA, 32 nt, Human
aucugggagauccuguuaaaaugcagguucug

SEQ ID NO: 334703 - RNA, 32 nt, Human
aucugggagaugaccugccuuauccuguucua

SEQ ID NO: 334704 - RNA, 32 nt, Human
aucugggagcuguccagccaggucuggugcug

SEQ ID NO: 334705 - RNA, 32 nt, Human
aucugggaggcagagguugcagugagccgaga

SEQ ID NO: 334706 - RNA, 32 nt, Human
aucugggaggcagagguugcagugagcugaga

SEQ ID NO: 334707 - RNA, 32 nt, Human
aucugggaggcagagguugcugugagccgaga

SEQ ID NO: 334708 - RNA, 32 nt, Human
aucugggaggcagaguuugccgugagcugaga

SEQ ID NO: 334709 - RNA, 32 nt, Human
aucugggaggcggagauugcagugagccgaga

SEQ ID NO: 334710 - RNA, 25 nt, Human
aucugggaggcggagguugcaguga

SEQ ID NO: 334711 - RNA, 32 nt, Human
aucugggaggcggagguugcagugagccagga

SEQ ID NO: 334712 - RNA, 32 nt, Human
aucugggagguggaaguugcagugagccgaga

SEQ ID NO: 334713 - RNA, 32 nt, Human
aucugggagguggagguugcagugagccaaga

SEQ ID NO: 334714 - RNA, 32 nt, Human
aucugggauuacaggcaugugccaccacaccu

SEQ ID NO: 334715 - RNA, 32 nt, Human
aucugggauuacaggcgugcaccaccaugccu

SEQ ID NO: 334716 - RNA, 32 nt, Human
aucugggauuacaggugcccaccaccaugccu

SEQ ID NO: 334717 - RNA, 32 nt, Human
aucugggauuacaggugcccgcuaccaugccc

SEQ ID NO: 334718 - RNA, 32 nt, Human
aucugggauugcaggugcacaccaccacgccc

SEQ ID NO: 334719 - RNA, 32 nt, Human
aucugggcagucaggggcaaggacuguuggag

SEQ ID NO: 334720 - RNA, 32 nt, Human
aucugggcauuuuccuccucugccuacagcca

SEQ ID NO: 334721 - RNA, 18 nt, Human
aucugggccaaccagggg

SEQ ID NO: 334722 - RNA, 32 nt, Human
aucugggcccaccucuccccugccucaagccc

SEQ ID NO: 334723 - RNA, 32 nt, Human
aucugggccuaugcuuccuucuggaccaccau

SEQ ID NO: 334724 - RNA, 32 nt, Human
aucugggcucaagugaugcuccugucucagcc

SEQ ID NO: 334725 - RNA, 24 nt, Human
aucugggcucacugcaaccuccgc

SEQ ID NO: 334726 - RNA, 32 nt, Human
aucugggcucacugcaaccuccgccucccugg

SEQ ID NO: 334727 - RNA, 32 nt, Human
aucugggcucacugcaaccuccuccuccugga

SEQ ID NO: 334728 - RNA, 32 nt, Human
aucugggcucauugcaaccuccgccucccggc

SEQ ID NO: 334729 - RNA, 32 nt, Human
aucugggcucauugcaaccucugccucccggg

SEQ ID NO: 334730 - RNA, 32 nt, Human
aucugggcugguuugucuggggagacagacag

SEQ ID NO: 334731 - RNA, 32 nt, Human
aucugggcuuucuaaagcaagugaccugaagg

SEQ ID NO: 334732 - RNA, 31 nt, Human
aucuggggagcgggugugcucacuuacauua

SEQ ID NO: 334733 - RNA, 32 nt, Human
aucuggggaggcagaggugacagugagcugag

SEQ ID NO: 334734 - RNA, 32 nt, Human
aucuggggcacagaagaagaaaaagaacuggg

SEQ ID NO: 334735 - RNA, 32 nt, Human
aucuggggcaccugcuuccacccgucucucug

SEQ ID NO: 334736 - RNA, 32 nt, Human
aucuggggcagcugaggcagggcuaggagaag

SEQ ID NO: 334737 - RNA, 32 nt, Human
aucuggggcaggcacaaauugguggaaaucac

SEQ ID NO: 334738 - RNA, 32 nt, Human
aucuggggcaggugccuguaaucccagcacuu

SEQ ID NO: 334739 - RNA, 32 nt, Human
aucuggggcuacaggcauguaccaucaagccu

SEQ ID NO: 334740 - RNA, 32 nt, Human
aucugggggcugugucagggcagcgggagucc

SEQ ID NO: 334741 - RNA, 32 nt, Human
aucugggggugaggaggacaagaaggagagga

SEQ ID NO: 334742 - RNA, 32 nt, Human
aucugggguauggugggcugaacuccacaagg

SEQ ID NO: 334743 - RNA, 32 nt, Human
aucuggggucugcucccacccaucacaagcug

SEQ ID NO: 334744 - RNA, 32 nt, Human
aucugggucucccucuccacacccagaacuga

SEQ ID NO: 334745 - RNA, 32 nt, Human
aucugggucucuguaucucauguagaacauaa

SEQ ID NO: 334746 - RNA, 32 nt, Human
aucugggugaaggauuugagggaguuuuuggu

SEQ ID NO: 334747 - RNA, 32 nt, Human
aucugggugaaggccuugacagcagcgcuggu

SEQ ID NO: 334748 - RNA, 32 nt, Human
augcacgccuguaaacccagcuacucgggagg

SEQ ID NO: 334749 - RNA, 32 nt, Human
augcacggcuccugcaguuuccugaugcuucu

SEQ ID NO: 334750 - RNA, 32 nt, Human
augcacguacuucaccaccugcccccggggca

SEQ ID NO: 334751 - RNA, 32 nt, Human
augcacguauguccagggcauggggguggcgu

SEQ ID NO: 334752 - RNA, 32 nt, Human
augcacguccucauuauauguaaggaaucuau

SEQ ID NO: 334753 - RNA, 32 nt, Human
augcacuccagccuagacaacagggcaaggcc

SEQ ID NO: 334754 - RNA, 32 nt, Human
augcacuccagccugggcaacagacagaguga

SEQ ID NO: 334755 - RNA, 27 nt, Human
augcacuccagccuggguaacagagcg

SEQ ID NO: 334756 - RNA, 32 nt, Human
augcacucgcggaaauucuccaggcaaaugac

SEQ ID NO: 334757 - RNA, 21 nt, Human
augcacucucucccacccccu

SEQ ID NO: 334758 - RNA, 32 nt, Human
augcacucucuuccaucucuuuccccaaggcu

SEQ ID NO: 334759 - RNA, 32 nt, Human
augcacugaauaugcauuuuauugcuuuacuc

SEQ ID NO: 334760 - RNA, 32 nt, Human
augcacugaccacagcccccaggggaggaugg

SEQ ID NO: 334761 - RNA, 32 nt, Human
augcacugcaccccagccugggcgacagagcc

SEQ ID NO: 334762 - RNA, 32 nt, Human
augcacugcucuccucccacagucuccacuug

SEQ ID NO: 334763 - RNA, 31 nt, Human
augcacuggguggaagaaggguaggagggcu

SEQ ID NO: 334764 - RNA, 32 nt, Human
augcacuucagguuugcuaucuguaaagccuu

SEQ ID NO: 334765 - RNA, 32 nt, Human
augcacuucauacuagcaaucacagcacagga

SEQ ID NO: 334766 - RNA, 32 nt, Human
augcacuucuuacugguacaguuuucuuuugu

SEQ ID NO: 334767 - RNA, 32 nt, Human
augcacuucuuucucuguagcacauguuaccu

SEQ ID NO: 334768 - RNA, 32 nt, Human
augcacuuguacucccagcuacuugggaggcu

SEQ ID NO: 334769 - RNA, 32 nt, Human
augcacuuguagucccagcuacucaagaggcu

SEQ ID NO: 334770 - RNA, 32 nt, Human
augcacuuuauguagcauugaaugaucaaaua

SEQ ID NO: 334771 - RNA, 16 nt, Human
augcacuuuguguuga

SEQ ID NO: 334772 - RNA, 32 nt, Human
augcagaaagagauauucugugauagauauau

SEQ ID NO: 334773 - RNA, 32 nt, Human
augcagaaauaucaggaggagugugaaauacu

SEQ ID NO: 334774 - RNA, 32 nt, Human
augcagaacaugcacguguacacauaccacag

SEQ ID NO: 334775 - RNA, 32 nt, Human
augcagaacccccagaggagugacuguaugcc

SEQ ID NO: 334776 - RNA, 32 nt, Human
augcagaagaggaagaggaggaguaugguguc

SEQ ID NO: 334777 - RNA, 32 nt, Human
augcagaagcuggcaaaggauccuccacacgc

SEQ ID NO: 334778 - RNA, 32 nt, Human
augcagaagucaacgcaaaaucaugcugccgu

SEQ ID NO: 334779 - RNA, 32 nt, Human
augcagaauuaauaagcuauuuagauagcgua

SEQ ID NO: 334780 - RNA, 32 nt, Human
augcagaauuaauaagcuauuuggauagugua

SEQ ID NO: 334781 - RNA, 32 nt, Human
augcagacagggaagggaauuucacuuaaaag

SEQ ID NO: 334782 - RNA, 32 nt, Human
augcagaccagcugugggaagccuccugaaga

SEQ ID NO: 334783 - RNA, 32 nt, Human
augcagaccccaaggagacugggcuggggcug

SEQ ID NO: 334784 - RNA, 32 nt, Human
augcagaccccuggcuuagucuggauacaggc

SEQ ID NO: 334785 - RNA, 32 nt, Human
augcagagaagcagagaagaagaaaggagcug

SEQ ID NO: 334786 - RNA, 32 nt, Human
augcagagacuacacagaaaacuacaagaugu

SEQ ID NO: 334787 - RNA, 32 nt, Human
augcagagcagggccaucauggucagcccuug

SEQ ID NO: 334788 - RNA, 32 nt, Human
augcagagccugcacucuggcacucgcugaag

SEQ ID NO: 334789 - RNA, 32 nt, Human
augcagaggugaugcagcugggguccagcucc

SEQ ID NO: 334790 - RNA, 32 nt, Human
augcagagucuacagccugacccagcugcccg

SEQ ID NO: 334791 - RNA, 32 nt, Human
augcagagucuagagugcaguggugcaagcuc

SEQ ID NO: 334792 - RNA, 32 nt, Human
augcagaguggaccagccgccucugaagcagc

SEQ ID NO: 334793 - RNA, 32 nt, Human
augcagaucccagcuuuaccacuugcuggcug

SEQ ID NO: 334794 - RNA, 32 nt, Human
augcagaucugaagaccccaaucucagaaauu

SEQ ID NO: 334795 - RNA, 32 nt, Human
augcagaugcuuggccccuggcccaggcugug

SEQ ID NO: 334796 - RNA, 32 nt, Human
augcagauggaccacacuuugagaaacaccac

SEQ ID NO: 334797 - RNA, 32 nt, Human
augcagauggccaagcucccacccuggguauu

SEQ ID NO: 334798 - RNA, 32 nt, Human
augcagaugggaguugggggaggggaggauac

SEQ ID NO: 334799 - RNA, 32 nt, Human
augcagauguggaagcagacguuacuauuauc

SEQ ID NO: 334800 - RNA, 32 nt, Human
augcagauucccaggcugggugcaguggcuca

SEQ ID NO: 334801 - RNA, 32 nt, Human
augcagcacacacacaauuccccagcccagug

SEQ ID NO: 334802 - RNA, 32 nt, Human
augcagcacagagagguuaaguaacuugucca

SEQ ID NO: 334803 - RNA, 32 nt, Human
augcagcacgacccagccuggccacacacugu

SEQ ID NO: 334804 - RNA, 32 nt, Human
augcagcacgcaacauggcacauguguauaca

SEQ ID NO: 334805 - RNA, 32 nt, Human
augcagcaggcaggcucagaagacgaugcggg

SEQ ID NO: 334806 - RNA, 32 nt, Human
augcagcagggacugugguggugggcaucacg

SEQ ID NO: 334807 - RNA, 32 nt, Human
augcagcagguauucuuaacugccuuuuucag

SEQ ID NO: 334808 - RNA, 32 nt, Human
augcagcaucaucuuuugcagcauuccucugc

SEQ ID NO: 334809 - RNA, 32 nt, Human
augcagcaugaacacaauuucucuccaccugg

SEQ ID NO: 334810 - RNA, 32 nt, Human
augcagccaagguugagagucacugaauuaag

SEQ ID NO: 334811 - RNA, 32 nt, Human
augcagccaauaggaaccccauuuuuccaccu

SEQ ID NO: 334812 - RNA, 32 nt, Human
augcagccacaggucaccuucugugaucccca

SEQ ID NO: 334813 - RNA, 32 nt, Human
augcagcccagccugaaccuccgcaaaacccc

SEQ ID NO: 334814 - RNA, 17 nt, Human
augcagcccaucgggga

SEQ ID NO: 334815 - RNA, 32 nt, Human
augcagcccccuucuuggucccaugugauguc

SEQ ID NO: 334816 - RNA, 32 nt, Human
augcagccuaaaguacagccuggaccaccccu

SEQ ID NO: 334817 - RNA, 32 nt, Human
augcagcgaugcucccagcccaagagcccaug

SEQ ID NO: 334818 - RNA, 32 nt, Human
augcagcuaacauuucggaaaguuucuaaaag

SEQ ID NO: 334819 - RNA, 32 nt, Human
augcagcuacuaagauuuccuacuacaaagaa

SEQ ID NO: 334820 - RNA, 32 nt, Human
augcagcuagagcagacccaggaaagcuuucu

SEQ ID NO: 334821 - RNA, 32 nt, Human
augcagcucccaggcccuggucugcgcucauu

SEQ ID NO: 334822 - RNA, 32 nt, Human
augcagcucguagaggagagaaaacaagagug

SEQ ID NO: 334823 - RNA, 32 nt, Human
augcagcucucagcacugggugggagggcguu

SEQ ID NO: 334824 - RNA, 32 nt, Human
augcagcucuuccuggacaggccagguggugg

SEQ ID NO: 334825 - RNA, 25 nt, Human
augcagcugacucaucugggccuga

SEQ ID NO: 334826 - RNA, 32 nt, Human
augcagcugcgugaccuaaggcacguaucucc

SEQ ID NO: 334827 - RNA, 32 nt, Human
augcagcugcugcaggggauggggaagggaug

SEQ ID NO: 334828 - RNA, 32 nt, Human
augcagcugggcugagugaugucagcgagacu

SEQ ID NO: 334829 - RNA, 32 nt, Human
augcagcugggcuuccugugaccaggcacccu

SEQ ID NO: 334830 - RNA, 32 nt, Human
augcagcuucuucuguaaccuaccucagaggg

SEQ ID NO: 334831 - RNA, 32 nt, Human
augcagcuuugccuccccagcucaagugaucc

SEQ ID NO: 334832 - RNA, 32 nt, Human
augcaggaaaaugacgagagcauaacuuuucu

SEQ ID NO: 334833 - RNA, 32 nt, Human
augcaggaaguuaaguuuuuaaaggugauucu

SEQ ID NO: 334834 - RNA, 32 nt, Human
augcaggacaagcagagggguugcuggaggug

SEQ ID NO: 334835 - RNA, 32 nt, Human
augcaggagagggagguggucauagagucagg

SEQ ID NO: 334836 - RNA, 32 nt, Human
augcaggaggacccggagaaggccccgacaga

SEQ ID NO: 334837 - RNA, 32 nt, Human
augcaggaggggcugcagguccaugugggcag

SEQ ID NO: 334838 - RNA, 32 nt, Human
augcaggcacacaccacgaaguuuacucagca

SEQ ID NO: 334839 - RNA, 32 nt, Human
augcaggcacagauuuaucaagcuccucaguc

SEQ ID NO: 334840 - RNA, 32 nt, Human
augcaggcaguggcaugaucuuggcucacgac

SEQ ID NO: 334841 - RNA, 22 nt, Human
augcaggccacugaucucugca

SEQ ID NO: 334842 - RNA, 32 nt, Human
augcaggcccuuugaagccucagcuacccacu

SEQ ID NO: 334843 - RNA, 32 nt, Human
augcaggcugcuguacccgcucugccucaagc

SEQ ID NO: 334844 - RNA, 32 nt, Human
augcaggcugugucugcaccagaagaggcucc

SEQ ID NO: 334845 - RNA, 32 nt, Human
augcaggcuucugggccaccugcuccaggcac

SEQ ID NO: 334846 - RNA, 32 nt, Human
augcaggcuuuggugaacagagccgagcuugg

SEQ ID NO: 334847 - RNA, 32 nt, Human
augcaggcuuuuaggacugaguagccuugaaa

SEQ ID NO: 334848 - RNA, 32 nt, Human
augcagggagcacuguucacaucauagauaaa

SEQ ID NO: 334849 - RNA, 32 nt, Human
augcagggaggccacgucccaccccaccucuu

SEQ ID NO: 334850 - RNA, 32 nt, Human
augcagggccuuucagagaugcauugugauug

SEQ ID NO: 334851 - RNA, 32 nt, Human
augcagggcugguucuuuuaccccuugguuua

SEQ ID NO: 334852 - RNA, 32 nt, Human
augcaggggcuggagagaggggcuagggcuug

SEQ ID NO: 334853 - RNA, 32 nt, Human
augcagggggcuggcagguggggagggcuuga

SEQ ID NO: 334854 - RNA, 32 nt, Human
augcaggucagggagagggaaggcaggggugg

SEQ ID NO: 334855 - RNA, 32 nt, Human
augcaggucugcaggacugaccccaaggagga

SEQ ID NO: 334856 - RNA, 32 nt, Human
augcaggucuuucugagcucaagggugaaaga

SEQ ID NO: 334857 - RNA, 32 nt, Human
augcaggugaaacccagucacugugagcuccc

SEQ ID NO: 334858 - RNA, 32 nt, Human
augcaggugaaaggggacagagaaagcaauag

SEQ ID NO: 334859 - RNA, 32 nt, Human
augcaggugagaugcaagguuuucuaaguguu

SEQ ID NO: 334860 - RNA, 32 nt, Human
augcagguggaagaggguaggagggaugcugg

SEQ ID NO: 334861 - RNA, 32 nt, Human
augcaggugguagucacaucaccagagugauc

SEQ ID NO: 334862 - RNA, 32 nt, Human
augcagguggucuccugggaaaguguagagga

SEQ ID NO: 334863 - RNA, 32 nt, Human
augcagguguuuucucaguaucacagaccagc

SEQ ID NO: 334864 - RNA, 32 nt, Human
augcagguuagaauucaggaauuucaaguaug

SEQ ID NO: 334865 - RNA, 32 nt, Human
augcagguucccaggucccacccuggacuucu

SEQ ID NO: 334866 - RNA, 32 nt, Human
augcagguugcugcagcucugccuucuccaug

SEQ ID NO: 334867 - RNA, 32 nt, Human
augcaguagacgauacagguugcauguggaca

SEQ ID NO: 334868 - RNA, 32 nt, Human
augcaguagagauuugaguuuaauuucauguc

SEQ ID NO: 334869 - RNA, 32 nt, Human
augcagucaacuggagagaguuccgauuuguc

SEQ ID NO: 334870 - RNA, 32 nt, Human
augcagucauauggcagcagguuggugauuca

SEQ ID NO: 334871 - RNA, 32 nt, Human
augcagucaucuuccccuccaagggggcagaa

SEQ ID NO: 334872 - RNA, 32 nt, Human
augcagucccaccucagaguaaggacuaccca

SEQ ID NO: 334873 - RNA, 32 nt, Human
augcagucgcaauaacaugucugcucccgagg

SEQ ID NO: 334874 - RNA, 32 nt, Human
augcagucuuacuauguugcccaggcugucuc

SEQ ID NO: 334875 - RNA, 32 nt, Human
augcagugacauugcacaaucugccucugaag

SEQ ID NO: 334876 - RNA, 32 nt, Human
augcagugaccucacuggccuguggugacugc

SEQ ID NO: 334877 - RNA, 32 nt, Human
augcagugauggaagccagaaggaaugaaggc

SEQ ID NO: 334878 - RNA, 32 nt, Human
augcagugcacaggcucugggcucagguuggc

SEQ ID NO: 334879 - RNA, 32 nt, Human
augcagugccuagagagagaguauugucucuu

SEQ ID NO: 334880 - RNA, 32 nt, Human
augcaguggaaccugucaccuaaugggacugc

SEQ ID NO: 334881 - RNA, 32 nt, Human
augcaguggcaccauuucggcucacugcaacu

SEQ ID NO: 334882 - RNA, 32 nt, Human
augcagugggagccaccuccagcugaaugccc

SEQ ID NO: 334883 - RNA, 32 nt, Human
augcagugguagucccagcuacucaggaggcu

SEQ ID NO: 334884 - RNA, 32 nt, Human
augcaguggugugaacugggcucacugcagcc

SEQ ID NO: 334885 - RNA, 32 nt, Human
augcaguguagggagaggagauggcaggacac

SEQ ID NO: 334886 - RNA, 32 nt, Human
augcaguuaccuguggucauuuuggaggaagu

SEQ ID NO: 334887 - RNA, 32 nt, Human
augcaguugcuucucaggggaggaagaaggaa

SEQ ID NO: 334888 - RNA, 32 nt, Human
augcauaagcuacugauaacuugcuuacagca

SEQ ID NO: 334889 - RNA, 32 nt, Human
augcauaagcuugugguucacacugaguguac

SEQ ID NO: 334890 - RNA, 32 nt, Human
augcauacacagacacaagacacacacgcuca

SEQ ID NO: 334891 - RNA, 27 nt, Human
augcauaccccaccccuuaccugcucu

SEQ ID NO: 334892 - RNA, 32 nt, Human
augcauacugucauuugcaggcugucauuuga

SEQ ID NO: 334893 - RNA, 32 nt, Human
augcauagcacaaacuccuccugcuucauuua

SEQ ID NO: 334894 - RNA, 32 nt, Human
augcauaggaauaugcuggugccugaauguac

SEQ ID NO: 334895 - RNA, 32 nt, Human
augcauagguuagagaaauggagagaggcuug

SEQ ID NO: 334896 - RNA, 32 nt, Human
augcauauaauauauguauauguauaugaaga

SEQ ID NO: 334897 - RNA, 32 nt, Human
augcauaugcuucauuccacauuguacuugcu

SEQ ID NO: 334898 - RNA, 32 nt, Human
augcauauuccugguggggauggaggaagaag

SEQ ID NO: 334899 - RNA, 22 nt, Human
augcaucaacugucgggaagag

SEQ ID NO: 334900 - RNA, 22 nt, Human
augcaucaauuucuugaaggag

SEQ ID NO: 334901 - RNA, 32 nt, Human
augcaucaauuuuugugcauucccaacaugcu

SEQ ID NO: 334902 - RNA, 32 nt, Human
augcaucacagaaaagcaacuacuuauauuuc

SEQ ID NO: 334903 - RNA, 32 nt, Human
augcaucacucucccuucugccuccuucaacu

SEQ ID NO: 334904 - RNA, 32 nt, Human
augcaucacucucccuucuuccuccuucaacu

SEQ ID NO: 334905 - RNA, 32 nt, Human
augcaucacucugccagaguaugacuuuuuac

SEQ ID NO: 334906 - RNA, 32 nt, Human
augcaucagcacugcacacuggaaucauugcu

SEQ ID NO: 334907 - RNA, 32 nt, Human
augcaucauugcacuccagccugggugacaga

SEQ ID NO: 334908 - RNA, 32 nt, Human
augcaucauuuccccucugagucucagauucu

SEQ ID NO: 334909 - RNA, 32 nt, Human
augcauccagcucccggguucucagcugguuu

SEQ ID NO: 334910 - RNA, 32 nt, Human
augcauccuaaugaauguuguccccuucaaug

SEQ ID NO: 334911 - RNA, 32 nt, Human
augcaucuagcacauuuaaacugugcaaauau

SEQ ID NO: 334912 - RNA, 32 nt, Human
augcaucuauauguguauuauguauguaugug

SEQ ID NO: 334913 - RNA, 32 nt, Human
augcaucucaacaaagguggcagcaguugaag

SEQ ID NO: 334914 - RNA, 32 nt, Human
augcaucuccaccugcucccaggccaguaagg

SEQ ID NO: 334915 - RNA, 28 nt, Human
augcaucucccaagugccucaugcuugc

SEQ ID NO: 334916 - RNA, 32 nt, Human
augcaucugcaugagccaggcacuacauacag

SEQ ID NO: 334917 - RNA, 32 nt, Human
augcaucugcauucagcugauggcucaucugg

SEQ ID NO: 334918 - RNA, 32 nt, Human
augcaucuguaacccagcuauucaagaggcug

SEQ ID NO: 334919 - RNA, 32 nt, Human
augcaucuguagucccagcuacucgggaggcu

SEQ ID NO: 334920 - RNA, 32 nt, Human
augcaucugugcucccagcuccucacgaggcu

SEQ ID NO: 334921 - RNA, 31 nt, Human
augcaucuguuucagcccuaaccccagugug

SEQ ID NO: 334922 - RNA, 32 nt, Human
augcaucuuagcaauuaccugauuuccaaagu

SEQ ID NO: 334923 - RNA, 32 nt, Human
augcaucuuaucuggcauguccugggagaugg

SEQ ID NO: 334924 - RNA, 32 nt, Human
augcaucuuugugcagggagggugguguaccu

SEQ ID NO: 334925 - RNA, 32 nt, Human
augcaugagcgaaauaucaaacuuucaucuuc

SEQ ID NO: 334926 - RNA, 32 nt, Human
augcaugaggugggcugguagagcaggaagcu

SEQ ID NO: 334927 - RNA, 32 nt, Human
augcaugcaaccuuguaaaaugagcuuauuua

SEQ ID NO: 334928 - RNA, 32 nt, Human
augcaugcacacaaacguguacacaaguguga

SEQ ID NO: 334929 - RNA, 32 nt, Human
augcaugcacacacaugcacacauacacgcac

SEQ ID NO: 334930 - RNA, 32 nt, Human
augcaugcacacacgagcauacuuguaccuuu

SEQ ID NO: 334931 - RNA, 32 nt, Human
augcaugcacacauacacaggcauacaugcau

SEQ ID NO: 334932 - RNA, 32 nt, Human
augcaugcacacauacacaugcacacacacau

SEQ ID NO: 334933 - RNA, 32 nt, Human
augcaugcacacauacauacauauguauacac

SEQ ID NO: 334934 - RNA, 32 nt, Human
augcaugcacacauacauaugcacgcacacac

SEQ ID NO: 334935 - RNA, 32 nt, Human
augcaugcacaugcaguagcuucucugcuuga

SEQ ID NO: 334936 - RNA, 32 nt, Human
augcaugccuguaaucccagcuacucgggagg

SEQ ID NO: 334937 - RNA, 32 nt, Human
augcaugcucagcucaccccugcucugcccuc

SEQ ID NO: 334938 - RNA, 32 nt, Human
augcaugcucuucucucacauggagaaaacca

SEQ ID NO: 334939 - RNA, 32 nt, Human
augcauggaaauucccuucaucuggaaccauc

SEQ ID NO: 334940 - RNA, 32 nt, Human
augcauggauuuaaaugcugugucuuucuaag

SEQ ID NO: 334941 - RNA, 32 nt, Human
augcauggcaaauauuuuaauauuucuguuuu

SEQ ID NO: 334942 - RNA, 32 nt, Human
augcauggggaugcaggucccuugcauuucuu

SEQ ID NO: 334943 - RNA, 32 nt, Human
augcauggguguggggguaugugcccucugug

SEQ ID NO: 334944 - RNA, 32 nt, Human
augcaugucaccagcccaucacggugauucuu

SEQ ID NO: 334945 - RNA, 32 nt, Human
augcaugucucuccuucucuagcugucaaaca

SEQ ID NO: 334946 - RNA, 32 nt, Human
augcaugugaagcccuauaggucucagcagag

SEQ ID NO: 334947 - RNA, 32 nt, Human
augcaugugggcucauucucuccaagcugcuu

SEQ ID NO: 334948 - RNA, 32 nt, Human
augcauguuuuccagcuccucauccagggcuc

SEQ ID NO: 334949 - RNA, 32 nt, Human
augcauuacuaucaguguccuaggcaauaccu

SEQ ID NO: 334950 - RNA, 32 nt, Human
augcauuauggcacagaugagauaauggaugu

SEQ ID NO: 334951 - RNA, 32 nt, Human
augcauucaauauuccaagucuggacagcauc

SEQ ID NO: 334952 - RNA, 32 nt, Human
augcauuccauauuuugcuuucagaacuuaua

SEQ ID NO: 334953 - RNA, 32 nt, Human
augcauuccugucaagucaucuugugaaaggc

SEQ ID NO: 334954 - RNA, 32 nt, Human
augcauucuuauaacauaaccucagaguaucu

SEQ ID NO: 334955 - RNA, 32 nt, Human
augcauugggcauauagagaugaccaaccaca

SEQ ID NO: 334956 - RNA, 32 nt, Human
augcauugucauuuaauauaguagccucuuaa

SEQ ID NO: 334957 - RNA, 32 nt, Human
augcauuguuucuacccaccugagaugguugg

SEQ ID NO: 334958 - RNA, 32 nt, Human
augcauuguuugcuucagauccaugguguuaa

SEQ ID NO: 334959 - RNA, 32 nt, Human
augcauuuccagagaaauguggacuuuucaua

SEQ ID NO: 334960 - RNA, 32 nt, Human
augcauuuccuuaaaauuaauuguagacucca

SEQ ID NO: 334961 - RNA, 32 nt, Human
augcauuucuccacaaguuagcacuugauugu

SEQ ID NO: 334962 - RNA, 31 nt, Human
augcauuucugcuuccuuugccaaagccagc

SEQ ID NO: 334963 - RNA, 32 nt, Human
augcauuucuucuuccugccacugugacucgg

SEQ ID NO: 334964 - RNA, 32 nt, Human
augcauuugagcugccccaggcucugucuccu

SEQ ID NO: 334965 - RNA, 32 nt, Human
augcauuugugcauuucuacuacaauggcauc

SEQ ID NO: 334966 - RNA, 32 nt, Human
augcauuuuaaagcagagagacagggcauuga

SEQ ID NO: 334967 - RNA, 32 nt, Human
augcauuuuagugaauguucucugugcaaaaa

SEQ ID NO: 334968 - RNA, 32 nt, Human
augcauuuucacugaauaugguauguaugcua

SEQ ID NO: 334969 - RNA, 32 nt, Human
augcauuuucugcuuuugguaacuuccuuucg

SEQ ID NO: 334970 - RNA, 32 nt, Human
augcauuuuugaugggaagaaaagguacaugu

SEQ ID NO: 334971 - RNA, 32 nt, Human
augccaaaaacccaaacugcaagugguacugu

SEQ ID NO: 334972 - RNA, 32 nt, Human
augccaaaacuugcuaccaggccaggugugau

SEQ ID NO: 334973 - RNA, 23 nt, Human
augccaaaccaauuuugggucga

SEQ ID NO: 334974 - RNA, 32 nt, Human
augccaaaccacugcacuccuacugccacucu

SEQ ID NO: 334975 - RNA, 23 nt, Human
augccaaacggacaaagggucaa

SEQ ID NO: 334976 - RNA, 32 nt, Human
augccaaagcugcuuucuucucugccuccucc

SEQ ID NO: 334977 - RNA, 32 nt, Human
augccaaaggauuuggcaugcuguaaacaaaa

SEQ ID NO: 334978 - RNA, 32 nt, Human
augccaaaucagcaaccauuguuguuaugauc

SEQ ID NO: 334979 - RNA, 32 nt, Human
augccaaauccacugagugagcaacagaugag

SEQ ID NO: 334980 - RNA, 32 nt, Human
augccaacacccuucucggaggcucaggucaa

SEQ ID NO: 334981 - RNA, 18 nt, Human
augccaacacucgagggg

SEQ ID NO: 334982 - RNA, 19 nt, Human
augccaacagccugggaga

SEQ ID NO: 334983 - RNA, 18 nt, Human
augccaacagcuugggga

SEQ ID NO: 334984 - RNA, 32 nt, Human
augccaaccagcuucccuacuccuacccuggc

SEQ ID NO: 334985 - RNA, 32 nt, Human
augccaacuacaaaagaaaaauauaaaguaaa

SEQ ID NO: 334986 - RNA, 32 nt, Human
augccaacuggagaaagggaagaaggacauau

SEQ ID NO: 334987 - RNA, 32 nt, Human
augccaagaaaauucuuuuuauuggugccuau

SEQ ID NO: 334988 - RNA, 32 nt, Human
augccaagcagugggagcacgcaggacagaca

SEQ ID NO: 334989 - RNA, 32 nt, Human
augccaagccugacacauuugacagugaggac

SEQ ID NO: 334990 - RNA, 25 nt, Human
augccaagcuuacuggaguauuuga

SEQ ID NO: 334991 - RNA, 32 nt, Human
augccaagggcagaaagcaaaccuaguuaaau

SEQ ID NO: 334992 - RNA, 32 nt, Human
augccaaggggagaacaaugagcugaaauugu

SEQ ID NO: 334993 - RNA, 32 nt, Human
augccaaguccgaggcagagcugcagggccug

SEQ ID NO: 334994 - RNA, 32 nt, Human
augccaaugcacuccagucugggcaacagagu

SEQ ID NO: 334995 - RNA, 32 nt, Human
augccaauguacuggcagauuaacauacaacc

SEQ ID NO: 334996 - RNA, 32 nt, Human
augccaauugcugcuacucaacagguuuucug

SEQ ID NO: 334997 - RNA, 32 nt, Human
augccacaccguacuccagccugggcgacauc

SEQ ID NO: 334998 - RNA, 32 nt, Human
augccacaucacagggaccagccaucacagag

SEQ ID NO: 334999 - RNA, 32 nt, Human
augccacaucacuccagccugggcaacagaac

SEQ ID NO: 335000 - RNA, 32 nt, Human
augccaccaaccaaccucagaaacccauaaug

SEQ ID NO: 335001 - RNA, 32 nt, Human
augccaccaccugaacccugcucccucguggg

SEQ ID NO: 335002 - RNA, 32 nt, Human
augccaccaugccuggcuaaucuuuugcagcg

SEQ ID NO: 335003 - RNA, 32 nt, Human
augccacccaaagaaaaggcccugccaggucc

SEQ ID NO: 335004 - RNA, 19 nt, Human
augccacccaccgccugga

SEQ ID NO: 335005 - RNA, 30 nt, Human
augccaccccccaccuuucgccccugccca

SEQ ID NO: 335006 - RNA, 32 nt, Human
augccacccguacuaugaacaccagaacagaa

SEQ ID NO: 335007 - RNA, 32 nt, Human
augccacccucuuccuucucuuugaccccugu

SEQ ID NO: 335008 - RNA, 32 nt, Human
augccacccugaccccacggcuggagaacccu

SEQ ID NO: 335009 - RNA, 32 nt, Human
augccaccgcacuccagccugggcaacagagc

SEQ ID NO: 335010 - RNA, 32 nt, Human
augccaccgcacuuccagccugggugacagag

SEQ ID NO: 335011 - RNA, 32 nt, Human
augccaccucucucaccacguucuagucccag

SEQ ID NO: 335012 - RNA, 32 nt, Human
augccaccuggaaaacagccuggaccugcacc

SEQ ID NO: 335013 - RNA, 18 nt, Human
augccaccugucgucuua

SEQ ID NO: 335014 - RNA, 32 nt, Human
augccacggaccugugcacaugccuggaauug

SEQ ID NO: 335015 - RNA, 32 nt, Human
augccacuacacuccagccuggcgacagagcg

SEQ ID NO: 335016 - RNA, 32 nt, Human
augccacuauacuccagccugggcaacaaagc

SEQ ID NO: 335017 - RNA, 32 nt, Human
augccacuccacuccagucugggcgacagagc

SEQ ID NO: 335018 - RNA, 32 nt, Human
augccacugaacuccagccugggcaacagagu

SEQ ID NO: 335019 - RNA, 32 nt, Human
augccacugaacuccagccugggcaacaggug

SEQ ID NO: 335020 - RNA, 32 nt, Human
augccacugaacuccagccugggugacagagc

SEQ ID NO: 335021 - RNA, 32 nt, Human
augccacugagcaaggagagaugggugagccu

SEQ ID NO: 335022 - RNA, 32 nt, Human
augccacugcacuacagccugggcgacaaagu

SEQ ID NO: 335023 - RNA, 32 nt, Human
augccacugcacuagagccugggcaacagacc

SEQ ID NO: 335024 - RNA, 32 nt, Human
augccacugcacucaaaccuggcggacagagu

SEQ ID NO: 335025 - RNA, 32 nt, Human
augccacugcacuccaaccugggcaacagaau

SEQ ID NO: 335026 - RNA, 32 nt, Human
augccacugcacuccaaccugggcagcagagc

SEQ ID NO: 335027 - RNA, 32 nt, Human
augccacugcacuccaaccugggcgacagagu

SEQ ID NO: 335028 - RNA, 32 nt, Human
augccacugcacuccaaccugggugacagagc

SEQ ID NO: 335029 - RNA, 32 nt, Human
augccacugcacuccacucugggcaacagaau

SEQ ID NO: 335030 - RNA, 32 nt, Human
augccacugcacuccagcaugggugauggaga

SEQ ID NO: 335031 - RNA, 32 nt, Human
augccacugcacuccagcccaggugacagagg

SEQ ID NO: 335032 - RNA, 32 nt, Human
augccacugcacuccagccuaggugacaaaga

SEQ ID NO: 335033 - RNA, 32 nt, Human
augccacugcacuccagccuaugugacuagug

SEQ ID NO: 335034 - RNA, 32 nt, Human
augccacugcacuccagccugagugacagaga

SEQ ID NO: 335035 - RNA, 32 nt, Human
augccacugcacuccagccugccuggaugaca

SEQ ID NO: 335036 - RNA, 32 nt, Human
augccacugcacuccagccuggacaacagagc

SEQ ID NO: 335037 - RNA, 32 nt, Human
augccacugcacuccagccuggaugacagagc

SEQ ID NO: 335038 - RNA, 32 nt, Human
augccacugcacuccagccuggaugacagcga

SEQ ID NO: 335039 - RNA, 32 nt, Human
augccacugcacuccagccuggccugggcaac

SEQ ID NO: 335040 - RNA, 32 nt, Human
augccacugcacuccagccugggagacagagc

SEQ ID NO: 335041 - RNA, 32 nt, Human
augccacugcacuccagccugggcaacaaaac

SEQ ID NO: 335042 - RNA, 32 nt, Human
augccacugcacuccagccugggcaacaaagc

SEQ ID NO: 335043 - RNA, 32 nt, Human
augccacugcacuccagccugggcaacaagaa

SEQ ID NO: 335044 - RNA, 32 nt, Human
augccacugcacuccagccugggcaacaagug

SEQ ID NO: 335045 - RNA, 32 nt, Human
augccacugcacuccagccugggcaacacagc

SEQ ID NO: 335046 - RNA, 32 nt, Human
augccacugcacuccagccugggcaacacagg

SEQ ID NO: 335047 - RNA, 32 nt, Human
augccacugcacuccagccugggcaacagagc

SEQ ID NO: 335048 - RNA, 32 nt, Human
augccacugcacuccagccugggcaacagagu

SEQ ID NO: 335049 - RNA, 32 nt, Human
augccacugcacuccagccugggcaacagcaa

SEQ ID NO: 335050 - RNA, 32 nt, Human
augccacugcacuccagccugggcaaccaggu

SEQ ID NO: 335051 - RNA, 32 nt, Human
augccacugcacuccagccugggcaauggaga

SEQ ID NO: 335052 - RNA, 32 nt, Human
augccacugcacuccagccugggcagcagagc

SEQ ID NO: 335053 - RNA, 32 nt, Human
augccacugcacuccagccugggcaugagacu

SEQ ID NO: 335054 - RNA, 32 nt, Human
augccacugcacuccagccugggccagaauga

SEQ ID NO: 335055 - RNA, 32 nt, Human
augccacugcacuccagccugggcgacagaga

SEQ ID NO: 335056 - RNA, 32 nt, Human
augccacugcacuccagccugggcgacagagc

SEQ ID NO: 335057 - RNA, 32 nt, Human
augccacugcacuccagccugggcgacagagu

SEQ ID NO: 335058 - RNA, 32 nt, Human
augccacugcacuccagccugggcgacggagu

SEQ ID NO: 335059 - RNA, 32 nt, Human
augccacugcacuccagccugggcgauggagu

SEQ ID NO: 335060 - RNA, 32 nt, Human
augccacugcacuccagccugggcggcagagc

SEQ ID NO: 335061 - RNA, 32 nt, Human
augccacugcacuccagccugggcuacagagc

SEQ ID NO: 335062 - RNA, 32 nt, Human
augccacugcacuccagccuggggcugacaga

SEQ ID NO: 335063 - RNA, 25 nt, Human
augccacugcacuccagccugggug

SEQ ID NO: 335064 - RNA, 32 nt, Human
augccacugcacuccagccugggugacagaac

SEQ ID NO: 335065 - RNA, 32 nt, Human
augccacugcacuccagccugggugacagagc

SEQ ID NO: 335066 - RNA, 32 nt, Human
augccacugcacuccagccugggugacagagu

SEQ ID NO: 335067 - RNA, 32 nt, Human
augccacugcacuccagccuggugacagagcg

SEQ ID NO: 335068 - RNA, 32 nt, Human
augccacugcacuccagcuugggcgacagagc

SEQ ID NO: 335069 - RNA, 32 nt, Human
augccacugcacuccagcuugggugagagugg

SEQ ID NO: 335070 - RNA, 32 nt, Human
augccacugcacuccagucuggaugacagaga

SEQ ID NO: 335071 - RNA, 32 nt, Human
augccacugcacuccagucugggugacagcaa

SEQ ID NO: 335072 - RNA, 32 nt, Human
augccacugcacuccauccugggcaacaagaa

SEQ ID NO: 335073 - RNA, 32 nt, Human
augccacugcacuccauccugggugacagcaa

SEQ ID NO: 335074 - RNA, 32 nt, Human
augccacugcacucccgccugggugacaaagc

SEQ ID NO: 335075 - RNA, 32 nt, Human
augccacugcacuccggccuaggugacagagg

SEQ ID NO: 335076 - RNA, 32 nt, Human
augccacugcacuccggccugggugacaaagc

SEQ ID NO: 335077 - RNA, 32 nt, Human
augccacugcacuccuccgugggugacagagc

SEQ ID NO: 335078 - RNA, 32 nt, Human
augccacugcacuccugccugggugacaaagu

SEQ ID NO: 335079 - RNA, 32 nt, Human
augccacugcacucuagccuaggcuacagagc

SEQ ID NO: 335080 - RNA, 32 nt, Human
augccacugcacucuagccugggugacagagc

SEQ ID NO: 335081 - RNA, 32 nt, Human
augccacugcacucugggcuggguaacagagu

SEQ ID NO: 335082 - RNA, 32 nt, Human
augccacugcacugcacuccagccugggugac

SEQ ID NO: 335083 - RNA, 32 nt, Human
augccacugcacugcagcccgggcgacagaga

SEQ ID NO: 335084 - RNA, 32 nt, Human
augccacugcacugcagccugggcgacagagc

SEQ ID NO: 335085 - RNA, 32 nt, Human
augccacugcacuucagccugggugacagagc

SEQ ID NO: 335086 - RNA, 32 nt, Human
augccacugcacuuccagccugggugacacag

SEQ ID NO: 335087 - RNA, 32 nt, Human
augccacugcacuuccagccugggugacagag

SEQ ID NO: 335088 - RNA, 32 nt, Human
augccacugcacuuuagccugggcaacagauc

SEQ ID NO: 335089 - RNA, 32 nt, Human
augccacugcacuuuagccugggugacagagc

SEQ ID NO: 335090 - RNA, 32 nt, Human
augccacugcauuccagccugggcaacagagc

SEQ ID NO: 335091 - RNA, 32 nt, Human
augccacugcauuccagccugggcgacagagu

SEQ ID NO: 335092 - RNA, 32 nt, Human
augccacugcauuccagccugugugauggaga

SEQ ID NO: 335093 - RNA, 32 nt, Human
augccacugccagagcuggccuagcaagaugu

SEQ ID NO: 335094 - RNA, 25 nt, Human
augccacugccuccaugccccuguc

SEQ ID NO: 335095 - RNA, 32 nt, Human
augccacugccucuccccaagugcaacaccua

SEQ ID NO: 335096 - RNA, 32 nt, Human
augccacugcuuuccagccugggcaacauagu

SEQ ID NO: 335097 - RNA, 32 nt, Human
augccacuggacuccagccugggugaaagagc

SEQ ID NO: 335098 - RNA, 32 nt, Human
augccacuguacuccagccuaggugacagagc

SEQ ID NO: 335099 - RNA, 32 nt, Human
augccacuguacuccagccugagcuacagagc

SEQ ID NO: 335100 - RNA, 32 nt, Human
augccacuguacuccagccugggcgacagcaa

SEQ ID NO: 335101 - RNA, 32 nt, Human
augccacuguacuccagccuggguaacaggaa

SEQ ID NO: 335102 - RNA, 32 nt, Human
augccacuguacuccagccugggugacagagc

SEQ ID NO: 335103 - RNA, 32 nt, Human
augccacuguacuccagccugggugacagagu

SEQ ID NO: 335104 - RNA, 32 nt, Human
augccacuguacuccagcgugggugacagagu

SEQ ID NO: 335105 - RNA, 32 nt, Human
augccacugucaaucccggcacuuugggaggc

SEQ ID NO: 335106 - RNA, 32 nt, Human
augccacuucccaggguggagacaguggaaaa

SEQ ID NO: 335107 - RNA, 32 nt, Human
augccacuuuggcugaacuacaaguguaggcc

SEQ ID NO: 335108 - RNA, 32 nt, Human
augccagaacaaccaccuuauuucucaaugac

SEQ ID NO: 335109 - RNA, 32 nt, Human
augccagagaaauauacuaucucaccaguauu

SEQ ID NO: 335110 - RNA, 32 nt, Human
augccagaggaagcacuccugaggcagaggag

SEQ ID NO: 335111 - RNA, 24 nt, Human
augccagagggaggcuugugcaaa

SEQ ID NO: 335112 - RNA, 32 nt, Human
augccagauggaaauuuauuauuucuugcaau

SEQ ID NO: 335113 - RNA, 32 nt, Human
augccagcaacaacccuaccccugccaacgcg

SEQ ID NO: 335114 - RNA, 32 nt, Human
augccagcacacacaaggaagcagagcucugg

SEQ ID NO: 335115 - RNA, 31 nt, Human
augccagcagcucuuccuugccagagaugau

SEQ ID NO: 335116 - RNA, 32 nt, Human
augccagcccagaacagagaaucagcuggagc

SEQ ID NO: 335117 - RNA, 32 nt, Human
augccagccugggcgaugcugcagugaccguu

SEQ ID NO: 335118 - RNA, 32 nt, Human
augccagcgccaacaggaggcugucuggacac

SEQ ID NO: 335119 - RNA, 32 nt, Human
augccagcgcccagggaggagucaguaccccu

SEQ ID NO: 335120 - RNA, 32 nt, Human
augccagcgucaacaggaggcugucuggacac

SEQ ID NO: 335121 - RNA, 32 nt, Human
augccagcuauaaucuccccugccuuccuuua

SEQ ID NO: 335122 - RNA, 32 nt, Human
augccagcugcaaccuccgcuagguacgauac

SEQ ID NO: 335123 - RNA, 32 nt, Human
augccagcuguacugaguucucauccacagag

SEQ ID NO: 335124 - RNA, 32 nt, Human
augccagcuguacugccggcucugccggcacc

SEQ ID NO: 335125 - RNA, 23 nt, Human
augccagcuuaccaucucuacca

SEQ ID NO: 335126 - RNA, 32 nt, Human
augccagcuuggagagucacgugagagcaaga

SEQ ID NO: 335127 - RNA, 30 nt, Human
augccagcuuugcaaucaugagauucaaaa

SEQ ID NO: 335128 - RNA, 32 nt, Human
augccaggaagagaagaaagggggugcagucu

SEQ ID NO: 335129 - RNA, 32 nt, Human
augccaggacacccccucccacacucaggaca

SEQ ID NO: 335130 - RNA, 32 nt, Human
augccaggaccucacagacaaagccauugcua

SEQ ID NO: 335131 - RNA, 32 nt, Human
augccaggacuugugcacaucuuuuuggagcc

SEQ ID NO: 335132 - RNA, 32 nt, Human
augccaggagagguucaagcgucuuaccugaa

SEQ ID NO: 335133 - RNA, 32 nt, Human
augccaggagcacggccacugcccgccgggcu

SEQ ID NO: 335134 - RNA, 32 nt, Human
augccaggaggguggcugggcaggcugcuguc

SEQ ID NO: 335135 - RNA, 32 nt, Human
augccaggaguuuggggaaggaagggguggga

SEQ ID NO: 335136 - RNA, 32 nt, Human
augccaggcacuguacuaggcacuuuucaugc

SEQ ID NO: 335137 - RNA, 32 nt, Human
augccaggccaggaacugggaccaccaucuug

SEQ ID NO: 335138 - RNA, 32 nt, Human
augccaggccuccugggucugcagugagucug

SEQ ID NO: 335139 - RNA, 32 nt, Human
augccaggguuagaggcuagagaguggaaguc

SEQ ID NO: 335140 - RNA, 32 nt, Human
augccagguaggaggaagggcuggggcaaugg

SEQ ID NO: 335141 - RNA, 32 nt, Human
augccaggucccaggaacucaggcuucaggug

SEQ ID NO: 335142 - RNA, 32 nt, Human
augccagguuuuccucuucuggguccggagcu

SEQ ID NO: 335143 - RNA, 32 nt, Human
augccaguagguuugaagggggcagagcacug

SEQ ID NO: 335144 - RNA, 22 nt, Human
augccaguagugaccaagaaca

SEQ ID NO: 335145 - RNA, 32 nt, Human
augccagugcacuccagccugggcaacagagu

SEQ ID NO: 335146 - RNA, 32 nt, Human
augccagugccuggcccccucuugccuuuuau

SEQ ID NO: 335147 - RNA, 32 nt, Human
augccaguggccacccuugggcucagacagcu

SEQ ID NO: 335148 - RNA, 32 nt, Human
augccaguguuacuccagcaggcaaccaagaa

SEQ ID NO: 335149 - RNA, 32 nt, Human
augccaguuacauucccaucagauaagagcaa

SEQ ID NO: 335150 - RNA, 32 nt, Human
augccaucacaggcucagccuuuuacauguau

SEQ ID NO: 335151 - RNA, 32 nt, Human
augccaucauuucccuuuccccucugaauggc

SEQ ID NO: 335152 - RNA, 32 nt, Human
augccauccccaucaagcuaccaaugacuuuc

SEQ ID NO: 335153 - RNA, 32 nt, Human
augccauccuuugggcccucugcuggaaaagu

SEQ ID NO: 335154 - RNA, 32 nt, Human
augccaucuccucugugaagccuccuuguuuc

SEQ ID NO: 335155 - RNA, 32 nt, Human
augccaucugaaggggauucugaucuguucuu

SEQ ID NO: 335156 - RNA, 30 nt, Human
augccauggcuaguccagggaaagauaacu

SEQ ID NO: 335157 - RNA, 32 nt, Human
augccaugucuuggcugggauuacaggcauga

SEQ ID NO: 335158 - RNA, 32 nt, Human
augccaugugucaggagggaaaggccuaggaa

SEQ ID NO: 335159 - RNA, 32 nt, Human
augccauuacacuccagccugggcaacagcgu

SEQ ID NO: 335160 - RNA, 32 nt, Human
augccauuacacuccagccugggcgacagaac

SEQ ID NO: 335161 - RNA, 32 nt, Human
augccauuaccuaaggggaggguauuaugcac

SEQ ID NO: 335162 - RNA, 32 nt, Human
augccauugcacuccaaccugggugacagagu

SEQ ID NO: 335163 - RNA, 32 nt, Human
augccauugcacuccagcccagguaacagagu

SEQ ID NO: 335164 - RNA, 32 nt, Human
augccauugcacuccagcccggguuacagugu

SEQ ID NO: 335165 - RNA, 32 nt, Human
augccauugcacuccagccuaggcaacaagag

SEQ ID NO: 335166 - RNA, 32 nt, Human
augccauugcacuccagccugagugacaagag

SEQ ID NO: 335167 - RNA, 32 nt, Human
augccauugcacuccagccuggacaacagagc

SEQ ID NO: 335168 - RNA, 32 nt, Human
augccauugcacuccagccugggcaacaagag

SEQ ID NO: 335169 - RNA, 32 nt, Human
augccauugcacuccagccugggcaacagagc

SEQ ID NO: 335170 - RNA, 32 nt, Human
augccauugcacuccagccugggcaacagagu

SEQ ID NO: 335171 - RNA, 32 nt, Human
augccauugcacuccagccugggcaacgagag

SEQ ID NO: 335172 - RNA, 32 nt, Human
augccauugcacuccagccugggcgacaagag

SEQ ID NO: 335173 - RNA, 32 nt, Human
augccauugcacuccagccugggcgacagagc

SEQ ID NO: 335174 - RNA, 32 nt, Human
augccauugcacuccagccugggcgacagagu

SEQ ID NO: 335175 - RNA, 32 nt, Human
augccauugcacuccagccugggugacaaagc

SEQ ID NO: 335176 - RNA, 32 nt, Human
augccauugcacuccagccugggugacaagag

SEQ ID NO: 335177 - RNA, 32 nt, Human
augccauugcacuccagccugggugacaaggg

SEQ ID NO: 335178 - RNA, 32 nt, Human
augccauugcacuccagccugggugacagagc

SEQ ID NO: 335179 - RNA, 32 nt, Human
augccauugcacuccagccugggugacagagu

SEQ ID NO: 335180 - RNA, 32 nt, Human
augccauugcacuccagccugggugauaagag

SEQ ID NO: 335181 - RNA, 32 nt, Human
augccauugcacuccagcuugggugacagagu

SEQ ID NO: 335182 - RNA, 32 nt, Human
augccauugcacuccagucugggcgacaggag

SEQ ID NO: 335183 - RNA, 32 nt, Human
augccauugcacuccgacucugggcaacagag

SEQ ID NO: 335184 - RNA, 32 nt, Human
augccauugcacugcaccugggcaacaagagu

SEQ ID NO: 335185 - RNA, 32 nt, Human
augccauugcauuccagccuaggcaacacgag

SEQ ID NO: 335186 - RNA, 32 nt, Human
augccauugcauuccagccuuggcgacagagc

SEQ ID NO: 335187 - RNA, 32 nt, Human
augccauuggacuccagccugggcaaaaaggg

SEQ ID NO: 335188 - RNA, 32 nt, Human
augccauuguacuccagccugggcaacaagag

SEQ ID NO: 335189 - RNA, 32 nt, Human
augccauuucugcaucucccagaagggaugag

SEQ ID NO: 335190 - RNA, 32 nt, Human
augccauuuuauuucuuuuugauuuuuaaauc

SEQ ID NO: 335191 - RNA, 22 nt, Human
augcccaaaaauaagucuuaga

SEQ ID NO: 335192 - RNA, 22 nt, Human
augcccaaaacaucccucccca

SEQ ID NO: 335193 - RNA, 32 nt, Human
augcccaaaauaccagccuguuuagcaguguu

SEQ ID NO: 335194 - RNA, 32 nt, Human
augcccaaaauguagaacuuuaaccaaagacu

SEQ ID NO: 335195 - RNA, 24 nt, Human
augcccaaagcccaaccuucucca

SEQ ID NO: 335196 - RNA, 32 nt, Human
augcccaaccuauccuguucuuuuaauugaaa

SEQ ID NO: 335197 - RNA, 22 nt, Human
augcccaagacccccgcuucca

SEQ ID NO: 335198 - RNA, 32 nt, Human
augcccaagacuauguccugacauauaacuau

SEQ ID NO: 335199 - RNA, 32 nt, Human
augcccaagagaaagccugaaggggaugcuac

SEQ ID NO: 335200 - RNA, 32 nt, Human
augcccaagaugacuugcgaggcaaucucagg

SEQ ID NO: 335201 - RNA, 32 nt, Human
augcccacacaacaggcuuauuuucugugaag

SEQ ID NO: 335202 - RNA, 32 nt, Human
augcccacagcaccagcaccugagcucaccuc

SEQ ID NO: 335203 - RNA, 32 nt, Human
augcccacaggccacacacacugcaucacuga

SEQ ID NO: 335204 - RNA, 32 nt, Human
augcccacgccuagucccaucugggcccccau

SEQ ID NO: 335205 - RNA, 32 nt, Human
augcccacgcuggagugcagugagccgagauc

SEQ ID NO: 335206 - RNA, 32 nt, Human
augcccacuccccuuuuuccuuccaccaugau

SEQ ID NO: 335207 - RNA, 32 nt, Human
augcccacuccuccuucucucacucccuuucu

SEQ ID NO: 335208 - RNA, 32 nt, Human
augcccacugcagcccuccagccucugguccc

SEQ ID NO: 335209 - RNA, 32 nt, Human
augcccagaggucugguccugaugcuggcagg

SEQ ID NO: 335210 - RNA, 18 nt, Human
augcccagcacacauggg

SEQ ID NO: 335211 - RNA, 24 nt, Human
augcccagccagccaccccugcca

SEQ ID NO: 335212 - RNA, 32 nt, Human
augcccagccugagaggagucaagacacaaua

SEQ ID NO: 335213 - RNA, 32 nt, Human
augcccagccuggcugagcccgagauucgcuc

SEQ ID NO: 335214 - RNA, 32 nt, Human
augcccagcugcaacccuaauuuuucauucag

SEQ ID NO: 335215 - RNA, 32 nt, Human
augcccagcugcggaugggagcuguuccugga

SEQ ID NO: 335216 - RNA, 32 nt, Human
augcccaggagaagagugaaccucucccacgu

SEQ ID NO: 335217 - RNA, 32 nt, Human
augcccaggcagcuccuggggcaguggaugga

SEQ ID NO: 335218 - RNA, 32 nt, Human
augcccagggccuggcagacuguggcuagaac

SEQ ID NO: 335219 - RNA, 32 nt, Human
augcccagggccugugcggccgcccuggaggc

SEQ ID NO: 335220 - RNA, 28 nt, Human
augcccaggucuccugccucacaucaca

SEQ ID NO: 335221 - RNA, 32 nt, Human
augcccagguuggggugcaguggcacaaucau

SEQ ID NO: 335222 - RNA, 32 nt, Human
augcccagucccccaguauuccccaucucgaa

SEQ ID NO: 335223 - RNA, 32 nt, Human
augcccagugcugcaugggacccaugucuccu

SEQ ID NO: 335224 - RNA, 32 nt, Human
augcccaucaucaagcaaaggggccauccagg

SEQ ID NO: 335225 - RNA, 32 nt, Human
augcccaucuaauauuuguauuuuuaguagag

SEQ ID NO: 335226 - RNA, 32 nt, Human
augcccaucugacaucagagacggcagugcuc

SEQ ID NO: 335227 - RNA, 32 nt, Human
augcccaucuugagggaagagggugagugaag

SEQ ID NO: 335228 - RNA, 32 nt, Human
augcccaugaccuguaauuguaaagaagcuug

SEQ ID NO: 335229 - RNA, 32 nt, Human
augcccaugagguauuuaaaacagauauuuau

SEQ ID NO: 335230 - RNA, 32 nt, Human
augccccacucccuuacugcagucucuacuaa

SEQ ID NO: 335231 - RNA, 32 nt, Human
augccccacugagguccuagagugccuccagg

SEQ ID NO: 335232 - RNA, 32 nt, Human
augccccacugcacuccagccugggcgacaga

SEQ ID NO: 335233 - RNA, 32 nt, Human
augccccacuggcagcaucuucacuucuaaau

SEQ ID NO: 335234 - RNA, 32 nt, Human
augccccagaguaaaucccagauggaucaaag

SEQ ID NO: 335235 - RNA, 32 nt, Human
augccccaggggacccagccagggggugggcu

SEQ ID NO: 335236 - RNA, 32 nt, Human
augccccaguucagaaauuuggcauugaucuu

SEQ ID NO: 335237 - RNA, 32 nt, Human
augccccaucacagcacacgcuguccugcauu

SEQ ID NO: 335238 - RNA, 32 nt, Human
augccccaugucucagaaauagguggccaugg

SEQ ID NO: 335239 - RNA, 32 nt, Human
augcccccacgaccauccucacugcagaacug

SEQ ID NO: 335240 - RNA, 32 nt, Human
augcccccaggaaccucagcccgggugcugca

SEQ ID NO: 335241 - RNA, 32 nt, Human
augcccccauugagguucacuuccuggauccu

SEQ ID NO: 335242 - RNA, 32 nt, Human
augcccccuacacuccuccccaccucaaccag

SEQ ID NO: 335243 - RNA, 32 nt, Human
augcccccuccaggcugagacugaugugauaa

SEQ ID NO: 335244 - RNA, 32 nt, Human
augcccccuuucagaugucuucugccuguuau

SEQ ID NO: 335245 - RNA, 31 nt, Human
augccccggcaccucugcccugugucuuuca

SEQ ID NO: 335246 - RNA, 32 nt, Human
augccccucccgcccccaaauacgagaucgaa

SEQ ID NO: 335247 - RNA, 32 nt, Human
augccccucucagaccacccagcggaugccua

SEQ ID NO: 335248 - RNA, 24 nt, Human
augccccugacacugcacugagca

SEQ ID NO: 335249 - RNA, 32 nt, Human
augccccugcauuccagccuaggcgacagagu

SEQ ID NO: 335250 - RNA, 32 nt, Human
augccccugguccccucugcaucaccucugcg

SEQ ID NO: 335251 - RNA, 32 nt, Human
augccccuguacuccagccugggugacagagc

SEQ ID NO: 335252 - RNA, 32 nt, Human
augccccuguagucccagcuacuugggaggcu

SEQ ID NO: 335253 - RNA, 32 nt, Human
augccccuuccuuccuucuccugggacuggug

SEQ ID NO: 335254 - RNA, 32 nt, Human
augcccgcgagguggcccccaggcuggccuuu

SEQ ID NO: 335255 - RNA, 32 nt, Human
augcccggacauccuggaagcugggaaauggu

SEQ ID NO: 335256 - RNA, 32 nt, Human
augcccggcugauuucuuuuuguauuuuuagu

SEQ ID NO: 335257 - RNA, 32 nt, Human
augcccgggaggaccagcagaggauuaaaggu

SEQ ID NO: 335258 - RNA, 32 nt, Human
augcccggggcaggccugacgggcagcugagg

SEQ ID NO: 335259 - RNA, 32 nt, Human
augcccggucaccaugggggucagguuauuuu

SEQ ID NO: 335260 - RNA, 32 nt, Human
augcccgugaaaugauguuguugcugcccaca

SEQ ID NO: 335261 - RNA, 32 nt, Human
augcccgugagcugcuaugggguggugggggu

SEQ ID NO: 335262 - RNA, 32 nt, Human
augcccgugggugggaugggaguggaggguuc

SEQ ID NO: 335263 - RNA, 32 nt, Human
augcccuacagaccuggcuggucaaggauuug

SEQ ID NO: 335264 - RNA, 19 nt, Human
augcccuauccaucauuaa

SEQ ID NO: 335265 - RNA, 32 nt, Human
augcccucaaccgccuccuggugacggacuac

SEQ ID NO: 335266 - RNA, 32 nt, Human
augcccucuucucgugccuccccaccaccacu

SEQ ID NO: 335267 - RNA, 32 nt, Human
augcccugaaaaggaaaggaaaagggaagcuu

SEQ ID NO: 335268 - RNA, 32 nt, Human
augcccugaaggacacugugacaggaagaaca

SEQ ID NO: 335269 - RNA, 32 nt, Human
augcccugccaagcagcagauggggagggugc

SEQ ID NO: 335270 - RNA, 32 nt, Human
augcccugcgcuccuccacagccugggccggg

SEQ ID NO: 335271 - RNA, 32 nt, Human
augcccuggcagcagauuucugcaggaugagg

SEQ ID NO: 335272 - RNA, 32 nt, Human
augcccugguccaccggaaggccggcgccucc

SEQ ID NO: 335273 - RNA, 32 nt, Human
augcccuggugucuuucuccugggcuucuauc

SEQ ID NO: 335274 - RNA, 17 nt, Human
augcccuguacuaccau

SEQ ID NO: 335275 - RNA, 32 nt, Human
augcccugucacaguucccucgacucuuucaa

SEQ ID NO: 335276 - RNA, 32 nt, Human
augcccugucauuccugagauggggccaccug

SEQ ID NO: 335277 - RNA, 32 nt, Human
augcccugucucauuuugggaaaaaggaaauc

SEQ ID NO: 335278 - RNA, 32 nt, Human
augcccugugggcucccagaccccugagcuuu

SEQ ID NO: 335279 - RNA, 32 nt, Human
augcccuucaccaaagcugccucccaguggcc

SEQ ID NO: 335280 - RNA, 32 nt, Human
augcccuucacuuucuccugguguuuuucucu

SEQ ID NO: 335281 - RNA, 32 nt, Human
augcccuucccccuuucucugccuggcaacau

SEQ ID NO: 335282 - RNA, 32 nt, Human
augcccuucucccaaauggcuucccuccugga

SEQ ID NO: 335283 - RNA, 32 nt, Human
augcccuucucccccaucuccguguccucguu

SEQ ID NO: 335284 - RNA, 32 nt, Human
augcccuugaauuccucccugucuggcccucc

SEQ ID NO: 335285 - RNA, 32 nt, Human
augcccuugauauaucuuuugcaccugcugaa

SEQ ID NO: 335286 - RNA, 20 nt, Human
augccgaaagguuucugucu

SEQ ID NO: 335287 - RNA, 32 nt, Human
augccgaggguggagugcaguggcacaaucuc

SEQ ID NO: 335288 - RNA, 32 nt, Human
augccgaugaagccuccagguaacaggcuuca

SEQ ID NO: 335289 - RNA, 32 nt, Human
augccgcauucauuuaaagcuauuuuguuuac

SEQ ID NO: 335290 - RNA, 23 nt, Human
augccgccaagcgccccccgcca

SEQ ID NO: 335291 - RNA, 27 nt, Human
augccgccaccagaaaccccucugcca

SEQ ID NO: 335292 - RNA, 20 nt, Human
augccgccaccggccccgcc

SEQ ID NO: 335293 - RNA, 30 nt, Human
augccgccgccauccgcccgccgccgccgc

SEQ ID NO: 335294 - RNA, 20 nt, Human
augccgccgccgcugccgcc

SEQ ID NO: 335295 - RNA, 32 nt, Human
augccgccucaagggucuucaggggaggccag

SEQ ID NO: 335296 - RNA, 30 nt, Human
augccgccugucaauaaauguugaaaaguc

SEQ ID NO: 335297 - RNA, 32 nt, Human
augccgcugcacuccagccugggagacugcau

SEQ ID NO: 335298 - RNA, 32 nt, Human
augccgcugcacuccagccugggggacagagc

SEQ ID NO: 335299 - RNA, 25 nt, Human
augccgcugcauuccagccugggug

SEQ ID NO: 335300 - RNA, 32 nt, Human
augccggagugggggaaauggaacccgcaaag

SEQ ID NO: 335301 - RNA, 32 nt, Human
augccggcucacugcaaccucugucuucuggg

SEQ ID NO: 335302 - RNA, 23 nt, Human
augccggcuuaccaucucuacca

SEQ ID NO: 335303 - RNA, 32 nt, Human
augccggggaccugggccgcgcugccaggacc

SEQ ID NO: 335304 - RNA, 32 nt, Human
augccggucuccuacucuucauggccuuugua

SEQ ID NO: 335305 - RNA, 32 nt, Human
augccguuguacuccagcuugggcaacagagu

SEQ ID NO: 335306 - RNA, 32 nt, Human
augccuaaagcuuugggucugaaggggccccc

SEQ ID NO: 335307 - RNA, 32 nt, Human
augccuaaggucgccacugccugcugcagaga

SEQ ID NO: 335308 - RNA, 32 nt, Human
augccuaccaacaagcuguaaaaugaucaccc

SEQ ID NO: 335309 - RNA, 32 nt, Human
augccuaccuucucuuucuucguucccugccc

SEQ ID NO: 335310 - RNA, 32 nt, Human
augccuacugcacuccagccugggcaacaaag

SEQ ID NO: 335311 - RNA, 32 nt, Human
augccuacuggaagccuguucuucagcuuugg

SEQ ID NO: 335312 - RNA, 17 nt, Human
augccuagacacggggg

SEQ ID NO: 335313 - RNA, 32 nt, Human
augccuaggagguugaggcugcagugagcugu

SEQ ID NO: 335314 - RNA, 32 nt, Human
augccuauagucccagcacuuugggaggccaa

SEQ ID NO: 335315 - RNA, 32 nt, Human
augccuauuauucacauaucuccuuuuaugaa

SEQ ID NO: 335316 - RNA, 32 nt, Human
augccuauuguuggauauugaaugacagacaa

SEQ ID NO: 335317 - RNA, 32 nt, Human
augccucagcacagcagagaaaaccaugcugu

SEQ ID NO: 335318 - RNA, 32 nt, Human
augccucagcuugcugcuugugccaguugccu

SEQ ID NO: 335319 - RNA, 32 nt, Human
augccucaggcaguuauaugaagguuuauuuc

SEQ ID NO: 335320 - RNA, 32 nt, Human
augccucaguguuaaaaugacaucucaaaaga

SEQ ID NO: 335321 - RNA, 32 nt, Human
augccucaguuuccucauuuugaucuagauau

SEQ ID NO: 335322 - RNA, 32 nt, Human
augccucauggagaauuaagagagaagccucc

SEQ ID NO: 335323 - RNA, 32 nt, Human
augccuccaaggccgguccccugcugcccagg

SEQ ID NO: 335324 - RNA, 32 nt, Human
augccuccaccauuuucuaccuggugacuuga

SEQ ID NO: 335325 - RNA, 32 nt, Human
augccucccacugugacaggcccugucaccac

SEQ ID NO: 335326 - RNA, 32 nt, Human
augccucccucuuccuccucuuuccuccucuc

SEQ ID NO: 335327 - RNA, 32 nt, Human
augccuccgggacugacacuccaggcagcuuu

SEQ ID NO: 335328 - RNA, 32 nt, Human
augccuccucagcucaccuucucucuucacca

SEQ ID NO: 335329 - RNA, 32 nt, Human
augccuccucccucugaccacagggucaugcc

SEQ ID NO: 335330 - RNA, 32 nt, Human
augccuccugcacacagccgucugagcagggc

SEQ ID NO: 335331 - RNA, 32 nt, Human
augccucggggugggagcugggccuggcgacc

SEQ ID NO: 335332 - RNA, 32 nt, Human
augccucuccaccucacucuggacugcccaag

SEQ ID NO: 335333 - RNA, 32 nt, Human
augccucuccaccucccaugucacccaugaaa

SEQ ID NO: 335334 - RNA, 32 nt, Human
augccucucccauccucucucaggaagcuucu

SEQ ID NO: 335335 - RNA, 32 nt, Human
augccucucuacuccagccugggcaauagggu

SEQ ID NO: 335336 - RNA, 32 nt, Human
augccucugaagagagggacagaccgucagaa

SEQ ID NO: 335337 - RNA, 32 nt, Human
augccucugcagccacaauucugaccuaagug

SEQ ID NO: 335338 - RNA, 32 nt, Human
augccucugcagcuacacaaucccaagacaga

SEQ ID NO: 335339 - RNA, 32 nt, Human
augccucugcauuccagccuuggugacagagc

SEQ ID NO: 335340 - RNA, 32 nt, Human
augccucugccucucuucauuuucuuucaucu

SEQ ID NO: 335341 - RNA, 20 nt, Human
augccucuggcaccugcgca

SEQ ID NO: 335342 - RNA, 32 nt, Human
augccucuucacuguucuggauugugagagug

SEQ ID NO: 335343 - RNA, 32 nt, Human
augccucuuugugccaggcaugugggugucuu

SEQ ID NO: 335344 - RNA, 32 nt, Human
augccugaggcaugagugacugugcauuugag

SEQ ID NO: 335345 - RNA, 32 nt, Human
augccugaguauguaaccaaaagaauugaaau

SEQ ID NO: 335346 - RNA, 32 nt, Human
augccugagugccugcagcccaggaggcccgc

SEQ ID NO: 335347 - RNA, 32 nt, Human
augccugauuugcuauuuuugacauuuccucg

SEQ ID NO: 335348 - RNA, 32 nt, Human
augccugcaacaaaauguucucccauagggac

SEQ ID NO: 335349 - RNA, 32 nt, Human
augccugcaacaacugcucaugccaagcuggg

SEQ ID NO: 335350 - RNA, 22 nt, Human
augccugcaguuagccaacuca

SEQ ID NO: 335351 - RNA, 32 nt, Human
augccugccuguaaucccagcacugugggagg

SEQ ID NO: 335352 - RNA, 32 nt, Human
augccugcuagugcuuucugauuacucgcauu

SEQ ID NO: 335353 - RNA, 32 nt, Human
augccugcuccccagcccccugccuggaaccc

SEQ ID NO: 335354 - RNA, 32 nt, Human
augccugcucgagagccagcuguuccaugugc

SEQ ID NO: 335355 - RNA, 32 nt, Human
augccugcugcuucucugccucuuugagguac

SEQ ID NO: 335356 - RNA, 32 nt, Human
augccugcuucaugccaugugcugacugagcc

SEQ ID NO: 335357 - RNA, 32 nt, Human
augccugcuuccaagcuuccaucaagucaggg

SEQ ID NO: 335358 - RNA, 32 nt, Human
augccuggaacaccccaacgugcucaaguuca

SEQ ID NO: 335359 - RNA, 32 nt, Human
augccuggaagaaaccuggggacuuaguuagg

SEQ ID NO: 335360 - RNA, 32 nt, Human
augccuggaagaggagcugguggcugccagcc

SEQ ID NO: 335361 - RNA, 32 nt, Human
augccuggacacugaaaaguaaacgcaucacc

SEQ ID NO: 335362 - RNA, 32 nt, Human
augccuggagagaagggauguuacagaguagc

SEQ ID NO: 335363 - RNA, 32 nt, Human
augccuggcaggacugugccuuuugcauuuuc

SEQ ID NO: 335364 - RNA, 32 nt, Human
augccuggccagaacaaaugccuuuuuaaacc

SEQ ID NO: 335365 - RNA, 32 nt, Human
augccuggccagggacaugaauuuguacaaag

SEQ ID NO: 335366 - RNA, 32 nt, Human
augccuggccuuaggcuguggcccagaagcug

SEQ ID NO: 335367 - RNA, 32 nt, Human
augccuggcuaaaauucuuuuguauuuuuacu

SEQ ID NO: 335368 - RNA, 32 nt, Human
augccugggagggagaauaagaguaagugaac

SEQ ID NO: 335369 - RNA, 32 nt, Human
augccugggcccagcuggagguucugacaggg

SEQ ID NO: 335370 - RNA, 32 nt, Human
augccugggugagccuaggagggaaggcucug

SEQ ID NO: 335371 - RNA, 31 nt, Human
augccuggucaucaggagguugagaaaagcc

SEQ ID NO: 335372 - RNA, 32 nt, Human
augccuggucuugagcaaccucccacugcugg

SEQ ID NO: 335373 - RNA, 32 nt, Human
augccuguaaaucccagcuauuugggaggcug

SEQ ID NO: 335374 - RNA, 32 nt, Human
augccuguaaucaaucccagcacuuugggagg

SEQ ID NO: 335375 - RNA, 32 nt, Human
augccuguaaucacugcacccagccucaaauu

SEQ ID NO: 335376 - RNA, 22 nt, Human
augccuguaaucccaacacuuu

SEQ ID NO: 335377 - RNA, 32 nt, Human
augccuguaaucccagcacuugggaggccaag

SEQ ID NO: 335378 - RNA, 22 nt, Human
augccuguaaucccagcacuuu

SEQ ID NO: 335379 - RNA, 22 nt, Human
augccuguaaucccaguacuuu

SEQ ID NO: 335380 - RNA, 22 nt, Human
augccuguaaucccggcacuuu

SEQ ID NO: 335381 - RNA, 18 nt, Human
augccuguaauuccagcu

SEQ ID NO: 335382 - RNA, 32 nt, Human
augccuguaguaaucccagcacuuuuggaggc

SEQ ID NO: 335383 - RNA, 32 nt, Human
augccuguagucccagcacucgggaaggccga

SEQ ID NO: 335384 - RNA, 32 nt, Human
augccuguagucccagcacucuguggggccga

SEQ ID NO: 335385 - RNA, 32 nt, Human
augccuguauaaucccagcacuuugggaggcc

SEQ ID NO: 335386 - RNA, 32 nt, Human
augccuguccaaaauugcagacuugaaaaguu

SEQ ID NO: 335387 - RNA, 32 nt, Human
augccuguccuccaggcuggggcagguucuua

SEQ ID NO: 335388 - RNA, 32 nt, Human
augccuguccucugccuuaucuugccccucua

SEQ ID NO: 335389 - RNA, 32 nt, Human
augccugucugucauaaacaguacaaacguga

SEQ ID NO: 335390 - RNA, 32 nt, Human
augccugugcuggggccagggguucagggagg

SEQ ID NO: 335391 - RNA, 32 nt, Human
augccugugggaaggcugcacugguuuccuga

SEQ ID NO: 335392 - RNA, 32 nt, Human
augccugugggcuccugucacccuccacgucu

SEQ ID NO: 335393 - RNA, 32 nt, Human
augccuguggucaugcucucagcuccaccugg

SEQ ID NO: 335394 - RNA, 32 nt, Human
augccuguguucucccccggggccacuuagau

SEQ ID NO: 335395 - RNA, 32 nt, Human
augccuguucaucugcugacuucugucuaggc

SEQ ID NO: 335396 - RNA, 32 nt, Human
augccuguucccaggaugcaggugcagucugg

SEQ ID NO: 335397 - RNA, 32 nt, Human
augccuguucugauucucauuugugucucugg

SEQ ID NO: 335398 - RNA, 28 nt, Human
augccuguuuaagggauuacugguccua

SEQ ID NO: 335399 - RNA, 32 nt, Human
augccuuaacccaucaacacagagccggauuu

SEQ ID NO: 335400 - RNA, 32 nt, Human
augccuuaaggaaaaagauugugccaggugug

SEQ ID NO: 335401 - RNA, 32 nt, Human
augccuuaauauuugcaugauaagcuaguuuu

SEQ ID NO: 335402 - RNA, 32 nt, Human
augccuuaguaaaauagcucuauuuaauaaag

SEQ ID NO: 335403 - RNA, 32 nt, Human
augccuucaaccuggcaggagguguagccacu

SEQ ID NO: 335404 - RNA, 32 nt, Human
augccuucacuggcuucuugugcaauaauaug

SEQ ID NO: 335405 - RNA, 32 nt, Human
augccuucaugcccuucucugcagagcauggg

SEQ ID NO: 335406 - RNA, 32 nt, Human
augccuucaugcccuucucugcugagcauggu

SEQ ID NO: 335407 - RNA, 32 nt, Human
augccuuccagugaugcccaccagagaauaca

SEQ ID NO: 335408 - RNA, 32 nt, Human
augccuucccaaucaucucccaaagucucaac

SEQ ID NO: 335409 - RNA, 32 nt, Human
augccuucccagcagucccucaaagucuuaac

SEQ ID NO: 335410 - RNA, 32 nt, Human
augccuucccuuguagcaguuuucagccuccu

SEQ ID NO: 335411 - RNA, 32 nt, Human
augccuuccugucuuucuggcccuuucuggac

SEQ ID NO: 335412 - RNA, 32 nt, Human
augccuucugggcuggggaugggugagcaaag

SEQ ID NO: 335413 - RNA, 32 nt, Human
augccuucuuuggggcucugcaguuccugcau

SEQ ID NO: 335414 - RNA, 32 nt, Human
augccuugcccuaaaccuugaaugacugugag

SEQ ID NO: 335415 - RNA, 32 nt, Human
augccuuggauguggucccaccagcccagugg

SEQ ID NO: 335416 - RNA, 32 nt, Human
augccuuggcccauuccagcagucccaguuau

SEQ ID NO: 335417 - RNA, 25 nt, Human
augccuuggcugcucucagccccca

SEQ ID NO: 335418 - RNA, 32 nt, Human
augccuuuccauccugguacauggaugcuuug

SEQ ID NO: 335419 - RNA, 32 nt, Human
augccuuucccuucccccucugcuccaccgug

SEQ ID NO: 335420 - RNA, 32 nt, Human
augccuuugcgcaaaggaccucccucuugcac

SEQ ID NO: 335421 - RNA, 32 nt, Human
augccuuuuauuucuuuuucuugccuaacugc

SEQ ID NO: 335422 - RNA, 32 nt, Human
augccuuuucccgaauggguucaccucuggca

SEQ ID NO: 335423 - RNA, 32 nt, Human
augccuuuuccucccuuuuccuguacacuccc

SEQ ID NO: 335424 - RNA, 22 nt, Human
augccuuuugccaccuccccca

SEQ ID NO: 335425 - RNA, 32 nt, Human
augccuuuugucuauuucugacacagaugcau

SEQ ID NO: 335426 - RNA, 24 nt, Human
augcgaaaaccugaugagggcaaa

SEQ ID NO: 335427 - RNA, 32 nt, Human
augcgaaaacucagaaggagcuagaaguuacu

SEQ ID NO: 335428 - RNA, 16 nt, Human
augcgaacacugcuca

SEQ ID NO: 335429 - RNA, 32 nt, Human
augcgaaccuauaguagcagcuacuccagagg

SEQ ID NO: 335430 - RNA, 32 nt, Human
augcgaagagugauaguuacgugcuccugacu

SEQ ID NO: 335431 - RNA, 32 nt, Human
augcgacauagcugugucugugccaguaugcc

SEQ ID NO: 335432 - RNA, 32 nt, Human
augcgacaugcccugccugaacaggugcucaa

SEQ ID NO: 335433 - RNA, 32 nt, Human
augcgaccuuugccagccagagcugcugccag

SEQ ID NO: 335434 - RNA, 32 nt, Human
augcgacgcuugaacccaggaggcggagguug

SEQ ID NO: 335435 - RNA, 32 nt, Human
augcgacugcacuccagccugggugacugagc

SEQ ID NO: 335436 - RNA, 32 nt, Human
augcgagggcacucgccuucugccuucugguu

SEQ ID NO: 335437 - RNA, 32 nt, Human
augcgagggcagggugagcaccugagagugag

SEQ ID NO: 335438 - RNA, 32 nt, Human
augcgaguaccugaggaaggugaccuugagga

SEQ ID NO: 335439 - RNA, 32 nt, Human
augcgagucaagguaguugaugcccaacugug

SEQ ID NO: 335440 - RNA, 32 nt, Human
augcgaguccccuagagagaggcauuguacug

SEQ ID NO: 335441 - RNA, 32 nt, Human
augcgauagggagggguggggacugugguggg

SEQ ID NO: 335442 - RNA, 32 nt, Human
augcgaucacggaucagucagagcagggucag

SEQ ID NO: 335443 - RNA, 32 nt, Human
augcgaucucacugcaaccucugccucccggg

SEQ ID NO: 335444 - RNA, 32 nt, Human
augcgcaaaacuuggaaaaugugacaauaaag

SEQ ID NO: 335445 - RNA, 32 nt, Human
augcgcagugccuugcauacccaaaccaggug

SEQ ID NO: 335446 - RNA, 32 nt, Human
augcgccacugcacuccagccugggcgacaga

SEQ ID NO: 335447 - RNA, 32 nt, Human
augcgcccggagcgauccuccuucccucuccu

SEQ ID NO: 335448 - RNA, 32 nt, Human
augcgccgucaccaucuccaccucccaccaaa

SEQ ID NO: 335449 - RNA, 32 nt, Human
augcgccuagaaucccagcuacucggaaggcc

SEQ ID NO: 335450 - RNA, 32 nt, Human
augcgccuauaaucucagcuacuugggaggcu

SEQ ID NO: 335451 - RNA, 32 nt, Human
augcgccuauagucccagcugcucaggaggcu

SEQ ID NO: 335452 - RNA, 32 nt, Human
augcgccucaccucucccuccccaccagcaga

SEQ ID NO: 335453 - RNA, 32 nt, Human
augcgccuccucucccccaucccagcccucag

SEQ ID NO: 335454 - RNA, 32 nt, Human
augcgccuguaaucccagcuacccaggaggcu

SEQ ID NO: 335455 - RNA, 32 nt, Human
augcgccuguaaucccagcuacucaggaagcu

SEQ ID NO: 335456 - RNA, 32 nt, Human
augcgccuguaaucccagcuacucaggaggcu

SEQ ID NO: 335457 - RNA, 32 nt, Human
augcgccuguaaucccagcuacucgggaggcu

SEQ ID NO: 335458 - RNA, 32 nt, Human
augcgccuguaaucccagcuacucgggagguu

SEQ ID NO: 335459 - RNA, 32 nt, Human
augcgccuguaaucccagcuacucgggagucu

SEQ ID NO: 335460 - RNA, 32 nt, Human
augcgccuguaaucccagcuacucgggcagcu

SEQ ID NO: 335461 - RNA, 32 nt, Human
augcgccuguaaucccagcuacuucggagguu

SEQ ID NO: 335462 - RNA, 32 nt, Human
augcgccuguaaucccggcuacucgggaggcu

SEQ ID NO: 335463 - RNA, 32 nt, Human
augcgccuguaauccuagcuauucuggaggcu

SEQ ID NO: 335464 - RNA, 20 nt, Human
augcgccuguagucccagcu

SEQ ID NO: 335465 - RNA, 32 nt, Human
augcgccuguagucccagcuacccaggaggcu

SEQ ID NO: 335466 - RNA, 32 nt, Human
augcgccuguagucccagcuacucccuccaga

SEQ ID NO: 335467 - RNA, 32 nt, Human
augcgccuguagucccagcuacucgggaggcu

SEQ ID NO: 335468 - RNA, 32 nt, Human
augcgccuguagucccagcuacuuggaagcug

SEQ ID NO: 335469 - RNA, 32 nt, Human
augcgccuguagucccagcuacuugggagacu

SEQ ID NO: 335470 - RNA, 32 nt, Human
augcgccuguagucccagcuacuugggaggcu

SEQ ID NO: 335471 - RNA, 32 nt, Human
augcgccuguagucccagcugcucaggaggcu

SEQ ID NO: 335472 - RNA, 32 nt, Human
augcgccuguauacccagcuacucgggaggcu

SEQ ID NO: 335473 - RNA, 32 nt, Human
augcgccugucaucccagcuacuugagaggcu

SEQ ID NO: 335474 - RNA, 32 nt, Human
augcgccugugaucccagcuacuuggaaggcu

SEQ ID NO: 335475 - RNA, 32 nt, Human
augcgccugugcucccagcuacuuggaagacu

SEQ ID NO: 335476 - RNA, 32 nt, Human
augcgccuguugucccagcugcucuggaggcu

SEQ ID NO: 335477 - RNA, 32 nt, Human
augcgcgaugcccaacucuuuccaagagcacc

SEQ ID NO: 335478 - RNA, 32 nt, Human
augcgcuccagcugcacaaggcagccucugug

SEQ ID NO: 335479 - RNA, 32 nt, Human
augcgcucgccccucuacuccuccacgccccg

SEQ ID NO: 335480 - RNA, 32 nt, Human
augcgcugcugaaaccaggaauccaggucagg

SEQ ID NO: 335481 - RNA, 32 nt, Human
augcgcugcuuucccucuccugccucauuccu

SEQ ID NO: 335482 - RNA, 32 nt, Human
augcggaaagcugcuuucucucccuucuucga

SEQ ID NO: 335483 - RNA, 32 nt, Human
augcggaaaggccuuuuuccagaagucacacc

SEQ ID NO: 335484 - RNA, 32 nt, Human
augcggacccagcccgccgccuccaggagcac

SEQ ID NO: 335485 - RNA, 32 nt, Human
augcggagacugagguuuagggcaguuaagcu

SEQ ID NO: 335486 - RNA, 32 nt, Human
augcggagccggcugaaaugcuccaacuuuuu

SEQ ID NO: 335487 - RNA, 32 nt, Human
augcggauccacacuggagaaaaacccuacaa

SEQ ID NO: 335488 - RNA, 32 nt, Human
augcggccgcugcuacacgccuggugggcagc

SEQ ID NO: 335489 - RNA, 32 nt, Human
augcggcugcucccugcuccgucccgcccagc

SEQ ID NO: 335490 - RNA, 32 nt, Human
augcggcuggaggcggaggcaacggcggcugg

SEQ ID NO: 335491 - RNA, 32 nt, Human
augcggcuggagggacacagagggcaagacug

SEQ ID NO: 335492 - RNA, 32 nt, Human
augcggcuguuuggcagaguccuguccuggcu

SEQ ID NO: 335493 - RNA, 32 nt, Human
augcgggagagggcggcgccggggcgcucgcg

SEQ ID NO: 335494 - RNA, 32 nt, Human
augcgggagaggguuagagcuauagagauuau

SEQ ID NO: 335495 - RNA, 32 nt, Human
augcgggagcagcagaaggagcagcgggagca

SEQ ID NO: 335496 - RNA, 21 nt, Human
augcgggagguucaaugugaa

SEQ ID NO: 335497 - RNA, 32 nt, Human
augcgggauaucucccccugcucucuggguau

SEQ ID NO: 335498 - RNA, 32 nt, Human
augcgggcgcgggacacuccaucucuguuccu

SEQ ID NO: 335499 - RNA, 32 nt, Human
augcggggacaggcuggaaugagggaggcguc

SEQ ID NO: 335500 - RNA, 32 nt, Human
augcggggcugcagaggagacgcggggccgga

SEQ ID NO: 335501 - RNA, 32 nt, Human
augcggggcugcucagggcaggccccagggcg

SEQ ID NO: 335502 - RNA, 32 nt, Human
augcgggggaagagaacugacccagguaauga

SEQ ID NO: 335503 - RNA, 32 nt, Human
augcggucagcagucucaggccagcuucucug

SEQ ID NO: 335504 - RNA, 32 nt, Human
augcggucaggaguucgagaccagccuggcca

SEQ ID NO: 335505 - RNA, 32 nt, Human
augcggugaccugccagcaccugccgcagccu

SEQ ID NO: 335506 - RNA, 32 nt, Human
augcgguuuugccuaauaaagcauuuucacag

SEQ ID NO: 335507 - RNA, 32 nt, Human
augcguagccugaguggcuggguagacggagg

SEQ ID NO: 335508 - RNA, 32 nt, Human
augcguaggagaaggggugggaagauggguuu

SEQ ID NO: 335509 - RNA, 32 nt, Human
augcguauagacauacauacauguacaccaua

SEQ ID NO: 335510 - RNA, 32 nt, Human
augcguauuagguacuagcugcagugaaggcu

SEQ ID NO: 335511 - RNA, 32 nt, Human
augcgucacugcagccuccaccucccgggcuc

SEQ ID NO: 335512 - RNA, 32 nt, Human
augcgucaguuauuuagggauggucuuuuguu

SEQ ID NO: 335513 - RNA, 32 nt, Human
augcguccuugaaagaaaaagaaucugaauuc

SEQ ID NO: 335514 - RNA, 32 nt, Human
augcgucgggugggcaccucagcaaccaguag

SEQ ID NO: 335515 - RNA, 32 nt, Human
augcgucuccccugcccuccuggagcccugca

SEQ ID NO: 335516 - RNA, 32 nt, Human
augcgugaugguccuucuuugucccugcaagu

SEQ ID NO: 335517 - RNA, 32 nt, Human
augcgugcacacauagacgcaugcacucacac

SEQ ID NO: 335518 - RNA, 32 nt, Human
augcgugcagugcucuuaucaccaucucuggu

SEQ ID NO: 335519 - RNA, 32 nt, Human
augcgugccugcuggggagggggugaguggug

SEQ ID NO: 335520 - RNA, 32 nt, Human
augcguggagaguccaccuccaguguagagac

SEQ ID NO: 335521 - RNA, 32 nt, Human
augcgugggcugggcuaggucccucuguccau

SEQ ID NO: 335522 - RNA, 32 nt, Human
augcguguauaguccaagcuacucaggaggcu

SEQ ID NO: 335523 - RNA, 32 nt, Human
augcguguguagucgaagcuacucaggaggcu

SEQ ID NO: 335524 - RNA, 32 nt, Human
augcguguuaccuggcuuuuggcuccacgcuc

SEQ ID NO: 335525 - RNA, 32 nt, Human
augcguucacaauuaaggucucuuccaaaucc

SEQ ID NO: 335526 - RNA, 32 nt, Human
augcguucagcagacugguuugcagugaauuu

SEQ ID NO: 335527 - RNA, 32 nt, Human
augcguucuggugugucuuaaaauuccaaaca

SEQ ID NO: 335528 - RNA, 32 nt, Human
augcguugccugcccuuccuccauuguugccc

SEQ ID NO: 335529 - RNA, 32 nt, Human
augcuaaaagaggaagaagagaggcuccagcu

SEQ ID NO: 335530 - RNA, 32 nt, Human
augcuaaagcuuucucuccucaauaaaaauau

SEQ ID NO: 335531 - RNA, 32 nt, Human
augcuaaccucuguuucaugcuaaccagacac

SEQ ID NO: 335532 - RNA, 32 nt, Human
augcuaagaacagcaccuguacguaguauguc

SEQ ID NO: 335533 - RNA, 32 nt, Human
augcuaagacucaguggggaggggcugugggc

SEQ ID NO: 335534 - RNA, 32 nt, Human
augcuaaggaaaaugggcugagcccccaauag

SEQ ID NO: 335535 - RNA, 32 nt, Human
augcuaaggacugcgggaaugagggagucaga

SEQ ID NO: 335536 - RNA, 32 nt, Human
augcuaaggacugugggaaugagggggucaga

SEQ ID NO: 335537 - RNA, 32 nt, Human
augcuaaucucuuccagaaacagccucacaga

SEQ ID NO: 335538 - RNA, 32 nt, Human
augcuacaacuacuauuuuuagcaauguuuuu

SEQ ID NO: 335539 - RNA, 32 nt, Human
augcuacaaguaugagaugagaucuaaguaaa

SEQ ID NO: 335540 - RNA, 32 nt, Human
augcuacacagcacuccucuuguccuugaucc

SEQ ID NO: 335541 - RNA, 32 nt, Human
augcuacacccacauucucuccaacucuucau

SEQ ID NO: 335542 - RNA, 32 nt, Human
augcuacauggucauaggaaacuggggaaugu

SEQ ID NO: 335543 - RNA, 32 nt, Human
augcuaccccacaagcuugucagaucgcccag

SEQ ID NO: 335544 - RNA, 32 nt, Human
augcuacugcacuccagccuaggugacagagu

SEQ ID NO: 335545 - RNA, 32 nt, Human
augcuacugcacuccagccugggagacagagc

SEQ ID NO: 335546 - RNA, 32 nt, Human
augcuacugcacuccagccugggcgacagagc

SEQ ID NO: 335547 - RNA, 32 nt, Human
augcuacugcacuccagccugggugacagagc

SEQ ID NO: 335548 - RNA, 32 nt, Human
augcuacugcacuccagcuuagguggcaaagu

SEQ ID NO: 335549 - RNA, 32 nt, Human
augcuacugcacucuagccugagcgacagagu

SEQ ID NO: 335550 - RNA, 32 nt, Human
augcuagaagcauaugcaacagugaauaaaag

SEQ ID NO: 335551 - RNA, 24 nt, Human
augcuagaggugccccgcuccauc

SEQ ID NO: 335552 - RNA, 32 nt, Human
augcuagagugaaagaaaaagaaagagagcac

SEQ ID NO: 335553 - RNA, 32 nt, Human
augcuagaucagugagaggagauugcaguucu

SEQ ID NO: 335554 - RNA, 32 nt, Human
augcuagcaacauuauagaaauuuugccuugu

SEQ ID NO: 335555 - RNA, 32 nt, Human
augcuagccaggccucuccaucuugccugguu

SEQ ID NO: 335556 - RNA, 32 nt, Human
augcuagccauggucaucugacagucucuacg

SEQ ID NO: 335557 - RNA, 32 nt, Human
augcuagccccuuucccuccccugaaccuggu

SEQ ID NO: 335558 - RNA, 30 nt, Human
augcuaggaacgugcugggcacaauuaggg

SEQ ID NO: 335559 - RNA, 32 nt, Human
augcuaggaggcagaaggggcagagaguaaaa

SEQ ID NO: 335560 - RNA, 30 nt, Human
augcuaggcaagcccagggcacagaugccg

SEQ ID NO: 335561 - RNA, 32 nt, Human
augcuagggugagguuuagccaucuuacuugg

SEQ ID NO: 335562 - RNA, 32 nt, Human
augcuagguuaauccaauuauaugagacguuu

SEQ ID NO: 335563 - RNA, 32 nt, Human
augcuagugcgcuccagccugggcaacagagc

SEQ ID NO: 335564 - RNA, 32 nt, Human
augcuaguggcugauaugggugugggggaugc

SEQ ID NO: 335565 - RNA, 32 nt, Human
augcuaguguguggcagccaugaaaaguuaca

SEQ ID NO: 335566 - RNA, 31 nt, Human
augcuaguuacaggguagaaagacuguauug

SEQ ID NO: 335567 - RNA, 32 nt, Human
augcuaguuaccacugugaacacaggacauga

SEQ ID NO: 335568 - RNA, 32 nt, Human
augcuaucauuguauucuuuaagaacuuuauu

SEQ ID NO: 335569 - RNA, 32 nt, Human
augcuaugaaaccucaagggaacaaauuaugu

SEQ ID NO: 335570 - RNA, 32 nt, Human
augcuauguauggguauguaaauaucagugcu

SEQ ID NO: 335571 - RNA, 32 nt, Human
augcuauugugauauuuuagcacuuugguagc

SEQ ID NO: 335572 - RNA, 32 nt, Human
augcuauuuuauggaaacuuuggucucacauc

SEQ ID NO: 335573 - RNA, 32 nt, Human
augcucaaacaugagaagacugggacauccau

SEQ ID NO: 335574 - RNA, 32 nt, Human
augcucacaaaagacaaaaauuagcugaaaca

SEQ ID NO: 335575 - RNA, 32 nt, Human
augcucacacacacagagauauauuaaagcac

SEQ ID NO: 335576 - RNA, 32 nt, Human
augcucacaccacugcacuccagccuggguga

SEQ ID NO: 335577 - RNA, 32 nt, Human
augcucacaccacugcacuccauccugggcaa

SEQ ID NO: 335578 - RNA, 32 nt, Human
augcucacagucacacagcaggcaguggcagg

SEQ ID NO: 335579 - RNA, 32 nt, Human
augcucaccaauaugaauugggaucuucaaag

SEQ ID NO: 335580 - RNA, 32 nt, Human
augcucaccugugccaucuguccuccugucug

SEQ ID NO: 335581 - RNA, 32 nt, Human
augcucacuacuuucucucuucucucucccug

SEQ ID NO: 335582 - RNA, 32 nt, Human
augcucacuguagccuugaccuucuggguuca

SEQ ID NO: 335583 - RNA, 32 nt, Human
augcucacuucugguccagagcucuuuccuca

SEQ ID NO: 335584 - RNA, 32 nt, Human
augcucagaaccuaaccacuaccuuacaguga

SEQ ID NO: 335585 - RNA, 32 nt, Human
augcucagaauggagcaguggacaaaggagac

SEQ ID NO: 335586 - RNA, 32 nt, Human
augcucagaccucucccaccccaaacccucuc

SEQ ID NO: 335587 - RNA, 32 nt, Human
augcucagauuaacuuccauagguacauaagu

SEQ ID NO: 335588 - RNA, 32 nt, Human
augcucagauuucucacauccugcccaggauc

SEQ ID NO: 335589 - RNA, 32 nt, Human
augcucagcaugcucacccugcagcacagcgc

SEQ ID NO: 335590 - RNA, 32 nt, Human
augcucagccagcucuggaggcuggagucuga

SEQ ID NO: 335591 - RNA, 32 nt, Human
augcucagcccaggcauugagugugaugcuga

SEQ ID NO: 335592 - RNA, 32 nt, Human
augcucaggaacaggcuuuuguccuucugcau

SEQ ID NO: 335593 - RNA, 32 nt, Human
augcucaggaagagcugggccuuuggcacuug

SEQ ID NO: 335594 - RNA, 32 nt, Human
augcucaggaaggaggcgccucugcaaggguu

SEQ ID NO: 335595 - RNA, 32 nt, Human
augcucaggagaacagggggaagagagagauu

SEQ ID NO: 335596 - RNA, 32 nt, Human
augcucaggagaagccaugggccccuccuguc

SEQ ID NO: 335597 - RNA, 32 nt, Human
augcucaggggcccuggagcagccaccccaug

SEQ ID NO: 335598 - RNA, 31 nt, Human
augcucaggguaaggagcaccaaagcugagg

SEQ ID NO: 335599 - RNA, 24 nt, Human
augcucauaaauaagccugggaag

SEQ ID NO: 335600 - RNA, 32 nt, Human
augcucaugugcuucuucugggcuuguaacac

SEQ ID NO: 335601 - RNA, 32 nt, Human
augcuccaaaccauaccacagagugauccaaa

SEQ ID NO: 335602 - RNA, 32 nt, Human
augcuccaaaggccaaacuucuggggcugggg

SEQ ID NO: 335603 - RNA, 23 nt, Human
augcuccacaaauucaacuugua

SEQ ID NO: 335604 - RNA, 32 nt, Human
augcuccacuaaaccauuucuugcaucacagu

SEQ ID NO: 335605 - RNA, 32 nt, Human
augcuccagaucccaguauucagaugugucua

SEQ ID NO: 335606 - RNA, 32 nt, Human
augcuccagcaacccugugggggaaguguuuu

SEQ ID NO: 335607 - RNA, 32 nt, Human
augcuccaggaggucugggguaccagugggcu

SEQ ID NO: 335608 - RNA, 32 nt, Human
augcuccagggcagccuccaccuugcucuucu

SEQ ID NO: 335609 - RNA, 32 nt, Human
augcuccaucauacucaggucucccuacuccu

SEQ ID NO: 335610 - RNA, 32 nt, Human
augcucccaagcuccauucuuccuucccucaa

SEQ ID NO: 335611 - RNA, 32 nt, Human
augcucccaagugccagggagggccgagcgag

SEQ ID NO: 335612 - RNA, 32 nt, Human
augcucccaguucccucgucccugcccagguc

SEQ ID NO: 335613 - RNA, 32 nt, Human
augcucccaguucuguuaggacaggcauacug

SEQ ID NO: 335614 - RNA, 32 nt, Human
augcuccccaaauaagaaaugcaucagcucag

SEQ ID NO: 335615 - RNA, 32 nt, Human
augcuccccacccccuggcaaaaggcuggcca

SEQ ID NO: 335616 - RNA, 32 nt, Human
augcuccccgaucuccuuccucuaccacucug

SEQ ID NO: 335617 - RNA, 32 nt, Human
augcuccccuacugacuagcugugccacucug

SEQ ID NO: 335618 - RNA, 32 nt, Human
augcuccccuccaggauggagugggggucggc

SEQ ID NO: 335619 - RNA, 32 nt, Human
augcuccccuuccucugcuccuuaaggucacu

SEQ ID NO: 335620 - RNA, 32 nt, Human
augcucccucucuccagaccagccuucugcuu

SEQ ID NO: 335621 - RNA, 32 nt, Human
augcucccugcucacccccuucuccaaagccc

SEQ ID NO: 335622 - RNA, 32 nt, Human
augcucccuuccuccccagcuccugguuggac

SEQ ID NO: 335623 - RNA, 20 nt, Human
augcuccgacacagcaggga

SEQ ID NO: 335624 - RNA, 32 nt, Human
augcuccuauagucccagcuuggagauugagg

SEQ ID NO: 335625 - RNA, 32 nt, Human
augcuccucucuuuucugagagagaaggcaug

SEQ ID NO: 335626 - RNA, 32 nt, Human
augcuccugcuauccagaaagcagagaucugu

SEQ ID NO: 335627 - RNA, 32 nt, Human
augcuccugggaacucggaaagcucugggaug

SEQ ID NO: 335628 - RNA, 25 nt, Human
augcuccuugccucugcucugugca

SEQ ID NO: 335629 - RNA, 32 nt, Human
augcucgccagccgggguacacccugcacaau

SEQ ID NO: 335630 - RNA, 32 nt, Human
augcucgcccagcccucccccugcugcugaga

SEQ ID NO: 335631 - RNA, 32 nt, Human
augcucggcccagggucugggagcugggcuaa

SEQ ID NO: 335632 - RNA, 32 nt, Human
augcucggccuccugcgggaagaggaagcggc

SEQ ID NO: 335633 - RNA, 32 nt, Human
augcucggccugcugcugcucugcacccccag

SEQ ID NO: 335634 - RNA, 32 nt, Human
augcucgucaaugaucaguaucaacacagaag

SEQ ID NO: 335635 - RNA, 32 nt, Human
augcucgucuccaacuccugaccucagguaau

SEQ ID NO: 335636 - RNA, 32 nt, Human
augcucuaagagaacagccagaugguuuauau

SEQ ID NO: 335637 - RNA, 32 nt, Human
augcucuacuucugcucuaguauuugguuugg

SEQ ID NO: 335638 - RNA, 32 nt, Human
augcucucacccucgucuggaggggcaggagu

SEQ ID NO: 335639 - RNA, 32 nt, Human
augcucuccaucucccuuauguggacucuugu

SEQ ID NO: 335640 - RNA, 32 nt, Human
augcucucccuguuccucuccccgccacccca

SEQ ID NO: 335641 - RNA, 32 nt, Human
augcucucucaccucuauuaccuccucacauc

SEQ ID NO: 335642 - RNA, 32 nt, Human
augcucucuccuaaggccuuuccucuuuccug

SEQ ID NO: 335643 - RNA, 32 nt, Human
augcucucuccucugcccaucaccuccccuug

SEQ ID NO: 335644 - RNA, 32 nt, Human
augcucucucuuacccugucacuuggucuaga

SEQ ID NO: 335645 - RNA, 23 nt, Human
augcucucuguccgaucugugca

SEQ ID NO: 335646 - RNA, 32 nt, Human
augcucugaaauggcgugcccucugcccaggu

SEQ ID NO: 335647 - RNA, 23 nt, Human
augcucugacacccaccucauca

SEQ ID NO: 335648 - RNA, 32 nt, Human
augcucugaguagaagguggugaccuccagga

SEQ ID NO: 335649 - RNA, 32 nt, Human
augcucugcacucuggggucagcagaguucaa

SEQ ID NO: 335650 - RNA, 22 nt, Human
augcucugccuuuuagcuucua

SEQ ID NO: 335651 - RNA, 32 nt, Human
augcucugcgucuguguuggaucaguguucuu

SEQ ID NO: 335652 - RNA, 32 nt, Human
augcucugcuucucuuuuaagcauaaguucca

SEQ ID NO: 335653 - RNA, 29 nt, Human
augcucuggcugcuguccccagcuccccg

SEQ ID NO: 335654 - RNA, 32 nt, Human
augcucuggcuucucucuugaaugcucacuaa

SEQ ID NO: 335655 - RNA, 32 nt, Human
augcucugggcucucccucucuguccauuucu

SEQ ID NO: 335656 - RNA, 32 nt, Human
augcucuggggcuucuguggccaagccccacc

SEQ ID NO: 335657 - RNA, 32 nt, Human
augcucuguaguucuuuccacaaagagcugac

SEQ ID NO: 335658 - RNA, 32 nt, Human
augcucugucugcccaggcuguguagauucug

SEQ ID NO: 335659 - RNA, 32 nt, Human
augcucugugacuugggcugauccccacccuu

SEQ ID NO: 335660 - RNA, 32 nt, Human
augcucuguggcuacauauacacacacguauu

SEQ ID NO: 335661 - RNA, 32 nt, Human
augcucuguuuccaacugcauuuccuuuccaa

SEQ ID NO: 335662 - RNA, 32 nt, Human
augcucuguuugcagugagcccuggaaaauua

SEQ ID NO: 335663 - RNA, 32 nt, Human
augcucuucagccgucccccaggauugaucca

SEQ ID NO: 335664 - RNA, 32 nt, Human
augcucuuccacccugcucgugcugcccagag

SEQ ID NO: 335665 - RNA, 32 nt, Human
augcucuugcuuguaagauaauuuuaacuuaa

SEQ ID NO: 335666 - RNA, 32 nt, Human
augcucuuguucugccgugacuguucaggugu

SEQ ID NO: 335667 - RNA, 32 nt, Human
augcugaaaaagcguuuguuuuugaaacaaau

SEQ ID NO: 335668 - RNA, 32 nt, Human
augcugaaaagcuuuccugacccaagcaaaga

SEQ ID NO: 335669 - RNA, 32 nt, Human
augcugaaacuaguuguucacaguuguuacac

SEQ ID NO: 335670 - RNA, 32 nt, Human
augcugaaggcagagcagcugagggaggggcg

SEQ ID NO: 335671 - RNA, 32 nt, Human
augcugaagggaaauguacaagagcacuacug

SEQ ID NO: 335672 - RNA, 32 nt, Human
augcugaagggaagagagguugcagcugagca

SEQ ID NO: 335673 - RNA, 32 nt, Human
augcugaagguaaacauuggagaacugauggc

SEQ ID NO: 335674 - RNA, 32 nt, Human
augcugaauaagagacgguaagagccaaggca

SEQ ID NO: 335675 - RNA, 32 nt, Human
augcugaauucuauguggcaacuugcuggacg

SEQ ID NO: 335676 - RNA, 32 nt, Human
augcugacagcuggugacagaugaagacggaa

SEQ ID NO: 335677 - RNA, 32 nt, Human
augcugacaggcaauuugcacuauauuuggcu

SEQ ID NO: 335678 - RNA, 32 nt, Human
augcugaccagaacacucuugagcccaggcau

SEQ ID NO: 335679 - RNA, 32 nt, Human
augcugaccagaacgcucuugagcccaggcau

SEQ ID NO: 335680 - RNA, 32 nt, Human
augcugagaauuuguauugaugaaccucuuuu

SEQ ID NO: 335681 - RNA, 32 nt, Human
augcugagcagcuuugaaggcugcaguccuau

SEQ ID NO: 335682 - RNA, 32 nt, Human
augcugagccagccugaaauaagacuugauaa

SEQ ID NO: 335683 - RNA, 32 nt, Human
augcugaggacuacuaaaugaagaggacuugg

SEQ ID NO: 335684 - RNA, 24 nt, Human
augcugaggagcgggggcauggua

SEQ ID NO: 335685 - RNA, 32 nt, Human
augcugaggaugacagcuuuuagccugacucu

SEQ ID NO: 335686 - RNA, 32 nt, Human
augcugaggcugcaguggugucguggguguua

SEQ ID NO: 335687 - RNA, 32 nt, Human
augcugaguaugacacuuuucuucuugcaugc

SEQ ID NO: 335688 - RNA, 32 nt, Human
augcugauagcugcuuagguucuugaguaguu

SEQ ID NO: 335689 - RNA, 32 nt, Human
augcugaucacacugcaugggagauuuuguua

SEQ ID NO: 335690 - RNA, 32 nt, Human
augcugaucucgaacuccuggccucaagugau

SEQ ID NO: 335691 - RNA, 32 nt, Human
augcugaugauaauuuaucuacaugcauuuca

SEQ ID NO: 335692 - RNA, 32 nt, Human
augcugauguaucaggccaucugugucaugcu

SEQ ID NO: 335693 - RNA, 19 nt, Human
augcugaugugcagucacc

SEQ ID NO: 335694 - RNA, 32 nt, Human
augcugauuaccuggggacaaaauuaacugua

SEQ ID NO: 335695 - RNA, 32 nt, Human
augcugauuaugcagaccgaugaguaggccuc

SEQ ID NO: 335696 - RNA, 32 nt, Human
augcugauucucucacuccucaugcagaaugu

SEQ ID NO: 335697 - RNA, 32 nt, Human
augcugauuuggccagagaugaccucaaggcc

SEQ ID NO: 335698 - RNA, 22 nt, Human
augcugcaaacacauucaccua

SEQ ID NO: 335699 - RNA, 32 nt, Human
augcugcaacucucaacauuucccuuauuugg

SEQ ID NO: 335700 - RNA, 32 nt, Human
augcugcaaguucuuucuggaccucuggcaaa

SEQ ID NO: 335701 - RNA, 32 nt, Human
augcugcaccaaaacaggaucucuccaaggca

SEQ ID NO: 335702 - RNA, 32 nt, Human
augcugcacugcacuacuccaaugucuuccau

SEQ ID NO: 335703 - RNA, 32 nt, Human
augcugcacuucugacaggcugcuuccuggau

SEQ ID NO: 335704 - RNA, 32 nt, Human
augcugcagaaccuggccucaccuggacuuuu

SEQ ID NO: 335705 - RNA, 32 nt, Human
augcugcagaacugccaccuccuggucaagug

SEQ ID NO: 335706 - RNA, 32 nt, Human
augcugcagaagagaagugaagagcacaucaa

SEQ ID NO: 335707 - RNA, 32 nt, Human
augcugcagagggagaggacaacagcuccagu

SEQ ID NO: 335708 - RNA, 32 nt, Human
augcugcagcagagugagcaagggggcccgaa

SEQ ID NO: 335709 - RNA, 32 nt, Human
augcugcagccuggaacucugaucuccagugu

SEQ ID NO: 335710 - RNA, 32 nt, Human
augcugcagcugccgggagacucacgccuuag

SEQ ID NO: 335711 - RNA, 30 nt, Human
augcugcagcuuuaaucagaaaguccaugg

SEQ ID NO: 335712 - RNA, 32 nt, Human
augcugcaggugugacuggaaggucacguuug

SEQ ID NO: 335713 - RNA, 32 nt, Human
augcugcagugagcuaugguagcaccacugca

SEQ ID NO: 335714 - RNA, 32 nt, Human
augcugcaguuguucucucaagcuagggcaga

SEQ ID NO: 335715 - RNA, 32 nt, Human
augcugcauaaaugauuuuugaugucaaagac

SEQ ID NO: 335716 - RNA, 20 nt, Human
augcugcaugacaaaauguu

SEQ ID NO: 335717 - RNA, 32 nt, Human
augcugcauuccuuuugcacuuuuggauucca

SEQ ID NO: 335718 - RNA, 32 nt, Human
augcugccaagugccauuuggggucagcaucc

SEQ ID NO: 335719 - RNA, 25 nt, Human
augcugccaccgccgccgccaccuc

SEQ ID NO: 335720 - RNA, 32 nt, Human
augcugccagaauaaaaccaccaggaaugaau

SEQ ID NO: 335721 - RNA, 32 nt, Human
augcugcccgggcccuuccuccaagacccuac

SEQ ID NO: 335722 - RNA, 32 nt, Human
augcugcccgugacccaugcagguggucuccu

SEQ ID NO: 335723 - RNA, 32 nt, Human
augcugcccuggcuugccaggauggcaggccg

SEQ ID NO: 335724 - RNA, 21 nt, Human
augcugccgccaccgccgcca

SEQ ID NO: 335725 - RNA, 25 nt, Human
augcugccgccaccgccgccaccac

SEQ ID NO: 335726 - RNA, 31 nt, Human
augcugccgcccccgucgccgccgccgccgc

SEQ ID NO: 335727 - RNA, 31 nt, Human
augcugccgccgccaccgccccggcugccau

SEQ ID NO: 335728 - RNA, 29 nt, Human
augcugccgccgccgccgcccggagcgcc

SEQ ID NO: 335729 - RNA, 29 nt, Human
augcugccgccgccgccgcgcagccccac

SEQ ID NO: 335730 - RNA, 25 nt, Human
augcugccgcuucugcugggccugc

SEQ ID NO: 335731 - RNA, 32 nt, Human
augcugccucacugcuuaagugccugcaggag

SEQ ID NO: 335732 - RNA, 32 nt, Human
augcugccuuucuacucuguucuugcugucuc

SEQ ID NO: 335733 - RNA, 25 nt, Human
augcugcgcguucugugccuccugc

SEQ ID NO: 335734 - RNA, 32 nt, Human
augcugcggcgacgggcccaggaagaggacag

SEQ ID NO: 335735 - RNA, 32 nt, Human
augcugcggggaggaaggcaagaggugccaaa

SEQ ID NO: 335736 - RNA, 32 nt, Human
augcugcuacuugccaggaacagguugggaag

SEQ ID NO: 335737 - RNA, 32 nt, Human
augcugcuaggguggaggaguaugcagagaaa

SEQ ID NO: 335738 - RNA, 32 nt, Human
augcugcuccacccucccccagacacagccca

SEQ ID NO: 335739 - RNA, 32 nt, Human
augcugcuccaggagcucuucucugcaacaag

SEQ ID NO: 335740 - RNA, 32 nt, Human
augcugcugagagugaaagaaaggaggaaagu

SEQ ID NO: 335741 - RNA, 32 nt, Human
augcugcugcacuccagccuggacaacagagu

SEQ ID NO: 335742 - RNA, 32 nt, Human
augcugcugcccaggcuggagugcaguggugc

SEQ ID NO: 335743 - RNA, 32 nt, Human
augcugcugccucugggcagucguagaaucuc

SEQ ID NO: 335744 - RNA, 32 nt, Human
augcugcugcucauguugggcuuuccuuuugg

SEQ ID NO: 335745 - RNA, 32 nt, Human
augcugcuguaaauacagguauuuuuaauuuu

SEQ ID NO: 335746 - RNA, 32 nt, Human
augcugcugugaaauuuauaaaauuagcuuuu

SEQ ID NO: 335747 - RNA, 32 nt, Human
augcugcuguggcugcucagcugccuccuuuu

SEQ ID NO: 335748 - RNA, 32 nt, Human
augcugcuucaugcaaccuuccauuccuauuc

SEQ ID NO: 335749 - RNA, 32 nt, Human
augcugcuugaccccugaaacugacauucaug

SEQ ID NO: 335750 - RNA, 32 nt, Human
augcugcuuuuccaccagacuugcuccauacu

SEQ ID NO: 335751 - RNA, 32 nt, Human
augcuggaaaggugcuccugcccacacccagc

SEQ ID NO: 335752 - RNA, 32 nt, Human
augcuggaacacaucccugccuccgggaagug

SEQ ID NO: 335753 - RNA, 32 nt, Human
augcuggaaggacgaaggugagugaagauggc

SEQ ID NO: 335754 - RNA, 32 nt, Human
augcuggagaagaaggaagggggaacccauag

SEQ ID NO: 335755 - RNA, 32 nt, Human
augcuggagacacccugguugucuccacacgu

SEQ ID NO: 335756 - RNA, 32 nt, Human
augcuggagauggcggaggcuccucacucuuu

SEQ ID NO: 335757 - RNA, 32 nt, Human
augcuggaggagaaggaaguaggccagaaguc

SEQ ID NO: 335758 - RNA, 32 nt, Human
augcuggaggcaggugacggggagcacagacu

SEQ ID NO: 335759 - RNA, 32 nt, Human
augcuggaugagcaacuccuguucuuugggcu

SEQ ID NO: 335760 - RNA, 32 nt, Human
augcuggcagaggcacucagguacuugguaag

SEQ ID NO: 335761 - RNA, 32 nt, Human
augcuggccaggacgcagaguguggccgugcu

SEQ ID NO: 335762 - RNA, 32 nt, Human
augcuggccccuggcccagcaggccugucugu

SEQ ID NO: 335763 - RNA, 32 nt, Human
augcuggcgcccaaagccuccagccugagagu

SEQ ID NO: 335764 - RNA, 32 nt, Human
augcuggcucacugcagccuccaccucccagg

SEQ ID NO: 335765 - RNA, 32 nt, Human
augcuggcucagaaaaugaaagugaacaguua

SEQ ID NO: 335766 - RNA, 22 nt, Human
augcuggcucaugccuguaauc

SEQ ID NO: 335767 - RNA, 32 nt, Human
augcuggcuggcacccucaggccuacguuccc

SEQ ID NO: 335768 - RNA, 32 nt, Human
augcuggcuggccacucucugccucaguggcc

SEQ ID NO: 335769 - RNA, 32 nt, Human
augcuggcugucuggggucugcauuuucugaa

SEQ ID NO: 335770 - RNA, 30 nt, Human
augcuggcuuccuccuugcuccugaaacag

SEQ ID NO: 335771 - RNA, 32 nt, Human
augcuggcuuggaggccgggugcaguggcuca

SEQ ID NO: 335772 - RNA, 26 nt, Human
augcugggaaaguccugcaacugugg

SEQ ID NO: 335773 - RNA, 32 nt, Human
augcugggaaggcagagauugauuaagugcau

SEQ ID NO: 335774 - RNA, 32 nt, Human
augcugggagcugucaccuccacuccuaggcu

SEQ ID NO: 335775 - RNA, 32 nt, Human
augcugggagggcugaacccccacucacacaa

SEQ ID NO: 335776 - RNA, 32 nt, Human
augcugggcaacagggaccccaucucuacaaa

SEQ ID NO: 335777 - RNA, 32 nt, Human
augcugggcagcguuuuugccauugaggguug

SEQ ID NO: 335778 - RNA, 31 nt, Human
augcugggccgaggacagggcggcaggggug

SEQ ID NO: 335779 - RNA, 32 nt, Human
augcugggcuucugcugagaccuguuccagua

SEQ ID NO: 335780 - RNA, 23 nt, Human
augcuggggaaccaaaaugguga

SEQ ID NO: 335781 - RNA, 32 nt, Human
augcuggggacgcagaggugacccagagacau

SEQ ID NO: 335782 - RNA, 32 nt, Human
augcuggggcccagagagguuaagugucuugc

SEQ ID NO: 335783 - RNA, 32 nt, Human
augcuggguucugcacagcuggccucccgcgg

SEQ ID NO: 335784 - RNA, 32 nt, Human
augcugguacuuccagcucccuuccaccugca

SEQ ID NO: 335785 - RNA, 32 nt, Human
augcugguauguuuuaagcuacucuaugaagu

SEQ ID NO: 335786 - RNA, 32 nt, Human
augcuggucucaaacuccugaccucgugugau

SEQ ID NO: 335787 - RNA, 32 nt, Human
augcuggucucaaacuccugggcucaagcaau

SEQ ID NO: 335788 - RNA, 32 nt, Human
augcuggucucgaacuccugaccucagaugau

SEQ ID NO: 335789 - RNA, 32 nt, Human
augcuggucucgaacuccugaccucagguguu

SEQ ID NO: 335790 - RNA, 32 nt, Human
augcuggucucgaacuccugggcucaagcgau

SEQ ID NO: 335791 - RNA, 32 nt, Human
augcuggugagguuguggagaaaaaggaaugc

SEQ ID NO: 335792 - RNA, 32 nt, Human
augcuggugcagcguaaggacgaacuccucca

SEQ ID NO: 335793 - RNA, 21 nt, Human
augcugguggccucacccauc

SEQ ID NO: 335794 - RNA, 24 nt, Human
augcugguguaccccagcaguucu

SEQ ID NO: 335795 - RNA, 32 nt, Human
augcugguguccaccuccugaccucaguugau

SEQ ID NO: 335796 - RNA, 23 nt, Human
augcugguuccaacuguuuaauc

SEQ ID NO: 335797 - RNA, 23 nt, Human
augcugguucugacucuacccca

SEQ ID NO: 335798 - RNA, 32 nt, Human
augcugguuuuccacugccugacaguuaccac

SEQ ID NO: 335799 - RNA, 32 nt, Human
augcuguaacccaguaccuacaaaaucagcuc

SEQ ID NO: 335800 - RNA, 32 nt, Human
augcuguacagguuuguagccuaggagcaaua

SEQ ID NO: 335801 - RNA, 32 nt, Human
augcuguacuauuuaauuauccuuccagcguu

SEQ ID NO: 335802 - RNA, 32 nt, Human
augcuguacuccaauuuucuuugcaaggccuu

SEQ ID NO: 335803 - RNA, 32 nt, Human
augcuguacuccugaaaauuuuucccacaagg

SEQ ID NO: 335804 - RNA, 32 nt, Human
augcuguagacagaagaaauaaaauacucaac

SEQ ID NO: 335805 - RNA, 32 nt, Human
augcuguagaccuaguuucacacacaucugug

SEQ ID NO: 335806 - RNA, 31 nt, Human
augcuguaguaacugccucaguguuucacgu

SEQ ID NO: 335807 - RNA, 32 nt, Human
augcugucaaagggauaaggaaauagcaagau

SEQ ID NO: 335808 - RNA, 32 nt, Human
augcugucacugggugcugugagauuucgauu

SEQ ID NO: 335809 - RNA, 32 nt, Human
augcugucuauccucucuucucuccuugcagg

SEQ ID NO: 335810 - RNA, 32 nt, Human
augcugucuauucacuucauagucauuaagga

SEQ ID NO: 335811 - RNA, 32 nt, Human
augcugucugcagcucagucccugccagcccc

SEQ ID NO: 335812 - RNA, 21 nt, Human
augcugucugccgacugcucu

SEQ ID NO: 335813 - RNA, 32 nt, Human
augcugucuguuaaauaaaaugccauucugca

SEQ ID NO: 335814 - RNA, 32 nt, Human
augcugucuugacaucucuugccuuguccucc

SEQ ID NO: 335815 - RNA, 32 nt, Human
augcugugaauuacucuuccuccccuucucug

SEQ ID NO: 335816 - RNA, 32 nt, Human
augcugugagaaaucucucuuguugcuguccu

SEQ ID NO: 335817 - RNA, 32 nt, Human
augcugugagagaagcauuggggcacaaauag

SEQ ID NO: 335818 - RNA, 32 nt, Human
augcugugaugccugugacuccuucaucccgc

SEQ ID NO: 335819 - RNA, 32 nt, Human
augcugugcaggagugaaaacacggauccaag

SEQ ID NO: 335820 - RNA, 32 nt, Human
augcugugcaguucaaccaucuggaggugguc

SEQ ID NO: 335821 - RNA, 32 nt, Human
augcugugcugccuacagccuggacagggucu

SEQ ID NO: 335822 - RNA, 32 nt, Human
augcugugcuuccucuggaggccugggcugag

SEQ ID NO: 335823 - RNA, 32 nt, Human
augcuguggaaaugaacggggagcagcagcuu

SEQ ID NO: 335824 - RNA, 32 nt, Human
augcuguggagaaagggaagagcugcaugugu

SEQ ID NO: 335825 - RNA, 32 nt, Human
augcuguguaucaugacacuaucuucgucugu

SEQ ID NO: 335826 - RNA, 24 nt, Human
augcuguguauuggguguaaggua

SEQ ID NO: 335827 - RNA, 32 nt, Human
augcuguguuccauacagccuuggacuagcaa

SEQ ID NO: 335828 - RNA, 32 nt, Human
augcuguguuccuuuuauaaaaggacauuugc

SEQ ID NO: 335829 - RNA, 32 nt, Human
augcuguuacccaagguuaggguguugaagga

SEQ ID NO: 335830 - RNA, 32 nt, Human
augcuguuacuuggccauuucuucccaucucc

SEQ ID NO: 335831 - RNA, 32 nt, Human
augcuguucuucagugcugaaauccacgccag

SEQ ID NO: 335832 - RNA, 32 nt, Human
augcuguugagggcccuggagaaacuucagca

SEQ ID NO: 335833 - RNA, 32 nt, Human
augcuguugcccaggcuggagugcaguggugc

SEQ ID NO: 335834 - RNA, 32 nt, Human
augcuguugcccaggcuggagugcaguguccc

SEQ ID NO: 335835 - RNA, 32 nt, Human
augcuguuucaggcuuaaacaucacagcagau

SEQ ID NO: 335836 - RNA, 32 nt, Human
augcuguuucuagucaucaucauguuuacuuu

SEQ ID NO: 335837 - RNA, 32 nt, Human
augcuguuucuguuggugcuagcuacuggggc

SEQ ID NO: 335838 - RNA, 17 nt, Human
augcuguuuuauucaaa

SEQ ID NO: 335839 - RNA, 32 nt, Human
augcuuaacagcuguuuccuguuucucuuaaa

SEQ ID NO: 335840 - RNA, 32 nt, Human
augcuuaacauacuaaccuuacauacacucua

SEQ ID NO: 335841 - RNA, 32 nt, Human
augcuuaacuuaggaagagauaaggcaagagc

SEQ ID NO: 335842 - RNA, 32 nt, Human
augcuuaacuucacaaguuaacuuuuucuuau

SEQ ID NO: 335843 - RNA, 32 nt, Human
augcuuaagaacauaguugcaguuuuuguucu

SEQ ID NO: 335844 - RNA, 31 nt, Human
augcuuaaggcucucaaaacagcagaacaau

SEQ ID NO: 335845 - RNA, 32 nt, Human
augcuuacagagguagauugcauuuugucaau

SEQ ID NO: 335846 - RNA, 32 nt, Human
augcuuaccuucugcuguuuguuccaggcuca

SEQ ID NO: 335847 - RNA, 32 nt, Human
augcuuacugugugcuucucauccccugguug

SEQ ID NO: 335848 - RNA, 32 nt, Human
augcuuaggauucaugcugagauaucaauugg

SEQ ID NO: 335849 - RNA, 32 nt, Human
augcuuagggaagguugauaccagcuucaguc

SEQ ID NO: 335850 - RNA, 32 nt, Human
augcuuauccuuucaucugugugauuguuuuu

SEQ ID NO: 335851 - RNA, 32 nt, Human
augcuuaugcccaaggagaguucuggaggguu

SEQ ID NO: 335852 - RNA, 32 nt, Human
augcuuaugcuacucaggaggcugagguggga

SEQ ID NO: 335853 - RNA, 32 nt, Human
augcuuauguagugccuucuguuguccuacau

SEQ ID NO: 335854 - RNA, 32 nt, Human
augcuuauugcccuccagucugggcaacaaaa

SEQ ID NO: 335855 - RNA, 32 nt, Human
augcuuauuuguuuuaaaaccuguaucaucaa

SEQ ID NO: 335856 - RNA, 32 nt, Human
augcuuauuuuagaauccuccccuuuuugagg

SEQ ID NO: 335857 - RNA, 32 nt, Human
augcuucaagaguuccagcuggccugcuguga

SEQ ID NO: 335858 - RNA, 32 nt, Human
augcuucaauaguucaaggaacuugaaaaaua

SEQ ID NO: 335859 - RNA, 19 nt, Human
augcuucagaaacaccuca

SEQ ID NO: 335860 - RNA, 32 nt, Human
augcuucagaccacccucccuucuucacagac

SEQ ID NO: 335861 - RNA, 32 nt, Human
augcuucagccugucuggccuucuuaucauau

SEQ ID NO: 335862 - RNA, 32 nt, Human
augcuucauggggcuccaggaagccuguauca

SEQ ID NO: 335863 - RNA, 32 nt, Human
augcuucauggucacacauacaggcacaaaaa

SEQ ID NO: 335864 - RNA, 32 nt, Human
augcuucaugucccuccaagauuugagaucaa

SEQ ID NO: 335865 - RNA, 32 nt, Human
augcuucauucugccaugugggauugcugcag

SEQ ID NO: 335866 - RNA, 32 nt, Human
augcuuccagucacaaaaaugcagcccagcuc

SEQ ID NO: 335867 - RNA, 32 nt, Human
augcuuccccuggguguguccucccuugguuu

SEQ ID NO: 335868 - RNA, 32 nt, Human
augcuucccgccagucaagauggucuguggac

SEQ ID NO: 335869 - RNA, 32 nt, Human
augcuucccuccacuguuuauguacucaugua

SEQ ID NO: 335870 - RNA, 32 nt, Human
augcuuccugcccuugaacaucagacuccaag

SEQ ID NO: 335871 - RNA, 32 nt, Human
augcuuccugcccuugaacaucagacuccagg

SEQ ID NO: 335872 - RNA, 32 nt, Human
augcuuccuggguggaguguugaguuggaacc

SEQ ID NO: 335873 - RNA, 32 nt, Human
augcuucuagguuacuuuuucucuuuaagcaa

SEQ ID NO: 335874 - RNA, 32 nt, Human
augcuucuauucuaucaucuaaaacaaaucau

SEQ ID NO: 335875 - RNA, 32 nt, Human
augcuucucccccauucccacccucucugccc

SEQ ID NO: 335876 - RNA, 32 nt, Human
augcuucucugaguucugcuacaaccucuaga

SEQ ID NO: 335877 - RNA, 32 nt, Human
augcuucucugauucccucuucugccugcacc

SEQ ID NO: 335878 - RNA, 32 nt, Human
augcuucugaagcugcucaccuggccgaggga

SEQ ID NO: 335879 - RNA, 32 nt, Human
augcuucugcucacagccuuguggucagaaca

SEQ ID NO: 335880 - RNA, 32 nt, Human
augcuucugcucucccugcucuggcauccugc

SEQ ID NO: 335881 - RNA, 32 nt, Human
augcuucugucuccacucggcuuucccaaaag

SEQ ID NO: 335882 - RNA, 32 nt, Human
augcuucuguguauauaaaggccuuuauuuau

SEQ ID NO: 335883 - RNA, 32 nt, Human
augcuucuuccuccucagaccuggcaugcccu

SEQ ID NO: 335884 - RNA, 32 nt, Human
augcuugaaauaugcacuuagcacuuugguuc

SEQ ID NO: 335885 - RNA, 32 nt, Human
augcuugaaauuuaacacuuuucacuugguuc

SEQ ID NO: 335886 - RNA, 25 nt, Human
augcuugaaccccaggcuucagacu

SEQ ID NO: 335887 - RNA, 32 nt, Human
augcuugaccauuccuuucuucauaacaaaaa

SEQ ID NO: 335888 - RNA, 32 nt, Human
augcuugaccucuauguccagggaguccuuca

SEQ ID NO: 335889 - RNA, 32 nt, Human
augcuugaguuuucugcuucugugccaaaaug

SEQ ID NO: 335890 - RNA, 32 nt, Human
augcuugcacacaugcacacacagugaauguu

SEQ ID NO: 335891 - RNA, 32 nt, Human
augcuugcagucaggagagggcaggggauaga

SEQ ID NO: 335892 - RNA, 32 nt, Human
augcuugcauuuucuugccugauuucccuggg

SEQ ID NO: 335893 - RNA, 32 nt, Human
augcuugccaugaccaaguggcagucaccauu

SEQ ID NO: 335894 - RNA, 32 nt, Human
augcuugcuaagugccuucagcugaaugugaa

SEQ ID NO: 335895 - RNA, 32 nt, Human
augcuugcugggugcugagugcagggggugcc

SEQ ID NO: 335896 - RNA, 32 nt, Human
augcuuggacucuucucccaaaucugaugaau

SEQ ID NO: 335897 - RNA, 32 nt, Human
augcuuggauguaaaacugaacuucagagcau

SEQ ID NO: 335898 - RNA, 32 nt, Human
augcuuggccuggacaaugcuggaaagacaac

SEQ ID NO: 335899 - RNA, 32 nt, Human
augcuugggaggcgcaggaugguacuggcaca

SEQ ID NO: 335900 - RNA, 32 nt, Human
augcuugggaggucgaggcugcagugagucau

SEQ ID NO: 335901 - RNA, 32 nt, Human
augcuugggguaggguggaguggggagggauu

SEQ ID NO: 335902 - RNA, 31 nt, Human
augcuugguguggggaucugggugaaggggg

SEQ ID NO: 335903 - RNA, 32 nt, Human
augcuugucauccaagcuggaguacagugcca

SEQ ID NO: 335904 - RNA, 32 nt, Human
augcuugugcagguagcuaugagcagggagcu

SEQ ID NO: 335905 - RNA, 32 nt, Human
augcuuguucugaaaguaagaucagugaacug

SEQ ID NO: 335906 - RNA, 32 nt, Human
augcuuguugaugccgucuaaggaaccaaugu

SEQ ID NO: 335907 - RNA, 32 nt, Human
augcuuguugccgaaacuguuuauggccuucu

SEQ ID NO: 335908 - RNA, 32 nt, Human
augcuuuacuccuguauuguuauuuuguucau

SEQ ID NO: 335909 - RNA, 32 nt, Human
augcuuucaugccaaguaaauggucuugccag

SEQ ID NO: 335910 - RNA, 32 nt, Human
augcuuuccacauuucuuucuccauucuguuc

SEQ ID NO: 335911 - RNA, 32 nt, Human
augcuuucucccaccgugagggauaugcaaac

SEQ ID NO: 335912 - RNA, 32 nt, Human
augcuuugaaauugaaccuuugugcccuauca

SEQ ID NO: 335913 - RNA, 32 nt, Human
augcuuugcauccuucaauccaaucaaguuga

SEQ ID NO: 335914 - RNA, 32 nt, Human
augcuuugggcagcuuuugaggaacagcaggg

SEQ ID NO: 335915 - RNA, 32 nt, Human
augcuuuguaaggcauaaagugcaauacuagc

SEQ ID NO: 335916 - RNA, 32 nt, Human
augcuuuuaaccaauucucaaaucuuacuaaa

SEQ ID NO: 335917 - RNA, 32 nt, Human
augcuuuuagagacagggucucacuguguugc

SEQ ID NO: 335918 - RNA, 32 nt, Human
augcuuuuauagaccaugcuaaugcuagacca

SEQ ID NO: 335919 - RNA, 32 nt, Human
augcuuuuauucaagacaccaaauuccaaacu

SEQ ID NO: 335920 - RNA, 32 nt, Human
augcuuuuccuuccuuucccuucccugccuuc

SEQ ID NO: 335921 - RNA, 32 nt, Human
augcuuuucuucuaucagugaaaaugucauca

SEQ ID NO: 335922 - RNA, 32 nt, Human
augcuuuugcagaaauguguucauagaugaug

SEQ ID NO: 335923 - RNA, 32 nt, Human
augcuuuugccacuuuggcuucuccugugacc

SEQ ID NO: 335924 - RNA, 32 nt, Human
augcuuuugccuucccuucccuucccauccgc

SEQ ID NO: 335925 - RNA, 22 nt, Human
auggaaaaaucucaugcugcuc

SEQ ID NO: 335926 - RNA, 32 nt, Human
auggaaaaauuuuaggaaauguauuuauuagg

SEQ ID NO: 335927 - RNA, 32 nt, Human
auggaaaacaaauauaucacacagacaacagc

SEQ ID NO: 335928 - RNA, 32 nt, Human
auggaaaacucuuuccagucuggggaugacac

SEQ ID NO: 335929 - RNA, 32 nt, Human
auggaaaagauggggaagagcaaaauacaugg

SEQ ID NO: 335930 - RNA, 24 nt, Human
auggaaaagccugcaugccuguuc

SEQ ID NO: 335931 - RNA, 32 nt, Human
auggaaaaguuaaagacucagucucugagaaa

SEQ ID NO: 335932 - RNA, 22 nt, Human
auggaaaauaccuaauugugga

SEQ ID NO: 335933 - RNA, 22 nt, Human
auggaaaauaguaaacacggga

SEQ ID NO: 335934 - RNA, 32 nt, Human
auggaaaauauauguguagaaguauuucuucu

SEQ ID NO: 335935 - RNA, 21 nt, Human
auggaaaaugcagggugugga

SEQ ID NO: 335936 - RNA, 25 nt, Human
auggaaaauuaccucacaucuguuu

SEQ ID NO: 335937 - RNA, 20 nt, Human
auggaaaauucccaugagag

SEQ ID NO: 335938 - RNA, 23 nt, Human
auggaaaauucuagggacaggag

SEQ ID NO: 335939 - RNA, 32 nt, Human
auggaaacacaaauuucauggagcuguguacc

SEQ ID NO: 335940 - RNA, 32 nt, Human
auggaaacagcaacuuguacaguggcugagaa

SEQ ID NO: 335941 - RNA, 32 nt, Human
auggaaaccaugauuauaacaagaccacaugg

SEQ ID NO: 335942 - RNA, 32 nt, Human
auggaaacccauagguccacacacagguggug

SEQ ID NO: 335943 - RNA, 32 nt, Human
auggaaacucaggaggugccgugagucccaug

SEQ ID NO: 335944 - RNA, 32 nt, Human
auggaaacugagaugcuggcacuuuggcccug

SEQ ID NO: 335945 - RNA, 22 nt, Human
auggaaacugcagcaucuccug

SEQ ID NO: 335946 - RNA, 24 nt, Human
auggaaacugcccugacucuugaa

SEQ ID NO: 335947 - RNA, 32 nt, Human
auggaaagaaaauauuuuugucgauucuuauu

SEQ ID NO: 335948 - RNA, 32 nt, Human
auggaaagcacuuggaacaaugccugguuguu

SEQ ID NO: 335949 - RNA, 32 nt, Human
auggaaagccauuugaggguuuugaacaggga

SEQ ID NO: 335950 - RNA, 32 nt, Human
auggaaaggaaggcuucuaauuagaaaacaca

SEQ ID NO: 335951 - RNA, 32 nt, Human
auggaaaggagccaccuccaccccuuuccgga

SEQ ID NO: 335952 - RNA, 31 nt, Human
auggaaagggagacuguuucagaggacuuga

SEQ ID NO: 335953 - RNA, 32 nt, Human
auggaaagggucucacccugucacucaggcug

SEQ ID NO: 335954 - RNA, 24 nt, Human
auggaaaguugcuuaaauugugga

SEQ ID NO: 335955 - RNA, 32 nt, Human
auggaaauaauuaaauaaaauaguccaucuaa

SEQ ID NO: 335956 - RNA, 32 nt, Human
auggaaaucagaaaaucccaucacuccagcag

SEQ ID NO: 335957 - RNA, 18 nt, Human
auggaaauccagagcaag

SEQ ID NO: 335958 - RNA, 32 nt, Human
auggaaaucccagcuaugcagcacuagcaggu

SEQ ID NO: 335959 - RNA, 32 nt, Human
auggaaaugagguugggcucuauccuccacgg

SEQ ID NO: 335960 - RNA, 32 nt, Human
auggaaaugccaccgugucugcucccaggccu

SEQ ID NO: 335961 - RNA, 32 nt, Human
auggaaaugccacgucugcucuucagugaaga

SEQ ID NO: 335962 - RNA, 24 nt, Human
auggaaauggaauuuaaucuguuu

SEQ ID NO: 335963 - RNA, 32 nt, Human
auggaacaaacaaugaaaguggggugagugcc

SEQ ID NO: 335964 - RNA, 32 nt, Human
auggaacaaauacuaaggucccagggugggag

SEQ ID NO: 335965 - RNA, 32 nt, Human
auggaacacaugcuccuugcuaaccacacgga

SEQ ID NO: 335966 - RNA, 32 nt, Human
auggaacacguaugucaccuccuccugaggau

SEQ ID NO: 335967 - RNA, 32 nt, Human
auggaacagagggugagagaggcaguggccgu

SEQ ID NO: 335968 - RNA, 32 nt, Human
auggaacagcacaagaaagaccugcccccaua

SEQ ID NO: 335969 - RNA, 32 nt, Human
auggaacagcugguauaacauaaguuguuggc

SEQ ID NO: 335970 - RNA, 32 nt, Human
auggaacaggaaacuagagugcauuuaaaaua

SEQ ID NO: 335971 - RNA, 32 nt, Human
auggaacaggugguaggagagccccagggaga

SEQ ID NO: 335972 - RNA, 32 nt, Human
auggaacagucucagaguacugaagaucaaag

SEQ ID NO: 335973 - RNA, 32 nt, Human
auggaacauaucuuuaaccaaauguuuggcau

SEQ ID NO: 335974 - RNA, 32 nt, Human
auggaacauugugagaauggccagucuggaaa

SEQ ID NO: 335975 - RNA, 32 nt, Human
auggaacauuuccugaacauuuacgggcuaug

SEQ ID NO: 335976 - RNA, 32 nt, Human
auggaacccacacccauagcucuccccacagc

SEQ ID NO: 335977 - RNA, 32 nt, Human
auggaacccacuguaccaggcccaggccucag

SEQ ID NO: 335978 - RNA, 32 nt, Human
auggaacccacuguuuggccagcacagggcau

SEQ ID NO: 335979 - RNA, 32 nt, Human
auggaacccugggaacugcccucccccuuagc

SEQ ID NO: 335980 - RNA, 32 nt, Human
auggaaccugcuguguucuguccucuuccagc

SEQ ID NO: 335981 - RNA, 32 nt, Human
auggaaccugggaacagaagccucaaccccca

SEQ ID NO: 335982 - RNA, 32 nt, Human
auggaacucaggaggcggaggcugcagucaac

SEQ ID NO: 335983 - RNA, 32 nt, Human
auggaacuccacccuuucuuguuuuaaguaug

SEQ ID NO: 335984 - RNA, 32 nt, Human
auggaacucuccagagcccuccuugaaaguuu

SEQ ID NO: 335985 - RNA, 32 nt, Human
auggaacugaggugaaauugugcuccaugauu

SEQ ID NO: 335986 - RNA, 32 nt, Human
auggaacugcagacagaaagcacuccaugcga

SEQ ID NO: 335987 - RNA, 32 nt, Human
auggaacuuccucucuguaucucaggucagua

SEQ ID NO: 335988 - RNA, 32 nt, Human
auggaagaaaugcccaagacggcaggcagcag

SEQ ID NO: 335989 - RNA, 32 nt, Human
auggaagaaggcacgugagcagaggaggcagc

SEQ ID NO: 335990 - RNA, 32 nt, Human
auggaagacagaggagaagaagaugauucuuu

SEQ ID NO: 335991 - RNA, 32 nt, Human
auggaagacaucaccuuggcuuccuggcuguc

SEQ ID NO: 335992 - RNA, 32 nt, Human
auggaagagaaaagacagggugggagggagga

SEQ ID NO: 335993 - RNA, 32 nt, Human
auggaagagcccccuccagaccacucuacagc

SEQ ID NO: 335994 - RNA, 32 nt, Human
auggaagaggaggaggaggaggagcuggagga

SEQ ID NO: 335995 - RNA, 32 nt, Human
auggaagaguccagcagcugaaaggacauuug

SEQ ID NO: 335996 - RNA, 32 nt, Human
auggaagaguuuugucaacacaacacuuuguc

SEQ ID NO: 335997 - RNA, 32 nt, Human
auggaagaucaagagagcucgcuuugcaagaa

SEQ ID NO: 335998 - RNA, 32 nt, Human
auggaagcaaagugcuggauuguccuuggagg

SEQ ID NO: 335999 - RNA, 32 nt, Human
auggaagcaaggcaccuguugaaggaaaaaga

SEQ ID NO: 336000 - RNA, 32 nt, Human
auggaagcauccaggagggaggcuguacccug

SEQ ID NO: 336001 - RNA, 32 nt, Human
auggaagcauuuucaccgcccugggguuuuaa

SEQ ID NO: 336002 - RNA, 32 nt, Human
auggaagccguaagugcuucuuugucaucgac

SEQ ID NO: 336003 - RNA, 28 nt, Human
auggaagcugaggcugccucuuccuagc

SEQ ID NO: 336004 - RNA, 25 nt, Human
auggaagcuguugccaaguuugauu

SEQ ID NO: 336005 - RNA, 32 nt, Human
auggaagcuuagaaaagccuggagucuguggg

SEQ ID NO: 336006 - RNA, 32 nt, Human
auggaagcuucccaucagucucccagcugaau

SEQ ID NO: 336007 - RNA, 32 nt, Human
auggaagcuuuuugagggcagguccuugucuu

SEQ ID NO: 336008 - RNA, 32 nt, Human
auggaaggaauuggaacugaaagggaaaggaa

SEQ ID NO: 336009 - RNA, 32 nt, Human
auggaaggacaggcagcacgggagccaggcgc

SEQ ID NO: 336010 - RNA, 22 nt, Human
auggaaggagggagccaagaag

SEQ ID NO: 336011 - RNA, 25 nt, Human
auggaaggcacgcagucgugccugc

SEQ ID NO: 336012 - RNA, 32 nt, Human
auggaaggcggcgcagaggcagcugugugggc

SEQ ID NO: 336013 - RNA, 32 nt, Human
auggaaggcgggaaugaaugggccucugaugg

SEQ ID NO: 336014 - RNA, 25 nt, Human
auggaaggcguggugggauuugcuc

SEQ ID NO: 336015 - RNA, 32 nt, Human
auggaaggcuccugccugggcccugcucacag

SEQ ID NO: 336016 - RNA, 22 nt, Human
auggaagggacgguacccgcuu

SEQ ID NO: 336017 - RNA, 32 nt, Human
auggaagggagagcugggcauggcgguucaug

SEQ ID NO: 336018 - RNA, 20 nt, Human
auggaagggaggcauuugcu

SEQ ID NO: 336019 - RNA, 32 nt, Human
auggaagucaggaggaagggaagaugugagug

SEQ ID NO: 336020 - RNA, 32 nt, Human
auggaagugacucaacaaagagccaaagugga

SEQ ID NO: 336021 - RNA, 25 nt, Human
auggaagugcaguuagggcugggaa

SEQ ID NO: 336022 - RNA, 32 nt, Human
auggaagugguacauaacauugccaaaauaau

SEQ ID NO: 336023 - RNA, 32 nt, Human
auggaaguucaacccgccccuaccucuucaga

SEQ ID NO: 336024 - RNA, 32 nt, Human
auggaaguuuggguguuuaccaacaagguacc

SEQ ID NO: 336025 - RNA, 32 nt, Human
auggaauaagaaguauaccuccuucuacaugu

SEQ ID NO: 336026 - RNA, 32 nt, Human
auggaauaagcauaacaucuguccuaaucuaa

SEQ ID NO: 336027 - RNA, 32 nt, Human
auggaauacuauucagccacaaaaaggaacaa

SEQ ID NO: 336028 - RNA, 32 nt, Human
auggaauacuguugaaccuauagcguugucuu

SEQ ID NO: 336029 - RNA, 25 nt, Human
auggaaucaaacacaauuuuuuaaa

SEQ ID NO: 336030 - RNA, 32 nt, Human
auggaaucacagacuuguuuugagccagucac

SEQ ID NO: 336031 - RNA, 32 nt, Human
auggaaucacugcaaaucuaucugcucuucag

SEQ ID NO: 336032 - RNA, 32 nt, Human
auggaaucugaaggggcucugcagggaggagu

SEQ ID NO: 336033 - RNA, 32 nt, Human
auggaaugaucauuuuguguacauacagguua

SEQ ID NO: 336034 - RNA, 32 nt, Human
auggaaugccuagugcuaagugcaguguccuu

SEQ ID NO: 336035 - RNA, 32 nt, Human
auggaaugcuccacggagcuccaggcuuacua

SEQ ID NO: 336036 - RNA, 32 nt, Human
auggaaugcuugcagagcaugaccugaggagg

SEQ ID NO: 336037 - RNA, 30 nt, Human
auggaaugggcagaggagauggauuugauu

SEQ ID NO: 336038 - RNA, 32 nt, Human
auggaaugggggaagaggaggagcaggaggcc

SEQ ID NO: 336039 - RNA, 32 nt, Human
auggaaugucaguugagugcaggugcagcagg

SEQ ID NO: 336040 - RNA, 25 nt, Human
auggaauucaaacuuaugccugcuc

SEQ ID NO: 336041 - RNA, 32 nt, Human
auggaauucaagaacagacucuggagugucca

SEQ ID NO: 336042 - RNA, 32 nt, Human
auggaauucuaaaguuuuaauuucauuuugga

SEQ ID NO: 336043 - RNA, 32 nt, Human
auggaauugcccagccagucacagcaguagcu

SEQ ID NO: 336044 - RNA, 32 nt, Human
auggaauuguguugugccuuacuucagaggug

SEQ ID NO: 336045 - RNA, 32 nt, Human
auggaauuuuuccagccucauccuggccugcc

SEQ ID NO: 336046 - RNA, 32 nt, Human
auggacaaaaugucucuuagaccuguucuggc

SEQ ID NO: 336047 - RNA, 32 nt, Human
auggacaaauuaacagcauucugcacuuggaa

SEQ ID NO: 336048 - RNA, 32 nt, Human
auggacaacauacucugcaguagcaugaagaa

SEQ ID NO: 336049 - RNA, 32 nt, Human
auggacaacuggaggguaaacaagguggagag

SEQ ID NO: 336050 - RNA, 19 nt, Human
auggacaaggcgucuccug

SEQ ID NO: 336051 - RNA, 32 nt, Human
auggacaaggcugguuauuagaacaaagauuu

SEQ ID NO: 336052 - RNA, 32 nt, Human
auggacaauagcugagaaggggagccaugaaa

SEQ ID NO: 336053 - RNA, 32 nt, Human
auggacaaucaagcaugccucugugaugaagu

SEQ ID NO: 336054 - RNA, 32 nt, Human
auggacacaagaauugacucuaacuccauguc

SEQ ID NO: 336055 - RNA, 20 nt, Human
auggacacaagaugcucuug

SEQ ID NO: 336056 - RNA, 32 nt, Human
auggacacacaaaaacacaugcacccaauuau

SEQ ID NO: 336057 - RNA, 32 nt, Human
auggacacacaaccccagcggcagcaggaaaa

SEQ ID NO: 336058 - RNA, 32 nt, Human
auggacacacaauggauggacacauuauaucu

SEQ ID NO: 336059 - RNA, 24 nt, Human
auggacacacacuuugcaauacca

SEQ ID NO: 336060 - RNA, 32 nt, Human
auggacacacagagccucggcggccacugcug

SEQ ID NO: 336061 - RNA, 32 nt, Human
auggacacacagauggcuccggcuagccgccu

SEQ ID NO: 336062 - RNA, 32 nt, Human
auggacacaccaacgagguacugagugucggc

SEQ ID NO: 336063 - RNA, 32 nt, Human
auggacacagauucucaugccauuccagauuu

SEQ ID NO: 336064 - RNA, 22 nt, Human
auggacacagggaucuucugaa

SEQ ID NO: 336065 - RNA, 20 nt, Human
auggacaccaccggacacca

SEQ ID NO: 336066 - RNA, 16 nt, Human
auggacacccaaccac

SEQ ID NO: 336067 - RNA, 32 nt, Human
auggacaccugccucagacugggccagucaca

SEQ ID NO: 336068 - RNA, 32 nt, Human
auggacaccugcucaccccugccucaucugua

SEQ ID NO: 336069 - RNA, 22 nt, Human
auggacacuacaggcccuggaa

SEQ ID NO: 336070 - RNA, 32 nt, Human
auggacacucaggcacagaguggcccucagga

SEQ ID NO: 336071 - RNA, 32 nt, Human
auggacacugccugucguucugucacuguuaa

SEQ ID NO: 336072 - RNA, 20 nt, Human
auggacacuuguauuuccua

SEQ ID NO: 336073 - RNA, 21 nt, Human
auggacacuuugcguuucuua

SEQ ID NO: 336074 - RNA, 32 nt, Human
auggacagacagaaggggaggaagagaggccu

SEQ ID NO: 336075 - RNA, 32 nt, Human
auggacagacaggccauggaggcagcacugag

SEQ ID NO: 336076 - RNA, 22 nt, Human
auggacagacaguaaucuccug

SEQ ID NO: 336077 - RNA, 24 nt, Human
auggacagagccuuuuucuaaaga

SEQ ID NO: 336078 - RNA, 32 nt, Human
auggacagagggccgugaggggucccccugcu

SEQ ID NO: 336079 - RNA, 32 nt, Human
auggacagaucuuccucagaggaggccucagc

SEQ ID NO: 336080 - RNA, 32 nt, Human
auggacagcuugguuaccuccaccuuccugca

SEQ ID NO: 336081 - RNA, 32 nt, Human
auggacaggaaggggcagagugagucacggcc

SEQ ID NO: 336082 - RNA, 32 nt, Human
auggacaggagccuugagcuggcgugugggaa

SEQ ID NO: 336083 - RNA, 32 nt, Human
auggacaggcgcugcagccugcagagaccuca

SEQ ID NO: 336084 - RNA, 22 nt, Human
auggacagggcugucucugaag

SEQ ID NO: 336085 - RNA, 32 nt, Human
auggacagguaggaaggaaggaaaggaggaaa

SEQ ID NO: 336086 - RNA, 24 nt, Human
auggacagucuagagacucuggag

SEQ ID NO: 336087 - RNA, 32 nt, Human
auggacagugaucauuagaaacugaauuuugu

SEQ ID NO: 336088 - RNA, 32 nt, Human
auggacaguuccaagcccugauccuggcagac

SEQ ID NO: 336089 - RNA, 23 nt, Human
auggacaucauguuuucugguga

SEQ ID NO: 336090 - RNA, 32 nt, Human
auggacaucuacaaggagacuggugaauaaug

SEQ ID NO: 336091 - RNA, 32 nt, Human
auggacaugccuuugugaaaccaggaaguauu

SEQ ID NO: 336092 - RNA, 32 nt, Human
auggacaugguagaggauguggauacuuugca

SEQ ID NO: 336093 - RNA, 32 nt, Human
auggacauguacaaauuugaacucaaaccauc

SEQ ID NO: 336094 - RNA, 32 nt, Human
auggacaugucaguuauugcucugucuaaaca

SEQ ID NO: 336095 - RNA, 32 nt, Human
auggaccaaacagcucuggccuagggauuggg

SEQ ID NO: 336096 - RNA, 32 nt, Human
auggaccaacucagugcuucaggucuuaaugc

SEQ ID NO: 336097 - RNA, 32 nt, Human
auggaccaaucaggaggaaguggguggggcca

SEQ ID NO: 336098 - RNA, 32 nt, Human
auggaccacuuccaaaacagagacgggggcag

SEQ ID NO: 336099 - RNA, 32 nt, Human
auggaccacuugaggucaggaguuugagacca

SEQ ID NO: 336100 - RNA, 32 nt, Human
auggaccagcugcccggaccuccuaguccaga

SEQ ID NO: 336101 - RNA, 32 nt, Human
auggaccauccaggucucgccugcugcagggc

SEQ ID NO: 336102 - RNA, 32 nt, Human
auggaccauguaacaaauaccucagcaggccc

SEQ ID NO: 336103 - RNA, 32 nt, Human
auggaccauugugccaguugccaaucacuaau

SEQ ID NO: 336104 - RNA, 32 nt, Human
auggacccaagugcccuggaggcucugaucaa

SEQ ID NO: 336105 - RNA, 32 nt, Human
auggacccaggcugucauuccaggaagaacug

SEQ ID NO: 336106 - RNA, 32 nt, Human
auggacccauuccaauucaauaccuuucuagu

SEQ ID NO: 336107 - RNA, 32 nt, Human
auggacccgagagcuucacagcugccugcugu

SEQ ID NO: 336108 - RNA, 32 nt, Human
auggacccugagcaaggaaggagggagggagg

SEQ ID NO: 336109 - RNA, 32 nt, Human
auggacccugccaaccuggccugggugugcag

SEQ ID NO: 336110 - RNA, 32 nt, Human
auggacccuggagggaaucuccccagccgacu

SEQ ID NO: 336111 - RNA, 19 nt, Human
auggaccucacacugugga

SEQ ID NO: 336112 - RNA, 32 nt, Human
auggaccucaggucagcuucagcgugagaagc

SEQ ID NO: 336113 - RNA, 32 nt, Human
auggaccuccccucccuugcuggagcuagaau

SEQ ID NO: 336114 - RNA, 32 nt, Human
auggaccuccuagugccuccuggaccuaaggg

SEQ ID NO: 336115 - RNA, 32 nt, Human
auggaccuccuagugccuucuggaccuaaggg

SEQ ID NO: 336116 - RNA, 21 nt, Human
auggaccuccugcccuggggg

SEQ ID NO: 336117 - RNA, 32 nt, Human
auggaccugacucuucuugacugccuuguucu

SEQ ID NO: 336118 - RNA, 21 nt, Human
auggaccugcuagaauuugga

SEQ ID NO: 336119 - RNA, 32 nt, Human
auggaccuggcaccuggcgcgguauucaccag

SEQ ID NO: 336120 - RNA, 32 nt, Human
auggaccuguaauuccgggugugacgagagaa

SEQ ID NO: 336121 - RNA, 32 nt, Human
auggaccugucacgauugucaucaggagaaaa

SEQ ID NO: 336122 - RNA, 32 nt, Human
auggaccuuacauccucacugcagucaccuuu

SEQ ID NO: 336123 - RNA, 32 nt, Human
auggaccuugcacucuagaagggacaauggac

SEQ ID NO: 336124 - RNA, 20 nt, Human
auggacgccaggacgagcgg

SEQ ID NO: 336125 - RNA, 32 nt, Human
auggacgcucgcgaggagcaggcugcagguuu

SEQ ID NO: 336126 - RNA, 25 nt, Human
auggacgggaagguggcagugcaag

SEQ ID NO: 336127 - RNA, 32 nt, Human
auggacgggcugccccucccauuccuucaagc

SEQ ID NO: 336128 - RNA, 32 nt, Human
auggacuaggagagagacugggucaaguaagc

SEQ ID NO: 336129 - RNA, 32 nt, Human
auggacuagucacuaaccccacacucaaaggg

SEQ ID NO: 336130 - RNA, 32 nt, Human
auggacucaccgccagcccugacuguggaggg

SEQ ID NO: 336131 - RNA, 32 nt, Human
auggacucagauucagccccagaggagauggg

SEQ ID NO: 336132 - RNA, 32 nt, Human
auggacucagcaggaagcauauugucugggga

SEQ ID NO: 336133 - RNA, 32 nt, Human
auggacucaguggcauuugaggauguggcuau

SEQ ID NO: 336134 - RNA, 32 nt, Human
auggacucuccugccgggcaacucuugcguaa

SEQ ID NO: 336135 - RNA, 32 nt, Human
auggacucuuccagauccugggugacaauggc

SEQ ID NO: 336136 - RNA, 32 nt, Human
auggacucuucccacccagaggaugcagggaa

SEQ ID NO: 336137 - RNA, 32 nt, Human
auggacugaaagaggaagaggcugcaauggag

SEQ ID NO: 336138 - RNA, 32 nt, Human
auggacugacccggggcugggccucgccagcc

SEQ ID NO: 336139 - RNA, 32 nt, Human
auggacuggccaaaaguuauccuuacuccauc

SEQ ID NO: 336140 - RNA, 32 nt, Human
auggacugggaggagggggagggugaugcauu

SEQ ID NO: 336141 - RNA, 32 nt, Human
auggacugggcauuuaaaagaaauggcaacug

SEQ ID NO: 336142 - RNA, 32 nt, Human
auggacugggcugggaggcgagcaaaggaagc

SEQ ID NO: 336143 - RNA, 27 nt, Human
auggacugggugguggagacgaugccc

SEQ ID NO: 336144 - RNA, 21 nt, Human
auggacugucucauacugcuc

SEQ ID NO: 336145 - RNA, 32 nt, Human
auggacugugcugcaguaucaccagaagacau

SEQ ID NO: 336146 - RNA, 32 nt, Human
auggacuguggacucuuuaggucucaggguuu

SEQ ID NO: 336147 - RNA, 32 nt, Human
auggacuuccacugccauccucccaaggggcc

SEQ ID NO: 336148 - RNA, 25 nt, Human
auggacuucuccaaguuccuggcag

SEQ ID NO: 336149 - RNA, 32 nt, Human
auggacuugaguaaaaugguaguuggcucuug

SEQ ID NO: 336150 - RNA, 32 nt, Human
auggacuugcccacaccuccaccuccccugag

SEQ ID NO: 336151 - RNA, 32 nt, Human
auggacuugguuugagggagggggaaucacag

SEQ ID NO: 336152 - RNA, 32 nt, Human
auggagaaauucaggcugggugcaguggcuca

SEQ ID NO: 336153 - RNA, 32 nt, Human
auggagaacagcaugacagcugucuuuggcag

SEQ ID NO: 336154 - RNA, 32 nt, Human
auggagaacaggccuggugggaaaggcuuugg

SEQ ID NO: 336155 - RNA, 32 nt, Human
auggagaacaucaccuguuacuaguucaguaa

SEQ ID NO: 336156 - RNA, 32 nt, Human
auggagaacuaaaucuuuuguaguagcugaga

SEQ ID NO: 336157 - RNA, 21 nt, Human
auggagaacugauguaugaga

SEQ ID NO: 336158 - RNA, 32 nt, Human
auggagaagaaaggcugccaaaaugagaucug

SEQ ID NO: 336159 - RNA, 32 nt, Human
auggagaagcaccuuugcucucagccaccugu

SEQ ID NO: 336160 - RNA, 32 nt, Human
auggagaauggcugucucucagcuggggagga

SEQ ID NO: 336161 - RNA, 32 nt, Human
auggagacaaauucuggguacuagagucagaa

SEQ ID NO: 336162 - RNA, 32 nt, Human
auggagacagacaaacccacugugggcagcau

SEQ ID NO: 336163 - RNA, 27 nt, Human
auggagacauuuaagauugucagcaaa

SEQ ID NO: 336164 - RNA, 18 nt, Human
auggagaccaacaaauag

SEQ ID NO: 336165 - RNA, 32 nt, Human
auggagaccacggugaaaccccgucucuacua

SEQ ID NO: 336166 - RNA, 32 nt, Human
auggagaccagccugcaagccggcccagccug

SEQ ID NO: 336167 - RNA, 32 nt, Human
auggagaccauccuggccaacacagugaggcc

SEQ ID NO: 336168 - RNA, 32 nt, Human
auggagaccauccuggccaacauggugaaacc

SEQ ID NO: 336169 - RNA, 32 nt, Human
auggagaccauccuggcuaacauggugaaacc

SEQ ID NO: 336170 - RNA, 25 nt, Human
auggagacccucugugcaccccagg

SEQ ID NO: 336171 - RNA, 20 nt, Human
auggagacucagauuucuua

SEQ ID NO: 336172 - RNA, 32 nt, Human
auggagacuccuugagugcacacaccugagcc

SEQ ID NO: 336173 - RNA, 32 nt, Human
auggagagaaaggagaaaaaucagaauucuau

SEQ ID NO: 336174 - RNA, 32 nt, Human
auggagagaaggauggaaagccuggacuuaaa

SEQ ID NO: 336175 - RNA, 25 nt, Human
auggagagaaggggcccucccagca

SEQ ID NO: 336176 - RNA, 32 nt, Human
auggagagaauagcaucucuauuccaauguag

SEQ ID NO: 336177 - RNA, 32 nt, Human
auggagagagugagccagacagacuucaccuc

SEQ ID NO: 336178 - RNA, 32 nt, Human
auggagagagugagcuggggaacaggaaaguc

SEQ ID NO: 336179 - RNA, 32 nt, Human
auggagagaugggccguugccaugguggacgg

SEQ ID NO: 336180 - RNA, 20 nt, Human
auggagagcuucagcuaaga

SEQ ID NO: 336181 - RNA, 32 nt, Human
auggagaggaacgcggaaggugcccucugcgg

SEQ ID NO: 336182 - RNA, 32 nt, Human
auggagaggacaaaggcagcuucugcacacca

SEQ ID NO: 336183 - RNA, 32 nt, Human
auggagaggaggaggaggcugaguuuggggua

SEQ ID NO: 336184 - RNA, 32 nt, Human
auggagagggcugcuuuuggggauuauuuaua

SEQ ID NO: 336185 - RNA, 32 nt, Human
auggagaggugggguuuuccuuuugauucagu

SEQ ID NO: 336186 - RNA, 32 nt, Human
auggagagguuagugugaugagguggugucug

SEQ ID NO: 336187 - RNA, 21 nt, Human
auggagagucuaaaauuugga

SEQ ID NO: 336188 - RNA, 32 nt, Human
auggagaguuuacaaagacugaauaauuauug

SEQ ID NO: 336189 - RNA, 32 nt, Human
auggagaucagcugccugagcaccugcgcugu

SEQ ID NO: 336190 - RNA, 32 nt, Human
auggagaugaagauuguuuucuccaauuuucu

SEQ ID NO: 336191 - RNA, 32 nt, Human
auggagaugaagugaaggucugagggacgggc

SEQ ID NO: 336192 - RNA, 32 nt, Human
auggagaugagagagggugagagauggagggc

SEQ ID NO: 336193 - RNA, 32 nt, Human
auggagaugggaucacuauguugcccaugcug

SEQ ID NO: 336194 - RNA, 32 nt, Human
auggagauggggucuugcuuuguugcccaggc

SEQ ID NO: 336195 - RNA, 32 nt, Human
auggagaugguucagggaggcuuggaguacca

SEQ ID NO: 336196 - RNA, 32 nt, Human
auggagaugguuuugcccucccucucugcccu

SEQ ID NO: 336197 - RNA, 31 nt, Human
auggagaugucgggacucagcuuuucagaga

SEQ ID NO: 336198 - RNA, 32 nt, Human
auggagauguggagccuugucaccaaccucua

SEQ ID NO: 336199 - RNA, 32 nt, Human
auggagcaaaagagacagggagagguggagaa

SEQ ID NO: 336200 - RNA, 25 nt, Human
auggagcaacugcccucaggaggca

SEQ ID NO: 336201 - RNA, 26 nt, Human
auggagcacgccaagaagagccagga

SEQ ID NO: 336202 - RNA, 32 nt, Human
auggagcagcaacccugagucccuaaggcagc

SEQ ID NO: 336203 - RNA, 32 nt, Human
auggagcagcaggaauuugagggauggagcag

SEQ ID NO: 336204 - RNA, 32 nt, Human
auggagcagccccauuccagggucccaucugu

SEQ ID NO: 336205 - RNA, 32 nt, Human
auggagcaggaaacuggaguugaggagggcag

SEQ ID NO: 336206 - RNA, 32 nt, Human
auggagcaggagcagaagcacacguuggagaa

SEQ ID NO: 336207 - RNA, 32 nt, Human
auggagcaggaguggagaaagggaaaggcagg

SEQ ID NO: 336208 - RNA, 32 nt, Human
auggagcagggagggagacggcuagggcagca

SEQ ID NO: 336209 - RNA, 32 nt, Human
auggagcaggugugcagagggugagaacccag

SEQ ID NO: 336210 - RNA, 32 nt, Human
auggagcauguacuuauuugcauuugcuggca

SEQ ID NO: 336211 - RNA, 32 nt, Human
auggagcauguggcuguccugagguucuuuua

SEQ ID NO: 336212 - RNA, 32 nt, Human
auggagccacugcacuccagcccaggugacag

SEQ ID NO: 336213 - RNA, 32 nt, Human
auggagccacugcacuccagccugggcgacag

SEQ ID NO: 336214 - RNA, 32 nt, Human
auggagccacugcacuccagccugggggaaag

SEQ ID NO: 336215 - RNA, 32 nt, Human
auggagcccagagugacacagaggaagaggcc

SEQ ID NO: 336216 - RNA, 32 nt, Human
auggagcccuagggagccccugugcugccccu

SEQ ID NO: 336217 - RNA, 32 nt, Human
auggagcccuugccucauguacaccgggaguc

SEQ ID NO: 336218 - RNA, 32 nt, Human
auggagccuagacagaagcccagaacuuucug

SEQ ID NO: 336219 - RNA, 32 nt, Human
auggagccucaggcaccaugccaaaaauaauu

SEQ ID NO: 336220 - RNA, 32 nt, Human
auggagccugccuuggggagugcauguguugg

SEQ ID NO: 336221 - RNA, 32 nt, Human
auggagccuggcagauaacaagcacgagauaa

SEQ ID NO: 336222 - RNA, 32 nt, Human
auggagccuuucuguggcauugaaggaacaaa

SEQ ID NO: 336223 - RNA, 32 nt, Human
auggagcgggaggcguugccguggggccucga

SEQ ID NO: 336224 - RNA, 32 nt, Human
auggagcuagagagacaacaggaaagacggug

SEQ ID NO: 336225 - RNA, 32 nt, Human
auggagcucaugccagaaaugguccuaagcau

SEQ ID NO: 336226 - RNA, 32 nt, Human
auggagcuccacccuucagucugugucguguu

SEQ ID NO: 336227 - RNA, 25 nt, Human
auggagcugcuugaagaagaucuca

SEQ ID NO: 336228 - RNA, 32 nt, Human
auggagcugggagcugaggcuccuguugcacc

SEQ ID NO: 336229 - RNA, 19 nt, Human
auggagcugucaucuccua

SEQ ID NO: 336230 - RNA, 32 nt, Human
auggagcuuacaaugaauaaaaagacaugacg

SEQ ID NO: 336231 - RNA, 32 nt, Human
auggagcuuauggguagaagaccaugucuacu

SEQ ID NO: 336232 - RNA, 32 nt, Human
auggagcuucaugacccacggucagcccccaa

SEQ ID NO: 336233 - RNA, 32 nt, Human
auggaggaaccagcagcccagaaacacucccc

SEQ ID NO: 336234 - RNA, 32 nt, Human
auggaggaagauugauuuucuccaucaguuca

SEQ ID NO: 336235 - RNA, 23 nt, Human
auggaggaaggaaaaagggagaa

SEQ ID NO: 336236 - RNA, 32 nt, Human
auggaggacacuggagagaguugcuauuccag

SEQ ID NO: 336237 - RNA, 32 nt, Human
auggaggacaggacaggauggcuggaggggcu

SEQ ID NO: 336238 - RNA, 32 nt, Human
auggaggacgugagaggaacagccagcugugu

SEQ ID NO: 336239 - RNA, 32 nt, Human
auggaggacuccucucuucugcuucuguggau

SEQ ID NO: 336240 - RNA, 31 nt, Human
auggaggagacgucucccacgaggccaaggc

SEQ ID NO: 336241 - RNA, 32 nt, Human
auggaggagauaguuugugguccauuauugua

SEQ ID NO: 336242 - RNA, 32 nt, Human
auggaggaggaaugagcugggguggggccguu

SEQ ID NO: 336243 - RNA, 32 nt, Human
auggaggaggcccagcccugaggucaacgcca

SEQ ID NO: 336244 - RNA, 32 nt, Human
auggaggagggagggcuucaggacggggcguc

SEQ ID NO: 336245 - RNA, 32 nt, Human
auggaggauggggcagccaggagccagacuua

SEQ ID NO: 336246 - RNA, 32 nt, Human
auggaggauguaagcaaguaacacagccaaga

SEQ ID NO: 336247 - RNA, 32 nt, Human
auggaggcacaucuucagggcaccaguguuaa

SEQ ID NO: 336248 - RNA, 32 nt, Human
auggaggcacaugucagaugcugcagucgcaa

SEQ ID NO: 336249 - RNA, 32 nt, Human
auggaggcagguauuucccaugcuauucuuuu

SEQ ID NO: 336250 - RNA, 24 nt, Human
auggaggcauccugacaucuguuc

SEQ ID NO: 336251 - RNA, 32 nt, Human
auggaggccacuauggugaaaaagccagggga

SEQ ID NO: 336252 - RNA, 22 nt, Human
auggaggcccugaccucugcug

SEQ ID NO: 336253 - RNA, 32 nt, Human
auggaggccugggaacaggguuuauacuaagu

SEQ ID NO: 336254 - RNA, 32 nt, Human
auggaggcggcggcucccuaaaccacuuuucg

SEQ ID NO: 336255 - RNA, 20 nt, Human
auggaggcgucuacaccugc

SEQ ID NO: 336256 - RNA, 22 nt, Human
auggaggcucaugccuguaauc

SEQ ID NO: 336257 - RNA, 32 nt, Human
auggaggcuggcaagggaaaguuucagcucac

SEQ ID NO: 336258 - RNA, 32 nt, Human
auggaggcuguucauucccugcagugucggca

SEQ ID NO: 336259 - RNA, 32 nt, Human
auggagggagccuguuggaauaucgagccagc

SEQ ID NO: 336260 - RNA, 32 nt, Human
auggagggaggcaccccuuccaggaacaaggc

SEQ ID NO: 336261 - RNA, 32 nt, Human
auggagggaggcagaguaacagcgaagagggg

SEQ ID NO: 336262 - RNA, 27 nt, Human
auggagggagggucccaaauuagcaaa

SEQ ID NO: 336263 - RNA, 22 nt, Human
auggagggcagccacuuuucuc

SEQ ID NO: 336264 - RNA, 32 nt, Human
auggagggcaucuacacacauacacaucccuc

SEQ ID NO: 336265 - RNA, 32 nt, Human
auggagggccguuguugccucucccggcguuu

SEQ ID NO: 336266 - RNA, 32 nt, Human
auggagggcuaaauuugcucaugugaaacuuc

SEQ ID NO: 336267 - RNA, 26 nt, Human
auggagggcuccguaggucucagcaa

SEQ ID NO: 336268 - RNA, 32 nt, Human
auggagggcuccugcccuucugcugagccaca

SEQ ID NO: 336269 - RNA, 32 nt, Human
auggagggcuuuguuucacaagcuuuucuccu

SEQ ID NO: 336270 - RNA, 32 nt, Human
auggaggggaacgugcugacugggacucccag

SEQ ID NO: 336271 - RNA, 21 nt, Human
auggaggggaagauacugcuu

SEQ ID NO: 336272 - RNA, 32 nt, Human
auggagggggcugcagguuggaacuaugcagu

SEQ ID NO: 336273 - RNA, 32 nt, Human
auggagggguaggaguugaugguucugaaggc

SEQ ID NO: 336274 - RNA, 24 nt, Human
auggagggugacuggcccuggcuc

SEQ ID NO: 336275 - RNA, 23 nt, Human
auggaggguggcgcaggccucuc

SEQ ID NO: 336276 - RNA, 21 nt, Human
auggaggguggucacauguuc

SEQ ID NO: 336277 - RNA, 32 nt, Human
auggagguaaaaggaaaggaaggaaggaaaaa

SEQ ID NO: 336278 - RNA, 32 nt, Human
auggagguaaguggccagcaaaaaugaaagug

SEQ ID NO: 336279 - RNA, 28 nt, Human
auggaggucucaggaagggcccagcgaa

SEQ ID NO: 336280 - RNA, 32 nt, Human
auggaggucuggggcucugguggcuuccauag

SEQ ID NO: 336281 - RNA, 32 nt, Human
auggaggugggaccagaugcuucccugugcug

SEQ ID NO: 336282 - RNA, 32 nt, Human
auggagguggugagccguggggaacgcucucu

SEQ ID NO: 336283 - RNA, 32 nt, Human
auggagguuccuucccucucaccugcauuuuu

SEQ ID NO: 336284 - RNA, 32 nt, Human
auggagguugucacucucuggaaaaggauuuc

SEQ ID NO: 336285 - RNA, 32 nt, Human
auggaguagagaaagaaagagcaagagcaggc

SEQ ID NO: 336286 - RNA, 32 nt, Human
auggaguagcaacuaguuuuguagcacuacau

SEQ ID NO: 336287 - RNA, 32 nt, Human
auggaguauaccuuguaaaucuucccaaaugu

SEQ ID NO: 336288 - RNA, 32 nt, Human
auggagucacacucuccaggcuggagugcagu

SEQ ID NO: 336289 - RNA, 32 nt, Human
auggagucaggugcuggaggccguggcagcgg

SEQ ID NO: 336290 - RNA, 32 nt, Human
auggagucauucauccugauguccucaauugc

SEQ ID NO: 336291 - RNA, 32 nt, Human
auggaguccagccugggugacagagugagacc

SEQ ID NO: 336292 - RNA, 32 nt, Human
auggaguccagggaagagaaagugauuucuag

SEQ ID NO: 336293 - RNA, 32 nt, Human
auggagucucaaacuaucaccugggcuggagu

SEQ ID NO: 336294 - RNA, 19 nt, Human
auggagucucaccauguug

SEQ ID NO: 336295 - RNA, 23 nt, Human
auggagucucaccauguugguca

SEQ ID NO: 336296 - RNA, 18 nt, Human
auggagucucacuauguu

SEQ ID NO: 336297 - RNA, 19 nt, Human
auggagucucacuauguug

SEQ ID NO: 336298 - RNA, 32 nt, Human
auggagucucacuauguugcccagacuggucu

SEQ ID NO: 336299 - RNA, 32 nt, Human
auggagucuccaggaaccccagccuguuaggg

SEQ ID NO: 336300 - RNA, 32 nt, Human
auggagucucccuauguugcucaggccgguug

SEQ ID NO: 336301 - RNA, 32 nt, Human
auggagucucgcucucuggagugcaauggcgc

SEQ ID NO: 336302 - RNA, 32 nt, Human
auggagucucucugcacuccagccugggugac

SEQ ID NO: 336303 - RNA, 32 nt, Human
auggagucuugcucugucucucaggcuagagc

SEQ ID NO: 336304 - RNA, 32 nt, Human
auggagugaaaccuauuguaaggcuguacuuu

SEQ ID NO: 336305 - RNA, 32 nt, Human
auggagugaaguauaccaugcaccaaaauaaa

SEQ ID NO: 336306 - RNA, 32 nt, Human
auggagugcagugguugaucauagcucccggg

SEQ ID NO: 336307 - RNA, 32 nt, Human
auggagugcaguguugugaucaugccucagug

SEQ ID NO: 336308 - RNA, 15 nt, Human
auggaguggagacaa

SEQ ID NO: 336309 - RNA, 32 nt, Human
auggaguggcccacggcggccuuggggugaag

SEQ ID NO: 336310 - RNA, 32 nt, Human
auggaguggcccagccucccaccuucagcccg

SEQ ID NO: 336311 - RNA, 31 nt, Human
auggaguggcccugguccaugccagguuuuc

SEQ ID NO: 336312 - RNA, 32 nt, Human
auggagugggaaauguguuucucuggagaagg

SEQ ID NO: 336313 - RNA, 31 nt, Human
auggagugggaaugaagauggggaacuuacg

SEQ ID NO: 336314 - RNA, 31 nt, Human
auggagugggagaugccaaagacugaucauu

SEQ ID NO: 336315 - RNA, 32 nt, Human
auggaguggugagaauugaaugguuaaugcac

SEQ ID NO: 336316 - RNA, 32 nt, Human
auggaguguaggaaagagcagaccaaaaucag

SEQ ID NO: 336317 - RNA, 32 nt, Human
auggagugugcgugugugcauguaugugugug

SEQ ID NO: 336318 - RNA, 32 nt, Human
auggaguguugaugcuuucgucuccagccccu

SEQ ID NO: 336319 - RNA, 32 nt, Human
auggaguucagggcaucccagagcagauccau

SEQ ID NO: 336320 - RNA, 32 nt, Human
auggaguugaauccuuucucugccacucuuug

SEQ ID NO: 336321 - RNA, 32 nt, Human
auggaguugggaacaggcugggaaggaugccc

SEQ ID NO: 336322 - RNA, 32 nt, Human
auggaguugugcaaagcuauggcuuccuuggu

SEQ ID NO: 336323 - RNA, 32 nt, Human
auggaguuuaaguugagugaacaucggccaug

SEQ ID NO: 336324 - RNA, 19 nt, Human
auggaguuucaccacguug

SEQ ID NO: 336325 - RNA, 32 nt, Human
auggaguuucuaagccaccugauuuuaaggcu

SEQ ID NO: 336326 - RNA, 32 nt, Human
auggaguuuugcucuugcacuccauccuggac

SEQ ID NO: 336327 - RNA, 32 nt, Human
auggauaaacugccuuuucucacauccccucu

SEQ ID NO: 336328 - RNA, 32 nt, Human
auggauaacaacucucacuuuaguggauguaa

SEQ ID NO: 336329 - RNA, 32 nt, Human
auggauaagcgcacggaugaauggagcuuaca

SEQ ID NO: 336330 - RNA, 32 nt, Human
auggauaaucaggaggcaucacugaggccagg

SEQ ID NO: 336331 - RNA, 32 nt, Human
auggauaaucuaugugcuucuaguaggcacag

SEQ ID NO: 336332 - RNA, 32 nt, Human
auggauacaggcucuuccuaugguauuauuua

SEQ ID NO: 336333 - RNA, 32 nt, Human
auggauacccgcacuccuccuccugggccgga

SEQ ID NO: 336334 - RNA, 32 nt, Human
auggauacuacugcauuggcaucuagcagaaa

SEQ ID NO: 336335 - RNA, 32 nt, Human
auggauacugacaccaaggacauucagauuuu

SEQ ID NO: 336336 - RNA, 32 nt, Human
auggauagaguauugagauacuuuuucuuuug

SEQ ID NO: 336337 - RNA, 32 nt, Human
auggauagcugggguuggcagauggcuagaga

SEQ ID NO: 336338 - RNA, 32 nt, Human
auggauaggaauuaguacuaagcaaugugucu

SEQ ID NO: 336339 - RNA, 32 nt, Human
auggauaggggagggggcgguaggggcugcag

SEQ ID NO: 336340 - RNA, 32 nt, Human
auggaucaagacgguuaccuggcacgcuggcc

SEQ ID NO: 336341 - RNA, 21 nt, Human
auggaucaagccccuaaaaug

SEQ ID NO: 336342 - RNA, 21 nt, Human
auggaucagccaaggccgaga

SEQ ID NO: 336343 - RNA, 32 nt, Human
auggaucaggcaggccagaggggcaguucaug

SEQ ID NO: 336344 - RNA, 28 nt, Human
auggaucaucugucggguguguggugaa

SEQ ID NO: 336345 - RNA, 32 nt, Human
auggaucaugaggaucagagaggaaaagucac

SEQ ID NO: 336346 - RNA, 32 nt, Human
auggaucauuucuugacuuucauguggguaac

SEQ ID NO: 336347 - RNA, 32 nt, Human
auggauccaaaccaagaagaaaucccugauuu

SEQ ID NO: 336348 - RNA, 32 nt, Human
auggauccgugacagcacuuuccuguugcacu

SEQ ID NO: 336349 - RNA, 32 nt, Human
auggaucgcuugagcccaggagguggagguug

SEQ ID NO: 336350 - RNA, 32 nt, Human
auggaucgcuugagcccaggaguuugagacca

SEQ ID NO: 336351 - RNA, 32 nt, Human
auggaucggccacugcacuccgggcugggcga

SEQ ID NO: 336352 - RNA, 32 nt, Human
auggaucugaagagugggcaacggagaguuaa

SEQ ID NO: 336353 - RNA, 32 nt, Human
auggaucugauccuccgaagcacagcagagau

SEQ ID NO: 336354 - RNA, 32 nt, Human
auggaucuuguaaucaugccaagagaauagau

SEQ ID NO: 336355 - RNA, 32 nt, Human
auggaucuuuggguguguaggggauagaggag

SEQ ID NO: 336356 - RNA, 32 nt, Human
auggaugaaugagagagggagggaacagugcc

SEQ ID NO: 336357 - RNA, 32 nt, Human
auggaugacaaaugugacauugugcacuagcu

SEQ ID NO: 336358 - RNA, 32 nt, Human
auggaugauggacccuuuccuaaugagccucc

SEQ ID NO: 336359 - RNA, 32 nt, Human
auggaugcagcaaaccaccauggcacguguau

SEQ ID NO: 336360 - RNA, 32 nt, Human
auggaugccaucacucuuuucuccacauacag

SEQ ID NO: 336361 - RNA, 32 nt, Human
auggaugccucaucagaacaugcuguugaguc

SEQ ID NO: 336362 - RNA, 32 nt, Human
auggaugcuaugccuggauaccagucuccacu

SEQ ID NO: 336363 - RNA, 32 nt, Human
auggaugcugggcuucauaccugggugaugag

SEQ ID NO: 336364 - RNA, 29 nt, Human
auggaugcuguuuccccucccccgggcca

SEQ ID NO: 336365 - RNA, 32 nt, Human
auggauggacacaccucuccacaauuccuuca

SEQ ID NO: 336366 - RNA, 18 nt, Human
auggauggagacuaugaa

SEQ ID NO: 336367 - RNA, 32 nt, Human
auggauggagccaugcagacaccaaggugaag

SEQ ID NO: 336368 - RNA, 29 nt, Human
auggauggaggcagaguuggcacccagag

SEQ ID NO: 336369 - RNA, 32 nt, Human
auggauggcugucaaucccgaggcagaaguuu

SEQ ID NO: 336370 - RNA, 32 nt, Human
auggaugggcagaggcucucucccugcccacu

SEQ ID NO: 336371 - RNA, 32 nt, Human
auggaugggcugagggaguggagggggaccuc

SEQ ID NO: 336372 - RNA, 32 nt, Human
auggauggggcugcuuuugcagugggugccac

SEQ ID NO: 336373 - RNA, 32 nt, Human
auggaugguuaugucaaagucauaguucaucc

SEQ ID NO: 336374 - RNA, 32 nt, Human
auggaugugaugcacugaaaaguuaguugcuc

SEQ ID NO: 336375 - RNA, 32 nt, Human
auggaugugcagugggagguugaggcacaagg

SEQ ID NO: 336376 - RNA, 23 nt, Human
auggaugugcuguacaucugcuc

SEQ ID NO: 336377 - RNA, 32 nt, Human
auggauguggggagaguggaagaggcagggag

SEQ ID NO: 336378 - RNA, 32 nt, Human
auggauguggggccagugcacacagaugccac

SEQ ID NO: 336379 - RNA, 32 nt, Human
auggaugugggguggucccuucacacaaggca

SEQ ID NO: 336380 - RNA, 32 nt, Human
auggauguuggugaaaauuaaagggaaacaga

SEQ ID NO: 336381 - RNA, 32 nt, Human
auggauguuugaagcuaaucugcaacagccuu

SEQ ID NO: 336382 - RNA, 32 nt, Human
auggauuacauaaucacagccaaaaagcacgg

SEQ ID NO: 336383 - RNA, 32 nt, Human
auggauuaccaucuuuauugcuguaauguguu

SEQ ID NO: 336384 - RNA, 32 nt, Human
auggauuaugcucugugaaaugaaaaguucaa

SEQ ID NO: 336385 - RNA, 32 nt, Human
auggauucaaaccaagaugaaaucacugaauu

SEQ ID NO: 336386 - RNA, 32 nt, Human
auggauucaauggacucauccauuugugagga

SEQ ID NO: 336387 - RNA, 32 nt, Human
auggauucagcauguccaacaugguaauucac

SEQ ID NO: 336388 - RNA, 32 nt, Human
auggauucauucuuucaaacauccgcauucuc

SEQ ID NO: 336389 - RNA, 32 nt, Human
auggauucgagccacuuguaggcacauuagcu

SEQ ID NO: 336390 - RNA, 32 nt, Human
auggauucuucuuuuguguauuuccuuuucug

SEQ ID NO: 336391 - RNA, 32 nt, Human
auggauuggaagagaacugcuggcauauugag

SEQ ID NO: 336392 - RNA, 32 nt, Human
auggauuggcaagagaaaaaggaggaacaggg

SEQ ID NO: 336393 - RNA, 32 nt, Human
auggauuguucaaugguacaguuuggaaccaa

SEQ ID NO: 336394 - RNA, 32 nt, Human
auggauuuacuuuugggauacacucauuauuc

SEQ ID NO: 336395 - RNA, 32 nt, Human
auggauuuauuagaauuucauaugacauucau

SEQ ID NO: 336396 - RNA, 32 nt, Human
auggauuuauuuucucucucagucuccauuuu

SEQ ID NO: 336397 - RNA, 32 nt, Human
auggauuucacuucugaacaguuuacagcaca

SEQ ID NO: 336398 - RNA, 23 nt, Human
auggauuucuaggucacugggga

SEQ ID NO: 336399 - RNA, 32 nt, Human
auggauuugaagcaaagcaccagcuucuccag

SEQ ID NO: 336400 - RNA, 32 nt, Human
auggauuugguauucaacuuuuucccuggaug

SEQ ID NO: 336401 - RNA, 31 nt, Human
auggauuuucauaaauacaguuugaauauau

SEQ ID NO: 336402 - RNA, 32 nt, Human
  misc_feature (32)..(32): n is a, c, g, or u
auggauuuucccuuuuguuuucaguguuccun

SEQ ID NO: 336403 - RNA, 32 nt, Human
auggcaaaaccagcuuaggaccucugcuguac

SEQ ID NO: 336404 - RNA, 32 nt, Human
auggcaaaagauuggacuaagacacuggccau

SEQ ID NO: 336405 - RNA, 32 nt, Human
auggcaaacaauccuaaaauauacaagacuac

SEQ ID NO: 336406 - RNA, 32 nt, Human
auggcaaacacucggcugggcacaguggcuca

SEQ ID NO: 336407 - RNA, 32 nt, Human
auggcaaacagaaacgcaacaaaaagacagac

SEQ ID NO: 336408 - RNA, 32 nt, Human
auggcaaacauggugaaacgcugucucuacua

SEQ ID NO: 336409 - RNA, 32 nt, Human
auggcaaagggaugugggaaguauccaugggc

SEQ ID NO: 336410 - RNA, 32 nt, Human
auggcaaauggguggcaaguaccgccuuaugg

SEQ ID NO: 336411 - RNA, 32 nt, Human
auggcaacauaauucacuuuccaucuuuuaaa

SEQ ID NO: 336412 - RNA, 21 nt, Human
auggcaacguccagggcccag

SEQ ID NO: 336413 - RNA, 32 nt, Human
auggcaagaagggcauuuuucucuucaauuuc

SEQ ID NO: 336414 - RNA, 32 nt, Human
auggcaagaugccauauccuggaaacauauua

SEQ ID NO: 336415 - RNA, 32 nt, Human
auggcaagcugguguuuaagaggucaggaggc

SEQ ID NO: 336416 - RNA, 32 nt, Human
auggcaagcuuacugccuugaugcacaucugg

SEQ ID NO: 336417 - RNA, 32 nt, Human
auggcaaggaagagagagccuucauggcaauu

SEQ ID NO: 336418 - RNA, 32 nt, Human
auggcaagugauaucaccucucuucagccccu

SEQ ID NO: 336419 - RNA, 32 nt, Human
auggcaaguggucccugaugugcagugucuca

SEQ ID NO: 336420 - RNA, 31 nt, Human
auggcaauauacauggagaggagggacucuu

SEQ ID NO: 336421 - RNA, 32 nt, Human
auggcaauuguuuagugacuguaagugauacu

SEQ ID NO: 336422 - RNA, 32 nt, Human
auggcacaaauccauggcugggcauggcuuua

SEQ ID NO: 336423 - RNA, 32 nt, Human
auggcacaauccaggcuguugcaccccuucuu

SEQ ID NO: 336424 - RNA, 32 nt, Human
auggcacacugggauaaacaagcaagauugcu

SEQ ID NO: 336425 - RNA, 32 nt, Human
auggcacagaaacacaucccaaauacuaugau

SEQ ID NO: 336426 - RNA, 32 nt, Human
auggcacagcacagugugcacugcucccacag

SEQ ID NO: 336427 - RNA, 32 nt, Human
auggcacagcagagcaccgggaccugcccagc

SEQ ID NO: 336428 - RNA, 32 nt, Human
auggcacauguggagagccagggagaagaaga

SEQ ID NO: 336429 - RNA, 32 nt, Human
auggcaccaauacuugggacacgaugauuuag

SEQ ID NO: 336430 - RNA, 32 nt, Human
auggcaccacaguggugggggcccauggccuc

SEQ ID NO: 336431 - RNA, 32 nt, Human
auggcaccaccaggguagagggaaggucggcu

SEQ ID NO: 336432 - RNA, 32 nt, Human
auggcaccaccagugguggggacagcgaugcc

SEQ ID NO: 336433 - RNA, 32 nt, Human
auggcaccacuacacuccagcccgggcgacag

SEQ ID NO: 336434 - RNA, 32 nt, Human
auggcaccacuacauuucagccugggcgaaag

SEQ ID NO: 336435 - RNA, 32 nt, Human
auggcaccacugcacuccagccuaggugacag

SEQ ID NO: 336436 - RNA, 25 nt, Human
auggcaccacugcacuccagccugg

SEQ ID NO: 336437 - RNA, 32 nt, Human
auggcaccacugcacuccagccuggacgacag

SEQ ID NO: 336438 - RNA, 32 nt, Human
auggcaccacugcacuccagccugggagacac

SEQ ID NO: 336439 - RNA, 32 nt, Human
auggcaccacugcacuccagccugggagacag

SEQ ID NO: 336440 - RNA, 32 nt, Human
auggcaccacugcacuccagccugggcaacag

SEQ ID NO: 336441 - RNA, 32 nt, Human
auggcaccacugcacuccagccugggugacag

SEQ ID NO: 336442 - RNA, 32 nt, Human
auggcaccacugcacuccagccugggugagag

SEQ ID NO: 336443 - RNA, 32 nt, Human
auggcaccacugcacuccagcuugggugacag

SEQ ID NO: 336444 - RNA, 32 nt, Human
auggcaccacugcacuccauccugggugacag

SEQ ID NO: 336445 - RNA, 32 nt, Human
auggcaccacugcacuccggccuaggcaacga

SEQ ID NO: 336446 - RNA, 32 nt, Human
auggcaccacugcacuucagccugggugacag

SEQ ID NO: 336447 - RNA, 32 nt, Human
auggcaccacugcauuccagccugggugacag

SEQ ID NO: 336448 - RNA, 32 nt, Human
auggcaccacuggacuccagccugggcgacag

SEQ ID NO: 336449 - RNA, 32 nt, Human
auggcaccacuguacuccagccugggugacag

SEQ ID NO: 336450 - RNA, 32 nt, Human
auggcaccauuacacuccagccugggcaacag

SEQ ID NO: 336451 - RNA, 32 nt, Human
auggcaccauugcacuccagccugggugacaa

SEQ ID NO: 336452 - RNA, 32 nt, Human
auggcacccucagaccacacaguagccaaguu

SEQ ID NO: 336453 - RNA, 32 nt, Human
auggcacccugagacagcccagaggugaauag

SEQ ID NO: 336454 - RNA, 32 nt, Human
auggcacccuggaaccgggaaggguggccugu

SEQ ID NO: 336455 - RNA, 32 nt, Human
auggcacccuggcuucucacacaucucaucgu

SEQ ID NO: 336456 - RNA, 32 nt, Human
auggcaccgcugcacuccaaccugggcaacag

SEQ ID NO: 336457 - RNA, 32 nt, Human
auggcaccugcucugauccggugggcuccacg

SEQ ID NO: 336458 - RNA, 32 nt, Human
auggcaccugguguguaacgacacaaucagca

SEQ ID NO: 336459 - RNA, 32 nt, Human
auggcaccuucaccaucuuguagaaucacuuu

SEQ ID NO: 336460 - RNA, 32 nt, Human
auggcacucacuccagccugggcaacaagagc

SEQ ID NO: 336461 - RNA, 32 nt, Human
auggcacucauuaaaaaggaucagagaccauu

SEQ ID NO: 336462 - RNA, 32 nt, Human
auggcacugcacuccagccugggcaacagagu

SEQ ID NO: 336463 - RNA, 32 nt, Human
auggcacugcugcacuccagccugcgggacag

SEQ ID NO: 336464 - RNA, 32 nt, Human
auggcacuggguccagcacaaacacaagguca

SEQ ID NO: 336465 - RNA, 32 nt, Human
auggcacuucaugguccuugaaaaccucggau

SEQ ID NO: 336466 - RNA, 32 nt, Human
auggcagaaaaaccauuuccacuaugcaaagu

SEQ ID NO: 336467 - RNA, 32 nt, Human
auggcagaaaugucauucucuuccauauaugu

SEQ ID NO: 336468 - RNA, 32 nt, Human
auggcagacacugcuucuucucagggaggccc

SEQ ID NO: 336469 - RNA, 32 nt, Human
auggcagacaucaggaaggaggagaggaacca

SEQ ID NO: 336470 - RNA, 32 nt, Human
auggcagaccuugauguuuauuucucaaaugg

SEQ ID NO: 336471 - RNA, 32 nt, Human
auggcagagaaauauacuaucucaccaguauu

SEQ ID NO: 336472 - RNA, 32 nt, Human
auggcagagaugggugugugaggggugaggag

SEQ ID NO: 336473 - RNA, 25 nt, Human
auggcagagguggaggaaaccuuaa

SEQ ID NO: 336474 - RNA, 32 nt, Human
auggcagaugcacaaauugugcagugauguaa

SEQ ID NO: 336475 - RNA, 23 nt, Human
auggcagauugaaaaggaucuca

SEQ ID NO: 336476 - RNA, 22 nt, Human
auggcagcacagauauaccuca

SEQ ID NO: 336477 - RNA, 32 nt, Human
auggcagcacaggcaacaguucagagguagug

SEQ ID NO: 336478 - RNA, 32 nt, Human
auggcagcacuuccaucaaaagacaccauagc

SEQ ID NO: 336479 - RNA, 32 nt, Human
auggcagcagaggcagccuccuacguccuggc

SEQ ID NO: 336480 - RNA, 24 nt, Human
auggcagcagcaugcagaaucuua

SEQ ID NO: 336481 - RNA, 32 nt, Human
auggcagcagucgagagagagugugugaagga

SEQ ID NO: 336482 - RNA, 21 nt, Human
auggcagcauccagggccucg

SEQ ID NO: 336483 - RNA, 23 nt, Human
auggcagcauccuucggaccuca

SEQ ID NO: 336484 - RNA, 32 nt, Human
auggcagccacuguugaguacuguuacagggg

SEQ ID NO: 336485 - RNA, 32 nt, Human
auggcagcgguggcaguggcagcaguggccca

SEQ ID NO: 336486 - RNA, 32 nt, Human
auggcagcuccuggcuccuaucugggacaccu

SEQ ID NO: 336487 - RNA, 32 nt, Human
auggcagcugaaacucacucugugcugggcuu

SEQ ID NO: 336488 - RNA, 32 nt, Human
auggcagcugugugcucagcccgcacaggcag

SEQ ID NO: 336489 - RNA, 22 nt, Human
auggcagcuguugagaaucuca

SEQ ID NO: 336490 - RNA, 32 nt, Human
auggcaggaugcuugucuccagguguggccug

SEQ ID NO: 336491 - RNA, 31 nt, Human
auggcaggauguucuggcacagcagacugga

SEQ ID NO: 336492 - RNA, 32 nt, Human
auggcaggccuggguuuggauuucagaauccu

SEQ ID NO: 336493 - RNA, 32 nt, Human
auggcagggaauggagagagugagccagacag

SEQ ID NO: 336494 - RNA, 32 nt, Human
auggcagggagggcugcacugacauugaugcc

SEQ ID NO: 336495 - RNA, 32 nt, Human
auggcagggccagcagggaggugggcauggca

SEQ ID NO: 336496 - RNA, 32 nt, Human
auggcaggggcagagugcagguggagagaaca

SEQ ID NO: 336497 - RNA, 32 nt, Human
auggcaggggcagagugcagguggagagaaua

SEQ ID NO: 336498 - RNA, 32 nt, Human
auggcaggugagugaaaacguuauaagggacu

SEQ ID NO: 336499 - RNA, 32 nt, Human
auggcaggugugugaguucuguccuagaccug

SEQ ID NO: 336500 - RNA, 32 nt, Human
auggcaguaggcaguggcuggacuggaaccca

SEQ ID NO: 336501 - RNA, 20 nt, Human
auggcaguccuaaccuagca

SEQ ID NO: 336502 - RNA, 32 nt, Human
auggcaguccuggaggcagggggugaggggca

SEQ ID NO: 336503 - RNA, 32 nt, Human
auggcagucgaaggagcuucgucuggcagcag

SEQ ID NO: 336504 - RNA, 32 nt, Human
auggcagugaagagcuuguggaaaagaaaccu

SEQ ID NO: 336505 - RNA, 32 nt, Human
auggcagugaaucuccuuucuguucuacuuua

SEQ ID NO: 336506 - RNA, 32 nt, Human
auggcauaacaaaggcaagacucugccuuaau

SEQ ID NO: 336507 - RNA, 32 nt, Human
auggcauaggccauagaccaggucccugcugc

SEQ ID NO: 336508 - RNA, 32 nt, Human
auggcaucaaggcucacugcagccuggaccuc

SEQ ID NO: 336509 - RNA, 32 nt, Human
auggcaucaaguggcauccaucauaagaucgu

SEQ ID NO: 336510 - RNA, 32 nt, Human
auggcaucagcguuucaugcucugccuuuuag

SEQ ID NO: 336511 - RNA, 32 nt, Human
auggcaucauugcauuccagccugggcaacag

SEQ ID NO: 336512 - RNA, 32 nt, Human
auggcaucccacuugcccacucuccuuccugg

SEQ ID NO: 336513 - RNA, 32 nt, Human
auggcauccugcucugaaucuagacuuuuuag

SEQ ID NO: 336514 - RNA, 32 nt, Human
auggcaucucacuauguugcccaggcugaucu

SEQ ID NO: 336515 - RNA, 32 nt, Human
auggcaucuccucuugagauauguucuucuua

SEQ ID NO: 336516 - RNA, 32 nt, Human
auggcaucugguagggagggagguauaguugg

SEQ ID NO: 336517 - RNA, 32 nt, Human
auggcaugaacccaggaggcagagcuugcagu

SEQ ID NO: 336518 - RNA, 32 nt, Human
auggcaugaacccaggaggcagagcuuguagu

SEQ ID NO: 336519 - RNA, 32 nt, Human
auggcaugauuagauugcaaagcaaugaacuc

SEQ ID NO: 336520 - RNA, 32 nt, Human
auggcauggaaucacugccuccugugauuuga

SEQ ID NO: 336521 - RNA, 32 nt, Human
auggcauggcaauccauccaucaaugagaaga

SEQ ID NO: 336522 - RNA, 32 nt, Human
auggcauggccuuaucgauugcagugggaagc

SEQ ID NO: 336523 - RNA, 32 nt, Human
auggcaugguuuugugccaucuguagcuauaa

SEQ ID NO: 336524 - RNA, 32 nt, Human
auggcauguaccaccuguccuaggaagaccag

SEQ ID NO: 336525 - RNA, 32 nt, Human
auggcauuaccuccguguuucucccuuucgag

SEQ ID NO: 336526 - RNA, 31 nt, Human
auggcauucaauaaacauauguugaaagaau

SEQ ID NO: 336527 - RNA, 32 nt, Human
auggcauucuguagguuuauagaagguuuagc

SEQ ID NO: 336528 - RNA, 32 nt, Human
auggcauugcucagcaacuacuucucccuucc

SEQ ID NO: 336529 - RNA, 19 nt, Human
auggcauuugcauuuucua

SEQ ID NO: 336530 - RNA, 32 nt, Human
auggcauuugucugucucugugucaaagcacu

SEQ ID NO: 336531 - RNA, 32 nt, Human
auggccaaaacaauccagggauuguuaagugc

SEQ ID NO: 336532 - RNA, 32 nt, Human
auggccaacaaaacaugaaacaccuugaaccc

SEQ ID NO: 336533 - RNA, 32 nt, Human
auggccaacaugguaagacccugucucuacua

SEQ ID NO: 336534 - RNA, 31 nt, Human
auggccaacauggugaagccccaucucuacu

SEQ ID NO: 336535 - RNA, 32 nt, Human
auggccaaccuccaccuuccccucucucagcc

SEQ ID NO: 336536 - RNA, 32 nt, Human
auggccaagcugcugggcucuguaucucccac

SEQ ID NO: 336537 - RNA, 32 nt, Human
auggccaauauuuugaaggucuucccaacccu

SEQ ID NO: 336538 - RNA, 32 nt, Human
auggccacaagugcccacagcuggccccaggu

SEQ ID NO: 336539 - RNA, 32 nt, Human
auggccacaaguucuuucccagccucuuccau

SEQ ID NO: 336540 - RNA, 32 nt, Human
auggccacagacaaucugccgucuccuggaaa

SEQ ID NO: 336541 - RNA, 32 nt, Human
auggccacaguacagucugguccuuuuccuuc

SEQ ID NO: 336542 - RNA, 32 nt, Human
auggccaccauccuggguauccagggccccuc

SEQ ID NO: 336543 - RNA, 32 nt, Human
auggccaccccugccaagguuugcuucucuuu

SEQ ID NO: 336544 - RNA, 32 nt, Human
auggccacuaccccacuguuugcucuccugca

SEQ ID NO: 336545 - RNA, 22 nt, Human
auggccagagggccucagggag

SEQ ID NO: 336546 - RNA, 32 nt, Human
auggccaggaaagaagccagcacaggguuaaa

SEQ ID NO: 336547 - RNA, 32 nt, Human
auggccaggagaagggccaggggaauagagcu

SEQ ID NO: 336548 - RNA, 32 nt, Human
auggccagguguacugggugaccaugggcacc

SEQ ID NO: 336549 - RNA, 32 nt, Human
auggccagguucucacacuggcccagagaaaa

SEQ ID NO: 336550 - RNA, 32 nt, Human
auggccaguaaacugagcaagggccuuggaau

SEQ ID NO: 336551 - RNA, 32 nt, Human
auggccaguauggugaaacccugucucuccua

SEQ ID NO: 336552 - RNA, 32 nt, Human
auggccagugaccgcuuucucccuucaagaaa

SEQ ID NO: 336553 - RNA, 32 nt, Human
auggccagugcaagauugcaaaaagacugugc

SEQ ID NO: 336554 - RNA, 32 nt, Human
auggccagugcacuccaaugaugggacaggcc

SEQ ID NO: 336555 - RNA, 32 nt, Human
auggccagugggacuaguguucccuccaucug

SEQ ID NO: 336556 - RNA, 23 nt, Human
auggccaguugauugguuuucua

SEQ ID NO: 336557 - RNA, 32 nt, Human
auggccauagauuugccuugugguguuggauc

SEQ ID NO: 336558 - RNA, 31 nt, Human
auggccauaguacuuuaccuguugaacucuu

SEQ ID NO: 336559 - RNA, 32 nt, Human
auggccauaguuugagccacagagaaagccaa

SEQ ID NO: 336560 - RNA, 32 nt, Human
auggccaugacucuguguaagacagagggcac

SEQ ID NO: 336561 - RNA, 32 nt, Human
auggccaugcugggcuggaguggcuguggggu

SEQ ID NO: 336562 - RNA, 32 nt, Human
auggccaugggcagaggcgaagggcugguggg

SEQ ID NO: 336563 - RNA, 32 nt, Human
auggccauucacccccaggccuggugcuucuc

SEQ ID NO: 336564 - RNA, 32 nt, Human
auggcccaacagcaaacaaaugauggggccac

SEQ ID NO: 336565 - RNA, 32 nt, Human
auggcccaaucagcaugcacuuccucccuucu

SEQ ID NO: 336566 - RNA, 32 nt, Human
auggcccaccagcccaucccagaucuuccuuu

SEQ ID NO: 336567 - RNA, 32 nt, Human
auggcccacccaggccuggagcugggaugcaa

SEQ ID NO: 336568 - RNA, 32 nt, Human
auggcccacuccaaauacgaagugagauccug

SEQ ID NO: 336569 - RNA, 32 nt, Human
auggcccacuggccuuuuucucccccacguca

SEQ ID NO: 336570 - RNA, 32 nt, Human
auggcccagagaggagcucaugugucuaaagu

SEQ ID NO: 336571 - RNA, 32 nt, Human
auggcccagcagacgagacagcaaagaccaag

SEQ ID NO: 336572 - RNA, 32 nt, Human
auggcccagccacugcagcacaggaggcuccg

SEQ ID NO: 336573 - RNA, 32 nt, Human
auggcccagggguguugaggccagcggugaga

SEQ ID NO: 336574 - RNA, 28 nt, Human
auggccccaauucuugccucauccuaug

SEQ ID NO: 336575 - RNA, 32 nt, Human
auggccccacccucaccagccugggcagcagc

SEQ ID NO: 336576 - RNA, 32 nt, Human
auggcccccuccacauaucucagccauuuugc

SEQ ID NO: 336577 - RNA, 28 nt, Human
auggcccccuccgugauccauccaucuc

SEQ ID NO: 336578 - RNA, 32 nt, Human
auggcccccuuagagaccacaggugaugucug

SEQ ID NO: 336579 - RNA, 32 nt, Human
auggccccugggcuggagcccccauggccagc

SEQ ID NO: 336580 - RNA, 32 nt, Human
auggccccugucuuguuuggggagaggggaac

SEQ ID NO: 336581 - RNA, 32 nt, Human
auggccccuguggucugcuuguccuucagccc

SEQ ID NO: 336582 - RNA, 32 nt, Human
auggcccgcaguggcuuuugccccagaaaggg

SEQ ID NO: 336583 - RNA, 32 nt, Human
auggcccgcgcugcgcuccgaggucccgcgcc

SEQ ID NO: 336584 - RNA, 32 nt, Human
auggcccuagcagccaguacagugcccugucu

SEQ ID NO: 336585 - RNA, 32 nt, Human
auggcccuauggcacaguuccacccacagagu

SEQ ID NO: 336586 - RNA, 32 nt, Human
auggcccucccucuccccugacgcacccuccc

SEQ ID NO: 336587 - RNA, 23 nt, Human
auggcccucuugcagaucuucug

SEQ ID NO: 336588 - RNA, 32 nt, Human
auggcccugccuggaccccauggaggccgaau

SEQ ID NO: 336589 - RNA, 32 nt, Human
auggcccugggacacccacagcugcagcaggu

SEQ ID NO: 336590 - RNA, 32 nt, Human
auggccggagcagacacuacagucuucaccag

SEQ ID NO: 336591 - RNA, 32 nt, Human
auggccggcgugagccaccaugcccggcucca

SEQ ID NO: 336592 - RNA, 32 nt, Human
auggccgggcuggggcaucuuucccuccuugg

SEQ ID NO: 336593 - RNA, 32 nt, Human
auggccggggccugaguggacgugaggcaccg

SEQ ID NO: 336594 - RNA, 32 nt, Human
auggccuaauuuucaccuuugcacccaguuga

SEQ ID NO: 336595 - RNA, 32 nt, Human
auggccucacuuuauugaagugcaaaauaaac

SEQ ID NO: 336596 - RNA, 24 nt, Human
auggccucagcugcagaucuccug

SEQ ID NO: 336597 - RNA, 32 nt, Human
auggccucagggccuggugaagucugcuacuc

SEQ ID NO: 336598 - RNA, 28 nt, Human
auggccucaggugugauccgcccgccuc

SEQ ID NO: 336599 - RNA, 32 nt, Human
auggccucagugccuccauaaaaagcuuaagu

SEQ ID NO: 336600 - RNA, 32 nt, Human
auggccucauugguaucagcacucuggccugc

SEQ ID NO: 336601 - RNA, 32 nt, Human
auggccuccagaggaggggugguguccuucuc

SEQ ID NO: 336602 - RNA, 32 nt, Human
auggccuccagccaggcaccugggcgucccuu

SEQ ID NO: 336603 - RNA, 32 nt, Human
auggccucccaaagugcugggauuacaggcgu

SEQ ID NO: 336604 - RNA, 32 nt, Human
auggccucccaaagugcugggauuacaggcuc

SEQ ID NO: 336605 - RNA, 32 nt, Human
auggccucggacaggcagaggcugugaaauac

SEQ ID NO: 336606 - RNA, 32 nt, Human
auggccucugcaagccucuccuccaccuucac

SEQ ID NO: 336607 - RNA, 32 nt, Human
auggccucugcacuccagccugggugacagag

SEQ ID NO: 336608 - RNA, 32 nt, Human
auggccucugcagauuuuccugaacuucugcu

SEQ ID NO: 336609 - RNA, 32 nt, Human
auggccugaagaugcagggcagaggaauugcc

SEQ ID NO: 336610 - RNA, 32 nt, Human
auggccugaagcaagugaagaaucacaaaaga

SEQ ID NO: 336611 - RNA, 32 nt, Human
auggccugaagcaaguggagaaucacaaaaga

SEQ ID NO: 336612 - RNA, 32 nt, Human
auggccugaccaggaacuacugcaggaaucca

SEQ ID NO: 336613 - RNA, 32 nt, Human
auggccugcacccuccugcagugcaguugcug

SEQ ID NO: 336614 - RNA, 32 nt, Human
auggccugccaagaguugcaggagacccagga

SEQ ID NO: 336615 - RNA, 32 nt, Human
auggccugcuaccuagcaugugucuagcucaa

SEQ ID NO: 336616 - RNA, 32 nt, Human
auggccugggaggccagaaugaaguggguauu

SEQ ID NO: 336617 - RNA, 32 nt, Human
auggccugggagguugguuugggauugggguu

SEQ ID NO: 336618 - RNA, 32 nt, Human
auggccugggggccaagccucacccugcggug

SEQ ID NO: 336619 - RNA, 21 nt, Human
auggccuggugcccccaccug

SEQ ID NO: 336620 - RNA, 32 nt, Human
auggccuguagcaaugaggcugugcauuccua

SEQ ID NO: 336621 - RNA, 32 nt, Human
auggccuuagccuuugaaaauauuuuaaaaua

SEQ ID NO: 336622 - RNA, 32 nt, Human
auggccuucuuagagcagagagaggaguaugu

SEQ ID NO: 336623 - RNA, 32 nt, Human
auggccuucuucccugcuaccucucuuccugg

SEQ ID NO: 336624 - RNA, 32 nt, Human
auggccuuggaaauggggccagggcaggccca

SEQ ID NO: 336625 - RNA, 32 nt, Human
auggccuugugucccucgggcaugacaggcag

SEQ ID NO: 336626 - RNA, 32 nt, Human
auggccuuuauuucuccucuuccagugggagu

SEQ ID NO: 336627 - RNA, 32 nt, Human
auggcgacaggucauuuuaugaccuggaggca

SEQ ID NO: 336628 - RNA, 32 nt, Human
auggcgagcaccuugcaggcagccuucugauc

SEQ ID NO: 336629 - RNA, 32 nt, Human
auggcgagcauccuggccaacauggugaaacc

SEQ ID NO: 336630 - RNA, 32 nt, Human
auggcgccacuacacuccagccugggcaacag

SEQ ID NO: 336631 - RNA, 32 nt, Human
auggcgccacuacacuccagccugggcgacag

SEQ ID NO: 336632 - RNA, 32 nt, Human
auggcgccacugcacuccagcccgggcgacag

SEQ ID NO: 336633 - RNA, 32 nt, Human
auggcgccacugcacuccagccuaggcaacag

SEQ ID NO: 336634 - RNA, 32 nt, Human
auggcgccacugcacuccagccugagugacag

SEQ ID NO: 336635 - RNA, 32 nt, Human
auggcgccacugcacuccagccugggcgacag

SEQ ID NO: 336636 - RNA, 32 nt, Human
auggcgccacugcacuccagccugggcgucag

SEQ ID NO: 336637 - RNA, 32 nt, Human
auggcgccacugcacuccagccuggguaacag

SEQ ID NO: 336638 - RNA, 32 nt, Human
auggcgccacugcacuccagccugggugacag

SEQ ID NO: 336639 - RNA, 32 nt, Human
auggcgccacugcacuccagccugggugagag

SEQ ID NO: 336640 - RNA, 32 nt, Human
auggcgccacugcacuccagucugggcaacag

SEQ ID NO: 336641 - RNA, 32 nt, Human
auggcgccacugcacuccagucugggcgauag

SEQ ID NO: 336642 - RNA, 32 nt, Human
auggcgccacugcacucccgucugggggagag

SEQ ID NO: 336643 - RNA, 32 nt, Human
auggcgccacugcacuucagccuuggagacag

SEQ ID NO: 336644 - RNA, 32 nt, Human
auggcgccacugcauuccagccugggcaacag

SEQ ID NO: 336645 - RNA, 32 nt, Human
auggcgccacugcgcuccagccugggcaacag

SEQ ID NO: 336646 - RNA, 32 nt, Human
auggcgccacuucacugcagccuggguggcag

SEQ ID NO: 336647 - RNA, 32 nt, Human
auggcgccauugcacuccagccugggcaaaaa

SEQ ID NO: 336648 - RNA, 32 nt, Human
auggcgccauugcacuccagccugggugacaa

SEQ ID NO: 336649 - RNA, 32 nt, Human
auggcgccauuucacuccagccugggcgacag

SEQ ID NO: 336650 - RNA, 32 nt, Human
auggcgcccagccugggccaaccuuuucugag

SEQ ID NO: 336651 - RNA, 32 nt, Human
auggcgcgacugcacuccagccugggcgagag

SEQ ID NO: 336652 - RNA, 32 nt, Human
auggcgcuauugcacuccagucuggguaacag

SEQ ID NO: 336653 - RNA, 32 nt, Human
auggcgcuccgauccccuccucccucucuccg

SEQ ID NO: 336654 - RNA, 32 nt, Human
auggcgcugcugcacucaagcuuggaugacag

SEQ ID NO: 336655 - RNA, 32 nt, Human
auggcggaaagaaggcaccagggcacagugga

SEQ ID NO: 336656 - RNA, 32 nt, Human
auggcggaacccugucucuaccaaaauuacaa

SEQ ID NO: 336657 - RNA, 25 nt, Human
auggcggcagcggugcugacggacc

SEQ ID NO: 336658 - RNA, 32 nt, Human
auggcggcccugucuucuuggcccuggcacug

SEQ ID NO: 336659 - RNA, 25 nt, Human
auggcggccucucagguccuggggg

SEQ ID NO: 336660 - RNA, 22 nt, Human
auggcggcucacgccuguaauc

SEQ ID NO: 336661 - RNA, 32 nt, Human
auggcgggaacccaggaggcagagguugcagu

SEQ ID NO: 336662 - RNA, 32 nt, Human
auggcgggaaccugggaggcggagcuuacagu

SEQ ID NO: 336663 - RNA, 32 nt, Human
auggcgggagagaagaagcgcaggcacaggaa

SEQ ID NO: 336664 - RNA, 32 nt, Human
auggcgggcuucagccagaccugcugagaccu

SEQ ID NO: 336665 - RNA, 32 nt, Human
auggcggggaaagaggcaaggagcagaguccu

SEQ ID NO: 336666 - RNA, 32 nt, Human
auggcggggaggaggaggagaaggcggcggcg

SEQ ID NO: 336667 - RNA, 32 nt, Human
auggcgguggagguggugguuguagugugaug

SEQ ID NO: 336668 - RNA, 32 nt, Human
auggcguccugcccuugcuccagccugacaac

SEQ ID NO: 336669 - RNA, 32 nt, Human
auggcgucuuagucaucuccccagugugcccu

SEQ ID NO: 336670 - RNA, 32 nt, Human
auggcgugaacccagcgggaagagguugcagu

SEQ ID NO: 336671 - RNA, 32 nt, Human
auggcgugaacccaggaggcagagcuugcagu

SEQ ID NO: 336672 - RNA, 32 nt, Human
auggcgugaacccaggaggcagagguugcagu

SEQ ID NO: 336673 - RNA, 32 nt, Human
auggcgugaacccaggaggcggagguugcagu

SEQ ID NO: 336674 - RNA, 32 nt, Human
auggcgugaacccaggagguggagcuugcagu

SEQ ID NO: 336675 - RNA, 31 nt, Human
auggcgugacuucucgugcacagggcugguu

SEQ ID NO: 336676 - RNA, 32 nt, Human
auggcgugagccaccguaccuggccauauuuu

SEQ ID NO: 336677 - RNA, 32 nt, Human
auggcgugagccacuguaccuggccauauuuu

SEQ ID NO: 336678 - RNA, 32 nt, Human
auggcguggcagcugcgugaauaccaggagcu

SEQ ID NO: 336679 - RNA, 32 nt, Human
auggcguggccuuaucgauugcagugggaagu

SEQ ID NO: 336680 - RNA, 31 nt, Human
auggcguggcucagcugucuguugaaguugu

SEQ ID NO: 336681 - RNA, 32 nt, Human
auggcgugguuauguggaguuguaucucuauc

SEQ ID NO: 336682 - RNA, 32 nt, Human
auggcguucccugagccuguuccccaacugug

SEQ ID NO: 336683 - RNA, 32 nt, Human
auggcguucgccgggcuggagcgaguacauua

SEQ ID NO: 336684 - RNA, 32 nt, Human
auggcuaacauggugaaaccccaucucuacua

SEQ ID NO: 336685 - RNA, 32 nt, Human
auggcuaauaauauucaggaccucuuuaugug

SEQ ID NO: 336686 - RNA, 21 nt, Human
auggcuagaagagaccugcca

SEQ ID NO: 336687 - RNA, 32 nt, Human
auggcuaguuaggaagaaaggaggugggauaa

SEQ ID NO: 336688 - RNA, 30 nt, Human
auggcuauucuguagacagaaagacaacag

SEQ ID NO: 336689 - RNA, 25 nt, Human
auggcucaauuuggaggacagaaga

SEQ ID NO: 336690 - RNA, 32 nt, Human
auggcucacaccuguaucccaacacuuuggga

SEQ ID NO: 336691 - RNA, 30 nt, Human
auggcucacgccuguagucccagagcuuug

SEQ ID NO: 336692 - RNA, 32 nt, Human
auggcucacucacuuuucuauuuuggaauuac

SEQ ID NO: 336693 - RNA, 32 nt, Human
auggcucacugcaaccuccaccuccuggguuc

SEQ ID NO: 336694 - RNA, 32 nt, Human
auggcucacugcaaccucugccucccgguuuc

SEQ ID NO: 336695 - RNA, 32 nt, Human
auggcucacugcaaccuugaccucccaggcuc

SEQ ID NO: 336696 - RNA, 32 nt, Human
auggcucacugcaaccuugacgucccagguuc

SEQ ID NO: 336697 - RNA, 32 nt, Human
auggcucacugcagccccaaccuucagggcuc

SEQ ID NO: 336698 - RNA, 32 nt, Human
auggcucacugcagccccgaacuacugggcuc

SEQ ID NO: 336699 - RNA, 32 nt, Human
auggcucacugcagccucaaccucccaggcuc

SEQ ID NO: 336700 - RNA, 32 nt, Human
auggcucacugcagccucaaccugcugggcuc

SEQ ID NO: 336701 - RNA, 32 nt, Human
auggcucacugcagccuccaccucccaggcuc

SEQ ID NO: 336702 - RNA, 32 nt, Human
auggcucacugcagccuccaccuccuugacuc

SEQ ID NO: 336703 - RNA, 32 nt, Human
auggcucacugcagccucgaacuccugggcuc

SEQ ID NO: 336704 - RNA, 32 nt, Human
auggcucacugcagccucgacaccuggguuca

SEQ ID NO: 336705 - RNA, 32 nt, Human
auggcucacugcagccucgaccucccaggcuc

SEQ ID NO: 336706 - RNA, 32 nt, Human
auggcucacugcagccuugaacucccagacuc

SEQ ID NO: 336707 - RNA, 32 nt, Human
auggcucacugcagccuugaacuccugagcuc

SEQ ID NO: 336708 - RNA, 32 nt, Human
auggcucacugcagccuugaccuuccagccug

SEQ ID NO: 336709 - RNA, 32 nt, Human
auggcucacugcagccuugacuucucaggcuu

SEQ ID NO: 336710 - RNA, 32 nt, Human
auggcucacugcagucucaaucucucuggcuc

SEQ ID NO: 336711 - RNA, 32 nt, Human
auggcucacugcagucucugccucccaggcuc

SEQ ID NO: 336712 - RNA, 32 nt, Human
auggcucacugcaguuucaaccucccagauuc

SEQ ID NO: 336713 - RNA, 32 nt, Human
auggcucacuguagccacaaccucucaggcuc

SEQ ID NO: 336714 - RNA, 32 nt, Human
auggcucagcacuugcucaucuuggauggcuu

SEQ ID NO: 336715 - RNA, 32 nt, Human
auggcucaggggcaaugugagguguguugcca

SEQ ID NO: 336716 - RNA, 32 nt, Human
auggcucagguguggagaaggguuucagaaca

SEQ ID NO: 336717 - RNA, 24 nt, Human
auggcucaugccuguaaucccagc

SEQ ID NO: 336718 - RNA, 32 nt, Human
auggcuccaaagguuaaaugaagcaggaaaaa

SEQ ID NO: 336719 - RNA, 32 nt, Human
auggcuccagcaccaucugccucugcaguucu

SEQ ID NO: 336720 - RNA, 32 nt, Human
auggcuccaugcucaccagccucgccgaggag

SEQ ID NO: 336721 - RNA, 32 nt, Human
auggcucccacuccucccuccuuucacuucuc

SEQ ID NO: 336722 - RNA, 32 nt, Human
auggcuccccuggaacaggagggagagccaag

SEQ ID NO: 336723 - RNA, 32 nt, Human
auggcucccucaggaagaagcucuggaguggg

SEQ ID NO: 336724 - RNA, 32 nt, Human
auggcucccugaccacccaacucugaaacaau

SEQ ID NO: 336725 - RNA, 32 nt, Human
auggcuccuccucuuccuucugcuccaagaag

SEQ ID NO: 336726 - RNA, 32 nt, Human
auggcucuaaucucacacauuuacuuacuaaa

SEQ ID NO: 336727 - RNA, 32 nt, Human
auggcucuagcugggcugccugggugagaugc

SEQ ID NO: 336728 - RNA, 20 nt, Human
auggcucucaccauuuccua

SEQ ID NO: 336729 - RNA, 32 nt, Human
auggcucuccacccagcccgcuccugacccuu

SEQ ID NO: 336730 - RNA, 32 nt, Human
auggcucucccuccucccuccccauuucauug

SEQ ID NO: 336731 - RNA, 32 nt, Human
auggcucugagcucccugaggugggggcgagg

SEQ ID NO: 336732 - RNA, 32 nt, Human
auggcucugcaccagccggcccccaggagguc

SEQ ID NO: 336733 - RNA, 32 nt, Human
auggcucugucaaugucaggcccgagaacagc

SEQ ID NO: 336734 - RNA, 32 nt, Human
auggcucugucucuccugcuucuuuaaccuga

SEQ ID NO: 336735 - RNA, 32 nt, Human
auggcucuguggacaccaggaggucagggcac

SEQ ID NO: 336736 - RNA, 32 nt, Human
auggcucuguggcuggagugcagccauccagu

SEQ ID NO: 336737 - RNA, 32 nt, Human
auggcucuuucuauccugcucuucuguugaaa

SEQ ID NO: 336738 - RNA, 32 nt, Human
auggcugaacugggggcccacuguggagagcu

SEQ ID NO: 336739 - RNA, 32 nt, Human
auggcugaagacagaaucuagagccuucaaau

SEQ ID NO: 336740 - RNA, 32 nt, Human
auggcugaaggcggaggugcagggcagcgggg

SEQ ID NO: 336741 - RNA, 32 nt, Human
auggcugaaguuggccaccuugcuugagggac

SEQ ID NO: 336742 - RNA, 32 nt, Human
auggcugaccguggcccagccucugcaacagc

SEQ ID NO: 336743 - RNA, 32 nt, Human
auggcugacuuccucacuauccucuucacaug

SEQ ID NO: 336744 - RNA, 32 nt, Human
auggcugagacaccuaguccuccaggcacuga

SEQ ID NO: 336745 - RNA, 32 nt, Human
auggcugagagccaggcuuccuuccuggucuc

SEQ ID NO: 336746 - RNA, 32 nt, Human
auggcugagaugaccugguccuaggacacccu

SEQ ID NO: 336747 - RNA, 32 nt, Human
auggcugagggagggggcuaagagaggagcaa

SEQ ID NO: 336748 - RNA, 32 nt, Human
auggcugauguggcauuuaagggaagagagug

SEQ ID NO: 336749 - RNA, 32 nt, Human
auggcugcacucuagccugggugacaguguga

SEQ ID NO: 336750 - RNA, 32 nt, Human
auggcugcagcccucgaccuccugggcucaag

SEQ ID NO: 336751 - RNA, 32 nt, Human
auggcugcagugccagccuggggcagcaggua

SEQ ID NO: 336752 - RNA, 32 nt, Human
auggcugcaguggaugugggaaagccuacagu

SEQ ID NO: 336753 - RNA, 32 nt, Human
auggcugccaacucccaaucucccaggaaggc

SEQ ID NO: 336754 - RNA, 32 nt, Human
auggcugccaucaagccuuuucuggauccagc

SEQ ID NO: 336755 - RNA, 32 nt, Human
auggcugccuguaaucccagcacuuugggagg

SEQ ID NO: 336756 - RNA, 32 nt, Human
auggcugcgccaagcccuucgucuucacccag

SEQ ID NO: 336757 - RNA, 32 nt, Human
auggcugcuaucaauucuuccuuucccuaugu

SEQ ID NO: 336758 - RNA, 32 nt, Human
auggcugcucagacuggcauccaggcuuugcu

SEQ ID NO: 336759 - RNA, 32 nt, Human
auggcugcucuaucuugggcuguaucaaggga

SEQ ID NO: 336760 - RNA, 32 nt, Human
auggcugcuuagagucagccuggguggcacca

SEQ ID NO: 336761 - RNA, 32 nt, Human
auggcugcuugccuggcccaaccuagcguucu

SEQ ID NO: 336762 - RNA, 32 nt, Human
auggcuggaauagaauagaaacuuccaaaauu

SEQ ID NO: 336763 - RNA, 32 nt, Human
auggcuggacaugggugggcucugaugcagaa

SEQ ID NO: 336764 - RNA, 32 nt, Human
auggcuggccugagcccaucucagccuccugc

SEQ ID NO: 336765 - RNA, 32 nt, Human
auggcugggaagagaggaggaguggcagaaga

SEQ ID NO: 336766 - RNA, 32 nt, Human
auggcugggcaggcacaggcagugaggccgag

SEQ ID NO: 336767 - RNA, 32 nt, Human
auggcuggggagagguggaggcugacagcuga

SEQ ID NO: 336768 - RNA, 32 nt, Human
auggcuggggagcagcaaagcaguucauuagg

SEQ ID NO: 336769 - RNA, 21 nt, Human
auggcuggggccgcugggguc

SEQ ID NO: 336770 - RNA, 32 nt, Human
auggcuggggcucuugagcuauaaguggcacc

SEQ ID NO: 336771 - RNA, 32 nt, Human
auggcugggucucccccuaccucuuccagcuc

SEQ ID NO: 336772 - RNA, 32 nt, Human
auggcugguggcagagguagaaaggacauugg

SEQ ID NO: 336773 - RNA, 28 nt, Human
auggcuguaagugcuggccucauuucgc

SEQ ID NO: 336774 - RNA, 32 nt, Human
auggcugugacccugggcugacccgcccagug

SEQ ID NO: 336775 - RNA, 32 nt, Human
auggcugugacggauaagggguguggggugcg

SEQ ID NO: 336776 - RNA, 32 nt, Human
auggcuguggugagcaacugaacgagccuacg

SEQ ID NO: 336777 - RNA, 32 nt, Human
auggcuguguguggaauugcuugccaaagaag

SEQ ID NO: 336778 - RNA, 32 nt, Human
auggcuuaacacaacagaaacuuauuugcuua

SEQ ID NO: 336779 - RNA, 32 nt, Human
auggcuuagcccaagugggaggcugccugauu

SEQ ID NO: 336780 - RNA, 32 nt, Human
auggcuuaguuuucauacacagccugggcugg

SEQ ID NO: 336781 - RNA, 32 nt, Human
auggcuuauuuccuuugccaucagggcuuucc

SEQ ID NO: 336782 - RNA, 32 nt, Human
auggcuucaagggaaacucccacccucaauau

SEQ ID NO: 336783 - RNA, 32 nt, Human
auggcuucaguuaucacuuuugggugucugua

SEQ ID NO: 336784 - RNA, 32 nt, Human
auggcuuccaucuccaacagaacacaaggucg

SEQ ID NO: 336785 - RNA, 32 nt, Human
auggcuuccauuuggcuguuucuaaguuguau

SEQ ID NO: 336786 - RNA, 25 nt, Human
auggcuucccaggaguuugagguug

SEQ ID NO: 336787 - RNA, 32 nt, Human
auggcuucuaaaguaguccuaagaacaugguu

SEQ ID NO: 336788 - RNA, 32 nt, Human
auggcuucucagggcaugccacaaguuaaagg

SEQ ID NO: 336789 - RNA, 32 nt, Human
auggcuucucauuaugggagcacuugguuaaa

SEQ ID NO: 336790 - RNA, 32 nt, Human
auggcuucucccgacccucuggcugccccggu

SEQ ID NO: 336791 - RNA, 32 nt, Human
auggcuugaacccaagagguggaggcugaagu

SEQ ID NO: 336792 - RNA, 32 nt, Human
auggcuugaacccagcagauggagguugcagu

SEQ ID NO: 336793 - RNA, 32 nt, Human
auggcuugaacccaggaggcagagguugcagu

SEQ ID NO: 336794 - RNA, 32 nt, Human
auggcuugaacccaggagguggagguugcggu

SEQ ID NO: 336795 - RNA, 32 nt, Human
auggcuugaaccccagaggcggagguugcagu

SEQ ID NO: 336796 - RNA, 32 nt, Human
auggcuugaacccggaaggcggagcuugcagu

SEQ ID NO: 336797 - RNA, 32 nt, Human
auggcuugaacccgggaggcagagguugcagu

SEQ ID NO: 336798 - RNA, 32 nt, Human
auggcuugaacccgggaggcagagguugcugu

SEQ ID NO: 336799 - RNA, 32 nt, Human
auggcuugaacccgggaggcggagcuugcagu

SEQ ID NO: 336800 - RNA, 32 nt, Human
auggcuugaacccgggaggcggagguugcagu

SEQ ID NO: 336801 - RNA, 32 nt, Human
auggcuugaacccgggagguggagguugcagu

SEQ ID NO: 336802 - RNA, 32 nt, Human
auggcuugagcccaggagguggagguugcagu

SEQ ID NO: 336803 - RNA, 32 nt, Human
auggcuugagcccaggagguugaggcugcagu

SEQ ID NO: 336804 - RNA, 32 nt, Human
auggcuugagugugugaauaugaugugugcac

SEQ ID NO: 336805 - RNA, 32 nt, Human
auggcuugggccagaagcacuugugugucacc

SEQ ID NO: 336806 - RNA, 32 nt, Human
auggcuuggugucuuucuuguuucauggcugu

SEQ ID NO: 336807 - RNA, 32 nt, Human
auggcuugugugaaaacugagcagguguuugu

SEQ ID NO: 336808 - RNA, 32 nt, Human
auggcuuucuguagccacaccugugaggcgug

SEQ ID NO: 336809 - RNA, 32 nt, Human
auggcuuucuguagucuuuagcaagacacaag

SEQ ID NO: 336810 - RNA, 32 nt, Human
auggcuuugcaagaagaugacauuucagaaga

SEQ ID NO: 336811 - RNA, 32 nt, Human
auggcuuuggaaggcggaguucaggcugagga

SEQ ID NO: 336812 - RNA, 32 nt, Human
auggcuuuuaucuaccaucaaccugauaaggc

SEQ ID NO: 336813 - RNA, 32 nt, Human
auggcuuuuauuccuuuccacauuuccuaugu

SEQ ID NO: 336814 - RNA, 32 nt, Human
augggaaaaauguccagaaagccauguuccug

SEQ ID NO: 336815 - RNA, 32 nt, Human
augggaaaacugccaauauagaaaaauaaaaa

SEQ ID NO: 336816 - RNA, 32 nt, Human
augggaaaauucagauauuuucuuaguagugc

SEQ ID NO: 336817 - RNA, 21 nt, Human
augggaaacauccauuugcuu

SEQ ID NO: 336818 - RNA, 32 nt, Human
augggaaagacacccucagaggcacaagauuc

SEQ ID NO: 336819 - RNA, 32 nt, Human
augggaaagcacaguguccucuaaagaaacuu

SEQ ID NO: 336820 - RNA, 32 nt, Human
augggaaagcgaagaagagaagagggaugugu

SEQ ID NO: 336821 - RNA, 32 nt, Human
augggaaagcugaucuauaaagaggcauucug

SEQ ID NO: 336822 - RNA, 32 nt, Human
augggaaagggaggguaggaagagggagaagu

SEQ ID NO: 336823 - RNA, 32 nt, Human
augggaaaguuccugguacugaagggguccau

SEQ ID NO: 336824 - RNA, 32 nt, Human
augggaaauagcccuggauuggguagugggug

SEQ ID NO: 336825 - RNA, 32 nt, Human
augggaaauaggggacaguaagcacaaugccc

SEQ ID NO: 336826 - RNA, 23 nt, Human
augggaacaacagacacugggga

SEQ ID NO: 336827 - RNA, 32 nt, Human
augggaacaagugcccucagcaagaagccgug

SEQ ID NO: 336828 - RNA, 32 nt, Human
augggaaccuagaagagaggggauaccagguu

SEQ ID NO: 336829 - RNA, 32 nt, Human
augggaacgaggcagaggaaauagagaaauuu

SEQ ID NO: 336830 - RNA, 32 nt, Human
augggaacgcagcccuccucaguggcaccugg

SEQ ID NO: 336831 - RNA, 32 nt, Human
augggaacggcagaggcuggcaggugacugaa

SEQ ID NO: 336832 - RNA, 32 nt, Human
augggaacugccucuuuccuguuguuguuaau

SEQ ID NO: 336833 - RNA, 32 nt, Human
augggaagaagcaggagcccugucuggcugua

SEQ ID NO: 336834 - RNA, 32 nt, Human
augggaagaaggaggaauggagggucagggcu

SEQ ID NO: 336835 - RNA, 32 nt, Human
augggaagaaggcagaaggcccaggggcuuug

SEQ ID NO: 336836 - RNA, 32 nt, Human
augggaagaaguaguccucucuuccuucuccu

SEQ ID NO: 336837 - RNA, 32 nt, Human
augggaagaccucacaucucagagcucaucua

SEQ ID NO: 336838 - RNA, 32 nt, Human
augggaagagaacugggcugacuccaggaccu

SEQ ID NO: 336839 - RNA, 32 nt, Human
augggaagagcagaaggccuuggugggggugg

SEQ ID NO: 336840 - RNA, 32 nt, Human
augggaagaucacuugagcucaggaguaugag

SEQ ID NO: 336841 - RNA, 32 nt, Human
augggaagaugugacagaaccaggacacuacu

SEQ ID NO: 336842 - RNA, 32 nt, Human
augggaagccuccucagcguggguucuuggaa

SEQ ID NO: 336843 - RNA, 22 nt, Human
augggaagcucucacuaaaaca

SEQ ID NO: 336844 - RNA, 32 nt, Human
augggaagcugaggcaggagaaucaccugaac

SEQ ID NO: 336845 - RNA, 32 nt, Human
augggaaggaacccccucaccaccugcccggc

SEQ ID NO: 336846 - RNA, 32 nt, Human
augggaaggagaagcaguggcuuuugugggca

SEQ ID NO: 336847 - RNA, 32 nt, Human
augggaagggugaggaagggcuggggccaguc

SEQ ID NO: 336848 - RNA, 32 nt, Human
augggaagugaagccaaccgaggcagaggugg

SEQ ID NO: 336849 - RNA, 32 nt, Human
augggaagugugagacacuggaaggcaagaaa

SEQ ID NO: 336850 - RNA, 32 nt, Human
augggaaguuaggaaagauaugggaagaaugg

SEQ ID NO: 336851 - RNA, 32 nt, Human
augggaaguugcaugcugccuccuggguuuua

SEQ ID NO: 336852 - RNA, 32 nt, Human
augggaaguuguuccuuugcucucucgcgccc

SEQ ID NO: 336853 - RNA, 32 nt, Human
augggaaucaggcaugugucccuuccaagcug

SEQ ID NO: 336854 - RNA, 32 nt, Human
augggaaugggguuuggagcagcccugccccu

SEQ ID NO: 336855 - RNA, 32 nt, Human
augggacaaaggacauuuguuggagggguggg

SEQ ID NO: 336856 - RNA, 32 nt, Human
augggacaaaggacggaggucuaggaagaggg

SEQ ID NO: 336857 - RNA, 32 nt, Human
augggacaagaagcugagucucagagagagaa

SEQ ID NO: 336858 - RNA, 32 nt, Human
augggacaagggaggcagagucuggaguuacg

SEQ ID NO: 336859 - RNA, 32 nt, Human
augggacacagcaggacaggaacgguuccagu

SEQ ID NO: 336860 - RNA, 32 nt, Human
augggacacauggucugucaaugagagcauaa

SEQ ID NO: 336861 - RNA, 32 nt, Human
augggacacuccuuuucuguuccucaguuguc

SEQ ID NO: 336862 - RNA, 32 nt, Human
augggacacugcagauaaaaucacaaaaacca

SEQ ID NO: 336863 - RNA, 32 nt, Human
augggacacuugacagugacuugaaacauuug

SEQ ID NO: 336864 - RNA, 31 nt, Human
augggacacuuuuucugaaugaagagauuga

SEQ ID NO: 336865 - RNA, 32 nt, Human
augggacagagugacauuucuccucugugcgg

SEQ ID NO: 336866 - RNA, 32 nt, Human
augggacaggaaauuuuccaagacgcuuuugg

SEQ ID NO: 336867 - RNA, 32 nt, Human
augggacaggaggccaaacacaucucaguaug

SEQ ID NO: 336868 - RNA, 32 nt, Human
augggacaugcagccauguuggaaagcaguuu

SEQ ID NO: 336869 - RNA, 32 nt, Human
augggaccacuucuagaaaucuuucagcuguc

SEQ ID NO: 336870 - RNA, 22 nt, Human
augggaccaggaugguuuuuug

SEQ ID NO: 336871 - RNA, 32 nt, Human
augggaccaguucugcugccuaagaaggucug

SEQ ID NO: 336872 - RNA, 32 nt, Human
augggaccccucucacacuuugucacuggaau

SEQ ID NO: 336873 - RNA, 32 nt, Human
augggacccuggaggcagagcuggagccacgg

SEQ ID NO: 336874 - RNA, 32 nt, Human
augggacccuggcaagugaccaaauccucucu

SEQ ID NO: 336875 - RNA, 32 nt, Human
augggaccgaggggcuggaggagaggcggagc

SEQ ID NO: 336876 - RNA, 32 nt, Human
augggacggucacccagcagugccgggcuggg

SEQ ID NO: 336877 - RNA, 32 nt, Human
augggacuaaaaaggccaggcgugguggcuca

SEQ ID NO: 336878 - RNA, 32 nt, Human
augggacucuuggaggauacccagugucuauu

SEQ ID NO: 336879 - RNA, 32 nt, Human
augggacugcacuccagccugggugacagagc

SEQ ID NO: 336880 - RNA, 32 nt, Human
augggacugcgccggauccggugacagcaggg

SEQ ID NO: 336881 - RNA, 32 nt, Human
augggacugggcagaugcaucugggaaguaac

SEQ ID NO: 336882 - RNA, 32 nt, Human
augggacuucuucccuuccuccucagcccccg

SEQ ID NO: 336883 - RNA, 32 nt, Human
augggagaacugcggagcuugccccucggaaa

SEQ ID NO: 336884 - RNA, 32 nt, Human
augggagaaucuuaagaauuucacuacugaag

SEQ ID NO: 336885 - RNA, 32 nt, Human
augggagacagaaaccugcgucauaccugcuu

SEQ ID NO: 336886 - RNA, 32 nt, Human
augggagacaggagagaugagccccaggaccc

SEQ ID NO: 336887 - RNA, 32 nt, Human
augggagagaggaggcuuugacugggcugccu

SEQ ID NO: 336888 - RNA, 32 nt, Human
augggagagccagcagggguucuggagaaaaa

SEQ ID NO: 336889 - RNA, 32 nt, Human
augggagaggggcugagggggagccaagggug

SEQ ID NO: 336890 - RNA, 32 nt, Human
augggagauaauuuauuuuaaaggacagaauu

SEQ ID NO: 336891 - RNA, 32 nt, Human
augggagaugagauagaaaguguuaggaguua

SEQ ID NO: 336892 - RNA, 32 nt, Human
augggagcacacagagagauggcagccaccua

SEQ ID NO: 336893 - RNA, 32 nt, Human
augggagcacccuggcaccugggagcacagug

SEQ ID NO: 336894 - RNA, 32 nt, Human
augggagcaggaggagaagauacgagagcagg

SEQ ID NO: 336895 - RNA, 32 nt, Human
augggagcaggcaccagcuauggagagggaua

SEQ ID NO: 336896 - RNA, 32 nt, Human
augggagcagguuggagggagggagagccaau

SEQ ID NO: 336897 - RNA, 32 nt, Human
augggagcauaguacugggaaaccccagaccu

SEQ ID NO: 336898 - RNA, 21 nt, Human
augggagccaggccacaggga

SEQ ID NO: 336899 - RNA, 32 nt, Human
augggagccaggccacagggaggaggcuucuu

SEQ ID NO: 336900 - RNA, 32 nt, Human
augggagcccacaguacugggaaaggggaguu

SEQ ID NO: 336901 - RNA, 32 nt, Human
augggagccgggacugcucagcaaagauggau

SEQ ID NO: 336902 - RNA, 32 nt, Human
augggagccugaggcaugagaaucacuugaac

SEQ ID NO: 336903 - RNA, 32 nt, Human
augggagccugccuggugagggguccaguggu

SEQ ID NO: 336904 - RNA, 32 nt, Human
augggagcgaaguaaggagaccccaccugagc

SEQ ID NO: 336905 - RNA, 32 nt, Human
augggagcuggaguuaaaaccccagccagagc

SEQ ID NO: 336906 - RNA, 30 nt, Human
augggaggaagccgcgggguggagcagggg

SEQ ID NO: 336907 - RNA, 32 nt, Human
augggaggaauaggauauaagcaguugaggaa

SEQ ID NO: 336908 - RNA, 32 nt, Human
augggaggagacaaggagcugaaggaguaguu

SEQ ID NO: 336909 - RNA, 32 nt, Human
augggaggagcagcaaugucauauuacaaaag

SEQ ID NO: 336910 - RNA, 32 nt, Human
augggaggaggacauggagcugauggagucca

SEQ ID NO: 336911 - RNA, 32 nt, Human
augggaggaggcgggaucugcucugaggcccu

SEQ ID NO: 336912 - RNA, 32 nt, Human
augggaggagggaggggaaagugaagagggaa

SEQ ID NO: 336913 - RNA, 32 nt, Human
augggaggaguuaaagagguuggaagggaaga

SEQ ID NO: 336914 - RNA, 32 nt, Human
augggaggaucacuugaacccaggagguugag

SEQ ID NO: 336915 - RNA, 32 nt, Human
augggaggaucucuugagaccagguguucaag

SEQ ID NO: 336916 - RNA, 32 nt, Human
augggaggaucucuugagcccaggagaugcag

SEQ ID NO: 336917 - RNA, 32 nt, Human
augggaggaucucuugagcccaggaguuggag

SEQ ID NO: 336918 - RNA, 32 nt, Human
augggaggcaaaaugcucuguucuccaagagg

SEQ ID NO: 336919 - RNA, 21 nt, Human
augggaggcacguggccucuc

SEQ ID NO: 336920 - RNA, 32 nt, Human
augggaggccagagaugagaacccuuugaaaa

SEQ ID NO: 336921 - RNA, 32 nt, Human
augggaggcccaggugagcagaucaccugagg

SEQ ID NO: 336922 - RNA, 32 nt, Human
augggaggccgagguggguggaucacgagguc

SEQ ID NO: 336923 - RNA, 32 nt, Human
augggaggcgccuccuagaccuccucgaaggc

SEQ ID NO: 336924 - RNA, 19 nt, Human
augggaggcggcgcugcuc

SEQ ID NO: 336925 - RNA, 32 nt, Human
augggaggcggcgcugcucuccccgagggcgg

SEQ ID NO: 336926 - RNA, 32 nt, Human
augggaggcugaacaggagaaucgcuugaacc

SEQ ID NO: 336927 - RNA, 32 nt, Human
augggaggcugaggcacgagaaucacuugaac

SEQ ID NO: 336928 - RNA, 32 nt, Human
augggaggcugaggcaggagaagggcgugaac

SEQ ID NO: 336929 - RNA, 32 nt, Human
augggaggcugaggcaggagaaucaguugaac

SEQ ID NO: 336930 - RNA, 32 nt, Human
augggaggcugaggcaggagaaucgcuugaac

SEQ ID NO: 336931 - RNA, 32 nt, Human
augggaggcugaggcaggaggaucacuugaac

SEQ ID NO: 336932 - RNA, 32 nt, Human
augggaggcugaggcgggauugcuugagucca

SEQ ID NO: 336933 - RNA, 32 nt, Human
augggaggcugcagcuggaucagaggaaaaau

SEQ ID NO: 336934 - RNA, 32 nt, Human
augggaggcugcaggggacagcagggccugag

SEQ ID NO: 336935 - RNA, 32 nt, Human
augggagggcuguuauuuccccuagucaucuc

SEQ ID NO: 336936 - RNA, 32 nt, Human
augggagggggacacagaaaaagggaaggaaa

SEQ ID NO: 336937 - RNA, 32 nt, Human
augggagggggcaugacuggaauggccggaau

SEQ ID NO: 336938 - RNA, 32 nt, Human
augggagguaauugaaucauggggacgggucu

SEQ ID NO: 336939 - RNA, 32 nt, Human
augggagguguuagaaaacuuagagacuagaa

SEQ ID NO: 336940 - RNA, 32 nt, Human
augggagugaaggaggaggagggaugccacac

SEQ ID NO: 336941 - RNA, 32 nt, Human
augggaguggagggcaggauuggggcagggcu

SEQ ID NO: 336942 - RNA, 32 nt, Human
augggagugggacugccaggaggaggagagga

SEQ ID NO: 336943 - RNA, 32 nt, Human
augggaguggguaaagaguuugggaagguuau

SEQ ID NO: 336944 - RNA, 32 nt, Human
augggaguucacagcacuaggaaaugggagca

SEQ ID NO: 336945 - RNA, 32 nt, Human
augggaguugaagcacuguaugaaaaggguuu

SEQ ID NO: 336946 - RNA, 32 nt, Human
augggaguuggacccaggcuugaaggacacau

SEQ ID NO: 336947 - RNA, 32 nt, Human
augggauauagaauuggcagaguggcagaugu

SEQ ID NO: 336948 - RNA, 32 nt, Human
augggaucacagaauuuuuggcuuuccuguua

SEQ ID NO: 336949 - RNA, 32 nt, Human
augggaucacuuugauuccuaccugcaacuua

SEQ ID NO: 336950 - RNA, 32 nt, Human
augggaucaggugcccuuaugaaaaggcuuga

SEQ ID NO: 336951 - RNA, 24 nt, Human
augggaucauggauuuucugggca

SEQ ID NO: 336952 - RNA, 32 nt, Human
augggaugacagauggggucagacagaaagag

SEQ ID NO: 336953 - RNA, 32 nt, Human
augggaugcaggaagaagaggcaggagacacc

SEQ ID NO: 336954 - RNA, 32 nt, Human
augggauggcaaaggugguggugcuuucaucu

SEQ ID NO: 336955 - RNA, 32 nt, Human
augggaugggagaacuugagggugaucgggaa

SEQ ID NO: 336956 - RNA, 32 nt, Human
augggauggggaggggguaugagaacuggcag

SEQ ID NO: 336957 - RNA, 32 nt, Human
augggaugguacagcggccugggcaggggcgg

SEQ ID NO: 336958 - RNA, 32 nt, Human
augggaugguagagcggccugggcaggggcgg

SEQ ID NO: 336959 - RNA, 32 nt, Human
augggauguucuguuccgcuuuuaugauaucc

SEQ ID NO: 336960 - RNA, 32 nt, Human
augggauucggccucuggaaaguggugguagu

SEQ ID NO: 336961 - RNA, 32 nt, Human
augggauucuaagaagugaagaacagcauagg

SEQ ID NO: 336962 - RNA, 32 nt, Human
augggauugccugggaccagaggaaaggucua

SEQ ID NO: 336963 - RNA, 32 nt, Human
augggauuucugugccuaggcagccacuccag

SEQ ID NO: 336964 - RNA, 32 nt, Human
augggauuuuaguucuuauucugugauaacua

SEQ ID NO: 336965 - RNA, 32 nt, Human
augggauuuugccauguugcccaggcuggucu

SEQ ID NO: 336966 - RNA, 32 nt, Human
augggcaacaugguaagaccuccgccucuacg

SEQ ID NO: 336967 - RNA, 32 nt, Human
augggcaacauggugaaacacugucucuacaa

SEQ ID NO: 336968 - RNA, 32 nt, Human
augggcaagguaugagggaaggaaauaaaaca

SEQ ID NO: 336969 - RNA, 32 nt, Human
augggcaaugagugcaugggaacucacucacc

SEQ ID NO: 336970 - RNA, 32 nt, Human
augggcacaggcugggacaucagauagaagcu

SEQ ID NO: 336971 - RNA, 19 nt, Human
augggcaccacauuucuua

SEQ ID NO: 336972 - RNA, 32 nt, Human
augggcacccuggcagcagaccccaaaccaac

SEQ ID NO: 336973 - RNA, 32 nt, Human
augggcaccucauggacucaggauccuccugg

SEQ ID NO: 336974 - RNA, 32 nt, Human
augggcaccucuagugacccaggcuggcugag

SEQ ID NO: 336975 - RNA, 32 nt, Human
augggcacuggcagucaaaguggagagagugg

SEQ ID NO: 336976 - RNA, 32 nt, Human
augggcagaacugcugucuuuacuacuucauc

SEQ ID NO: 336977 - RNA, 32 nt, Human
augggcagaaggcagggugcacagguggcucc

SEQ ID NO: 336978 - RNA, 32 nt, Human
augggcagagaagaaaaugaccaggaguguca

SEQ ID NO: 336979 - RNA, 32 nt, Human
augggcagaggaccaggcuguaggaaaucuag

SEQ ID NO: 336980 - RNA, 32 nt, Human
augggcagcacagacacagacacacaccgcag

SEQ ID NO: 336981 - RNA, 21 nt, Human
augggcagccugugcuuuuug

SEQ ID NO: 336982 - RNA, 32 nt, Human
augggcagcuccauccucuugaucuucuaaau

SEQ ID NO: 336983 - RNA, 30 nt, Human
augggcagcuugcacucaccaauagaccaa

SEQ ID NO: 336984 - RNA, 32 nt, Human
augggcagcuuuguuuuauuuauuuauuuauu

SEQ ID NO: 336985 - RNA, 32 nt, Human
augggcaggagaaagagcagauuccuuuuagc

SEQ ID NO: 336986 - RNA, 32 nt, Human
augggcaggcagugcuggaggaacugggaggc

SEQ ID NO: 336987 - RNA, 24 nt, Human
augggcaggcuuuucuguugaaga

SEQ ID NO: 336988 - RNA, 32 nt, Human
augggcagugaauggccucuucugccagccac

SEQ ID NO: 336989 - RNA, 16 nt, Human
augggcagugccucuc

SEQ ID NO: 336990 - RNA, 32 nt, Human
augggcaguuucaccuuccaugaaggcuuaua

SEQ ID NO: 336991 - RNA, 20 nt, Human
augggcauaaacuggcuucu

SEQ ID NO: 336992 - RNA, 32 nt, Human
augggcaucacacccucugccuacccacgugc

SEQ ID NO: 336993 - RNA, 32 nt, Human
augggcaugaggaaucuuacagugauggaaau

SEQ ID NO: 336994 - RNA, 32 nt, Human
augggcaugggaagaugggcucccuggccccc

SEQ ID NO: 336995 - RNA, 32 nt, Human
augggcaugguagcuuacgccuguaaucccag

SEQ ID NO: 336996 - RNA, 32 nt, Human
augggcauguauuuauugcaggugcuaugcag

SEQ ID NO: 336997 - RNA, 32 nt, Human
augggcauguggcccugaaggcugggugagag

SEQ ID NO: 336998 - RNA, 32 nt, Human
augggcauguggucccagcuacucuggaagcu

SEQ ID NO: 336999 - RNA, 32 nt, Human
augggcauguuaacauugccuaccucauagga

SEQ ID NO: 337000 - RNA, 32 nt, Human
augggccaaguugaagacuguugaugaucccu

SEQ ID NO: 337001 - RNA, 32 nt, Human
augggccaccacuguaccccuggucucagucc

SEQ ID NO: 337002 - RNA, 32 nt, Human
augggccaccugacuuagacucucauuaguau

SEQ ID NO: 337003 - RNA, 32 nt, Human
augggccacguagcgcgacuccaucucuacaa

SEQ ID NO: 337004 - RNA, 32 nt, Human
augggccagaaaccgcuucugagcggggcacu

SEQ ID NO: 337005 - RNA, 32 nt, Human
augggccagccaggcauccugauuuccagcuc

SEQ ID NO: 337006 - RNA, 19 nt, Human
augggccagccgucuccua

SEQ ID NO: 337007 - RNA, 32 nt, Human
augggccagccugccccaaggcucuuuacuga

SEQ ID NO: 337008 - RNA, 32 nt, Human
augggccaggagaagacugugcuggguugauu

SEQ ID NO: 337009 - RNA, 32 nt, Human
augggccaggcagggggagggcaagugaggga

SEQ ID NO: 337010 - RNA, 32 nt, Human
augggccaguaugccaguuugaauucucaguc

SEQ ID NO: 337011 - RNA, 32 nt, Human
augggccauauuccgcacugggcacaggccgu

SEQ ID NO: 337012 - RNA, 22 nt, Human
augggccaugagaugcugggga

SEQ ID NO: 337013 - RNA, 32 nt, Human
augggccauuuauuuuccucggagcuccacag

SEQ ID NO: 337014 - RNA, 32 nt, Human
augggcccaaguuucuguggcucauuacaggg

SEQ ID NO: 337015 - RNA, 32 nt, Human
augggcccacauccaccuccagucccuggcca

SEQ ID NO: 337016 - RNA, 25 nt, Human
augggcccaccagaccaaacagccc

SEQ ID NO: 337017 - RNA, 32 nt, Human
augggcccaguucugggagaggacagaaaagg

SEQ ID NO: 337018 - RNA, 25 nt, Human
augggccccaggggaacacugggga

SEQ ID NO: 337019 - RNA, 22 nt, Human
augggcccccaggggcugagga

SEQ ID NO: 337020 - RNA, 32 nt, Human
augggccccugcagaauaaaucugccaguuuu

SEQ ID NO: 337021 - RNA, 32 nt, Human
augggccccugggggagcugcaguaaggcggc

SEQ ID NO: 337022 - RNA, 32 nt, Human
augggcccgcaggagagagggagggaaggucu

SEQ ID NO: 337023 - RNA, 32 nt, Human
augggcccggcgcagauccucugugguuguug

SEQ ID NO: 337024 - RNA, 32 nt, Human
augggcccuauugugcucacacauucagaacc

SEQ ID NO: 337025 - RNA, 21 nt, Human
augggcccucucagcagggga

SEQ ID NO: 337026 - RNA, 32 nt, Human
augggcccucugcuccccaaugccuuagagag

SEQ ID NO: 337027 - RNA, 32 nt, Human
augggcccugcaugcuaauaaaugcuucuuca

SEQ ID NO: 337028 - RNA, 32 nt, Human
augggcccugcccucuuucuucacaccagccc

SEQ ID NO: 337029 - RNA, 32 nt, Human
augggccggcgauugggaccagcugggcccca

SEQ ID NO: 337030 - RNA, 32 nt, Human
augggccuaucacccuugucagagauauaaau

SEQ ID NO: 337031 - RNA, 25 nt, Human
augggccuaucugggcugccuucug

SEQ ID NO: 337032 - RNA, 28 nt, Human
augggccucaauaaaaugguugaguugc

SEQ ID NO: 337033 - RNA, 32 nt, Human
augggccucaccuccccaccagccugggaagg

SEQ ID NO: 337034 - RNA, 32 nt, Human
augggccuccacugacccaucccucucuuuua

SEQ ID NO: 337035 - RNA, 32 nt, Human
augggccugagcugugggugccaagccagaga

SEQ ID NO: 337036 - RNA, 32 nt, Human
augggccugaggccuccacuucuugaggucug

SEQ ID NO: 337037 - RNA, 19 nt, Human
augggccugcagcgucucc

SEQ ID NO: 337038 - RNA, 32 nt, Human
augggccugcuuccugucuuugggagaaaacg

SEQ ID NO: 337039 - RNA, 32 nt, Human
augggccuggaugcagaucugcguggcuggug

SEQ ID NO: 337040 - RNA, 32 nt, Human
augggccuggugugguggcucacaccuguaau

SEQ ID NO: 337041 - RNA, 32 nt, Human
augggccugugugaugucccugaggcagaaga

SEQ ID NO: 337042 - RNA, 32 nt, Human
augggcgcuguucauccucuggugcugaagca

SEQ ID NO: 337043 - RNA, 32 nt, Human
augggcgggaugagacaaaaggagggaugaaa

SEQ ID NO: 337044 - RNA, 21 nt, Human
augggcgggugugucugaagg

SEQ ID NO: 337045 - RNA, 32 nt, Human
augggcgguacuuuagcacggaagcuucccuu

SEQ ID NO: 337046 - RNA, 32 nt, Human
augggcgugguggcaggugccuguaaucccau

SEQ ID NO: 337047 - RNA, 32 nt, Human
augggcgugguggcucacgccuguaauuccag

SEQ ID NO: 337048 - RNA, 32 nt, Human
augggcuacacagcagcuguucaacaagagua

SEQ ID NO: 337049 - RNA, 32 nt, Human
augggcuacagugucuggccuugggaagaagu

SEQ ID NO: 337050 - RNA, 32 nt, Human
augggcuaccggaccugcuggaggcugguccc

SEQ ID NO: 337051 - RNA, 32 nt, Human
augggcuaggcagaguugucccagggccgccu

SEQ ID NO: 337052 - RNA, 32 nt, Human
augggcucaagcaguccucccaccucagccuc

SEQ ID NO: 337053 - RNA, 32 nt, Human
augggcucaccuuuggccagaagccaaacuug

SEQ ID NO: 337054 - RNA, 32 nt, Human
augggcucaggcugauggucagcugggcgcuu

SEQ ID NO: 337055 - RNA, 32 nt, Human
augggcucaugggauucuccuaccucagccuc

SEQ ID NO: 337056 - RNA, 32 nt, Human
augggcuccaacacgggaaggaagcaaaggga

SEQ ID NO: 337057 - RNA, 32 nt, Human
augggcuccacugucuucuggcucccaugugu

SEQ ID NO: 337058 - RNA, 32 nt, Human
augggcuccauccucuggauucuggccaauga

SEQ ID NO: 337059 - RNA, 32 nt, Human
augggcuccauuuggcaccugcugagccacag

SEQ ID NO: 337060 - RNA, 22 nt, Human
augggcuccugcagccugggga

SEQ ID NO: 337061 - RNA, 32 nt, Human
augggcuccuugagagcaagcauuguuuccca

SEQ ID NO: 337062 - RNA, 32 nt, Human
augggcucucagaauaaucucucagaugaaau

SEQ ID NO: 337063 - RNA, 31 nt, Human
augggcugacuucucauuuuagagaugaaga

SEQ ID NO: 337064 - RNA, 21 nt, Human
augggcugaggcccccagcug

SEQ ID NO: 337065 - RNA, 32 nt, Human
augggcugagucccugggcucagaccuagcag

SEQ ID NO: 337066 - RNA, 26 nt, Human
augggcugcagcagaggcacuggggg

SEQ ID NO: 337067 - RNA, 32 nt, Human
augggcugccaagaguugcgggagacccagga

SEQ ID NO: 337068 - RNA, 32 nt, Human
augggcugccuaggagcugccugcacggcaca

SEQ ID NO: 337069 - RNA, 32 nt, Human
augggcugcgcgucuccagccucugcacacac

SEQ ID NO: 337070 - RNA, 32 nt, Human
augggcugcugcuuagcuugcaccuugucaca

SEQ ID NO: 337071 - RNA, 32 nt, Human
augggcugcuggggugucgggagaagccacac

SEQ ID NO: 337072 - RNA, 32 nt, Human
augggcuggaaccggaucuguuuccagacgca

SEQ ID NO: 337073 - RNA, 32 nt, Human
augggcuggacauuggacuuccuccgggagcg

SEQ ID NO: 337074 - RNA, 32 nt, Human
augggcuggaugugguggcucacaccuguaau

SEQ ID NO: 337075 - RNA, 32 nt, Human
augggcugggaacccagccaggugagagccgu

SEQ ID NO: 337076 - RNA, 32 nt, Human
augggcugggcugggcuguggugggguggggg

SEQ ID NO: 337077 - RNA, 32 nt, Human
augggcuggggaaggagagggaauuagagauu

SEQ ID NO: 337078 - RNA, 32 nt, Human
augggcugggggccgcggaggcugcgagcggc

SEQ ID NO: 337079 - RNA, 32 nt, Human
augggcugggugagaugaggggagacagccau

SEQ ID NO: 337080 - RNA, 32 nt, Human
augggcuggucaaugcauccuacaccaaacug

SEQ ID NO: 337081 - RNA, 32 nt, Human
augggcugguggggugagagggggucuaucau

SEQ ID NO: 337082 - RNA, 19 nt, Human
augggcuguacaacuucau

SEQ ID NO: 337083 - RNA, 32 nt, Human
augggcugugcgucaucuuccuuuccuguacc

SEQ ID NO: 337084 - RNA, 32 nt, Human
augggcuguggggcaccggcugccuuucccca

SEQ ID NO: 337085 - RNA, 32 nt, Human
augggcugugucugugccucucucucuuuccu

SEQ ID NO: 337086 - RNA, 32 nt, Human
augggcuuagaagccuuuuugagggaccuccc

SEQ ID NO: 337087 - RNA, 32 nt, Human
augggcuucaguuucaacaucuguaaaauggg

SEQ ID NO: 337088 - RNA, 25 nt, Human
augggcuucugccuggcacuggggg

SEQ ID NO: 337089 - RNA, 32 nt, Human
augggcuugcaggauggagugucuguaaaauc

SEQ ID NO: 337090 - RNA, 32 nt, Human
augggcuugggggccuacagcagccucaccuu

SEQ ID NO: 337091 - RNA, 32 nt, Human
augggcuuguugcagucagcaggugugggcuu

SEQ ID NO: 337092 - RNA, 32 nt, Human
augggcuuucugcuuagucugaaaggugugug

SEQ ID NO: 337093 - RNA, 32 nt, Human
auggggaaaaagaggaucuggagaaccucauc

SEQ ID NO: 337094 - RNA, 32 nt, Human
auggggaaaacaagcugugucuucuuaacugc

SEQ ID NO: 337095 - RNA, 18 nt, Human
auggggaaaacacaaggu

SEQ ID NO: 337096 - RNA, 32 nt, Human
auggggaaaggcuguuauuaccuagaguuuac

SEQ ID NO: 337097 - RNA, 32 nt, Human
auggggaaaggggcuuccugcaccacacaugc

SEQ ID NO: 337098 - RNA, 27 nt, Human
auggggaaaucccuguuauuuugugaa

SEQ ID NO: 337099 - RNA, 32 nt, Human
auggggaacauauucuucuaguuuaagauaca

SEQ ID NO: 337100 - RNA, 32 nt, Human
auggggaagcaaccccagagcaggcagacauc

SEQ ID NO: 337101 - RNA, 32 nt, Human
auggggaaggcagaggcuggcaccauggugac

SEQ ID NO: 337102 - RNA, 32 nt, Human
auggggaaggcagaggcuggcacgauggugac

SEQ ID NO: 337103 - RNA, 24 nt, Human
auggggaaugcuugucacugugga

SEQ ID NO: 337104 - RNA, 32 nt, Human
auggggaaugucugggaagcuggggacauugc

SEQ ID NO: 337105 - RNA, 32 nt, Human
auggggacacauauaaagcaguguuuaauaga

SEQ ID NO: 337106 - RNA, 32 nt, Human
auggggacaccaguggcuucaaacuuccugau

SEQ ID NO: 337107 - RNA, 23 nt, Human
auggggacaguuccguucuugaa

SEQ ID NO: 337108 - RNA, 32 nt, Human
auggggaccaaagugcuuuuuccuucaggaag

SEQ ID NO: 337109 - RNA, 32 nt, Human
auggggaccagccuugccaacugcugcugugg

SEQ ID NO: 337110 - RNA, 32 nt, Human
auggggaccccaaagaagcagaagcugaagaa

SEQ ID NO: 337111 - RNA, 32 nt, Human
auggggaccccaagccccuuccuccauuuaug

SEQ ID NO: 337112 - RNA, 32 nt, Human
auggggaccccagcgaagcaggggcugaagaa

SEQ ID NO: 337113 - RNA, 32 nt, Human
auggggaccucuugcuaagucauuccacuccu

SEQ ID NO: 337114 - RNA, 32 nt, Human
auggggaccuggaaccugggcguacuagagug

SEQ ID NO: 337115 - RNA, 32 nt, Human
auggggacugagaaggauaggaagggauagaa

SEQ ID NO: 337116 - RNA, 32 nt, Human
auggggacuuccugggacaagcaaggaaagua

SEQ ID NO: 337117 - RNA, 22 nt, Human
auggggacuuggacccugagga

SEQ ID NO: 337118 - RNA, 32 nt, Human
auggggagaacacagaacacacaaagcuuucu

SEQ ID NO: 337119 - RNA, 32 nt, Human
auggggagaagcacccacaucucuccuguagc

SEQ ID NO: 337120 - RNA, 32 nt, Human
auggggagaggaacuccuuggccuagcccacc

SEQ ID NO: 337121 - RNA, 32 nt, Human
auggggagauuauccugaauuacuuuggaggg

SEQ ID NO: 337122 - RNA, 32 nt, Human
auggggagcuggcagagcagguggcagucacu

SEQ ID NO: 337123 - RNA, 32 nt, Human
auggggaggaaaugcuggggaggugggggcag

SEQ ID NO: 337124 - RNA, 32 nt, Human
auggggagggaagaggaauaagaaaaguuacg

SEQ ID NO: 337125 - RNA, 32 nt, Human
auggggagggaagaggaggagaggggagggga

SEQ ID NO: 337126 - RNA, 32 nt, Human
auggggagggaagggaaggcagcuccaagaag

SEQ ID NO: 337127 - RNA, 32 nt, Human
auggggagggagcaggggaagguuguaugugu

SEQ ID NO: 337128 - RNA, 32 nt, Human
auggggagggugaacaguccccacagcagaca

SEQ ID NO: 337129 - RNA, 32 nt, Human
auggggagguauaaaaagcaaagauuauuuuu

SEQ ID NO: 337130 - RNA, 32 nt, Human
auggggagguugagggacaggaucuauaggca

SEQ ID NO: 337131 - RNA, 32 nt, Human
auggggaguagagagaaaacaggcgagaacaa

SEQ ID NO: 337132 - RNA, 28 nt, Human
auggggagucccagagguauccagcaga

SEQ ID NO: 337133 - RNA, 32 nt, Human
auggggaguccccagaccccaggaucagggag

SEQ ID NO: 337134 - RNA, 32 nt, Human
auggggagugagagagagggcacgagaaccca

SEQ ID NO: 337135 - RNA, 20 nt, Human
auggggauaccauucuggaa

SEQ ID NO: 337136 - RNA, 32 nt, Human
auggggauaugggggaacagugaagaaaagga

SEQ ID NO: 337137 - RNA, 32 nt, Human
auggggaugacuauccccucucugguuauugu

SEQ ID NO: 337138 - RNA, 21 nt, Human
auggggaugagggcagagaga

SEQ ID NO: 337139 - RNA, 22 nt, Human
auggggaugauagaaggaagaa

SEQ ID NO: 337140 - RNA, 21 nt, Human
auggggaugggguuggggaga

SEQ ID NO: 337141 - RNA, 19 nt, Human
auggggauucaccauguug

SEQ ID NO: 337142 - RNA, 23 nt, Human
auggggauucaccauguugguca

SEQ ID NO: 337143 - RNA, 21 nt, Human
auggggauugugccuguugga

SEQ ID NO: 337144 - RNA, 32 nt, Human
auggggcaaucaauggcugucuugcucaauug

SEQ ID NO: 337145 - RNA, 22 nt, Human
auggggcacccuggacaaagaa

SEQ ID NO: 337146 - RNA, 32 nt, Human
auggggcagaaauuccguggaggcagauagcu

SEQ ID NO: 337147 - RNA, 32 nt, Human
auggggcagaaggcacguaaccauaaccucca

SEQ ID NO: 337148 - RNA, 32 nt, Human
auggggcagagcugggcauucaggaccuugag

SEQ ID NO: 337149 - RNA, 32 nt, Human
auggggcagaggacaggggagcugagguuggu

SEQ ID NO: 337150 - RNA, 32 nt, Human
auggggcagaggcauaaaugcccagaugacuu

SEQ ID NO: 337151 - RNA, 20 nt, Human
auggggcagaggccgcccaa

SEQ ID NO: 337152 - RNA, 32 nt, Human
auggggcaggaaaugcugagucuggggacagg

SEQ ID NO: 337153 - RNA, 32 nt, Human
auggggcaggaggggcugagggccugucccag

SEQ ID NO: 337154 - RNA, 32 nt, Human
auggggcagggcugcugaagcgcggaguucgg

SEQ ID NO: 337155 - RNA, 32 nt, Human
auggggcaguagaucuggaggaguuuaucggu

SEQ ID NO: 337156 - RNA, 25 nt, Human
auggggcaguuagcagcauuuccua

SEQ ID NO: 337157 - RNA, 27 nt, Human
auggggcauccucaucccagggcucuc

SEQ ID NO: 337158 - RNA, 32 nt, Human
auggggcauggagaacccagaggaucuaggcc

SEQ ID NO: 337159 - RNA, 32 nt, Human
auggggcauguucugugacugcauuugcaucu

SEQ ID NO: 337160 - RNA, 32 nt, Human
auggggcauugugaggaacugugcaaagacau

SEQ ID NO: 337161 - RNA, 32 nt, Human
auggggccacguguuggcaguggaaucagccu

SEQ ID NO: 337162 - RNA, 32 nt, Human
auggggccacugcacugcagccugugugacaa

SEQ ID NO: 337163 - RNA, 18 nt, Human
auggggcccagacugcag

SEQ ID NO: 337164 - RNA, 32 nt, Human
auggggcccucccaggccccugccccaacuga

SEQ ID NO: 337165 - RNA, 32 nt, Human
auggggccucuggugucucuuuaccaggggca

SEQ ID NO: 337166 - RNA, 32 nt, Human
auggggccugaaacugucugggucugagcugg

SEQ ID NO: 337167 - RNA, 32 nt, Human
auggggccugcaggacuucuuucugggggucc

SEQ ID NO: 337168 - RNA, 32 nt, Human
auggggccugugcucccaggcucgggggagcc

SEQ ID NO: 337169 - RNA, 32 nt, Human
auggggcgagggcugaggacucucuggcucua

SEQ ID NO: 337170 - RNA, 32 nt, Human
auggggcgcagcccuggguuugccaugcagca

SEQ ID NO: 337171 - RNA, 32 nt, Human
auggggcggcucagugguccccagggaccuca

SEQ ID NO: 337172 - RNA, 32 nt, Human
auggggcuaacaauauuaccuaccucauagga

SEQ ID NO: 337173 - RNA, 32 nt, Human
auggggcucaggucugucacuuaacuuagagu

SEQ ID NO: 337174 - RNA, 32 nt, Human
auggggcucuccaagcaagagguggcccuggg

SEQ ID NO: 337175 - RNA, 32 nt, Human
auggggcucugccugcccccgccccugccucc

SEQ ID NO: 337176 - RNA, 21 nt, Human
auggggcucuuucucugaagg

SEQ ID NO: 337177 - RNA, 23 nt, Human
auggggcugcagaggacgcgccc

SEQ ID NO: 337178 - RNA, 32 nt, Human
auggggcugcuucccugucccuucccuccccu

SEQ ID NO: 337179 - RNA, 32 nt, Human
auggggcuggacaaagaaggaggggccagacu

SEQ ID NO: 337180 - RNA, 25 nt, Human
auggggcuggcaccagaugaugucc

SEQ ID NO: 337181 - RNA, 32 nt, Human
auggggcugggacuucucauuggccaaccugc

SEQ ID NO: 337182 - RNA, 32 nt, Human
auggggcugggagggcaaagauggggcggggc

SEQ ID NO: 337183 - RNA, 32 nt, Human
auggggcugggcuggagaggguggcaggcagu

SEQ ID NO: 337184 - RNA, 21 nt, Human
auggggcugugucagaugccc

SEQ ID NO: 337185 - RNA, 31 nt, Human
auggggcuguugagaugccuguugaagguac

SEQ ID NO: 337186 - RNA, 32 nt, Human
auggggcuucuucuccccuucuuccuuucccc

SEQ ID NO: 337187 - RNA, 32 nt, Human
auggggcuuuagugaugcuccucuuuuguguc

SEQ ID NO: 337188 - RNA, 30 nt, Human
augggggaaagccacaaggaacaguucuga

SEQ ID NO: 337189 - RNA, 32 nt, Human
augggggaaagccagcaugcaaggcccucccc

SEQ ID NO: 337190 - RNA, 23 nt, Human
augggggaaugcccauccuggag

SEQ ID NO: 337191 - RNA, 32 nt, Human
augggggaauuaccuacacaccugcuaaacac

SEQ ID NO: 337192 - RNA, 17 nt, Human
augggggacaauuucau

SEQ ID NO: 337193 - RNA, 32 nt, Human
augggggaggagaacccagggaugggagagau

SEQ ID NO: 337194 - RNA, 32 nt, Human
augggggaggagucagggcaugguggcccaca

SEQ ID NO: 337195 - RNA, 32 nt, Human
augggggaggcugugcauauguuggggaaggu

SEQ ID NO: 337196 - RNA, 32 nt, Human
augggggaggggcaaggcuggucagggagcau

SEQ ID NO: 337197 - RNA, 32 nt, Human
augggggaggggcaggaagcugaauucaccac

SEQ ID NO: 337198 - RNA, 32 nt, Human
augggggaggguggggagcagcucccagcacc

SEQ ID NO: 337199 - RNA, 32 nt, Human
augggggagguggggaguuggggaguacuugg

SEQ ID NO: 337200 - RNA, 32 nt, Human
augggggauccaguggagcaggaguugacgga

SEQ ID NO: 337201 - RNA, 32 nt, Human
augggggauggcuugguuaacugugaagcucc

SEQ ID NO: 337202 - RNA, 32 nt, Human
augggggcaaggggcugaaccucucacagauu

SEQ ID NO: 337203 - RNA, 32 nt, Human
augggggcagcaaaccaccauggcacaugugu

SEQ ID NO: 337204 - RNA, 32 nt, Human
augggggcagggaggauuuugcuuuugcuuuu

SEQ ID NO: 337205 - RNA, 32 nt, Human
augggggcagucuccccuuccuggcacauugc

SEQ ID NO: 337206 - RNA, 32 nt, Human
augggggcauuagaggccugagguucucuagg

SEQ ID NO: 337207 - RNA, 32 nt, Human
augggggccaccucuuaacaccuggcaacagu

SEQ ID NO: 337208 - RNA, 32 nt, Human
augggggccaggcugucaacugugcauagagu

SEQ ID NO: 337209 - RNA, 32 nt, Human
augggggccccucggcauucacacacagccug

SEQ ID NO: 337210 - RNA, 32 nt, Human
augggggcggaggcgggagugagaggagaagg

SEQ ID NO: 337211 - RNA, 25 nt, Human
augggggcucccagcugcuugugga

SEQ ID NO: 337212 - RNA, 32 nt, Human
augggggcucucuccccuagauggcugcuccu

SEQ ID NO: 337213 - RNA, 32 nt, Human
augggggcuggccucucuugcccagccagcgg

SEQ ID NO: 337214 - RNA, 32 nt, Human
augggggucaccaggugaccagugggagcccc

SEQ ID NO: 337215 - RNA, 32 nt, Human
augggggugcccacacugagugaggaagggaa

SEQ ID NO: 337216 - RNA, 32 nt, Human
augggggugcugcagccaggaggagaggaaag

SEQ ID NO: 337217 - RNA, 32 nt, Human
auggggguggguggccggguggguggagcguu

SEQ ID NO: 337218 - RNA, 20 nt, Human
augggggugugauuugugaa

SEQ ID NO: 337219 - RNA, 32 nt, Human
auuacaggcaugagccacugcacccagccaag

SEQ ID NO: 337220 - RNA, 32 nt, Human
auuacaggcaugagccacugcacccagcccag

SEQ ID NO: 337221 - RNA, 32 nt, Human
auuacaggcaugagccacugcacccagccgau

SEQ ID NO: 337222 - RNA, 32 nt, Human
auuacaggcaugagccacugcacccagccucu

SEQ ID NO: 337223 - RNA, 32 nt, Human
auuacaggcaugagccacugcacccagccuug

SEQ ID NO: 337224 - RNA, 32 nt, Human
auuacaggcaugagccacugcacccggccaag

SEQ ID NO: 337225 - RNA, 32 nt, Human
auuacaggcaugagccacugcacccggccuuu

SEQ ID NO: 337226 - RNA, 32 nt, Human
auuacaggcaugagccacugcacccggcgcau

SEQ ID NO: 337227 - RNA, 32 nt, Human
auuacaggcaugagccacugcacccggcuuga

SEQ ID NO: 337228 - RNA, 32 nt, Human
auuacaggcaugagccacugcaccuggcccac

SEQ ID NO: 337229 - RNA, 32 nt, Human
auuacaggcaugagccacugcaccuggccuag

SEQ ID NO: 337230 - RNA, 32 nt, Human
auuacaggcaugagccacugcauccggccugu

SEQ ID NO: 337231 - RNA, 32 nt, Human
auuacaggcaugagccacugcgcccaguauau

SEQ ID NO: 337232 - RNA, 32 nt, Human
auuacaggcaugagccacugcgcccggccaag

SEQ ID NO: 337233 - RNA, 32 nt, Human
auuacaggcaugagccacugcgcccggccaau

SEQ ID NO: 337234 - RNA, 32 nt, Human
auuacaggcaugagccacugcgcccggccaug

SEQ ID NO: 337235 - RNA, 32 nt, Human
auuacaggcaugagccacugcgcccggcccaa

SEQ ID NO: 337236 - RNA, 32 nt, Human
auuacaggcaugagccacugcgcccggccucc

SEQ ID NO: 337237 - RNA, 32 nt, Human
auuacaggcaugagccacugcgcccggccucu

SEQ ID NO: 337238 - RNA, 32 nt, Human
auuacaggcaugagccacugcgcccggccugg

SEQ ID NO: 337239 - RNA, 32 nt, Human
auuacaggcaugagccacugcgcccggcugag

SEQ ID NO: 337240 - RNA, 32 nt, Human
auuacaggcaugagccacugcgccuggcaaau

SEQ ID NO: 337241 - RNA, 32 nt, Human
auuacaggcaugagccacugcgccuggccagc

SEQ ID NO: 337242 - RNA, 32 nt, Human
auuacaggcaugagccacugcgccuggccgga

SEQ ID NO: 337243 - RNA, 32 nt, Human
auuacaggcaugagccacugcgccuggccuca

SEQ ID NO: 337244 - RNA, 32 nt, Human
auuacaggcaugagccacugcgccugguugcc

SEQ ID NO: 337245 - RNA, 32 nt, Human
auuacaggcaugagccacugggcgcggccaga

SEQ ID NO: 337246 - RNA, 32 nt, Human
auuacaggcaugagccacuguacccagccaaa

SEQ ID NO: 337247 - RNA, 32 nt, Human
auuacaggcaugagccacugugcccagcccuu

SEQ ID NO: 337248 - RNA, 32 nt, Human
auuacaggcaugagccacugugcccagcuggg

SEQ ID NO: 337249 - RNA, 32 nt, Human
auuacaggcaugagccacugugcccagucagg

SEQ ID NO: 337250 - RNA, 32 nt, Human
auuacaggcaugagccacugugcccggcaagc

SEQ ID NO: 337251 - RNA, 32 nt, Human
auuacaggcaugagccacugugcccggccacu

SEQ ID NO: 337252 - RNA, 32 nt, Human
auuacaggcaugagccacugugcccggccagu

SEQ ID NO: 337253 - RNA, 32 nt, Human
auuacaggcaugagccacugugcccggccuau

SEQ ID NO: 337254 - RNA, 32 nt, Human
auuacaggcaugagccacugugcccggccugg

SEQ ID NO: 337255 - RNA, 32 nt, Human
auuacaggcaugagccacugugcccggccuuu

SEQ ID NO: 337256 - RNA, 32 nt, Human
auuacaggcaugagccacugugccuggccaac

SEQ ID NO: 337257 - RNA, 32 nt, Human
auuacaggcaugagccacugugccuggccaga

SEQ ID NO: 337258 - RNA, 32 nt, Human
auuacaggcaugagccacugugccuggccccu

SEQ ID NO: 337259 - RNA, 32 nt, Human
auuacaggcaugagccacugugccuggccuga

SEQ ID NO: 337260 - RNA, 32 nt, Human
auuacaggcaugagccacugugccuggcuauu

SEQ ID NO: 337261 - RNA, 32 nt, Human
auuacaggcaugagccacugugcucagccuuc

SEQ ID NO: 337262 - RNA, 32 nt, Human
auuacaggcaugagccacugugcuuggccugu

SEQ ID NO: 337263 - RNA, 32 nt, Human
auuacaggcaugagccacuguguccggucuug

SEQ ID NO: 337264 - RNA, 32 nt, Human
auuacaggcaugagccacugugucuggcccua

SEQ ID NO: 337265 - RNA, 32 nt, Human
auuacaggcaugagccacuguguucaguuggc

SEQ ID NO: 337266 - RNA, 32 nt, Human
auuacaggcaugagccaucacaccuggucaac

SEQ ID NO: 337267 - RNA, 32 nt, Human
auuacaggcaugagccaucgcccagcccagaa

SEQ ID NO: 337268 - RNA, 32 nt, Human
auuacaggcaugcaccaccacgcccagcuaau

SEQ ID NO: 337269 - RNA, 32 nt, Human
auuacaggcaugcaccaccacgcccagcuuau

SEQ ID NO: 337270 - RNA, 32 nt, Human
auuacaggcaugggccaccacgcccagcuagu

SEQ ID NO: 337271 - RNA, 32 nt, Human
auuacaggcaugugccaccacgcccagcuaau

SEQ ID NO: 337272 - RNA, 32 nt, Human
auuacaggcaugugccacuacccggccaauuu

SEQ ID NO: 337273 - RNA, 32 nt, Human
auuacaggccugagcaacugugccuggcccaa

SEQ ID NO: 337274 - RNA, 32 nt, Human
auuacaggccugagccaccauacccagcaagu

SEQ ID NO: 337275 - RNA, 32 nt, Human
auuacaggccugagccaccaugcccagcugaa

SEQ ID NO: 337276 - RNA, 32 nt, Human
auuacaggccugagccaccgcgcccagucucu

SEQ ID NO: 337277 - RNA, 32 nt, Human
auuacaggccugagccaccgcgcccggccuau

SEQ ID NO: 337278 - RNA, 32 nt, Human
auuacaggccugagccaccgcguccggccucc

SEQ ID NO: 337279 - RNA, 32 nt, Human
auuacaggccugagccaccgugcccagccaaa

SEQ ID NO: 337280 - RNA, 32 nt, Human
auuacaggccugagccacugcgcccagccaau

SEQ ID NO: 337281 - RNA, 32 nt, Human
auuacaggccugagccacugcgcccagccagg

SEQ ID NO: 337282 - RNA, 32 nt, Human
auuacaggcgcccaccaccacgcccagcuaau

SEQ ID NO: 337283 - RNA, 32 nt, Human
auuacaggcgcccgccaccacgcccagagaga

SEQ ID NO: 337284 - RNA, 32 nt, Human
auuacaggcgcccgccaccacgcccagcaugc

SEQ ID NO: 337285 - RNA, 32 nt, Human
auuacaggcgcccgccaccacgcccagcuaau

SEQ ID NO: 337286 - RNA, 32 nt, Human
auuacaggcgcccgccaccacgcccaggcggu

SEQ ID NO: 337287 - RNA, 32 nt, Human
auuacaggcgcccgccacuacgcccagcuaau

SEQ ID NO: 337288 - RNA, 32 nt, Human
auuacaggcgccgaucaccaagcccggcuaau

SEQ ID NO: 337289 - RNA, 32 nt, Human
auuacaggcgccugccaccacgcccagcuaau

SEQ ID NO: 337290 - RNA, 32 nt, Human
auuacaggcgccugccaccaugccuagcaaau

SEQ ID NO: 337291 - RNA, 32 nt, Human
auuacaggcgcuggccacacacccagcugauu

SEQ ID NO: 337292 - RNA, 32 nt, Human
auuacaggcguaagccacugcgcccagccacu

SEQ ID NO: 337293 - RNA, 32 nt, Human
auuacaggcgugagccaaugugcccggccuaa

SEQ ID NO: 337294 - RNA, 32 nt, Human
auuacaggcgugagccacaaugcccggcccac

SEQ ID NO: 337295 - RNA, 32 nt, Human
auuacaggcgugagccacacacuuagugucuu

SEQ ID NO: 337296 - RNA, 32 nt, Human
auuacaggcgugagccacagcgcccggcccuc

SEQ ID NO: 337297 - RNA, 32 nt, Human
auuacaggcgugagccacagugccuggccucu

SEQ ID NO: 337298 - RNA, 32 nt, Human
auuacaggcgugagccaccacacccagccaaa

SEQ ID NO: 337299 - RNA, 32 nt, Human
auuacaggcgugagccaccacacccagccagu

SEQ ID NO: 337300 - RNA, 32 nt, Human
auuacaggcgugagccaccacacccagcccuu

SEQ ID NO: 337301 - RNA, 32 nt, Human
auuacaggcgugagccaccacacccagcucag

SEQ ID NO: 337302 - RNA, 32 nt, Human
auuacaggcgugagccaccacacccggcccac

SEQ ID NO: 337303 - RNA, 32 nt, Human
auuacaggcgugagccaccacacccggccccc

SEQ ID NO: 337304 - RNA, 32 nt, Human
auuacaggcgugagccaccacacccggccgug

SEQ ID NO: 337305 - RNA, 32 nt, Human
auuacaggcgugagccaccacacccggcuccg

SEQ ID NO: 337306 - RNA, 32 nt, Human
auuacaggcgugagccaccacaccuagcugga

SEQ ID NO: 337307 - RNA, 32 nt, Human
auuacaggcgugagccaccacauccagccagu

SEQ ID NO: 337308 - RNA, 32 nt, Human
auuacaggcgugagccaccacauccggccagu

SEQ ID NO: 337309 - RNA, 32 nt, Human
auuacaggcgugagccaccacccccggccugu

SEQ ID NO: 337310 - RNA, 32 nt, Human
auuacaggcgugagccaccacgccagggcuuu

SEQ ID NO: 337311 - RNA, 32 nt, Human
auuacaggcgugagccaccacgcccagccgua

SEQ ID NO: 337312 - RNA, 32 nt, Human
auuacaggcgugagccaccacgcccagccuau

SEQ ID NO: 337313 - RNA, 32 nt, Human
auuacaggcgugagccaccacgcccggccacu

SEQ ID NO: 337314 - RNA, 32 nt, Human
auuacaggcgugagccaccacgcccggcccca

SEQ ID NO: 337315 - RNA, 32 nt, Human
auuacaggcgugagccaccacgcccggccccc

SEQ ID NO: 337316 - RNA, 32 nt, Human
auuacaggcgugagccaccacgcccggcccgu

SEQ ID NO: 337317 - RNA, 32 nt, Human
auuacaggcgugagccaccacgcccggccucu

SEQ ID NO: 337318 - RNA, 32 nt, Human
auuacaggcgugagccaccacgcccggccugg

SEQ ID NO: 337319 - RNA, 32 nt, Human
auuacaggcgugagccaccacgcccggucacc

SEQ ID NO: 337320 - RNA, 32 nt, Human
auuacaggcgugagccaccacgccuggccaau

SEQ ID NO: 337321 - RNA, 32 nt, Human
auuacaggcgugagccaccacgccuggccgaa

SEQ ID NO: 337322 - RNA, 32 nt, Human
auuacaggcgugagccaccacgccuggccuca

SEQ ID NO: 337323 - RNA, 32 nt, Human
auuacaggcgugagccaccacgccuggcugga

SEQ ID NO: 337324 - RNA, 32 nt, Human
auuacaggcgugagccaccacgcucagccuuu

SEQ ID NO: 337325 - RNA, 32 nt, Human
auuacaggcgugagccaccacucccggccgug

SEQ ID NO: 337326 - RNA, 32 nt, Human
auuacaggcgugagccaccacucccggcuaag

SEQ ID NO: 337327 - RNA, 32 nt, Human
auuacaggcgugagccaccacuccuggccuau

SEQ ID NO: 337328 - RNA, 32 nt, Human
auuacaggcgugagccaccagccaggccaagc

SEQ ID NO: 337329 - RNA, 32 nt, Human
auuacaggcgugagccaccaggcccagccucg

SEQ ID NO: 337330 - RNA, 32 nt, Human
auuacaggcgugagccaccaggccuggcuccu

SEQ ID NO: 337331 - RNA, 32 nt, Human
auuacaggcgugagccaccauacccggcccac

SEQ ID NO: 337332 - RNA, 32 nt, Human
auuacaggcgugagccaccaugaccagcccuc

SEQ ID NO: 337333 - RNA, 32 nt, Human
auuacaggcgugagccaccaugcccagaugcu

SEQ ID NO: 337334 - RNA, 32 nt, Human
auuacaggcgugagccaccaugcccagccuaa

SEQ ID NO: 337335 - RNA, 32 nt, Human
auuacaggcgugagccaccaugcccagccuac

SEQ ID NO: 337336 - RNA, 32 nt, Human
auuacaggcgugagccaccaugcccggccagc

SEQ ID NO: 337337 - RNA, 32 nt, Human
auuacaggcgugagccaccaugcccggccaug

SEQ ID NO: 337338 - RNA, 32 nt, Human
auuacaggcgugagccaccaugcccggcccaa

SEQ ID NO: 337339 - RNA, 32 nt, Human
auuacaggcgugagccaccaugcccggccucu

SEQ ID NO: 337340 - RNA, 32 nt, Human
auuacaggcgugagccaccaugccuagcaaca

SEQ ID NO: 337341 - RNA, 32 nt, Human
auuacaggcgugagccaccaugccugcccagc

SEQ ID NO: 337342 - RNA, 32 nt, Human
auuacaggcgugagccaccaugccuggcaaca

SEQ ID NO: 337343 - RNA, 32 nt, Human
auuacaggcgugagccaccaugccuggccaaa

SEQ ID NO: 337344 - RNA, 32 nt, Human
auuacaggcgugagccaccaugccuggccaca

SEQ ID NO: 337345 - RNA, 32 nt, Human
auuacaggcgugagccaccaugccuggccaga

SEQ ID NO: 337346 - RNA, 32 nt, Human
auuacaggcgugagccaccaugccuggccauc

SEQ ID NO: 337347 - RNA, 32 nt, Human
auuacaggcgugagccaccaugccuggccuuc

SEQ ID NO: 337348 - RNA, 32 nt, Human
auuacaggcgugagccaccaugcucggccuaa

SEQ ID NO: 337349 - RNA, 32 nt, Human
auuacaggcgugagccaccauguccagccaaa

SEQ ID NO: 337350 - RNA, 32 nt, Human
auuacaggcgugagccaccauguccggcuugu

SEQ ID NO: 337351 - RNA, 32 nt, Human
auuacaggcgugagccaccauucccgggcgcu

SEQ ID NO: 337352 - RNA, 32 nt, Human
auuacaggcgugagccacccggccuggccuag

SEQ ID NO: 337353 - RNA, 32 nt, Human
auuacaggcgugagccaccgagccuggccggu

SEQ ID NO: 337354 - RNA, 32 nt, Human
auuacaggcgugagccaccgcacccagccagg

SEQ ID NO: 337355 - RNA, 32 nt, Human
auuacaggcgugagccaccgcacccagcccau

SEQ ID NO: 337356 - RNA, 32 nt, Human
auuacaggcgugagccaccgcacccagcccgu

SEQ ID NO: 337357 - RNA, 32 nt, Human
auuacaggcgugagccaccgcacccggcagag

SEQ ID NO: 337358 - RNA, 32 nt, Human
auuacaggcgugagccaccgcacccggcccuu

SEQ ID NO: 337359 - RNA, 32 nt, Human
auuacaggcgugagccaccgcacccggccuau

SEQ ID NO: 337360 - RNA, 32 nt, Human
auuacaggcgugagccaccgcacccggccucu

SEQ ID NO: 337361 - RNA, 32 nt, Human
auuacaggcgugagccaccgcacccggcuugc

SEQ ID NO: 337362 - RNA, 32 nt, Human
auuacaggcgugagccaccgcacccggucagc

SEQ ID NO: 337363 - RNA, 32 nt, Human
auuacaggcgugagccaccgcaccuggccuac

SEQ ID NO: 337364 - RNA, 32 nt, Human
auuacaggcgugagccaccgcacggauauguu

SEQ ID NO: 337365 - RNA, 32 nt, Human
auuacaggcgugagccaccgcccccggccgcc

SEQ ID NO: 337366 - RNA, 32 nt, Human
auuacaggcgugagccaccgcgacuggccuac

SEQ ID NO: 337367 - RNA, 32 nt, Human
auuacaggcgugagccaccgcgccaggcugag

SEQ ID NO: 337368 - RNA, 32 nt, Human
auuacaggcgugagccaccgcgcccagccaaa

SEQ ID NO: 337369 - RNA, 32 nt, Human
auuacaggcgugagccaccgcgcccagccaga

SEQ ID NO: 337370 - RNA, 32 nt, Human
auuacaggcgugagccaccgcgcccagcccca

SEQ ID NO: 337371 - RNA, 32 nt, Human
auuacaggcgugagccaccgcgcccagcccug

SEQ ID NO: 337372 - RNA, 32 nt, Human
auuacaggcgugagccaccgcgcccagccgga

SEQ ID NO: 337373 - RNA, 32 nt, Human
auuacaggcgugagccaccgcgcccagccuac

SEQ ID NO: 337374 - RNA, 32 nt, Human
auuacaggcgugagccaccgcgcccagccuau

SEQ ID NO: 337375 - RNA, 32 nt, Human
auuacaggcgugagccaccgcgcccagccuca

SEQ ID NO: 337376 - RNA, 32 nt, Human
auuacaggcgugagccaccgcgcccagccuua

SEQ ID NO: 337377 - RNA, 32 nt, Human
auuacaggcgugagccaccgcgcccagcugaa

SEQ ID NO: 337378 - RNA, 32 nt, Human
auuacaggcgugagccaccgcgcccggccaag

SEQ ID NO: 337379 - RNA, 32 nt, Human
auuacaggcgugagccaccgcgcccggccaau

SEQ ID NO: 337380 - RNA, 32 nt, Human
auuacaggcgugagccaccgcgcccggccagg

SEQ ID NO: 337381 - RNA, 32 nt, Human
auuacaggcgugagccaccgcgcccggccagu

SEQ ID NO: 337382 - RNA, 32 nt, Human
auuacaggcgugagccaccgcgcccggccaua

SEQ ID NO: 337383 - RNA, 32 nt, Human
auuacaggcgugagccaccgcgcccggccaug

SEQ ID NO: 337384 - RNA, 32 nt, Human
auuacaggcgugagccaccgcgcccggcccac

SEQ ID NO: 337385 - RNA, 32 nt, Human
auuacaggcgugagccaccgcgcccggcccag

SEQ ID NO: 337386 - RNA, 32 nt, Human
auuacaggcgugagccaccgcgcccggcccau

SEQ ID NO: 337387 - RNA, 32 nt, Human
auuacaggcgugagccaccgcgcccggcccuc

SEQ ID NO: 337388 - RNA, 32 nt, Human
auuacaggcgugagccaccgcgcccggccggc

SEQ ID NO: 337389 - RNA, 32 nt, Human
auuacaggcgugagccaccgcgcccggccgua

SEQ ID NO: 337390 - RNA, 32 nt, Human
auuacaggcgugagccaccgcgcccggccuag

SEQ ID NO: 337391 - RNA, 32 nt, Human
auuacaggcgugagccaccgcgcccggccuca

SEQ ID NO: 337392 - RNA, 32 nt, Human
auuacaggcgugagccaccgcgcccggccucc

SEQ ID NO: 337393 - RNA, 32 nt, Human
auuacaggcgugagccaccgcgcccggccuga

SEQ ID NO: 337394 - RNA, 32 nt, Human
auuacaggcgugagccaccgcgcccggccugu

SEQ ID NO: 337395 - RNA, 32 nt, Human
auuacaggcgugagccaccgcgcccggcggcg

SEQ ID NO: 337396 - RNA, 32 nt, Human
auuacaggcgugagccaccgcgcccggcugcc

SEQ ID NO: 337397 - RNA, 32 nt, Human
auuacaggcgugagccaccgcgccgggcaccu

SEQ ID NO: 337398 - RNA, 32 nt, Human
auuacaggcgugagccaccgcgccuggccaaa

SEQ ID NO: 337399 - RNA, 32 nt, Human
auuacaggcgugagccaccgcgccuggccaag

SEQ ID NO: 337400 - RNA, 32 nt, Human
auuacaggcgugagccaccgcgccuggccaca

SEQ ID NO: 337401 - RNA, 32 nt, Human
auuacaggcgugagccaccgcgccuggccagg

SEQ ID NO: 337402 - RNA, 32 nt, Human
auuacaggcgugagccaccgcgccuggccgau

SEQ ID NO: 337403 - RNA, 32 nt, Human
auuacaggcgugagccaccgcgccuggccuaa

SEQ ID NO: 337404 - RNA, 32 nt, Human
auuacaggcgugagccaccgcgccuggccuca

SEQ ID NO: 337405 - RNA, 32 nt, Human
auuacaggcgugagccaccgcgccuggccuuc

SEQ ID NO: 337406 - RNA, 32 nt, Human
auuacaggcgugagccaccgcgccuggucuau

SEQ ID NO: 337407 - RNA, 32 nt, Human
auuacaggcgugagccaccgcggcccaacagc

SEQ ID NO: 337408 - RNA, 32 nt, Human
auuacaggcgugagccaccgcguccagccaca

SEQ ID NO: 337409 - RNA, 32 nt, Human
auuacaggcgugagccaccgcguccggccucu

SEQ ID NO: 337410 - RNA, 32 nt, Human
auuacaggcgugagccaccgcguccggcucag

SEQ ID NO: 337411 - RNA, 32 nt, Human
auuacaggcgugagccaccgcuccuggccuau

SEQ ID NO: 337412 - RNA, 32 nt, Human
auuacaggcgugagccaccguacccagccugg

SEQ ID NO: 337413 - RNA, 32 nt, Human
auuacaggcgugagccaccgugcccagccucc

SEQ ID NO: 337414 - RNA, 32 nt, Human
auuacaggcgugagccaccgugcccagccuuc

SEQ ID NO: 337415 - RNA, 32 nt, Human
auuacaggcgugagccaccgugcccagccuuu

SEQ ID NO: 337416 - RNA, 32 nt, Human
auuacaggcgugagccaccgugcccggcccaa

SEQ ID NO: 337417 - RNA, 32 nt, Human
auuacaggcgugagccaccgugcccggcccag

SEQ ID NO: 337418 - RNA, 32 nt, Human
auuacaggcgugagccaccgugcccggcccua

SEQ ID NO: 337419 - RNA, 32 nt, Human
auuacaggcgugagccaccgugcccggcccuu

SEQ ID NO: 337420 - RNA, 32 nt, Human
auuacaggcgugagccaccgugcccggccuaa

SEQ ID NO: 337421 - RNA, 32 nt, Human
auuacaggcgugagccaccgugcccggccuac

SEQ ID NO: 337422 - RNA, 32 nt, Human
auuacaggcgugagccaccgugcccggccucu

SEQ ID NO: 337423 - RNA, 32 nt, Human
auuacaggcgugagccaccgugcccggccuga

SEQ ID NO: 337424 - RNA, 32 nt, Human
auuacaggcgugagccaccgugcccggccugu

SEQ ID NO: 337425 - RNA, 32 nt, Human
auuacaggcgugagccaccgugccuggccaag

SEQ ID NO: 337426 - RNA, 32 nt, Human
auuacaggcgugagccaccgugccuggccacg

SEQ ID NO: 337427 - RNA, 32 nt, Human
auuacaggcgugagccaccgugccuggccaga

SEQ ID NO: 337428 - RNA, 32 nt, Human
auuacaggcgugagccaccgugccuggccagg

SEQ ID NO: 337429 - RNA, 32 nt, Human
auuacaggcgugagccaccgugccuggcccug

SEQ ID NO: 337430 - RNA, 32 nt, Human
auuacaggcgugagccaccgugccuggccgau

SEQ ID NO: 337431 - RNA, 32 nt, Human
auuacaggcgugagccaccgugccuggccgug

SEQ ID NO: 337432 - RNA, 32 nt, Human
auuacaggcgugagccaccgugccuggccuaa

SEQ ID NO: 337433 - RNA, 32 nt, Human
auuacaggcgugagccaccgugccuggcugag

SEQ ID NO: 337434 - RNA, 32 nt, Human
auuacaggcgugagccaccgugccuggcugua

SEQ ID NO: 337435 - RNA, 32 nt, Human
auuacaggcgugagccaccgugcucagccuaa

SEQ ID NO: 337436 - RNA, 32 nt, Human
auuacaggcgugagccaccguguccggccgua

SEQ ID NO: 337437 - RNA, 32 nt, Human
auuacaggcgugagccaccucacccagccggc

SEQ ID NO: 337438 - RNA, 32 nt, Human
auuacaggcgugagccaccucgcccagcggca

SEQ ID NO: 337439 - RNA, 32 nt, Human
auuacaggcgugagccaccucgcccggccaau

SEQ ID NO: 337440 - RNA, 32 nt, Human
auuacaggcgugagccaccuugcccagcccac

SEQ ID NO: 337441 - RNA, 32 nt, Human
auuacaggcgugagccaccuugccuagcccac

SEQ ID NO: 337442 - RNA, 32 nt, Human
auuacaggcgugagccacggcaccaggcccuc

SEQ ID NO: 337443 - RNA, 32 nt, Human
auuacaggcgugagccacggcacgcagccagc

SEQ ID NO: 337444 - RNA, 32 nt, Human
auuacaggcgugagccacggcgcccagccugu

SEQ ID NO: 337445 - RNA, 32 nt, Human
auuacaggcgugagccacuacacccagccaau

SEQ ID NO: 337446 - RNA, 32 nt, Human
auuacaggcgugagccacuccacccagcccag

SEQ ID NO: 337447 - RNA, 32 nt, Human
auuacaggcgugagccacucugcccggccugu

SEQ ID NO: 337448 - RNA, 32 nt, Human
auuacaggcgugagccacugagcccagccuac

SEQ ID NO: 337449 - RNA, 32 nt, Human
auuacaggcgugagccacugagcccggccaaa

SEQ ID NO: 337450 - RNA, 32 nt, Human
auuacaggcgugagccacugcacccacccacg

SEQ ID NO: 337451 - RNA, 32 nt, Human
auuacaggcgugagccacugcacccagccaaa

SEQ ID NO: 337452 - RNA, 32 nt, Human
auuacaggcgugagccacugcacccagcccuc

SEQ ID NO: 337453 - RNA, 32 nt, Human
auuacaggcgugagccacugcacccagccgag

SEQ ID NO: 337454 - RNA, 32 nt, Human
auuacaggcgugagccacugcacccagccuag

SEQ ID NO: 337455 - RNA, 32 nt, Human
auuacaggcgugagccacugcacccagccuau

SEQ ID NO: 337456 - RNA, 32 nt, Human
auuacaggcgugagccacugcacccagccuca

SEQ ID NO: 337457 - RNA, 32 nt, Human
auuacaggcgugagccacugcacccagccugg

SEQ ID NO: 337458 - RNA, 32 nt, Human
auuacaggcgugagccacugcacccggccgug

SEQ ID NO: 337459 - RNA, 32 nt, Human
auuacaggcgugagccacugcacccggccuaa

SEQ ID NO: 337460 - RNA, 32 nt, Human
auuacaggcgugagccacugcacccggcucac

SEQ ID NO: 337461 - RNA, 32 nt, Human
auuacaggcgugagccacugcaccuggcccuc

SEQ ID NO: 337462 - RNA, 32 nt, Human
auuacaggcgugagccacugcaccuggccucu

SEQ ID NO: 337463 - RNA, 32 nt, Human
auuacaggcgugagccacugcaccuggccuga

SEQ ID NO: 337464 - RNA, 32 nt, Human
auuacaggcgugagccacugcaccuggccuua

SEQ ID NO: 337465 - RNA, 32 nt, Human
auuacaggcgugagccacugcccagcuauacu

SEQ ID NO: 337466 - RNA, 32 nt, Human
auuacaggcgugagccacugcccccagcccca

SEQ ID NO: 337467 - RNA, 32 nt, Human
auuacaggcgugagccacugcgcccagccaac

SEQ ID NO: 337468 - RNA, 32 nt, Human
auuacaggcgugagccacugcgcccagccuga

SEQ ID NO: 337469 - RNA, 32 nt, Human
auuacaggcgugagccacugcgcccagccugu

SEQ ID NO: 337470 - RNA, 32 nt, Human
auuacaggcgugagccacugcgcccagccuug

SEQ ID NO: 337471 - RNA, 32 nt, Human
auuacaggcgugagccacugcgcccagcuacc

SEQ ID NO: 337472 - RNA, 32 nt, Human
auuacaggcgugagccacugcgcccggccaau

SEQ ID NO: 337473 - RNA, 32 nt, Human
auuacaggcgugagccacugcgcccggccaca

SEQ ID NO: 337474 - RNA, 32 nt, Human
auuacaggcgugagccacugcgcccggcccua

SEQ ID NO: 337475 - RNA, 32 nt, Human
auuacaggcgugagccacugcgcccggccuaa

SEQ ID NO: 337476 - RNA, 32 nt, Human
auuacaggcgugagccacugcgcccggccuau

SEQ ID NO: 337477 - RNA, 32 nt, Human
auuacaggcgugagccacugcgcccggccucc

SEQ ID NO: 337478 - RNA, 32 nt, Human
auuacaggcgugagccacugcgcccggccugu

SEQ ID NO: 337479 - RNA, 32 nt, Human
auuacaggcgugagccacugcgcccggccuug

SEQ ID NO: 337480 - RNA, 32 nt, Human
auuacaggcgugagccacugcgcccgggcaag

SEQ ID NO: 337481 - RNA, 32 nt, Human
auuacaggcgugagccacugcgccuggccaag

SEQ ID NO: 337482 - RNA, 32 nt, Human
auuacaggcgugagccacugcgccuggccaga

SEQ ID NO: 337483 - RNA, 32 nt, Human
auuacaggcgugagccacugcgccuggccauc

SEQ ID NO: 337484 - RNA, 32 nt, Human
auuacaggcgugagccacugcgccuggccgug

SEQ ID NO: 337485 - RNA, 32 nt, Human
auuacaggcgugagccacugcgccuggccuag

SEQ ID NO: 337486 - RNA, 32 nt, Human
auuacaggcgugagccacugcgccuggccuuu

SEQ ID NO: 337487 - RNA, 32 nt, Human
auuacaggcgugagccacugcguccagccaga

SEQ ID NO: 337488 - RNA, 32 nt, Human
auuacaggcgugagccacugcucccagccucu

SEQ ID NO: 337489 - RNA, 32 nt, Human
auuacaggcgugagccacugcuccuggcccaa

SEQ ID NO: 337490 - RNA, 32 nt, Human
auuacaggcgugagccacuggcccggcggcac

SEQ ID NO: 337491 - RNA, 32 nt, Human
auuacaggcgugagccacuggcggccucaacu

SEQ ID NO: 337492 - RNA, 32 nt, Human
auuacaggcgugagccacugggcccagccuaa

SEQ ID NO: 337493 - RNA, 32 nt, Human
auuacaggcgugagccacugugcauggcccca

SEQ ID NO: 337494 - RNA, 32 nt, Human
auuacaggcgugagccacugugcccagccaaa

SEQ ID NO: 337495 - RNA, 32 nt, Human
auuacaggcgugagccacugugcccagccacc

SEQ ID NO: 337496 - RNA, 32 nt, Human
auuacaggcgugagccacugugcccagccgau

SEQ ID NO: 337497 - RNA, 32 nt, Human
auuacaggcgugagccacugugcccagccgga

SEQ ID NO: 337498 - RNA, 32 nt, Human
auuacaggcgugagccacugugcccagccuaa

SEQ ID NO: 337499 - RNA, 32 nt, Human
auuacaggcgugagccacugugcccagcugag

SEQ ID NO: 337500 - RNA, 32 nt, Human
auuacaggcgugagccacugugcccggccaag

SEQ ID NO: 337501 - RNA, 32 nt, Human
auuacaggcgugagccacugugcccggccuca

SEQ ID NO: 337502 - RNA, 32 nt, Human
auuacaggcgugagccacugugcccggccuug

SEQ ID NO: 337503 - RNA, 32 nt, Human
auuacaggcgugagccacugugcccggcuguu

SEQ ID NO: 337504 - RNA, 32 nt, Human
auuacaggcgugagccacugugccuagccauu

SEQ ID NO: 337505 - RNA, 32 nt, Human
auuacaggcgugagccacugugccuggccgac

SEQ ID NO: 337506 - RNA, 32 nt, Human
auuacaggcgugagccacugugccuggccuau

SEQ ID NO: 337507 - RNA, 32 nt, Human
auuacaggcgugagccacugugccuggccugu

SEQ ID NO: 337508 - RNA, 32 nt, Human
auuacaggcgugagccacugugccuggccuua

SEQ ID NO: 337509 - RNA, 32 nt, Human
auuacaggcgugagccacugugccuggcugag

SEQ ID NO: 337510 - RNA, 32 nt, Human
auuacaggcgugagccacugugccuggcuggu

SEQ ID NO: 337511 - RNA, 32 nt, Human
auuacaggcgugagccacugugccuggcuucc

SEQ ID NO: 337512 - RNA, 32 nt, Human
auuacaggcgugagccacuuacccggccucug

SEQ ID NO: 337513 - RNA, 32 nt, Human
auuacaggcgugagccagugugcccggccucc

SEQ ID NO: 337514 - RNA, 32 nt, Human
auuacaggcgugagccauggcgcccagccugg

SEQ ID NO: 337515 - RNA, 32 nt, Human
auuacaggcgugagccauggcgcccagccuuc

SEQ ID NO: 337516 - RNA, 32 nt, Human
auuacaggcgugagccauggugcccagccugg

SEQ ID NO: 337517 - RNA, 32 nt, Human
auuacaggcgugagccauugcgccugggcagg

SEQ ID NO: 337518 - RNA, 32 nt, Human
auuacaggcgugcaccacugaguccagccuau

SEQ ID NO: 337519 - RNA, 32 nt, Human
auuacaggcguuagccacugcgcccggcccga

SEQ ID NO: 337520 - RNA, 32 nt, Human
auuacaggcucaauaacuauuuacugaaugug

SEQ ID NO: 337521 - RNA, 32 nt, Human
auuacaggcuccugccaccacgcccagcuaau

SEQ ID NO: 337522 - RNA, 32 nt, Human
auuacaggcuggagcuacagagcccagccugu

SEQ ID NO: 337523 - RNA, 32 nt, Human
auuacaggcuugagccaccacgcccagacuug

SEQ ID NO: 337524 - RNA, 32 nt, Human
auuacaggcuugagccaccacgcccagccugu

SEQ ID NO: 337525 - RNA, 32 nt, Human
auuacaggcuugagccaccacgcccaguccaa

SEQ ID NO: 337526 - RNA, 32 nt, Human
auuacaggcuugagccaccgcgcccggcuaua

SEQ ID NO: 337527 - RNA, 32 nt, Human
auuacaggcuugagccaccgugccaggccugu

SEQ ID NO: 337528 - RNA, 32 nt, Human
auuacaggcuugagccacugcaccuagccucu

SEQ ID NO: 337529 - RNA, 32 nt, Human
auuacaggcuugagccacugcgcccggccuag

SEQ ID NO: 337530 - RNA, 32 nt, Human
auuacaggcuugagccacugcgccuggccugg

SEQ ID NO: 337531 - RNA, 32 nt, Human
auuacaggcuugagccacugcucccggcugau

SEQ ID NO: 337532 - RNA, 32 nt, Human
auuacaggcuugagccacugugccuggcuuca

SEQ ID NO: 337533 - RNA, 32 nt, Human
auuacagggacaucucaggcugugcuguccug

SEQ ID NO: 337534 - RNA, 32 nt, Human
auuacagggaugagccaccauacccggcuuuu

SEQ ID NO: 337535 - RNA, 32 nt, Human
auuacagggaugagccaccgcgcccagccuca

SEQ ID NO: 337536 - RNA, 32 nt, Human
auuacagggccagccgggcaugguggcucacg

SEQ ID NO: 337537 - RNA, 32 nt, Human
auuacagggggccgggacagggagguugggag

SEQ ID NO: 337538 - RNA, 32 nt, Human
auuacagggguaagccacugugcccggccggu

SEQ ID NO: 337539 - RNA, 32 nt, Human
auuacaggggucuucuagguauuccccacaca

SEQ ID NO: 337540 - RNA, 32 nt, Human
auuacaggggugagccaccacgcccagcccca

SEQ ID NO: 337541 - RNA, 32 nt, Human
auuacaggggugagccacugcgcccagccuaa

SEQ ID NO: 337542 - RNA, 32 nt, Human
auuacaggggugagccacugugcccggccaua

SEQ ID NO: 337543 - RNA, 32 nt, Human
auuacagguacgcaccaccacgcccagcucau

SEQ ID NO: 337544 - RNA, 32 nt, Human
auuacagguaugagccacaacacccagccuuu

SEQ ID NO: 337545 - RNA, 32 nt, Human
auuacagguaugagccacaacgcccagccauc

SEQ ID NO: 337546 - RNA, 32 nt, Human
auuacagguaugagccaccacgcccggucaga

SEQ ID NO: 337547 - RNA, 32 nt, Human
auuacagguaugagccaccaugcccggcuggc

SEQ ID NO: 337548 - RNA, 32 nt, Human
auuacagguaugagccaccaugccuggcccca

SEQ ID NO: 337549 - RNA, 32 nt, Human
auuacagguaugagccaccgcaccgggccugu

SEQ ID NO: 337550 - RNA, 32 nt, Human
auuacagguaugagccaccgcgcccagcccau

SEQ ID NO: 337551 - RNA, 32 nt, Human
auuacagguaugagccacugcgcccggccagu

SEQ ID NO: 337552 - RNA, 32 nt, Human
auuacaggugcacaccaccaugcccggcaaau

SEQ ID NO: 337553 - RNA, 32 nt, Human
auuacaggugcccaccaccaagcccugcaaau

SEQ ID NO: 337554 - RNA, 32 nt, Human
auuacaggugcccaccaccaugcccggcaaau

SEQ ID NO: 337555 - RNA, 32 nt, Human
auuacaggugcccaccaccaugcccggcuaau

SEQ ID NO: 337556 - RNA, 32 nt, Human
auuacaggugcccaccagcacgcccagcuaau

SEQ ID NO: 337557 - RNA, 32 nt, Human
auuacaggugcccaccuccacgcccagcuaau

SEQ ID NO: 337558 - RNA, 32 nt, Human
auuacaggugcccgccaccacgcccagcuaau

SEQ ID NO: 337559 - RNA, 32 nt, Human
auuacaggugcccgcuaccaugcccggguaau

SEQ ID NO: 337560 - RNA, 32 nt, Human
auuacaggugcccgcuacuaugcccggcuaau

SEQ ID NO: 337561 - RNA, 32 nt, Human
auuacaggugcgcaccaccaugcccggcuaac

SEQ ID NO: 337562 - RNA, 32 nt, Human
auuacaggugggagccacuacagcuggcccag

SEQ ID NO: 337563 - RNA, 32 nt, Human
auuacaggugggagccacugcacccggccuga

SEQ ID NO: 337564 - RNA, 32 nt, Human
auuacagguguaagccacugagcccggccuaa

SEQ ID NO: 337565 - RNA, 32 nt, Human
auuacagguguaagccacugcgcccggccuuu

SEQ ID NO: 337566 - RNA, 32 nt, Human
auuacagguguaagccacugcucccagccuuu

SEQ ID NO: 337567 - RNA, 32 nt, Human
auuacagguguaagccacugugcccggccucc

SEQ ID NO: 337568 - RNA, 32 nt, Human
auuacagguguaagccacugugccugguuuug

SEQ ID NO: 337569 - RNA, 32 nt, Human
auuacaggugugaaccaccacacccagcccac

SEQ ID NO: 337570 - RNA, 32 nt, Human
auuacaggugugaaccaccaugcccagccaga

SEQ ID NO: 337571 - RNA, 32 nt, Human
auuacaggugugaaccaccguacccagccuau

SEQ ID NO: 337572 - RNA, 32 nt, Human
auuacaggugugaaccacugcgcccagcccca

SEQ ID NO: 337573 - RNA, 32 nt, Human
auuacaggugugaaccacugugcccggccugu

SEQ ID NO: 337574 - RNA, 32 nt, Human
auuacaggugugaaucaccauacucagccuca

SEQ ID NO: 337575 - RNA, 32 nt, Human
auuacaggugugacccacugcgcacagcccca

SEQ ID NO: 337576 - RNA, 32 nt, Human
auuacaggugugagcaaccauugagacaagag

SEQ ID NO: 337577 - RNA, 32 nt, Human
auuacaggugugagcauagugagaccuuggcg

SEQ ID NO: 337578 - RNA, 32 nt, Human
auuacaggugugagccacagcacccaaccuuu

SEQ ID NO: 337579 - RNA, 32 nt, Human
auuacaggugugagccacagcaccuggccaac

SEQ ID NO: 337580 - RNA, 32 nt, Human
auuacaggugugagccacagcacucggccuaa

SEQ ID NO: 337581 - RNA, 32 nt, Human
auuacaggugugagccacagcgccuggcccag

SEQ ID NO: 337582 - RNA, 32 nt, Human
auuacaggugugagccacagugcccagcacuu

SEQ ID NO: 337583 - RNA, 32 nt, Human
auuacaggugugagccacagugccuggcccau

SEQ ID NO: 337584 - RNA, 32 nt, Human
auuacaggugugagccaccacacccagccaac

SEQ ID NO: 337585 - RNA, 32 nt, Human
auuacaggugugagccaccacacccagccaau

SEQ ID NO: 337586 - RNA, 32 nt, Human
auuacaggugugagccaccacacccagcccag

SEQ ID NO: 337587 - RNA, 32 nt, Human
auuacaggugugagccaccacacccagccucu

SEQ ID NO: 337588 - RNA, 32 nt, Human
auuacaggugugagccaccacacccggccaac

SEQ ID NO: 337589 - RNA, 32 nt, Human
auuacaggugugagccaccacacccggcccaa

SEQ ID NO: 337590 - RNA, 32 nt, Human
auuacaggugugagccaccacacccggccccc

SEQ ID NO: 337591 - RNA, 32 nt, Human
auuacaggugugagccaccacacccggccuau

SEQ ID NO: 337592 - RNA, 32 nt, Human
auuacaggugugagccaccacacccggccuua

SEQ ID NO: 337593 - RNA, 32 nt, Human
auuacaggugugagccaccacaccugacccau

SEQ ID NO: 337594 - RNA, 32 nt, Human
auuacaggugugagccaccacaccuggccaag

SEQ ID NO: 337595 - RNA, 32 nt, Human
auuacaggugugagccaccacaccuggcccau

SEQ ID NO: 337596 - RNA, 32 nt, Human
auuacaggugugagccaccacaccuggcccca

SEQ ID NO: 337597 - RNA, 32 nt, Human
auuacaggugugagccaccacacugggccaau

SEQ ID NO: 337598 - RNA, 32 nt, Human
auuacaggugugagccaccacauccagccuaa

SEQ ID NO: 337599 - RNA, 32 nt, Human
auuacaggugugagccaccacgaucagccucu

SEQ ID NO: 337600 - RNA, 32 nt, Human
auuacaggugugagccaccacgcauggcccug

SEQ ID NO: 337601 - RNA, 32 nt, Human
auuacaggugugagccaccacgcccagccaug

SEQ ID NO: 337602 - RNA, 32 nt, Human
auuacaggugugagccaccacgcccagccugu

SEQ ID NO: 337603 - RNA, 32 nt, Human
auuacaggugugagccaccacgcccagccuuu

SEQ ID NO: 337604 - RNA, 32 nt, Human
auuacaggugugagccaccacgcccggccaag

SEQ ID NO: 337605 - RNA, 32 nt, Human
auuacaggugugagccaccacgcccggccgau

SEQ ID NO: 337606 - RNA, 32 nt, Human
auuacaggugugagccaccacgcccgguacau

SEQ ID NO: 337607 - RNA, 32 nt, Human
auuacaggugugagccaccacgccuggacuau

SEQ ID NO: 337608 - RNA, 32 nt, Human
auuacaggugugagccaccacgccuggcuaau

SEQ ID NO: 337609 - RNA, 32 nt, Human
auuacaggugugagccaccacgccugggccca

SEQ ID NO: 337610 - RNA, 32 nt, Human
auuacaggugugagccaccacguccggccaau

SEQ ID NO: 337611 - RNA, 32 nt, Human
auuacaggugugagccaccaggcccagccuau

SEQ ID NO: 337612 - RNA, 32 nt, Human
auuacaggugugagccaccaggcucagccccc

SEQ ID NO: 337613 - RNA, 32 nt, Human
auuacaggugugagccaccaugccaggcccuc

SEQ ID NO: 337614 - RNA, 32 nt, Human
auuacaggugugagccaccaugcccaacaccc

SEQ ID NO: 337615 - RNA, 32 nt, Human
auuacaggugugagccaccaugcccagcccaa

SEQ ID NO: 337616 - RNA, 32 nt, Human
auuacaggugugagccaccaugcccagccucu

SEQ ID NO: 337617 - RNA, 32 nt, Human
auuacaggugugagccaccaugcccagccuga

SEQ ID NO: 337618 - RNA, 32 nt, Human
auuacaggugugagccaccaugcccagccugu

SEQ ID NO: 337619 - RNA, 32 nt, Human
auuacaggugugagccaccaugcccggccuug

SEQ ID NO: 337620 - RNA, 32 nt, Human
auuacaggugugagccaccaugcccggcuaau

SEQ ID NO: 337621 - RNA, 32 nt, Human
auuacaggugugagccaccaugccuggcccca

SEQ ID NO: 337622 - RNA, 32 nt, Human
auuacaggugugagccaccaugccuggccgug

SEQ ID NO: 337623 - RNA, 32 nt, Human
auuacaggugugagccaccaugccuggccuaa

SEQ ID NO: 337624 - RNA, 32 nt, Human
auuacaggugugagccaccaugccuggccugc

SEQ ID NO: 337625 - RNA, 32 nt, Human
auuacaggugugagccaccaugccuggcucug

SEQ ID NO: 337626 - RNA, 32 nt, Human
auuacaggugugagccaccaugccugggcuaa

SEQ ID NO: 337627 - RNA, 32 nt, Human
auuacaggugugagccaccaugccuggucacc

SEQ ID NO: 337628 - RNA, 32 nt, Human
auuacaggugugagccaccaugucuggccuug

SEQ ID NO: 337629 - RNA, 32 nt, Human
auuacaggugugagccacccugcccagccguc

SEQ ID NO: 337630 - RNA, 32 nt, Human
auuacaggugugagccaccgcacccaauccua

SEQ ID NO: 337631 - RNA, 32 nt, Human
auuacaggugugagccaccgcacccagccuau

SEQ ID NO: 337632 - RNA, 32 nt, Human
auuacaggugugagccaccgcacccggccaaa

SEQ ID NO: 337633 - RNA, 32 nt, Human
auuacaggugugagccaccgcacccggccaac

SEQ ID NO: 337634 - RNA, 32 nt, Human
auuacaggugugagccaccgcacccggcuggc

SEQ ID NO: 337635 - RNA, 32 nt, Human
auuacaggugugagccaccgcaccuggccaga

SEQ ID NO: 337636 - RNA, 32 nt, Human
auuacaggugugagccaccgcaccuggccugc

SEQ ID NO: 337637 - RNA, 32 nt, Human
auuacaggugugagccaccgcacucagcugau

SEQ ID NO: 337638 - RNA, 32 nt, Human
auuacaggugugagccaccgcgccaggccuca

SEQ ID NO: 337639 - RNA, 32 nt, Human
auuacaggugugagccaccgcgcccagccaag

SEQ ID NO: 337640 - RNA, 32 nt, Human
auuacaggugugagccaccgcgcccagccacc

SEQ ID NO: 337641 - RNA, 32 nt, Human
auuacaggugugagccaccgcgcccagcccgu

SEQ ID NO: 337642 - RNA, 32 nt, Human
auuacaggugugagccaccgcgcccggcccga

SEQ ID NO: 337643 - RNA, 32 nt, Human
auuacaggugugagccaccgcgcccggcccuu

SEQ ID NO: 337644 - RNA, 32 nt, Human
auuacaggugugagccaccgcgcccggccgag

SEQ ID NO: 337645 - RNA, 32 nt, Human
auuacaggugugagccaccgcgcccggccucu

SEQ ID NO: 337646 - RNA, 32 nt, Human
auuacaggugugagccaccgcgcccggcuguu

SEQ ID NO: 337647 - RNA, 32 nt, Human
auuacaggugugagccaccgcgccgggcccuu

SEQ ID NO: 337648 - RNA, 32 nt, Human
auuacaggugugagccaccgcgccuggcccuc

SEQ ID NO: 337649 - RNA, 32 nt, Human
auuacaggugugagccaccgcgccuggcccug

SEQ ID NO: 337650 - RNA, 32 nt, Human
auuacaggugugagccaccgcgccuggccuau

SEQ ID NO: 337651 - RNA, 32 nt, Human
auuacaggugugagccaccgcgccuggccugg

SEQ ID NO: 337652 - RNA, 32 nt, Human
auuacaggugugagccaccgcgcucggccaga

SEQ ID NO: 337653 - RNA, 32 nt, Human
auuacaggugugagccaccgcguccagccagc

SEQ ID NO: 337654 - RNA, 32 nt, Human
auuacaggugugagccaccgugaccagccaau

SEQ ID NO: 337655 - RNA, 32 nt, Human
auuacaggugugagccaccgugcacggccggc

SEQ ID NO: 337656 - RNA, 32 nt, Human
auuacaggugugagccaccgugcccagccuau

SEQ ID NO: 337657 - RNA, 32 nt, Human
auuacaggugugagccaccgugcccaggcccu

SEQ ID NO: 337658 - RNA, 32 nt, Human
auuacaggugugagccaccgugcccggccaag

SEQ ID NO: 337659 - RNA, 32 nt, Human
auuacaggugugagccaccgugcccggccacc

SEQ ID NO: 337660 - RNA, 32 nt, Human
auuacaggugugagccaccgugcccggcccag

SEQ ID NO: 337661 - RNA, 32 nt, Human
auuacaggugugagccaccgugcccggcccau

SEQ ID NO: 337662 - RNA, 32 nt, Human
auuacaggugugagccaccgugcccggccucu

SEQ ID NO: 337663 - RNA, 32 nt, Human
auuacaggugugagccaccgugccuggccaau

SEQ ID NO: 337664 - RNA, 32 nt, Human
auuacaggugugagccaccgugccuggccagu

SEQ ID NO: 337665 - RNA, 32 nt, Human
auuacaggugugagccaccgugccuggccgag

SEQ ID NO: 337666 - RNA, 32 nt, Human
auuacaggugugagccaccucgccugggcccc

SEQ ID NO: 337667 - RNA, 32 nt, Human
auuacaggugugagccacggcacccagccuag

SEQ ID NO: 337668 - RNA, 32 nt, Human
auuacaggugugagccacggcaccuggccaga

SEQ ID NO: 337669 - RNA, 32 nt, Human
auuacaggugugagccacggugcccggcccac

SEQ ID NO: 337670 - RNA, 32 nt, Human
auuacaggugugagccacuacacccagcccug

SEQ ID NO: 337671 - RNA, 32 nt, Human
auuacaggugugagccacuacgccccggccca

SEQ ID NO: 337672 - RNA, 32 nt, Human
auuacaggugugagccacuauacccgaccaga

SEQ ID NO: 337673 - RNA, 32 nt, Human
auuacaggugugagccacuaugccuggccuuc

SEQ ID NO: 337674 - RNA, 32 nt, Human
auuacaggugugagccacucugccuggccuac

SEQ ID NO: 337675 - RNA, 32 nt, Human
auuacaggugugagccacugagcccagccauu

SEQ ID NO: 337676 - RNA, 32 nt, Human
auuacaggugugagccacugagcccggccaca

SEQ ID NO: 337677 - RNA, 32 nt, Human
auuacaggugugagccacugcaacuggcuaua

SEQ ID NO: 337678 - RNA, 32 nt, Human
auuacaggugugagccacugcacccaacccaa

SEQ ID NO: 337679 - RNA, 32 nt, Human
auuacaggugugagccacugcacccacccaag

SEQ ID NO: 337680 - RNA, 32 nt, Human
auuacaggugugagccacugcacccagcccac

SEQ ID NO: 337681 - RNA, 32 nt, Human
auuacaggugugagccacugcacccagccuac

SEQ ID NO: 337682 - RNA, 32 nt, Human
auuacaggugugagccacugcacccagccugu

SEQ ID NO: 337683 - RNA, 32 nt, Human
auuacaggugugagccacugcacccagcugag

SEQ ID NO: 337684 - RNA, 32 nt, Human
auuacaggugugagccacugcaccccuccuaa

SEQ ID NO: 337685 - RNA, 32 nt, Human
auuacaggugugagccacugcacccgaccgau

SEQ ID NO: 337686 - RNA, 28 nt, Human
auuacaggugugagccacugcacccggc

SEQ ID NO: 337687 - RNA, 32 nt, Human
auuacaggugugagccacugcacccggccaac

SEQ ID NO: 337688 - RNA, 32 nt, Human
auuacaggugugagccacugcacccggccuga

SEQ ID NO: 337689 - RNA, 32 nt, Human
auuacaggugugagccacugcaccuggcagug

SEQ ID NO: 337690 - RNA, 32 nt, Human
auuacaggugugagccacugcaccuggccaug

SEQ ID NO: 337691 - RNA, 32 nt, Human
auuacaggugugagccacugcaccuggccucc

SEQ ID NO: 337692 - RNA, 32 nt, Human
auuacaggugugagccacugcaccuggcucua

SEQ ID NO: 337693 - RNA, 32 nt, Human
auuacaggugugagccacugcacguggccuaa

SEQ ID NO: 337694 - RNA, 32 nt, Human
auuacaggugugagccacugccuggccuggcc

SEQ ID NO: 337695 - RNA, 32 nt, Human
auuacaggugugagccacugcgcccagcacac

SEQ ID NO: 337696 - RNA, 32 nt, Human
auuacaggugugagccacugcgcccagccagc

SEQ ID NO: 337697 - RNA, 32 nt, Human
auuacaggugugagccacugcgcccagccuau

SEQ ID NO: 337698 - RNA, 32 nt, Human
auuacaggugugagccacugcgcccagucaug

SEQ ID NO: 337699 - RNA, 32 nt, Human
auuacaggugugagccacugcgcccggccaug

SEQ ID NO: 337700 - RNA, 32 nt, Human
auuacaggugugagccacugcgccgggccuaa

SEQ ID NO: 337701 - RNA, 32 nt, Human
auuacaggugugagccacugcgccuggccugu

SEQ ID NO: 337702 - RNA, 32 nt, Human
auuacaggugugagccacugggcccggucuuu

SEQ ID NO: 337703 - RNA, 32 nt, Human
auuacaggugugagccacugugcccagcaguu

SEQ ID NO: 337704 - RNA, 32 nt, Human
auuacaggugugagccacugugcccagccuaa

SEQ ID NO: 337705 - RNA, 32 nt, Human
auuacaggugugagccacugugcccagccucu

SEQ ID NO: 337706 - RNA, 32 nt, Human
auuacaggugugagccacugugcccagcguga

SEQ ID NO: 337707 - RNA, 32 nt, Human
auuacaggugugagccacugugcccggccaaa

SEQ ID NO: 337708 - RNA, 32 nt, Human
auuacaggugugagccacugugccuagccuau

SEQ ID NO: 337709 - RNA, 32 nt, Human
auuacaggugugagccacugugccuggccccc

SEQ ID NO: 337710 - RNA, 32 nt, Human
auuacaggugugagccacugugccuggccucc

SEQ ID NO: 337711 - RNA, 32 nt, Human
auuacaggugugagccacugugccuggccuga

SEQ ID NO: 337712 - RNA, 32 nt, Human
auuacaggugugagccacugugccuggccuuc

SEQ ID NO: 337713 - RNA, 32 nt, Human
auuacaggugugagccacugugcguggccucc

SEQ ID NO: 337714 - RNA, 32 nt, Human
auuacaggugugagccacugugcucggccuac

SEQ ID NO: 337715 - RNA, 32 nt, Human
auuacaggugugagccacuguggccgaccuac

SEQ ID NO: 337716 - RNA, 32 nt, Human
auuacaggugugagccacuguguccagccugu

SEQ ID NO: 337717 - RNA, 32 nt, Human
auuacaggugugagccacugugucuagccaag

SEQ ID NO: 337718 - RNA, 32 nt, Human
auuacaggugugagccacuucaccaggcccau

SEQ ID NO: 337719 - RNA, 32 nt, Human
auuacaggugugagccaucacgcucggccaag

SEQ ID NO: 337720 - RNA, 32 nt, Human
auuacaggugugagccauggcacccagcccua

SEQ ID NO: 337721 - RNA, 32 nt, Human
auuacaggugugagccauugugccuggccaag

SEQ ID NO: 337722 - RNA, 32 nt, Human
auuacaggugugagccgccaugccaggccggg

SEQ ID NO: 337723 - RNA, 32 nt, Human
auuacaggugugagccgccaugcccggccggg

SEQ ID NO: 337724 - RNA, 32 nt, Human
auuacaggugugagccgcugcgcucggccuuc

SEQ ID NO: 337725 - RNA, 32 nt, Human
auuacaggugugagccgcugggcccagccugg

SEQ ID NO: 337726 - RNA, 32 nt, Human
auuacaggugugagccuccaugcccagccuaa

SEQ ID NO: 337727 - RNA, 30 nt, Human
auuacaggugugagcuaccaugcccagcca

SEQ ID NO: 337728 - RNA, 32 nt, Human
auuacaggugugagcuaccgcgcccggccuau

SEQ ID NO: 337729 - RNA, 32 nt, Human
auuacaggugugagcuaccgcgccuggccaug

SEQ ID NO: 337730 - RNA, 32 nt, Human
auuacaggugugagcuacugcgcccagcccca

SEQ ID NO: 337731 - RNA, 32 nt, Human
auuacaggugugagcuacugugcccagccugc

SEQ ID NO: 337732 - RNA, 32 nt, Human
auuacaggugugagcugccacgcccagcccca

SEQ ID NO: 337733 - RNA, 32 nt, Human
auuacaggugugagcugccgcacccggccguu

SEQ ID NO: 337734 - RNA, 32 nt, Human
auuacaggugugaggcaccgugccuggcaguc

SEQ ID NO: 337735 - RNA, 32 nt, Human
auuacaggugugaggcacggugcccagccaau

SEQ ID NO: 337736 - RNA, 32 nt, Human
auuacaggugugagucaccacaccuggcugca

SEQ ID NO: 337737 - RNA, 32 nt, Human
auuacaggugugagucaccgcgccuggccggg

SEQ ID NO: 337738 - RNA, 32 nt, Human
auuacaggugugagucaccgcgccuggccuuu

SEQ ID NO: 337739 - RNA, 32 nt, Human
auuacaggugugagucaccgugcccagccugg

SEQ ID NO: 337740 - RNA, 32 nt, Human
auuacaggugugagucacugcacccagccgag

SEQ ID NO: 337741 - RNA, 32 nt, Human
auuacaggugugagucacugcaccuggccaag

SEQ ID NO: 337742 - RNA, 32 nt, Human
auuacaggugugagugcccaugccuggcagga

SEQ ID NO: 337743 - RNA, 32 nt, Human
auuacaggugugcgccaccacgcccaggaaau

SEQ ID NO: 337744 - RNA, 32 nt, Human
auuacaggugugugccaccacacccgacuaau

SEQ ID NO: 337745 - RNA, 32 nt, Human
auuacaggugugugucacugugccugacagcu

SEQ ID NO: 337746 - RNA, 32 nt, Human
auuacagguguuagccacugcuccuggcugau

SEQ ID NO: 337747 - RNA, 32 nt, Human
auuacagguuccugcuaccacgcccagcuaau

SEQ ID NO: 337748 - RNA, 32 nt, Human
auuacagguuugagccaccgugccuggccuaa

SEQ ID NO: 337749 - RNA, 32 nt, Human
auuacagguuugagccacugcaccuagucuuu

SEQ ID NO: 337750 - RNA, 32 nt, Human
auuacagucagaaaauccuuuuucuacugaau

SEQ ID NO: 337751 - RNA, 32 nt, Human
auuacagugccacugcaauccagccugggcaa

SEQ ID NO: 337752 - RNA, 32 nt, Human
auuacaguucuuuccucuuucugcucugccau

SEQ ID NO: 337753 - RNA, 32 nt, Human
auuacaguugccugccaccacgcccagcuaau

SEQ ID NO: 337754 - RNA, 32 nt, Human
auuacaguugcgagccacugugcguggccaga

SEQ ID NO: 337755 - RNA, 32 nt, Human
auuacaguugugagccacugugccuggccuuu

SEQ ID NO: 337756 - RNA, 32 nt, Human
auuacauaugcaauuguagguucaaccugucc

SEQ ID NO: 337757 - RNA, 32 nt, Human
auuacaucuucuuucuucuucucuccuuuucc

SEQ ID NO: 337758 - RNA, 32 nt, Human
auuacaugagccaccacaugcagccagauguu

SEQ ID NO: 337759 - RNA, 32 nt, Human
auuacauguauaccuauguaacaaacccgcau

SEQ ID NO: 337760 - RNA, 32 nt, Human
auuacauuaagaauuugucagauaauguguag

SEQ ID NO: 337761 - RNA, 32 nt, Human
auuacauuaugagggcagcugcagccugugug

SEQ ID NO: 337762 - RNA, 32 nt, Human
auuacauuccauccagccugggcgacaagagc

SEQ ID NO: 337763 - RNA, 32 nt, Human
auuacauucuguacuuacuaagugucaacagc

SEQ ID NO: 337764 - RNA, 32 nt, Human
auuacauugccucaaaaauugguccucgguaa

SEQ ID NO: 337765 - RNA, 32 nt, Human
auuacauuucuauuguuaaaaauaacagaaau

SEQ ID NO: 337766 - RNA, 32 nt, Human
auuacauuuggugugugucccauugaaucaac

SEQ ID NO: 337767 - RNA, 32 nt, Human
auuaccaagguuucaguguacuaguuuugaau

SEQ ID NO: 337768 - RNA, 32 nt, Human
auuaccaauuugaggcccaacaacaguguauu

SEQ ID NO: 337769 - RNA, 32 nt, Human
auuaccacaacagugccacuuauguggaaucu

SEQ ID NO: 337770 - RNA, 32 nt, Human
auuaccacaccaccuggaauaucauacugugg

SEQ ID NO: 337771 - RNA, 28 nt, Human
auuaccacaguugcugccuccuccagaa

SEQ ID NO: 337772 - RNA, 32 nt, Human
auuaccacaugggugcaagucagcauuguaag

SEQ ID NO: 337773 - RNA, 32 nt, Human
auuaccacauuuuuguauuuuaauagucuaca

SEQ ID NO: 337774 - RNA, 32 nt, Human
auuaccagaaaggugauaagccugcauguguc

SEQ ID NO: 337775 - RNA, 32 nt, Human
auuaccagaaagugccucugaaggagccagug

SEQ ID NO: 337776 - RNA, 32 nt, Human
auuaccagaguaaucagauguauaggcuccac

SEQ ID NO: 337777 - RNA, 32 nt, Human
auuaccagauccuaaagcuguguccuuaauga

SEQ ID NO: 337778 - RNA, 32 nt, Human
auuaccagcacuuacaagcacugugaaaacug

SEQ ID NO: 337779 - RNA, 32 nt, Human
auuaccagcuucuaaaugaauguuguuuuuga

SEQ ID NO: 337780 - RNA, 32 nt, Human
auuaccagguucuuauaaauacagcuuguaca

SEQ ID NO: 337781 - RNA, 32 nt, Human
auuaccagucauuaaaguccaguauuacuaag

SEQ ID NO: 337782 - RNA, 32 nt, Human
auuaccauaaaugcuauacauccaugcauugg

SEQ ID NO: 337783 - RNA, 32 nt, Human
auuaccauagacgacuccuagaggacagugcu

SEQ ID NO: 337784 - RNA, 32 nt, Human
auuaccaucugucccuuaucucuuggggcaua

SEQ ID NO: 337785 - RNA, 32 nt, Human
auuaccauugucauccaugcuuucagagggac

SEQ ID NO: 337786 - RNA, 32 nt, Human
auuacccagcggcugcuaaccccucuccucgc

SEQ ID NO: 337787 - RNA, 32 nt, Human
auuacccagcuggucucgagcuccuggccuca

SEQ ID NO: 337788 - RNA, 32 nt, Human
auuacccaggagaaaucaagugauccucaagg

SEQ ID NO: 337789 - RNA, 32 nt, Human
auuacccggcugcgguccagagccaagcggcg

SEQ ID NO: 337790 - RNA, 32 nt, Human
auuacccgggcuugguggagugcaccuguaau

SEQ ID NO: 337791 - RNA, 32 nt, Human
auuacccucuacugccccuugggcccccuguc

SEQ ID NO: 337792 - RNA, 32 nt, Human
auuacccugccugcucugugcuuugcugcaga

SEQ ID NO: 337793 - RNA, 32 nt, Human
auuacccuuggucacugugauuucuguuuugu

SEQ ID NO: 337794 - RNA, 32 nt, Human
auuaccggcaugagccacugcgccuggccgac

SEQ ID NO: 337795 - RNA, 32 nt, Human
auuaccggcgugagccaccaugcccagccuau

SEQ ID NO: 337796 - RNA, 32 nt, Human
auuaccggcgugagccaccaugccuggcccgg

SEQ ID NO: 337797 - RNA, 32 nt, Human
auuaccggcuugagccaccacacccggcacau

SEQ ID NO: 337798 - RNA, 32 nt, Human
auuaccggugugagccaccgcgccggcccagc

SEQ ID NO: 337799 - RNA, 32 nt, Human
auuaccggugugagccacugcgcccggccuuu

SEQ ID NO: 337800 - RNA, 32 nt, Human
auuaccgugguggcaggcgccuguaaucccag

SEQ ID NO: 337801 - RNA, 32 nt, Human
auuaccucacugcauuccagccugggcaacag

SEQ ID NO: 337802 - RNA, 32 nt, Human
auuaccuccuacuugccauucacccaucaaug

SEQ ID NO: 337803 - RNA, 32 nt, Human
auuaccucuaauugcuuuauuucaguguauga

SEQ ID NO: 337804 - RNA, 32 nt, Human
auuaccuggacccagaggguguaggaauggca

SEQ ID NO: 337805 - RNA, 32 nt, Human
auuaccugggauuacaggcaugugccaccaca

SEQ ID NO: 337806 - RNA, 32 nt, Human
auuaccugggcaugguggcaggugcuuauaau

SEQ ID NO: 337807 - RNA, 32 nt, Human
auuaccugguucugcuauccuuagucauaacu

SEQ ID NO: 337808 - RNA, 32 nt, Human
auuaccugucuuccuguuucucaagaauauuu

SEQ ID NO: 337809 - RNA, 32 nt, Human
auuaccuguugcugucaaguggcugggggcca

SEQ ID NO: 337810 - RNA, 32 nt, Human
auuaccuuauuggauauuugauauuugguuau

SEQ ID NO: 337811 - RNA, 31 nt, Human
auuaccuucagaagcucucuguugaauucca

SEQ ID NO: 337812 - RNA, 32 nt, Human
auuaccuucuaucccuuccuccacgugaggac

SEQ ID NO: 337813 - RNA, 32 nt, Human
auuaccuugacaggauaacugucagucuuguc

SEQ ID NO: 337814 - RNA, 32 nt, Human
auuaccuugcuaaggaauagcacacagugaag

SEQ ID NO: 337815 - RNA, 32 nt, Human
auuaccuugggaggggaaggggcagugguggc

SEQ ID NO: 337816 - RNA, 32 nt, Human
auuaccuugguaucugaaguuucccucugucu

SEQ ID NO: 337817 - RNA, 32 nt, Human
auuaccuuuaccucuuuuuaccaaaauguuaa

SEQ ID NO: 337818 - RNA, 24 nt, Human
auuaccuuuccuuugucugccuca

SEQ ID NO: 337819 - RNA, 32 nt, Human
auuaccuuucuccuucccaaaaagcuuuaucu

SEQ ID NO: 337820 - RNA, 32 nt, Human
auuaccuuuggucuaucugugugugcucugcc

SEQ ID NO: 337821 - RNA, 32 nt, Human
auuaccuuuuuagcuauuuuuaauagucuucu

SEQ ID NO: 337822 - RNA, 32 nt, Human
auuacgacccugcaacaggaaaaugaggaccu

SEQ ID NO: 337823 - RNA, 32 nt, Human
auuacgacuccuguaaucccagcacuuuggga

SEQ ID NO: 337824 - RNA, 32 nt, Human
auuacgccacugcaccccaaccugggcgacag

SEQ ID NO: 337825 - RNA, 32 nt, Human
auuacgccacugcacuaaugucuggugacaga

SEQ ID NO: 337826 - RNA, 32 nt, Human
auuacgccacugcacuccagccugggcaacac

SEQ ID NO: 337827 - RNA, 32 nt, Human
auuacgccacugcacuccagccugggcaacag

SEQ ID NO: 337828 - RNA, 32 nt, Human
auuacgccacugcacuccagccugggugacgg

SEQ ID NO: 337829 - RNA, 32 nt, Human
auuacgccacugcauuguagccugggcaacag

SEQ ID NO: 337830 - RNA, 32 nt, Human
auuacgccuguaaucccagcacuuugggaggu

SEQ ID NO: 337831 - RNA, 32 nt, Human
auuacggacgugagccaccacgccuggcccag

SEQ ID NO: 337832 - RNA, 32 nt, Human
auuacggcucagugcaaccuugaccuccuggg

SEQ ID NO: 337833 - RNA, 32 nt, Human
auuacgggcaugagccacugcacccagcaaug

SEQ ID NO: 337834 - RNA, 32 nt, Human
auuacgggcaugagccacugcacccggcccug

SEQ ID NO: 337835 - RNA, 32 nt, Human
auuacgggcgugagccaccgugcucggcccaa

SEQ ID NO: 337836 - RNA, 32 nt, Human
auuacgggcgugagccacuucacccggcccgg

SEQ ID NO: 337837 - RNA, 32 nt, Human
auuacgggggugagccacugcgcccggccccu

SEQ ID NO: 337838 - RNA, 32 nt, Human
auuacgggugugagcaacccugcccggccagu

SEQ ID NO: 337839 - RNA, 32 nt, Human
auuacgggugugagccaccacacccggcccaa

SEQ ID NO: 337840 - RNA, 32 nt, Human
auuacgggugugagccaccacgccuggcuaau

SEQ ID NO: 337841 - RNA, 32 nt, Human
auuacgggugugagccaccgugcccagccuuu

SEQ ID NO: 337842 - RNA, 32 nt, Human
auuacgggugugagccgccgcgccgagcaugg

SEQ ID NO: 337843 - RNA, 32 nt, Human
auuacgguagugcauugccuuaguggcuugcc

SEQ ID NO: 337844 - RNA, 32 nt, Human
auuacgguugaguucuguggcuucuucacuug

SEQ ID NO: 337845 - RNA, 32 nt, Human
auuacgucacagcuucccaucugguugcuuuc

SEQ ID NO: 337846 - RNA, 32 nt, Human
auuacgucacugcauuccagccugggugacag

SEQ ID NO: 337847 - RNA, 32 nt, Human
auuacgucaguguggcugccuuccaggugaug

SEQ ID NO: 337848 - RNA, 32 nt, Human
auuacgugaacgcauccucuuugcuaggucaa

SEQ ID NO: 337849 - RNA, 32 nt, Human
auuacuaaaaacacaaaaauuagccaggugug

SEQ ID NO: 337850 - RNA, 32 nt, Human
auuacuaacuccaaggggaggguuccccugcu

SEQ ID NO: 337851 - RNA, 32 nt, Human
auuacuaauaguuucacaucaccucacugcac

SEQ ID NO: 337852 - RNA, 32 nt, Human
auuacuacaacuaaccuguugugcucaccucu

SEQ ID NO: 337853 - RNA, 32 nt, Human
auuacuagaggagagaguugaaggagcugaga

SEQ ID NO: 337854 - RNA, 32 nt, Human
auuacuaugugagccuuuauuuccuucagaua

SEQ ID NO: 337855 - RNA, 32 nt, Human
auuacucaaauaagggcacacagugaucauau

SEQ ID NO: 337856 - RNA, 32 nt, Human
auuacucaaauacccaaaucccauuccaaguu

SEQ ID NO: 337857 - RNA, 32 nt, Human
auuacucaacagcucuccagaguugcacauua

SEQ ID NO: 337858 - RNA, 32 nt, Human
auuacucacucaccagccucccucuuuugucc

SEQ ID NO: 337859 - RNA, 32 nt, Human
auuacucaguggaaagcuaaguucagaaggua

SEQ ID NO: 337860 - RNA, 32 nt, Human
auuacucauucaaauuuccccugggcacguaa

SEQ ID NO: 337861 - RNA, 32 nt, Human
auuacuccacaccuuuuaugaaucaaauauga

SEQ ID NO: 337862 - RNA, 32 nt, Human
auuacuccacugcacuccagccugggcaacag

SEQ ID NO: 337863 - RNA, 32 nt, Human
auuacucccaauugaauuaucuaccucauuuu

SEQ ID NO: 337864 - RNA, 32 nt, Human
auuacucccccaaaccuccuggcucucaagga

SEQ ID NO: 337865 - RNA, 32 nt, Human
auuacucuccacccccuuacucugcuauaauu

SEQ ID NO: 337866 - RNA, 32 nt, Human
auuacugaaauuuuacaauucaagagaggaaa

SEQ ID NO: 337867 - RNA, 32 nt, Human
auuacugaagucagauuggaaccacuaaagau

SEQ ID NO: 337868 - RNA, 32 nt, Human
auuacugagaagauaaggggagagggauugag

SEQ ID NO: 337869 - RNA, 32 nt, Human
auuacugagcuuuuugacauuuccuuagacuu

SEQ ID NO: 337870 - RNA, 32 nt, Human
auuacugcagugggaaggugggagggagacgg

SEQ ID NO: 337871 - RNA, 32 nt, Human
auuacugccaaacaucucaccuuuaucaauga

SEQ ID NO: 337872 - RNA, 32 nt, Human
auuacugcccuaaaaugucucuggcaauguac

SEQ ID NO: 337873 - RNA, 32 nt, Human
auuacugcgguguuaagguagcccugccacgu

SEQ ID NO: 337874 - RNA, 32 nt, Human
auuacugcuggguuuuggaggcugcgauaaaa

SEQ ID NO: 337875 - RNA, 32 nt, Human
auuacuggauaaaucacuucaauuucccaaug

SEQ ID NO: 337876 - RNA, 32 nt, Human
auuacuggauccuuguguugcagcccuaagau

SEQ ID NO: 337877 - RNA, 32 nt, Human
auuacuggcaaaaacggccagguacaacaccu

SEQ ID NO: 337878 - RNA, 32 nt, Human
auuacuggcaugagccaccgaggcuggccuga

SEQ ID NO: 337879 - RNA, 32 nt, Human
auuacuggcaugagccacugugcccagcccgg

SEQ ID NO: 337880 - RNA, 32 nt, Human
auuacuggcgugagccaccgugccuggccagc

SEQ ID NO: 337881 - RNA, 32 nt, Human
auuacuggcucucaagcuauaguuuguuuuca

SEQ ID NO: 337882 - RNA, 32 nt, Human
auuacuggcuuaguuuugcuuuccuuugacac

SEQ ID NO: 337883 - RNA, 32 nt, Human
auuacugggagguggagguggaaaacgugauu

SEQ ID NO: 337884 - RNA, 32 nt, Human
auuacugggauuacaggcaugaggcaucacag

SEQ ID NO: 337885 - RNA, 32 nt, Human
auuacugguacacaccugcauugccucaccag

SEQ ID NO: 337886 - RNA, 32 nt, Human
auuacuggugcacaccaccacacucagcuaau

SEQ ID NO: 337887 - RNA, 32 nt, Human
auuacuggugcccaccaccaugcccagcuaau

SEQ ID NO: 337888 - RNA, 32 nt, Human
auuacuggugugagccacugugucuggccaga

SEQ ID NO: 337889 - RNA, 32 nt, Human
auuacugguguuuucaugccuugaggauucuu

SEQ ID NO: 337890 - RNA, 32 nt, Human
auuacuguaaagaacuuccuguaaaacacguu

SEQ ID NO: 337891 - RNA, 32 nt, Human
auuacugucaauaaacagcuucaugccuuugu

SEQ ID NO: 337892 - RNA, 32 nt, Human
auuacugugggccacucgcugcagaaauguag

SEQ ID NO: 337893 - RNA, 32 nt, Human
auuacuguguuguaauaaacauguuuguaugu

SEQ ID NO: 337894 - RNA, 32 nt, Human
auuacuguuuacugguggaguacauaugcaua

SEQ ID NO: 337895 - RNA, 32 nt, Human
auuacuguuuaggguauaauuuuuaacuugac

SEQ ID NO: 337896 - RNA, 32 nt, Human
auuacuguuucacauguacagcuuucuacuuc

SEQ ID NO: 337897 - RNA, 32 nt, Human
auuacuuaaacucuuuuccuguccugcauuaa

SEQ ID NO: 337898 - RNA, 32 nt, Human
auuacuuaagcagagggagagaaccucuacug

SEQ ID NO: 337899 - RNA, 32 nt, Human
auuacuuacuacugcacuccugcuuuuguggg

SEQ ID NO: 337900 - RNA, 32 nt, Human
auuacuuaggaaaugcuacaugcggaaugugc

SEQ ID NO: 337901 - RNA, 32 nt, Human
auuacuuauaacaaagcacaaauuacuucuaa

SEQ ID NO: 337902 - RNA, 32 nt, Human
auuacuuauuugggagaaacccugauuugugu

SEQ ID NO: 337903 - RNA, 31 nt, Human
auuacuucaaccugggagguugaggcugcag

SEQ ID NO: 337904 - RNA, 32 nt, Human
auuacuucaaccugggagguugaggcugcagu

SEQ ID NO: 337905 - RNA, 32 nt, Human
auuacuucucaaggauuauuagaaucuuaggu

SEQ ID NO: 337906 - RNA, 32 nt, Human
auuacuucugcuucacuuacugccuuuucuca

SEQ ID NO: 337907 - RNA, 32 nt, Human
auuacuugaacccaggaggcagagaucgcagu

SEQ ID NO: 337908 - RNA, 32 nt, Human
auuacuugaacccgggagguggagguugcagu

SEQ ID NO: 337909 - RNA, 32 nt, Human
auuacuuggguuauuucuugaaugaacauaca

SEQ ID NO: 337910 - RNA, 32 nt, Human
auuacuugugcauuugccucaccucugacaau

SEQ ID NO: 337911 - RNA, 32 nt, Human
auuacuuguucaauacagccacugauggaaug

SEQ ID NO: 337912 - RNA, 32 nt, Human
auuacuuucucauucuuuuaguguauucaaca

SEQ ID NO: 337913 - RNA, 32 nt, Human
auuacuuugucccgcuuauucuccucccuguu

SEQ ID NO: 337914 - RNA, 32 nt, Human
auuacuuuucaaagaauacuguucauaugcau

SEQ ID NO: 337915 - RNA, 32 nt, Human
auuacuuuugggaggggaaccaguagguugag

SEQ ID NO: 337916 - RNA, 32 nt, Human
auuagaaagaguuuuauuuaauuuucucccca

SEQ ID NO: 337917 - RNA, 32 nt, Human
auuagaaaugacucccuuucaaagucaaucuu

SEQ ID NO: 337918 - RNA, 32 nt, Human
auuagaacucuagcccaggcuuugucaacugu

SEQ ID NO: 337919 - RNA, 32 nt, Human
auuagaagaaacacaccuucaaacuucaacuu

SEQ ID NO: 337920 - RNA, 32 nt, Human
auuagaagaccugaaagccacuuuucauguuu

SEQ ID NO: 337921 - RNA, 32 nt, Human
auuagaaggagaggguaggugcagagcuggag

SEQ ID NO: 337922 - RNA, 32 nt, Human
auuagaaggggcccucgcuauuuucuguguca

SEQ ID NO: 337923 - RNA, 32 nt, Human
auuagaagguauuguucagugggauuuggaga

SEQ ID NO: 337924 - RNA, 32 nt, Human
auuagaauaaauccuaaucucuaaucuaagaa

SEQ ID NO: 337925 - RNA, 32 nt, Human
auuagaauuugacaacgucauuaagaaggaua

SEQ ID NO: 337926 - RNA, 32 nt, Human
auuagacaaauuagggaauucaggguuagaga

SEQ ID NO: 337927 - RNA, 32 nt, Human
auuagacagauacaaaauagcaaggcaguuaa

SEQ ID NO: 337928 - RNA, 32 nt, Human
auuagaccaaacccuugugacuuuuagguaag

SEQ ID NO: 337929 - RNA, 32 nt, Human
auuagaccaggaaaacuuaauguaauauuauu

SEQ ID NO: 337930 - RNA, 32 nt, Human
auuagaccuguaaaauguaguuauuauuccug

SEQ ID NO: 337931 - RNA, 32 nt, Human
auuagacgguuuccagguuuucucccagguga

SEQ ID NO: 337932 - RNA, 32 nt, Human
auuagacuuccucauucuuucucagaccucag

SEQ ID NO: 337933 - RNA, 32 nt, Human
auuagacuucucugcugacucucagaguugug

SEQ ID NO: 337934 - RNA, 32 nt, Human
auuagagaauaaacagccacacacacauuuuu

SEQ ID NO: 337935 - RNA, 32 nt, Human
auuagagagacuauucuuuucccauuggguau

SEQ ID NO: 337936 - RNA, 32 nt, Human
auuagagaguauuguucagugggauuuggaaa

SEQ ID NO: 337937 - RNA, 32 nt, Human
auuagagaguucccauuccuccacauccuuac

SEQ ID NO: 337938 - RNA, 32 nt, Human
auuagagauugacuucagaaacuuuuucuaaa

SEQ ID NO: 337939 - RNA, 32 nt, Human
auuagagccuugacuauuuugaagauuaaaug

SEQ ID NO: 337940 - RNA, 32 nt, Human
auuagaggaauagacucagccuucauguuugu

SEQ ID NO: 337941 - RNA, 32 nt, Human
auuagaggacggaagcagagggugcuguuuca

SEQ ID NO: 337942 - RNA, 32 nt, Human
auuagaggagauaaaucuccuuguuaucacaa

SEQ ID NO: 337943 - RNA, 32 nt, Human
auuagaggauauuguucagugggauuuggaga

SEQ ID NO: 337944 - RNA, 32 nt, Human
auuagaggcagaggaagagacagaggaguuuu

SEQ ID NO: 337945 - RNA, 32 nt, Human
auuagaggcaugagccaccgugcccagccuca

SEQ ID NO: 337946 - RNA, 32 nt, Human
auuagaggcaugagccacugcgcccggccccu

SEQ ID NO: 337947 - RNA, 32 nt, Human
auuagaggcaugagccacuguccccggccucc

SEQ ID NO: 337948 - RNA, 32 nt, Human
auuagaggcuauuguucagugggauuuggaga

SEQ ID NO: 337949 - RNA, 32 nt, Human
auuagaggcuugagccaccaggcccggcugga

SEQ ID NO: 337950 - RNA, 32 nt, Human
auuagaggguauuguucagugggauuuggaga

SEQ ID NO: 337951 - RNA, 32 nt, Human
auuagagggucuuucauggggagagaaggaga

SEQ ID NO: 337952 - RNA, 32 nt, Human
auuagaggugugagccaccacgcccggccuau

SEQ ID NO: 337953 - RNA, 32 nt, Human
auuagaggugugagccacugugcccagcccau

SEQ ID NO: 337954 - RNA, 32 nt, Human
auuagagucagccuucccccucccagggccag

SEQ ID NO: 337955 - RNA, 32 nt, Human
auuagagucaucuggggaucuuuuaaaaaccc

SEQ ID NO: 337956 - RNA, 32 nt, Human
auuagaguccucagaagagaacuuaucuagug

SEQ ID NO: 337957 - RNA, 32 nt, Human
auuagaguucagcucagcugggcauggaguua

SEQ ID NO: 337958 - RNA, 32 nt, Human
auuagaguugugagccaccgcugccagcccag

SEQ ID NO: 337959 - RNA, 32 nt, Human
auuagaucauuucuaaugguccucaaauaaug

SEQ ID NO: 337960 - RNA, 32 nt, Human
auuagaugaagguguugcaaaagauaaugcua

SEQ ID NO: 337961 - RNA, 30 nt, Human
auuagaugccuucgucuuuucagucaucau

SEQ ID NO: 337962 - RNA, 32 nt, Human
auuagaugucaugaggaaacuacugaacuagc

SEQ ID NO: 337963 - RNA, 32 nt, Human
auuagcaaaaaucauacaauauacagaugguc

SEQ ID NO: 337964 - RNA, 32 nt, Human
auuagcaaaaucaugaugcucagcuguuggga

SEQ ID NO: 337965 - RNA, 18 nt, Human
auuagcaaacacaagaca

SEQ ID NO: 337966 - RNA, 32 nt, Human
auuagcaaaucaggaaugcaaggcuuguucaa

SEQ ID NO: 337967 - RNA, 32 nt, Human
auuagcaaguuccuuuuuacuucaagcuacuu

SEQ ID NO: 337968 - RNA, 32 nt, Human
auuagcaauagcuccacuuugggugggggaga

SEQ ID NO: 337969 - RNA, 32 nt, Human
auuagcaauauuaaaugccaaaauuccauuga

SEQ ID NO: 337970 - RNA, 32 nt, Human
auuagcacuccccucccucaucuuuucuucua

SEQ ID NO: 337971 - RNA, 32 nt, Human
auuagcagccaaggaaaagggaaacaugagcu

SEQ ID NO: 337972 - RNA, 32 nt, Human
auuagcaggacaagggcucucuccucaguuuc

SEQ ID NO: 337973 - RNA, 32 nt, Human
auuagcaugagacugggcggcuguccugcuuc

SEQ ID NO: 337974 - RNA, 32 nt, Human
auuagcaugccaccaugccccuccuccgaugc

SEQ ID NO: 337975 - RNA, 32 nt, Human
auuagcauuacagaagacacacacaucacaua

SEQ ID NO: 337976 - RNA, 32 nt, Human
auuagccaaaaacccaguagccuagaagauac

SEQ ID NO: 337977 - RNA, 32 nt, Human
auuagccaagaaagcaaaguacugaugaauuc

SEQ ID NO: 337978 - RNA, 32 nt, Human
auuagccaccaccacugaaaacucagccgaau

SEQ ID NO: 337979 - RNA, 32 nt, Human
auuagccacgcuuccuguagcauacagugguc

SEQ ID NO: 337980 - RNA, 32 nt, Human
auuagccagauaugauggcaggcgccuguaau

SEQ ID NO: 337981 - RNA, 32 nt, Human
auuagccaggcauaauggcacacaccuguagu

SEQ ID NO: 337982 - RNA, 32 nt, Human
auuagccaggcaugauggcacacaccuguaau

SEQ ID NO: 337983 - RNA, 32 nt, Human
auuagccaggcauggugacacacuccuauaau

SEQ ID NO: 337984 - RNA, 32 nt, Human
auuagccaggcguggugaugggcaccuguaau

SEQ ID NO: 337985 - RNA, 32 nt, Human
auuagccaggcguggugaugggugccuguaau

SEQ ID NO: 337986 - RNA, 32 nt, Human
auuagccaggugguaguggugugugccuauaa

SEQ ID NO: 337987 - RNA, 32 nt, Human
auuagccagguguggcggcguaaucccaugcu

SEQ ID NO: 337988 - RNA, 32 nt, Human
auuagccaggugugguggcaagugccuuuaau

SEQ ID NO: 337989 - RNA, 32 nt, Human
auuagccaggugugguggcacacaccaguaau

SEQ ID NO: 337990 - RNA, 32 nt, Human
auuagccaggugugguggcacgcaccaguagu

SEQ ID NO: 337991 - RNA, 32 nt, Human
auuagccagguucucauuagauuuugcucggg

SEQ ID NO: 337992 - RNA, 32 nt, Human
auuagccaugcaacauggauauguauugggca

SEQ ID NO: 337993 - RNA, 32 nt, Human
auuagccauuugagaugagaugagacuacuug

SEQ ID NO: 337994 - RNA, 32 nt, Human
auuagcccuagaaaggagguugggguguaugg

SEQ ID NO: 337995 - RNA, 32 nt, Human
auuagcccugucuuagagugugaggaaaaugu

SEQ ID NO: 337996 - RNA, 32 nt, Human
auuagcccuucaccaucuaccugcuuggucuu

SEQ ID NO: 337997 - RNA, 32 nt, Human
auuagccggccgugguggcaagugccugaaau

SEQ ID NO: 337998 - RNA, 32 nt, Human
auuagccgggcauguuggcacacaccuauagu

SEQ ID NO: 337999 - RNA, 32 nt, Human
auuagccgggcgugguggcacacuccuguaau

SEQ ID NO: 338000 - RNA, 32 nt, Human
auuagccgucuucugcuacaucaaugcagcaa

SEQ ID NO: 338001 - RNA, 32 nt, Human
auuagccuaugugcaugcagcaucuaaguaau

SEQ ID NO: 338002 - RNA, 32 nt, Human
auuagccucuuccucauuauggagcugauuuu

SEQ ID NO: 338003 - RNA, 24 nt, Human
auuagccuggacaacauggugaaa

SEQ ID NO: 338004 - RNA, 32 nt, Human
auuagccuggacaacauggugaaaccccaucu

SEQ ID NO: 338005 - RNA, 24 nt, Human
auuagccuggccaagauggugaaa

SEQ ID NO: 338006 - RNA, 32 nt, Human
auuagccugggcaacagagcaagacucugucu

SEQ ID NO: 338007 - RNA, 32 nt, Human
auuagccugguaaggccgggugcaguggcuca

SEQ ID NO: 338008 - RNA, 32 nt, Human
auuagccugguggcucacgccuguaaucccag

SEQ ID NO: 338009 - RNA, 32 nt, Human
auuagcggcaugcaccaccacgcccagcuauu

SEQ ID NO: 338010 - RNA, 32 nt, Human
auuagcucaccuuucuccuaggcaauuauaau

SEQ ID NO: 338011 - RNA, 32 nt, Human
auuagcucacugcagucuccaccuccugagcu

SEQ ID NO: 338012 - RNA, 32 nt, Human
auuagcuccuaacaacacuuugaaguaauucu

SEQ ID NO: 338013 - RNA, 32 nt, Human
auuagcugagauauuaacuuacucacacggac

SEQ ID NO: 338014 - RNA, 32 nt, Human
auuagcugagugugguggugcaugcauguagu

SEQ ID NO: 338015 - RNA, 21 nt, Human
auuagcugcggagcccuggaa

SEQ ID NO: 338016 - RNA, 32 nt, Human
auuagcugcuuccuccccuccuggcacccacu

SEQ ID NO: 338017 - RNA, 32 nt, Human
auuagcugggauuacaggcaugcgccaccagg

SEQ ID NO: 338018 - RNA, 32 nt, Human
auuagcugggauuacaggcaugcgccaccaug

SEQ ID NO: 338019 - RNA, 32 nt, Human
auuagcugggauuacaggcaugugccacuacc

SEQ ID NO: 338020 - RNA, 32 nt, Human
auuagcugggauuacaggcgugugccaccaug

SEQ ID NO: 338021 - RNA, 32 nt, Human
auuagcugggcgucugggcaugguggcacaca

SEQ ID NO: 338022 - RNA, 32 nt, Human
auuagcuggguaugaugaugcacgccuguaaa

SEQ ID NO: 338023 - RNA, 32 nt, Human
auuagcuguagaguccuuggcaaaucacaaca

SEQ ID NO: 338024 - RNA, 32 nt, Human
auuagcuguugugagauauuucucggguccuu

SEQ ID NO: 338025 - RNA, 18 nt, Human
auuagcuucacaagcaca

SEQ ID NO: 338026 - RNA, 32 nt, Human
auuagcuuucaguuccuuugguagugugggca

SEQ ID NO: 338027 - RNA, 32 nt, Human
auuagcuuuccacagggauuucuugaaaugcu

SEQ ID NO: 338028 - RNA, 32 nt, Human
auuagcuuuccucugcuuuaugaccacagguu

SEQ ID NO: 338029 - RNA, 32 nt, Human
auuagcuuugcuucaaaagaaauaggcuuaau

SEQ ID NO: 338030 - RNA, 32 nt, Human
auuagcuuuuaguuuuaaaacucuuuauccca

SEQ ID NO: 338031 - RNA, 32 nt, Human
auuagcuuuuucucagauguugaaacuuugaa

SEQ ID NO: 338032 - RNA, 32 nt, Human
auuaggaaaaacaaacuacccgcaucuucugu

SEQ ID NO: 338033 - RNA, 32 nt, Human
auuaggaaaacagguguuccuccuccccucuc

SEQ ID NO: 338034 - RNA, 32 nt, Human
auuaggaaagaugaguuuuaccucugguacac

SEQ ID NO: 338035 - RNA, 32 nt, Human
auuaggaaaggggcugugcaugugggugcagc

SEQ ID NO: 338036 - RNA, 32 nt, Human
auuaggaaaugagucuguauggaaaucucacc

SEQ ID NO: 338037 - RNA, 32 nt, Human
auuaggaaucucagugcagagguccucagagg

SEQ ID NO: 338038 - RNA, 32 nt, Human
auuaggacaguccugcaucucucucacaaagg

SEQ ID NO: 338039 - RNA, 32 nt, Human
auuaggacauggucauauuuuaguuggcacaa

SEQ ID NO: 338040 - RNA, 32 nt, Human
auuaggaugauuguuaauacugcacuguggau

SEQ ID NO: 338041 - RNA, 32 nt, Human
auuaggauugcaugaguccaggaguucgagac

SEQ ID NO: 338042 - RNA, 32 nt, Human
auuaggcaacccaagugugacuccacucaagu

SEQ ID NO: 338043 - RNA, 32 nt, Human
auuaggcagccugcucuccucuuaugauggcc

SEQ ID NO: 338044 - RNA, 32 nt, Human
auuaggcaggcagaggcaguuaugggcuucug

SEQ ID NO: 338045 - RNA, 32 nt, Human
auuaggcauucauccugccaaccagggcaggc

SEQ ID NO: 338046 - RNA, 32 nt, Human
auuaggcccagagagacaaagacagaucugaa

SEQ ID NO: 338047 - RNA, 32 nt, Human
auuaggcccagccugccauggcagcuccaaca

SEQ ID NO: 338048 - RNA, 32 nt, Human
auuaggcccccaucauccucuggcuuggccac

SEQ ID NO: 338049 - RNA, 32 nt, Human
auuaggcugcaacucugauauacagagacuag

SEQ ID NO: 338050 - RNA, 32 nt, Human
auuaggcugcugcugcugcuuccaaauggggg

SEQ ID NO: 338051 - RNA, 32 nt, Human
auuagggaggcugaggcaggagaaucgcuuga

SEQ ID NO: 338052 - RNA, 32 nt, Human
auuagggaucauugcagacucugccucucagg

SEQ ID NO: 338053 - RNA, 32 nt, Human
auuagggcaagcuaguugaccugcacuuuauc

SEQ ID NO: 338054 - RNA, 32 nt, Human
auuagggcagaguuugcacguccucuggucac

SEQ ID NO: 338055 - RNA, 32 nt, Human
auuagggcccaugccagcaucccagugaaguu

SEQ ID NO: 338056 - RNA, 32 nt, Human
auuaggggaggaauguuuucaucaccuaaguu

SEQ ID NO: 338057 - RNA, 32 nt, Human
auuaggggcaugagccaccgcacccagcuugc

SEQ ID NO: 338058 - RNA, 32 nt, Human
auuagggggaaugcaaacuggaagggaauacg

SEQ ID NO: 338059 - RNA, 32 nt, Human
auuagggguggaggcagcaggaugagcagaaa

SEQ ID NO: 338060 - RNA, 32 nt, Human
auuaggguaccacauuuuaacuuaccaugacu

SEQ ID NO: 338061 - RNA, 32 nt, Human
auuagggugcgugccagcuccgggaggccgcg

SEQ ID NO: 338062 - RNA, 32 nt, Human
auuagguaguguccucauuuuauauugugacc

SEQ ID NO: 338063 - RNA, 32 nt, Human
auuagguauacaaauaaacuaacaaauaaauc

SEQ ID NO: 338064 - RNA, 32 nt, Human
auuaggucaggaguucgagaccagccuggcca

SEQ ID NO: 338065 - RNA, 24 nt, Human
auuaggucagucugccuccugaca

SEQ ID NO: 338066 - RNA, 32 nt, Human
auuaggugaggguugucuaauccuauggcaca

SEQ ID NO: 338067 - RNA, 32 nt, Human
auuaggugagguuuauagaaagauagauaucc

SEQ ID NO: 338068 - RNA, 32 nt, Human
auuaggugcagccggcaggccaucccaacucg

SEQ ID NO: 338069 - RNA, 32 nt, Human
auuagguggaacugagggaaacagaaauagga

SEQ ID NO: 338070 - RNA, 32 nt, Human
auuaggugggcaugguggcaggugcuuguaau

SEQ ID NO: 338071 - RNA, 32 nt, Human
auuaggugugagccaccgcaccuggccgauau

SEQ ID NO: 338072 - RNA, 32 nt, Human
auuaggugugaugucaacagcauguuagaagg

SEQ ID NO: 338073 - RNA, 32 nt, Human
auuaggugugcacaccuguaaucccagcuacc

SEQ ID NO: 338074 - RNA, 32 nt, Human
auuaguaauguucaacuuuucacaaagaugau

SEQ ID NO: 338075 - RNA, 32 nt, Human
auuaguagcuguucuucuguacugggauggaa

SEQ ID NO: 338076 - RNA, 32 nt, Human
auuaguauacuuauaaaagagacuucagagag

SEQ ID NO: 338077 - RNA, 32 nt, Human
auuaguauccccacacugaguguggggaauaa

SEQ ID NO: 338078 - RNA, 32 nt, Human
auuagucacggcacugcagccugggcaacaua

SEQ ID NO: 338079 - RNA, 24 nt, Human
auuaguccuggcgggccccuggga

SEQ ID NO: 338080 - RNA, 32 nt, Human
auuagucgggucggagaugaaaucagagggag

SEQ ID NO: 338081 - RNA, 32 nt, Human
auuagucugagagagaacuuauaguaaggaaa

SEQ ID NO: 338082 - RNA, 32 nt, Human
auuagucugggcauugaccaggacagcgcugc

SEQ ID NO: 338083 - RNA, 32 nt, Human
auuagucugggucugaguccucugcuuuuucu

SEQ ID NO: 338084 - RNA, 32 nt, Human
auuagucuguuauccauggcuggcacuucacu

SEQ ID NO: 338085 - RNA, 32 nt, Human
auuagugaaauggcaugaaguagcauguggag

SEQ ID NO: 338086 - RNA, 32 nt, Human
auuagugaaccuagaagcagagacucugugag

SEQ ID NO: 338087 - RNA, 32 nt, Human
auuagugaagaaaagacggaguuucgaaauug

SEQ ID NO: 338088 - RNA, 32 nt, Human
auuagugauuccaucaaagagaaggaaaguaa

SEQ ID NO: 338089 - RNA, 31 nt, Human
auuagugcaaugucauaucugaucccaggaa

SEQ ID NO: 338090 - RNA, 32 nt, Human
auuagugcagagcagggguggucaggcugaac

SEQ ID NO: 338091 - RNA, 32 nt, Human
auuagugcucaggaguuugaugagcaaaaagu

SEQ ID NO: 338092 - RNA, 32 nt, Human
auuaguggauuucuuaauaggaagaugcaaug

SEQ ID NO: 338093 - RNA, 32 nt, Human
auuaguggucugaggaagagcagaucacauug

SEQ ID NO: 338094 - RNA, 32 nt, Human
auuaguguagguuuagacucuuguacauuucu

SEQ ID NO: 338095 - RNA, 32 nt, Human
auuaguguguuuuggguugcaugcaggauagu

SEQ ID NO: 338096 - RNA, 32 nt, Human
auuaguguuaaagaaguguggugccugauguu

SEQ ID NO: 338097 - RNA, 32 nt, Human
auuaguguuuuucauaguuugcacugaugcgu

SEQ ID NO: 338098 - RNA, 32 nt, Human
auuaguuaccacagccagcccagagagaaacu

SEQ ID NO: 338099 - RNA, 32 nt, Human
auuaguuaggcuucugagcuugcaaucauauu

SEQ ID NO: 338100 - RNA, 32 nt, Human
auuaguucaagcgauucucgugccucagccuc

SEQ ID NO: 338101 - RNA, 22 nt, Human
auuaguuccauugugccuggaa

SEQ ID NO: 338102 - RNA, 32 nt, Human
auuaguucccccucagcuacuggagaucucag

SEQ ID NO: 338103 - RNA, 32 nt, Human
auuaguugcugcacuccagccuaggcaacaua

SEQ ID NO: 338104 - RNA, 32 nt, Human
auuaguuuucuuccucuucuaccugcucauga

SEQ ID NO: 338105 - RNA, 32 nt, Human
auuaguuuugcaagaucacacacuaauguaac

SEQ ID NO: 338106 - RNA, 32 nt, Human
auuaguuuuuguguuguggcuuuuguugcuuu

SEQ ID NO: 338107 - RNA, 32 nt, Human
auuauaaaaggauuuuugaaaguauaaacaaa

SEQ ID NO: 338108 - RNA, 32 nt, Human
auuauaaaaucuaaaacaaaacuuuauagagu

SEQ ID NO: 338109 - RNA, 32 nt, Human
auuauaaacagaaaaucuuuccucuucucauu

SEQ ID NO: 338110 - RNA, 32 nt, Human
auuauaaagacuguauuucccauagacguuua

SEQ ID NO: 338111 - RNA, 32 nt, Human
auuauaaaggccauggagagugcugccaguuu

SEQ ID NO: 338112 - RNA, 32 nt, Human
auuauaaccccucaccuugaccagagucauug

SEQ ID NO: 338113 - RNA, 32 nt, Human
auuauaacuuccuagugugcagccaggcugug

SEQ ID NO: 338114 - RNA, 32 nt, Human
auuauaagcagcuguauccccuuugccauggu

SEQ ID NO: 338115 - RNA, 32 nt, Human
auuauaagcuguuccaguucacaggcagcaaa

SEQ ID NO: 338116 - RNA, 32 nt, Human
auuauaagcuguucucagaguauccaaagauc

SEQ ID NO: 338117 - RNA, 32 nt, Human
auuauaauaccaccuuaagcacuugcugaaaa

SEQ ID NO: 338118 - RNA, 32 nt, Human
auuauaauaggccuucuauauuuccuugucuu

SEQ ID NO: 338119 - RNA, 32 nt, Human
auuauaaugcaaauacuuuuuaacuuagaggc

SEQ ID NO: 338120 - RNA, 32 nt, Human
auuauaauuaugguuuacacuguugggaguaa

SEQ ID NO: 338121 - RNA, 32 nt, Human
auuauaauuucuuuaaaaagaggggaggggag

SEQ ID NO: 338122 - RNA, 32 nt, Human
auuauacaaguaugaugcuucuggaccuucaa

SEQ ID NO: 338123 - RNA, 30 nt, Human
auuauacauauguuauaaaauauguucauu

SEQ ID NO: 338124 - RNA, 32 nt, Human
auuauacauggcuacuuuacugugucuguagc

SEQ ID NO: 338125 - RNA, 32 nt, Human
auuauaccaagggauucccuuguccuccagcu

SEQ ID NO: 338126 - RNA, 32 nt, Human
auuauaccacugcacuccagccugggugacag

SEQ ID NO: 338127 - RNA, 21 nt, Human
auuauacccaggaggcucuca

SEQ ID NO: 338128 - RNA, 32 nt, Human
auuauaccuucuguaacaguggcauucccuua

SEQ ID NO: 338129 - RNA, 32 nt, Human
auuauaccuugguguuugccucuuucuaaguu

SEQ ID NO: 338130 - RNA, 24 nt, Human
auuauacgcuaugggauacuggca

SEQ ID NO: 338131 - RNA, 32 nt, Human
auuauacggacucuucagauuuacagagaacu

SEQ ID NO: 338132 - RNA, 32 nt, Human
auuauacuaacauaaacacauauaaaugcacu

SEQ ID NO: 338133 - RNA, 32 nt, Human
auuauacuccauguguauuuugcccacuuuuu

SEQ ID NO: 338134 - RNA, 32 nt, Human
auuauacugcucuguacaggaagcuugcaaau

SEQ ID NO: 338135 - RNA, 32 nt, Human
auuauacuguagcugaugaaacuccugauuuu

SEQ ID NO: 338136 - RNA, 32 nt, Human
auuauacuucaugcuguuuuccagcaugguau

SEQ ID NO: 338137 - RNA, 32 nt, Human
auuauacuuguaaugggcgacauggcaaacaa

SEQ ID NO: 338138 - RNA, 32 nt, Human
auuauacuuuaacaaacuauucaacugauuua

SEQ ID NO: 338139 - RNA, 32 nt, Human
auuauagacagaaauuuguaacauuacuucug

SEQ ID NO: 338140 - RNA, 32 nt, Human
auuauagauacacuaccaaacauaucaccuua

SEQ ID NO: 338141 - RNA, 32 nt, Human
auuauagaugugagccaccgcgcccggccuac

SEQ ID NO: 338142 - RNA, 32 nt, Human
auuauagcagagggacuugggcagcccacagc

SEQ ID NO: 338143 - RNA, 32 nt, Human
auuauagcauugagggagcagagauacccaua

SEQ ID NO: 338144 - RNA, 32 nt, Human
auuauagcucacugcagccuggaacuccuggg

SEQ ID NO: 338145 - RNA, 32 nt, Human
auuauagcuuucugcagcaaggaagcccacgu

SEQ ID NO: 338146 - RNA, 32 nt, Human
auuauaggaacuuugcuugcucuagugcucau

SEQ ID NO: 338147 - RNA, 32 nt, Human
auuauaggagugagccaccgcgccgggccaga

SEQ ID NO: 338148 - RNA, 32 nt, Human
auuauaggcaugagccaccacacccagccucc

SEQ ID NO: 338149 - RNA, 32 nt, Human
auuauaggcaugagccaccacaccuggcuacu

SEQ ID NO: 338150 - RNA, 32 nt, Human
auuauaggcaugagccaccacgcccagccugu

SEQ ID NO: 338151 - RNA, 32 nt, Human
auuauaggcaugagccaccaugcccagccagg

SEQ ID NO: 338152 - RNA, 32 nt, Human
auuauaggcaugagccaccgcacccagccucu

SEQ ID NO: 338153 - RNA, 32 nt, Human
auuauaggcaugagccaccgugcccagccuac

SEQ ID NO: 338154 - RNA, 32 nt, Human
auuauaggcaugagccaccgugcccggcuauu

SEQ ID NO: 338155 - RNA, 32 nt, Human
auuauaggcaugagccacugcacccggccggu

SEQ ID NO: 338156 - RNA, 32 nt, Human
auuauaggcaugagccacugcauccagcauca

SEQ ID NO: 338157 - RNA, 32 nt, Human
auuauaggcaugagccacugcgccuggccaac

SEQ ID NO: 338158 - RNA, 32 nt, Human
auuauaggcaugagccacugugccaggcccaa

SEQ ID NO: 338159 - RNA, 32 nt, Human
auuauaggcaugagccacugugcccagcugaa

SEQ ID NO: 338160 - RNA, 32 nt, Human
auuauaggcaugagccacugugccuggcccuc

SEQ ID NO: 338161 - RNA, 32 nt, Human
auuauaggccugagccacugcguacagcuugu

SEQ ID NO: 338162 - RNA, 32 nt, Human
auuauaggcgagagccacugcauccagugacu

SEQ ID NO: 338163 - RNA, 32 nt, Human
auuauaggcguaagccacugugucuggccuag

SEQ ID NO: 338164 - RNA, 32 nt, Human
auuauaggcgugagccaccacgcccggcgagg

SEQ ID NO: 338165 - RNA, 32 nt, Human
auuauaggcgugagccaccaugcccagccuaa

SEQ ID NO: 338166 - RNA, 32 nt, Human
auuauaggcgugagccaccaugcucagccauu

SEQ ID NO: 338167 - RNA, 32 nt, Human
auuauaggcgugagccaccgcaccuggccuau

SEQ ID NO: 338168 - RNA, 32 nt, Human
auuauaggcgugagccaccgcccccggccuug

SEQ ID NO: 338169 - RNA, 32 nt, Human
auuauaggcgugagccaccgcgcccagcccug

SEQ ID NO: 338170 - RNA, 32 nt, Human
auuauaggcgugagccaccgcgcccggccucc

SEQ ID NO: 338171 - RNA, 32 nt, Human
auuauaggcgugagccaccgcgccuggccccg

SEQ ID NO: 338172 - RNA, 32 nt, Human
auuauaggcgugagccaccgcgccuggcuuau

SEQ ID NO: 338173 - RNA, 32 nt, Human
auuauaggcgugagccaccguacccggccuac

SEQ ID NO: 338174 - RNA, 32 nt, Human
auuauaggcgugagccaccgugccuggccuaa

SEQ ID NO: 338175 - RNA, 32 nt, Human
auuauaggcgugagccacggcauccagccuca

SEQ ID NO: 338176 - RNA, 32 nt, Human
auuauaggcgugagccacugcacccggccccu

SEQ ID NO: 338177 - RNA, 32 nt, Human
auuauaggcgugagccacugcaccuggucccc

SEQ ID NO: 338178 - RNA, 32 nt, Human
auuauaggcgugagccacugcgccuggccaaa

SEQ ID NO: 338179 - RNA, 32 nt, Human
auuauaggcgugagccacugugcccagccuca

SEQ ID NO: 338180 - RNA, 32 nt, Human
auuauaggcgugagccacuguguccagccuuu

SEQ ID NO: 338181 - RNA, 32 nt, Human
auuauaggcuugagccaccacgcccggcuggu

SEQ ID NO: 338182 - RNA, 32 nt, Human
auuauagguaugagccaccgcgccuggucugg

SEQ ID NO: 338183 - RNA, 32 nt, Human
auuauaggugcccaccaccaagcccagcuaaa

SEQ ID NO: 338184 - RNA, 32 nt, Human
auuauaggugcgagccacugcgcccagccuca

SEQ ID NO: 338185 - RNA, 32 nt, Human
auuauaggugugaaccaccauacccaggcuca

SEQ ID NO: 338186 - RNA, 32 nt, Human
auuauaggugugagccacagcacccagccaaa

SEQ ID NO: 338187 - RNA, 32 nt, Human
auuauaggugugagccaccacacccagccucu

SEQ ID NO: 338188 - RNA, 32 nt, Human
auuauaggugugagccaccaugcccagccccu

SEQ ID NO: 338189 - RNA, 32 nt, Human
auuauaggugugagccacccugcucaaccagg

SEQ ID NO: 338190 - RNA, 32 nt, Human
auuauaggugugagccaccgcacccagccaaa

SEQ ID NO: 338191 - RNA, 32 nt, Human
auuauaggugugagccaccgcacccaguuggg

SEQ ID NO: 338192 - RNA, 32 nt, Human
auuauaggugugagccaccgcgcccggccugc

SEQ ID NO: 338193 - RNA, 32 nt, Human
auuauaggugugagccaccgcgccgggccggu

SEQ ID NO: 338194 - RNA, 32 nt, Human
auuauaggugugagccaccgugccgggccugg

SEQ ID NO: 338195 - RNA, 32 nt, Human
auuauaggugugagccacugcacccggccucc

SEQ ID NO: 338196 - RNA, 32 nt, Human
auuauaggugugagccacugcgccuggcuaag

SEQ ID NO: 338197 - RNA, 32 nt, Human
auuauaggugugagccacugcucccgggcccu

SEQ ID NO: 338198 - RNA, 32 nt, Human
auuauaggugugagccagcaugccuggccccu

SEQ ID NO: 338199 - RNA, 32 nt, Human
auuauaggugugagccaucacgccaggucaag

SEQ ID NO: 338200 - RNA, 32 nt, Human
auuauaggugugagcccccacgccuggccaac

SEQ ID NO: 338201 - RNA, 32 nt, Human
auuauaggugugagcccccgugccuggcccac

SEQ ID NO: 338202 - RNA, 32 nt, Human
auuauaggugugagcuacuguacccagccuua

SEQ ID NO: 338203 - RNA, 32 nt, Human
auuauaguugcccacggccuccagucaaugaa

SEQ ID NO: 338204 - RNA, 32 nt, Human
auuauauacuauauacuauacacuguaucucc

SEQ ID NO: 338205 - RNA, 32 nt, Human
auuauauacuucugaauggcaccuuacuuuuu

SEQ ID NO: 338206 - RNA, 32 nt, Human
auuauauagcuuaagugaagauauuuaagauu

SEQ ID NO: 338207 - RNA, 32 nt, Human
auuauaucaucaaaacccguguuuccaaauaa

SEQ ID NO: 338208 - RNA, 32 nt, Human
auuauauccaagguaauauaaaagccauuacg

SEQ ID NO: 338209 - RNA, 32 nt, Human
auuauaucuccaccacuucccuuuggcucagu

SEQ ID NO: 338210 - RNA, 32 nt, Human
auuauaucuggagugaaggauccugccaccua

SEQ ID NO: 338211 - RNA, 32 nt, Human
auuauaugaacuguuuuauaucauguucauau

SEQ ID NO: 338212 - RNA, 32 nt, Human
auuauaugaauagaaguggagagccagaaugc

SEQ ID NO: 338213 - RNA, 32 nt, Human
auuauaugggcaagagcuagaaguaauaaaau

SEQ ID NO: 338214 - RNA, 32 nt, Human
auuauauguaguguuucagcucccauuguguu

SEQ ID NO: 338215 - RNA, 32 nt, Human
auuauauucccaagccucccuuucaacuagag

SEQ ID NO: 338216 - RNA, 32 nt, Human
auuauauuuacauaaaugcaaauaucacuuga

SEQ ID NO: 338217 - RNA, 32 nt, Human
auuauauuuauugguuacuuacauuccuuuuu

SEQ ID NO: 338218 - RNA, 32 nt, Human
auuauauuucuuuguuuaaaaauaacaggcaa

SEQ ID NO: 338219 - RNA, 32 nt, Human
auuauauuugacuugaaugcccaaaauuuuca

SEQ ID NO: 338220 - RNA, 32 nt, Human
auuaucaauuuaaucaucaccaccgguguuuc

SEQ ID NO: 338221 - RNA, 32 nt, Human
auuaucacauagccuaaauucuagccuggcag

SEQ ID NO: 338222 - RNA, 32 nt, Human
auuaucacccagacaugugcagaugaaauguc

SEQ ID NO: 338223 - RNA, 32 nt, Human
auuaucacccuuuucuccauguuuucagaguu

SEQ ID NO: 338224 - RNA, 32 nt, Human
auuaucacgccgcugcacuccagcuugaauga

SEQ ID NO: 338225 - RNA, 32 nt, Human
auuaucacuauauuaauuuucaaagguuuuuc

SEQ ID NO: 338226 - RNA, 32 nt, Human
auuaucaggaauacaauguugcaaugaugcuu

SEQ ID NO: 338227 - RNA, 32 nt, Human
auuaucagguaucaauauuuuuccaggaaagu

SEQ ID NO: 338228 - RNA, 32 nt, Human
auuaucagugaauuuucaguggguaggauguu

SEQ ID NO: 338229 - RNA, 32 nt, Human
auuaucagugcagaguuaggccagauucauuu

SEQ ID NO: 338230 - RNA, 32 nt, Human
auuaucaguggcuuugccacuaguaaaugugu

SEQ ID NO: 338231 - RNA, 32 nt, Human
auuaucaguguugaucucugcaaccaacauug

SEQ ID NO: 338232 - RNA, 32 nt, Human
auuaucauccuccugaguuauuugaaaugauu

SEQ ID NO: 338233 - RNA, 32 nt, Human
auuaucauccuccugaguuauuuugaaaugau

SEQ ID NO: 338234 - RNA, 32 nt, Human
auuaucaucucaauaagcacuucaguaagaaa

SEQ ID NO: 338235 - RNA, 32 nt, Human
auuaucaucuucacuucagacaauucagaagc

SEQ ID NO: 338236 - RNA, 32 nt, Human
auuaucaugaucaacuacccagcuuggauuuc

SEQ ID NO: 338237 - RNA, 32 nt, Human
auuauccaaagaauugaaacuccuagcacauc

SEQ ID NO: 338238 - RNA, 32 nt, Human
auuauccaaagagagaagacagaaucauuaua

SEQ ID NO: 338239 - RNA, 32 nt, Human
auuauccaacacaguaauauugguaccuguca

SEQ ID NO: 338240 - RNA, 32 nt, Human
auuauccacagcaacugcugagccccacuaca

SEQ ID NO: 338241 - RNA, 32 nt, Human
auuauccacugcccccucccuccuggugucuc

SEQ ID NO: 338242 - RNA, 32 nt, Human
auuauccagcugaacaucaccuaggagggcca

SEQ ID NO: 338243 - RNA, 32 nt, Human
auuauccagucgugguggugcaugccuguagu

SEQ ID NO: 338244 - RNA, 32 nt, Human
auuauccaguuuccuguucuugcugacacucc

SEQ ID NO: 338245 - RNA, 32 nt, Human
auuaucccuccaguccccauggauuggaaaug

SEQ ID NO: 338246 - RNA, 32 nt, Human
auuaucccugaacaagggcagcuccugcuuua

SEQ ID NO: 338247 - RNA, 32 nt, Human
auuaucccugggaaacagugcuuacccacaag

SEQ ID NO: 338248 - RNA, 32 nt, Human
auuaucccuuucucugccucucuuggcuuuau

SEQ ID NO: 338249 - RNA, 32 nt, Human
auuauccguaucacucucagcauuuuggucaa

SEQ ID NO: 338250 - RNA, 32 nt, Human
auuauccucagcaaacuggcaaaggaacagaa

SEQ ID NO: 338251 - RNA, 22 nt, Human
auuauccucauacucauucugg

SEQ ID NO: 338252 - RNA, 32 nt, Human
auuauccuccucucuucucucccccucagccu

SEQ ID NO: 338253 - RNA, 32 nt, Human
auuauccucuggugaugcuguuucucguuagu

SEQ ID NO: 338254 - RNA, 32 nt, Human
auuauccugagguguaccaggaaaggauuuua

SEQ ID NO: 338255 - RNA, 32 nt, Human
auuauccugcaccaccucacuguuccccaugc

SEQ ID NO: 338256 - RNA, 32 nt, Human
auuauccuuccuccucacccugccggguagcu

SEQ ID NO: 338257 - RNA, 32 nt, Human
auuauccuuggaguuggaauuaggucuuucua

SEQ ID NO: 338258 - RNA, 32 nt, Human
auuaucgaaauaagcauccauuuaaaagaaug

SEQ ID NO: 338259 - RNA, 32 nt, Human
auuaucguauauuuauaaugucucauccaguu

SEQ ID NO: 338260 - RNA, 32 nt, Human
auuaucguucaugggcguaagucucuucucag

SEQ ID NO: 338261 - RNA, 32 nt, Human
auuaucuacuaguaauaauguaauacuguaga

SEQ ID NO: 338262 - RNA, 32 nt, Human
auuaucuaguuuaauuucuucuuuggacaagg

SEQ ID NO: 338263 - RNA, 32 nt, Human
auuaucuaucuaccuagauagacagagauauc

SEQ ID NO: 338264 - RNA, 32 nt, Human
auuaucuaucugucugucugucugucugucug

SEQ ID NO: 338265 - RNA, 32 nt, Human
auuaucuauucuagacaaauuucuugaagaau

SEQ ID NO: 338266 - RNA, 32 nt, Human
auuaucuccaggaguuuggaagugagcugaac

SEQ ID NO: 338267 - RNA, 32 nt, Human
auuaucucucagacagcuguuucauuuuccaa

SEQ ID NO: 338268 - RNA, 32 nt, Human
auuaucucuggauuucaugaagguguaauauc

SEQ ID NO: 338269 - RNA, 32 nt, Human
auuaucuguaugaauuauauguuccagugaaa

SEQ ID NO: 338270 - RNA, 32 nt, Human
auuaucugugaggaauggacucuccccagacg

SEQ ID NO: 338271 - RNA, 32 nt, Human
auuaucuuaaaacuuuggccauaguuaauaac

SEQ ID NO: 338272 - RNA, 32 nt, Human
auuaucuuacagucuucuaccucuucaagaua

SEQ ID NO: 338273 - RNA, 32 nt, Human
auuaucuuuaaugaagacaaaggaaucuagug

SEQ ID NO: 338274 - RNA, 32 nt, Human
auuaucuuuggacauguacugcagcuucuugu

SEQ ID NO: 338275 - RNA, 32 nt, Human
auuaucuuuucuuucuccuuuuguuucucuaa

SEQ ID NO: 338276 - RNA, 32 nt, Human
auuaugaaaaacaucccaaacuuuaaaaugcg

SEQ ID NO: 338277 - RNA, 32 nt, Human
auuaugaaaauggguauacagcauuaaaaccu

SEQ ID NO: 338278 - RNA, 32 nt, Human
auuaugaaugauuuuucuccuuuugcuuguua

SEQ ID NO: 338279 - RNA, 32 nt, Human
auuaugaauguucaucaauuugacuauuauag

SEQ ID NO: 338280 - RNA, 32 nt, Human
auuaugaauucuuugaacucuuaagguuuuug

SEQ ID NO: 338281 - RNA, 32 nt, Human
auuaugacaacugaaugagacaugcacauaau

SEQ ID NO: 338282 - RNA, 32 nt, Human
auuaugacucacuguagccucaagagauccuc

SEQ ID NO: 338283 - RNA, 32 nt, Human
auuaugagaacuuucaguucaaagcaucaaau

SEQ ID NO: 338284 - RNA, 32 nt, Human
auuaugagagcaucagaguauuaucacugcug

SEQ ID NO: 338285 - RNA, 32 nt, Human
auuaugagagugaguuacgggagcaguuuuua

SEQ ID NO: 338286 - RNA, 32 nt, Human
auuaugagggaggcguguagcuucuuaucauu

SEQ ID NO: 338287 - RNA, 32 nt, Human
auuaugauguuccucagagaagugagguggga

SEQ ID NO: 338288 - RNA, 32 nt, Human
auuaugcaaagccacagcauuaaggagcucaa

SEQ ID NO: 338289 - RNA, 32 nt, Human
auuaugcaagugacuuucuuucuuacuugggg

SEQ ID NO: 338290 - RNA, 32 nt, Human
auuaugcacugacaugacccugggugacagga

SEQ ID NO: 338291 - RNA, 32 nt, Human
auuaugcacuucauuuugaggaauuacuacua

SEQ ID NO: 338292 - RNA, 32 nt, Human
auuaugcacuugcugcugccuccugggcucug

SEQ ID NO: 338293 - RNA, 32 nt, Human
auuaugcagagaauuggauugggucucuguca

SEQ ID NO: 338294 - RNA, 32 nt, Human
auuaugcagccaaggguacucuuuuacauaag

SEQ ID NO: 338295 - RNA, 32 nt, Human
auuaugccacugcacuccagccugggcaacag

SEQ ID NO: 338296 - RNA, 32 nt, Human
auuaugccacugcacuccagccugggugacag

SEQ ID NO: 338297 - RNA, 32 nt, Human
auuaugccacugcacuccagccuggugacaga

SEQ ID NO: 338298 - RNA, 32 nt, Human
auuaugccacugcacuucagccugggugacag

SEQ ID NO: 338299 - RNA, 32 nt, Human
auuaugccacugcuuuccagccugggcaacau

SEQ ID NO: 338300 - RNA, 32 nt, Human
auuaugccacuguacuccagccugggugacag

SEQ ID NO: 338301 - RNA, 32 nt, Human
auuaugccacuguacuccagcgugggugacag

SEQ ID NO: 338302 - RNA, 32 nt, Human
auuaugccagugcauuccagccaggaugacag

SEQ ID NO: 338303 - RNA, 32 nt, Human
auuaugccauuacacuccagccugggcaacag

SEQ ID NO: 338304 - RNA, 32 nt, Human
auuaugccauugcacuccagccugggugacaa

SEQ ID NO: 338305 - RNA, 32 nt, Human
auuaugccauugcacuccagccugggugacag

SEQ ID NO: 338306 - RNA, 32 nt, Human
auuaugccccugcacaucagccugggugauag

SEQ ID NO: 338307 - RNA, 32 nt, Human
auuaugccuaguuugucauaucacagaaaaac

SEQ ID NO: 338308 - RNA, 22 nt, Human
auuaugccugaaaagucuccca

SEQ ID NO: 338309 - RNA, 32 nt, Human
auuaugcuaauuugugaguucugaucacuuuu

SEQ ID NO: 338310 - RNA, 32 nt, Human
auuaugcuaggugaaauaagccugucacaaaa

SEQ ID NO: 338311 - RNA, 32 nt, Human
auuaugcugcccucaggcuugccuguaggauu

SEQ ID NO: 338312 - RNA, 32 nt, Human
auuaugcugcugcacuccagccuggacaacag

SEQ ID NO: 338313 - RNA, 32 nt, Human
auuaugcuuuugguucuuacugggugacuuug

SEQ ID NO: 338314 - RNA, 32 nt, Human
auuauggaagcacgauuuauuuaaauagguac

SEQ ID NO: 338315 - RNA, 32 nt, Human
auuauggaaggugagcuuggagaagaaggcag

SEQ ID NO: 338316 - RNA, 32 nt, Human
auuauggacgugagccaccacacccgcccuug

SEQ ID NO: 338317 - RNA, 32 nt, Human
auuauggagaaaaggccaggugcaguggcuca

SEQ ID NO: 338318 - RNA, 32 nt, Human
auuauggagccucguguguucuuaggggcuau

SEQ ID NO: 338319 - RNA, 32 nt, Human
auuauggaggcugagaagucucaagaucacag

SEQ ID NO: 338320 - RNA, 32 nt, Human
auuauggagggucuccugcaggcccuuguggg

SEQ ID NO: 338321 - RNA, 32 nt, Human
auuauggaguguaguguuuucuuaguucuuca

SEQ ID NO: 338322 - RNA, 32 nt, Human
auuauggcaggcaccuguaaucccagcuaccu

SEQ ID NO: 338323 - RNA, 32 nt, Human
auuauggccauuugauaccauucaagugaaau

SEQ ID NO: 338324 - RNA, 32 nt, Human
auuauggccauuuuccuuaucucccucccaag

SEQ ID NO: 338325 - RNA, 32 nt, Human
auuauggcuaaguugauauggaagcauucugg

SEQ ID NO: 338326 - RNA, 32 nt, Human
auuauggcucacugcaguuucaaccucccaga

SEQ ID NO: 338327 - RNA, 32 nt, Human
auuauggcucacugcggccucgacuuuccagu

SEQ ID NO: 338328 - RNA, 32 nt, Human
auuauggcuucacaaauaugugcucuauauug

SEQ ID NO: 338329 - RNA, 32 nt, Human
auuaugggaaaauaguguagccagcugccacc

SEQ ID NO: 338330 - RNA, 32 nt, Human
auuaugggaauuccauuuuaagaauuacuaca

SEQ ID NO: 338331 - RNA, 28 nt, Human
auuaugggaccaggccagccagcuucaa

SEQ ID NO: 338332 - RNA, 32 nt, Human
auuaugggcgcccgccaccacgcccagcuaau

SEQ ID NO: 338333 - RNA, 32 nt, Human
auuauggggacagagagcagggggcagacagc

SEQ ID NO: 338334 - RNA, 32 nt, Human
auuaugggugugagccaccacacccggccccc

SEQ ID NO: 338335 - RNA, 32 nt, Human
auuauggugaugguggccaacaagaaaaguca

SEQ ID NO: 338336 - RNA, 32 nt, Human
auuauggugcugggaagcucugucuuugauuu

SEQ ID NO: 338337 - RNA, 32 nt, Human
auuaugguucacugcagacuccaccucuccag

SEQ ID NO: 338338 - RNA, 23 nt, Human
auuaugguucugccagggcuccc

SEQ ID NO: 338339 - RNA, 32 nt, Human
auuaugguugacagagaguuuaugauccagaa

SEQ ID NO: 338340 - RNA, 28 nt, Human
auuaugguugcuucugcaggaagccuuu

SEQ ID NO: 338341 - RNA, 32 nt, Human
auuauguaauggaagaaaaaugcggaugccua

SEQ ID NO: 338342 - RNA, 32 nt, Human
auuauguacaaaccacaaaucagguacuguau

SEQ ID NO: 338343 - RNA, 32 nt, Human
auuauguacauacuuuuucauucuuaacuuag

SEQ ID NO: 338344 - RNA, 32 nt, Human
auuauguacuaucaaacccccaagaugcugau

SEQ ID NO: 338345 - RNA, 32 nt, Human
auuauguauacugucuguugcugccuggugau

SEQ ID NO: 338346 - RNA, 32 nt, Human
auuauguauuagauaucgcuauaaguggacau

SEQ ID NO: 338347 - RNA, 32 nt, Human
auuaugucacugcacuccauccugggugacaa

SEQ ID NO: 338348 - RNA, 28 nt, Human
auuaugucagggaccuugccuaugagcc

SEQ ID NO: 338349 - RNA, 32 nt, Human
auuaugucauucuucugcucaaaacucuccaa

SEQ ID NO: 338350 - RNA, 32 nt, Human
auuaugucgauuuuuaacugaggggaaauuaa

SEQ ID NO: 338351 - RNA, 32 nt, Human
auuaugucuguaaucaguguggaaaagccuuu

SEQ ID NO: 338352 - RNA, 24 nt, Human
auuaugugacuugcaauaaaguua

SEQ ID NO: 338353 - RNA, 32 nt, Human
auuaugugcucacugcuggcucaggccccaac

SEQ ID NO: 338354 - RNA, 32 nt, Human
auuauguucacugcacucugauuuucuguagg

SEQ ID NO: 338355 - RNA, 24 nt, Human
auuauguuccugucuuucuugaug

SEQ ID NO: 338356 - RNA, 32 nt, Human
auuauuaaaagaacaggggcagaaguggcuca

SEQ ID NO: 338357 - RNA, 32 nt, Human
auuauuaaaggcagaccuccaaguuccucccu

SEQ ID NO: 338358 - RNA, 32 nt, Human
auuauuaaaugaggugaaaacaaguaggagug

SEQ ID NO: 338359 - RNA, 32 nt, Human
auuauuaaucuugauacuaaggauuuguuacu

SEQ ID NO: 338360 - RNA, 32 nt, Human
auuauuacaaauguaugggauauuuuucaacc

SEQ ID NO: 338361 - RNA, 28 nt, Human
auuauuacaagugcuguauuauuugacu

SEQ ID NO: 338362 - RNA, 32 nt, Human
auuauuacccagaauugcucuuccauaaagcu

SEQ ID NO: 338363 - RNA, 32 nt, Human
auuauuagaagcaguauggaaaccccacaagg

SEQ ID NO: 338364 - RNA, 32 nt, Human
auuauuagauuucaggaugauuuauaauaauu

SEQ ID NO: 338365 - RNA, 32 nt, Human
auuauuaugagccaggagauggggacugugac

SEQ ID NO: 338366 - RNA, 32 nt, Human
auuauuauguguacauuauuguugcuauugug

SEQ ID NO: 338367 - RNA, 32 nt, Human
auuauuauuaugaaccuucagccuacuuucuu

SEQ ID NO: 338368 - RNA, 32 nt, Human
auuauuauuuuagagagacuguuaacggccug

SEQ ID NO: 338369 - RNA, 32 nt, Human
auuauucaaauacagagaaauagccacagggc

SEQ ID NO: 338370 - RNA, 32 nt, Human
auuauucaacagaugaggaaacagugaguuua

SEQ ID NO: 338371 - RNA, 21 nt, Human
auuauucaacugacggugcaa

SEQ ID NO: 338372 - RNA, 32 nt, Human
auuauucaauuguaaugcaauggcuugaaacc

SEQ ID NO: 338373 - RNA, 32 nt, Human
auuauucaccagacccagaaguuguacgcauu

SEQ ID NO: 338374 - RNA, 32 nt, Human
auuauucacugcacuauauucuaagcacuuac

SEQ ID NO: 338375 - RNA, 32 nt, Human
auuauuccaaaccaaauuuuaauuuuugcuuu

SEQ ID NO: 338376 - RNA, 21 nt, Human
auuauuccaguagucaguaca

SEQ ID NO: 338377 - RNA, 32 nt, Human
auuauucccucacaaaacaagccuggcgaggg

SEQ ID NO: 338378 - RNA, 32 nt, Human
auuauucccuuaggaauaucuccaaagaggga

SEQ ID NO: 338379 - RNA, 32 nt, Human
auuauuccugaggguuugcuccaccuucucug

SEQ ID NO: 338380 - RNA, 32 nt, Human
auuauucgucuucuccccauuccgcugccgcc

SEQ ID NO: 338381 - RNA, 32 nt, Human
auuauucuaguuucaguaaaucuaaagcaagu

SEQ ID NO: 338382 - RNA, 32 nt, Human
auuauucugccuggccccauguccucuuggag

SEQ ID NO: 338383 - RNA, 32 nt, Human
auuauucuggaaggcaaaaauaaagcuauuua

SEQ ID NO: 338384 - RNA, 32 nt, Human
auuauucuggguuuaggugucagcuuuugagc

SEQ ID NO: 338385 - RNA, 32 nt, Human
auuauucuucagugccuagauuuccugggacu

SEQ ID NO: 338386 - RNA, 32 nt, Human
auuauucuugcagcuaagcaagacagccauau

SEQ ID NO: 338387 - RNA, 32 nt, Human
auuauugaagcgauuucuauguggaaauaaau

SEQ ID NO: 338388 - RNA, 32 nt, Human
auuauugacccauagugacaccaguuuuggga

SEQ ID NO: 338389 - RNA, 32 nt, Human
auuauugaccuugagaaacuugccugcuucau

SEQ ID NO: 338390 - RNA, 32 nt, Human
auuauugaggggcaacucaggauuuuaaguuc

SEQ ID NO: 338391 - RNA, 32 nt, Human
auuauugaugaauuuucauaagguggaauuga

SEQ ID NO: 338392 - RNA, 32 nt, Human
auuauugcaaagcacugucaccggccucaggg

SEQ ID NO: 338393 - RNA, 32 nt, Human
auuauugcacacugccugaacaaaaccuauuu

SEQ ID NO: 338394 - RNA, 32 nt, Human
auuauugcaccacugaacuccagccugggcca

SEQ ID NO: 338395 - RNA, 32 nt, Human
auuauugcacuacugcauuccagccuggguga

SEQ ID NO: 338396 - RNA, 32 nt, Human
auuauugcucacaggcuggggaggcagaauga

SEQ ID NO: 338397 - RNA, 32 nt, Human
auuauugcuguacugugauucugucgucagcu

SEQ ID NO: 338398 - RNA, 32 nt, Human
auuauugcuguugcuugaauagcaauagcaug

SEQ ID NO: 338399 - RNA, 32 nt, Human
auuauugcuucaaccaucagucauaacucuag

SEQ ID NO: 338400 - RNA, 32 nt, Human
auuauuggaaaguguaacggggaccuucugca

SEQ ID NO: 338401 - RNA, 32 nt, Human
auuauuggcuucuguuucauauggacccagag

SEQ ID NO: 338402 - RNA, 32 nt, Human
auuauugggaaucgcuuacaguaccauuucau

SEQ ID NO: 338403 - RNA, 21 nt, Human
auuauugggcaaaauguccca

SEQ ID NO: 338404 - RNA, 32 nt, Human
auuauugggggaaaaggaaaauuagugaucuc

SEQ ID NO: 338405 - RNA, 32 nt, Human
auuauugguaccacucuucacuggcacaguug

SEQ ID NO: 338406 - RNA, 32 nt, Human
auuauugguuacacuucaauuuacagggcaua

SEQ ID NO: 338407 - RNA, 32 nt, Human
auuauugguuauuucucacuguucauucuauu

SEQ ID NO: 338408 - RNA, 32 nt, Human
auuauugucaucuguagccaccagcacaucac

SEQ ID NO: 338409 - RNA, 32 nt, Human
auuauugugaagaucgaccugaaaucuaucuu

SEQ ID NO: 338410 - RNA, 32 nt, Human
auuauuguugcagaagcauagauuuaauugca

SEQ ID NO: 338411 - RNA, 32 nt, Human
auuauuuaaaguguggaaagcaaaauaacaaa

SEQ ID NO: 338412 - RNA, 32 nt, Human
auuauuuaaauccaccuagaguagaaguuugc

SEQ ID NO: 338413 - RNA, 32 nt, Human
auuauuuacacaguuaaggaacaggugauaca

SEQ ID NO: 338414 - RNA, 32 nt, Human
auuauuuagaauauuuguuguugcaauuuuca

SEQ ID NO: 338415 - RNA, 32 nt, Human
auuauuuaggaaacaaagcaugugagugcuac

SEQ ID NO: 338416 - RNA, 32 nt, Human
auuauuuauccuauuuauuaaauuuaaaaagc

SEQ ID NO: 338417 - RNA, 32 nt, Human
auuauuuauucacuccuuuccucaccccaagu

SEQ ID NO: 338418 - RNA, 32 nt, Human
auuauuucacacacggaccaucuuuagcaguu

SEQ ID NO: 338419 - RNA, 32 nt, Human
auuauuucagaggaagcgccucugauuuguuu

SEQ ID NO: 338420 - RNA, 32 nt, Human
auuauuucauucaguuuuuggagcucaguuaa

SEQ ID NO: 338421 - RNA, 32 nt, Human
auuauuucccaauauuucauaguuuaugaggc

SEQ ID NO: 338422 - RNA, 32 nt, Human
auuauuucucuuaagagauauuuccuuuuauu

SEQ ID NO: 338423 - RNA, 32 nt, Human
auuauuucugcccuagaguuguucacagccua

SEQ ID NO: 338424 - RNA, 32 nt, Human
auuauuucuuaaucugaacaugaaggcuccau

SEQ ID NO: 338425 - RNA, 32 nt, Human
auuauuugaacccgguaguuuguuugaccuag

SEQ ID NO: 338426 - RNA, 32 nt, Human
auuauuugagucuauguauucugaccucagaa

SEQ ID NO: 338427 - RNA, 32 nt, Human
auuauuugauggcgauggcaggacacagcaua

SEQ ID NO: 338428 - RNA, 32 nt, Human
auuauuugugccaccugcuguggacuguuuuc

SEQ ID NO: 338429 - RNA, 32 nt, Human
auuauuuuaaaugugacucccuugucccaacc

SEQ ID NO: 338430 - RNA, 32 nt, Human
auuauuuuaacaaaaguuacauuccucuccac

SEQ ID NO: 338431 - RNA, 32 nt, Human
auuauuuuaauacagagaugauuuucaaaaua

SEQ ID NO: 338432 - RNA, 32 nt, Human
auuauuuuaccuccuuuguccccuucuagucc

SEQ ID NO: 338433 - RNA, 32 nt, Human
auuauuuucccuuauuuuucuuucauuaguuu

SEQ ID NO: 338434 - RNA, 32 nt, Human
auuauuuuccucuuucuuugguaaggucaaua

SEQ ID NO: 338435 - RNA, 32 nt, Human
auuauuuuccuuccaugcucccaacucccuuc

SEQ ID NO: 338436 - RNA, 32 nt, Human
auuauuuucuccccaacaguauuuuccaguag

SEQ ID NO: 338437 - RNA, 32 nt, Human
auuauuuucuguaguuccggagagaugguggg

SEQ ID NO: 338438 - RNA, 32 nt, Human
auuauuuucuguauuuuaguauauaguauaaa

SEQ ID NO: 338439 - RNA, 32 nt, Human
auuauuuugaagcaagggcucacucugucacc

SEQ ID NO: 338440 - RNA, 32 nt, Human
auuauuuuucccuuggacacaaaugucuacag

SEQ ID NO: 338441 - RNA, 32 nt, Human
auuauuuuugaaacggagucucgcucugucac

SEQ ID NO: 338442 - RNA, 32 nt, Human
auuauuuuugagacagagucuuacucuguugc

SEQ ID NO: 338443 - RNA, 32 nt, Human
auuauuuuugagacagggucucgcucugccag

SEQ ID NO: 338444 - RNA, 32 nt, Human
auuauuuuugagacagugucuugcucugucuc

SEQ ID NO: 338445 - RNA, 32 nt, Human
auuauuuuugagauggaguuuugcucuuaaug

SEQ ID NO: 338446 - RNA, 32 nt, Human
auuauuuuugagauggggacucacucuguugc

SEQ ID NO: 338447 - RNA, 32 nt, Human
auuauuuuugucacggaaaacauccucuccaa

SEQ ID NO: 338448 - RNA, 32 nt, Human
auucaaaaagcucuccuuguaauugcaaguuu

SEQ ID NO: 338449 - RNA, 32 nt, Human
auucaaaaaggcaugcaacacaccuggagcac

SEQ ID NO: 338450 - RNA, 32 nt, Human
auucaaaaaugccugcaucucuucucuuauuu

SEQ ID NO: 338451 - RNA, 32 nt, Human
auucaaaaccagccuggccaacauagugaaac

SEQ ID NO: 338452 - RNA, 32 nt, Human
auucaaaaccagccuggccaacaugcaaaacc

SEQ ID NO: 338453 - RNA, 32 nt, Human
auucaaaacucggguucugugauaugaggaua

SEQ ID NO: 338454 - RNA, 32 nt, Human
auucaaaauaguccacugacuccucacaucug

SEQ ID NO: 338455 - RNA, 32 nt, Human
auucaaaauuuccagauuugggcuauuucugu

SEQ ID NO: 338456 - RNA, 32 nt, Human
auucaaacaggcugucggucuccucucacccc

SEQ ID NO: 338457 - RNA, 32 nt, Human
auucaaaccacccacccccaucaugaccuggg

SEQ ID NO: 338458 - RNA, 32 nt, Human
auucaaaccucacauccucccuucaguuuaau

SEQ ID NO: 338459 - RNA, 32 nt, Human
auucaaacucaugcuggaucucuuucauauua

SEQ ID NO: 338460 - RNA, 32 nt, Human
auucaaagaacucagucugauaaucugccucc

SEQ ID NO: 338461 - RNA, 32 nt, Human
auucaaagauguggcuguggauuucacccagg

SEQ ID NO: 338462 - RNA, 31 nt, Human
auucaaagccguccugggccuaaguccuugc

SEQ ID NO: 338463 - RNA, 32 nt, Human
auucaaauaaaaaugauagacacagaaagguu

SEQ ID NO: 338464 - RNA, 24 nt, Human
auucaaauaugcaccuggcucccu

SEQ ID NO: 338465 - RNA, 23 nt, Human
auucaaaucccguguugcacccu

SEQ ID NO: 338466 - RNA, 32 nt, Human
auucaacaaacacuuacugaggccaacacugg

SEQ ID NO: 338467 - RNA, 32 nt, Human
auucaacaaacaguuauguagcaucuacuggu

SEQ ID NO: 338468 - RNA, 32 nt, Human
auucaacaacgggucugaaugucuagcuggcc

SEQ ID NO: 338469 - RNA, 32 nt, Human
auucaacaagcugaguggagaccauggucugu

SEQ ID NO: 338470 - RNA, 32 nt, Human
auucaacaccagccuggccaacauagugaaac

SEQ ID NO: 338471 - RNA, 32 nt, Human
auucaacacccacuuucuccucccucugcccc

SEQ ID NO: 338472 - RNA, 32 nt, Human
auucaacaccuuuaacaauguauaugugaagu

SEQ ID NO: 338473 - RNA, 32 nt, Human
auucaacacugcagaaugggugaccucaaaga

SEQ ID NO: 338474 - RNA, 32 nt, Human
auucaacagaacaccaggaaggucaagacgcu

SEQ ID NO: 338475 - RNA, 32 nt, Human
auucaacaggaggaacccgcgggagaggagcc

SEQ ID NO: 338476 - RNA, 32 nt, Human
auucaacauagggugaaacuauuucugauaaa

SEQ ID NO: 338477 - RNA, 32 nt, Human
auucaacuaauucccuucccuucccccuucuu

SEQ ID NO: 338478 - RNA, 32 nt, Human
auucaacuagguuuugugucuccuggaucuau

SEQ ID NO: 338479 - RNA, 32 nt, Human
auucaacugaauauauuuccauggccaucaca

SEQ ID NO: 338480 - RNA, 32 nt, Human
auucaacuggaaggaaaccucaaugcugccuc

SEQ ID NO: 338481 - RNA, 32 nt, Human
auucaacuuugcuuagcuaaucaugccuaaca

SEQ ID NO: 338482 - RNA, 32 nt, Human
auucaagaacgaguuucucuucccucuccauu

SEQ ID NO: 338483 - RNA, 32 nt, Human
auucaagaacuccagaaaucaggagacggaga

SEQ ID NO: 338484 - RNA, 32 nt, Human
auucaagaacucccuagugaggagcugaacuu

SEQ ID NO: 338485 - RNA, 32 nt, Human
auucaagaccagccuagguaacauagugggac

SEQ ID NO: 338486 - RNA, 32 nt, Human
auucaagaccagccuggccaacauggugaaac

SEQ ID NO: 338487 - RNA, 32 nt, Human
auucaagaccagccugggcaacauggugaaac

SEQ ID NO: 338488 - RNA, 32 nt, Human
auucaagaccucagucacggucuuccaaagca

SEQ ID NO: 338489 - RNA, 32 nt, Human
auucaagacuggagacaccugggaaauaaaaa

SEQ ID NO: 338490 - RNA, 32 nt, Human
auucaagacuggucaguccaagagcagacaaa

SEQ ID NO: 338491 - RNA, 32 nt, Human
auucaagaggaaaugucacagaagcagcuaaa

SEQ ID NO: 338492 - RNA, 32 nt, Human
auucaagaggcugaggcaugaggaucucuuga

SEQ ID NO: 338493 - RNA, 32 nt, Human
auucaagaggggguuaaguacagugaguucug

SEQ ID NO: 338494 - RNA, 32 nt, Human
auucaagauacaacagugagggaauccgguca

SEQ ID NO: 338495 - RNA, 32 nt, Human
auucaagauuagccuggacaacauggugaaac

SEQ ID NO: 338496 - RNA, 32 nt, Human
auucaagcaaacaaauauggaagcuaccaaag

SEQ ID NO: 338497 - RNA, 32 nt, Human
auucaagcaauccucccaucucagccuccuga

SEQ ID NO: 338498 - RNA, 32 nt, Human
auucaagcaauggaugcaaggaacaugcugua

SEQ ID NO: 338499 - RNA, 32 nt, Human
auucaagcaauucuucugccucagcuucccga

SEQ ID NO: 338500 - RNA, 32 nt, Human
auucaagcacauauuggucaccuacugugugc

SEQ ID NO: 338501 - RNA, 32 nt, Human
auucaagcaguuuuccugccucagccucccca

SEQ ID NO: 338502 - RNA, 23 nt, Human
auucaagcgauucuccugccuca

SEQ ID NO: 338503 - RNA, 23 nt, Human
auucaagcgauucuccugucuca

SEQ ID NO: 338504 - RNA, 32 nt, Human
auucaagcugugggugagaagcucucuagcag

SEQ ID NO: 338505 - RNA, 32 nt, Human
auucaaggaaauaaggaaugaccuggaacagg

SEQ ID NO: 338506 - RNA, 32 nt, Human
auucaaggaaugucaggagaaacuccaggcag

SEQ ID NO: 338507 - RNA, 32 nt, Human
auucaaggagaguugagauacagugaaaugag

SEQ ID NO: 338508 - RNA, 32 nt, Human
auucaaggcaaauaccacucugugcauuuucu

SEQ ID NO: 338509 - RNA, 32 nt, Human
auucaagggaggcaggcgcuuuggaaguuugu

SEQ ID NO: 338510 - RNA, 32 nt, Human
auucaaggggcccugaggacuggacugcuagu

SEQ ID NO: 338511 - RNA, 32 nt, Human
auucaaggugacaaucaagcccaauggcuuga

SEQ ID NO: 338512 - RNA, 32 nt, Human
auucaagugcuuguaaaugcuuucauuucugg

SEQ ID NO: 338513 - RNA, 32 nt, Human
auucaaguuucaucuuugcagggaccacaaaa

SEQ ID NO: 338514 - RNA, 32 nt, Human
auucaauacaaacugcacuaugauuugcuuua

SEQ ID NO: 338515 - RNA, 32 nt, Human
auucaauauaaauauauuauaucaaucuuaac

SEQ ID NO: 338516 - RNA, 32 nt, Human
auucaauauuuaucauccuccuuucccucucu

SEQ ID NO: 338517 - RNA, 32 nt, Human
auucaauccucaggucuccaccaaggaggcag

SEQ ID NO: 338518 - RNA, 32 nt, Human
auucaaucuccagaagauugggauuaucgucu

SEQ ID NO: 338519 - RNA, 32 nt, Human
auucaaucugcaugccagccuggaggaggaaa

SEQ ID NO: 338520 - RNA, 32 nt, Human
auucaaucuuaugcuugggaggaggaauaacu

SEQ ID NO: 338521 - RNA, 32 nt, Human
auucaaugaccuucucaauugaccugaguuac

SEQ ID NO: 338522 - RNA, 22 nt, Human
auucaaugugaacaacuuuuua

SEQ ID NO: 338523 - RNA, 32 nt, Human
auucaauucacgcauugaaaacaaauuuagaa

SEQ ID NO: 338524 - RNA, 32 nt, Human
auucaauugcuuguugugcugaugagcuauga

SEQ ID NO: 338525 - RNA, 32 nt, Human
auucaauuuauucaagaaaaguaagcccuuga

SEQ ID NO: 338526 - RNA, 32 nt, Human
auucaauuuggacuggugugcucucuuuaaau

SEQ ID NO: 338527 - RNA, 32 nt, Human
auucacaaacaugacaucacccugcagcuugc

SEQ ID NO: 338528 - RNA, 32 nt, Human
auucacaaauauagaaaaguauacaaaacaaa

SEQ ID NO: 338529 - RNA, 32 nt, Human
auucacaaggcaauucauacuggagagaaacc

SEQ ID NO: 338530 - RNA, 32 nt, Human
auucacaaugauuuuguucucugcuccauauu

SEQ ID NO: 338531 - RNA, 32 nt, Human
auucacacaaguguuugucuuagaugauuaag

SEQ ID NO: 338532 - RNA, 32 nt, Human
auucacacagacugaaagugaguucgggcuug

SEQ ID NO: 338533 - RNA, 32 nt, Human
auucacacaggccacagcagaaaagagagcac

SEQ ID NO: 338534 - RNA, 32 nt, Human
auucacacucaacagguuuuaggauaauuuaa

SEQ ID NO: 338535 - RNA, 32 nt, Human
auucacacuuucuacuuucauaccuuuuuaau

SEQ ID NO: 338536 - RNA, 32 nt, Human
auucacagaaugcacuuucuacccugugugcc

SEQ ID NO: 338537 - RNA, 32 nt, Human
auucacagaguuguucaucuaucacuacuaaa

SEQ ID NO: 338538 - RNA, 32 nt, Human
auucacagcaauuuucuucacauuauuccuuu

SEQ ID NO: 338539 - RNA, 32 nt, Human
auucacagcaccaacagaaggaagagggugag

SEQ ID NO: 338540 - RNA, 32 nt, Human
auucacagcacugcacugcagccugggugaca

SEQ ID NO: 338541 - RNA, 32 nt, Human
auucacagcccaggcaggacagagcagaucac

SEQ ID NO: 338542 - RNA, 32 nt, Human
auucacagcuacucgggagguugaggcaggag

SEQ ID NO: 338543 - RNA, 32 nt, Human
auucacagcuguucccuggcagcacacaggag

SEQ ID NO: 338544 - RNA, 32 nt, Human
auucacauagccaucauuuacacugcuugcca

SEQ ID NO: 338545 - RNA, 32 nt, Human
auucacauaguccucagggcucagucuuuuga

SEQ ID NO: 338546 - RNA, 32 nt, Human
auucacaucccaggagcauccauuuuaaggaa

SEQ ID NO: 338547 - RNA, 32 nt, Human
auucacauccugggugggacagagcaggacaa

SEQ ID NO: 338548 - RNA, 32 nt, Human
auucacaugaggugagcuucagccugagauag

SEQ ID NO: 338549 - RNA, 32 nt, Human
auucacaugccauucaguuuacccauugcuag

SEQ ID NO: 338550 - RNA, 32 nt, Human
auucacauuaacagugcugccuguguccugug

SEQ ID NO: 338551 - RNA, 32 nt, Human
auucacauugaauggggaugaggucggacagu

SEQ ID NO: 338552 - RNA, 32 nt, Human
auucaccaaagacaugcuuaauuuuuaagaga

SEQ ID NO: 338553 - RNA, 32 nt, Human
auucaccaagccgccuccacagugccgguggg

SEQ ID NO: 338554 - RNA, 32 nt, Human
auucaccacacaugccagcugaugcaaagaaa

SEQ ID NO: 338555 - RNA, 21 nt, Human
auucaccacaguacaaaccuc

SEQ ID NO: 338556 - RNA, 32 nt, Human
auucaccacauuggccagccuggucuugaacu

SEQ ID NO: 338557 - RNA, 23 nt, Human
auucaccaccacaagaccuauua

SEQ ID NO: 338558 - RNA, 32 nt, Human
auucaccacuggcuuuucucuccccuggccuu

SEQ ID NO: 338559 - RNA, 32 nt, Human
auucaccagagaaacugcuguauacuaggugu

SEQ ID NO: 338560 - RNA, 32 nt, Human
auucaccagguaaaugaauguuuccagggacc

SEQ ID NO: 338561 - RNA, 32 nt, Human
auucaccagucgucucuggguugugugugaga

SEQ ID NO: 338562 - RNA, 32 nt, Human
auucaccaguguuccugaagcugcuguguccu

SEQ ID NO: 338563 - RNA, 32 nt, Human
auucaccauccaguagaggagaaagacgucga

SEQ ID NO: 338564 - RNA, 32 nt, Human
auucacccaauagaaucaucaccagagguuaa

SEQ ID NO: 338565 - RNA, 32 nt, Human
auucacccagaaccauggugggagagaacaga

SEQ ID NO: 338566 - RNA, 32 nt, Human
auucacccagcucucuugccugcaggcugauc

SEQ ID NO: 338567 - RNA, 32 nt, Human
auucacccaggaggucacagaaugacagcaag

SEQ ID NO: 338568 - RNA, 32 nt, Human
auucacccaucuuucuguuugucauucuuauc

SEQ ID NO: 338569 - RNA, 32 nt, Human
auucacccauuuuucuucuucagaaggccuuu

SEQ ID NO: 338570 - RNA, 32 nt, Human
auucacccccagucacaauggucuccauugca

SEQ ID NO: 338571 - RNA, 32 nt, Human
auucaccccugccccguugcuucccgcugcac

SEQ ID NO: 338572 - RNA, 32 nt, Human
auucacccugcacaccuccaggauggauaguu

SEQ ID NO: 338573 - RNA, 32 nt, Human
auucacccuggaccaacagggagagcaagaag

SEQ ID NO: 338574 - RNA, 32 nt, Human
auucacccuuccccuuccuccccuuucucuuu

SEQ ID NO: 338575 - RNA, 32 nt, Human
auucacccuuuuccuuuguuucuugcucuguu

SEQ ID NO: 338576 - RNA, 32 nt, Human
auucaccugccucuugcuuuuuguggguggcu

SEQ ID NO: 338577 - RNA, 32 nt, Human
auucaccuugaccuuauuuaugacuuuacgug

SEQ ID NO: 338578 - RNA, 32 nt, Human
auucaccuuuucuucaaaaucgauaugguggc

SEQ ID NO: 338579 - RNA, 32 nt, Human
auucacgacucugcagcccgagguccccucug

SEQ ID NO: 338580 - RNA, 32 nt, Human
auucacgagaacagcacauacauguguuugaa

SEQ ID NO: 338581 - RNA, 32 nt, Human
auucacgaggcugaggcaggaaaaucacuuga

SEQ ID NO: 338582 - RNA, 32 nt, Human
auucacgaugguuuugugccagcucuuuuuag

SEQ ID NO: 338583 - RNA, 32 nt, Human
auucacgccuguaaucccagaacucugggaag

SEQ ID NO: 338584 - RNA, 32 nt, Human
auucacgccuguaaucccagcacuuugagagg

SEQ ID NO: 338585 - RNA, 32 nt, Human
auucacgccuguaaucccagcacuuugggagg

SEQ ID NO: 338586 - RNA, 32 nt, Human
auucacggaaagcaaguugaugaccagaaauc

SEQ ID NO: 338587 - RNA, 32 nt, Human
auucacgggaggaggucaaaauaucaacauua

SEQ ID NO: 338588 - RNA, 32 nt, Human
auucacguucccacccagccuggcuggcggug

SEQ ID NO: 338589 - RNA, 32 nt, Human
auucacuaagcaagguuggugagacggcaaca

SEQ ID NO: 338590 - RNA, 32 nt, Human
auucacuacagccuggaugacaagcaagaccc

SEQ ID NO: 338591 - RNA, 21 nt, Human
auucacucacucguuugcaaa

SEQ ID NO: 338592 - RNA, 32 nt, Human
auucacucagaccuucauggcugcaaucucau

SEQ ID NO: 338593 - RNA, 32 nt, Human
auucacucaucuggagaacacaggguuggacu

SEQ ID NO: 338594 - RNA, 32 nt, Human
auucacuccuuuccucaccccaagugcccugc

SEQ ID NO: 338595 - RNA, 32 nt, Human
auucacugaaucaacagacacaaaaagcuggc

SEQ ID NO: 338596 - RNA, 32 nt, Human
auucacugauuucgugcugugugcucugggga

SEQ ID NO: 338597 - RNA, 32 nt, Human
auucacugcaucauagcuaugccuguauggag

SEQ ID NO: 338598 - RNA, 32 nt, Human
auucacugccccuggggcguuuccuugaaggu

SEQ ID NO: 338599 - RNA, 32 nt, Human
auucacugcugaaccccuggccccagagcccc

SEQ ID NO: 338600 - RNA, 32 nt, Human
auucacugcuguugcucauuugcccuuuucca

SEQ ID NO: 338601 - RNA, 32 nt, Human
auucacugguaagaguccagugggguccccug

SEQ ID NO: 338602 - RNA, 32 nt, Human
auucacuguuuucaaagagacaugagaagauc

SEQ ID NO: 338603 - RNA, 32 nt, Human
auucacuuaacuucuccauggcugcuuccugc

SEQ ID NO: 338604 - RNA, 32 nt, Human
auucacuuagcuuccucagucucuccaucuua

SEQ ID NO: 338605 - RNA, 32 nt, Human
auucacuucuaagggcccuguuuugagauugu

SEQ ID NO: 338606 - RNA, 22 nt, Human
auucacuucugucuucugcaaa

SEQ ID NO: 338607 - RNA, 32 nt, Human
auucacuucuucuucaaagcuuuuucuuaguu

SEQ ID NO: 338608 - RNA, 32 nt, Human
auucacuuucccuuggacauauggaugacauu

SEQ ID NO: 338609 - RNA, 32 nt, Human
auucagaaacgguagagagggaggggcugggg

SEQ ID NO: 338610 - RNA, 32 nt, Human
auucagaaauccaaguuggugucauacauuuc

SEQ ID NO: 338611 - RNA, 32 nt, Human
auucagaaauucauuucagcauguuauuauug

SEQ ID NO: 338612 - RNA, 32 nt, Human
auucagaacucacguagggagccccaggaaua

SEQ ID NO: 338613 - RNA, 32 nt, Human
auucagaagaguuccguccaacagaaauguaa

SEQ ID NO: 338614 - RNA, 32 nt, Human
auucagaagcccuaaaacauaccaccuuggcu

SEQ ID NO: 338615 - RNA, 32 nt, Human
auucagaagcucaagaagacaccagagaagcc

SEQ ID NO: 338616 - RNA, 32 nt, Human
auucagaagucugcuuuucagguuuauuccua

SEQ ID NO: 338617 - RNA, 32 nt, Human
auucagaaucuauucucuucucuccagucccg

SEQ ID NO: 338618 - RNA, 24 nt, Human
auucagaaugacaccauauucuua

SEQ ID NO: 338619 - RNA, 24 nt, Human
auucagaaugauguuucgguucuu

SEQ ID NO: 338620 - RNA, 32 nt, Human
auucagacaacauuaugaucuaauaaacuuua

SEQ ID NO: 338621 - RNA, 32 nt, Human
auucagacaugauccaguccagccugggcuug

SEQ ID NO: 338622 - RNA, 32 nt, Human
auucagacgcuuccgucagccucccaggaugg

SEQ ID NO: 338623 - RNA, 32 nt, Human
auucagacugauuuccaaaucugucaacuaga

SEQ ID NO: 338624 - RNA, 24 nt, Human
auucagacuggaguggauaggaua

SEQ ID NO: 338625 - RNA, 32 nt, Human
auucagacugucagucuauuccugggcaguag

SEQ ID NO: 338626 - RNA, 32 nt, Human
auucagagaaaugcugcaugcugccgucaugg

SEQ ID NO: 338627 - RNA, 31 nt, Human
auucagagaacuaauuuuucacuggauaaga

SEQ ID NO: 338628 - RNA, 32 nt, Human
auucagagacgggguuucaccguguuagccag

SEQ ID NO: 338629 - RNA, 32 nt, Human
auucagagaggcccugaggacuuggccaccac

SEQ ID NO: 338630 - RNA, 32 nt, Human
auucagagagguuucgcagacucgguaacggc

SEQ ID NO: 338631 - RNA, 32 nt, Human
auucagagcuugguaaaugucacuguacagaa

SEQ ID NO: 338632 - RNA, 32 nt, Human
auucagaggaaaacccagauucagugauuaac

SEQ ID NO: 338633 - RNA, 32 nt, Human
auucagaggacagcgucuguccccagcugcag

SEQ ID NO: 338634 - RNA, 32 nt, Human
auucagagugugagagcaagcucuacagauag

SEQ ID NO: 338635 - RNA, 32 nt, Human
auucagaguugugaugcucucuucugacagcc

SEQ ID NO: 338636 - RNA, 32 nt, Human
auucagauacccuaucgucgucagucauggcu

SEQ ID NO: 338637 - RNA, 32 nt, Human
auucagauaugacagcuaauuaccucaucaua

SEQ ID NO: 338638 - RNA, 32 nt, Human
auucagaugcugugaaccagauuuccuuuucu

SEQ ID NO: 338639 - RNA, 32 nt, Human
auucagauuccccucugggaucugucuucaga

SEQ ID NO: 338640 - RNA, 32 nt, Human
auucagauugacugaaaagucacaugaagagu

SEQ ID NO: 338641 - RNA, 32 nt, Human
auucagcaaagucuacuaucagaagacacguu

SEQ ID NO: 338642 - RNA, 32 nt, Human
auucagcaagggacagauuuaccucaaggcca

SEQ ID NO: 338643 - RNA, 32 nt, Human
auucagcacaacggccucaucaagaucggcuc

SEQ ID NO: 338644 - RNA, 32 nt, Human
auucagcaccuuuguuguuacugugaacguga

SEQ ID NO: 338645 - RNA, 32 nt, Human
auucagcacgcacacaacacacaagggagaga

SEQ ID NO: 338646 - RNA, 32 nt, Human
auucagcagcagaguuggugacuuugacaacu

SEQ ID NO: 338647 - RNA, 32 nt, Human
auucagcaggucugcggggacugaggcauggc

SEQ ID NO: 338648 - RNA, 32 nt, Human
auucagcaguccaggcugaugcaguggcuuca

SEQ ID NO: 338649 - RNA, 32 nt, Human
auucagcaucuucucuauucauguggagugaa

SEQ ID NO: 338650 - RNA, 32 nt, Human
auucagcauguguguggguguggauguuuaua

SEQ ID NO: 338651 - RNA, 32 nt, Human
auucagccaagaggaaaagcacucugauuaug

SEQ ID NO: 338652 - RNA, 22 nt, Human
auucagcccaccagccaccuca

SEQ ID NO: 338653 - RNA, 32 nt, Human
auucagccucaccuaucuccccacccauucuc

SEQ ID NO: 338654 - RNA, 32 nt, Human
auucagccucgcaguccagcacacacaaacag

SEQ ID NO: 338655 - RNA, 32 nt, Human
auucagccucuucggacccucucucacucccu

SEQ ID NO: 338656 - RNA, 32 nt, Human
auucagccuuaaauuaagcucuuaguuguuca

SEQ ID NO: 338657 - RNA, 32 nt, Human
auucagcguuuuguuucuuucuguccauacuu

SEQ ID NO: 338658 - RNA, 32 nt, Human
auucagcuacuuuuuccccucaguuaaaaggu

SEQ ID NO: 338659 - RNA, 32 nt, Human
auucagcucaaggauucagugucuucauuuuu

SEQ ID NO: 338660 - RNA, 32 nt, Human
auucagcucaauucucaaccauacuccaaacu

SEQ ID NO: 338661 - RNA, 32 nt, Human
auucagcucacugcaaucuccgccucccgggu

SEQ ID NO: 338662 - RNA, 32 nt, Human
auucagcucagcugccucuuucuugaggacac

SEQ ID NO: 338663 - RNA, 32 nt, Human
auucagcucauauggcaucuguccucgacuaa

SEQ ID NO: 338664 - RNA, 32 nt, Human
auucagcugcccaggcagaggagaaugggguc

SEQ ID NO: 338665 - RNA, 32 nt, Human
auucagcuggagcccuuaaaacuucgagcgug

SEQ ID NO: 338666 - RNA, 31 nt, Human
auucagcuguggagugugguuggagaugaag

SEQ ID NO: 338667 - RNA, 32 nt, Human
auucagcuucaaaugcagcccaguauccugcc

SEQ ID NO: 338668 - RNA, 26 nt, Human
auucagcuucuggguggugggugggg

SEQ ID NO: 338669 - RNA, 32 nt, Human
auucagcuucuucauuuccaacauggaagaaa

SEQ ID NO: 338670 - RNA, 32 nt, Human
auucagcuugcuugcuuccuccaccagucuga

SEQ ID NO: 338671 - RNA, 32 nt, Human
auucaggaaacugaggugggaggaucacuuga

SEQ ID NO: 338672 - RNA, 32 nt, Human
auucaggaaccgcggcugcugaaggagaaggu

SEQ ID NO: 338673 - RNA, 32 nt, Human
auucaggaagaggggguaaauguggauuguau

SEQ ID NO: 338674 - RNA, 32 nt, Human
auucaggaagcauaaaguaguaugaaagguuu

SEQ ID NO: 338675 - RNA, 32 nt, Human
auucaggaccaacuucugggaaacccaaacua

SEQ ID NO: 338676 - RNA, 32 nt, Human
auucaggacgcugaggcaggaggaucacuuca

SEQ ID NO: 338677 - RNA, 32 nt, Human
auucaggagauuaaggcaggaggaucacuuga

SEQ ID NO: 338678 - RNA, 32 nt, Human
auucaggagcaaguuuccaaagagacucauaa

SEQ ID NO: 338679 - RNA, 32 nt, Human
auucaggagcuucuguuauauucaaagguaau

SEQ ID NO: 338680 - RNA, 25 nt, Human
auucaggaggcggagguugcaguga

SEQ ID NO: 338681 - RNA, 32 nt, Human
auucaggaggcggagguugcagugagccaaga

SEQ ID NO: 338682 - RNA, 32 nt, Human
auucaggaggcugaggcaggagaaucacuuga

SEQ ID NO: 338683 - RNA, 32 nt, Human
auucaggaggcugaggcaggagaaucacuugg

SEQ ID NO: 338684 - RNA, 32 nt, Human
auucaggaggcugaggcaggaggaucgcuuga

SEQ ID NO: 338685 - RNA, 32 nt, Human
auucaggaggcugaggcggcaggaucacuuga

SEQ ID NO: 338686 - RNA, 32 nt, Human
auucaggaggcugaggugggaggaucauuuga

SEQ ID NO: 338687 - RNA, 32 nt, Human
auucaggaggcugaggugggaggaucgguuga

SEQ ID NO: 338688 - RNA, 32 nt, Human
auucaggaggcugaggugggaggauugcuuga

SEQ ID NO: 338689 - RNA, 32 nt, Human
auucaggagguggagguugcagugagccgaca

SEQ ID NO: 338690 - RNA, 32 nt, Human
auucaggaguccugugcuccagucacagccuu

SEQ ID NO: 338691 - RNA, 32 nt, Human
auucaggcaugaugccaggugcaccaacuuac

SEQ ID NO: 338692 - RNA, 32 nt, Human
auucaggcauuuucccccuuggcucucaaugc

SEQ ID NO: 338693 - RNA, 32 nt, Human
auucaggcgaguuuugcccaggccugcugucu

SEQ ID NO: 338694 - RNA, 32 nt, Human
auucaggcugggaaccugaacacacacuugug

SEQ ID NO: 338695 - RNA, 32 nt, Human
auucagggaaaucucucccuucauuuacuuuu

SEQ ID NO: 338696 - RNA, 32 nt, Human
auucagggaucacacaguucugccuguucuca

SEQ ID NO: 338697 - RNA, 32 nt, Human
auucaggggcaaucugguuugcauuuaagauc

SEQ ID NO: 338698 - RNA, 32 nt, Human
auucaggggcugcuucagaaucccaucuuugc

SEQ ID NO: 338699 - RNA, 32 nt, Human
auucaggggcuggggucugccugguccuugag

SEQ ID NO: 338700 - RNA, 32 nt, Human
auucaggguuuccugacugcuaaugcagaaag

SEQ ID NO: 338701 - RNA, 32 nt, Human
auucagguauaugugauauuuugccugguuug

SEQ ID NO: 338702 - RNA, 32 nt, Human
auucaggucaacacugcacuccagccugggcg

SEQ ID NO: 338703 - RNA, 32 nt, Human
auucaggugaucucuguggagguagucaggga

SEQ ID NO: 338704 - RNA, 32 nt, Human
auucagguggagggguacaucuagggguggag

SEQ ID NO: 338705 - RNA, 32 nt, Human
auucagguucaguacauuuauuacaaagugaa

SEQ ID NO: 338706 - RNA, 32 nt, Human
auucaguaaauguuaagcagcagaagacuucg

SEQ ID NO: 338707 - RNA, 32 nt, Human
auucaguacugagcuagaucguguaaagaauc

SEQ ID NO: 338708 - RNA, 32 nt, Human
auucaguaguuagggcagggaggagaaauaaa

SEQ ID NO: 338709 - RNA, 32 nt, Human
auucaguauaauggcaucacugccuguuuuuc

SEQ ID NO: 338710 - RNA, 32 nt, Human
auucaguauuucugcacucuuagcuggauucu

SEQ ID NO: 338711 - RNA, 32 nt, Human
auucagucacagucacagccaccaugccaggg

SEQ ID NO: 338712 - RNA, 32 nt, Human
auucagucauggagaaaaacauauuaaaauaa

SEQ ID NO: 338713 - RNA, 32 nt, Human
auucaguccagggggagccacggaaaccaugu

SEQ ID NO: 338714 - RNA, 32 nt, Human
auucagucuguggagguuugcauucaccugcc

SEQ ID NO: 338715 - RNA, 32 nt, Human
auucagugcagcagggggacacagaccugccc

SEQ ID NO: 338716 - RNA, 32 nt, Human
auucagugcagccucuuuaccaccuccccacu

SEQ ID NO: 338717 - RNA, 32 nt, Human
auucagugcauccagguccugccuugugagau

SEQ ID NO: 338718 - RNA, 19 nt, Human
auucaguggaaagaugcac

SEQ ID NO: 338719 - RNA, 32 nt, Human
auucaguggccugcuuucgccugcugucucug

SEQ ID NO: 338720 - RNA, 32 nt, Human
auucagugggccagucaaaucuuaaagcuccc

SEQ ID NO: 338721 - RNA, 24 nt, Human
auucagugucuucauuuuuacaaa

SEQ ID NO: 338722 - RNA, 32 nt, Human
auucaguucauccaaaauggaguaauauccuu

SEQ ID NO: 338723 - RNA, 32 nt, Human
auucaguuccaguuuaaugauguggcccucua

SEQ ID NO: 338724 - RNA, 32 nt, Human
auucaguucugccuccaaaaugcaugugucca

SEQ ID NO: 338725 - RNA, 32 nt, Human
auucaguugagugcagcaucuuucccacauuc

SEQ ID NO: 338726 - RNA, 21 nt, Human
auucaguuuauguguaaaaua

SEQ ID NO: 338727 - RNA, 32 nt, Human
auucaguuucuggggaaagugaagcaugaagg

SEQ ID NO: 338728 - RNA, 32 nt, Human
auucaguuuuaaaaggaaaacagagcauaaaa

SEQ ID NO: 338729 - RNA, 32 nt, Human
auucaguuuucuuguccauaucuuuaaaagag

SEQ ID NO: 338730 - RNA, 32 nt, Human
auucauaaaggagauaaauuauacaaauguga

SEQ ID NO: 338731 - RNA, 32 nt, Human
auucauaagcauguaauuccagugacuuacua

SEQ ID NO: 338732 - RNA, 32 nt, Human
auucauaaggcaauucauacuggagaaaaacc

SEQ ID NO: 338733 - RNA, 32 nt, Human
auucauaaggcaauucauacuggagagaaacc

SEQ ID NO: 338734 - RNA, 32 nt, Human
auucauaaggcaauucauacuggagagaaucc

SEQ ID NO: 338735 - RNA, 32 nt, Human
auucauaauuauucagcucugcugcuaaacac

SEQ ID NO: 338736 - RNA, 32 nt, Human
auucauacacaugcaaucauacaugcacacug

SEQ ID NO: 338737 - RNA, 21 nt, Human
auucauacgggagagaagccu

SEQ ID NO: 338738 - RNA, 32 nt, Human
auucauagcuaggaaaugaaauucuuguaauu

SEQ ID NO: 338739 - RNA, 32 nt, Human
auucauaggcaguaauguuccucccaggguuu

SEQ ID NO: 338740 - RNA, 32 nt, Human
auucauaguauuaggaucuuuaugauuuauca

SEQ ID NO: 338741 - RNA, 32 nt, Human
auucauauauuuuugcucguuaguguauuucu

SEQ ID NO: 338742 - RNA, 32 nt, Human
auucauaugcugcugcugcugcagccaccaga

SEQ ID NO: 338743 - RNA, 32 nt, Human
auucauauugcuuaagaggcuuaacauuaccu

SEQ ID NO: 338744 - RNA, 32 nt, Human
auucauauuugcaaagacuacagacuuuuucu

SEQ ID NO: 338745 - RNA, 32 nt, Human
auucaucaacagaccaguuuuugugggcauau

SEQ ID NO: 338746 - RNA, 20 nt, Human
auucaucaacuaagaaccaa

SEQ ID NO: 338747 - RNA, 32 nt, Human
auucaucaccaaguccuuauuagaugagcacu

SEQ ID NO: 338748 - RNA, 32 nt, Human
auucaucacugcaucuccaacgccuagcacag

SEQ ID NO: 338749 - RNA, 32 nt, Human
auucaucagauccaguuuaugaggguuggggg

SEQ ID NO: 338750 - RNA, 32 nt, Human
auucaucaggacuuguauuagcagguucuggc

SEQ ID NO: 338751 - RNA, 21 nt, Human
auucaucagggcaggaagcag

SEQ ID NO: 338752 - RNA, 32 nt, Human
auucaucaugauauugucugugccuagugaau

SEQ ID NO: 338753 - RNA, 32 nt, Human
auucauccauauaugacuuaaaagccacccag

SEQ ID NO: 338754 - RNA, 32 nt, Human
auucauccaugcguccgccugccugccugcgc

SEQ ID NO: 338755 - RNA, 32 nt, Human
auucauccauuuuagagccaggaauucccaug

SEQ ID NO: 338756 - RNA, 32 nt, Human
auucaucccagaggaaccugaggccugaagga

SEQ ID NO: 338757 - RNA, 32 nt, Human
auucauccucuauccauccaucauccauccau

SEQ ID NO: 338758 - RNA, 32 nt, Human
auucauccucuggaaauauucucucucagcca

SEQ ID NO: 338759 - RNA, 32 nt, Human
auucauccugcacagggaaauggcuaccuauu

SEQ ID NO: 338760 - RNA, 32 nt, Human
auucauccuugcaaccccauucaccaggagcc

SEQ ID NO: 338761 - RNA, 32 nt, Human
auucauccuugccucugcccuucaggagcagc

SEQ ID NO: 338762 - RNA, 32 nt, Human
auucauccuuguuucccuugugggaucaggua

SEQ ID NO: 338763 - RNA, 32 nt, Human
auucaucuacccugcugaccucccagugaccc

SEQ ID NO: 338764 - RNA, 32 nt, Human
auucaucuaccugccaggccucaggcccagga

SEQ ID NO: 338765 - RNA, 32 nt, Human
auucaucuccacccccuucccccaccacuucu

SEQ ID NO: 338766 - RNA, 32 nt, Human
auucaucuccacccuucaugacugcccgcuga

SEQ ID NO: 338767 - RNA, 32 nt, Human
auucaucuccccuuuucagccauuucaacaaa

SEQ ID NO: 338768 - RNA, 32 nt, Human
auucaucuccuggaauuuccaugugaaucaca

SEQ ID NO: 338769 - RNA, 32 nt, Human
auucaucugaccccaucuccucauccuccccc

SEQ ID NO: 338770 - RNA, 32 nt, Human
auucaucugcccacccauccgucccuccgucu

SEQ ID NO: 338771 - RNA, 32 nt, Human
auucaucuggaaggagggaggcuuggaugagc

SEQ ID NO: 338772 - RNA, 32 nt, Human
auucaucuuccuggucccaaagccugguuggu

SEQ ID NO: 338773 - RNA, 32 nt, Human
auucaucuuuauucccuccaucaucuagacuu

SEQ ID NO: 338774 - RNA, 32 nt, Human
auucaugaagaaaagcagauagaaguggcuga

SEQ ID NO: 338775 - RNA, 32 nt, Human
auucaugaguuucuacuugagugagaaaacug

SEQ ID NO: 338776 - RNA, 32 nt, Human
auucaugcacuguagggcugggcgcagcaucc

SEQ ID NO: 338777 - RNA, 32 nt, Human
auucaugccuuacagaacaucagagaguucau

SEQ ID NO: 338778 - RNA, 32 nt, Human
auucaugccuuggaauuaaauauacauauaua

SEQ ID NO: 338779 - RNA, 32 nt, Human
auucaugcugugaugcgauuucaccuuauagu

SEQ ID NO: 338780 - RNA, 32 nt, Human
auucaugcuuacccugcugcucagcuuucuca

SEQ ID NO: 338781 - RNA, 31 nt, Human
auucauggaccaguagauuguugaaaguugg

SEQ ID NO: 338782 - RNA, 32 nt, Human
auucauggagaaauacacccucccacaacuga

SEQ ID NO: 338783 - RNA, 29 nt, Human
auucauggcugaaguggaggaucaggcag

SEQ ID NO: 338784 - RNA, 31 nt, Human
auucauguagagagagaaaaguaacuguuuu

SEQ ID NO: 338785 - RNA, 32 nt, Human
auucaugucagaccaagaauuuaaauuauuuu

SEQ ID NO: 338786 - RNA, 32 nt, Human
auucauguccuguaauacuucaccuccaggaa

SEQ ID NO: 338787 - RNA, 32 nt, Human
auucauguccuucuggggaggagggaggaccc

SEQ ID NO: 338788 - RNA, 32 nt, Human
auucaugucuucauuuugggaugcagcuaaua

SEQ ID NO: 338789 - RNA, 31 nt, Human
auucauguucaucaauaccugcugagaguac

SEQ ID NO: 338790 - RNA, 32 nt, Human
auucauguucugagaguucuucagcugcccug

SEQ ID NO: 338791 - RNA, 32 nt, Human
auucauguuugugagagaaggaaagaguaagu

SEQ ID NO: 338792 - RNA, 32 nt, Human
auucauguuuucucaagcuccagauuggcuag

SEQ ID NO: 338793 - RNA, 32 nt, Human
auucauuaaccaccaaaccucuaccucuucuc

SEQ ID NO: 338794 - RNA, 32 nt, Human
auucauuaaggaaccagcugcggaggaaggug

SEQ ID NO: 338795 - RNA, 32 nt, Human
auucauuaguaaaaugaguuaccaagauccuc

SEQ ID NO: 338796 - RNA, 32 nt, Human
auucauuaguaagcagcaaucuuccagaagug

SEQ ID NO: 338797 - RNA, 32 nt, Human
auucauuaucugaaaugggcucagcugcuucu

SEQ ID NO: 338798 - RNA, 32 nt, Human
auucauuauggugaacccuucuugucugcuau

SEQ ID NO: 338799 - RNA, 32 nt, Human
auucauuauucuaguccugcuuuaguccuuug

SEQ ID NO: 338800 - RNA, 32 nt, Human
auucauucaaccuaauuaucugugauaugaga

SEQ ID NO: 338801 - RNA, 32 nt, Human
auucauucauuauucuaguccugcuuuagucc

SEQ ID NO: 338802 - RNA, 32 nt, Human
auucauucauucuuucauucauucgauaggua

SEQ ID NO: 338803 - RNA, 32 nt, Human
auucauuccagagaaaugaaaaccuauauugu

SEQ ID NO: 338804 - RNA, 32 nt, Human
auucauucucucugaacacacauugcuauucc

SEQ ID NO: 338805 - RNA, 32 nt, Human
auucauucucucuucuccaucacccauaccca

SEQ ID NO: 338806 - RNA, 32 nt, Human
auucauucuuagcuucuucaucuuugugugga

SEQ ID NO: 338807 - RNA, 32 nt, Human
auucauuguuucugcugggggcauuuuuaucu

SEQ ID NO: 338808 - RNA, 32 nt, Human
auucauuuaaggccuaaggaugaaggcgagaa

SEQ ID NO: 338809 - RNA, 32 nt, Human
auucauuucaacaaaauagugaauugauaauc

SEQ ID NO: 338810 - RNA, 32 nt, Human
auucauuucuguagcaugacagggauuucaau

SEQ ID NO: 338811 - RNA, 32 nt, Human
auucauuugaaggcucaucaacaacaaaaagu

SEQ ID NO: 338812 - RNA, 26 nt, Human
auucauuugaauaaaaaggaacuugg

SEQ ID NO: 338813 - RNA, 32 nt, Human
auucauuugcagcaaaauacuggcuuguuaau

SEQ ID NO: 338814 - RNA, 32 nt, Human
auucauuuuaaggcuucucugaauugugcuca

SEQ ID NO: 338815 - RNA, 32 nt, Human
auucauuuuaucaauguagcugugaaggccau

SEQ ID NO: 338816 - RNA, 32 nt, Human
auucauuuucucaguugaagaagagaaaauuu

SEQ ID NO: 338817 - RNA, 32 nt, Human
auucauuuucuuuggguuagagcuagagagaa

SEQ ID NO: 338818 - RNA, 32 nt, Human
auuccaaacauguaggaugggggucuuguccu

SEQ ID NO: 338819 - RNA, 18 nt, Human
auuccaaaguacuaaaca

SEQ ID NO: 338820 - RNA, 32 nt, Human
auuccaaagugcugggauuacaggugugagcc

SEQ ID NO: 338821 - RNA, 32 nt, Human
auuccaacacucuuaaaaaccccuacccccaa

SEQ ID NO: 338822 - RNA, 32 nt, Human
auuccaacccuccacagaugugcaguugguuc

SEQ ID NO: 338823 - RNA, 32 nt, Human
auuccaacucaggccuccaagggcugcaguuc

SEQ ID NO: 338824 - RNA, 32 nt, Human
auuccaacugccuccgaccccaaagggauucu

SEQ ID NO: 338825 - RNA, 32 nt, Human
auuccaagacucaagugucuucaaugagacuu

SEQ ID NO: 338826 - RNA, 32 nt, Human
auuccaagagaaggauaugcugagggaaaaug

SEQ ID NO: 338827 - RNA, 32 nt, Human
auuccaagcucgagagcuucagccucaggaaa

SEQ ID NO: 338828 - RNA, 32 nt, Human
auuccaagcuggcacugccacuguggagggcg

SEQ ID NO: 338829 - RNA, 32 nt, Human
auuccaagcugguccccucuguguaucacucu

SEQ ID NO: 338830 - RNA, 32 nt, Human
auuccaaggcauggccagcccagcuggagggc

SEQ ID NO: 338831 - RNA, 32 nt, Human
auuccaaggccaccccuucuccuuuuagucau

SEQ ID NO: 338832 - RNA, 32 nt, Human
auuccaagucaccacuucucucaccggcuucu

SEQ ID NO: 338833 - RNA, 32 nt, Human
auuccaagugaguccuggguggagaaagaaga

SEQ ID NO: 338834 - RNA, 32 nt, Human
auuccaaugcucuccucuuucucuggccacag

SEQ ID NO: 338835 - RNA, 32 nt, Human
auuccaauuaugaagccucuucccucaugacc

SEQ ID NO: 338836 - RNA, 32 nt, Human
auuccaauugcuuuuuggccuuuuggcuaaaa

SEQ ID NO: 338837 - RNA, 25 nt, Human
auuccaauuugaagauucauuugaa

SEQ ID NO: 338838 - RNA, 20 nt, Human
auuccacaaacgaacaaaca

SEQ ID NO: 338839 - RNA, 32 nt, Human
auuccacaaagaagaggaagaaguggaagauu

SEQ ID NO: 338840 - RNA, 32 nt, Human
auuccacacuagaccagcuuuguccacucagc

SEQ ID NO: 338841 - RNA, 18 nt, Human
auuccacagaaucuucaa

SEQ ID NO: 338842 - RNA, 32 nt, Human
auuccacagacacauauguuguguacauacgu

SEQ ID NO: 338843 - RNA, 32 nt, Human
auuccacagaugugggucagaggcagagaugg

SEQ ID NO: 338844 - RNA, 32 nt, Human
auuccacaggcuccugaguccccgaggccugg

SEQ ID NO: 338845 - RNA, 32 nt, Human
auuccacaugcaauucacucuggcgacccugu

SEQ ID NO: 338846 - RNA, 19 nt, Human
auuccaccagagucugcac

SEQ ID NO: 338847 - RNA, 32 nt, Human
auuccaccaggacucaucucccuuccuucuca

SEQ ID NO: 338848 - RNA, 32 nt, Human
auuccaccagggguauuucagcuuugaaacca

SEQ ID NO: 338849 - RNA, 32 nt, Human
auuccaccauugcacuccagucugggcaacag

SEQ ID NO: 338850 - RNA, 32 nt, Human
auuccacccaggaacuaaggcugcagcccacc

SEQ ID NO: 338851 - RNA, 32 nt, Human
auuccacccucugccugccugccugccugcug

SEQ ID NO: 338852 - RNA, 32 nt, Human
auuccaccuccaccuccaccucccccugccac

SEQ ID NO: 338853 - RNA, 32 nt, Human
auuccaccuccccucccaagugacccuccucc

SEQ ID NO: 338854 - RNA, 32 nt, Human
auuccacgaagaaaauccugauuccaagaugu

SEQ ID NO: 338855 - RNA, 32 nt, Human
auuccacucccaugaaacuuuggucauuguua

SEQ ID NO: 338856 - RNA, 32 nt, Human
auuccacugaaaccucuguucucaugaaggag

SEQ ID NO: 338857 - RNA, 32 nt, Human
auuccacugggccuaccuuccuuggggauguu

SEQ ID NO: 338858 - RNA, 32 nt, Human
auuccacugggucugcagcucacacauaggca

SEQ ID NO: 338859 - RNA, 32 nt, Human
auuccacuguuagacagcuacagggaaugauu

SEQ ID NO: 338860 - RNA, 32 nt, Human
auuccagaaugcugggaguuuuacagugccau

SEQ ID NO: 338861 - RNA, 32 nt, Human
auuccagacacacaccacucagaaaugugggc

SEQ ID NO: 338862 - RNA, 32 nt, Human
auuccagacuuugaugacuacacccaccccau

SEQ ID NO: 338863 - RNA, 32 nt, Human
auuccagagaugcacuccgcucuggaacucac

SEQ ID NO: 338864 - RNA, 32 nt, Human
auuccagaugcaugauccagcuguguguuuuc

SEQ ID NO: 338865 - RNA, 32 nt, Human
auuccagauggaaauagaauucucucucuugc

SEQ ID NO: 338866 - RNA, 32 nt, Human
auuccagcaauucuccugccucggcuucccaa

SEQ ID NO: 338867 - RNA, 32 nt, Human
auuccagcaccguuucuacaucugccaucuua

SEQ ID NO: 338868 - RNA, 20 nt, Human
auuccagcacuggaggaccc

SEQ ID NO: 338869 - RNA, 32 nt, Human
auuccagcacuggaggacccccugccacggcg

SEQ ID NO: 338870 - RNA, 32 nt, Human
auuccagcagccacccagaccaugcuccgccg

SEQ ID NO: 338871 - RNA, 32 nt, Human
auuccagccucauuguaacacacauucuacgc

SEQ ID NO: 338872 - RNA, 26 nt, Human
auuccagccugggugacagagcgaga

SEQ ID NO: 338873 - RNA, 26 nt, Human
auuccagccugggugacagagugaga

SEQ ID NO: 338874 - RNA, 32 nt, Human
auuccagcucacugcgcagccugggaggaggc

SEQ ID NO: 338875 - RNA, 32 nt, Human
auuccagcuuuucuucuacuagucugauguuu

SEQ ID NO: 338876 - RNA, 32 nt, Human
auuccaggaggcuuuucauauagaagaugagu

SEQ ID NO: 338877 - RNA, 32 nt, Human
auuccaggcaugagccacugcgcccagucuac

SEQ ID NO: 338878 - RNA, 32 nt, Human
auuccaggccagagacccaguccuuucaauua

SEQ ID NO: 338879 - RNA, 32 nt, Human
auuccaggcccuggcauaagcugaaucccaaa

SEQ ID NO: 338880 - RNA, 32 nt, Human
auuccaggccuccgcuucuccuggggcagcca

SEQ ID NO: 338881 - RNA, 32 nt, Human
auuccaggcgugagccacugcaccuggcggaa

SEQ ID NO: 338882 - RNA, 32 nt, Human
auuccaggcgugagccacugcgcccggccagc

SEQ ID NO: 338883 - RNA, 32 nt, Human
auuccaggcgugagccaucgugcccagcuaga

SEQ ID NO: 338884 - RNA, 32 nt, Human
auuccaggcuccucagcugcaggauggcuccu

SEQ ID NO: 338885 - RNA, 32 nt, Human
auuccagggaagaaacucuggagaagagcuaa

SEQ ID NO: 338886 - RNA, 32 nt, Human
auuccagggacccugccgcugccccucugagg

SEQ ID NO: 338887 - RNA, 32 nt, Human
auuccagggaggucaggaagagguaaaguaca

SEQ ID NO: 338888 - RNA, 32 nt, Human
auuccagggcacagucccuaaauuacugauca

SEQ ID NO: 338889 - RNA, 32 nt, Human
auuccagggcccagagcuggacagacaucaca

SEQ ID NO: 338890 - RNA, 32 nt, Human
auuccagggucacagccccaacagaagcagca

SEQ ID NO: 338891 - RNA, 32 nt, Human
auuccagggugaugccugcugaagccacgcag

SEQ ID NO: 338892 - RNA, 32 nt, Human
auuccagguaguucuggugcagguaaguggcc

SEQ ID NO: 338893 - RNA, 32 nt, Human
auuccaggugggagccacugcaccuggcucuu

SEQ ID NO: 338894 - RNA, 32 nt, Human
auuccaggugugagccacaucacaguauuacc

SEQ ID NO: 338895 - RNA, 32 nt, Human
auuccaggugugagccacuucacccagccaca

SEQ ID NO: 338896 - RNA, 32 nt, Human
auuccaggugugagcuacugugcccagcuaaa

SEQ ID NO: 338897 - RNA, 32 nt, Human
auuccagguguucccuggaaaggucaagugag

SEQ ID NO: 338898 - RNA, 32 nt, Human
auuccaguccuucccuuccucuccucacucug

SEQ ID NO: 338899 - RNA, 32 nt, Human
auuccagugcucucaaaaagcauguuuuucaa

SEQ ID NO: 338900 - RNA, 31 nt, Human
auuccaguugcuuucaucacagccugaaaau

SEQ ID NO: 338901 - RNA, 32 nt, Human
auuccaguuguuaggaagagaugaggaguugg

SEQ ID NO: 338902 - RNA, 32 nt, Human
auuccauaauuguaaagcgggcuguucuuauc

SEQ ID NO: 338903 - RNA, 32 nt, Human
auuccauacaaauaacucagcacacaagugac

SEQ ID NO: 338904 - RNA, 32 nt, Human
auuccauaggaagacacacauaugcacacaaa

SEQ ID NO: 338905 - RNA, 32 nt, Human
auuccauaggagagcugggggcaggagaaugg

SEQ ID NO: 338906 - RNA, 32 nt, Human
auuccauagguuggcagggcuuggggagcaag

SEQ ID NO: 338907 - RNA, 32 nt, Human
auuccauauuagggcaaugagacugaaacuac

SEQ ID NO: 338908 - RNA, 32 nt, Human
auuccauccacacaguuuccacccucaccugc

SEQ ID NO: 338909 - RNA, 32 nt, Human
auuccaucccaagagaggucugcgugacgcgu

SEQ ID NO: 338910 - RNA, 32 nt, Human
auuccaucccacauggcggcgcuccugaggag

SEQ ID NO: 338911 - RNA, 32 nt, Human
auuccauccccaguccagccugggcaacccca

SEQ ID NO: 338912 - RNA, 32 nt, Human
auuccaucucagaagagacuugacuuguggau

SEQ ID NO: 338913 - RNA, 32 nt, Human
auuccaucuuggaagagcacaaggugcaggug

SEQ ID NO: 338914 - RNA, 32 nt, Human
auuccaucuugguuacaaaugagacuccuuca

SEQ ID NO: 338915 - RNA, 32 nt, Human
auuccaucuuuuucagacaagugaacaauuua

SEQ ID NO: 338916 - RNA, 32 nt, Human
auuccaugaacccaggaugcggagguugcagu

SEQ ID NO: 338917 - RNA, 32 nt, Human
auuccaugaaguauuguuuccuuuauuuaaaa

SEQ ID NO: 338918 - RNA, 32 nt, Human
auuccaugaugcauauuacuggauuagauuaa

SEQ ID NO: 338919 - RNA, 29 nt, Human
auuccauggcugcuguuuucuccucugua

SEQ ID NO: 338920 - RNA, 32 nt, Human
auuccauggcugggagucacugaugcugccuc

SEQ ID NO: 338921 - RNA, 29 nt, Human
auuccaugugugccugugccuggggcaug

SEQ ID NO: 338922 - RNA, 32 nt, Human
auuccauguguuagauggaagcauuuccuauc

SEQ ID NO: 338923 - RNA, 32 nt, Human
auuccauguuuucuucccaucugccuuauaua

SEQ ID NO: 338924 - RNA, 32 nt, Human
auuccauuacacuccagccugggcaccaggaa

SEQ ID NO: 338925 - RNA, 32 nt, Human
auuccauuagauaguacauuucucaaagauuu

SEQ ID NO: 338926 - RNA, 23 nt, Human
auuccauucccuccagccucagc

SEQ ID NO: 338927 - RNA, 23 nt, Human
auuccauucccuucggccaaaca

SEQ ID NO: 338928 - RNA, 32 nt, Human
auuccauugcugcaaugaaugugaaaaagcca

SEQ ID NO: 338929 - RNA, 32 nt, Human
auuccauuguaaaguuguacagaaaguuauag

SEQ ID NO: 338930 - RNA, 32 nt, Human
auucccaaaagcuuccuuucaaaccacgauuu

SEQ ID NO: 338931 - RNA, 32 nt, Human
auucccaacugcucugcccacugugaaaccac

SEQ ID NO: 338932 - RNA, 32 nt, Human
auucccaagcaugccagcuucugugcccaugg

SEQ ID NO: 338933 - RNA, 32 nt, Human
auucccaagccgcggggcggcuccgguggugc

SEQ ID NO: 338934 - RNA, 32 nt, Human
auucccaagcuggucuugaaaucuugggcuca

SEQ ID NO: 338935 - RNA, 32 nt, Human
auucccaaucacuggucaucugacccuacuug

SEQ ID NO: 338936 - RNA, 32 nt, Human
auucccacagcugggagccagcaagagagcuu

SEQ ID NO: 338937 - RNA, 32 nt, Human
auucccacaguaauauagacugugcauggugu

SEQ ID NO: 338938 - RNA, 23 nt, Human
auucccacaucuacaucagugaa

SEQ ID NO: 338939 - RNA, 32 nt, Human
auucccacaugccgugacucuggacuauauca

SEQ ID NO: 338940 - RNA, 32 nt, Human
auucccaccagcugcaggcugucaggguauca

SEQ ID NO: 338941 - RNA, 32 nt, Human
auucccaccauccugugaacuuuguuguacuu

SEQ ID NO: 338942 - RNA, 32 nt, Human
auucccacccacgacucacaggcauuccuccc

SEQ ID NO: 338943 - RNA, 32 nt, Human
auucccaccugccacaguucacaugccacaaa

SEQ ID NO: 338944 - RNA, 32 nt, Human
auucccaccuucacccugucauggucucaggg

SEQ ID NO: 338945 - RNA, 32 nt, Human
auucccacuccccuccucucagccucccugau

SEQ ID NO: 338946 - RNA, 32 nt, Human
auucccacuccuggcauuuucuggcagguuua

SEQ ID NO: 338947 - RNA, 32 nt, Human
auucccacugcacuuggugcugcuuuggcuga

SEQ ID NO: 338948 - RNA, 32 nt, Human
auucccacuggagagacuugugcucaaggaau

SEQ ID NO: 338949 - RNA, 32 nt, Human
auucccagaccccagcccuuugugcucacccu

SEQ ID NO: 338950 - RNA, 32 nt, Human
auucccagcagaggcuucaggugcuuugugua

SEQ ID NO: 338951 - RNA, 32 nt, Human
auucccagcccagcugcgugguggugacugga

SEQ ID NO: 338952 - RNA, 32 nt, Human
auucccagcccugaggcccaccccagaggcug

SEQ ID NO: 338953 - RNA, 32 nt, Human
auucccagcuacucagaggcugaggcaggaaa

SEQ ID NO: 338954 - RNA, 32 nt, Human
auucccagcuacucaggagguugaggugggag

SEQ ID NO: 338955 - RNA, 32 nt, Human
auucccagcuacucaugaggcugaggcaggag

SEQ ID NO: 338956 - RNA, 32 nt, Human
auucccagcuacucgggaggcugaggcaggag

SEQ ID NO: 338957 - RNA, 32 nt, Human
auucccagcuacucuggaggcugaggcggagg

SEQ ID NO: 338958 - RNA, 32 nt, Human
auucccagcuacuggggaggcugaggcaggag

SEQ ID NO: 338959 - RNA, 32 nt, Human
auucccagcuacuuggaaggcugagacaggag

SEQ ID NO: 338960 - RNA, 32 nt, Human
auucccagcuacuugggaggcugaggcaggaa

SEQ ID NO: 338961 - RNA, 32 nt, Human
auucccagcuacuugggaggcugaggcaggag

SEQ ID NO: 338962 - RNA, 32 nt, Human
auucccagcuacuugggagguugagggaggag

SEQ ID NO: 338963 - RNA, 32 nt, Human
auucccagcucugaccagacuugcugugugac

SEQ ID NO: 338964 - RNA, 32 nt, Human
auucccagcuucucgggaggcugaggcaggag

SEQ ID NO: 338965 - RNA, 32 nt, Human
auucccaggagaagagggaacaaccaauucau

SEQ ID NO: 338966 - RNA, 32 nt, Human
auucccaggccaggcugucgcuggccauccau

SEQ ID NO: 338967 - RNA, 32 nt, Human
auucccaggcuggagugcaaugucgugaucuu

SEQ ID NO: 338968 - RNA, 32 nt, Human
auucccaggcugggugcaguggcucacgccug

SEQ ID NO: 338969 - RNA, 32 nt, Human
auucccaggcuggucugagcuccggggccgug

SEQ ID NO: 338970 - RNA, 32 nt, Human
auucccaguccccagcuggggcuuggugugag

SEQ ID NO: 338971 - RNA, 32 nt, Human
auucccagucuacaaaaccccacagcuccuag

SEQ ID NO: 338972 - RNA, 32 nt, Human
auucccagugccccuggcuaggggcagagggc

SEQ ID NO: 338973 - RNA, 32 nt, Human
auucccauccccaaaagucaccagcguguggc

SEQ ID NO: 338974 - RNA, 32 nt, Human
auucccaucuacucgggaggcuuaggcaggau

SEQ ID NO: 338975 - RNA, 32 nt, Human
auucccaucuuugucucuagccuggagaagag

SEQ ID NO: 338976 - RNA, 32 nt, Human
auucccaugaacauccggggccugguguuguc

SEQ ID NO: 338977 - RNA, 32 nt, Human
auucccaugagagggcugaggucugggggcuu

SEQ ID NO: 338978 - RNA, 32 nt, Human
auucccauucgacgggcaaccagucaaugaaa

SEQ ID NO: 338979 - RNA, 21 nt, Human
auuccccaagccccuaauuca

SEQ ID NO: 338980 - RNA, 32 nt, Human
auuccccaccugcuucccagcuucacaauaaa

SEQ ID NO: 338981 - RNA, 32 nt, Human
auuccccacucacuuugugugcucuuaaccuu

SEQ ID NO: 338982 - RNA, 22 nt, Human
auuccccacuuuugcuaugcua

SEQ ID NO: 338983 - RNA, 20 nt, Human
auuccccagauccucuuagg

SEQ ID NO: 338984 - RNA, 32 nt, Human
auuccccagcuacuuggaaggcugagauggga

SEQ ID NO: 338985 - RNA, 20 nt, Human
auuccccagucacgaaaggg

SEQ ID NO: 338986 - RNA, 31 nt, Human
auuccccaguuucagugcguugcccacuuca

SEQ ID NO: 338987 - RNA, 22 nt, Human
auuccccaucgauggcaccuuc

SEQ ID NO: 338988 - RNA, 32 nt, Human
auucccccaagaggagugucuggaaggaucug

SEQ ID NO: 338989 - RNA, 32 nt, Human
auucccccagccccugggcaacuaucuacuuu

SEQ ID NO: 338990 - RNA, 32 nt, Human
auucccccuuuauuuuccuuuuugcccaauaa

SEQ ID NO: 338991 - RNA, 32 nt, Human
auuccccgagcacuccagccuggcagucagca

SEQ ID NO: 338992 - RNA, 32 nt, Human
auuccccgugugucugugcugcagccugccug

SEQ ID NO: 338993 - RNA, 32 nt, Human
auuccccuaaaccaccuccuguguuccugcuu

SEQ ID NO: 338994 - RNA, 32 nt, Human
auuccccuacaagggcccuguugugaggaguc

SEQ ID NO: 338995 - RNA, 25 nt, Human
auuccccuacccuucccuccucugu

SEQ ID NO: 338996 - RNA, 32 nt, Human
auuccccucacugcacuuuggaccccuggggc

SEQ ID NO: 338997 - RNA, 32 nt, Human
auuccccuccucacgccagccuaggagaagaa

SEQ ID NO: 338998 - RNA, 32 nt, Human
auuccccugaauauuuuugcauucauauuuuu

SEQ ID NO: 338999 - RNA, 32 nt, Human
auuccccugcucccccugucccuuccccaucc

SEQ ID NO: 339000 - RNA, 32 nt, Human
auuccccuucuagaacauguagacacuugaga

SEQ ID NO: 339001 - RNA, 32 nt, Human
auucccgaggaggccugagcagcuggacacgc

SEQ ID NO: 339002 - RNA, 32 nt, Human
auucccgaguagcugggauuacagaugugcac

SEQ ID NO: 339003 - RNA, 32 nt, Human
auucccgccagucugcccagcugcaguacuca

SEQ ID NO: 339004 - RNA, 32 nt, Human
auucccggccacucgggaggcugaggcaggag

SEQ ID NO: 339005 - RNA, 32 nt, Human
auucccggcgugagccaccgcgcccagcccuc

SEQ ID NO: 339006 - RNA, 32 nt, Human
auucccgggauucauuccucagccucugcuuc

SEQ ID NO: 339007 - RNA, 32 nt, Human
auucccgguucaauaaauggugcugggauaac

SEQ ID NO: 339008 - RNA, 32 nt, Human
auucccuaacugcuuccugaaagcuggaaaag

SEQ ID NO: 339009 - RNA, 32 nt, Human
auucccuaauuacagugaaauucuaucuugca

SEQ ID NO: 339010 - RNA, 32 nt, Human
auucccuacaaagccuccucugcaugccaguu

SEQ ID NO: 339011 - RNA, 32 nt, Human
auucccuaccuggcccccuccaccucccuagc

SEQ ID NO: 339012 - RNA, 22 nt, Human
auucccuagacaccuccggggu

SEQ ID NO: 339013 - RNA, 24 nt, Human
auucccuaggcguauuuuuguggu

SEQ ID NO: 339014 - RNA, 23 nt, Human
auucccuauuuaauaaauggugc

SEQ ID NO: 339015 - RNA, 32 nt, Human
auucccucaaagcaauaucagguaaaccaagu

SEQ ID NO: 339016 - RNA, 32 nt, Human
auucccucaaaucccuccucuuacuccaugcu

SEQ ID NO: 339017 - RNA, 32 nt, Human
auucccucaagugcccugaggagcauuugcaa

SEQ ID NO: 339018 - RNA, 32 nt, Human
auucccucacuacccccaggagauauucacug

SEQ ID NO: 339019 - RNA, 32 nt, Human
auucccucacuggcuguguauuuauugagugg

SEQ ID NO: 339020 - RNA, 32 nt, Human
auucccucauuuccuucaagucugcucaaaug

SEQ ID NO: 339021 - RNA, 32 nt, Human
auucccuccaggcuugggcagggagacucgca

SEQ ID NO: 339022 - RNA, 21 nt, Human
auucccucccaagaagucagu

SEQ ID NO: 339023 - RNA, 32 nt, Human
auucccuccuccacuccucccuuggucuggcc

SEQ ID NO: 339024 - RNA, 32 nt, Human
auucccuccucugaaaugcaccccuuuguaau

SEQ ID NO: 339025 - RNA, 32 nt, Human
auucccucuccucuuggcucauaggucaaugg

SEQ ID NO: 339026 - RNA, 32 nt, Human
auucccucuccuggucucugggucuggcuucc

SEQ ID NO: 339027 - RNA, 32 nt, Human
auucccucuggcccagcuucccagugcucaca

SEQ ID NO: 339028 - RNA, 32 nt, Human
auucccucuuccaggcccuugucuccccaguu

SEQ ID NO: 339029 - RNA, 32 nt, Human
auucccugagguauggcuuggucacucucagg

SEQ ID NO: 339030 - RNA, 21 nt, Human
auucccugauuuaauaugcaa

SEQ ID NO: 339031 - RNA, 32 nt, Human
auucccugcccagccgaccaaaugaccucugc

SEQ ID NO: 339032 - RNA, 32 nt, Human
auucccuggauaguguagugguagauuucucc

SEQ ID NO: 339033 - RNA, 32 nt, Human
auucccugggcaacacuggucaggcauucauu

SEQ ID NO: 339034 - RNA, 32 nt, Human
auucccuggugaggacagccagaggagcugcg

SEQ ID NO: 339035 - RNA, 32 nt, Human
auucccuguccuggcccccuucagcaacccug

SEQ ID NO: 339036 - RNA, 32 nt, Human
auucccugugaccuaguuggugcaguggcuug

SEQ ID NO: 339037 - RNA, 32 nt, Human
auucccuguggauuuuuaaaacagauauuauu

SEQ ID NO: 339038 - RNA, 32 nt, Human
auucccuuccaucucccuccccucugccuuuu

SEQ ID NO: 339039 - RNA, 32 nt, Human
auucccuucggccaaacagacagguggaaaaa

SEQ ID NO: 339040 - RNA, 32 nt, Human
auucccuucucccauuccuugucugccauucu

SEQ ID NO: 339041 - RNA, 32 nt, Human
auucccuucuccuauccuccugccucccuauc

SEQ ID NO: 339042 - RNA, 32 nt, Human
auucccuucucuucaacgguuucaguacauau

SEQ ID NO: 339043 - RNA, 32 nt, Human
auuccgacagcaggacauacauguugguguga

SEQ ID NO: 339044 - RNA, 32 nt, Human
auuccgagagccugagacugacgcccgaccug

SEQ ID NO: 339045 - RNA, 32 nt, Human
auuccgcacgggccuacuguaggaccauuguc

SEQ ID NO: 339046 - RNA, 32 nt, Human
auuccgccccuuggaaccuggccaugcaaagc

SEQ ID NO: 339047 - RNA, 20 nt, Human
auuccgcgccgccgccgccg

SEQ ID NO: 339048 - RNA, 32 nt, Human
auuccggacacacaaccggccaugugacaggc

SEQ ID NO: 339049 - RNA, 32 nt, Human
auuccggaggaaaccuguuugacuugaguaga

SEQ ID NO: 339050 - RNA, 32 nt, Human
auuccgguccuuucuccuccccuagcugggga

SEQ ID NO: 339051 - RNA, 32 nt, Human
auuccguaugauagauggggccuggacaccca

SEQ ID NO: 339052 - RNA, 32 nt, Human
auuccgucuccugcucuggacuugcccucucc

SEQ ID NO: 339053 - RNA, 32 nt, Human
auuccgugcugucuggcaggaagcuccaucuc

SEQ ID NO: 339054 - RNA, 32 nt, Human
auuccguggaggagcuugaagagauggauagu

SEQ ID NO: 339055 - RNA, 22 nt, Human
auuccguggcaacuagauauca

SEQ ID NO: 339056 - RNA, 32 nt, Human
auuccguggucaaaauucuuccucacuauaau

SEQ ID NO: 339057 - RNA, 32 nt, Human
auuccuacuaucuguguucccuuagauacucc

SEQ ID NO: 339058 - RNA, 32 nt, Human
auuccuacuuucugaaucaacagugccuguua

SEQ ID NO: 339059 - RNA, 32 nt, Human
auuccuagaguuaagagaaccuuaaaagauua

SEQ ID NO: 339060 - RNA, 32 nt, Human
auuccuagcaucugcuaucaaacugugccuua

SEQ ID NO: 339061 - RNA, 31 nt, Human
auuccuaggcccuuucugccugugucagggc

SEQ ID NO: 339062 - RNA, 32 nt, Human
auuccuaguaacuagagaaaagacuuauuuau

SEQ ID NO: 339063 - RNA, 32 nt, Human
auuccuaucauucagaucuuccuuccucccaa

SEQ ID NO: 339064 - RNA, 32 nt, Human
auuccuaucuucuuccucaaaaucuggugacc

SEQ ID NO: 339065 - RNA, 32 nt, Human
auuccuauguguuucuuuggccuguguaucag

SEQ ID NO: 339066 - RNA, 32 nt, Human
auuccucaacucccagugugcccaugaguaag

SEQ ID NO: 339067 - RNA, 32 nt, Human
auuccucaccccaccugugaacuccuaccaga

SEQ ID NO: 339068 - RNA, 32 nt, Human
auuccucacuccauccagccucuugacaagca

SEQ ID NO: 339069 - RNA, 31 nt, Human
auuccucacugcuagaaugagaccagagguc

SEQ ID NO: 339070 - RNA, 32 nt, Human
auuccucagacuccaugagucuugcugccagg

SEQ ID NO: 339071 - RNA, 32 nt, Human
auuccucaggggccuguggcuggagaaaaggu

SEQ ID NO: 339072 - RNA, 32 nt, Human
auuccucagucagccaaaagcuuuucaaagag

SEQ ID NO: 339073 - RNA, 32 nt, Human
auuccucagugucgccucugagcccaggccuc

SEQ ID NO: 339074 - RNA, 31 nt, Human
auuccucaguuucaccaccucccucuuccag

SEQ ID NO: 339075 - RNA, 32 nt, Human
auuccucaucaacuuagaagguggugauauuc

SEQ ID NO: 339076 - RNA, 32 nt, Human
auuccucaucucccacccuugaucucaucacc

SEQ ID NO: 339077 - RNA, 32 nt, Human
auuccucaugcuguauguuuagauuugugauu

SEQ ID NO: 339078 - RNA, 32 nt, Human
auuccucauucuguggauguuucuaugagcca

SEQ ID NO: 339079 - RNA, 32 nt, Human
auuccuccaaaccaaauacagcaccuacugug

SEQ ID NO: 339080 - RNA, 32 nt, Human
auuccuccccacccacccauguuuuuaaacua

SEQ ID NO: 339081 - RNA, 32 nt, Human
auuccuccccauucacccaccuugccaggugc

SEQ ID NO: 339082 - RNA, 32 nt, Human
auuccucccuccugccacaaauuccccaaaaa

SEQ ID NO: 339083 - RNA, 32 nt, Human
auuccucccuuucucagucuaccuacucuuug

SEQ ID NO: 339084 - RNA, 32 nt, Human
auuccucccuuucucucuguuucuguuccucu

SEQ ID NO: 339085 - RNA, 32 nt, Human
auuccuccggucagcaauuucuugccucccuu

SEQ ID NO: 339086 - RNA, 32 nt, Human
auuccuccuaaggagcuggugucuucauccag

SEQ ID NO: 339087 - RNA, 32 nt, Human
auuccuccucaaggcaccaguguggagggcau

SEQ ID NO: 339088 - RNA, 32 nt, Human
auuccuccuccccugggccucucucccuuucu

SEQ ID NO: 339089 - RNA, 32 nt, Human
auuccuccugcuccaaacuuugcccauccucu

SEQ ID NO: 339090 - RNA, 32 nt, Human
auuccuccuuuuucucuguuucucucucuguu

SEQ ID NO: 339091 - RNA, 32 nt, Human
auuccucgucacagcaaaaacacuuuccuuuc

SEQ ID NO: 339092 - RNA, 24 nt, Human
auuccucucagugacccucagggu

SEQ ID NO: 339093 - RNA, 32 nt, Human
auuccucucaugggagaaacaaggaggcaguc

SEQ ID NO: 339094 - RNA, 32 nt, Human
auuccucuccaauuucugucuucuuuccacuu

SEQ ID NO: 339095 - RNA, 32 nt, Human
auuccucuccuccuccuccuccuggguccccc

SEQ ID NO: 339096 - RNA, 32 nt, Human
auuccucugcccucuugagccagcacaggaag

SEQ ID NO: 339097 - RNA, 32 nt, Human
auuccucugcuccauuccugccccucucugcc

SEQ ID NO: 339098 - RNA, 32 nt, Human
auuccucugggaaaaaugaaacauaaaauuuc

SEQ ID NO: 339099 - RNA, 32 nt, Human
auuccucugggcagcagcuccaacacaugggg

SEQ ID NO: 339100 - RNA, 32 nt, Human
auuccucugucugauccuuuggucuuugcuac

SEQ ID NO: 339101 - RNA, 32 nt, Human
auuccucuuacuuuauccuuuuuccuuaagua

SEQ ID NO: 339102 - RNA, 32 nt, Human
auuccucuucaaagauuuuagccuguaaaaau

SEQ ID NO: 339103 - RNA, 32 nt, Human
auuccucuucccaaucagccucuacccauucu

SEQ ID NO: 339104 - RNA, 32 nt, Human
auuccucuuucucugcuggagcugggauauuc

SEQ ID NO: 339105 - RNA, 32 nt, Human
auuccugaccucaggugauccaccugcuucgg

SEQ ID NO: 339106 - RNA, 32 nt, Human
auuccugacuaguuuugcacacuugaaaauug

SEQ ID NO: 339107 - RNA, 32 nt, Human
auuccugagacaggaguuacagucccuuuugg

SEQ ID NO: 339108 - RNA, 32 nt, Human
auuccugagauggggccaccuggggcccacag

SEQ ID NO: 339109 - RNA, 32 nt, Human
auuccugagccagagccuuccugguuuguaag

SEQ ID NO: 339110 - RNA, 32 nt, Human
auuccugaugaccgguuucauuuauucaugua

SEQ ID NO: 339111 - RNA, 32 nt, Human
auuccugauguuggggaagggacauggaggga

SEQ ID NO: 339112 - RNA, 32 nt, Human
auuccugcaacuugaccuucaggcugggagag

SEQ ID NO: 339113 - RNA, 32 nt, Human
auuccugcacucugccguguccacacugcccc

SEQ ID NO: 339114 - RNA, 32 nt, Human
auuccugcagagaagagcagggguggccagga

SEQ ID NO: 339115 - RNA, 32 nt, Human
auuccugcagagccauggucccaggcuuccca

SEQ ID NO: 339116 - RNA, 32 nt, Human
auuccugcagagccugcagcccaggacgacug

SEQ ID NO: 339117 - RNA, 32 nt, Human
auuccugcagcccuccagacuuccugcccuua

SEQ ID NO: 339118 - RNA, 32 nt, Human
auuccugccagacuuccaguacuguccucgac

SEQ ID NO: 339119 - RNA, 31 nt, Human
auuccugcccucucugagucucaguuuuucc

SEQ ID NO: 339120 - RNA, 32 nt, Human
auuccugcccugcccaauuuugcagggagcau

SEQ ID NO: 339121 - RNA, 32 nt, Human
auuccugccucgccacuguccugcugcccucc

SEQ ID NO: 339122 - RNA, 32 nt, Human
auuccugccuuggagaaaauacuucaaccaga

SEQ ID NO: 339123 - RNA, 32 nt, Human
auuccugcgcccccagcguggaaaggcuucca

SEQ ID NO: 339124 - RNA, 32 nt, Human
auuccugcugcagacaucaauagcuuaucuau

SEQ ID NO: 339125 - RNA, 32 nt, Human
auuccugcuucucaagggacacaguggccugc

SEQ ID NO: 339126 - RNA, 32 nt, Human
auuccugcuugccugccugccugccaauggcc

SEQ ID NO: 339127 - RNA, 32 nt, Human
auuccuggagucaguggauacaaguagugcag

SEQ ID NO: 339128 - RNA, 32 nt, Human
auuccuggccugcccuccuccuccaggcagcc

SEQ ID NO: 339129 - RNA, 32 nt, Human
auuccugggccggcaccauuucccaggaggac

SEQ ID NO: 339130 - RNA, 32 nt, Human
auuccugggccuggcccagguggcuguuuccc

SEQ ID NO: 339131 - RNA, 32 nt, Human
auuccuggggccagggcagagcuugagguguu

SEQ ID NO: 339132 - RNA, 32 nt, Human
auuccugggggcugagacuacaguggccaggu

SEQ ID NO: 339133 - RNA, 32 nt, Human
auuccugggguuuaauuguugugcaguuucau

SEQ ID NO: 339134 - RNA, 32 nt, Human
auuccugguccucaguguuggccaagggaucc

SEQ ID NO: 339135 - RNA, 32 nt, Human
auuccuggucucaagcaguccucccaccucag

SEQ ID NO: 339136 - RNA, 32 nt, Human
auuccuggugaagcaaaggagaggaggauggg

SEQ ID NO: 339137 - RNA, 32 nt, Human
auuccuguaaaugugacaaaauuuuaggauuu

SEQ ID NO: 339138 - RNA, 32 nt, Human
auuccuguaaggaaaauccgggcagauggagg

SEQ ID NO: 339139 - RNA, 32 nt, Human
auuccugucaaugacugggaugacaugaggaa

SEQ ID NO: 339140 - RNA, 32 nt, Human
auuccugucccaagcuaccucuaccaacccuc

SEQ ID NO: 339141 - RNA, 32 nt, Human
auuccugugaaccucuagaggauuugcgccug

SEQ ID NO: 339142 - RNA, 32 nt, Human
auuccuguugcugucuucagucucacagagaa

SEQ ID NO: 339143 - RNA, 32 nt, Human
auuccuguuguacauggggaggaagcaggucu

SEQ ID NO: 339144 - RNA, 32 nt, Human
auuccuuaacuccuuuuugauucauguuugua

SEQ ID NO: 339145 - RNA, 32 nt, Human
auuccuuacuaccgcuaacuccagucauaaac

SEQ ID NO: 339146 - RNA, 32 nt, Human
auuccuuacuaggcuuccaaagccacugcugu

SEQ ID NO: 339147 - RNA, 32 nt, Human
auuccuuacugcccagguucugucuaggaagg

SEQ ID NO: 339148 - RNA, 32 nt, Human
auuccuuagggcagugccucuagcuguguccu

SEQ ID NO: 339149 - RNA, 20 nt, Human
auuccuuagguucucagggu

SEQ ID NO: 339150 - RNA, 21 nt, Human
auuccuuagucuagcauaucc

SEQ ID NO: 339151 - RNA, 32 nt, Human
auuccuuauaaaggugauacuggagaauguga

SEQ ID NO: 339152 - RNA, 32 nt, Human
auuccuucacauaguuugauaaaaagaucaau

SEQ ID NO: 339153 - RNA, 32 nt, Human
auuccuucaggauacaaucagugagaaauaaa

SEQ ID NO: 339154 - RNA, 32 nt, Human
auuccuucaggauagagccaggaugggcccag

SEQ ID NO: 339155 - RNA, 32 nt, Human
auuccuucaggucuggaggcagaggaaugggc

SEQ ID NO: 339156 - RNA, 32 nt, Human
auuccuucauuaguggaagugucccgucuaca

SEQ ID NO: 339157 - RNA, 32 nt, Human
auuccuuccauccucuuuauuuccugaggucc

SEQ ID NO: 339158 - RNA, 32 nt, Human
auuccuucccauaggaacuguaagcucaaaaa

SEQ ID NO: 339159 - RNA, 32 nt, Human
auuccuuccuuuagaaaaacugaagauuaccc

SEQ ID NO: 339160 - RNA, 32 nt, Human
auuccuucuagcucccccugggggcugagccu

SEQ ID NO: 339161 - RNA, 32 nt, Human
auuccuucuccaccucaaccaccagcauugau

SEQ ID NO: 339162 - RNA, 32 nt, Human
auuccuucuggccucugcugaaugcagggaau

SEQ ID NO: 339163 - RNA, 32 nt, Human
auuccuucuggcuggucuuucuccuugacaca

SEQ ID NO: 339164 - RNA, 23 nt, Human
auuccuucuucauucuuugcaaa

SEQ ID NO: 339165 - RNA, 32 nt, Human
auuccuucuuuacugcuuuuucaucaagugaa

SEQ ID NO: 339166 - RNA, 32 nt, Human
auuccuugaacccaggagguggagguugcagu

SEQ ID NO: 339167 - RNA, 32 nt, Human
auuccuugaucauccaaagcaccugcagaguc

SEQ ID NO: 339168 - RNA, 32 nt, Human
auuccuugcacugugcuggugaucaaguuugu

SEQ ID NO: 339169 - RNA, 32 nt, Human
auuccuugccagggaggaaggggagggaacag

SEQ ID NO: 339170 - RNA, 32 nt, Human
auuccuugcucaccuauuccuuucucucucca

SEQ ID NO: 339171 - RNA, 32 nt, Human
auuccuuggagccacugggauucauggcuuug

SEQ ID NO: 339172 - RNA, 32 nt, Human
auuccuuggcaggggaacaggaaauguggucg

SEQ ID NO: 339173 - RNA, 32 nt, Human
auuccuuggguuugcauccaucagaagaucca

SEQ ID NO: 339174 - RNA, 32 nt, Human
auuccuuggucugcgugcuuguuuucuccuuu

SEQ ID NO: 339175 - RNA, 32 nt, Human
auuccuuguguagaaaugauucccagucuagu

SEQ ID NO: 339176 - RNA, 22 nt, Human
auuccuuuaauguagcauccuu

SEQ ID NO: 339177 - RNA, 32 nt, Human
auuccuuuauuuuuauaaauuauucccccuau

SEQ ID NO: 339178 - RNA, 32 nt, Human
auuccuuucucauuggagccuagugaaaccaa

SEQ ID NO: 339179 - RNA, 32 nt, Human
auuccuuucuucugccucuguuuccugaggaa

SEQ ID NO: 339180 - RNA, 32 nt, Human
auuccuuugcauccauugcauuucucaggaag

SEQ ID NO: 339181 - RNA, 32 nt, Human
auuccuuugucaagacuuuggaagcagacaaa

SEQ ID NO: 339182 - RNA, 21 nt, Human
auuccuuugucuacagcaucc

SEQ ID NO: 339183 - RNA, 32 nt, Human
auuccuuuucuccaaacucuuuaaccacaaga

SEQ ID NO: 339184 - RNA, 32 nt, Human
auuccuuuuuacugcugacuaauagucugcug

SEQ ID NO: 339185 - RNA, 31 nt, Human
auucgaagagggagagaaacuggacuggaac

SEQ ID NO: 339186 - RNA, 32 nt, Human
auucgacaaacaugaggagaaacacagcaaac

SEQ ID NO: 339187 - RNA, 32 nt, Human
auucgacaucacggugaugauccgggagaaga

SEQ ID NO: 339188 - RNA, 32 nt, Human
auucgacuacuucaacuuacuuucaacuacau

SEQ ID NO: 339189 - RNA, 32 nt, Human
auucgagaagcaaagaucuguucuccauauug

SEQ ID NO: 339190 - RNA, 32 nt, Human
auucgagaagugagagagggucgggggcggug

SEQ ID NO: 339191 - RNA, 32 nt, Human
auucgagaccagccuaggugacauagugagac

SEQ ID NO: 339192 - RNA, 32 nt, Human
auucgagaccagccuggcaacauggcaagacc

SEQ ID NO: 339193 - RNA, 32 nt, Human
auucgagaccagccuggccaacauggugaaac

SEQ ID NO: 339194 - RNA, 32 nt, Human
auucgagaccagccuggccagcauggugaaac

SEQ ID NO: 339195 - RNA, 32 nt, Human
auucgagaccagccugggcaacauagugagac

SEQ ID NO: 339196 - RNA, 32 nt, Human
auucgagaccagccugggccacaugacaaagc

SEQ ID NO: 339197 - RNA, 32 nt, Human
auucgagaccagccugggcuacauagugagac

SEQ ID NO: 339198 - RNA, 32 nt, Human
auucgauggcaugcagcugcgugaccuaaggc

SEQ ID NO: 339199 - RNA, 32 nt, Human
auucgcaacauguuuucuacccugccaccucu

SEQ ID NO: 339200 - RNA, 32 nt, Human
auucgcaccagccaccacccacucccaccccc

SEQ ID NO: 339201 - RNA, 32 nt, Human
auucgcacguuauuugccauguaaaugaaaac

SEQ ID NO: 339202 - RNA, 32 nt, Human
auucgcacuuggcgcugggcccuuccccuccc

SEQ ID NO: 339203 - RNA, 32 nt, Human
auucgcagagggaaaggagcuggaauaaggac

SEQ ID NO: 339204 - RNA, 32 nt, Human
auucgcaggaaggggaguggggagcccugagc

SEQ ID NO: 339205 - RNA, 32 nt, Human
auucgccaggcagagcugagaagcgcaccagg

SEQ ID NO: 339206 - RNA, 32 nt, Human
auucgccgcagcggaccggccucggcgaauuu

SEQ ID NO: 339207 - RNA, 32 nt, Human
auucgccgcccgcuccgagccuggugcuuccg

SEQ ID NO: 339208 - RNA, 32 nt, Human
auucgcgaggcagagguugcagcgaacccaga

SEQ ID NO: 339209 - RNA, 32 nt, Human
auucgcucuuccuccagccucuggcaaccacu

SEQ ID NO: 339210 - RNA, 32 nt, Human
auucgcuggaaaugcaggcucaagccccuccc

SEQ ID NO: 339211 - RNA, 32 nt, Human
auucgcugugugacucagggcaagugugcgca

SEQ ID NO: 339212 - RNA, 32 nt, Human
auucgcuuuucacccaagaugauuugaugucu

SEQ ID NO: 339213 - RNA, 32 nt, Human
auucggagccugggguugucagagugaucggg

SEQ ID NO: 339214 - RNA, 32 nt, Human
auucggagcugcauuucccagcugggcacucu

SEQ ID NO: 339215 - RNA, 32 nt, Human
auucggagugaggagcacuuucagaguuacug

SEQ ID NO: 339216 - RNA, 32 nt, Human
auucggaucauagucaaagggcuguagcauua

SEQ ID NO: 339217 - RNA, 32 nt, Human
auucggcaccaaacacacagacugcuuugcau

SEQ ID NO: 339218 - RNA, 32 nt, Human
auucggcagugcauuccagccugcagaaaacc

SEQ ID NO: 339219 - RNA, 21 nt, Human
auucggccaccuccacgacca

SEQ ID NO: 339220 - RNA, 32 nt, Human
auucggcccuccugucccuagagacuaccaga

SEQ ID NO: 339221 - RNA, 32 nt, Human
auucggcuuggugaaauccuucucuaaagccu

SEQ ID NO: 339222 - RNA, 30 nt, Human
auucgggaaauccacagggacaguucaagu

SEQ ID NO: 339223 - RNA, 32 nt, Human
auucgggacacaauaccaacucuuucaugcca

SEQ ID NO: 339224 - RNA, 32 nt, Human
auucgggaggcugagacaggagaaucacuuga

SEQ ID NO: 339225 - RNA, 32 nt, Human
auucgggaggcugaggcacaagaaucauuuga

SEQ ID NO: 339226 - RNA, 32 nt, Human
auucgggaggcugaggcaggagaaucgcguga

SEQ ID NO: 339227 - RNA, 32 nt, Human
auucgggaggcugaggcaggaggauggcguga

SEQ ID NO: 339228 - RNA, 32 nt, Human
auucgggaggcugaggcccgagaaucgcuuga

SEQ ID NO: 339229 - RNA, 32 nt, Human
auucgggaggcugagguaagaggaucaccuaa

SEQ ID NO: 339230 - RNA, 32 nt, Human
auucgggaggcugagguaggagaaucacuuga

SEQ ID NO: 339231 - RNA, 32 nt, Human
auucgggaggcugagguagguggaucaccucu

SEQ ID NO: 339232 - RNA, 25 nt, Human
auucgggagguggagguugcaguga

SEQ ID NO: 339233 - RNA, 32 nt, Human
auucgggagguggagguugcagugagccgaaa

SEQ ID NO: 339234 - RNA, 32 nt, Human
auucgggcauaagcaggagacacacacaucag

SEQ ID NO: 339235 - RNA, 32 nt, Human
auucgggccugggacugugucugucgcccaug

SEQ ID NO: 339236 - RNA, 32 nt, Human
auucgggcgccgcggcagcugcuccggcugcc

SEQ ID NO: 339237 - RNA, 32 nt, Human
auucggguaggauucucucuaaauuauuuauu

SEQ ID NO: 339238 - RNA, 32 nt, Human
auucggguggucuuccugaaccacagccagug

SEQ ID NO: 339239 - RNA, 32 nt, Human
auucggugauucagccccaaaacaucucugcc

SEQ ID NO: 339240 - RNA, 32 nt, Human
auucgguggcucccugguuugcauuuaccuca

SEQ ID NO: 339241 - RNA, 31 nt, Human
auucguaugcacgcccugcccagcuggucag

SEQ ID NO: 339242 - RNA, 32 nt, Human
auucgucaguuucacuggguaucugcaaggcu

SEQ ID NO: 339243 - RNA, 32 nt, Human
auucgucuguaaucccagcuacuugaugcgaa

SEQ ID NO: 339244 - RNA, 32 nt, Human
auucgugacaacaugcgaccgugccaggaaca

SEQ ID NO: 339245 - RNA, 32 nt, Human
auucgugagugugcgagugugugugcacaugu

SEQ ID NO: 339246 - RNA, 32 nt, Human
auucgugcagugggaugagcuacuuugccagc

SEQ ID NO: 339247 - RNA, 32 nt, Human
auucguuaugguagaaucauuuuuaauucacg

SEQ ID NO: 339248 - RNA, 32 nt, Human
auucguucaaagagauugacugcuguggagac

SEQ ID NO: 339249 - RNA, 32 nt, Human
auucguugugcucaaaggcaggaaacaacuau

SEQ ID NO: 339250 - RNA, 32 nt, Human
auucguuuuccuauuucuuuucauacaaauaa

SEQ ID NO: 339251 - RNA, 32 nt, Human
auucuaaaaugagaggauuguuacaggaggga

SEQ ID NO: 339252 - RNA, 32 nt, Human
auucuaaacccucccuccucuucuugcuggag

SEQ ID NO: 339253 - RNA, 32 nt, Human
auucuaaagcugcuucagacugcuucaugagg

SEQ ID NO: 339254 - RNA, 32 nt, Human
auucuaaaggaaauguucucugaugggaggag

SEQ ID NO: 339255 - RNA, 32 nt, Human
auucuaaaguuuuaauuucauuuuggaauuua

SEQ ID NO: 339256 - RNA, 32 nt, Human
auucuaacaacaaaagcugaauuucuucaccc

SEQ ID NO: 339257 - RNA, 32 nt, Human
auucuaacauucucugaaacacuugagauguu

SEQ ID NO: 339258 - RNA, 32 nt, Human
auucuaaccaacucacacauauacacaaaauc

SEQ ID NO: 339259 - RNA, 32 nt, Human
auucuaaccugacuggcacaucucagccuaac

SEQ ID NO: 339260 - RNA, 32 nt, Human
auucuaacuccugcuccuucucuuguccuucc

SEQ ID NO: 339261 - RNA, 32 nt, Human
auucuaagcgguuggggcaugagggaggauau

SEQ ID NO: 339262 - RNA, 32 nt, Human
auucuaaggacugaggcaauagaaaggggagg

SEQ ID NO: 339263 - RNA, 32 nt, Human
auucuaaggugauguucuuagcacuuuaauuc

SEQ ID NO: 339264 - RNA, 32 nt, Human
auucuaagugccaaggcucugagggugucuug

SEQ ID NO: 339265 - RNA, 32 nt, Human
auucuaaucaagcuguauguagagacugaaug

SEQ ID NO: 339266 - RNA, 32 nt, Human
auucuaaucccauccaucccuguggagcugca

SEQ ID NO: 339267 - RNA, 32 nt, Human
auucuaaugauuggcaagucacguuguuuuca

SEQ ID NO: 339268 - RNA, 32 nt, Human
auucuaauguacaaguuuguuuuaaaaagugu

SEQ ID NO: 339269 - RNA, 32 nt, Human
auucuaaugucacguaugugaccguguggacu

SEQ ID NO: 339270 - RNA, 32 nt, Human
auucuaauguuugccaggaaaggcuagguuca

SEQ ID NO: 339271 - RNA, 32 nt, Human
auucuaauuauuuugagucugccuccuaggaa

SEQ ID NO: 339272 - RNA, 32 nt, Human
auucuaauucauuuuaaaaucuuuuaggucag

SEQ ID NO: 339273 - RNA, 32 nt, Human
auucuaauuugagggcugcacuguacaccaug

SEQ ID NO: 339274 - RNA, 32 nt, Human
auucuacaaacugcucucaaguuaccaaggaa

SEQ ID NO: 339275 - RNA, 32 nt, Human
auucuacacauacaaccuguucuguuaucaua

SEQ ID NO: 339276 - RNA, 25 nt, Human
auucuacagcauacagagcaggcca

SEQ ID NO: 339277 - RNA, 32 nt, Human
auucuacagugaugauugaauucuaaaaaugg

SEQ ID NO: 339278 - RNA, 32 nt, Human
auucuacauauaguggaaaaucugccaaagaa

SEQ ID NO: 339279 - RNA, 32 nt, Human
auucuaccuaaaucuuccaauuuccuuuaaau

SEQ ID NO: 339280 - RNA, 32 nt, Human
auucuaccucagccuccugaauagcugggaau

SEQ ID NO: 339281 - RNA, 32 nt, Human
auucuacgugcagcggguucucugccuccgug

SEQ ID NO: 339282 - RNA, 25 nt, Human
auucuacucauauauaucuaucuua

SEQ ID NO: 339283 - RNA, 32 nt, Human
auucuacugaguagacaggacuggaaauccau

SEQ ID NO: 339284 - RNA, 32 nt, Human
auucuacuggauuucaaaaagagacuaauacc

SEQ ID NO: 339285 - RNA, 32 nt, Human
auucuacuuauccacaugugccaagaugugcc

SEQ ID NO: 339286 - RNA, 32 nt, Human
auucuagaacaugacccacauucugaguauca

SEQ ID NO: 339287 - RNA, 32 nt, Human
auucuagaccagccugggcaacauagugagac

SEQ ID NO: 339288 - RNA, 32 nt, Human
auucuagagccagucucugccucccagacgcg

SEQ ID NO: 339289 - RNA, 32 nt, Human
auucuagaggauguaucucacaaguaggauca

SEQ ID NO: 339290 - RNA, 32 nt, Human
auucuagaggcugaggcgggaggauugcuuga

SEQ ID NO: 339291 - RNA, 32 nt, Human
auucuagaguauuccaggugguugcacauuug

SEQ ID NO: 339292 - RNA, 32 nt, Human
auucuagcacagugccuugccuagaguaguag

SEQ ID NO: 339293 - RNA, 32 nt, Human
auucuagcaguccuggggcacugaccuuugcc

SEQ ID NO: 339294 - RNA, 32 nt, Human
auucuagccaaacuauucuauggccauuacua

SEQ ID NO: 339295 - RNA, 26 nt, Human
auucuagccugggugacagagcgaga

SEQ ID NO: 339296 - RNA, 32 nt, Human
auucuagcuuuauucaaguuugcuuugcauuc

SEQ ID NO: 339297 - RNA, 32 nt, Human
auucuaggaccuguguccuagacuucagggag

SEQ ID NO: 339298 - RNA, 32 nt, Human
auucuaggauucuggaaacagagacaguaaga

SEQ ID NO: 339299 - RNA, 32 nt, Human
auucuaggcagaggcuggaaugcaaugaugcg

SEQ ID NO: 339300 - RNA, 32 nt, Human
auucuagggaccacuccagaccuacagaauca

SEQ ID NO: 339301 - RNA, 32 nt, Human
auucuagguagaggagacagccuggacaaagg

SEQ ID NO: 339302 - RNA, 32 nt, Human
auucuagucuugaacuccugaccucaggugau

SEQ ID NO: 339303 - RNA, 32 nt, Human
auucuaguggcuguucaugcuccaagacuuua

SEQ ID NO: 339304 - RNA, 32 nt, Human
auucuaguguuuuucauccuuugcuaggaugc

SEQ ID NO: 339305 - RNA, 32 nt, Human
auucuaguuacccuuugcuucccuucaccucu

SEQ ID NO: 339306 - RNA, 32 nt, Human
auucuaguugaauauguucaaggaaguuauuu

SEQ ID NO: 339307 - RNA, 32 nt, Human
auucuauaagagccucaccagugacugggaag

SEQ ID NO: 339308 - RNA, 32 nt, Human
auucuauauuauaucugcuguacaacuucuuu

SEQ ID NO: 339309 - RNA, 32 nt, Human
auucuaucacccaggcuggaguggagugguau

SEQ ID NO: 339310 - RNA, 32 nt, Human
auucuaucgcccaggcuggagugcaauggcac

SEQ ID NO: 339311 - RNA, 32 nt, Human
auucuaucggccaggcuggagugcaguggugc

SEQ ID NO: 339312 - RNA, 32 nt, Human
auucuaucuccaaguaucuugugcaucccucc

SEQ ID NO: 339313 - RNA, 32 nt, Human
auucuaucuucauuuuagacuuuuggucugug

SEQ ID NO: 339314 - RNA, 32 nt, Human
auucuaucuuuuccuuucaucuauuuucuaca

SEQ ID NO: 339315 - RNA, 32 nt, Human
auucuaugacaucaugaggucuccucagugca

SEQ ID NO: 339316 - RNA, 32 nt, Human
auucuaugacucuugucuccuccuccaggagg

SEQ ID NO: 339317 - RNA, 32 nt, Human
auucuaugcaaaaagaagguggggaagaaagu

SEQ ID NO: 339318 - RNA, 32 nt, Human
auucuauggaauugagagccaucgcugcaugg

SEQ ID NO: 339319 - RNA, 32 nt, Human
auucuauguagugaucuuuuuacugugaccac

SEQ ID NO: 339320 - RNA, 32 nt, Human
auucuauguagugguuuuaggauacuuaacaa

SEQ ID NO: 339321 - RNA, 32 nt, Human
auucuauguauugagaaaauguuuaauaucaa

SEQ ID NO: 339322 - RNA, 32 nt, Human
auucuauuaagccaucuugcucugccuucuug

SEQ ID NO: 339323 - RNA, 32 nt, Human
auucuauucgcuuguuauuggacuugaaacuc

SEQ ID NO: 339324 - RNA, 19 nt, Human
auucuauuuaccucacuga

SEQ ID NO: 339325 - RNA, 32 nt, Human
auucuauuugaccaguggccuauuuggucaca

SEQ ID NO: 339326 - RNA, 32 nt, Human
auucuauuuuuagcuuuucauuucucagcugu

SEQ ID NO: 339327 - RNA, 32 nt, Human
auucucaaacaccaaaaggaaaaguugaaucu

SEQ ID NO: 339328 - RNA, 32 nt, Human
auucucaaauugugucugcuuccccugacccc

SEQ ID NO: 339329 - RNA, 32 nt, Human
auucucaacgcuucuccuuucucuccaccucc

SEQ ID NO: 339330 - RNA, 32 nt, Human
auucucaacuagcaauuggaacuccuaggcuc

SEQ ID NO: 339331 - RNA, 32 nt, Human
auucucaacuagccuuggcaaaacagcuguag

SEQ ID NO: 339332 - RNA, 32 nt, Human
auucucaaguggcugcaauuacaggcaaccag

SEQ ID NO: 339333 - RNA, 32 nt, Human
auucucaaugcagaauuauugggucuuucaua

SEQ ID NO: 339334 - RNA, 22 nt, Human
auucucaauuuucuuuaugcua

SEQ ID NO: 339335 - RNA, 32 nt, Human
auucucacagauccuccucaacaugagggugu

SEQ ID NO: 339336 - RNA, 32 nt, Human
auucucacagcacagaugagguugagaccaug

SEQ ID NO: 339337 - RNA, 32 nt, Human
auucucacucacuguagacccuauauuccuuc

SEQ ID NO: 339338 - RNA, 32 nt, Human
auucucacucucccucccuucucucacucuca

SEQ ID NO: 339339 - RNA, 32 nt, Human
auucucagacuugccacccccagguuagcaac

SEQ ID NO: 339340 - RNA, 32 nt, Human
auucucagagagacccgaccgcgcucuugaug

SEQ ID NO: 339341 - RNA, 32 nt, Human
auucucagaguguuuaauuguacucaauggua

SEQ ID NO: 339342 - RNA, 32 nt, Human
auucucagauugcccugaauuuugccacuuuu

SEQ ID NO: 339343 - RNA, 32 nt, Human
auucucagccaagaagacagugagcacaccua

SEQ ID NO: 339344 - RNA, 32 nt, Human
auucucagccaucuuugaagcuugaaagaaga

SEQ ID NO: 339345 - RNA, 32 nt, Human
auucucagccuuccuucccucuccuugucuca

SEQ ID NO: 339346 - RNA, 32 nt, Human
auucucagcuacucgggaggcugaggcaggag

SEQ ID NO: 339347 - RNA, 32 nt, Human
auucucagcugaugcaguccaggcuccaugcu

SEQ ID NO: 339348 - RNA, 32 nt, Human
auucucaggaacaccagguuucagaccaucuu

SEQ ID NO: 339349 - RNA, 32 nt, Human
auucucaguagaguugggaaugaggaugcugu

SEQ ID NO: 339350 - RNA, 32 nt, Human
auucucaguggggguucaccacaaaacacggg

SEQ ID NO: 339351 - RNA, 24 nt, Human
auucucaguucauaggcuauccca

SEQ ID NO: 339352 - RNA, 24 nt, Human
auucucaguucauuuuuacuccca

SEQ ID NO: 339353 - RNA, 32 nt, Human
auucucaguuuaugaagauaauaggauuaaga

SEQ ID NO: 339354 - RNA, 32 nt, Human
auucucaucccagccauuuaucuucuuuguuu

SEQ ID NO: 339355 - RNA, 32 nt, Human
auucucaugccucggcccuccgaguagcuggg

SEQ ID NO: 339356 - RNA, 32 nt, Human
auucucaugccuguagguuuccauugcucugu

SEQ ID NO: 339357 - RNA, 32 nt, Human
auucucauggcuaccuccucugacccauccac

SEQ ID NO: 339358 - RNA, 32 nt, Human
auucucauguaaaugucagugccaacgcuggu

SEQ ID NO: 339359 - RNA, 32 nt, Human
auucucauuccugcucugggccauuuguguuu

SEQ ID NO: 339360 - RNA, 32 nt, Human
auucuccaaaacaugcauaaaaguaaaauaug

SEQ ID NO: 339361 - RNA, 32 nt, Human
auucuccaaaggacaggaacuggacuuauggg

SEQ ID NO: 339362 - RNA, 32 nt, Human
auucuccaagccuggucagcugccugcacagg

SEQ ID NO: 339363 - RNA, 32 nt, Human
auucuccaauccccucuccuuugguccaguag

SEQ ID NO: 339364 - RNA, 32 nt, Human
auucuccacaauauuaccaugcaaguuaucuc

SEQ ID NO: 339365 - RNA, 32 nt, Human
auucuccacaguuaccuuuagagagaauuuau

SEQ ID NO: 339366 - RNA, 32 nt, Human
auucuccacccuuaacccugugcucaggcacc

SEQ ID NO: 339367 - RNA, 32 nt, Human
auucuccaguauuccuguuuccauccaguucc

SEQ ID NO: 339368 - RNA, 32 nt, Human
auucuccauagaaaauaggagugaagagagaa

SEQ ID NO: 339369 - RNA, 26 nt, Human
auucuccauggacaggcucucggggu

SEQ ID NO: 339370 - RNA, 32 nt, Human
auucucccaggagccuccagaaggaaccuugg

SEQ ID NO: 339371 - RNA, 32 nt, Human
auucuccccaaaacccuucuugcaugcaggau

SEQ ID NO: 339372 - RNA, 32 nt, Human
auucuccccaauaaaucucucuccaggcuuua

SEQ ID NO: 339373 - RNA, 32 nt, Human
auucuccccacuugauuuuucuucuauaaaau

SEQ ID NO: 339374 - RNA, 32 nt, Human
auucuccccaguagcugggauuacaggugccc

SEQ ID NO: 339375 - RNA, 32 nt, Human
auucucccccucucucccuccugugucuugcg

SEQ ID NO: 339376 - RNA, 32 nt, Human
auucucccgccucagccuucugaguagcuggg

SEQ ID NO: 339377 - RNA, 32 nt, Human
auucucccucucauccugccauccgcugcggc

SEQ ID NO: 339378 - RNA, 32 nt, Human
auucucccugcucccuguggacaaaagcacau

SEQ ID NO: 339379 - RNA, 32 nt, Human
auucucccuugccuccccuuuugagacuggag

SEQ ID NO: 339380 - RNA, 32 nt, Human
auucuccuaaaaucucaggagggcagcaagug

SEQ ID NO: 339381 - RNA, 32 nt, Human
auucuccuagaugagucagaacuuaguuuuga

SEQ ID NO: 339382 - RNA, 32 nt, Human
auucuccucuccccauuucagucacaggaaau

SEQ ID NO: 339383 - RNA, 32 nt, Human
auucuccucuggggcucuaccucuccacacuu

SEQ ID NO: 339384 - RNA, 32 nt, Human
auucuccugaguagcugggauugcuggugcac

SEQ ID NO: 339385 - RNA, 32 nt, Human
auucuccugccucagccuucugaguagcugga

SEQ ID NO: 339386 - RNA, 32 nt, Human
auucuccugccucagccuucugaguagcuggg

SEQ ID NO: 339387 - RNA, 32 nt, Human
auucuccugccucaggcuucugaguagcuggg

SEQ ID NO: 339388 - RNA, 32 nt, Human
auucuccugccucauucuccccaguagcuggg

SEQ ID NO: 339389 - RNA, 32 nt, Human
auucuccugccugagccuuccgaguagcuggg

SEQ ID NO: 339390 - RNA, 32 nt, Human
auucuccugccuugccuccugaguagcuggga

SEQ ID NO: 339391 - RNA, 31 nt, Human
auucuccugcucucuggguuccuuggugcua

SEQ ID NO: 339392 - RNA, 32 nt, Human
auucuccugcuucagccuucugagcagcuggg

SEQ ID NO: 339393 - RNA, 32 nt, Human
auucuccuggcaagagaaaaagacuuaacuag

SEQ ID NO: 339394 - RNA, 32 nt, Human
auucuccugguguuugcgcaagugccuucucc

SEQ ID NO: 339395 - RNA, 32 nt, Human
auucuccuguaaucccagcuacucgggaggcc

SEQ ID NO: 339396 - RNA, 32 nt, Human
auucuccuguaccuccuggccugcagaaguga

SEQ ID NO: 339397 - RNA, 32 nt, Human
auucuccuucuuucucuuccugcuggcugaag

SEQ ID NO: 339398 - RNA, 32 nt, Human
auucuccuuuauuuucuucccgucugccugcc

SEQ ID NO: 339399 - RNA, 32 nt, Human
auucuccuuuguccuguuucuccuguuucauu

SEQ ID NO: 339400 - RNA, 32 nt, Human
auucucgaaagacauccugaagguggcuuucu

SEQ ID NO: 339401 - RNA, 32 nt, Human
auucucgccuccccaucucccauagacuguaa

SEQ ID NO: 339402 - RNA, 32 nt, Human
auucucgccucgccgcagcccagcccugcgcg

SEQ ID NO: 339403 - RNA, 32 nt, Human
auucucggaagagagaagggagagggaggagg

SEQ ID NO: 339404 - RNA, 32 nt, Human
auucucgggcucaagugguccucccaaagugc

SEQ ID NO: 339405 - RNA, 32 nt, Human
auucucgguucuucccccuccucccagagcug

SEQ ID NO: 339406 - RNA, 32 nt, Human
auucucuacccccuucauuaucaugccuugca

SEQ ID NO: 339407 - RNA, 32 nt, Human
auucucuaggccugcagccaaauuacuggacc

SEQ ID NO: 339408 - RNA, 32 nt, Human
auucucuaggugguaacaucagagccaccacu

SEQ ID NO: 339409 - RNA, 32 nt, Human
auucucuaguacucauccaggaaaccauucuu

SEQ ID NO: 339410 - RNA, 32 nt, Human
auucucucagcggucucucuucuccucaaguu

SEQ ID NO: 339411 - RNA, 32 nt, Human
auucucucaguuacuccauuggugaaauggcc

SEQ ID NO: 339412 - RNA, 32 nt, Human
auucucucaugcacuuuccuuuccaggucccc

SEQ ID NO: 339413 - RNA, 32 nt, Human
auucucuccaaaaaugcacccaacuagcucua

SEQ ID NO: 339414 - RNA, 32 nt, Human
auucucuccauuuucucccaagaagcaugacu

SEQ ID NO: 339415 - RNA, 23 nt, Human
auucucucccccaaugaaucaau

SEQ ID NO: 339416 - RNA, 20 nt, Human
auucucuccccugaaaucaa

SEQ ID NO: 339417 - RNA, 32 nt, Human
auucucucucacucacauuuucucagugugcc

SEQ ID NO: 339418 - RNA, 21 nt, Human
auucucucuccccucacuggu

SEQ ID NO: 339419 - RNA, 32 nt, Human
auucucucuccuuuuccaucuggaccacccag

SEQ ID NO: 339420 - RNA, 32 nt, Human
auucucucugagucugggauguaaagacaaag

SEQ ID NO: 339421 - RNA, 32 nt, Human
auucucucuggccaucuuuggucacucacgug

SEQ ID NO: 339422 - RNA, 32 nt, Human
auucucucuuucucauagacugaccuucuuuu

SEQ ID NO: 339423 - RNA, 32 nt, Human
auucucugaaagcucacugcugccaaggugcu

SEQ ID NO: 339424 - RNA, 32 nt, Human
auucucugagccucugcucacucucagggcca

SEQ ID NO: 339425 - RNA, 32 nt, Human
auucucugcaaaaccuacucuaaugccugugu

SEQ ID NO: 339426 - RNA, 32 nt, Human
auucucugcaagugucuguuauuagagaaacg

SEQ ID NO: 339427 - RNA, 32 nt, Human
auucucugccagcugcugugcacugcugucag

SEQ ID NO: 339428 - RNA, 32 nt, Human
auucucuggaugagggagaguggucgugagcu

SEQ ID NO: 339429 - RNA, 32 nt, Human
auucucugggaggcaaaggcuggcacuggacu

SEQ ID NO: 339430 - RNA, 32 nt, Human
auucucugucucucucuguuuaucucuccccu

SEQ ID NO: 339431 - RNA, 32 nt, Human
auucucugugggccuagcagggaaggggacag

SEQ ID NO: 339432 - RNA, 32 nt, Human
auucucuguggguaugcaaaguuaugggaauu

SEQ ID NO: 339433 - RNA, 32 nt, Human
auucucuucacuuaagaaacuuaaguugcugc

SEQ ID NO: 339434 - RNA, 32 nt, Human
auucucuuccccucaucucuuggggcuguucc

SEQ ID NO: 339435 - RNA, 32 nt, Human
auucucuuccccugugugccucaguguccuuc

SEQ ID NO: 339436 - RNA, 32 nt, Human
auucucuucucuccagucccguuguuauaguc

SEQ ID NO: 339437 - RNA, 32 nt, Human
auucucuugcccaggcuuuuugcuccuucaag

SEQ ID NO: 339438 - RNA, 32 nt, Human
auucucuugccucaaucuccccaguaccuggg

SEQ ID NO: 339439 - RNA, 32 nt, Human
auucucuugccucagccuucugaguagcuggg

SEQ ID NO: 339440 - RNA, 32 nt, Human
auucucuuggagccuugggugggcagggacgg

SEQ ID NO: 339441 - RNA, 32 nt, Human
auucucuuuaccaguauccuggcaaugguugu

SEQ ID NO: 339442 - RNA, 32 nt, Human
auucucuuugcaccuggcgagagggucugacu

SEQ ID NO: 339443 - RNA, 32 nt, Human
auucucuuugcucacuggcucuccuauaauca

SEQ ID NO: 339444 - RNA, 32 nt, Human
auucucuuuuguagcuugagcagggaggaucc

SEQ ID NO: 339445 - RNA, 21 nt, Human
auucugaaaggcccacugagc

SEQ ID NO: 339446 - RNA, 22 nt, Human
auucugaacuuuucaggaggua

SEQ ID NO: 339447 - RNA, 32 nt, Human
auucugaagaagaugggggcuaugacagugau

SEQ ID NO: 339448 - RNA, 23 nt, Human
auucugaauaguuccaugucaua

SEQ ID NO: 339449 - RNA, 32 nt, Human
auucugaauggaggcagaaccagcaacaacuc

SEQ ID NO: 339450 - RNA, 31 nt, Human
auucugaauuuccucccuuggggaagaaggg

SEQ ID NO: 339451 - RNA, 32 nt, Human
auucugacaagguccagccaggaauuucuaag

SEQ ID NO: 339452 - RNA, 32 nt, Human
auucugacaccagcuugcugcuaugauuucag

SEQ ID NO: 339453 - RNA, 32 nt, Human
auucugacauauauuuguuuauaaaauuccuu

SEQ ID NO: 339454 - RNA, 32 nt, Human
auucugacauuuucuauucuaaaauaaaucuc

SEQ ID NO: 339455 - RNA, 32 nt, Human
auucugacgccaacaugcagcgaaguaucaug

SEQ ID NO: 339456 - RNA, 32 nt, Human
auucugacuacucgcuauuuuguaguaguugu

SEQ ID NO: 339457 - RNA, 32 nt, Human
auucugacuaucccaagagagcagaaaaggga

SEQ ID NO: 339458 - RNA, 32 nt, Human
auucugacuaucucccuuucccgcccuccauc

SEQ ID NO: 339459 - RNA, 32 nt, Human
auucugacucaaaauucuccuaaaccucccug

SEQ ID NO: 339460 - RNA, 32 nt, Human
auucugacugcacucuauguccugggccaugg

SEQ ID NO: 339461 - RNA, 32 nt, Human
auucugagauuuguuuaucugcuuuauucauu

SEQ ID NO: 339462 - RNA, 32 nt, Human
auucugagcaagauaagcaacaugacaaauuc

SEQ ID NO: 339463 - RNA, 22 nt, Human
auucugagcauguaggaaggua

SEQ ID NO: 339464 - RNA, 32 nt, Human
auucugagcuaaaaucuauuuaccauugagua

SEQ ID NO: 339465 - RNA, 32 nt, Human
auucugagcuucugugggauauuuugcagaag

SEQ ID NO: 339466 - RNA, 32 nt, Human
auucugaggcacugaagugccucccagaugug

SEQ ID NO: 339467 - RNA, 32 nt, Human
auucugaguuuucacacuccacaaauccucag

SEQ ID NO: 339468 - RNA, 32 nt, Human
auucugauacaaccaccugaaaaugcuacagc

SEQ ID NO: 339469 - RNA, 32 nt, Human
auucugauaccgaagaagaggggccaaugaaa

SEQ ID NO: 339470 - RNA, 21 nt, Human
auucugaucacuggcuccauc

SEQ ID NO: 339471 - RNA, 32 nt, Human
auucugaucugcauuuucagaagaggacaauc

SEQ ID NO: 339472 - RNA, 32 nt, Human
auucugaucugcccaccuccucuuccuucuuc

SEQ ID NO: 339473 - RNA, 32 nt, Human
auucugaugcagauggucaggaugguggugac

SEQ ID NO: 339474 - RNA, 32 nt, Human
auucugaugcccagguuggggugcaguggcac

SEQ ID NO: 339475 - RNA, 22 nt, Human
auucugaugcuggaggcaggug

SEQ ID NO: 339476 - RNA, 21 nt, Human
auucugaugcugggacaggug

SEQ ID NO: 339477 - RNA, 32 nt, Human
auucugauugauuuuuauuuuauucuauuauu

SEQ ID NO: 339478 - RNA, 32 nt, Human
auucugcaauauguaaccaacaugucacaaac

SEQ ID NO: 339479 - RNA, 32 nt, Human
auucugcaauccucuugcucaggaaguguaua

SEQ ID NO: 339480 - RNA, 32 nt, Human
auucugcacccuuuuaaauucauugcuuuucu

SEQ ID NO: 339481 - RNA, 32 nt, Human
auucugcaccugcuagcacagcuguccacguc

SEQ ID NO: 339482 - RNA, 32 nt, Human
auucugcacuuuagccagccugggucggcaac

SEQ ID NO: 339483 - RNA, 32 nt, Human
auucugcagagacuuccaguuuauugcauaua

SEQ ID NO: 339484 - RNA, 20 nt, Human
auucugcagccagcccaggc

SEQ ID NO: 339485 - RNA, 21 nt, Human
auucugcagccuggacggcca

SEQ ID NO: 339486 - RNA, 32 nt, Human
auucugcagccuguguugcucucuaccuggca

SEQ ID NO: 339487 - RNA, 32 nt, Human
auucugcagcuuccuaaaauauuuuaaaaaua

SEQ ID NO: 339488 - RNA, 32 nt, Human
auucugcagguggagguugcuagucuaguuuc

SEQ ID NO: 339489 - RNA, 32 nt, Human
auucugcaucagaaaaacaaacaaaacaaaaa

SEQ ID NO: 339490 - RNA, 32 nt, Human
auucugcauccagcucuaucccccucugaugc

SEQ ID NO: 339491 - RNA, 32 nt, Human
auucugcauccccuccccauccaaccuaaaug

SEQ ID NO: 339492 - RNA, 32 nt, Human
auucugcaucuggucaauguuuccaaugaaga

SEQ ID NO: 339493 - RNA, 32 nt, Human
auucugcauggugacagucucccccaaacaug

SEQ ID NO: 339494 - RNA, 20 nt, Human
auucugccaggcccccaagc

SEQ ID NO: 339495 - RNA, 32 nt, Human
auucugccaucuccucauggaaagagaggcuc

SEQ ID NO: 339496 - RNA, 32 nt, Human
auucugcccacacccauuuauuuccuuccuuc

SEQ ID NO: 339497 - RNA, 32 nt, Human
auucugcccaggauccuaggccccucuacucc

SEQ ID NO: 339498 - RNA, 31 nt, Human
auucugcccaucaaggugguuggagggccaa

SEQ ID NO: 339499 - RNA, 21 nt, Human
auucugccccacacccagcca

SEQ ID NO: 339500 - RNA, 32 nt, Human
auucugcccccgcccuuccuccccuuauuugu

SEQ ID NO: 339501 - RNA, 22 nt, Human
auucugcccuacaugaugggua

SEQ ID NO: 339502 - RNA, 32 nt, Human
auucugcccuggcccaugcacacccgucuuuc

SEQ ID NO: 339503 - RNA, 32 nt, Human
auucugccgagccucuugucccuucccugcuc

SEQ ID NO: 339504 - RNA, 32 nt, Human
auucugccucaguugucuuuucuugaaauauu

SEQ ID NO: 339505 - RNA, 32 nt, Human
auucugccuccaucucugccuccauggcuacc

SEQ ID NO: 339506 - RNA, 32 nt, Human
auucugccucuggacucacauuucucgucuug

SEQ ID NO: 339507 - RNA, 32 nt, Human
auucugccuguaaucccagaauuuugggaggc

SEQ ID NO: 339508 - RNA, 32 nt, Human
auucugccuuccuaaggcaggagaccugaugg

SEQ ID NO: 339509 - RNA, 32 nt, Human
auucugccuuucugcuggagggaaguguuuuc

SEQ ID NO: 339510 - RNA, 32 nt, Human
auucugcgcccugauccagucaccucccacca

SEQ ID NO: 339511 - RNA, 16 nt, Human
auucugcucccugaac

SEQ ID NO: 339512 - RNA, 32 nt, Human
auucugcucccugaacacccacagaaccccaa

SEQ ID NO: 339513 - RNA, 32 nt, Human
auucugcucucaggaacucuaagucuagcaga

SEQ ID NO: 339514 - RNA, 32 nt, Human
auucugcugaccacagcacuccaaccaaaagc

SEQ ID NO: 339515 - RNA, 32 nt, Human
auucugcuuuucauccucugugguguuggcca

SEQ ID NO: 339516 - RNA, 32 nt, Human
auucuggaaacuuuuguuagggcugcuuuuaa

SEQ ID NO: 339517 - RNA, 32 nt, Human
auucuggaaacuuuuguuagggcugcuuuucu

SEQ ID NO: 339518 - RNA, 32 nt, Human
auucuggaagauuucuuucuucacuggacuau

SEQ ID NO: 339519 - RNA, 32 nt, Human
auucuggaagcauggaaggcguggacuugcua

SEQ ID NO: 339520 - RNA, 32 nt, Human
auucuggaaucugagccuucucuuacaacagg

SEQ ID NO: 339521 - RNA, 32 nt, Human
auucuggaauugcauguugcaaggagucuccu

SEQ ID NO: 339522 - RNA, 32 nt, Human
auucuggagcaaguggagugguugcaggcaga

SEQ ID NO: 339523 - RNA, 28 nt, Human
auucuggaggaaaagcagugaucuguaa

SEQ ID NO: 339524 - RNA, 32 nt, Human
auucuggaggcugagaugggaggaucacuuga

SEQ ID NO: 339525 - RNA, 32 nt, Human
auucuggaggcugaggcaggaaucgcuugaaa

SEQ ID NO: 339526 - RNA, 32 nt, Human
auucuggaggcugaggcaggagaaucgcuuga

SEQ ID NO: 339527 - RNA, 32 nt, Human
auucuggauauauucuggauacaugguuugca

SEQ ID NO: 339528 - RNA, 32 nt, Human
auucuggaugucagaggagggugcgugugaug

SEQ ID NO: 339529 - RNA, 32 nt, Human
auucuggcaauauuuuuccagucucagaggca

SEQ ID NO: 339530 - RNA, 32 nt, Human
auucuggcaaucuuuagaaagggagauuccaa

SEQ ID NO: 339531 - RNA, 32 nt, Human
auucuggccauuugagcauucucuccaacucu

SEQ ID NO: 339532 - RNA, 32 nt, Human
auucuggccucucaucccaggcugcagacccu

SEQ ID NO: 339533 - RNA, 32 nt, Human
auucuggccucucccaugccucaggcucuggu

SEQ ID NO: 339534 - RNA, 32 nt, Human
auucuggccucugugguaggaggcagggagag

SEQ ID NO: 339535 - RNA, 32 nt, Human
auucuggcgucagcuuccucaggauuuucuuc

SEQ ID NO: 339536 - RNA, 32 nt, Human
auucuggcucacugcagccucaaacuccugag

SEQ ID NO: 339537 - RNA, 32 nt, Human
auucuggcuuugguagagucuccucuuguguu

SEQ ID NO: 339538 - RNA, 32 nt, Human
auucugggccaagagacacucacuggacaaua

SEQ ID NO: 339539 - RNA, 30 nt, Human
auucugggccucuccaggccuguccugccu

SEQ ID NO: 339540 - RNA, 32 nt, Human
auucugggcucuggucagggcuggcaggcugg

SEQ ID NO: 339541 - RNA, 32 nt, Human
auucugggcugaagugagauuuucuugaaugg

SEQ ID NO: 339542 - RNA, 32 nt, Human
auucugggcuggacugugggaucuguuacaga

SEQ ID NO: 339543 - RNA, 32 nt, Human
auucuggggagagcagccuuguggaaauugau

SEQ ID NO: 339544 - RNA, 32 nt, Human
auucuggggccagccaggggcagucaaauuag

SEQ ID NO: 339545 - RNA, 32 nt, Human
auucugggguagaaggaaggcugggaguggug

SEQ ID NO: 339546 - RNA, 32 nt, Human
auucugggguuauuuaacaauagcaauaguuc

SEQ ID NO: 339547 - RNA, 32 nt, Human
auucugggucucaguacugggaaagggugagg

SEQ ID NO: 339548 - RNA, 32 nt, Human
auucugggugugagccacugucaugccuggcc

SEQ ID NO: 339549 - RNA, 32 nt, Human
auucugguaaagaagaaagagauaagggacgc

SEQ ID NO: 339550 - RNA, 32 nt, Human
auucuggucuuucugggccagauuuuuauauu

SEQ ID NO: 339551 - RNA, 32 nt, Human
auucuggugaucuacugcacaggaugguagcc

SEQ ID NO: 339552 - RNA, 25 nt, Human
auucuggugcaguggugguauacca

SEQ ID NO: 339553 - RNA, 32 nt, Human
auucuggugguagacugguagugagcagcaaa

SEQ ID NO: 339554 - RNA, 26 nt, Human
auucugguucauuuuaaacucccucc

SEQ ID NO: 339555 - RNA, 23 nt, Human
auucuguaaagcaaguauuaucc

SEQ ID NO: 339556 - RNA, 32 nt, Human
auucuguagaaaguggaacuguuguugcguug

SEQ ID NO: 339557 - RNA, 21 nt, Human
auucuguagagcagccugcca

SEQ ID NO: 339558 - RNA, 32 nt, Human
auucuguaugcugcuguuuucaaguuggcaaa

SEQ ID NO: 339559 - RNA, 32 nt, Human
auucuguauuuuuaguagagaugggguuucac

SEQ ID NO: 339560 - RNA, 32 nt, Human
auucuguauuuuuaguagagaugggguuucuc

SEQ ID NO: 339561 - RNA, 32 nt, Human
auucuguauuuuuaguagggaugggguuucuc

SEQ ID NO: 339562 - RNA, 32 nt, Human
auucugucacacagucuggagugcuguggugc

SEQ ID NO: 339563 - RNA, 32 nt, Human
auucugucacccagacuggagugcagugccac

SEQ ID NO: 339564 - RNA, 32 nt, Human
auucugucacccaggccggagugcaguggugu

SEQ ID NO: 339565 - RNA, 32 nt, Human
auucugucacccaggcuagagcgcaguggcaa

SEQ ID NO: 339566 - RNA, 32 nt, Human
auucugucacccaggcuagaguacagugggaa

SEQ ID NO: 339567 - RNA, 32 nt, Human
auucugucacccaggcuggaguccaauggggc

SEQ ID NO: 339568 - RNA, 32 nt, Human
auucugucacccaggcuggagugcaaaggugc

SEQ ID NO: 339569 - RNA, 32 nt, Human
auucugucacccaggcuggagugcaguggcgc

SEQ ID NO: 339570 - RNA, 32 nt, Human
auucugucacccaggcuggagugcaguggcgu

SEQ ID NO: 339571 - RNA, 32 nt, Human
auucugucacccaggcuggagugcaguggugc

SEQ ID NO: 339572 - RNA, 32 nt, Human
auucugucacccgggcuggagugcaguggcgu

SEQ ID NO: 339573 - RNA, 32 nt, Human
auucugucacucaagcuguagugcaguggugc

SEQ ID NO: 339574 - RNA, 32 nt, Human
auucugucacucaggcuagagugcaguggcau

SEQ ID NO: 339575 - RNA, 32 nt, Human
auucugucacucaggcuggagugcaguggcgu

SEQ ID NO: 339576 - RNA, 21 nt, Human
auucugucaggcuggacggga

SEQ ID NO: 339577 - RNA, 32 nt, Human
auucugucaucaaauccugugcugcuguuccu

SEQ ID NO: 339578 - RNA, 26 nt, Human
auucugucauugguuacaaauuuuua

SEQ ID NO: 339579 - RNA, 24 nt, Human
auucugucauuugucagauuuaca

SEQ ID NO: 339580 - RNA, 32 nt, Human
auucugucccucaacccaaauccacuuucaua

SEQ ID NO: 339581 - RNA, 32 nt, Human
auucuguccuccaggcuggagugcaaugacau

SEQ ID NO: 339582 - RNA, 32 nt, Human
auucuguccuuagaguacugaaggcaguucaa

SEQ ID NO: 339583 - RNA, 32 nt, Human
auucugucgaugccauccagcucucuugugua

SEQ ID NO: 339584 - RNA, 32 nt, Human
auucugucgcccaggcuggaguguagugacgc

SEQ ID NO: 339585 - RNA, 32 nt, Human
auucugucgcccuggcuggagugcaauggugu

SEQ ID NO: 339586 - RNA, 32 nt, Human
auucugucgccuuagcauguuugcugaacacc

SEQ ID NO: 339587 - RNA, 32 nt, Human
auucugucuccucuucuuugucaucagccaaa

SEQ ID NO: 339588 - RNA, 32 nt, Human
auucugucucgcaggccagagugcaguggugu

SEQ ID NO: 339589 - RNA, 32 nt, Human
auucugucucugcuuggcuuccccuccacccu

SEQ ID NO: 339590 - RNA, 32 nt, Human
auucugucucuuccuuugcucagugguaugga

SEQ ID NO: 339591 - RNA, 32 nt, Human
auucugucuggcagagaguggggaaaagacgc

SEQ ID NO: 339592 - RNA, 32 nt, Human
auucugucuuauaaccuccugggucccaucca

SEQ ID NO: 339593 - RNA, 32 nt, Human
auucugucuuucuccucccacacuggguuaaa

SEQ ID NO: 339594 - RNA, 32 nt, Human
auucugugaagaaugaaguggaggaaguaacu

SEQ ID NO: 339595 - RNA, 32 nt, Human
auucugugacucauggaaaugauaugagauuc

SEQ ID NO: 339596 - RNA, 32 nt, Human
auucugugcugcgcugccgcugggcgaugcag

SEQ ID NO: 339597 - RNA, 32 nt, Human
auucuguggaggagaagaaaagugauucagug

SEQ ID NO: 339598 - RNA, 23 nt, Human
auucugugggcuguaguaugcca

SEQ ID NO: 339599 - RNA, 32 nt, Human
auucuguggggugagaggaugggugauggggu

SEQ ID NO: 339600 - RNA, 32 nt, Human
auucuguguagugggaugagcagagaacaaaa

SEQ ID NO: 339601 - RNA, 32 nt, Human
auucugugugagccagaauguucaacuaauaa

SEQ ID NO: 339602 - RNA, 32 nt, Human
auucugugugugacucuggguggaagugccca

SEQ ID NO: 339603 - RNA, 32 nt, Human
auucuguguuuugcugucacuuuggcauccuc

SEQ ID NO: 339604 - RNA, 32 nt, Human
auucuguuaaacuccaggcuuggaugguguua

SEQ ID NO: 339605 - RNA, 32 nt, Human
auucuguuaauauggacuuggacuaauaaccu

SEQ ID NO: 339606 - RNA, 32 nt, Human
auucuguuaauguaaugaacaugggaaagacc

SEQ ID NO: 339607 - RNA, 24 nt, Human
auucuguuauuuuuagcauucuca

SEQ ID NO: 339608 - RNA, 22 nt, Human
auucuguucaagugguauauca

SEQ ID NO: 339609 - RNA, 32 nt, Human
auucuguucagugcgauccugaugguccggga

SEQ ID NO: 339610 - RNA, 32 nt, Human
auucuguucucccagagcugcaccugccucgc

SEQ ID NO: 339611 - RNA, 32 nt, Human
auucuguucucuuccuccuccaucuuuauuca

SEQ ID NO: 339612 - RNA, 32 nt, Human
auucuguugcccaaguuggagugcaguggcau

SEQ ID NO: 339613 - RNA, 32 nt, Human
auucuguugcccagacuagaguacaauauugc

SEQ ID NO: 339614 - RNA, 32 nt, Human
auucuguugcccaggcuggagugcaauggcau

SEQ ID NO: 339615 - RNA, 32 nt, Human
auucuguugcccaggcuggagugcaguggcgu

SEQ ID NO: 339616 - RNA, 32 nt, Human
auucuguugcccaggcuggagugcaguggugc

SEQ ID NO: 339617 - RNA, 32 nt, Human
auucuguugcccaugcuggagugcaguggcgu

SEQ ID NO: 339618 - RNA, 32 nt, Human
auucuguugccuaggcuggagugcaguggcgc

SEQ ID NO: 339619 - RNA, 23 nt, Human
auucuguuuauguggacacccca

SEQ ID NO: 339620 - RNA, 32 nt, Human
auucuguuugcuccacgugccugcuucuugcu

SEQ ID NO: 339621 - RNA, 32 nt, Human
auucuguuuggucaguucuagaugguacguca

SEQ ID NO: 339622 - RNA, 32 nt, Human
auucuuaacauugcagcuuucucuccaucugc

SEQ ID NO: 339623 - RNA, 32 nt, Human
auucuuaacugccuuuuucagacaagcaaaua

SEQ ID NO: 339624 - RNA, 32 nt, Human
auucuuaauuaaaaucauuaaauuuaauuaaa

SEQ ID NO: 339625 - RNA, 32 nt, Human
auucuuacuaccaacaguauaacugaacaugu

SEQ ID NO: 339626 - RNA, 32 nt, Human
auucuuacuugaaugcuuugaaugacuacauc

SEQ ID NO: 339627 - RNA, 32 nt, Human
auucuuagaagaguaagaacaaauaaaguaca

SEQ ID NO: 339628 - RNA, 32 nt, Human
auucuuagcacugaacuccucugugaucuagg

SEQ ID NO: 339629 - RNA, 31 nt, Human
auucuuaggcacuuuuugaccuugcugucug

SEQ ID NO: 339630 - RNA, 32 nt, Human
auucuuagguacuaggcugugugucuugggau

SEQ ID NO: 339631 - RNA, 32 nt, Human
auucuuaguuguuuucuuuagaagaacauuuc

SEQ ID NO: 339632 - RNA, 32 nt, Human
auucuuauaacauauccagccauuucaauuuu

SEQ ID NO: 339633 - RNA, 32 nt, Human
auucuuauaaucauguuauagaauguaaaugu

SEQ ID NO: 339634 - RNA, 32 nt, Human
auucuuaugagccagucuuuucuugaauuaga

SEQ ID NO: 339635 - RNA, 32 nt, Human
auucuuauuaauauuguuacuaaccuauuaac

SEQ ID NO: 339636 - RNA, 32 nt, Human
auucuuauuggaagccaggucucuccucucau

SEQ ID NO: 339637 - RNA, 32 nt, Human
auucuucaaaguagauuuccuauuacauacaa

SEQ ID NO: 339638 - RNA, 32 nt, Human
auucuucaaagucacccuaaaagaagaucuga

SEQ ID NO: 339639 - RNA, 32 nt, Human
auucuucaaaugagacucuucucaccuuaaau

SEQ ID NO: 339640 - RNA, 32 nt, Human
auucuucaacaacaguaacuaaucuuuaaaaa

SEQ ID NO: 339641 - RNA, 32 nt, Human
auucuucaacagacugucaucuggaggccugg

SEQ ID NO: 339642 - RNA, 32 nt, Human
auucuucaacagcauuaacggaguuugccaag

SEQ ID NO: 339643 - RNA, 32 nt, Human
auucuucaagcaaucacuaugucaacagacac

SEQ ID NO: 339644 - RNA, 32 nt, Human
auucuucaaggggagucagggucccucaggcu

SEQ ID NO: 339645 - RNA, 32 nt, Human
auucuucacagcaacagagcucaguuaaaugc

SEQ ID NO: 339646 - RNA, 32 nt, Human
auucuucaccucuuuucucagcucccugcagc

SEQ ID NO: 339647 - RNA, 32 nt, Human
auucuucagacagaagcugggccagcacugug

SEQ ID NO: 339648 - RNA, 32 nt, Human
auucuucagcuucauauugucuugaaaaccua

SEQ ID NO: 339649 - RNA, 24 nt, Human
auucuucaguuuuacauuaugcua

SEQ ID NO: 339650 - RNA, 32 nt, Human
auucuucauaaauacaugcauacugacacuau

SEQ ID NO: 339651 - RNA, 32 nt, Human
auucuucauuucuucuuccuacugccuccacu

SEQ ID NO: 339652 - RNA, 32 nt, Human
auucuuccagcaguucuucugauucugaagau

SEQ ID NO: 339653 - RNA, 32 nt, Human
auucuuccaggaaaacucagucuuccaacugc

SEQ ID NO: 339654 - RNA, 32 nt, Human
auucuuccauaaagaagugaucuguagaacac

SEQ ID NO: 339655 - RNA, 32 nt, Human
auucuuccaucuccuucuaaagccccucaccc

SEQ ID NO: 339656 - RNA, 32 nt, Human
auucuuccaugcuggggcugaugugggcuagu

SEQ ID NO: 339657 - RNA, 32 nt, Human
auucuucccaaggcagcuucagcuaggaguuu

SEQ ID NO: 339658 - RNA, 32 nt, Human
auucuucccugccucuucccuaacuagacaau

SEQ ID NO: 339659 - RNA, 32 nt, Human
auucuucccuggagccuacagagcaggcaggc

SEQ ID NO: 339660 - RNA, 32 nt, Human
auucuucccuugccugugggcaguggagagug

SEQ ID NO: 339661 - RNA, 32 nt, Human
auucuuccuagagaagauuauccuguccugca

SEQ ID NO: 339662 - RNA, 32 nt, Human
auucuuccucaaguaguucuuuacugcaagau

SEQ ID NO: 339663 - RNA, 32 nt, Human
auucuuccucauucauucuuuaucauccugug

SEQ ID NO: 339664 - RNA, 32 nt, Human
auuucucuccacccuaacucagaccucaccuu

SEQ ID NO: 339665 - RNA, 32 nt, Human
auuucucuccucuccuccuucugcuuaauuua

SEQ ID NO: 339666 - RNA, 32 nt, Human
auuucucucucccauaacagugcagugauagu

SEQ ID NO: 339667 - RNA, 32 nt, Human
auuucucugaguagcuucugcuaugauauucu

SEQ ID NO: 339668 - RNA, 32 nt, Human
auuucucugccucucucuccugccaugucgua

SEQ ID NO: 339669 - RNA, 32 nt, Human
auuucucugcuaggagccagccuggguggcgc

SEQ ID NO: 339670 - RNA, 32 nt, Human
auuucucugucauuuggauggcuggucaaugg

SEQ ID NO: 339671 - RNA, 32 nt, Human
auuucucuuagcagaucagcaaucccucuagg

SEQ ID NO: 339672 - RNA, 32 nt, Human
auuucucuucauuugcuuggcuuaucucauau

SEQ ID NO: 339673 - RNA, 23 nt, Human
auuucucuuccaauuacuguuca

SEQ ID NO: 339674 - RNA, 32 nt, Human
auuucucuuccauugagcuuccugccugaccc

SEQ ID NO: 339675 - RNA, 32 nt, Human
auuucucuuccuccucaccuccaccaccccuu

SEQ ID NO: 339676 - RNA, 32 nt, Human
auuucucuucgccucuccuuuucacuucuugc

SEQ ID NO: 339677 - RNA, 32 nt, Human
auuucucuucucuccacaccagaccucguuca

SEQ ID NO: 339678 - RNA, 32 nt, Human
auuucugaaaggcucuucugaaaggugguauc

SEQ ID NO: 339679 - RNA, 32 nt, Human
auuucugaagcgagcgucuucgaugccuaugu

SEQ ID NO: 339680 - RNA, 32 nt, Human
auuucugaaugugcauuuccagccuucuugcu

SEQ ID NO: 339681 - RNA, 32 nt, Human
auuucugcaaaucaagagaaacucugcagggc

SEQ ID NO: 339682 - RNA, 32 nt, Human
auuucugcacacucugggucugugcuggugga

SEQ ID NO: 339683 - RNA, 32 nt, Human
auuucugcacagacacagaucucugugccugg

SEQ ID NO: 339684 - RNA, 32 nt, Human
auuucugcacuugggcccuccucugggagccg

SEQ ID NO: 339685 - RNA, 32 nt, Human
auuucugcagcaaaccccaaagcagggugcca

SEQ ID NO: 339686 - RNA, 32 nt, Human
auuucugcagcggcaugaaagcucugcagcua

SEQ ID NO: 339687 - RNA, 32 nt, Human
auuucugcaguugagacagacccugaagaugu

SEQ ID NO: 339688 - RNA, 32 nt, Human
auuucugcaguuucgguuuucauuugcuucag

SEQ ID NO: 339689 - RNA, 32 nt, Human
auuucugcucaccgcaaccuccgccucccagg

SEQ ID NO: 339690 - RNA, 32 nt, Human
auuucuggaaacagccagugcaggaguuggug

SEQ ID NO: 339691 - RNA, 32 nt, Human
auuucuggaaucugauugagucuccacuccac

SEQ ID NO: 339692 - RNA, 32 nt, Human
auuucuggaaugcuucugcaucaaaggagauu

SEQ ID NO: 339693 - RNA, 32 nt, Human
auuucuggagugagaguaaagaggcuuaauua

SEQ ID NO: 339694 - RNA, 32 nt, Human
auuucuggccagacuuucugggucccuuucag

SEQ ID NO: 339695 - RNA, 32 nt, Human
auuucugggcagcagcauugcaggaagaggaa

SEQ ID NO: 339696 - RNA, 31 nt, Human
auuucugggucuuucugacaucagcagagaa

SEQ ID NO: 339697 - RNA, 32 nt, Human
auuucuggucccacccaccucugccuccgcca

SEQ ID NO: 339698 - RNA, 32 nt, Human
auuucuggugguuucugcccugcagaugucua

SEQ ID NO: 339699 - RNA, 32 nt, Human
auuucuggugugugcagacaugguggccauug

SEQ ID NO: 339700 - RNA, 32 nt, Human
auuucuguagcaucugccuucaucucaucuca

SEQ ID NO: 339701 - RNA, 32 nt, Human
auuucuguaguuagugaacagagcagauagag

SEQ ID NO: 339702 - RNA, 32 nt, Human
auuucuguauguucucaguaugcaucacuaga

SEQ ID NO: 339703 - RNA, 32 nt, Human
auuucuguauugcuggcaucugugcuaagcuu

SEQ ID NO: 339704 - RNA, 32 nt, Human
auuucugucucccuuccaucuuuucucccauu

SEQ ID NO: 339705 - RNA, 32 nt, Human
auuucugugagagagaaaaagagagagucaua

SEQ ID NO: 339706 - RNA, 32 nt, Human
auuucuguggaugccuuuuucucuccaaccuc

SEQ ID NO: 339707 - RNA, 32 nt, Human
auuucuguggcgucaucuuuacauucuagucc

SEQ ID NO: 339708 - RNA, 32 nt, Human
auuucugugggaggggcagagagguagguggc

SEQ ID NO: 339709 - RNA, 32 nt, Human
auuucuguguuccccuuccacccuuuaaaucu

SEQ ID NO: 339710 - RNA, 32 nt, Human
auuucuguuaggguaggaaaugaaucauaggg

SEQ ID NO: 339711 - RNA, 22 nt, Human
auuucuguucuauuucaaggcc

SEQ ID NO: 339712 - RNA, 32 nt, Human
auuucuuauauacuuuguuuucucuaaggaga

SEQ ID NO: 339713 - RNA, 32 nt, Human
auuucuucaacguuccauuccuaggugauuuu

SEQ ID NO: 339714 - RNA, 31 nt, Human
auuucuucaauaaauuuggaagagggcuggc

SEQ ID NO: 339715 - RNA, 32 nt, Human
auuucuucacugcaauugccauuugccuuuuu

SEQ ID NO: 339716 - RNA, 32 nt, Human
auuucuucagccccuucucuggcccagacccu

SEQ ID NO: 339717 - RNA, 32 nt, Human
auuucuucauaaagcaccucgauggcagggac

SEQ ID NO: 339718 - RNA, 32 nt, Human
auuucuucauuuucuuuuggaggaccgacuua

SEQ ID NO: 339719 - RNA, 32 nt, Human
auuucuuccuaaagggagagugagugauaugu

SEQ ID NO: 339720 - RNA, 32 nt, Human
auuucuuccuuucccagggccugauugguuca

SEQ ID NO: 339721 - RNA, 32 nt, Human
auuucuucgucaugcauucggcauuugcuaaa

SEQ ID NO: 339722 - RNA, 32 nt, Human
auuucuucuacccagcuuccugaucuauuuau

SEQ ID NO: 339723 - RNA, 32 nt, Human
auuucuucuccuggaguugcauugauucagua

SEQ ID NO: 339724 - RNA, 32 nt, Human
auuucuucucucucugcauaugccuggaauaa

SEQ ID NO: 339725 - RNA, 32 nt, Human
auuucuucugacaaagcugaaaaugcuagugc

SEQ ID NO: 339726 - RNA, 32 nt, Human
auuucuucuuucccucuauccaaaggagcuug

SEQ ID NO: 339727 - RNA, 32 nt, Human
auuucuucuuucucuuauuccuccuguuucgu

SEQ ID NO: 339728 - RNA, 32 nt, Human
auuucuucuuuuccuuucucuuuucuagaaau

SEQ ID NO: 339729 - RNA, 32 nt, Human
auuucuugaaguccacaggaggcacauggucc

SEQ ID NO: 339730 - RNA, 32 nt, Human
auuucuugaucuuuacucaaagaauuauucug

SEQ ID NO: 339731 - RNA, 32 nt, Human
auuucuugccaacaaauggcuagaaaggacug

SEQ ID NO: 339732 - RNA, 32 nt, Human
auuucuugccaagaggucucccaggagauauu

SEQ ID NO: 339733 - RNA, 32 nt, Human
auuucuugcccagguuccaguguguguuccaa

SEQ ID NO: 339734 - RNA, 32 nt, Human
auuucuugccuguaacccuagcacuuugggag

SEQ ID NO: 339735 - RNA, 32 nt, Human
auuucuuggaaauggacuuucaaaggcuuuaa

SEQ ID NO: 339736 - RNA, 32 nt, Human
auuucuugguuccaauaaagcauuuuacaaga

SEQ ID NO: 339737 - RNA, 32 nt, Human
auuucuugguucccuggccaggaagcaaggua

SEQ ID NO: 339738 - RNA, 32 nt, Human
auuucuuuaaaaauaaaaacaaaacuugccaa

SEQ ID NO: 339739 - RNA, 32 nt, Human
auuucuuuacagaauggauuuguuaaacuagc

SEQ ID NO: 339740 - RNA, 31 nt, Human
auuucuuucaauaaauaauuauuggauagcu

SEQ ID NO: 339741 - RNA, 32 nt, Human
auuucuuucugugccacacaauggauggcucu

SEQ ID NO: 339742 - RNA, 32 nt, Human
auuucuuugagggaucaggaaggaauccuggg

SEQ ID NO: 339743 - RNA, 32 nt, Human
auuucuuugcuacacagaggugucuuggaaag

SEQ ID NO: 339744 - RNA, 32 nt, Human
auuucuuuucaacuggcuauuucccaaggauc

SEQ ID NO: 339745 - RNA, 32 nt, Human
auuucuuuucccugaugcaggcagagcugaac

SEQ ID NO: 339746 - RNA, 32 nt, Human
auuucuuuucuuccuggcuuuuuaacuccccu

SEQ ID NO: 339747 - RNA, 32 nt, Human
auuucuuuucuuugcccuccugauucuuggcu

SEQ ID NO: 339748 - RNA, 32 nt, Human
auuucuuuugagauggaguuuugcucugucac

SEQ ID NO: 339749 - RNA, 32 nt, Human
auuucuuuugcagcuuccuauaaaguuugucu

SEQ ID NO: 339750 - RNA, 32 nt, Human
auuugaaaacaguacucaaugagacuggaaau

SEQ ID NO: 339751 - RNA, 32 nt, Human
auuugaaaaggagcccaggacagauacaaaca

SEQ ID NO: 339752 - RNA, 32 nt, Human
auuugaaaaugccagucaggguuguuucuuac

SEQ ID NO: 339753 - RNA, 32 nt, Human
auuugaaacaugugaacuauaugacauucaga

SEQ ID NO: 339754 - RNA, 21 nt, Human
auuugaaaccaaaacuugaga

SEQ ID NO: 339755 - RNA, 32 nt, Human
auuugaaaccaguuuuuaucccuucucuuucc

SEQ ID NO: 339756 - RNA, 32 nt, Human
auuugaaacucaugcaauaauuauccucagua

SEQ ID NO: 339757 - RNA, 32 nt, Human
auuugaaacuugaggaaacaugcucagagugc

SEQ ID NO: 339758 - RNA, 32 nt, Human
auuugaaagagcauugacuuugccacuuaaaa

SEQ ID NO: 339759 - RNA, 32 nt, Human
auuugaaagaguagggaugacauggaggaugc

SEQ ID NO: 339760 - RNA, 32 nt, Human
auuugaaaugaauuccucauuuggaggaaaaa

SEQ ID NO: 339761 - RNA, 32 nt, Human
auuugaaaugagggugggccagaugaguaugu

SEQ ID NO: 339762 - RNA, 32 nt, Human
auuugaacaaauuccuggcucacugagcauca

SEQ ID NO: 339763 - RNA, 32 nt, Human
auuugaacaagugggccauuagccagauuugu

SEQ ID NO: 339764 - RNA, 32 nt, Human
auuugaacccuuggaccaggcauuugcacagg

SEQ ID NO: 339765 - RNA, 32 nt, Human
auuugaaccuaccucuuuuauuuucugaacca

SEQ ID NO: 339766 - RNA, 32 nt, Human
auuugaaccuaggagguggcgguugcugugag

SEQ ID NO: 339767 - RNA, 32 nt, Human
auuugaagaagagagagccuguggggauagcc

SEQ ID NO: 339768 - RNA, 32 nt, Human
auuugaagagcuaaagagucugcagcaggauu

SEQ ID NO: 339769 - RNA, 32 nt, Human
auuugaagaggaaaggaugguggcuggguggu

SEQ ID NO: 339770 - RNA, 32 nt, Human
auuugaagcaaagggaggaagacugguagcgg

SEQ ID NO: 339771 - RNA, 32 nt, Human
auuugaaggaaaaacugugaaugacaaaaucu

SEQ ID NO: 339772 - RNA, 32 nt, Human
auuugaaggccuugagugcccucugcccaucg

SEQ ID NO: 339773 - RNA, 32 nt, Human
auuugaaggccuugagugcccucugccgaccg

SEQ ID NO: 339774 - RNA, 32 nt, Human
auuugaagguauaaccuucaugaugaauuacu

SEQ ID NO: 339775 - RNA, 32 nt, Human
auuugaaggucugcaagaaccugacucgucug

SEQ ID NO: 339776 - RNA, 32 nt, Human
auuugaaguaauguuuuaguaaggagagauua

SEQ ID NO: 339777 - RNA, 32 nt, Human
auuugaaguauuagaagaaagugugccaugag

SEQ ID NO: 339778 - RNA, 32 nt, Human
auuugaaguguauguaacuuagcuuauguuaa

SEQ ID NO: 339779 - RNA, 32 nt, Human
auuugaauagaugcugauaaauuugauucucu

SEQ ID NO: 339780 - RNA, 32 nt, Human
auuugaauagggucuuccaaauccagacucca

SEQ ID NO: 339781 - RNA, 32 nt, Human
auuugaauccagagaagagcgagcugaggcug

SEQ ID NO: 339782 - RNA, 32 nt, Human
auuugaaucucaggacucuucuggccguaggu

SEQ ID NO: 339783 - RNA, 32 nt, Human
auuugaaugcauggguagaaaauaucauauuu

SEQ ID NO: 339784 - RNA, 32 nt, Human
auuugaauguauuuuuauauucucuugauaau

SEQ ID NO: 339785 - RNA, 32 nt, Human
auuugaaugucauuguccuugagacccuacau

SEQ ID NO: 339786 - RNA, 32 nt, Human
auuugaauuucagcuuaaucaugugggauuua

SEQ ID NO: 339787 - RNA, 32 nt, Human
auuugaauuuucuuccccaaccugagugcuuu

SEQ ID NO: 339788 - RNA, 32 nt, Human
auuugacagauggcaaaacugaggcuuaaaga

SEQ ID NO: 339789 - RNA, 32 nt, Human
auuugacagcuuuccuuggugacccaaaccuu

SEQ ID NO: 339790 - RNA, 32 nt, Human
auuugacaggaaauuaggaugagcacgagcaa

SEQ ID NO: 339791 - RNA, 32 nt, Human
auuugacagggaggggccagcagugagcugca

SEQ ID NO: 339792 - RNA, 17 nt, Human
auuugacauaccuuaga

SEQ ID NO: 339793 - RNA, 32 nt, Human
auuugacauccucucuggauucccaaggagca

SEQ ID NO: 339794 - RNA, 32 nt, Human
auuugaccaucccugggggccuggcugcugac

SEQ ID NO: 339795 - RNA, 32 nt, Human
auuugaccuuaaaucuccagugacucagagcu

SEQ ID NO: 339796 - RNA, 32 nt, Human
auuugacuaagaaaucacccagcuuuaaagcu

SEQ ID NO: 339797 - RNA, 31 nt, Human
auuugacucaauaaagacuucuugaaugacu

SEQ ID NO: 339798 - RNA, 32 nt, Human
auuugacuccacccucaucacccacacucccu

SEQ ID NO: 339799 - RNA, 32 nt, Human
auuugacugcaacucuugucgucuuauguggg

SEQ ID NO: 339800 - RNA, 32 nt, Human
auuugacugguuccauuacauuuccuuuuggu

SEQ ID NO: 339801 - RNA, 32 nt, Human
auuugagaaaauaucugguucacuuacacuac

SEQ ID NO: 339802 - RNA, 32 nt, Human
auuugagaaacagcagguggguguggccaaag

SEQ ID NO: 339803 - RNA, 32 nt, Human
auuugagaagaaaaucagagagggaagaucug

SEQ ID NO: 339804 - RNA, 32 nt, Human
auuugagaagcaaacaauuacaugucauguca

SEQ ID NO: 339805 - RNA, 32 nt, Human
auuugagaaggugauuuaagguguggacauuu

SEQ ID NO: 339806 - RNA, 32 nt, Human
auuugagaauaguuucaucucagcccccauua

SEQ ID NO: 339807 - RNA, 32 nt, Human
auuugagaccagccuggccaacauagugaaac

SEQ ID NO: 339808 - RNA, 32 nt, Human
auuugagaccagccugggcaacauagugagug

SEQ ID NO: 339809 - RNA, 32 nt, Human
auuugagaccagccuggguaacauagugagac

SEQ ID NO: 339810 - RNA, 32 nt, Human
auuugagagagcauuuacucugucucccugug

SEQ ID NO: 339811 - RNA, 32 nt, Human
auuugagagagggagagaaggcccuugccacg

SEQ ID NO: 339812 - RNA, 32 nt, Human
auuugagaggcugaggugggaggaucauuuga

SEQ ID NO: 339813 - RNA, 32 nt, Human
auuugagaugcagaggaaugagcuugagccuu

SEQ ID NO: 339814 - RNA, 32 nt, Human
auuugagaugccagauuccuuggaaguagaga

SEQ ID NO: 339815 - RNA, 32 nt, Human
auuugagauguuugggauuaagccauacaauu

SEQ ID NO: 339816 - RNA, 32 nt, Human
auuugagcacauuagguuuugugucuucauuc

SEQ ID NO: 339817 - RNA, 32 nt, Human
auuugagcauagcaagugaguuuugaauccca

SEQ ID NO: 339818 - RNA, 32 nt, Human
auuugagcaucaggaaaacuguugaaggguua

SEQ ID NO: 339819 - RNA, 32 nt, Human
auuugagccaggagguugagguugcagugagc

SEQ ID NO: 339820 - RNA, 32 nt, Human
auuugagccaucauuucacuucugauuuuaag

SEQ ID NO: 339821 - RNA, 32 nt, Human
auuugagcccagagguagaggcugcagugagc

SEQ ID NO: 339822 - RNA, 32 nt, Human
auuugagcccaggaauuugaggcugcagugag

SEQ ID NO: 339823 - RNA, 32 nt, Human
auuugagcccaggaggcugaggcugcaaugac

SEQ ID NO: 339824 - RNA, 32 nt, Human
auuugagcccaggaggucaaggcugcagugag

SEQ ID NO: 339825 - RNA, 32 nt, Human
auuugagcccaggaguuugagaccagcugggg

SEQ ID NO: 339826 - RNA, 32 nt, Human
auuugagcccaggaguuugaggcugcagugag

SEQ ID NO: 339827 - RNA, 32 nt, Human
auuugagcccagggguuugaagcuucagugag

SEQ ID NO: 339828 - RNA, 32 nt, Human
auuugagcccccaggggugggguggacgcgug

SEQ ID NO: 339829 - RNA, 32 nt, Human
auuugagccuaggaggucaaggcugcagugag

SEQ ID NO: 339830 - RNA, 32 nt, Human
auuugagccugggagaucgaggcugcagugag

SEQ ID NO: 339831 - RNA, 32 nt, Human
auuugagccuugcugguuugacauugggugcc

SEQ ID NO: 339832 - RNA, 32 nt, Human
auuugagcuuucuccccucccgcuaguaucuu

SEQ ID NO: 339833 - RNA, 30 nt, Human
auuugaggaagccgcaggguugacaaccau

SEQ ID NO: 339834 - RNA, 32 nt, Human
auuugaggacaguccugugugacucagaggcc

SEQ ID NO: 339835 - RNA, 32 nt, Human
auuugaggacaucuaucguauucuugugugcu

SEQ ID NO: 339836 - RNA, 32 nt, Human
auuugaggagcacaauacagagauuuuaaaaa

SEQ ID NO: 339837 - RNA, 32 nt, Human
auuugaggccaggcguggaggcucacaccuau

SEQ ID NO: 339838 - RNA, 32 nt, Human
auuugaggccuauagauuuagcuuaagagaac

SEQ ID NO: 339839 - RNA, 32 nt, Human
auuugaggcggcugcuggaggcugguucccuc

SEQ ID NO: 339840 - RNA, 32 nt, Human
auuugaggcuggaugcaguggcucacgccuac

SEQ ID NO: 339841 - RNA, 32 nt, Human
auuugaggcuuagggguagucauuccaucuuu

SEQ ID NO: 339842 - RNA, 32 nt, Human
auuugagggaggcagaagucugcaguugaaga

SEQ ID NO: 339843 - RNA, 32 nt, Human
auuugagggguaauuuuuaagcaguaaaaaga

SEQ ID NO: 339844 - RNA, 32 nt, Human
auuugaguagaggcacagucuguaucccaucu

SEQ ID NO: 339845 - RNA, 32 nt, Human
auuugaguagccacuuauucaccagaguugga

SEQ ID NO: 339846 - RNA, 32 nt, Human
auuugaguagucugcauuuuggcaacuccucu

SEQ ID NO: 339847 - RNA, 32 nt, Human
auuugaguauuuuuauaaugucucuuuuaaag

SEQ ID NO: 339848 - RNA, 32 nt, Human
auuugagucuauguauucugaccucagaacua

SEQ ID NO: 339849 - RNA, 32 nt, Human
auuugagugcaggaguucaaggacagccuggg

SEQ ID NO: 339850 - RNA, 32 nt, Human
auuugaguuagcaacacuguuuucuuuacgag

SEQ ID NO: 339851 - RNA, 32 nt, Human
auuugaguucaggaguucgaguuacagccugg

SEQ ID NO: 339852 - RNA, 32 nt, Human
auuugaguucuugagaauaaagccacugggcc

SEQ ID NO: 339853 - RNA, 32 nt, Human
auuugaguuuuaaauucucacacugagguaaa

SEQ ID NO: 339854 - RNA, 32 nt, Human
auuugaguuuuagcaagaguccugagggcggg

SEQ ID NO: 339855 - RNA, 32 nt, Human
auuugauaacuaagaggaagacuugcaaagcc

SEQ ID NO: 339856 - RNA, 32 nt, Human
auuugauauaauucuggauggaagaccucuua

SEQ ID NO: 339857 - RNA, 32 nt, Human
auuugauaucccuuucuccauucuagguuuuu

SEQ ID NO: 339858 - RNA, 32 nt, Human
auuugauccaagcagguuggggaacauauugg

SEQ ID NO: 339859 - RNA, 32 nt, Human
auuugauccucccagggcccugccagguuguu

SEQ ID NO: 339860 - RNA, 32 nt, Human
auuugaugacaugcagcauuacuuaguucugu

SEQ ID NO: 339861 - RNA, 32 nt, Human
auuugaugcaccugggaggccaugucucccgg

SEQ ID NO: 339862 - RNA, 32 nt, Human
auuugaugcuuagaauuuuaaaccugaagaga

SEQ ID NO: 339863 - RNA, 31 nt, Human
auuugauggacaaaauuaccgccaccaacac

SEQ ID NO: 339864 - RNA, 32 nt, Human
auuugauggagggagcagggacauagcacauu

SEQ ID NO: 339865 - RNA, 32 nt, Human
auuugauggcccaugugggaucaaaggccacu

SEQ ID NO: 339866 - RNA, 32 nt, Human
auuugauguaccugggaggccaugucucccgg

SEQ ID NO: 339867 - RNA, 32 nt, Human
auuugauuagaauuugaaaauaaaucacauuu

SEQ ID NO: 339868 - RNA, 32 nt, Human
auuugauucauacuggaaucucugguucauuu

SEQ ID NO: 339869 - RNA, 32 nt, Human
auuugauugcuguauauggauacauggcuguu

SEQ ID NO: 339870 - RNA, 32 nt, Human
auuugauuuccaagucagguagaucauuggcc

SEQ ID NO: 339871 - RNA, 32 nt, Human
auuugauuuuacugcugauuucacagcuccuu

SEQ ID NO: 339872 - RNA, 32 nt, Human
auuugcaaaacacacauaauaccgucagagug

SEQ ID NO: 339873 - RNA, 32 nt, Human
auuugcaaaacaucaucuaaaauuuaaauuug

SEQ ID NO: 339874 - RNA, 32 nt, Human
auuugcaaagucugcugacaauguuauuuaca

SEQ ID NO: 339875 - RNA, 32 nt, Human
auuugcaaaugcugucaaaacaugcuuuccuu

SEQ ID NO: 339876 - RNA, 32 nt, Human
auuugcaaugcacuuguauacacuucaaaaau

SEQ ID NO: 339877 - RNA, 32 nt, Human
auuugcaauguuuguccuucucugccuguugc

SEQ ID NO: 339878 - RNA, 32 nt, Human
auuugcacaagucaccuuggacugcagggagc

SEQ ID NO: 339879 - RNA, 32 nt, Human
auuugcacacaaaaauaaagacuagagcaaaa

SEQ ID NO: 339880 - RNA, 32 nt, Human
auuugcacccacugcauuugcagccuugaggu

SEQ ID NO: 339881 - RNA, 32 nt, Human
auuugcaccgcuguacuccagccugggcaaca

SEQ ID NO: 339882 - RNA, 22 nt, Human
auuugcaccucuguucauuuca

SEQ ID NO: 339883 - RNA, 32 nt, Human
auuugcacuaucugcuuaaugagcaaaucugu

SEQ ID NO: 339884 - RNA, 32 nt, Human
auuugcacuucacuuuguuggaauaucccaua

SEQ ID NO: 339885 - RNA, 32 nt, Human
auuugcacuuccaauagaccagggauugacca

SEQ ID NO: 339886 - RNA, 32 nt, Human
auuugcagaauguaagugauuucuccagcagu

SEQ ID NO: 339887 - RNA, 32 nt, Human
auuugcagaggaagaaugagaacccuggaaag

SEQ ID NO: 339888 - RNA, 32 nt, Human
auuugcagaguguugggacugucauuugugau

SEQ ID NO: 339889 - RNA, 32 nt, Human
auuugcagcccccagcccuggguucaaguccc

SEQ ID NO: 339890 - RNA, 32 nt, Human
auuugcagccuaacuucucuuuuccuuuuaaa

SEQ ID NO: 339891 - RNA, 32 nt, Human
auuugcagccugacaaugagacaggaaagaaa

SEQ ID NO: 339892 - RNA, 32 nt, Human
auuugcagcuauucuggaugucaguuuaauaa

SEQ ID NO: 339893 - RNA, 32 nt, Human
auuugcagggccaccuggaggcuggggugcug

SEQ ID NO: 339894 - RNA, 32 nt, Human
auuugcauaccagccaguguuguccagcacuu

SEQ ID NO: 339895 - RNA, 32 nt, Human
auuugcaucacugaggaugaaacugacuuuug

SEQ ID NO: 339896 - RNA, 32 nt, Human
auuugcaucauuuccccucucuggcuccaauu

SEQ ID NO: 339897 - RNA, 32 nt, Human
auuugcaucauuuugucccuuguaaaucaaga

SEQ ID NO: 339898 - RNA, 32 nt, Human
auuugcauccaccuucccuucugacucacguu

SEQ ID NO: 339899 - RNA, 32 nt, Human
auuugcauccaccuucccuucugacucagguu

SEQ ID NO: 339900 - RNA, 32 nt, Human
auuugcaugggcagggacagaauaauaugacu

SEQ ID NO: 339901 - RNA, 32 nt, Human
auuugcauuucuaacacauucucagcugaugc

SEQ ID NO: 339902 - RNA, 32 nt, Human
auuugcauuuuagugguuagggagaggauaua

SEQ ID NO: 339903 - RNA, 32 nt, Human
auuugccaagauuuuccagccaaaaaggauua

SEQ ID NO: 339904 - RNA, 32 nt, Human
auuugccacuggcuauaaacaccucccucagg

SEQ ID NO: 339905 - RNA, 32 nt, Human
auuugccagcagucugagcuucuaccgagucu

SEQ ID NO: 339906 - RNA, 32 nt, Human
auuugccauacaguaaccagagaccuccaacu

SEQ ID NO: 339907 - RNA, 32 nt, Human
auuugccaucucccagcagaagaaggaugugc

SEQ ID NO: 339908 - RNA, 32 nt, Human
auuugcccaccagcuucuccucuggagccuga

SEQ ID NO: 339909 - RNA, 32 nt, Human
auuugcccaguuuuuaauuacacugagauaau

SEQ ID NO: 339910 - RNA, 32 nt, Human
auuugcccauuuccaagccaguacaguaaaug

SEQ ID NO: 339911 - RNA, 32 nt, Human
auuugccccucaccugcccuuggugagccuuu

SEQ ID NO: 339912 - RNA, 32 nt, Human
auuugccccuggcaaaugcacacaccucaugc

SEQ ID NO: 339913 - RNA, 32 nt, Human
auuugccccuggcaaaugcauacaccucaugc

SEQ ID NO: 339914 - RNA, 26 nt, Human
auuugccccuggcuaucaucauccua

SEQ ID NO: 339915 - RNA, 29 nt, Human
auuugccccuggcuaucaucauccuacau

SEQ ID NO: 339916 - RNA, 32 nt, Human
auuugcccgccucugccuccccaaagugcugg

SEQ ID NO: 339917 - RNA, 32 nt, Human
auuugccguguucccuuccuccugucacugca

SEQ ID NO: 339918 - RNA, 32 nt, Human
auuugccuacuauccugaauuugccuacuauc

SEQ ID NO: 339919 - RNA, 32 nt, Human
auuugccuaggacuucucagcuucucccauag

SEQ ID NO: 339920 - RNA, 32 nt, Human
auuugccuauugccuaucgccucucucuccca

SEQ ID NO: 339921 - RNA, 32 nt, Human
auuugccucauucagacugagacagggcuguu

SEQ ID NO: 339922 - RNA, 32 nt, Human
auuugccucccaggaggaagccagggcagggu

SEQ ID NO: 339923 - RNA, 32 nt, Human
auuugccuccuccagagggacauggcaauguu

SEQ ID NO: 339924 - RNA, 32 nt, Human
auuugccucucaagcagccucuggucaucuau

SEQ ID NO: 339925 - RNA, 32 nt, Human
auuugccucugaguuucagaugaccucucugu

SEQ ID NO: 339926 - RNA, 32 nt, Human
auuugccucuuuauggaaaaaguuugccauuc

SEQ ID NO: 339927 - RNA, 32 nt, Human
auuugccuguucugggcauuucaugucaaugg

SEQ ID NO: 339928 - RNA, 32 nt, Human
auuugccuguucuuacccuuugcucauguauc

SEQ ID NO: 339929 - RNA, 32 nt, Human
auuugccuguuucugcuugcucuuguccuagc

SEQ ID NO: 339930 - RNA, 32 nt, Human
auuugccuuauaacugacauuucuucaaauua

SEQ ID NO: 339931 - RNA, 32 nt, Human
auuugccuucucugagcuucaguuuccuucua

SEQ ID NO: 339932 - RNA, 32 nt, Human
auuugccuuggccuugcccugagaaggugcug

SEQ ID NO: 339933 - RNA, 32 nt, Human
auuugccuuuaagaguuacuuuuguugaaugu

SEQ ID NO: 339934 - RNA, 32 nt, Human
auuugccuuugccccggcuugccuguaauccc

SEQ ID NO: 339935 - RNA, 32 nt, Human
auuugcgaggcacccaguaccuccauuagugu

SEQ ID NO: 339936 - RNA, 32 nt, Human
auuugcgccacugcauucuagccugagugaca

SEQ ID NO: 339937 - RNA, 32 nt, Human
auuugcgcuguuucagccuccugauucaacuc

SEQ ID NO: 339938 - RNA, 32 nt, Human
auuugcggaaugaaugaacacccugucugcag

SEQ ID NO: 339939 - RNA, 32 nt, Human
auuugcuaaaagggaugcugaggcucugggag

SEQ ID NO: 339940 - RNA, 32 nt, Human
auuugcuagagggagggagcagccacggaguu

SEQ ID NO: 339941 - RNA, 32 nt, Human
auuugcucacccucaaacugucucagcccucu

SEQ ID NO: 339942 - RNA, 32 nt, Human
auuugcucagugauggcagacaagauggcugu

SEQ ID NO: 339943 - RNA, 32 nt, Human
auuugcucccguggagcuucaucgggguggug

SEQ ID NO: 339944 - RNA, 32 nt, Human
auuugcucuagggaaucagggaagaaagauac

SEQ ID NO: 339945 - RNA, 32 nt, Human
auuugcugauccgucugcuccagcauagguuc

SEQ ID NO: 339946 - RNA, 32 nt, Human
auuugcugcucccugaaucuucuacugaacau

SEQ ID NO: 339947 - RNA, 32 nt, Human
auuugcugcuuuguugcaaguugauauaacug

SEQ ID NO: 339948 - RNA, 32 nt, Human
auuugcugggagaggguguugaguucacugug

SEQ ID NO: 339949 - RNA, 32 nt, Human
auuugcugucuucacugugcagcuaucacagg

SEQ ID NO: 339950 - RNA, 31 nt, Human
auuugcuuaguaaaugccuguugaugguuuu

SEQ ID NO: 339951 - RNA, 32 nt, Human
auuugcuucaaaauagaaucggauaaguuuaa

SEQ ID NO: 339952 - RNA, 32 nt, Human
auuugcuuccaucauccagccccugggcaaca

SEQ ID NO: 339953 - RNA, 32 nt, Human
auuugcuucccaaggcacacacuguccccaca

SEQ ID NO: 339954 - RNA, 32 nt, Human
auuugcuuccucuagacuacagcagggaaagg

SEQ ID NO: 339955 - RNA, 32 nt, Human
auuugcuuccucugacaaguuaccucaccuaa

SEQ ID NO: 339956 - RNA, 32 nt, Human
auuugcuucucccagcccaccucaagcagucu

SEQ ID NO: 339957 - RNA, 32 nt, Human
auuugcuucucccuccccaaccaccucauggu

SEQ ID NO: 339958 - RNA, 32 nt, Human
auuugcuucucuuucuccucaacucgacugac

SEQ ID NO: 339959 - RNA, 32 nt, Human
auuugcuucuuacccuguguuuucugcaaacu

SEQ ID NO: 339960 - RNA, 32 nt, Human
auuugcuugggcucccccuucauggccucugc

SEQ ID NO: 339961 - RNA, 32 nt, Human
auuugcuuguaagaguaacguuaaagguuuaa

SEQ ID NO: 339962 - RNA, 32 nt, Human
auuugcuuugacuguaaguguagaacaggacg

SEQ ID NO: 339963 - RNA, 32 nt, Human
auuugcuuugagagcuacaggaaaugguuguu

SEQ ID NO: 339964 - RNA, 22 nt, Human
auuuggaaaacccugagucuaa

SEQ ID NO: 339965 - RNA, 32 nt, Human
auuuggaaaaugugaucaauugaaaucaacug

SEQ ID NO: 339966 - RNA, 32 nt, Human
auuuggaaauccuaguuuccucuccuucguau

SEQ ID NO: 339967 - RNA, 32 nt, Human
auuuggaaaugaggacugucuugggaaaaggg

SEQ ID NO: 339968 - RNA, 32 nt, Human
auuuggaacaccauuccagaccaaaauugaaa

SEQ ID NO: 339969 - RNA, 32 nt, Human
auuuggaagaaacaaauuuaaauaaguucuaa

SEQ ID NO: 339970 - RNA, 32 nt, Human
auuuggaagggaagccggaaauccagauuuaa

SEQ ID NO: 339971 - RNA, 32 nt, Human
auuuggaaugagcagucuuccauuccaacuuu

SEQ ID NO: 339972 - RNA, 31 nt, Human
auuuggaauguggaaaggagguagaagucau

SEQ ID NO: 339973 - RNA, 32 nt, Human
auuuggaauucuaucagauaaauuuaacaaug

SEQ ID NO: 339974 - RNA, 32 nt, Human
auuuggacacagaaagacacaaacaaggagaa

SEQ ID NO: 339975 - RNA, 32 nt, Human
auuuggagaagaggcaugaccuuuguauuuca

SEQ ID NO: 339976 - RNA, 32 nt, Human
auuuggagaggaaggauggagguggacucuca

SEQ ID NO: 339977 - RNA, 32 nt, Human
auuuggagcauccauggauugcagugaucauu

SEQ ID NO: 339978 - RNA, 32 nt, Human
auuuggagcaugccauuggaaaacccaccccc

SEQ ID NO: 339979 - RNA, 32 nt, Human
auuuggagccaccucugcuucucagccccacc

SEQ ID NO: 339980 - RNA, 32 nt, Human
auuuggaggccccauucuaggacucuggggau

SEQ ID NO: 339981 - RNA, 32 nt, Human
auuuggagggccugggccuggcucccucacuc

SEQ ID NO: 339982 - RNA, 32 nt, Human
auuuggagguggggcuuuugggaggugauuag

SEQ ID NO: 339983 - RNA, 32 nt, Human
auuuggagguggggcuuuugguaagugauagg

SEQ ID NO: 339984 - RNA, 32 nt, Human
auuuggaucaaauugcuacuaugauaggaaau

SEQ ID NO: 339985 - RNA, 32 nt, Human
auuuggaucucacgcugccucugugguucccu

SEQ ID NO: 339986 - RNA, 32 nt, Human
auuuggaugagacugauuagggaggggauuug

SEQ ID NO: 339987 - RNA, 32 nt, Human
auuuggaugagguugaggugagaucaggucac

SEQ ID NO: 339988 - RNA, 32 nt, Human
auuuggauguuuggcguugcacacacacaucc

SEQ ID NO: 339989 - RNA, 32 nt, Human
auuuggauuauucuauauaauuuuggacuuuu

SEQ ID NO: 339990 - RNA, 32 nt, Human
auuuggauucaguccuugccagccuggcuggu

SEQ ID NO: 339991 - RNA, 32 nt, Human
auuuggauugccuuacuucucuugccuuaaau

SEQ ID NO: 339992 - RNA, 32 nt, Human
auuuggauuguugcgccucugcucugaagaaa

SEQ ID NO: 339993 - RNA, 32 nt, Human
auuuggauuucccuuauuucucucauaagcgu

SEQ ID NO: 339994 - RNA, 32 nt, Human
auuuggauuugcucauagaggagcagauagga

SEQ ID NO: 339995 - RNA, 32 nt, Human
auuuggauuuggagaagaguuucuugaacauu

SEQ ID NO: 339996 - RNA, 32 nt, Human
auuuggauuuggagaugguggcuuccagaugu

SEQ ID NO: 339997 - RNA, 32 nt, Human
auuuggcaacccaaggaaccauuugcuuaaac

SEQ ID NO: 339998 - RNA, 32 nt, Human
auuuggcacagcaaaaagcccacccaggacuu

SEQ ID NO: 339999 - RNA, 32 nt, Human
auuuggcagcauggugagggcucuggccccag

SEQ ID NO: 340000 - RNA, 32 nt, Human
auuuggcagcucacugaucucuugccucugcu

SEQ ID NO: 340001 - RNA, 32 nt, Human
auuuggcaugaaggauauggugcucuauuugu

SEQ ID NO: 340002 - RNA, 23 nt, Human
auuuggcaugugugugugaaaua

SEQ ID NO: 340003 - RNA, 32 nt, Human
auuuggccacauuuggccuggugacagaacug

SEQ ID NO: 340004 - RNA, 32 nt, Human
auuuggccagagacacaccuggcccucagggg

SEQ ID NO: 340005 - RNA, 32 nt, Human
auuuggccauugauauucaacaggucacugac

SEQ ID NO: 340006 - RNA, 32 nt, Human
auuuggcccagccuguacuggugugccgcaau

SEQ ID NO: 340007 - RNA, 32 nt, Human
auuuggccccuggcuccuccagccugaaugag

SEQ ID NO: 340008 - RNA, 32 nt, Human
auuuggccggcucugguggccacugagcuggc

SEQ ID NO: 340009 - RNA, 32 nt, Human
auuuggccugugaacuuggcugugccagggcu

SEQ ID NO: 340010 - RNA, 32 nt, Human
auuuggccuuguggaggguguuccuagguaga

SEQ ID NO: 340011 - RNA, 32 nt, Human
auuuggccuuucuuucuuucuguaccuucaag

SEQ ID NO: 340012 - RNA, 32 nt, Human
auuuggcuacuguaaacauggcugguggaaaa

SEQ ID NO: 340013 - RNA, 32 nt, Human
auuuggcuacuucccugucccucugacuccua

SEQ ID NO: 340014 - RNA, 32 nt, Human
auuuggcucuggagguggccuguucagugggg

SEQ ID NO: 340015 - RNA, 32 nt, Human
auuuggcugggccucuggauggaaggucuggu

SEQ ID NO: 340016 - RNA, 32 nt, Human
auuuggcuuuaucaucuucacuugacuguuug

SEQ ID NO: 340017 - RNA, 32 nt, Human
auuugggaaccagcuuaggcaaaagagucccc

SEQ ID NO: 340018 - RNA, 32 nt, Human
auuugggaaucaaggcaacagauggauuagga

SEQ ID NO: 340019 - RNA, 32 nt, Human
auuugggagagggaugcccaggaacgccucau

SEQ ID NO: 340020 - RNA, 32 nt, Human
auuugggagcauauccuugucacugcagccag

SEQ ID NO: 340021 - RNA, 32 nt, Human
auuugggaggccaagaugggaggaucacuuga

SEQ ID NO: 340022 - RNA, 32 nt, Human
auuugggaggccaaggaaggaggaaugcuuga

SEQ ID NO: 340023 - RNA, 32 nt, Human
auuugggaggccaaggugggcagaucacuuga

SEQ ID NO: 340024 - RNA, 32 nt, Human
auuugggaggcugaggcaagagaaucauuuga

SEQ ID NO: 340025 - RNA, 32 nt, Human
auuugggaggcugaggcagaagaaucacuuga

SEQ ID NO: 340026 - RNA, 32 nt, Human
auuugggaggcugaggcagaagaaucgcuuga

SEQ ID NO: 340027 - RNA, 32 nt, Human
auuugggaggcugaggcaggagaaucacuuga

SEQ ID NO: 340028 - RNA, 32 nt, Human
auuugggaggcugaggcaggagaaucgcuuga

SEQ ID NO: 340029 - RNA, 32 nt, Human
auuugggaggcugaggcaggagaaucgguuga

SEQ ID NO: 340030 - RNA, 32 nt, Human
auuugggaggcugaggcaggaggaucgcuuga

SEQ ID NO: 340031 - RNA, 32 nt, Human
auuugggaggcugaggcaggcagaucaccuga

SEQ ID NO: 340032 - RNA, 32 nt, Human
auuugggaggcugaggcaggcagaucacguga

SEQ ID NO: 340033 - RNA, 32 nt, Human
auuugggaggcugaggcaguagaaucgcuuga

SEQ ID NO: 340034 - RNA, 32 nt, Human
auuugggaggcugaggcgagaggaucacuuga

SEQ ID NO: 340035 - RNA, 32 nt, Human
auuugggaggcugaggcggauggaucacuuga

SEQ ID NO: 340036 - RNA, 32 nt, Human
auuugggaggcugaggcgggaggaucacuuga

SEQ ID NO: 340037 - RNA, 32 nt, Human
auuugggaggcugaggcuggaggauugcuuaa

SEQ ID NO: 340038 - RNA, 32 nt, Human
auuugggaggcugaggcuggcggaucaugagg

SEQ ID NO: 340039 - RNA, 32 nt, Human
auuugggaggcugaggugggagaaucacuuga

SEQ ID NO: 340040 - RNA, 32 nt, Human
auuugggaggcugaggugggcagaucacuuga

SEQ ID NO: 340041 - RNA, 32 nt, Human
auuugggaggcugaggugggcggaucaugagg

SEQ ID NO: 340042 - RNA, 32 nt, Human
auuugggaggcugauguggguggauuaccuga

SEQ ID NO: 340043 - RNA, 32 nt, Human
auuugggaguaguggccaggggcccuggacgc

SEQ ID NO: 340044 - RNA, 32 nt, Human
auuugggaguggcgacagggaaugggagcucg

SEQ ID NO: 340045 - RNA, 32 nt, Human
auuugggauaccagauagcucaauacucucug

SEQ ID NO: 340046 - RNA, 32 nt, Human
auuugggaucuugaaucaggaagcugauucaa

SEQ ID NO: 340047 - RNA, 32 nt, Human
auuugggaugagcccucucaggaauccugugg

SEQ ID NO: 340048 - RNA, 32 nt, Human
auuugggaugcagaggaggagccguagccucg

SEQ ID NO: 340049 - RNA, 32 nt, Human
auuugggcauggcaucuucaaaacaauuaauu

SEQ ID NO: 340050 - RNA, 32 nt, Human
auuugggcauuucucguuucucaaguguaugc

SEQ ID NO: 340051 - RNA, 32 nt, Human
auuugggcucagccuuggacauggaggccuga

SEQ ID NO: 340052 - RNA, 32 nt, Human
auuugggcugucuuguauguuuuuaugcuccu

SEQ ID NO: 340053 - RNA, 32 nt, Human
auuuggggaaacacaacguugaaaacuuccua

SEQ ID NO: 340054 - RNA, 32 nt, Human
auuuggggaaggaaaagaaaguaguuguuuua

SEQ ID NO: 340055 - RNA, 32 nt, Human
auuuggggaaggagggaggaaauaugucccuu

SEQ ID NO: 340056 - RNA, 32 nt, Human
auuuggggaaugaucucuggaggcagaaugag

SEQ ID NO: 340057 - RNA, 32 nt, Human
auuuggggagagauagggugggaggcagggca

SEQ ID NO: 340058 - RNA, 32 nt, Human
auuuggggagcagcgguucuccuuauuuuucu

SEQ ID NO: 340059 - RNA, 32 nt, Human
auuuggggaggcaggcugggccaaaggguaga

SEQ ID NO: 340060 - RNA, 32 nt, Human
auuuggggauucacuguuucagaggacacaga

SEQ ID NO: 340061 - RNA, 32 nt, Human
auuugggggccagaggauccagguguacaugu

SEQ ID NO: 340062 - RNA, 32 nt, Human
auuuggggguguacuguccugccugugcaucu

SEQ ID NO: 340063 - RNA, 32 nt, Human
auuuggggugaguggguggugggagccuggag

SEQ ID NO: 340064 - RNA, 32 nt, Human
auuuggggugccaaagguuggggguaggauau

SEQ ID NO: 340065 - RNA, 32 nt, Human
auuuggggugggcucuucaacaucucaggcug

SEQ ID NO: 340066 - RNA, 32 nt, Human
auuuggggugguugauuagacuuuugaaaaac

SEQ ID NO: 340067 - RNA, 32 nt, Human
auuugggguuuggcauccugcccagccacuuc

SEQ ID NO: 340068 - RNA, 32 nt, Human
auuuggguauauguggaaguuccuggaaccaa

SEQ ID NO: 340069 - RNA, 32 nt, Human
auuugggucagagcuccccucccuucagauua

SEQ ID NO: 340070 - RNA, 31 nt, Human
auuuggguccugggagggugggugaaauaaa

SEQ ID NO: 340071 - RNA, 32 nt, Human
auuuggguggacuccagccuccccagcaacaa

SEQ ID NO: 340072 - RNA, 32 nt, Human
auuuggguugucugucuugucuucucauuuua

SEQ ID NO: 340073 - RNA, 32 nt, Human
auuuggguuguuuccagguuugggcuguuaca

SEQ ID NO: 340074 - RNA, 32 nt, Human
auuuggguuucuguuccuguguuaguuugcuu

SEQ ID NO: 340075 - RNA, 32 nt, Human
auuugguaaagcagcuaugcugugcuguggga

SEQ ID NO: 340076 - RNA, 32 nt, Human
auuugguaaguggccuccacuuaaacgacuua

SEQ ID NO: 340077 - RNA, 32 nt, Human
auuugguagcagcuccaacagggguccagccu

SEQ ID NO: 340078 - RNA, 32 nt, Human
auuugguaggaagaggaagcauuuagaaaggg

SEQ ID NO: 340079 - RNA, 32 nt, Human
auuugguagucugaaauggugacagauuacuu

SEQ ID NO: 340080 - RNA, 32 nt, Human
auuugguauggauucacuuuuuacuuauguua

SEQ ID NO: 340081 - RNA, 32 nt, Human
auuuggucaccaaaaaugaaauaauaguuuaa

SEQ ID NO: 340082 - RNA, 32 nt, Human
auuugguccauguccgaguccggccuuuggag

SEQ ID NO: 340083 - RNA, 32 nt, Human
auuugguccccuggacugucuuuguugauucu

SEQ ID NO: 340084 - RNA, 32 nt, Human
auuuggucucagaauuuagguuccuucccugu

SEQ ID NO: 340085 - RNA, 32 nt, Human
auuuggugacuagaaaggcaagggaggcauag

SEQ ID NO: 340086 - RNA, 32 nt, Human
auuuggugagagggguggagguggcaggcagg

SEQ ID NO: 340087 - RNA, 32 nt, Human
auuuggugcaugggaugggcucaguugggcag

SEQ ID NO: 340088 - RNA, 32 nt, Human
auuugguguggaaugaguguuucugaacugug

SEQ ID NO: 340089 - RNA, 32 nt, Human
auuugguguuuaaguuggagucugggcacugg

SEQ ID NO: 340090 - RNA, 32 nt, Human
auuugguuaaugacuuaugagcaagcugguuu

SEQ ID NO: 340091 - RNA, 32 nt, Human
auuugguucugacuucuguggcuguuuaaaau

SEQ ID NO: 340092 - RNA, 32 nt, Human
auuugguucugcuuuuugaccucucucuaccu

SEQ ID NO: 340093 - RNA, 32 nt, Human
auuugguugccugggaccuggaaaguguuuag

SEQ ID NO: 340094 - RNA, 32 nt, Human
auuugguugggaacagcugaauacuaggaaua

SEQ ID NO: 340095 - RNA, 32 nt, Human
auuugguuucagaaccaaagaccucagcuccc

SEQ ID NO: 340096 - RNA, 32 nt, Human
auuugguuucaguuguuuuaaggcuuaauuaa

SEQ ID NO: 340097 - RNA, 32 nt, Human
auuuguaaaagaaccacagcagcuauuuugga

SEQ ID NO: 340098 - RNA, 32 nt, Human
auuuguaacugcagaagacuaucuuaaaauac

SEQ ID NO: 340099 - RNA, 32 nt, Human
auuuguaagcccugcagcagauuucuuugaua

SEQ ID NO: 340100 - RNA, 32 nt, Human
auuuguaaguacuauuuccuuccuuauugucu

SEQ ID NO: 340101 - RNA, 32 nt, Human
auuuguaauucuuccucuucguucuucaccug

SEQ ID NO: 340102 - RNA, 32 nt, Human
auuuguacaaaugacaugauaauaaaaguuuu

SEQ ID NO: 340103 - RNA, 32 nt, Human
auuuguacaaauguuaauaucacugcaauucc

SEQ ID NO: 340104 - RNA, 32 nt, Human
auuuguacuggagauuucccuccuggaaccaa

SEQ ID NO: 340105 - RNA, 32 nt, Human
auuuguagaaaagauuugauuugaguuaaaua

SEQ ID NO: 340106 - RNA, 32 nt, Human
auuuguagaagcacgagacgcacuuuuauauc

SEQ ID NO: 340107 - RNA, 32 nt, Human
auuuguaggagagagggaugauugacaucuuc

SEQ ID NO: 340108 - RNA, 32 nt, Human
auuuguaggauuauuucgagggcagggcaggg

SEQ ID NO: 340109 - RNA, 32 nt, Human
auuuguaguuauugauuuaagcauuuuuagaa

SEQ ID NO: 340110 - RNA, 32 nt, Human
auuuguaguugauucuuaacugugcauaaacc

SEQ ID NO: 340111 - RNA, 32 nt, Human
auuuguaucuuuacuagaacaugagaaucuuu

SEQ ID NO: 340112 - RNA, 32 nt, Human
auuuguauggggaguugaagauucagauagag

SEQ ID NO: 340113 - RNA, 32 nt, Human
auuuguauucaugaacuuggcuguaaucaguu

SEQ ID NO: 340114 - RNA, 32 nt, Human
auuuguauuccuggaccugaaagagaagaaga

SEQ ID NO: 340115 - RNA, 32 nt, Human
auuuguauuuauuucucucccuugccaaaaag

SEQ ID NO: 340116 - RNA, 32 nt, Human
auuuguauuuauuuugaguuauacuugacaca

SEQ ID NO: 340117 - RNA, 32 nt, Human
auuuguauuuguauucccuucccccuacaaga

SEQ ID NO: 340118 - RNA, 32 nt, Human
auuugucaaagggggaaggcacccacugccua

SEQ ID NO: 340119 - RNA, 32 nt, Human
auuugucaacauugcuuuaaugagcugaggaa

SEQ ID NO: 340120 - RNA, 32 nt, Human
auuugucaauauagaugguaggaagcagaaug

SEQ ID NO: 340121 - RNA, 32 nt, Human
auuugucacagaaaucagaggagagauggugu

SEQ ID NO: 340122 - RNA, 32 nt, Human
auuugucaccucucuuucuucccuauccugcc

SEQ ID NO: 340123 - RNA, 32 nt, Human
auuugucagccaagccucggcuccagcuccgc

SEQ ID NO: 340124 - RNA, 32 nt, Human
auuugucaggcugggugcaguggcucaugccu

SEQ ID NO: 340125 - RNA, 32 nt, Human
auuugucagggugggaggaaaacuguugaagu

SEQ ID NO: 340126 - RNA, 32 nt, Human
auuugucaguguauccuuuccaaaaagaguaa

SEQ ID NO: 340127 - RNA, 31 nt, Human
auuugucaguuucaaagcugcuucacauuuu

SEQ ID NO: 340128 - RNA, 31 nt, Human
auuugucaguuucaaaucugcuucacauuuu

SEQ ID NO: 340129 - RNA, 32 nt, Human
auuugucauucuagucacuuccugccuuguga

SEQ ID NO: 340130 - RNA, 32 nt, Human
auuugucccacucuguuuucucccucucagcc

SEQ ID NO: 340131 - RNA, 32 nt, Human
auuugucccaugaauuccccugagcagagauu

SEQ ID NO: 340132 - RNA, 32 nt, Human
auuuguccccacccucaucucuuccuuuaugg

SEQ ID NO: 340133 - RNA, 32 nt, Human
auuuguccuaagauuccaggaggcuggccucc

SEQ ID NO: 340134 - RNA, 32 nt, Human
auuuguccuaucucucccuuauaguccuaagc

SEQ ID NO: 340135 - RNA, 32 nt, Human
auuuguccuucagaccaaugagcgucagggcc

SEQ ID NO: 340136 - RNA, 32 nt, Human
auuugucgccuccgucugccucuuuggucagu

SEQ ID NO: 340137 - RNA, 32 nt, Human
auuugucucugaccaaccagaaacaucgacgg

SEQ ID NO: 340138 - RNA, 32 nt, Human
auuugucugauuuaggacuuguucuguguuuu

SEQ ID NO: 340139 - RNA, 24 nt, Human
auuugucuggaucagauccgcgcu

SEQ ID NO: 340140 - RNA, 32 nt, Human
auuugucuggaucugagaaccugcauuuggua

SEQ ID NO: 340141 - RNA, 32 nt, Human
auuugucuguuucucauuuacuuccucuuaua

SEQ ID NO: 340142 - RNA, 32 nt, Human
auuugucuuccuauugacucuacuucuuuaaa

SEQ ID NO: 340143 - RNA, 32 nt, Human
auuugucuucuuucugucuuuaagacucaggg

SEQ ID NO: 340144 - RNA, 32 nt, Human
auuugugaaaucggcucaacucccaggugaga

SEQ ID NO: 340145 - RNA, 32 nt, Human
auuugugagaaagguaagaggucugggggcug

SEQ ID NO: 340146 - RNA, 32 nt, Human
auuugugaguccaggaacaauuuacuauuuuu

SEQ ID NO: 340147 - RNA, 32 nt, Human
auuugugauaguauuuucuacuagccauuggg

SEQ ID NO: 340148 - RNA, 32 nt, Human
auuugugcaaaacaaauuccacaccacaugua

SEQ ID NO: 340149 - RNA, 32 nt, Human
auuugugcacacacacagggcucuugggugug

SEQ ID NO: 340150 - RNA, 32 nt, Human
auuugugcaguguggcuucugaccagcugcau

SEQ ID NO: 340151 - RNA, 32 nt, Human
auuugugcauguccuucugccuccccgguggg

SEQ ID NO: 340152 - RNA, 32 nt, Human
auuugugcccuuucccuucuugcugcacccau

SEQ ID NO: 340153 - RNA, 32 nt, Human
auuugugcgaagugccuuaugcuaugagacca

SEQ ID NO: 340154 - RNA, 32 nt, Human
auuuguggaagcucgugugucuucucaacuga

SEQ ID NO: 340155 - RNA, 32 nt, Human
auuuguggaaggagagaggauacacauguaaa

SEQ ID NO: 340156 - RNA, 32 nt, Human
auuuguggagaaaggucuccauggagcgacag

SEQ ID NO: 340157 - RNA, 32 nt, Human
auuuguggagagaacaggagggccagauagau

SEQ ID NO: 340158 - RNA, 32 nt, Human
auuuguggaggaugagaaagaugaagaagaca

SEQ ID NO: 340159 - RNA, 32 nt, Human
auuuguggaguuagguggaagccagauuuuaa

SEQ ID NO: 340160 - RNA, 32 nt, Human
auuuguggcuguaaagcuguagcagcucaggu

SEQ ID NO: 340161 - RNA, 32 nt, Human
auuugugggaagaagagaagcgaggcugggga

SEQ ID NO: 340162 - RNA, 32 nt, Human
auuugugguaaacaccuuucccagggaaccuc

SEQ ID NO: 340163 - RNA, 32 nt, Human
auuugugguacaauaugcuaugugccaaauga

SEQ ID NO: 340164 - RNA, 31 nt, Human
auuuguggucuucauuuacauuuagaauacc

SEQ ID NO: 340165 - RNA, 32 nt, Human
auuugugguuaagguuagacuauaugauccau

SEQ ID NO: 340166 - RNA, 32 nt, Human
auuugugguuuagcccaggagacaucugccuc

SEQ ID NO: 340167 - RNA, 32 nt, Human
auuuguguacuagccucugccgcaggaugggg

SEQ ID NO: 340168 - RNA, 32 nt, Human
auuugugucuuucugaggagacauccucuuca

SEQ ID NO: 340169 - RNA, 32 nt, Human
auuugugugcgugcuugcaugugcugcaggug

SEQ ID NO: 340170 - RNA, 32 nt, Human
auuuguguucugauaucugaggccaguaacua

SEQ ID NO: 340171 - RNA, 32 nt, Human
auuuguguugggggaaauguuguggggguggg

SEQ ID NO: 340172 - RNA, 32 nt, Human
auuuguguuugugaccaagcagccucucccuu

SEQ ID NO: 340173 - RNA, 32 nt, Human
auuuguguuuuuaagaaggcuuugcugcaagc

SEQ ID NO: 340174 - RNA, 32 nt, Human
auuuguuaaccagcuguccugggcuauugaag

SEQ ID NO: 340175 - RNA, 31 nt, Human
auuuguuaaguguccauccaggugggccuac

SEQ ID NO: 340176 - RNA, 32 nt, Human
auuuguuacagggugaccuguucucuagcugu

SEQ ID NO: 340177 - RNA, 32 nt, Human
auuuguuacuauauuacuaugcaaaacuggca

SEQ ID NO: 340178 - RNA, 32 nt, Human
auuuguuacuaucuucuuaauuuguuccaaag

SEQ ID NO: 340179 - RNA, 31 nt, Human
auuuguuagauugucaguuggaagggguuua

SEQ ID NO: 340180 - RNA, 32 nt, Human
auuuguuaggaaacuugugagcauucacacua

SEQ ID NO: 340181 - RNA, 32 nt, Human
auuuguuagggaggauagagaaacagagcacc

SEQ ID NO: 340182 - RNA, 32 nt, Human
auuuguuaucuucuuugccugccuguauuuua

SEQ ID NO: 340183 - RNA, 17 nt, Human
auuuguucacaccuuga

SEQ ID NO: 340184 - RNA, 32 nt, Human
auuuguucaucaaauuacaucauguaauuugg

SEQ ID NO: 340185 - RNA, 32 nt, Human
auuuguuccaauacaaacucacuuuauucuaa

SEQ ID NO: 340186 - RNA, 32 nt, Human
auuuguucccauccucucuguccacagccugg

SEQ ID NO: 340187 - RNA, 32 nt, Human
auuuguuccuggcuucuccauggaacucgguc

SEQ ID NO: 340188 - RNA, 32 nt, Human
auuuguuccuuuaaauuucagaccauguccaa

SEQ ID NO: 340189 - RNA, 32 nt, Human
auuuguucuaucaccccucucccuaucauuaa

SEQ ID NO: 340190 - RNA, 32 nt, Human
auuuguucuccucugcuggugucauuucuuuu

SEQ ID NO: 340191 - RNA, 32 nt, Human
auuuguugaacacagagguuuaacugaucauu

SEQ ID NO: 340192 - RNA, 32 nt, Human
auuuguugaggcuuguuugauagcccaggaua

SEQ ID NO: 340193 - RNA, 32 nt, Human
auuuguugaguauuuuuaaaauuuuggauagu

SEQ ID NO: 340194 - RNA, 32 nt, Human
auuuguugcacugugccuugaagggcagcagg

SEQ ID NO: 340195 - RNA, 32 nt, Human
auuuguuggaugaauguaugcauauguauuca

SEQ ID NO: 340196 - RNA, 32 nt, Human
auuuguuggcugcuugagcugggauauucauc

SEQ ID NO: 340197 - RNA, 32 nt, Human
auuuguuggguaguuaaacuucagagauauuu

SEQ ID NO: 340198 - RNA, 32 nt, Human
auuuguuuaguacacauuaaaggucagaugug

SEQ ID NO: 340199 - RNA, 32 nt, Human
auuuguuuaguuuugcaccaauaaaacugugu

SEQ ID NO: 340200 - RNA, 32 nt, Human
auuuguuuauucacccccugcccaugauuuau

SEQ ID NO: 340201 - RNA, 32 nt, Human
auuuguuuauuuccucaucugagccuuugcca

SEQ ID NO: 340202 - RNA, 32 nt, Human
auuuguuucucaucucuugaggaucacugccc

SEQ ID NO: 340203 - RNA, 32 nt, Human
auuuguuucuucucuucuguguuucgauuuuu

SEQ ID NO: 340204 - RNA, 32 nt, Human
auuuguuuguuugcaauguuacuguaauacua

SEQ ID NO: 340205 - RNA, 32 nt, Human
auuuguuuguuuuuagaacaugagugacaguu

SEQ ID NO: 340206 - RNA, 32 nt, Human
auuuguuuugcaguaucuccccagacuuccug

SEQ ID NO: 340207 - RNA, 32 nt, Human
auuuuaaaaaccagaauuuuaguugcaauaca

SEQ ID NO: 340208 - RNA, 32 nt, Human
auuuuaaaaauuaaggucauuaggaagcaaau

SEQ ID NO: 340209 - RNA, 32 nt, Human
auuuuaaaaauugaauaaccaugugaaauaau

SEQ ID NO: 340210 - RNA, 32 nt, Human
auuuuaaaagagaaguuucuuuucugguuuua

SEQ ID NO: 340211 - RNA, 32 nt, Human
auuuuaaaagccagguaacaccuaccagucca

SEQ ID NO: 340212 - RNA, 32 nt, Human
auuuuaaaagugaaaaauauuaacacagugcu

SEQ ID NO: 340213 - RNA, 32 nt, Human
auuuuaaaauaaccaggcacucacucuuauga

SEQ ID NO: 340214 - RNA, 32 nt, Human
auuuuaaaauuaagugcauagcacucaucuaa

SEQ ID NO: 340215 - RNA, 32 nt, Human
auuuuaaaauuaauccaguuggugaugaggaa

SEQ ID NO: 340216 - RNA, 32 nt, Human
auuuuaaaauuagcugggcgugguggugugua

SEQ ID NO: 340217 - RNA, 32 nt, Human
auuuuaaacaagccaagguuuuccauuaccuu

SEQ ID NO: 340218 - RNA, 32 nt, Human
auuuuaaaccauuucuucuggcccagaagaca

SEQ ID NO: 340219 - RNA, 32 nt, Human
auuuuaaagaauugaccuaaggaaagcuuaug

SEQ ID NO: 340220 - RNA, 32 nt, Human
auuuuaaagaguguaggcaggccaggugcagu

SEQ ID NO: 340221 - RNA, 32 nt, Human
auuuuaaagauaaggaaaucaaacucaaagaa

SEQ ID NO: 340222 - RNA, 32 nt, Human
auuuuaaaggaaacuugcuuacaggaaggauu

SEQ ID NO: 340223 - RNA, 32 nt, Human
auuuuaaaggaaauguugcugugggggauuca

SEQ ID NO: 340224 - RNA, 32 nt, Human
auuuuaaaggccucuggauuuugcucauccag

SEQ ID NO: 340225 - RNA, 32 nt, Human
auuuuaaauccaguacuguacacugaguuaau

SEQ ID NO: 340226 - RNA, 32 nt, Human
auuuuaaauggaauggaaugagcuccauagau

SEQ ID NO: 340227 - RNA, 32 nt, Human
auuuuaaaugugaccauuuuucugguaugaau

SEQ ID NO: 340228 - RNA, 32 nt, Human
auuuuaaccaauugauuuuauguugcaauuua

SEQ ID NO: 340229 - RNA, 32 nt, Human
auuuuaacuauaauuuuaacugugauauaggc

SEQ ID NO: 340230 - RNA, 32 nt, Human
auuuuaagaagguacuuuauacauuuauuuaa

SEQ ID NO: 340231 - RNA, 32 nt, Human
auuuuaagaccaccauugcugauauugaaacu

SEQ ID NO: 340232 - RNA, 22 nt, Human
auuuuaagacugaaagugaaau

SEQ ID NO: 340233 - RNA, 32 nt, Human
auuuuaagauucagcauuugaaagauuucccu

SEQ ID NO: 340234 - RNA, 32 nt, Human
auuuuaagcaagaaguucuauuuaauggagau

SEQ ID NO: 340235 - RNA, 32 nt, Human
auuuuaagcuguucaugcugggacugacagcc

SEQ ID NO: 340236 - RNA, 32 nt, Human
auuuuaaggacccaggagguggggcagaagag

SEQ ID NO: 340237 - RNA, 32 nt, Human
auuuuaaggagacagaauccaacagggcuggg

SEQ ID NO: 340238 - RNA, 32 nt, Human
auuuuaaguccuuucguauaagaauuaaugag

SEQ ID NO: 340239 - RNA, 32 nt, Human
auuuuaagugauauuaaauuaugucaauaguu

SEQ ID NO: 340240 - RNA, 32 nt, Human
auuuuaauaagaauuacaaagacaauggcaua

SEQ ID NO: 340241 - RNA, 32 nt, Human
auuuuaauagcaacuguguacaugucacgaaa

SEQ ID NO: 340242 - RNA, 32 nt, Human
auuuuaauauuaaaauacaguugauuagcaac

SEQ ID NO: 340243 - RNA, 31 nt, Human
auuuuaaucaauaaaguaugucuguugaagc

SEQ ID NO: 340244 - RNA, 32 nt, Human
auuuuaaucauaguuaccuaagcagcaugcau

SEQ ID NO: 340245 - RNA, 32 nt, Human
auuuuaauccagacaucucugcuaacaagccu

SEQ ID NO: 340246 - RNA, 32 nt, Human
auuuuaauccccuuuauuggagguggggccug

SEQ ID NO: 340247 - RNA, 32 nt, Human
auuuuaauccuuuucaaguggaauggcuuaga

SEQ ID NO: 340248 - RNA, 32 nt, Human
auuuuaaugcauggaaaagcuguccauguucc

SEQ ID NO: 340249 - RNA, 31 nt, Human
auuuuaaugguauacucauguugaaagauaa

SEQ ID NO: 340250 - RNA, 32 nt, Human
auuuuaauguuuucagucauugcuuugguuau

SEQ ID NO: 340251 - RNA, 32 nt, Human
auuuuaauuagcugggugugguggcucaagcc

SEQ ID NO: 340252 - RNA, 32 nt, Human
auuuuaauuuucugcucugaguauuuaguaac

SEQ ID NO: 340253 - RNA, 32 nt, Human
auuuuaauuuuucugucuuuguuuucauaaga

SEQ ID NO: 340254 - RNA, 32 nt, Human
auuuuacaaaacugaggcuuagugagguucag

SEQ ID NO: 340255 - RNA, 32 nt, Human
auuuuacaaaccugaaauaugugccacauuga

SEQ ID NO: 340256 - RNA, 32 nt, Human
auuuuacaaagcaguuuucugaauggggauua

SEQ ID NO: 340257 - RNA, 32 nt, Human
auuuuacaaagcuucuaccacucugaaucaac

SEQ ID NO: 340258 - RNA, 32 nt, Human
auuuuacaauccagggauuguucaggccaugu

SEQ ID NO: 340259 - RNA, 32 nt, Human
auuuuacaauugcacgcuuucaaguuauuaaa

SEQ ID NO: 340260 - RNA, 32 nt, Human
auuuuacacagcaauuuuguauccauuuaaac

SEQ ID NO: 340261 - RNA, 32 nt, Human
auuuuacacagcaccacagugaauccagacca

SEQ ID NO: 340262 - RNA, 32 nt, Human
auuuuacagagcuugaaaacucacuucaauga

SEQ ID NO: 340263 - RNA, 32 nt, Human
auuuuacagcaaaaucagauuuauagauaaaa

SEQ ID NO: 340264 - RNA, 26 nt, Human
auuuuacagcccugcuacuuuugcuu

SEQ ID NO: 340265 - RNA, 32 nt, Human
auuuuacaguccugacaacuguguacaccuag

SEQ ID NO: 340266 - RNA, 32 nt, Human
auuuuacauagcuucagaccuuguccagaaaa

SEQ ID NO: 340267 - RNA, 32 nt, Human
auuuuacauauguaaaugguauguuucaauaa

SEQ ID NO: 340268 - RNA, 32 nt, Human
auuuuacaucucacaauguacuguuuacaugg

SEQ ID NO: 340269 - RNA, 32 nt, Human
auuuuacaugauuucaaaauaaaguugauugu

SEQ ID NO: 340270 - RNA, 32 nt, Human
auuuuaccaaagcaucaauacaaccagcccaa

SEQ ID NO: 340271 - RNA, 32 nt, Human
auuuuaccacugcacuccagcuugggcgacgg

SEQ ID NO: 340272 - RNA, 32 nt, Human
auuuuaccagcauuauuguaguuuaaugauug

SEQ ID NO: 340273 - RNA, 32 nt, Human
auuuuaccaggucgugcacacacacaagccgc

SEQ ID NO: 340274 - RNA, 32 nt, Human
auuuuaccaugauguuuuaaucucagguaaau

SEQ ID NO: 340275 - RNA, 32 nt, Human
auuuuaccccaucccugcaugacugugaagcu

SEQ ID NO: 340276 - RNA, 32 nt, Human
auuuuacgaagcucuguguucucaacgcccuc

SEQ ID NO: 340277 - RNA, 32 nt, Human
auuuuacgguaugcuuugcccauuccaucgag

SEQ ID NO: 340278 - RNA, 32 nt, Human
auuuuacuacucgaagaaaggcagaagaaguu

SEQ ID NO: 340279 - RNA, 32 nt, Human
auuuuacugaaguggagggaagaggugaaugc

SEQ ID NO: 340280 - RNA, 32 nt, Human
auuuuacugccaccaucugucuuaaaucuauu

SEQ ID NO: 340281 - RNA, 32 nt, Human
auuuuacugcugauuucacagcuccuucagcu

SEQ ID NO: 340282 - RNA, 32 nt, Human
auuuuacuucauccuccaaggaguucaaucac

SEQ ID NO: 340283 - RNA, 32 nt, Human
auuuuacuucgucuuggccagaauucacaaug

SEQ ID NO: 340284 - RNA, 32 nt, Human
auuuuacuucuaaaggagagaaugucaaaaag

SEQ ID NO: 340285 - RNA, 32 nt, Human
auuuuacuuugcuuuuaacauuuccuuggggu

SEQ ID NO: 340286 - RNA, 32 nt, Human
auuuuacuuuuuaaaaugacauuccuacugau

SEQ ID NO: 340287 - RNA, 32 nt, Human
auuuuagaaauguggaaauggaggcaucaggc

SEQ ID NO: 340288 - RNA, 32 nt, Human
auuuuagaaggugaggggaggggaggcuuuuu

SEQ ID NO: 340289 - RNA, 32 nt, Human
auuuuagacuuuguuucucagcucuguacaaa

SEQ ID NO: 340290 - RNA, 32 nt, Human
auuuuagagacagggucucgcucugucaccca

SEQ ID NO: 340291 - RNA, 32 nt, Human
auuuuagagccaaguuaacaaguacuucagga

SEQ ID NO: 340292 - RNA, 32 nt, Human
auuuuagagcuuucagcagccuuuuuaagaga

SEQ ID NO: 340293 - RNA, 32 nt, Human
auuuuagaggccaaggcaggaggaucacuugg

SEQ ID NO: 340294 - RNA, 32 nt, Human
auuuuagaucaugucuggagggaagucagccc

SEQ ID NO: 340295 - RNA, 32 nt, Human
auuuuagcacccagauggcauugcagugccag

SEQ ID NO: 340296 - RNA, 32 nt, Human
auuuuagccaguguccaggcuaucagcagaga

SEQ ID NO: 340297 - RNA, 32 nt, Human
auuuuagccaugccugcuccucugccuggacc

SEQ ID NO: 340298 - RNA, 32 nt, Human
auuuuagccugcuauaugucaugguuuuaacu

SEQ ID NO: 340299 - RNA, 32 nt, Human
auuuuagcucacuacaaccuccacuuuccagg

SEQ ID NO: 340300 - RNA, 32 nt, Human
auuuuagcuggauaacuuacugcuuuuaucug

SEQ ID NO: 340301 - RNA, 32 nt, Human
auuuuagcuguuucagcaucaauccaacuuaa

SEQ ID NO: 340302 - RNA, 32 nt, Human
auuuuaggcagggauuugaggagcagcuucag

SEQ ID NO: 340303 - RNA, 32 nt, Human
auuuuaggcugcaggggagggcagggcugggg

SEQ ID NO: 340304 - RNA, 32 nt, Human
auuuuagggacagggucuugcucuguugccaa

SEQ ID NO: 340305 - RNA, 32 nt, Human
auuuuagggaccuugcaguuugcacauaauug

SEQ ID NO: 340306 - RNA, 32 nt, Human
auuuuagggccugugaccaaaaaugaagcuug

SEQ ID NO: 340307 - RNA, 32 nt, Human
auuuuagguauguagagcaaguugaaaaugga

SEQ ID NO: 340308 - RNA, 32 nt, Human
auuuuaguauccucaggaguccuggaaccaac

SEQ ID NO: 340309 - RNA, 32 nt, Human
auuuuaguauuaaaauacauguaaagaucagg

SEQ ID NO: 340310 - RNA, 32 nt, Human
auuuuagucuuuuaagcaaaguuuacgaauga

SEQ ID NO: 340311 - RNA, 32 nt, Human
auuuuaguucacugcaacuuccgcuucccagg

SEQ ID NO: 340312 - RNA, 32 nt, Human
auuuuauaaauggugcugggauaacugggaua

SEQ ID NO: 340313 - RNA, 32 nt, Human
auuuuauaacuauaacuacuaguagaaauaua

SEQ ID NO: 340314 - RNA, 32 nt, Human
auuuuauaaguauauaaaaagcauuagguuca

SEQ ID NO: 340315 - RNA, 32 nt, Human
auuuuauacaaacuccguacaccuaagaugug

SEQ ID NO: 340316 - RNA, 32 nt, Human
auuuuauacaguauuuguuuuguuuugguuuu

SEQ ID NO: 340317 - RNA, 32 nt, Human
auuuuauaccagaacucagcaggcauuggcuc

SEQ ID NO: 340318 - RNA, 32 nt, Human
auuuuauacucagcagaagacagggaaauuua

SEQ ID NO: 340319 - RNA, 32 nt, Human
auuuuauaggcucauaggcugaagggacuugc

SEQ ID NO: 340320 - RNA, 32 nt, Human
auuuuauaggggauacuugaaaccaguauuua

SEQ ID NO: 340321 - RNA, 32 nt, Human
auuuuauccagccugcuucuccagccuucuag

SEQ ID NO: 340322 - RNA, 32 nt, Human
auuuuaucccuaaugccuucucucaacucugc

SEQ ID NO: 340323 - RNA, 32 nt, Human
auuuuaucccuuuuuguaaucaucucaucuca

SEQ ID NO: 340324 - RNA, 32 nt, Human
auuuuauccuucagaaccucacuuuucuauuu

SEQ ID NO: 340325 - RNA, 32 nt, Human
auuuuaucuuuuccuuucaggguuuuguccuc

SEQ ID NO: 340326 - RNA, 32 nt, Human
auuuuaugaagacauugcccauuuuuacuucc

SEQ ID NO: 340327 - RNA, 32 nt, Human
auuuuaugaccccuacuugcaggauguggucg

SEQ ID NO: 340328 - RNA, 32 nt, Human
auuuuaugcacuccaaccaugaauuuaaacua

SEQ ID NO: 340329 - RNA, 32 nt, Human
auuuuauggauggggaaacaggcucuaagaca

SEQ ID NO: 340330 - RNA, 32 nt, Human
auuuuaugugagagaaaaguuggaugcucacg

SEQ ID NO: 340331 - RNA, 32 nt, Human
auuuuaugugcaaagaaaagauuucaccauua

SEQ ID NO: 340332 - RNA, 32 nt, Human
auuuuauguuggccucaguuguacuagaaaag

SEQ ID NO: 340333 - RNA, 32 nt, Human
auuuuauguuguguuuucuacuuuucucaucu

SEQ ID NO: 340334 - RNA, 32 nt, Human
auuuuauuauaguaaugugacuuggauucaau

SEQ ID NO: 340335 - RNA, 32 nt, Human
auuuuauuauauacuaaaacaaaaaggauuuu

SEQ ID NO: 340336 - RNA, 32 nt, Human
auuuuauuauguaaucauguucugguaugucu

SEQ ID NO: 340337 - RNA, 32 nt, Human
auuuuauucaaaggaauuguaaaccuuaaacc

SEQ ID NO: 340338 - RNA, 32 nt, Human
auuuuauucaagauugugcucuucuaucaaaa

SEQ ID NO: 340339 - RNA, 31 nt, Human
auuuuauucaauaaauacuuaaaaugaaaaa

SEQ ID NO: 340340 - RNA, 32 nt, Human
auuuuauucuguagcauggagaaugggugcaa

SEQ ID NO: 340341 - RNA, 32 nt, Human
auuuuauugaagaucuccuaugugccagaggu

SEQ ID NO: 340342 - RNA, 32 nt, Human
auuuuauugaaggugacuacauuuuauuaguu

SEQ ID NO: 340343 - RNA, 32 nt, Human
auuuuauugagcccagaccacaugcaguuuuc

SEQ ID NO: 340344 - RNA, 32 nt, Human
auuuuauugcagucuuccauuacauggaaaua

SEQ ID NO: 340345 - RNA, 32 nt, Human
auuuuauugcauuucaaaaacaugcuaggaac

SEQ ID NO: 340346 - RNA, 32 nt, Human
auuuuauugccuggaucugcuuuaaagacaau

SEQ ID NO: 340347 - RNA, 32 nt, Human
auuuuauuuaggauugggagcagggaaaggag

SEQ ID NO: 340348 - RNA, 32 nt, Human
auuuuauuugacuuauagagaauagcauauag

SEQ ID NO: 340349 - RNA, 32 nt, Human
auuuuauuuggugcauuucugcucuggguaua

SEQ ID NO: 340350 - RNA, 32 nt, Human
auuuuauuuuuacccuugcaugacauuuucau

SEQ ID NO: 340351 - RNA, 32 nt, Human
auuuucaaaccagcuuuacacccuucaggaaa

SEQ ID NO: 340352 - RNA, 24 nt, Human
auuuucaaaguaagucucugcccu

SEQ ID NO: 340353 - RNA, 32 nt, Human
auuuucaaaugaccacccacagagguauuaaa

SEQ ID NO: 340354 - RNA, 32 nt, Human
auuuucaacugcuuugaaacuugccugggguc

SEQ ID NO: 340355 - RNA, 32 nt, Human
auuuucaaguucaagacuuaacucaggguuca

SEQ ID NO: 340356 - RNA, 31 nt, Human
auuuucaauacuucuuuaaauuuaaaauaaa

SEQ ID NO: 340357 - RNA, 32 nt, Human
auuuucaaucuggcaggaguagaaagaugcuc

SEQ ID NO: 340358 - RNA, 32 nt, Human
auuuucaaugugaucaguucuagaccuagaag

SEQ ID NO: 340359 - RNA, 32 nt, Human
auuuucacaagaagcacuuauuuuagccauag

SEQ ID NO: 340360 - RNA, 32 nt, Human
auuuucacaagugggucucccuuguccgggac

SEQ ID NO: 340361 - RNA, 32 nt, Human
auuuucacaauccucucuucccucaccagaag

SEQ ID NO: 340362 - RNA, 17 nt, Human
auuuucacacaccuuga

SEQ ID NO: 340363 - RNA, 32 nt, Human
auuuucacacaugaaagugaacaguggaauau

SEQ ID NO: 340364 - RNA, 32 nt, Human
auuuucacugguguuuccuucuuaaaguauug

SEQ ID NO: 340365 - RNA, 32 nt, Human
auuuucacuguagugucauccccucacaggcu

SEQ ID NO: 340366 - RNA, 32 nt, Human
auuuucagaaugacugacacugccgaagcugu

SEQ ID NO: 340367 - RNA, 32 nt, Human
auuuucagaaugcagaugcguuccuucagagc

SEQ ID NO: 340368 - RNA, 32 nt, Human
auuuucagagcuuaucucugaagaucuaaacu

SEQ ID NO: 340369 - RNA, 32 nt, Human
auuuucagaggaugagaaauagcugguuucca

SEQ ID NO: 340370 - RNA, 32 nt, Human
auuuucagcaaagugcuccaaaugccuuuuuc

SEQ ID NO: 340371 - RNA, 32 nt, Human
auuuucagcaccucaccuucuuuucugcaucu

SEQ ID NO: 340372 - RNA, 32 nt, Human
auuuucagcacuaccucugagccaugggguug

SEQ ID NO: 340373 - RNA, 32 nt, Human
auuuucagccaucuuugaagcuugaaagaaga

SEQ ID NO: 340374 - RNA, 32 nt, Human
auuuucagcguauagaucccuaugcauuuuug

SEQ ID NO: 340375 - RNA, 32 nt, Human
auuuucagcucucaaaggcaaaggacacuccu

SEQ ID NO: 340376 - RNA, 32 nt, Human
auuuucagcucugcuauaaucuuaugggacca

SEQ ID NO: 340377 - RNA, 32 nt, Human
auuuucaggacucaaacuaccacaaugaacag

SEQ ID NO: 340378 - RNA, 32 nt, Human
auuuucaggcuugguuuccacauucgagguag

SEQ ID NO: 340379 - RNA, 32 nt, Human
auuuucagguuucuuaaaaacagcuguaacua

SEQ ID NO: 340380 - RNA, 32 nt, Human
auuuucagugaucucauuugaaugauuuauag

SEQ ID NO: 340381 - RNA, 32 nt, Human
auuuucaguggacaaugggaauaaagcauuuc

SEQ ID NO: 340382 - RNA, 32 nt, Human
auuuucaguggguaggauguucugagcaguga

SEQ ID NO: 340383 - RNA, 32 nt, Human
auuuucaguuuaguguagcagcacacuuguuc

SEQ ID NO: 340384 - RNA, 32 nt, Human
auuuucauauccacuuccccaccacugaaaua

SEQ ID NO: 340385 - RNA, 32 nt, Human
auuuucaucacagaggagugggagaggggaca

SEQ ID NO: 340386 - RNA, 32 nt, Human
auuuucaucacugaaagucagaggccaacgaa

SEQ ID NO: 340387 - RNA, 32 nt, Human
auuuucauccucagugcuguacagaucuauuu

SEQ ID NO: 340388 - RNA, 32 nt, Human
auuuucaucuuucccccaaaccuccuuuaaag

SEQ ID NO: 340389 - RNA, 32 nt, Human
auuuucauuuuucucaagcucuccaauaaaua

SEQ ID NO: 340390 - RNA, 32 nt, Human
auuuuccaauuguuuucauucuuucugaaguu

SEQ ID NO: 340391 - RNA, 32 nt, Human
auuuuccacagcuguuuauucuuguuugacuu

SEQ ID NO: 340392 - RNA, 32 nt, Human
auuuuccagccuucugucagcagugaaacuua

SEQ ID NO: 340393 - RNA, 32 nt, Human
auuuuccaggagacuuggcuugcacugagagc

SEQ ID NO: 340394 - RNA, 32 nt, Human
auuuuccaggauaacugugacuccaggcccgc

SEQ ID NO: 340395 - RNA, 22 nt, Human
auuuuccagucuacuuuggggu

SEQ ID NO: 340396 - RNA, 32 nt, Human
auuuuccagucuccaguggccccggggucuuu

SEQ ID NO: 340397 - RNA, 32 nt, Human
auuuuccagugauugcuuuggccuguacaacc

SEQ ID NO: 340398 - RNA, 31 nt, Human
auuuuccaguuucaaguaccuauucaaaauu

SEQ ID NO: 340399 - RNA, 32 nt, Human
auuuuccauacagaacaacagccagagcagcu

SEQ ID NO: 340400 - RNA, 32 nt, Human
auuuucccaacaaguagaaacacuuaaaauca

SEQ ID NO: 340401 - RNA, 32 nt, Human
auuuucccaaccaauagaaacuauuuauugua

SEQ ID NO: 340402 - RNA, 32 nt, Human
auuuucccacagacuuccuggccuccugugac

SEQ ID NO: 340403 - RNA, 32 nt, Human
auuuucccaccugaccucccugccucagcagc

SEQ ID NO: 340404 - RNA, 32 nt, Human
auuuucccagaacagaagcaccaagaaaauua

SEQ ID NO: 340405 - RNA, 32 nt, Human
auuuucccagcccuaaauaugaaucauggggc

SEQ ID NO: 340406 - RNA, 32 nt, Human
auuuuccccagcuggccuggacugccugugcu

SEQ ID NO: 340407 - RNA, 20 nt, Human
auuuuccccaucccucugca

SEQ ID NO: 340408 - RNA, 28 nt, Human
auuuuccccgaggacaucuuucucugca

SEQ ID NO: 340409 - RNA, 32 nt, Human
auuuuccccgaggacaucuuucucugcaaguu

SEQ ID NO: 340410 - RNA, 19 nt, Human
auuuuccccuacacuuugu

SEQ ID NO: 340411 - RNA, 26 nt, Human
auuuuccccuccccaccccucuuugc

SEQ ID NO: 340412 - RNA, 32 nt, Human
auuuucccgacgaucuuccuggcuccaacacu

SEQ ID NO: 340413 - RNA, 32 nt, Human
auuuucccuccaggaccaccuugguuucuagg

SEQ ID NO: 340414 - RNA, 32 nt, Human
auuuucccuccugggaccagagcugacuccau

SEQ ID NO: 340415 - RNA, 32 nt, Human
auuuucccugcaguccccuugguuuguaaauu

SEQ ID NO: 340416 - RNA, 32 nt, Human
auuuucccugcucuuccucaguuguccggggc

SEQ ID NO: 340417 - RNA, 32 nt, Human
auuuucccuuucuacuuuuuaugagagccagu

SEQ ID NO: 340418 - RNA, 32 nt, Human
auuuuccgaaggagguggguugggagaaauau

SEQ ID NO: 340419 - RNA, 32 nt, Human
auuuuccgggaaauauuuccaguguuuauuug

SEQ ID NO: 340420 - RNA, 32 nt, Human
auuuuccgggaauauaauauuucuugaaugaa

SEQ ID NO: 340421 - RNA, 22 nt, Human
auuuuccguagugcucugggug

SEQ ID NO: 340422 - RNA, 32 nt, Human
auuuuccuaaggaggacuacagauggauuaaa

SEQ ID NO: 340423 - RNA, 32 nt, Human
auuuuccuaaguguuuacuaugugccaguucc

SEQ ID NO: 340424 - RNA, 32 nt, Human
auuuuccuacggcguuagcacuuuaagcacau

SEQ ID NO: 340425 - RNA, 32 nt, Human
auuuuccuccauccucagaccgugacaucucc

SEQ ID NO: 340426 - RNA, 32 nt, Human
auuuuccuccauucucuuucuucaccucuuga

SEQ ID NO: 340427 - RNA, 32 nt, Human
auuuuccugcaggcuuuuccaugaguauuauu

SEQ ID NO: 340428 - RNA, 32 nt, Human
auuuuccugcugucuucugugcguuuaguuuu

SEQ ID NO: 340429 - RNA, 31 nt, Human
auuuuccuggagguauuagccaacacaguua

SEQ ID NO: 340430 - RNA, 32 nt, Human
auuuuccugggcagguuuauguugauguuuac

SEQ ID NO: 340431 - RNA, 32 nt, Human
auuuuccuguaaucacaggaugacucaggaug

SEQ ID NO: 340432 - RNA, 32 nt, Human
auuuuccuucaaguguucaagucuaaugaaga

SEQ ID NO: 340433 - RNA, 32 nt, Human
auuuuccuuccagaaaaaugguaaugcuucug

SEQ ID NO: 340434 - RNA, 25 nt, Human
auuuuccuuuaucuuucuccuggca

SEQ ID NO: 340435 - RNA, 32 nt, Human
auuuucgcucugucucccagguuggagugcag

SEQ ID NO: 340436 - RNA, 32 nt, Human
auuuucguggaauucauguugcucugacggga

SEQ ID NO: 340437 - RNA, 19 nt, Human
auuuucuaaaugccucccu

SEQ ID NO: 340438 - RNA, 32 nt, Human
auuuucuaagacaguccucuggauccucuaaa

SEQ ID NO: 340439 - RNA, 32 nt, Human
auuuucuagagucacuguauaagggucuauga

SEQ ID NO: 340440 - RNA, 32 nt, Human
auuuucuaguaacccaggucuaaaguagcuac

SEQ ID NO: 340441 - RNA, 32 nt, Human
auuuucuauaagaaaaaggaaaaguugagggg

SEQ ID NO: 340442 - RNA, 32 nt, Human
auuuucuaugugaaguuuccugguuuuaaaau

SEQ ID NO: 340443 - RNA, 32 nt, Human
auuuucucaagcaauuuuuaaauuucauucau

SEQ ID NO: 340444 - RNA, 31 nt, Human
auuuucucacauaaauacugaggaagacccu

SEQ ID NO: 340445 - RNA, 32 nt, Human
auuuucucagccucuucucugccuccagagag

SEQ ID NO: 340446 - RNA, 32 nt, Human
auuuucucauucucuagugauuaccuucauac

SEQ ID NO: 340447 - RNA, 32 nt, Human
auuuucuccagccucugagacuaucgcucuua

SEQ ID NO: 340448 - RNA, 32 nt, Human
auuuucucccacccucggcccucuuguuuuua

SEQ ID NO: 340449 - RNA, 32 nt, Human
auuuucuccuagauuuucucauguuaugccau

SEQ ID NO: 340450 - RNA, 32 nt, Human
auuuucucucacucuuuaauuauuuucagcuu

SEQ ID NO: 340451 - RNA, 32 nt, Human
auuuucucuccccagccauucagagguuucca

SEQ ID NO: 340452 - RNA, 32 nt, Human
auuuucucuccuccuuucaaguuguucagccu

SEQ ID NO: 340453 - RNA, 32 nt, Human
auuuucucuccucgaguugcuccucauggcug

SEQ ID NO: 340454 - RNA, 32 nt, Human
auuuucucucuccaaaaugauaaaaacaauaa

SEQ ID NO: 340455 - RNA, 32 nt, Human
auuuucucugcagcuuauucuugccaugcuua

SEQ ID NO: 340456 - RNA, 32 nt, Human
auuuucucuggcccucuaccuugcuuccuggg

SEQ ID NO: 340457 - RNA, 32 nt, Human
auuuucucugucagauccccacucuauaccaa

SEQ ID NO: 340458 - RNA, 32 nt, Human
auuuucucuguggaaaacaucagccauuacau

SEQ ID NO: 340459 - RNA, 32 nt, Human
auuuucucuuccugccaagaacuaggugaauc

SEQ ID NO: 340460 - RNA, 32 nt, Human
auuuucucuuucuuuaaaugccuuuugggugu

SEQ ID NO: 340461 - RNA, 32 nt, Human
auuuucucuuugucugauuuggaaaaggaacu

SEQ ID NO: 340462 - RNA, 32 nt, Human
auuuucugaaggcagagauaucuacuguauaa

SEQ ID NO: 340463 - RNA, 32 nt, Human
auuuucugaaucugcaaucauuccuuugacaa

SEQ ID NO: 340464 - RNA, 32 nt, Human
auuuucugaugagacuagagugacaguguuuc

SEQ ID NO: 340465 - RNA, 32 nt, Human
auuuucugauguuccgccccacugugaagagu

SEQ ID NO: 340466 - RNA, 32 nt, Human
auuuucugcaccuucugauuuuacuuaagcag

SEQ ID NO: 340467 - RNA, 32 nt, Human
auuuucugcauuauagccucucauuuuccaug

SEQ ID NO: 340468 - RNA, 32 nt, Human
auuuucugccagccccucuccccagcuuauuu

SEQ ID NO: 340469 - RNA, 31 nt, Human
auuuucugccucuuugugugucuauuaaucu

SEQ ID NO: 340470 - RNA, 32 nt, Human
auuuucugcuuggaccucuuugguucucuccc

SEQ ID NO: 340471 - RNA, 32 nt, Human
auuuucugggccaguuucccugccuuauuuua

SEQ ID NO: 340472 - RNA, 32 nt, Human
auuuucuggugagguggguuugggaggaaaga

SEQ ID NO: 340473 - RNA, 32 nt, Human
auuuucuguccuuuuaaacuaaacccaaaaau

SEQ ID NO: 340474 - RNA, 32 nt, Human
auuuucugugccugaauauuuguuauguagau

SEQ ID NO: 340475 - RNA, 32 nt, Human
auuuucuguggcuccagugagaacaaggcuuu

SEQ ID NO: 340476 - RNA, 32 nt, Human
auuuucuguguguacauguacaugcauuuuuc

SEQ ID NO: 340477 - RNA, 32 nt, Human
auuuucuguuuguccccaccuccccagccuuc

SEQ ID NO: 340478 - RNA, 32 nt, Human
auuuucuuacccuucuggagugcauaugugcc

SEQ ID NO: 340479 - RNA, 32 nt, Human
auuuucuuauaccucaaacccaccucacagga

SEQ ID NO: 340480 - RNA, 32 nt, Human
auuuucuuauuaucuucuucucccucuagaau

SEQ ID NO: 340481 - RNA, 32 nt, Human
auuuucuucauacucugguucccuuucuacaa

SEQ ID NO: 340482 - RNA, 32 nt, Human
auuuucuucccuucccuucccuucccuuuccu

SEQ ID NO: 340483 - RNA, 32 nt, Human
auuuucuucuaugccuuaggcuucgaugguuc

SEQ ID NO: 340484 - RNA, 32 nt, Human
auuuucuucucuuccucucaggcuaggcuuuc

SEQ ID NO: 340485 - RNA, 32 nt, Human
auuuucuucucuucugaaaguucuggcuugua

SEQ ID NO: 340486 - RNA, 32 nt, Human
auuuucuucugacuucuuggcuaacuuccaga

SEQ ID NO: 340487 - RNA, 32 nt, Human
auuuucuucugugcuucucucuaucugcucug

SEQ ID NO: 340488 - RNA, 32 nt, Human
auuuucuucuugaaauuagaugccauauuagg

SEQ ID NO: 340489 - RNA, 32 nt, Human
auuuucuugccuccuuugcuucaucuuuucac

SEQ ID NO: 340490 - RNA, 32 nt, Human
auuuucuuggagcugggguuugaauaggaacc

SEQ ID NO: 340491 - RNA, 32 nt, Human
auuuucuuguacaacugguacacacuaauaaa

SEQ ID NO: 340492 - RNA, 32 nt, Human
auuuucuuguacucucuguacuccucaagcac

SEQ ID NO: 340493 - RNA, 32 nt, Human
auuuucuuguauacagggagagugagauaacu

SEQ ID NO: 340494 - RNA, 32 nt, Human
auuuucuuguguagcuucccagauuugcaaac

SEQ ID NO: 340495 - RNA, 32 nt, Human
auuuucuuucaguuuaguucagugcaugcacu

SEQ ID NO: 340496 - RNA, 32 nt, Human
auuuucuuuccucccuaaacacugaccucccg

SEQ ID NO: 340497 - RNA, 32 nt, Human
auuuucuuucuuuccucucccggcguugauga

SEQ ID NO: 340498 - RNA, 32 nt, Human
auuuucuuugggcauaacagucagacuuguug

SEQ ID NO: 340499 - RNA, 25 nt, Human
auuuucuuuugguuucuucuuuaca

SEQ ID NO: 340500 - RNA, 32 nt, Human
auuuugaaaggauuauuuuguaaggaauaacu

SEQ ID NO: 340501 - RNA, 32 nt, Human
auuuugaaauuucugaaucgagcuagagcgag

SEQ ID NO: 340502 - RNA, 19 nt, Human
auuuugaacaaaagaaauu

SEQ ID NO: 340503 - RNA, 32 nt, Human
auuuugaacagauuaugcaacauuggaaggaa

SEQ ID NO: 340504 - RNA, 32 nt, Human
auuuugaaccuaaaaagcacucagggaaaugc

SEQ ID NO: 340505 - RNA, 32 nt, Human
auuuugaacuguuuuguccucucuggccauaa

SEQ ID NO: 340506 - RNA, 32 nt, Human
auuuugaagaagcuagggucuggagggacaga

SEQ ID NO: 340507 - RNA, 32 nt, Human
auuuugaagcuucaaacuuagugcugcugcag

SEQ ID NO: 340508 - RNA, 32 nt, Human
auuuugaauagggguugaguaaaauaaggcug

SEQ ID NO: 340509 - RNA, 32 nt, Human
auuuugaauauguacauauuauaaauauguug

SEQ ID NO: 340510 - RNA, 32 nt, Human
auuuugaauccacgagcacugcagcccuccac

SEQ ID NO: 340511 - RNA, 32 nt, Human
auuuugaaucuccccuuuccucucacaauacu

SEQ ID NO: 340512 - RNA, 32 nt, Human
auuuugaauguucucuuuggcaacuuauccau

SEQ ID NO: 340513 - RNA, 32 nt, Human
auuuugaauuuaggcugggugcaguggcucac

SEQ ID NO: 340514 - RNA, 32 nt, Human
auuuugacaauguuguaaguguuuaccaagcc

SEQ ID NO: 340515 - RNA, 32 nt, Human
auuuugacaucaaggaugaguucuguguuccc

SEQ ID NO: 340516 - RNA, 32 nt, Human
auuuugaccaaacauggauaaagauuaagcuu

SEQ ID NO: 340517 - RNA, 32 nt, Human
auuuugaccaaccuucuucuaacaaggugcuc

SEQ ID NO: 340518 - RNA, 32 nt, Human
auuuugacucaauccuuuucuggaccauuuuu

SEQ ID NO: 340519 - RNA, 32 nt, Human
auuuugacuguacuaacuauaaauguaaugaa

SEQ ID NO: 340520 - RNA, 32 nt, Human
auuuugagaacuaauaaaugcaccuuaauggu

SEQ ID NO: 340521 - RNA, 32 nt, Human
auuuugagaauuccucccagugauggucagua

SEQ ID NO: 340522 - RNA, 32 nt, Human
auuuugagacuguucgggaggaaaaguuccuc

SEQ ID NO: 340523 - RNA, 32 nt, Human
auuuugagaggugggugauaugugagagagaa

SEQ ID NO: 340524 - RNA, 32 nt, Human
auuuugagaugguggaaucuguggaaacuuuc

SEQ ID NO: 340525 - RNA, 32 nt, Human
auuuugagcaaaccacauaaucucucuagguc

SEQ ID NO: 340526 - RNA, 32 nt, Human
auuuugagcagcacaguccaauucuuuaacua

SEQ ID NO: 340527 - RNA, 32 nt, Human
auuuugagcccccauuccaccacaguuuccug

SEQ ID NO: 340528 - RNA, 32 nt, Human
auuuugagcuaucaaaaugucuuuguaauuuu

SEQ ID NO: 340529 - RNA, 32 nt, Human
auuuugaggaaaggaagaaacacugagacagg

SEQ ID NO: 340530 - RNA, 32 nt, Human
auuuugaggaagaggugauggcggcaggcaau

SEQ ID NO: 340531 - RNA, 32 nt, Human
auuuugaggaggucagcccacccuggaaugua

SEQ ID NO: 340532 - RNA, 32 nt, Human
auuuugaguucuguucauccuacccuaaugcc

SEQ ID NO: 340533 - RNA, 32 nt, Human
auuuugauaaaaugccacaaaauaagggcuau

SEQ ID NO: 340534 - RNA, 32 nt, Human
auuuugauggacugugcugcaguaucaccaga

SEQ ID NO: 340535 - RNA, 32 nt, Human
auuuugauuauugugcagaaacugacagaauu

SEQ ID NO: 340536 - RNA, 32 nt, Human
auuuugcaacuguauucauacaugucaaacac

SEQ ID NO: 340537 - RNA, 32 nt, Human
auuuugcaacuuguugguguggaucuauuggc

SEQ ID NO: 340538 - RNA, 21 nt, Human
auuuugcaagucaagugacca

SEQ ID NO: 340539 - RNA, 32 nt, Human
auuuugcaauguuaaagaugcacagaauaugu

SEQ ID NO: 340540 - RNA, 32 nt, Human
auuuugcacaaacuagucauuggucucuuuaa

SEQ ID NO: 340541 - RNA, 32 nt, Human
auuuugcacaugcugcccuaagaaucacugcu

SEQ ID NO: 340542 - RNA, 24 nt, Human
auuuugcacggcgcccucccucua

SEQ ID NO: 340543 - RNA, 21 nt, Human
auuuugcacggucucccccuc

SEQ ID NO: 340544 - RNA, 31 nt, Human
auuuugcagaaucugcaccuacagcucaaua

SEQ ID NO: 340545 - RNA, 32 nt, Human
auuuugcagagcucugcuaucacugaauuaca

SEQ ID NO: 340546 - RNA, 32 nt, Human
auuuugcagguguaacagauaaccagagaagc

SEQ ID NO: 340547 - RNA, 32 nt, Human
auuuugcauaccacccucagggcccagagacc

SEQ ID NO: 340548 - RNA, 32 nt, Human
auuuugcauauguuuguaugggagaaagggug

SEQ ID NO: 340549 - RNA, 32 nt, Human
auuuugcauggcccucauucaguggcucacaa

SEQ ID NO: 340550 - RNA, 32 nt, Human
auuuugcauugaagauacauugccagguugug

SEQ ID NO: 340551 - RNA, 32 nt, Human
auuuugcauuugaaggaauugacuuccucauu

SEQ ID NO: 340552 - RNA, 32 nt, Human
auuuugccacugcacuccugccugggugacag

SEQ ID NO: 340553 - RNA, 21 nt, Human
auuuugcccaaccuaaugcuc

SEQ ID NO: 340554 - RNA, 32 nt, Human
auuuugcccaggcuggagugcgauggugcgau

SEQ ID NO: 340555 - RNA, 24 nt, Human
auuuugccccucaccccaauguuc

SEQ ID NO: 340556 - RNA, 19 nt, Human
auuuugccccucauugugu

SEQ ID NO: 340557 - RNA, 23 nt, Human
auuuugccccugcuauaaaauuc

SEQ ID NO: 340558 - RNA, 32 nt, Human
auuuugccugaacaccccaacacucuugguuu

SEQ ID NO: 340559 - RNA, 18 nt, Human
auuuugccugcugccauc

SEQ ID NO: 340560 - RNA, 18 nt, Human
auuuugccuucugugaua

SEQ ID NO: 340561 - RNA, 32 nt, Human
auuuugccuuucuuuuggaaggaaggaggcga

SEQ ID NO: 340562 - RNA, 32 nt, Human
auuuugcgaaacccccuuuucccuucagcuug

SEQ ID NO: 340563 - RNA, 32 nt, Human
auuuugcuaagagacacagucuucucaucacu

SEQ ID NO: 340564 - RNA, 32 nt, Human
auuuugcuacauauuagaaucaucugggaggu

SEQ ID NO: 340565 - RNA, 32 nt, Human
auuuugcuagauaaggaaaaaggcuagcaacu

SEQ ID NO: 340566 - RNA, 32 nt, Human
auuuugcuauuuuuacaguugauuccccagau

SEQ ID NO: 340567 - RNA, 31 nt, Human
auuuugcucaauaaaauuguucagaagauca

SEQ ID NO: 340568 - RNA, 32 nt, Human
auuuugcucagaggaggcagagaugggguggu

SEQ ID NO: 340569 - RNA, 32 nt, Human
auuuugcucugaugcauggugugaacuuucug

SEQ ID NO: 340570 - RNA, 32 nt, Human
auuuugcucuuaggauggucuuugggauucaa

SEQ ID NO: 340571 - RNA, 32 nt, Human
auuuugcucuucaauguugccuguaaacuuag

SEQ ID NO: 340572 - RNA, 32 nt, Human
auuuugcugagcugcaaagguaucugucauaa

SEQ ID NO: 340573 - RNA, 32 nt, Human
auuuugcugcaaaccucugcaggccugagagc

SEQ ID NO: 340574 - RNA, 32 nt, Human
auuuugcugcucccuauugcuucuguuuacaa

SEQ ID NO: 340575 - RNA, 32 nt, Human
auuuugcuggggagaggcuaaagggaaaggua

SEQ ID NO: 340576 - RNA, 32 nt, Human
auuuugcuggugaugaggaagcauuuagcuga

SEQ ID NO: 340577 - RNA, 32 nt, Human
auuuugcuucuaauuuugacaguaucacuuuc

SEQ ID NO: 340578 - RNA, 32 nt, Human
auuuugcuugccgcuggcaugccugaggaaug

SEQ ID NO: 340579 - RNA, 32 nt, Human
auuuugcuuuguuuaacgaugcuuuuagucgc

SEQ ID NO: 340580 - RNA, 32 nt, Human
auuuuggaaauaaucauaacuugucuuuccaa

SEQ ID NO: 340581 - RNA, 32 nt, Human
auuuuggaagcucacuuccagcagaggcaaac

SEQ ID NO: 340582 - RNA, 32 nt, Human
auuuuggaaggcagcauacucuaggagaaaaa

SEQ ID NO: 340583 - RNA, 32 nt, Human
auuuuggacaauuggaaagguagaaaagaaaa

SEQ ID NO: 340584 - RNA, 32 nt, Human
auuuuggacacacccugaagcuuuuguuuuga

SEQ ID NO: 340585 - RNA, 24 nt, Human
auuuuggacauugugaaggaaaug

SEQ ID NO: 340586 - RNA, 32 nt, Human
auuuuggagaagggagaaagaagggagaggca

SEQ ID NO: 340587 - RNA, 32 nt, Human
auuuuggagcagaucuuagaaauagaauuuaa

SEQ ID NO: 340588 - RNA, 32 nt, Human
auuuuggaggcagggcugggaagggagcgcuc

SEQ ID NO: 340589 - RNA, 32 nt, Human
auuuuggaggcugaggaggggucggaaaauua

SEQ ID NO: 340590 - RNA, 32 nt, Human
auuuuggagggguacuuguggcauuuuccugu

SEQ ID NO: 340591 - RNA, 32 nt, Human
auuuuggauauucuaggagaaagccuauaauu

SEQ ID NO: 340592 - RNA, 32 nt, Human
auuuuggaugccucucauauguaauuaguucu

SEQ ID NO: 340593 - RNA, 32 nt, Human
auuuuggauuucugaccuaaagaauuguaagg

SEQ ID NO: 340594 - RNA, 32 nt, Human
auuuuggcauuuuccuguccuuacaucucagc

SEQ ID NO: 340595 - RNA, 32 nt, Human
auuuuggccacuuguagguaucagugugaucu

SEQ ID NO: 340596 - RNA, 32 nt, Human
auuuuggcucaaugcaaccuccaccucccagg

SEQ ID NO: 340597 - RNA, 32 nt, Human
auuuuggcucacuauaaccucuuccuccaggg

SEQ ID NO: 340598 - RNA, 22 nt, Human
auuuuggcucacugcaaccucc

SEQ ID NO: 340599 - RNA, 32 nt, Human
auuuuggcucacugcaaccuccaccucccagg

SEQ ID NO: 340600 - RNA, 32 nt, Human
auuuuggcucacugcaaccuccgccuccgggg

SEQ ID NO: 340601 - RNA, 32 nt, Human
auuuuggcucacugcaaccuccgccuucuggg

SEQ ID NO: 340602 - RNA, 24 nt, Human
auuuuggcucacugcaagcucugc

SEQ ID NO: 340603 - RNA, 32 nt, Human
auuuuggcucacugcaagcucugccucccggg

SEQ ID NO: 340604 - RNA, 32 nt, Human
auuuuggcucacugcagccucugccucccagg

SEQ ID NO: 340605 - RNA, 32 nt, Human
auuuuggcucacuguauccuucgccucccugg

SEQ ID NO: 340606 - RNA, 32 nt, Human
auuuuggcucccugcaaccuccgccuccugga

SEQ ID NO: 340607 - RNA, 32 nt, Human
auuuuggcugcaggaccugggucuauuguuau

SEQ ID NO: 340608 - RNA, 32 nt, Human
auuuuggcuucauuucaaucauugaaguauau

SEQ ID NO: 340609 - RNA, 32 nt, Human
auuuuggcuuucucccugucccuuccuuucuc

SEQ ID NO: 340610 - RNA, 32 nt, Human
auuuugggaccccagccugcuggaggcuguca

SEQ ID NO: 340611 - RNA, 32 nt, Human
auuuugggacugcugcagggagggcagaggca

SEQ ID NO: 340612 - RNA, 32 nt, Human
auuuugggaggcacucuugaugguuaggaaaa

SEQ ID NO: 340613 - RNA, 32 nt, Human
auuuugggaggcagaggcaggaggauugcuua

SEQ ID NO: 340614 - RNA, 32 nt, Human
auuuugggaugaaacuguuucaucucagauca

SEQ ID NO: 340615 - RNA, 23 nt, Human
auuuugggcaugcucaguacaga

SEQ ID NO: 340616 - RNA, 32 nt, Human
auuuugggggcagggagguugggugggcugau

SEQ ID NO: 340617 - RNA, 32 nt, Human
auuuugggggcuggggugucaaaagugagaug

SEQ ID NO: 340618 - RNA, 32 nt, Human
auuuugggguuauuuauuaugaaaacaacaug

SEQ ID NO: 340619 - RNA, 32 nt, Human
auuuuggguaacauagcacauggagauaauca

SEQ ID NO: 340620 - RNA, 32 nt, Human
auuuuggguacagaacucacaaaagaagagca

SEQ ID NO: 340621 - RNA, 32 nt, Human
auuuugggugggacuaagcaaagacgaaacac

SEQ ID NO: 340622 - RNA, 32 nt, Human
auuuuggguucccacuccugaccuaaccagaa

SEQ ID NO: 340623 - RNA, 32 nt, Human
auuuuggguuuucucuucuccugcuuuccugg

SEQ ID NO: 340624 - RNA, 32 nt, Human
auuuugguagaguauauacauaccucacugcc

SEQ ID NO: 340625 - RNA, 32 nt, Human
auuuugguagguaaagugugguggacguccuu

SEQ ID NO: 340626 - RNA, 32 nt, Human
auuuuggucaauguggguaacuuacuuuagaa

SEQ ID NO: 340627 - RNA, 32 nt, Human
auuuuggucacuucuagucaaugaaaaaugua

SEQ ID NO: 340628 - RNA, 32 nt, Human
auuuuggucauggagauguuuaaauaguaaag

SEQ ID NO: 340629 - RNA, 32 nt, Human
auuuuggucuguccaagauuauggaugaugau

SEQ ID NO: 340630 - RNA, 32 nt, Human
auuuuggugcuugcugcugaaauaaauugaaa

SEQ ID NO: 340631 - RNA, 32 nt, Human
auuuuggugggaaugggguuucaaccacguug

SEQ ID NO: 340632 - RNA, 32 nt, Human
auuuugguuaacagcaagaaaaaugcuuauaa

SEQ ID NO: 340633 - RNA, 32 nt, Human
auuuugguuucauugaaacaguaucuaauuau

SEQ ID NO: 340634 - RNA, 18 nt, Human
auuuuguaaaaagaaauu

SEQ ID NO: 340635 - RNA, 32 nt, Human
auuuuguaaaccugcagccguuuugcacaccc

SEQ ID NO: 340636 - RNA, 22 nt, Human
auuuuguaaauacuguauacca

SEQ ID NO: 340637 - RNA, 32 nt, Human
auuuuguaacacuguaccagguggugacuguu

SEQ ID NO: 340638 - RNA, 32 nt, Human
auuuuguagagugcuuuguuuauccaguuuaa

SEQ ID NO: 340639 - RNA, 32 nt, Human
auuuuguagcaguuuuacuacugugugauuuu

SEQ ID NO: 340640 - RNA, 32 nt, Human
auuuuguagggguggcacauucauugguugug

SEQ ID NO: 340641 - RNA, 32 nt, Human
auuuuguauaaaugaagugcuggacuuuaccu

SEQ ID NO: 340642 - RNA, 32 nt, Human
auuuuguauucccaccugugcugguagauauu

SEQ ID NO: 340643 - RNA, 32 nt, Human
auuuuguauugauuuuugauuaugaaaaucaa

SEQ ID NO: 340644 - RNA, 32 nt, Human
auuuuguauuuuuacaguuuugauuggguaau

SEQ ID NO: 340645 - RNA, 32 nt, Human
auuuuguauuuuuaguagagacagggucucac

SEQ ID NO: 340646 - RNA, 32 nt, Human
auuuuguauuuuuaguagagacaggguuccac

SEQ ID NO: 340647 - RNA, 32 nt, Human
auuuuguauuuuuaguagagacaggguuucac

SEQ ID NO: 340648 - RNA, 32 nt, Human
auuuuguauuuuuaguagagacaggguuucuc

SEQ ID NO: 340649 - RNA, 32 nt, Human
auuuuguauuuuuaguagagacaggguuucuu

SEQ ID NO: 340650 - RNA, 32 nt, Human
auuuuguauuuuuaguagagauagggauucac

SEQ ID NO: 340651 - RNA, 32 nt, Human
auuuuguauuuuuaguagagauggggcuucac

SEQ ID NO: 340652 - RNA, 32 nt, Human
auuuuguauuuuuaguagagaugggguuuauc

SEQ ID NO: 340653 - RNA, 32 nt, Human
auuuuguauuuuuaguagagaugggguuucac

SEQ ID NO: 340654 - RNA, 32 nt, Human
auuuuguauuuuuaguagagaugggguuucau

SEQ ID NO: 340655 - RNA, 32 nt, Human
auuuuguauuuuuaguagagaugggguuucuc

SEQ ID NO: 340656 - RNA, 32 nt, Human
auuuuguauuuuuauagagacgggguuucacc

SEQ ID NO: 340657 - RNA, 32 nt, Human
auuuuguauuuuuauuagagacaggguuucuc

SEQ ID NO: 340658 - RNA, 32 nt, Human
auuuugucaccgaggcuggagugcaauggccc

SEQ ID NO: 340659 - RNA, 32 nt, Human
auuuugucagcccagauguggcccaguuauuu

SEQ ID NO: 340660 - RNA, 32 nt, Human
auuuugucccaagucuuauuugcugacuuuuu

SEQ ID NO: 340661 - RNA, 32 nt, Human
auuuugucccagagagaaaggcucuuuggggg

SEQ ID NO: 340662 - RNA, 32 nt, Human
auuuuguccuaaaaauacaaaaauuaguuggg

SEQ ID NO: 340663 - RNA, 32 nt, Human
auuuuguccugauucacugccaauugucacau

SEQ ID NO: 340664 - RNA, 32 nt, Human
auuuugucucucucgacguaggccucaguguc

SEQ ID NO: 340665 - RNA, 32 nt, Human
auuuugugaggugagagaaaacuaauguuuac

SEQ ID NO: 340666 - RNA, 32 nt, Human
auuuugugcaguuuacaaaggcggccaaacag

SEQ ID NO: 340667 - RNA, 32 nt, Human
auuuugugggagaaagaggagcuggaguuaca

SEQ ID NO: 340668 - RNA, 32 nt, Human
auuuuguggggugggaguggggagcaggaauu

SEQ ID NO: 340669 - RNA, 32 nt, Human
auuuuguguaagaaauacagacuggauguacc

SEQ ID NO: 340670 - RNA, 32 nt, Human
auuuuguuaaugcacauucuguuuguuuaagg

SEQ ID NO: 340671 - RNA, 32 nt, Human
auuuuguuccaagucagaggugggcaccuaua

SEQ ID NO: 340672 - RNA, 32 nt, Human
auuuuguucccugagugucugaguccccggca

SEQ ID NO: 340673 - RNA, 32 nt, Human
auuuuguucuauaugaauaaaaaggcaaauua

SEQ ID NO: 340674 - RNA, 32 nt, Human
auuuuguucuugagaggggucagucuagaagc

SEQ ID NO: 340675 - RNA, 32 nt, Human
auuuuguucuugugggcagaagugggaaugau

SEQ ID NO: 340676 - RNA, 32 nt, Human
auuuuguugcccaggcuggucuccaauuucug

SEQ ID NO: 340677 - RNA, 32 nt, Human
auuuuguuuaaaacaugauuaucuuaauuccu

SEQ ID NO: 340678 - RNA, 32 nt, Human
auuuuguuuaauuuucugggguguuuuuguug

SEQ ID NO: 340679 - RNA, 32 nt, Human
auuuuguuuccaucuucuguaaucuuccaaag

SEQ ID NO: 340680 - RNA, 32 nt, Human
auuuuguuugagauggagaucuugcuauauug

SEQ ID NO: 340681 - RNA, 32 nt, Human
auuuuguuuucagaagagccauucuuuauuaa

SEQ ID NO: 340682 - RNA, 32 nt, Human
auuuuuaaaaauccauccacacacauugguaa

SEQ ID NO: 340683 - RNA, 32 nt, Human
auuuuuaaaacaaugcauaccaguguuuaaaa

SEQ ID NO: 340684 - RNA, 32 nt, Human
auuuuuaaagaauguuguuagaggccgggcgc

SEQ ID NO: 340685 - RNA, 32 nt, Human
auuuuuaaaggaguuggaggagagggaggggg

SEQ ID NO: 340686 - RNA, 32 nt, Human
auuuuuaaauuaugcaguauuuuccaguucuc

SEQ ID NO: 340687 - RNA, 32 nt, Human
auuuuuaacuucuuccuggggccugagcaggg

SEQ ID NO: 340688 - RNA, 32 nt, Human
auuuuuaagaugaccaagguuccagccaccaa

SEQ ID NO: 340689 - RNA, 32 nt, Human
auuuuuaaggcuuuccuaauaggcugaucaca

SEQ ID NO: 340690 - RNA, 32 nt, Human
auuuuuaagguagugggcaucucucuccuaau

SEQ ID NO: 340691 - RNA, 32 nt, Human
auuuuuaaggucgggaguuagauuuuaugaua

SEQ ID NO: 340692 - RNA, 32 nt, Human
auuuuuaagugcccucuuuucagucauuugca

SEQ ID NO: 340693 - RNA, 32 nt, Human
auuuuuaaguguccucagcauugcagaaaaua

SEQ ID NO: 340694 - RNA, 32 nt, Human
auuuuuacacgcagccugagcgguuauucuug

SEQ ID NO: 340695 - RNA, 32 nt, Human
auuuuuacauucaucaauaucccucuuguaag

SEQ ID NO: 340696 - RNA, 32 nt, Human
auuuuuacccccaaaggaacugaagauggaaa

SEQ ID NO: 340697 - RNA, 32 nt, Human
auuuuuacucaggcuuucuauuggcauggauu

SEQ ID NO: 340698 - RNA, 32 nt, Human
auuuuuacugccacuaaacugccuguauuucu

SEQ ID NO: 340699 - RNA, 32 nt, Human
auuuuuacuuucuguaugcuaaaacaaacccc

SEQ ID NO: 340700 - RNA, 32 nt, Human
auuuuuagacuuaaguucacugugauaucccu

SEQ ID NO: 340701 - RNA, 32 nt, Human
auuuuuagaggaacagaaagaaagugaaaaga

SEQ ID NO: 340702 - RNA, 32 nt, Human
auuuuuagaguuuccaguuuuucuguucuguu

SEQ ID NO: 340703 - RNA, 32 nt, Human
auuuuuagauugcccuguauuuuguuaacaug

SEQ ID NO: 340704 - RNA, 32 nt, Human
auuuuuagccuucuuuuucugcacugagucuc

SEQ ID NO: 340705 - RNA, 23 nt, Human
auuuuuagcugugcagauaggug

SEQ ID NO: 340706 - RNA, 32 nt, Human
auuuuuaguagacacaggguuucuccauguug

SEQ ID NO: 340707 - RNA, 32 nt, Human
auuuuuaguagagacaggauuuugccauguuu

SEQ ID NO: 340708 - RNA, 32 nt, Human
auuuuuaguagagacaggguuucuccauguug

SEQ ID NO: 340709 - RNA, 32 nt, Human
auuuuuaguagagacgagguuucuccauguuc

SEQ ID NO: 340710 - RNA, 32 nt, Human
auuuuuaguagagacggaguuucuccauguug

SEQ ID NO: 340711 - RNA, 32 nt, Human
auuuuuaguagagacgggauuucuccauguug

SEQ ID NO: 340712 - RNA, 32 nt, Human
auuuuuaguagagacgggguuucuccauguua

SEQ ID NO: 340713 - RNA, 32 nt, Human
auuuuuaguagagacgggguuucuccauguug

SEQ ID NO: 340714 - RNA, 32 nt, Human
auuuuuaguagagaugggguuucuccaaaggc

SEQ ID NO: 340715 - RNA, 32 nt, Human
auuuuuaguagagaugggguuucuccauguug

SEQ ID NO: 340716 - RNA, 32 nt, Human
auuuuuaguagagaugugguuucuccauguug

SEQ ID NO: 340717 - RNA, 32 nt, Human
auuuuuaguagaggcaggguuucuccauguug

SEQ ID NO: 340718 - RNA, 32 nt, Human
auuuuuaguagggaugggguuucuccauguug

SEQ ID NO: 340719 - RNA, 32 nt, Human
auuuuuaguauaacauuuucaccaucugauau

SEQ ID NO: 340720 - RNA, 32 nt, Human
auuuuuaguugcugagguuggcauuuuaguga

SEQ ID NO: 340721 - RNA, 32 nt, Human
auuuuuauaagaaaauuuuacuauuauuuuca

SEQ ID NO: 340722 - RNA, 32 nt, Human
auuuuuauagaguagggguacaaggacaguug

SEQ ID NO: 340723 - RNA, 32 nt, Human
auuuuuauauaaauuauaucuuguccuauuaa

SEQ ID NO: 340724 - RNA, 32 nt, Human
auuuuuauauagcaacugcucucugcaaguag

SEQ ID NO: 340725 - RNA, 32 nt, Human
auuuuuauaucaauuuguuuauauuuuuauua

SEQ ID NO: 340726 - RNA, 32 nt, Human
auuuuuaucaccaaaaugaauguuaaugaauu

SEQ ID NO: 340727 - RNA, 32 nt, Human
auuuuuauccaugaagacuuuccuacuuuucu

SEQ ID NO: 340728 - RNA, 32 nt, Human
auuuuuaucuauuuuucccuuucucuuacauu

SEQ ID NO: 340729 - RNA, 32 nt, Human
auuuuuaugaaaugugugcaguauuuaauuuu

SEQ ID NO: 340730 - RNA, 32 nt, Human
auuuuuaugauucccaacucauugaaggucuu

SEQ ID NO: 340731 - RNA, 32 nt, Human
auuuuuaugcaaccucugugccaggcucuggg

SEQ ID NO: 340732 - RNA, 32 nt, Human
auuuuuauggagaagaaauauggccauauuau

SEQ ID NO: 340733 - RNA, 32 nt, Human
auuuuuaugucaggugaacuggcaugcugaac

SEQ ID NO: 340734 - RNA, 32 nt, Human
auuuuuauguuaggcuuauuucauguauagcu

SEQ ID NO: 340735 - RNA, 32 nt, Human
auuuuuauuguauauuccuacagaucagucau

SEQ ID NO: 340736 - RNA, 32 nt, Human
auuuuuauuucaccaccuuuaacugagucacc

SEQ ID NO: 340737 - RNA, 32 nt, Human
auuuuuauuuccuuugaaauaauaggacuuua

SEQ ID NO: 340738 - RNA, 32 nt, Human
auuuuucaaagauaaagaaaguguacugcgaa

SEQ ID NO: 340739 - RNA, 32 nt, Human
auuuuucaacccagugucacuagaugucacac

SEQ ID NO: 340740 - RNA, 32 nt, Human
auuuuucaauuggcaauucaguuaauuuuuaa

SEQ ID NO: 340741 - RNA, 32 nt, Human
auuuuucacaggcuggcuugguggcgggauua

SEQ ID NO: 340742 - RNA, 32 nt, Human
auuuuucacaucccaccauacacugcugccca

SEQ ID NO: 340743 - RNA, 32 nt, Human
auuuuucaccacugcguuuuagguggugaucu

SEQ ID NO: 340744 - RNA, 32 nt, Human
auuuuucacuccucguucuugugcuugguucu

SEQ ID NO: 340745 - RNA, 32 nt, Human
auuuuucacugccauaugcucuugucaaaacu

SEQ ID NO: 340746 - RNA, 32 nt, Human
auuuuucagcagucacagccagugugagugcu

SEQ ID NO: 340747 - RNA, 32 nt, Human
auuuuucaguagcuccagguagaugagccuuu

SEQ ID NO: 340748 - RNA, 32 nt, Human
auuuuucaucagucauucuauagugacaucau

SEQ ID NO: 340749 - RNA, 32 nt, Human
auuuuucaugaucuugccauuuuugaaaagga

SEQ ID NO: 340750 - RNA, 23 nt, Human
auuuuucauuucacccaauguuc

SEQ ID NO: 340751 - RNA, 32 nt, Human
auuuuuccaacuuuuguacaguaaguaguuag

SEQ ID NO: 340752 - RNA, 32 nt, Human
auuuuuccacaccuugaagucacaguguuuua

SEQ ID NO: 340753 - RNA, 32 nt, Human
auuuuuccacuccagcugagacugccucacug

SEQ ID NO: 340754 - RNA, 32 nt, Human
auuuuuccagccaaaccacucacccguacacu

SEQ ID NO: 340755 - RNA, 32 nt, Human
auuuuucccaaaacaaagcccaugccuugcuc

SEQ ID NO: 340756 - RNA, 32 nt, Human
auuuuucccacauaguauauuaguauauuuua

SEQ ID NO: 340757 - RNA, 32 nt, Human
auuuuucccuacucuggaauuugaacuuucuu

SEQ ID NO: 340758 - RNA, 32 nt, Human
auuuuucccuuucuuuaaaagaaacuuaacug

SEQ ID NO: 340759 - RNA, 32 nt, Human
auuuuuccuacagcuacauugagauauaguuc

SEQ ID NO: 340760 - RNA, 32 nt, Human
auuuuuccuaguuuaguaucaacauuuuagaa

SEQ ID NO: 340761 - RNA, 32 nt, Human
auuuuuccugcacuuuuucucagguaucaaua

SEQ ID NO: 340762 - RNA, 32 nt, Human
auuuuuccuucccauuauuuaugcauguaaau

SEQ ID NO: 340763 - RNA, 22 nt, Human
auuuuucgaugaaaucuucaga

SEQ ID NO: 340764 - RNA, 32 nt, Human
auuuuucuaaggauuuaaacagcuccacuaua

SEQ ID NO: 340765 - RNA, 32 nt, Human
auuuuucuacuuugcuuuucucuccauacuua

SEQ ID NO: 340766 - RNA, 32 nt, Human
auuuuucuagagccaaagaagcucuuuaaaga

SEQ ID NO: 340767 - RNA, 32 nt, Human
auuuuucuagcgaacguauuucuccagaccca

SEQ ID NO: 340768 - RNA, 32 nt, Human
auuuuucuauugaaaauauguccccuugcaaa

SEQ ID NO: 340769 - RNA, 32 nt, Human
auuuuucuauuuucucuugaaucugcuucuau

SEQ ID NO: 340770 - RNA, 32 nt, Human
auuuuucucauuuuuaguacuauuucaggguu

SEQ ID NO: 340771 - RNA, 32 nt, Human
auuuuucuccaccccaacuucaaugucuugac

SEQ ID NO: 340772 - RNA, 32 nt, Human
auuuuucucuuuacagaaaccccaugcuguuu

SEQ ID NO: 340773 - RNA, 32 nt, Human
auuuuucucuuucuccuccuggccuggccuga

SEQ ID NO: 340774 - RNA, 32 nt, Human
auuuuucugcuccugcuucucucucuucauug

SEQ ID NO: 340775 - RNA, 32 nt, Human
auuuuucuggccucgcuguucuccauagagca

SEQ ID NO: 340776 - RNA, 32 nt, Human
auuuuucugggaauucucagaggccuggaucc

SEQ ID NO: 340777 - RNA, 32 nt, Human
auuuuucuggggagaagguucaagagauucau

SEQ ID NO: 340778 - RNA, 32 nt, Human
auuuuucuguucuguugaauugcuauguucag

SEQ ID NO: 340779 - RNA, 32 nt, Human
auuuuucuuaaccuuggagauggcugucuagg

SEQ ID NO: 340780 - RNA, 32 nt, Human
auuuuucuuagcagacugcagucaauccacau

SEQ ID NO: 340781 - RNA, 32 nt, Human
auuuuucuuccaggaugguguuacugcaguug

SEQ ID NO: 340782 - RNA, 32 nt, Human
auuuuucuuccucuccagccagucuccugugg

SEQ ID NO: 340783 - RNA, 32 nt, Human
auuuuucuucucuucccuuugaucucucuucc

SEQ ID NO: 340784 - RNA, 32 nt, Human
auuuuucuugguuucacacucagcuacaugug

SEQ ID NO: 340785 - RNA, 32 nt, Human
auuuuucuuuucacacaaucucuuuacagcag

SEQ ID NO: 340786 - RNA, 32 nt, Human
auuuuucuuuuggcuccuugaauccccauagg

SEQ ID NO: 340787 - RNA, 32 nt, Human
auuuuucuuuuucuguguauuacuacagguuu

SEQ ID NO: 340788 - RNA, 32 nt, Human
auuuuugaagugaaaaaguacauauauuuugc

SEQ ID NO: 340789 - RNA, 32 nt, Human
auuuuugaagugacugggcaggcagcagaaau

SEQ ID NO: 340790 - RNA, 32 nt, Human
auuuuugaaguuaaaguauucauagcuggaac

SEQ ID NO: 340791 - RNA, 32 nt, Human
auuuuugaaguugaguuuggaguagauugguu

SEQ ID NO: 340792 - RNA, 32 nt, Human
auuuuugagacagggucuugcucugucaccca

SEQ ID NO: 340793 - RNA, 32 nt, Human
auuuuugagauggagucucacucugucaccca

SEQ ID NO: 340794 - RNA, 32 nt, Human
auuuuugagauggagucuugcucugucaccca

SEQ ID NO: 340795 - RNA, 32 nt, Human
auuuuugaggggaagcuggaggcuccccaagg

SEQ ID NO: 340796 - RNA, 32 nt, Human
auuuuugagguuucugugagaaguaaagauag

SEQ ID NO: 340797 - RNA, 32 nt, Human
auuuuugagucuuuuucuuucucauauacaga

SEQ ID NO: 340798 - RNA, 32 nt, Human
auuuuugaugccaaucuuaugagacccuacgc

SEQ ID NO: 340799 - RNA, 32 nt, Human
auuuuugcacauucuacacacagugccuguaa

SEQ ID NO: 340800 - RNA, 32 nt, Human
auuuuugcaccaggauggaaggggauucuuac

SEQ ID NO: 340801 - RNA, 32 nt, Human
auuuuugcaccuuuccauccuccagguuucaa

SEQ ID NO: 340802 - RNA, 31 nt, Human
auuuuugcauugauguucaucagggauauug

SEQ ID NO: 340803 - RNA, 32 nt, Human
auuuuugcauuuuuaguaaugacaggguuuca

SEQ ID NO: 340804 - RNA, 32 nt, Human
auuuuugccaaaauaccacuaguggaaaguca

SEQ ID NO: 340805 - RNA, 32 nt, Human
auuuuugccaacaacucagaagcuaacaaaac

SEQ ID NO: 340806 - RNA, 32 nt, Human
auuuuugccauggaaagaacaucaaacaagcc

SEQ ID NO: 340807 - RNA, 32 nt, Human
auuuuugccccaaauguuucauggcuuauacc

SEQ ID NO: 340808 - RNA, 32 nt, Human
auuuuugcuucaaaggagcucacaagcuaagu

SEQ ID NO: 340809 - RNA, 32 nt, Human
auuuuugcuuggaauaagcaugacagaaagau

SEQ ID NO: 340810 - RNA, 32 nt, Human
auuuuuggaaacaucugcccaauccuggguga

SEQ ID NO: 340811 - RNA, 32 nt, Human
auuuuuggaaacugaagagagaaugguuacca

SEQ ID NO: 340812 - RNA, 32 nt, Human
auuuuuggacccuguuaauagcauuaagguag

SEQ ID NO: 340813 - RNA, 32 nt, Human
auuuuuggagagagcuauguugcugcuuauuu

SEQ ID NO: 340814 - RNA, 32 nt, Human
auuuuuggagcuuuccuuccagaguccuggcu

SEQ ID NO: 340815 - RNA, 32 nt, Human
auuuuuggauucauuccuuugaagggagucgg

SEQ ID NO: 340816 - RNA, 32 nt, Human
auuuuugggaggcagagaggggcaggcuuggg

SEQ ID NO: 340817 - RNA, 32 nt, Human
auuuuugguauuguggcagaaggugaaggcuc

SEQ ID NO: 340818 - RNA, 32 nt, Human
auuuuugguccagaguacuuguuuucccgaug

SEQ ID NO: 340819 - RNA, 32 nt, Human
auuuuuggugacaugcacugagccaaggugau

SEQ ID NO: 340820 - RNA, 32 nt, Human
auuuuuggugcaaguagcacaugguuuaaaua

SEQ ID NO: 340821 - RNA, 32 nt, Human
auuuuugguucuauuaggauuuacuuaacuga

SEQ ID NO: 340822 - RNA, 32 nt, Human
auuuuuguaauuuuaguagagacagaguuuca

SEQ ID NO: 340823 - RNA, 32 nt, Human
auuuuuguaccaaggcgagcaagccuuuuuga

SEQ ID NO: 340824 - RNA, 32 nt, Human
auuuuuguauugaccuuauuucaacugaagcg

SEQ ID NO: 340825 - RNA, 32 nt, Human
auuuuuguauuuuuaguaaagacaggguuuca

SEQ ID NO: 340826 - RNA, 32 nt, Human
auuuuuguauuuuuaguaaagacaggguuuug

SEQ ID NO: 340827 - RNA, 32 nt, Human
auuuuuguauuuuuaguagagacagaguuuca

SEQ ID NO: 340828 - RNA, 32 nt, Human
auuuuuguauuuuuaguagagacagaguuuua

SEQ ID NO: 340829 - RNA, 32 nt, Human
auuuuuguauuuuugguagagacagaguuuca

SEQ ID NO: 340830 - RNA, 32 nt, Human
auuuuuguauuuuuguaauauuuguccacuaa

SEQ ID NO: 340831 - RNA, 32 nt, Human
auuuuugucaugauuuuaaauacacugacacg

SEQ ID NO: 340832 - RNA, 32 nt, Human
auuuuugucauuguuauuuucagaauaccaga

SEQ ID NO: 340833 - RNA, 32 nt, Human
auuuuuguccaguuuucucucuuccaguccca

SEQ ID NO: 340834 - RNA, 32 nt, Human
auuuuuguccauuuguguuucagaaucagcac

SEQ ID NO: 340835 - RNA, 32 nt, Human
auuuuugucgaguuuacuucaugaggagguca

SEQ ID NO: 340836 - RNA, 32 nt, Human
auuuuugucuccccuucccacccuccagccaa

SEQ ID NO: 340837 - RNA, 32 nt, Human
auuuuugugggauguuguucccauucuucuuu

SEQ ID NO: 340838 - RNA, 32 nt, Human
auuuuuguguuuuaguagagauaggguuucac

SEQ ID NO: 340839 - RNA, 32 nt, Human
auuuuuguguuuuuaauaaagacaggguuuca

SEQ ID NO: 340840 - RNA, 32 nt, Human
auuuuuguguuuuuaguagagacagaguuuug

SEQ ID NO: 340841 - RNA, 32 nt, Human
auuuuuguucacugcaaccucugccuuccaag

SEQ ID NO: 340842 - RNA, 32 nt, Human
auuuuuguucugacagugcaugucuuuggaag

SEQ ID NO: 340843 - RNA, 32 nt, Human
auuuuuguuuagacucccugagguuccguuuu

SEQ ID NO: 340844 - RNA, 32 nt, Human
auuuuuguuuuguucacucuucugccuucagu

SEQ ID NO: 340845 - RNA, 32 nt, Human
auuuuuguuuuuaaaaauauuucuuaaacaug

SEQ ID NO: 340846 - RNA, 25 nt, Human
caaaaaagcaaacacaagaaaucaa

SEQ ID NO: 340847 - RNA, 17 nt, Human
caaaaaagcaagcuuua

SEQ ID NO: 340848 - RNA, 25 nt, Human
caaaaaaggcugggauuacaggcau

SEQ ID NO: 340849 - RNA, 20 nt, Human
caaaaaauacgaauguguuc

SEQ ID NO: 340850 - RNA, 27 nt, Human
caaaaaaucaaaugaaagagcauuccu

SEQ ID NO: 340851 - RNA, 22 nt, Human
caaaaaaucagaaaagagccuu

SEQ ID NO: 340852 - RNA, 28 nt, Human
caaaaaauccugauauaaaagaaaucaa

SEQ ID NO: 340853 - RNA, 16 nt, Human
caaaaacaaaaacacc

SEQ ID NO: 340854 - RNA, 22 nt, Human
caaaaacaaaagucuugcuucu

SEQ ID NO: 340855 - RNA, 32 nt, Human
caaaaacaaaccuguguuguuuuuguauagau

SEQ ID NO: 340856 - RNA, 18 nt, Human
caaaaacaacaaaacacc

SEQ ID NO: 340857 - RNA, 32 nt, Human
caaaaacaacugcucaccaaucuuacauugau

SEQ ID NO: 340858 - RNA, 32 nt, Human
caaaaacaauuagcugggcaugauggcacaca

SEQ ID NO: 340859 - RNA, 32 nt, Human
caaaaacaauuagcugggcaugguggccggcg

SEQ ID NO: 340860 - RNA, 22 nt, Human
caaaaacacacccaaacacacc

SEQ ID NO: 340861 - RNA, 21 nt, Human
caaaaacacagaaucccugca

SEQ ID NO: 340862 - RNA, 32 nt, Human
caaaaacacaugcacccaauuauggacaccaa

SEQ ID NO: 340863 - RNA, 32 nt, Human
caaaaacaccuucauccccacccaguggggcc

SEQ ID NO: 340864 - RNA, 17 nt, Human
caaaaacagaaaaaccc

SEQ ID NO: 340865 - RNA, 32 nt, Human
caaaaacaggcagguacagguagugggcucac

SEQ ID NO: 340866 - RNA, 32 nt, Human
caaaaacagugauuaaagcaagagaauuauua

SEQ ID NO: 340867 - RNA, 32 nt, Human
caaaaacauaauucuggcaaugagaguauuuu

SEQ ID NO: 340868 - RNA, 32 nt, Human
caaaaacauccagguuuucucccaagucagag

SEQ ID NO: 340869 - RNA, 32 nt, Human
caaaaaccaaccaaccaaccaaccaaccaaca

SEQ ID NO: 340870 - RNA, 32 nt, Human
caaaaaccaagcucuaccccauccccauccca

SEQ ID NO: 340871 - RNA, 32 nt, Human
caaaaaccagccuguggcccagcuucagcagg

SEQ ID NO: 340872 - RNA, 32 nt, Human
caaaaaccagcugcaaccacagagcucaguca

SEQ ID NO: 340873 - RNA, 32 nt, Human
caaaaaccaucuuuacaggcuccuagaagcug

SEQ ID NO: 340874 - RNA, 32 nt, Human
caaaaacccaacaacacacuuuugugauuuua

SEQ ID NO: 340875 - RNA, 32 nt, Human
caaaaaccccuauggauuagauuuacaauacc

SEQ ID NO: 340876 - RNA, 32 nt, Human
caaaaacggugcuuguucaacuauccugaacu

SEQ ID NO: 340877 - RNA, 32 nt, Human
caaaaacuaccuaaaauaaagauuauagagcc

SEQ ID NO: 340878 - RNA, 32 nt, Human
caaaaacuagccaggugugguucuccaugccu

SEQ ID NO: 340879 - RNA, 32 nt, Human
caaaaacucccaggaugccccggugugaccgc

SEQ ID NO: 340880 - RNA, 32 nt, Human
caaaaacugcagggcccuuggccacacgguca

SEQ ID NO: 340881 - RNA, 32 nt, Human
caaaaacugugccuccccacucgucugugcag

SEQ ID NO: 340882 - RNA, 32 nt, Human
caaaaagaaagaaagaaagaaagaaagaaaga

SEQ ID NO: 340883 - RNA, 32 nt, Human
caaaaagaacaacauaucucagguugucuaag

SEQ ID NO: 340884 - RNA, 32 nt, Human
caaaaagaagaaaugaaagggaaaauaguaca

SEQ ID NO: 340885 - RNA, 32 nt, Human
caaaaagaagaaccuguucuauguuaacuacc

SEQ ID NO: 340886 - RNA, 32 nt, Human
caaaaagaagucguuccccaucaggaaguccu

SEQ ID NO: 340887 - RNA, 32 nt, Human
caaaaagaauugcccacgcuguggaagauaaa

SEQ ID NO: 340888 - RNA, 32 nt, Human
caaaaagacaagcaaaaacaauuaccagauug

SEQ ID NO: 340889 - RNA, 32 nt, Human
caaaaagacugccuuuuuaugauccacauacc

SEQ ID NO: 340890 - RNA, 32 nt, Human
caaaaagagaagagaagaaaaagggaggagag

SEQ ID NO: 340891 - RNA, 32 nt, Human
caaaaagagacagcaacuggcccagggucacc

SEQ ID NO: 340892 - RNA, 32 nt, Human
caaaaagagacuugaauguuguggacaaaauc

SEQ ID NO: 340893 - RNA, 32 nt, Human
caaaaagaggcagagccggcagggaccgagcg

SEQ ID NO: 340894 - RNA, 32 nt, Human
caaaaagaggcagagcgaguagagagcagccc

SEQ ID NO: 340895 - RNA, 32 nt, Human
caaaaagaguaauuuaauaagcauuaaaggua

SEQ ID NO: 340896 - RNA, 32 nt, Human
caaaaagaucaccacacccaagacacuugcuu

SEQ ID NO: 340897 - RNA, 32 nt, Human
caaaaagaugcagagagcagggcaguagcuac

SEQ ID NO: 340898 - RNA, 32 nt, Human
caaaaagcaauauuuuucaucacaugccaaaa

SEQ ID NO: 340899 - RNA, 32 nt, Human
caaaaagcacagaaaaaggaagugcuggugca

SEQ ID NO: 340900 - RNA, 32 nt, Human
caaaaagccagccugaauuuucauggccaugg

SEQ ID NO: 340901 - RNA, 32 nt, Human
caaaaagccagggugugccaggagaagggcau

SEQ ID NO: 340902 - RNA, 32 nt, Human
caaaaagcccucugcugacucccucaaguccu

SEQ ID NO: 340903 - RNA, 23 nt, Human
caaaaagcugggauuacuagcau

SEQ ID NO: 340904 - RNA, 32 nt, Human
caaaaaggaaccucuuucaggagcuauaaaag

SEQ ID NO: 340905 - RNA, 32 nt, Human
caaaaaggaccagccugaccagcguggagaaa

SEQ ID NO: 340906 - RNA, 32 nt, Human
caaaaaggagccugugguguuccccagugggg

SEQ ID NO: 340907 - RNA, 32 nt, Human
caaaaaggauguaagacuuggagccagagcau

SEQ ID NO: 340908 - RNA, 32 nt, Human
caaaaaggcaaaggacuccuacucacauaccc

SEQ ID NO: 340909 - RNA, 32 nt, Human
caaaaaggcaagguagaaagaggagugauggg

SEQ ID NO: 340910 - RNA, 32 nt, Human
caaaaaggcugcaagaaggguguuggaggguc

SEQ ID NO: 340911 - RNA, 32 nt, Human
caaaaaggcuuagaucugggcuauucccaugu

SEQ ID NO: 340912 - RNA, 32 nt, Human
caaaaaggggaagaguagacacugcugaagga

SEQ ID NO: 340913 - RNA, 32 nt, Human
caaaaaggggacauagugacaauuucuccugg

SEQ ID NO: 340914 - RNA, 32 nt, Human
caaaaagggucuggcaaaauaaccucaggagg

SEQ ID NO: 340915 - RNA, 23 nt, Human
caaaaaggugccaaaugcauaua

SEQ ID NO: 340916 - RNA, 32 nt, Human
caaaaagguucuuacaggaguugcaggagaag

SEQ ID NO: 340917 - RNA, 32 nt, Human
caaaaagguuucagguggagcagaucggagag

SEQ ID NO: 340918 - RNA, 32 nt, Human
caaaaaguagcuuuuucuuuccuuccuuccuu

SEQ ID NO: 340919 - RNA, 32 nt, Human
caaaaagucuaagccaaagguucucaggggag

SEQ ID NO: 340920 - RNA, 32 nt, Human
caaaaagucugaccauuggucuuuggauaccu

SEQ ID NO: 340921 - RNA, 32 nt, Human
caaaaagugccugccugugcucucucccucuc

SEQ ID NO: 340922 - RNA, 32 nt, Human
caaaaaguuaaggaacuagggaaaagagaugg

SEQ ID NO: 340923 - RNA, 25 nt, Human
caaaaaguuggagaaaaagucuucc

SEQ ID NO: 340924 - RNA, 32 nt, Human
caaaaaguuucuuuucugaggcugccauacug

SEQ ID NO: 340925 - RNA, 32 nt, Human
caaaaauaaaaauaaaaauuauccaggcgugg

SEQ ID NO: 340926 - RNA, 22 nt, Human
caaaaauaaaagaggugccucu

SEQ ID NO: 340927 - RNA, 24 nt, Human
caaaaauaaagcuggucugccucu

SEQ ID NO: 340928 - RNA, 32 nt, Human
caaaaauaaaggggcuacagaaacacucauuu

SEQ ID NO: 340929 - RNA, 32 nt, Human
caaaaauaaagguuugguuugguuuguuaugg

SEQ ID NO: 340930 - RNA, 22 nt, Human
caaaaauaauuacuucugcccu

SEQ ID NO: 340931 - RNA, 32 nt, Human
caaaaauacaaaaaguuagcugggcauggugg

SEQ ID NO: 340932 - RNA, 22 nt, Human
caaaaauagcaaaagccucucu

SEQ ID NO: 340933 - RNA, 32 nt, Human
caaaaauagugccggguggcccaaagauaaca

SEQ ID NO: 340934 - RNA, 32 nt, Human
caaaaauaucauuaugcagugugugacuguau

SEQ ID NO: 340935 - RNA, 32 nt, Human
caaaaauaugaacauggcugggcgcgguggcu

SEQ ID NO: 340936 - RNA, 32 nt, Human
caaaaaucagaaaguugaaaaagguggggaaa

SEQ ID NO: 340937 - RNA, 32 nt, Human
caaaaaucagccccaaaaagguauuauccauu

SEQ ID NO: 340938 - RNA, 32 nt, Human
caaaaauccugccuucuuugugggggaggggg

SEQ ID NO: 340939 - RNA, 32 nt, Human
caaaaauccuucuccaccgcacagacugggaa

SEQ ID NO: 340940 - RNA, 32 nt, Human
caaaaaugaaaccaucaauaaagacuggguug

SEQ ID NO: 340941 - RNA, 32 nt, Human
caaaaaugaagaggaaaacaaacagguggaga

SEQ ID NO: 340942 - RNA, 32 nt, Human
caaaaaugaauagggauuucacuugggaaaug

SEQ ID NO: 340943 - RNA, 32 nt, Human
caaaaaugacacaagcacaacucuccagacgu

SEQ ID NO: 340944 - RNA, 32 nt, Human
caaaaaugcauucauccaaagcgacacaugug

SEQ ID NO: 340945 - RNA, 32 nt, Human
caaaaauggugaggagggacagauaggaacuc

SEQ ID NO: 340946 - RNA, 32 nt, Human
caaaaauguagaacauauuauagauaguuuac

SEQ ID NO: 340947 - RNA, 22 nt, Human
caaaaauuaacugggcuuggug

SEQ ID NO: 340948 - RNA, 22 nt, Human
caaaaauuagccaggcauggua

SEQ ID NO: 340949 - RNA, 22 nt, Human
caaaaauuagccaggcguggua

SEQ ID NO: 340950 - RNA, 32 nt, Human
caaaaauuagccaggcgugguggugcacaccu

SEQ ID NO: 340951 - RNA, 32 nt, Human
caaaaauuagccaggcgugguggugcacgucu

SEQ ID NO: 340952 - RNA, 32 nt, Human
caaaaauuagccaggcgugguggugcaugccu

SEQ ID NO: 340953 - RNA, 22 nt, Human
caaaaauuagccgggcauggua

SEQ ID NO: 340954 - RNA, 22 nt, Human
caaaaauuagccgggccuggug

SEQ ID NO: 340955 - RNA, 22 nt, Human
caaaaauuagccgggcguggua

SEQ ID NO: 340956 - RNA, 22 nt, Human
caaaaauuagccgggcuuagug

SEQ ID NO: 340957 - RNA, 32 nt, Human
caaaaauuagccuggcgugguggugcacaccu

SEQ ID NO: 340958 - RNA, 32 nt, Human
caaaaauuagccuggcgugguggugcaugccu

SEQ ID NO: 340959 - RNA, 32 nt, Human
caaaaauuagccuggugugguggugcacgccu

SEQ ID NO: 340960 - RNA, 22 nt, Human
caaaaauuagcuaggccuggug

SEQ ID NO: 340961 - RNA, 22 nt, Human
caaaaauuagcugggcauggua

SEQ ID NO: 340962 - RNA, 22 nt, Human
caaaaauuagcugggcgcagua

SEQ ID NO: 340963 - RNA, 32 nt, Human
caaaaauuagcugggcgcgguggugcacaccu

SEQ ID NO: 340964 - RNA, 22 nt, Human
caaaaauuagcugggcguggua

SEQ ID NO: 340965 - RNA, 22 nt, Human
caaaaauuagcugggcuuggug

SEQ ID NO: 340966 - RNA, 32 nt, Human
caaaaauuagcugggugcaguggugcaugccu

SEQ ID NO: 340967 - RNA, 32 nt, Human
caaaaauuagcugggugugauggugcacaucu

SEQ ID NO: 340968 - RNA, 32 nt, Human
caaaaauuagcugggugugguggugcacaccu

SEQ ID NO: 340969 - RNA, 32 nt, Human
caaaaauuagcugggugugguggugcacgccu

SEQ ID NO: 340970 - RNA, 32 nt, Human
caaaaauuagcugggugugguggugcaugccu

SEQ ID NO: 340971 - RNA, 32 nt, Human
caaaaauuauagaauaugggaucccgugugug

SEQ ID NO: 340972 - RNA, 32 nt, Human
caaaaauuaucggggugcaauggcaugcaucu

SEQ ID NO: 340973 - RNA, 32 nt, Human
caaaaauucaccaagcagaaugccucucagcc

SEQ ID NO: 340974 - RNA, 32 nt, Human
caaaaauucccacugucauagcuauaggcugu

SEQ ID NO: 340975 - RNA, 32 nt, Human
caaaaauuccuccccuccuggagcucaguguc

SEQ ID NO: 340976 - RNA, 32 nt, Human
caaaaauuggcugggcgcgguggugcaugccu

SEQ ID NO: 340977 - RNA, 32 nt, Human
caaaaauuucuggcuucucuuaccccuauugc

SEQ ID NO: 340978 - RNA, 32 nt, Human
caaaacaaaacaaaacaaaauuagcugagcau

SEQ ID NO: 340979 - RNA, 32 nt, Human
caaaacaaaacaaaacaaaugacaguaacccu

SEQ ID NO: 340980 - RNA, 32 nt, Human
caaaacaaaacaaaaguggguggcucacuggu

SEQ ID NO: 340981 - RNA, 32 nt, Human
caaaacaaaacaaaugacaguaacccuucccc

SEQ ID NO: 340982 - RNA, 31 nt, Human
caaaacaaaacagugacacucacuugugugu

SEQ ID NO: 340983 - RNA, 32 nt, Human
caaaacaaacaaacacaugggggagagagacu

SEQ ID NO: 340984 - RNA, 32 nt, Human
caaaacaaaccucccuuccccagcagggcugc

SEQ ID NO: 340985 - RNA, 32 nt, Human
caaaacaaaggaugggauacguauagaaugga

SEQ ID NO: 340986 - RNA, 22 nt, Human
caaaacaacaauguaagcagca

SEQ ID NO: 340987 - RNA, 32 nt, Human
caaaacaacacaugaaaccaggauacaagaca

SEQ ID NO: 340988 - RNA, 32 nt, Human
caaaacaacaugcaaccaaaaacuucugacau

SEQ ID NO: 340989 - RNA, 16 nt, Human
caaaacaagaacugug

SEQ ID NO: 340990 - RNA, 32 nt, Human
caaaacaagccaccaugaagcugucggugugu

SEQ ID NO: 340991 - RNA, 32 nt, Human
caaaacaagccgcuaaggcgguggcggcggcg

SEQ ID NO: 340992 - RNA, 32 nt, Human
caaaacaaggaaaucacacauaugcacacaua

SEQ ID NO: 340993 - RNA, 32 nt, Human
caaaacaaggaaaugcagagacagggaaggag

SEQ ID NO: 340994 - RNA, 32 nt, Human
caaaacaauauguauccguacuguaugugaua

SEQ ID NO: 340995 - RNA, 32 nt, Human
caaaacacaaaaagauauuccacaggacaugc

SEQ ID NO: 340996 - RNA, 23 nt, Human
caaaacacaaaucccuuugcuaa

SEQ ID NO: 340997 - RNA, 32 nt, Human
caaaacacacaccacacacacgcgcuuuucca

SEQ ID NO: 340998 - RNA, 32 nt, Human
caaaacacacaugccucuuuguuuugaugcuu

SEQ ID NO: 340999 - RNA, 32 nt, Human
caaaacacagaauugaagguggagccucagcc

SEQ ID NO: 341000 - RNA, 32 nt, Human
caaaacaccacugcuuccuacccagguggcga

SEQ ID NO: 341001 - RNA, 32 nt, Human
caaaacaccagccucucagcccucucuccaua

SEQ ID NO: 341002 - RNA, 32 nt, Human
caaaacacccaccccugcccuccuggcauacu

SEQ ID NO: 341003 - RNA, 32 nt, Human
caaaacacccggcuguccccagacuugugucc

SEQ ID NO: 341004 - RNA, 25 nt, Human
caaaacaccugguguugccgcuuca

SEQ ID NO: 341005 - RNA, 32 nt, Human
caaaacaccuuaaaacuuucuucauaaauacu

SEQ ID NO: 341006 - RNA, 32 nt, Human
caaaacacgguaccuccagaacacuucagcuc

SEQ ID NO: 341007 - RNA, 23 nt, Human
caaaacacuaggaaaugauuaug

SEQ ID NO: 341008 - RNA, 32 nt, Human
caaaacacugaauucucuagaccagaggugcu

SEQ ID NO: 341009 - RNA, 32 nt, Human
caaaacacugcacccgaggcagccaggcagcu

SEQ ID NO: 341010 - RNA, 32 nt, Human
caaaacacuuugaucauggcucagccacuuac

SEQ ID NO: 341011 - RNA, 32 nt, Human
caaaacagaaaagucgcuagaggaauaacaau

SEQ ID NO: 341012 - RNA, 23 nt, Human
caaaacagaacccgugggcccag

SEQ ID NO: 341013 - RNA, 32 nt, Human
caaaacagaagagggaacggaaaaagacaguc

SEQ ID NO: 341014 - RNA, 32 nt, Human
caaaacagagacgggggcaggggcugaagggc

SEQ ID NO: 341015 - RNA, 32 nt, Human
caaaacagaucaggcacagaaagcugaaggug

SEQ ID NO: 341016 - RNA, 32 nt, Human
caaaacagcuaacaacuuagcuguuuucauug

SEQ ID NO: 341017 - RNA, 32 nt, Human
caaaacaggauuagcagagcucuuaaaaacag

SEQ ID NO: 341018 - RNA, 31 nt, Human
caaaacagucuacacagcaggagggauggcu

SEQ ID NO: 341019 - RNA, 32 nt, Human
caaaacauaagaaaguauaccuuggauauaga

SEQ ID NO: 341020 - RNA, 32 nt, Human
caaaacauaccuguauacacacacauucacuc

SEQ ID NO: 341021 - RNA, 32 nt, Human
caaaacaucugaagagcuguacacccacaagg

SEQ ID NO: 341022 - RNA, 24 nt, Human
caaaacaugagaaagccgacugug

SEQ ID NO: 341023 - RNA, 32 nt, Human
caaaacaugcaaaaauuagcugggcaugguag

SEQ ID NO: 341024 - RNA, 32 nt, Human
caaaacauguaaauuaucaaaacaugcauuaa

SEQ ID NO: 341025 - RNA, 32 nt, Human
caaaacauuaggcuccuguuguaucuugguuu

SEQ ID NO: 341026 - RNA, 32 nt, Human
caaaacauuuggugaguuguauucugguuuuc

SEQ ID NO: 341027 - RNA, 32 nt, Human
caaaaccaaacagagacagcuuccagcaccuu

SEQ ID NO: 341028 - RNA, 32 nt, Human
caaaaccaaaggacaacugaggagacugccca

SEQ ID NO: 341029 - RNA, 32 nt, Human
caaaaccaagaacauaucuagcaagaaaacuu

SEQ ID NO: 341030 - RNA, 32 nt, Human
caaaaccaagcucccuucccuuccucccccuu

SEQ ID NO: 341031 - RNA, 32 nt, Human
caaaaccacaauaucagcaacacuuccuaauc

SEQ ID NO: 341032 - RNA, 32 nt, Human
caaaaccacagcccugucagugcagcccgugu

SEQ ID NO: 341033 - RNA, 32 nt, Human
caaaaccacauuagggaauaagcaguauuugc

SEQ ID NO: 341034 - RNA, 32 nt, Human
caaaaccaccuugccucagcugaucagaguuu

SEQ ID NO: 341035 - RNA, 32 nt, Human
caaaaccacuucagagaccaggguaucuccuc

SEQ ID NO: 341036 - RNA, 32 nt, Human
caaaaccagaacugaucuucacauuggaacaa

SEQ ID NO: 341037 - RNA, 32 nt, Human
caaaaccagaagcaaugagaacuaaucucuau

SEQ ID NO: 341038 - RNA, 23 nt, Human
caaaaccagcuugccuccaggac

SEQ ID NO: 341039 - RNA, 32 nt, Human
caaaaccaucaucaacaccaagauaaaaggac

SEQ ID NO: 341040 - RNA, 32 nt, Human
caaaacccacacauagagagacugagaucaca

SEQ ID NO: 341041 - RNA, 32 nt, Human
caaaacccagugccuuccaaaugagcugcagu

SEQ ID NO: 341042 - RNA, 32 nt, Human
caaaacccaguguuugcacacacacaaaaucu

SEQ ID NO: 341043 - RNA, 32 nt, Human
caaaaccccacaaugagauacuaccuacacgg

SEQ ID NO: 341044 - RNA, 32 nt, Human
caaaaccccagccaaugaccagcaguugguau

SEQ ID NO: 341045 - RNA, 32 nt, Human
caaaacccuagcagccugaagaacucuaagcc

SEQ ID NO: 341046 - RNA, 20 nt, Human
caaaacccugaagccauugg

SEQ ID NO: 341047 - RNA, 32 nt, Human
caaaaccgaggacauggugcucuggaguggcc

SEQ ID NO: 341048 - RNA, 32 nt, Human
caaaaccuaccacuucccagagaacaaaauua

SEQ ID NO: 341049 - RNA, 24 nt, Human
caaaaccuauucaaauggguucua

SEQ ID NO: 341050 - RNA, 32 nt, Human
caaaaccucaugcugaccagaguugaggaaca

SEQ ID NO: 341051 - RNA, 32 nt, Human
caaaaccugaaccaccuucugcacuuaaagaa

SEQ ID NO: 341052 - RNA, 22 nt, Human
caaaaccuggcagaugguccua

SEQ ID NO: 341053 - RNA, 32 nt, Human
caaaaccuggggaaguggggcuggaggcucug

SEQ ID NO: 341054 - RNA, 32 nt, Human
caaaaccuggugugucacgugaggucaggagu

SEQ ID NO: 341055 - RNA, 22 nt, Human
caaaaccuguugccuccaccac

SEQ ID NO: 341056 - RNA, 32 nt, Human
caaaaccuucuccagagaaucaagcaagaccu

SEQ ID NO: 341057 - RNA, 32 nt, Human
caaaaccuuugagguagaccaggauuucuaau

SEQ ID NO: 341058 - RNA, 32 nt, Human
caaaacgcaggcaacagaccuauacauuucaa

SEQ ID NO: 341059 - RNA, 32 nt, Human
caaaacggaagaggagaaacucaauacaaaga

SEQ ID NO: 341060 - RNA, 32 nt, Human
caaaacgucgucccugcccuccgggaguuugu

SEQ ID NO: 341061 - RNA, 32 nt, Human
caaaacgugggugcaaaagugaugagacccca

SEQ ID NO: 341062 - RNA, 32 nt, Human
caaaacuaaaaucaaaguuucacuacauaaca

SEQ ID NO: 341063 - RNA, 32 nt, Human
caaaacuaaauaaacguaaaagaaauacaaca

SEQ ID NO: 341064 - RNA, 32 nt, Human
caaaacuaaauacuugcuccauuuacaaacua

SEQ ID NO: 341065 - RNA, 32 nt, Human
caaaacuaacaaaaauccuguuagccaaauaa

SEQ ID NO: 341066 - RNA, 32 nt, Human
caaaacuaacuguacaucacagaacacacuug

SEQ ID NO: 341067 - RNA, 32 nt, Human
caaaacuaccucuucaguguuuuuaacuuuug

SEQ ID NO: 341068 - RNA, 32 nt, Human
caaaacuagaucuuugucaucuuuucaguaau

SEQ ID NO: 341069 - RNA, 32 nt, Human
caaaacucaaaggcggagagcucagugggcac

SEQ ID NO: 341070 - RNA, 32 nt, Human
caaaacucaggccagagccacagcugggagac

SEQ ID NO: 341071 - RNA, 32 nt, Human
caaaacucaguagcucagguucucuggagcca

SEQ ID NO: 341072 - RNA, 32 nt, Human
caaaacucaguuaucugugggggaagugguag

SEQ ID NO: 341073 - RNA, 32 nt, Human
caaaacuccugccucucggccgcuucagcagg

SEQ ID NO: 341074 - RNA, 32 nt, Human
caaaacucuauucaagaaagcacacaggccuu

SEQ ID NO: 341075 - RNA, 32 nt, Human
caaaacucuccucugcugcuggcugguuagag

SEQ ID NO: 341076 - RNA, 32 nt, Human
caaaacucugucaggcauugaaugacaagcau

SEQ ID NO: 341077 - RNA, 32 nt, Human
caaaacucuguggggcuggguuccucucuuuu

SEQ ID NO: 341078 - RNA, 32 nt, Human
caaaacugagugaaaguaacugcugagauaac

SEQ ID NO: 341079 - RNA, 32 nt, Human
caaaacugagugugugucucuguuucaugggg

SEQ ID NO: 341080 - RNA, 32 nt, Human
caaaacugccaaaaauauaauucuuaguggaa

SEQ ID NO: 341081 - RNA, 32 nt, Human
caaaacugccucaagucggccucuccaggccc

SEQ ID NO: 341082 - RNA, 32 nt, Human
caaaacugccucuuucuuucucguggcaaauc

SEQ ID NO: 341083 - RNA, 20 nt, Human
caaaacugcuccuccuccug

SEQ ID NO: 341084 - RNA, 32 nt, Human
caaaacugcuucugguuuaggcacacgucacg

SEQ ID NO: 341085 - RNA, 32 nt, Human
caaaacugcuuugaaccaucgcacugcaaccu

SEQ ID NO: 341086 - RNA, 32 nt, Human
caaaacuggacucagcacacuccugggaaucu

SEQ ID NO: 341087 - RNA, 32 nt, Human
caaaacuguccagcaaaaugaaaagacucacg

SEQ ID NO: 341088 - RNA, 32 nt, Human
caaaacugugaggaagguuaucgggacagagg

SEQ ID NO: 341089 - RNA, 32 nt, Human
caaaacuguuaggugaguagggcaguucauuc

SEQ ID NO: 341090 - RNA, 32 nt, Human
caaaacuguuuuauagucauugauuuggugag

SEQ ID NO: 341091 - RNA, 32 nt, Human
caaaacuuccaggggaauguagagccacgucc

SEQ ID NO: 341092 - RNA, 32 nt, Human
caaaacuucgagaagauuuggaacucuacuau

SEQ ID NO: 341093 - RNA, 32 nt, Human
caaaacuugcagcuagaauugagggaagagag

SEQ ID NO: 341094 - RNA, 32 nt, Human
caaaacuuuguugaccucuuucucuguagaaa

SEQ ID NO: 341095 - RNA, 32 nt, Human
caaaagaaaagaaagaaagggaaguagaagua

SEQ ID NO: 341096 - RNA, 32 nt, Human
caaaagaaaccagcuccugugucaaagggcuu

SEQ ID NO: 341097 - RNA, 18 nt, Human
caaaagaaagaaaggggg

SEQ ID NO: 341098 - RNA, 32 nt, Human
caaaagaaagagacuucauuuggcaguucuga

SEQ ID NO: 341099 - RNA, 32 nt, Human
caaaagaaagccccaaacaacagaaagcauag

SEQ ID NO: 341100 - RNA, 32 nt, Human
caaaagaaagcggggacagggaaggaggaaga

SEQ ID NO: 341101 - RNA, 32 nt, Human
caaaagaacacaaaagccuuuuuccauuguau

SEQ ID NO: 341102 - RNA, 32 nt, Human
caaaagaagaauagccuccaccaggaaggugu

SEQ ID NO: 341103 - RNA, 32 nt, Human
caaaagaagacauacaugcagccaacaaauac

SEQ ID NO: 341104 - RNA, 32 nt, Human
caaaagaagagagauuccaagcaacccaucuu

SEQ ID NO: 341105 - RNA, 32 nt, Human
caaaagaagccaauggagggagagggagcguc

SEQ ID NO: 341106 - RNA, 32 nt, Human
caaaagaaugaaagguggcagugaagaugggg

SEQ ID NO: 341107 - RNA, 32 nt, Human
caaaagacagcagugggccugacaucuugggc

SEQ ID NO: 341108 - RNA, 32 nt, Human
caaaagacagccacccuccugcuccggauccu

SEQ ID NO: 341109 - RNA, 32 nt, Human
caaaagacauuucugauuucugcuucacuuug

SEQ ID NO: 341110 - RNA, 32 nt, Human
caaaagaccagaaaagcacucuccacccagca

SEQ ID NO: 341111 - RNA, 32 nt, Human
caaaagaccagcuggucccagauucgcugcug

SEQ ID NO: 341112 - RNA, 19 nt, Human
caaaagacugcccagaggg

SEQ ID NO: 341113 - RNA, 32 nt, Human
caaaagacugguuuguuugcuuaauuuccuuc

SEQ ID NO: 341114 - RNA, 32 nt, Human
caaaagacuguaccuaacuggaaugagguuac

SEQ ID NO: 341115 - RNA, 32 nt, Human
caaaagagcccaaaugaccaaauccauggaua

SEQ ID NO: 341116 - RNA, 32 nt, Human
caaaagagcggagcauuccucccacccaggcg

SEQ ID NO: 341117 - RNA, 32 nt, Human
caaaagagucaccaccucaugccaucuuguua

SEQ ID NO: 341118 - RNA, 32 nt, Human
caaaagaguuguuuuuaacugcccuaaacauu

SEQ ID NO: 341119 - RNA, 32 nt, Human
caaaagauaacauuggugucacugugguauua

SEQ ID NO: 341120 - RNA, 32 nt, Human
caaaagauacgcccuucucccugcacauaaag

SEQ ID NO: 341121 - RNA, 32 nt, Human
caaaagaugcagaggucaaccugauaaucaug

SEQ ID NO: 341122 - RNA, 32 nt, Human
caaaagaugcugcagagacagcuccccacgcc

SEQ ID NO: 341123 - RNA, 32 nt, Human
caaaagauggagugagccacaggaaguuuggg

SEQ ID NO: 341124 - RNA, 24 nt, Human
caaaagcaaaagcacaguaacuca

SEQ ID NO: 341125 - RNA, 32 nt, Human
caaaagcaaacaguuccagcaggcucucuaaa

SEQ ID NO: 341126 - RNA, 22 nt, Human
caaaagcaaagcauuaguggcu

SEQ ID NO: 341127 - RNA, 32 nt, Human
caaaagcaagaaguggucuucuggccuggcaa

SEQ ID NO: 341128 - RNA, 22 nt, Human
caaaagcagaaaucgcugcaag

SEQ ID NO: 341129 - RNA, 32 nt, Human
caaaagcagacaccuuugccuuguuccugagc

SEQ ID NO: 341130 - RNA, 32 nt, Human
caaaagcagcagacauguaagcagaugugcaa

SEQ ID NO: 341131 - RNA, 32 nt, Human
caaaagcagcgugggagcgccgggcuggcuuc

SEQ ID NO: 341132 - RNA, 32 nt, Human
caaaagcaggugaaaugaggcugaaaucaagg

SEQ ID NO: 341133 - RNA, 32 nt, Human
caaaagcaugucucacauaguggcaggcagga

SEQ ID NO: 341134 - RNA, 32 nt, Human
caaaagccaaggggaauuuugcagugauagga

SEQ ID NO: 341135 - RNA, 32 nt, Human
caaaagccaaguccagaaggaggugcuuuuaa

SEQ ID NO: 341136 - RNA, 32 nt, Human
caaaagccagcaacacagcauugaguacacga

SEQ ID NO: 341137 - RNA, 24 nt, Human
caaaagccagcaauaauucuucaa

SEQ ID NO: 341138 - RNA, 32 nt, Human
caaaagccagggugcccccagaagaacugaga

SEQ ID NO: 341139 - RNA, 32 nt, Human
caaaagccagucccauggcacucgagaagcag

SEQ ID NO: 341140 - RNA, 32 nt, Human
caaaagccauucuaacagcagcaccuugucgg

SEQ ID NO: 341141 - RNA, 32 nt, Human
caaaagccccuggcagugguggggaauguuga

SEQ ID NO: 341142 - RNA, 32 nt, Human
caaaagcccugaccccagggaaggaggcugcu

SEQ ID NO: 341143 - RNA, 32 nt, Human
caaaagccuaccccugcaacaaaauagaagcu

SEQ ID NO: 341144 - RNA, 32 nt, Human
caaaagccucuccugcugaugggcacuaggag

SEQ ID NO: 341145 - RNA, 32 nt, Human
caaaagccugaagaaagugaucaagaucacug

SEQ ID NO: 341146 - RNA, 32 nt, Human
caaaagccugggaagaauuuucccuauccaga

SEQ ID NO: 341147 - RNA, 26 nt, Human
caaaagccuguguguuccuccauuga

SEQ ID NO: 341148 - RNA, 25 nt, Human
caaaagcuccauaaaggguuggaga

SEQ ID NO: 341149 - RNA, 22 nt, Human
caaaagcugggauuacaggcgu

SEQ ID NO: 341150 - RNA, 32 nt, Human
caaaagcuucuucucccccagugcugaucuug

SEQ ID NO: 341151 - RNA, 20 nt, Human
caaaagcuugggggaggagg

SEQ ID NO: 341152 - RNA, 32 nt, Human
caaaagcuuugccacauucuucacauuuguau

SEQ ID NO: 341153 - RNA, 32 nt, Human
caaaagcuuuucauuaucugaagacaaaaccg

SEQ ID NO: 341154 - RNA, 32 nt, Human
caaaaggaacacacuugcaauuuucuacuuuu

SEQ ID NO: 341155 - RNA, 32 nt, Human
caaaaggaagaaaaggaggaaggaaggaaaag

SEQ ID NO: 341156 - RNA, 32 nt, Human
caaaaggaauaagcaaaggugugcaaagguaa

SEQ ID NO: 341157 - RNA, 32 nt, Human
caaaaggacaggcuguccaagguagaaacugu

SEQ ID NO: 341158 - RNA, 32 nt, Human
caaaaggagacacccccaaaucccacucuaaa

SEQ ID NO: 341159 - RNA, 23 nt, Human
caaaaggaggcgaaugggcucag

SEQ ID NO: 341160 - RNA, 32 nt, Human
caaaaggaucagaauccacguaaugaaaaagg

SEQ ID NO: 341161 - RNA, 32 nt, Human
caaaaggcaaagguauuauguaaaaauauuua

SEQ ID NO: 341162 - RNA, 32 nt, Human
caaaaggcaagacucuggcaggugggucaaug

SEQ ID NO: 341163 - RNA, 32 nt, Human
caaaaggcagaaggagggagaccccaaaaaga

SEQ ID NO: 341164 - RNA, 32 nt, Human
caaaaggcaggcagugcugguuccucugccug

SEQ ID NO: 341165 - RNA, 32 nt, Human
caaaaggcagugccaugcaagcuguuuaaaau

SEQ ID NO: 341166 - RNA, 32 nt, Human
caaaaggccuguugacuggggcugcuuuuaac

SEQ ID NO: 341167 - RNA, 32 nt, Human
caaaaggcuaggggguuggagguggggacucu

SEQ ID NO: 341168 - RNA, 32 nt, Human
caaaagggaagcagaaacaaaugaaguugcag

SEQ ID NO: 341169 - RNA, 32 nt, Human
caaaagggaguggagugcagucaugcagaagc

SEQ ID NO: 341170 - RNA, 32 nt, Human
caaaagggccauuuucaccugccucagcauuc

SEQ ID NO: 341171 - RNA, 32 nt, Human
caaaagggccucucccuuuguguucuauacau

SEQ ID NO: 341172 - RNA, 32 nt, Human
caaaagggcugcacuucucgggguuugcagaa

SEQ ID NO: 341173 - RNA, 18 nt, Human
caaaagggcuggcagcug

SEQ ID NO: 341174 - RNA, 32 nt, Human
caaaaggggagaagaucccacuacucucccac

SEQ ID NO: 341175 - RNA, 32 nt, Human
caaaaggggcugggacacucugaacuccugca

SEQ ID NO: 341176 - RNA, 32 nt, Human
caaaaggguggaagaaccaucaagacagcuug

SEQ ID NO: 341177 - RNA, 32 nt, Human
caaaagggugggggugggaggggcagaggcca

SEQ ID NO: 341178 - RNA, 32 nt, Human
caaaaggucauuguuucucacuagaccccagg

SEQ ID NO: 341179 - RNA, 32 nt, Human
caaaaggugccauuaaaaagcaauaccauuuu

SEQ ID NO: 341180 - RNA, 32 nt, Human
caaaagguggcaacccauggaggcagaaagaa

SEQ ID NO: 341181 - RNA, 32 nt, Human
caaaaggugggugguagguguggggagagcug

SEQ ID NO: 341182 - RNA, 32 nt, Human
caaaaguaagccauccucaaauaaggaacccc

SEQ ID NO: 341183 - RNA, 23 nt, Human
caaaaguaaucgcaguuuugcca

SEQ ID NO: 341184 - RNA, 24 nt, Human
caaaaguaauugcgguuuuugcca

SEQ ID NO: 341185 - RNA, 22 nt, Human
caaaaguaauugugguuuuugc

SEQ ID NO: 341186 - RNA, 24 nt, Human
caaaaguaauugugguuuuugcca

SEQ ID NO: 341187 - RNA, 32 nt, Human
caaaaguacgaacuuagcaacacuauauugag

SEQ ID NO: 341188 - RNA, 32 nt, Human
caaaaguagacugauuacacugaggugaggcu

SEQ ID NO: 341189 - RNA, 24 nt, Human
caaaaguagggccagguuuugaca

SEQ ID NO: 341190 - RNA, 17 nt, Human
caaaaguauugggugag

SEQ ID NO: 341191 - RNA, 32 nt, Human
caaaagucacagcuuagcugggcacaguggcu

SEQ ID NO: 341192 - RNA, 32 nt, Human
caaaagucaucaacucagagacagagccaggg

SEQ ID NO: 341193 - RNA, 32 nt, Human
caaaagucauucucucuuuaaccauauaauuu

SEQ ID NO: 341194 - RNA, 32 nt, Human
caaaaguccccgggaccuggagagauggaguc

SEQ ID NO: 341195 - RNA, 32 nt, Human
caaaaguccuuuuagcauucuaccucaaaggg

SEQ ID NO: 341196 - RNA, 32 nt, Human
caaaagugaaguaaugcacagauggaaauuua

SEQ ID NO: 341197 - RNA, 32 nt, Human
caaaagugaauuacccagagugugcuggcaga

SEQ ID NO: 341198 - RNA, 32 nt, Human
caaaagugacaauacuguugguccuugugaau

SEQ ID NO: 341199 - RNA, 32 nt, Human
caaaagugaccuucuagccuucuccugcccuc

SEQ ID NO: 341200 - RNA, 32 nt, Human
caaaagugaguuugcuuaaugaagacauuuaa

SEQ ID NO: 341201 - RNA, 32 nt, Human
caaaagugauguaaaaaugaaaagccaaauaa

SEQ ID NO: 341202 - RNA, 32 nt, Human
caaaaguggccaggcuggaggucuucuaaugu

SEQ ID NO: 341203 - RNA, 32 nt, Human
caaaaguggccuuuaccucuggauagcuuuua

SEQ ID NO: 341204 - RNA, 32 nt, Human
caaaagugugugccaccauggccugcuauuuu

SEQ ID NO: 341205 - RNA, 32 nt, Human
caaaaguuccccucaguucuuggcuuucccuu

SEQ ID NO: 341206 - RNA, 32 nt, Human
caaaaguuuaaucagaggaaauucuuucccag

SEQ ID NO: 341207 - RNA, 32 nt, Human
caaaaguuuaguuuauaaugauaucucucaaa

SEQ ID NO: 341208 - RNA, 32 nt, Human
caaaaguuuccccucauaauucuuugcucuug

SEQ ID NO: 341209 - RNA, 32 nt, Human
caaaauaaaaggauuuuucuguaacugucacc

SEQ ID NO: 341210 - RNA, 21 nt, Human
caaaauaaacagauucuucaa

SEQ ID NO: 341211 - RNA, 32 nt, Human
caaaauaaacuuucuccagucugggaaccuuu

SEQ ID NO: 341212 - RNA, 26 nt, Human
caaaauaaagccccucuuugcauuua

SEQ ID NO: 341213 - RNA, 32 nt, Human
caaaauaaaggccgacuacuuagcagagaaua

SEQ ID NO: 341214 - RNA, 32 nt, Human
caaaauaacacacuccagaacuuggcaguugu

SEQ ID NO: 341215 - RNA, 32 nt, Human
caaaauaacuaaagacauuucagcauugcuua

SEQ ID NO: 341216 - RNA, 32 nt, Human
caaaauaacuccagaaagaagcacuuagcgug

SEQ ID NO: 341217 - RNA, 32 nt, Human
caaaauaagacauacuuuaacuauugucauuu

SEQ ID NO: 341218 - RNA, 32 nt, Human
caaaauaauaacaggcugggugcaauggcuca

SEQ ID NO: 341219 - RNA, 32 nt, Human
caaaauaauaagagccaucuaugacaaaacca

SEQ ID NO: 341220 - RNA, 32 nt, Human
caaaauaauaagagccauuuaugacaaaccca

SEQ ID NO: 341221 - RNA, 32 nt, Human
caaaauaauacaacaaucccagcaucugauug

SEQ ID NO: 341222 - RNA, 32 nt, Human
caaaauaauggugauacauucuagccuuaaga

SEQ ID NO: 341223 - RNA, 32 nt, Human
caaaauaaugugccacuagaaaugguguaaag

SEQ ID NO: 341224 - RNA, 32 nt, Human
caaaauacaaguccuguucuguaguucuugcc

SEQ ID NO: 341225 - RNA, 32 nt, Human
caaaauacacugugaguucaaugauucugcuu

SEQ ID NO: 341226 - RNA, 32 nt, Human
caaaauacagcagaggacaccaggacuuucau

SEQ ID NO: 341227 - RNA, 32 nt, Human
caaaauaccacggacaugcuagugcagagugg

SEQ ID NO: 341228 - RNA, 32 nt, Human
caaaauaccagccuguuuagcaguguuacacu

SEQ ID NO: 341229 - RNA, 32 nt, Human
caaaauaccuguaaucccagcacuuugggagg

SEQ ID NO: 341230 - RNA, 32 nt, Human
caaaauacgugcucuccucucuccuugucagc

SEQ ID NO: 341231 - RNA, 21 nt, Human
caaaauacuauuucuuacauu

SEQ ID NO: 341232 - RNA, 32 nt, Human
caaaauacuguaaucucagcauuuugggagac

SEQ ID NO: 341233 - RNA, 32 nt, Human
caaaauagaacacaauagagaacuucaaaaua

SEQ ID NO: 341234 - RNA, 32 nt, Human
caaaauagaacugcauuuccuuuaaaauggag

SEQ ID NO: 341235 - RNA, 32 nt, Human
caaaauagagagagggaaaaauccuuguuuuc

SEQ ID NO: 341236 - RNA, 32 nt, Human
caaaauagaguaaagaaagaaguugagucaaa

SEQ ID NO: 341237 - RNA, 32 nt, Human
caaaauagcaaaauggugaagaggaggguucu

SEQ ID NO: 341238 - RNA, 32 nt, Human
caaaauagcaguaucagugucauaauaucacc

SEQ ID NO: 341239 - RNA, 32 nt, Human
caaaauagcccucccauugucagucuggacaa

SEQ ID NO: 341240 - RNA, 32 nt, Human
caaaauagccuauccuuaauaaauccuccacu

SEQ ID NO: 341241 - RNA, 31 nt, Human
caaaauagugauggagaaaaagguugucuuu

SEQ ID NO: 341242 - RNA, 32 nt, Human
caaaauaguucagaacauagagaaggaccaag

SEQ ID NO: 341243 - RNA, 32 nt, Human
caaaauaguugaagcuuaauuacuugacuugc

SEQ ID NO: 341244 - RNA, 32 nt, Human
caaaauauaaugaaggggauggugggauauuu

SEQ ID NO: 341245 - RNA, 23 nt, Human
caaaauauauacaacacacauuu

SEQ ID NO: 341246 - RNA, 24 nt, Human
caaaauauauauucauaccauuua

SEQ ID NO: 341247 - RNA, 32 nt, Human
caaaauauccuaagccuccuggaccuggcagg

SEQ ID NO: 341248 - RNA, 32 nt, Human
caaaauaucugaauaggugcaguuuuaguuua

SEQ ID NO: 341249 - RNA, 32 nt, Human
caaaauauggcugggugcaguggcucacaccg

SEQ ID NO: 341250 - RNA, 32 nt, Human
caaaauauggugcauggacaugcugaacugaa

SEQ ID NO: 341251 - RNA, 31 nt, Human
caaaauauuacuguggagguugaagaguuug

SEQ ID NO: 341252 - RNA, 32 nt, Human
caaaauauugagacuccugucucuccaaaaca

SEQ ID NO: 341253 - RNA, 23 nt, Human
caaaauauuggaaauacaggcau

SEQ ID NO: 341254 - RNA, 32 nt, Human
caaaaucacaaaacuaaguugucaguuaucac

SEQ ID NO: 341255 - RNA, 32 nt, Human
caaaaucacgccacugcacuccagccugggca

SEQ ID NO: 341256 - RNA, 32 nt, Human
caaaaucacugaggcugugacaggaggggaag

SEQ ID NO: 341257 - RNA, 32 nt, Human
caaaaucacugcaccuuguccaacuccauuuu

SEQ ID NO: 341258 - RNA, 32 nt, Human
caaaaucagaaacacaguacaaauaaaacaga

SEQ ID NO: 341259 - RNA, 23 nt, Human
caaaaucagaccagaacuucuga

SEQ ID NO: 341260 - RNA, 32 nt, Human
caaaaucagaccuuggccaugaccuuaagcag

SEQ ID NO: 341261 - RNA, 32 nt, Human
caaaaucaggguuugguuuggggaagaaaauc

SEQ ID NO: 341262 - RNA, 20 nt, Human
caaaaucauaggcuuuuucu

SEQ ID NO: 341263 - RNA, 32 nt, Human
caaaaucaugccaauguauuccagucugggug

SEQ ID NO: 341264 - RNA, 32 nt, Human
caaaaucaugccacugcacuccagccugggca

SEQ ID NO: 341265 - RNA, 32 nt, Human
caaaaucaugccauugcacuccagccugggug

SEQ ID NO: 341266 - RNA, 32 nt, Human
caaaauccaaauucaaagaaacagggcguggg

SEQ ID NO: 341267 - RNA, 32 nt, Human
caaaauccauuucuuauugaucuuuaaagaug

SEQ ID NO: 341268 - RNA, 32 nt, Human
caaaaucccaccacugcacuccagccugggug

SEQ ID NO: 341269 - RNA, 32 nt, Human
caaaaucccacugaugcccaucaugcccucag

SEQ ID NO: 341270 - RNA, 32 nt, Human
caaaauccccucccaaaccacucuccacagcu

SEQ ID NO: 341271 - RNA, 22 nt, Human
caaaauccugggauuacaggcg

SEQ ID NO: 341272 - RNA, 32 nt, Human
caaaauccuuucucccccgaaugcuuuaccag

SEQ ID NO: 341273 - RNA, 32 nt, Human
caaaaucgaaaucagguguuugcucaaaugag

SEQ ID NO: 341274 - RNA, 32 nt, Human
caaaaucgcgucacugcacuccagccugagug

SEQ ID NO: 341275 - RNA, 32 nt, Human
caaaaucuauucuauuuccucaucucccuaac

SEQ ID NO: 341276 - RNA, 32 nt, Human
caaaaucucagcucuuuauccauugcuuucac

SEQ ID NO: 341277 - RNA, 32 nt, Human
caaaaucucauggguuaguuaaccaggugcaa

SEQ ID NO: 341278 - RNA, 32 nt, Human
caaaaucuccaauccacacauauuguuuuaaa

SEQ ID NO: 341279 - RNA, 32 nt, Human
caaaaucucuacugcuuuggauccugggucaa

SEQ ID NO: 341280 - RNA, 32 nt, Human
caaaaucuuccuuuguguaggacaagaaaauu

SEQ ID NO: 341281 - RNA, 32 nt, Human
caaaaucuuugguagauggagggaacugggga

SEQ ID NO: 341282 - RNA, 24 nt, Human
caaaaugaaaacaaagcaaaugaa

SEQ ID NO: 341283 - RNA, 32 nt, Human
caaaaugaaaccaguaaagcaucuguugacca

SEQ ID NO: 341284 - RNA, 24 nt, Human
caaaaugaaaggaaaaagccuccu

SEQ ID NO: 341285 - RNA, 32 nt, Human
caaaaugaaaggauuucuggucucggugcugu

SEQ ID NO: 341286 - RNA, 21 nt, Human
caaaaugaaaguaauggagaa

SEQ ID NO: 341287 - RNA, 20 nt, Human
caaaaugaaauccagugaag

SEQ ID NO: 341288 - RNA, 32 nt, Human
caaaaugaacuuacucuagaaagcuuacccuu

SEQ ID NO: 341289 - RNA, 32 nt, Human
caaaaugaagaaaagcagaugaacagaaggag

SEQ ID NO: 341290 - RNA, 32 nt, Human
caaaaugacaaacacaaagggaaagaggagag

SEQ ID NO: 341291 - RNA, 29 nt, Human
caaaaugacaacacccagaaauucaguaa

SEQ ID NO: 341292 - RNA, 32 nt, Human
caaaaugacuucgaacugucuaaugccucaga

SEQ ID NO: 341293 - RNA, 32 nt, Human
caaaaugagacguggucuaaagcccuuucccu

SEQ ID NO: 341294 - RNA, 23 nt, Human
caaaaugagagacaaaaaugaag

SEQ ID NO: 341295 - RNA, 32 nt, Human
caaaaugagcccuguccugccuaaggcugaac

SEQ ID NO: 341296 - RNA, 32 nt, Human
caaaaugaggaagugaguguucuuggacgaac

SEQ ID NO: 341297 - RNA, 32 nt, Human
caaaaugaucacugccuacuugugauucaaau

SEQ ID NO: 341298 - RNA, 32 nt, Human
caaaaugauuuccaaagcagaacauggaacuu

SEQ ID NO: 341299 - RNA, 32 nt, Human
caaaaugcagagccaggucccucagcccagac

SEQ ID NO: 341300 - RNA, 32 nt, Human
caaaaugcauuacaccuguaguguaaaguggc

SEQ ID NO: 341301 - RNA, 32 nt, Human
caaaaugccaaagauuaaucugugauugguga

SEQ ID NO: 341302 - RNA, 32 nt, Human
caaaaugccgaacgagaaaacuguccauuuuc

SEQ ID NO: 341303 - RNA, 32 nt, Human
caaaaugcuacacccacauucucuccaacucu

SEQ ID NO: 341304 - RNA, 32 nt, Human
caaaaugcucaaggaauuagcucugggaauau

SEQ ID NO: 341305 - RNA, 32 nt, Human
caaaaugcucagaagaaaagugaauaauucag

SEQ ID NO: 341306 - RNA, 23 nt, Human
caaaaugcugagauuacaggugu

SEQ ID NO: 341307 - RNA, 32 nt, Human
caaaaugcugggacuauaggugugagccacug

SEQ ID NO: 341308 - RNA, 23 nt, Human
caaaaugcugggacuaugggcau

SEQ ID NO: 341309 - RNA, 23 nt, Human
caaaaugcugggauuacaagcgu

SEQ ID NO: 341310 - RNA, 19 nt, Human
caaaaugcugggauuacag

SEQ ID NO: 341311 - RNA, 20 nt, Human
caaaaugcugggauuacagg

SEQ ID NO: 341312 - RNA, 21 nt, Human
caaaaugcugggauuacaggc

SEQ ID NO: 341313 - RNA, 22 nt, Human
caaaaugcugggauuacaggca

SEQ ID NO: 341314 - RNA, 23 nt, Human
caaaaugcugggauuacaggcau

SEQ ID NO: 341315 - RNA, 23 nt, Human
caaaaugcugggauuacaggcgu

SEQ ID NO: 341316 - RNA, 23 nt, Human
caaaaugcugggauuacaggggu

SEQ ID NO: 341317 - RNA, 23 nt, Human
caaaaugcugggauuacaugcau

SEQ ID NO: 341318 - RNA, 32 nt, Human
caaaaugcugggauugcagacauggaccauca

SEQ ID NO: 341319 - RNA, 32 nt, Human
caaaaugcuguuggaauaugcagagaauugcu

SEQ ID NO: 341320 - RNA, 23 nt, Human
caaaaugcuucgauugcaggcau

SEQ ID NO: 341321 - RNA, 23 nt, Human
caaaaugcuuggauuacaggcau

SEQ ID NO: 341322 - RNA, 23 nt, Human
caaaaugcuuguccaggacucag

SEQ ID NO: 341323 - RNA, 32 nt, Human
caaaaugcuuugaggauucaucagaaccagua

SEQ ID NO: 341324 - RNA, 32 nt, Human
caaaaugcuuuuuauuucugcauauguugaau

SEQ ID NO: 341325 - RNA, 32 nt, Human
caaaaugcuuuuuauuucugcauauguuugaa

SEQ ID NO: 341326 - RNA, 21 nt, Human
caaaauggaauagggacucag

SEQ ID NO: 341327 - RNA, 32 nt, Human
caaaauggaauagggacucagggugggucagg

SEQ ID NO: 341328 - RNA, 21 nt, Human
caaaauggagauggaucccag

SEQ ID NO: 341329 - RNA, 32 nt, Human
caaaauggagguuucacaggcugugcgggagc

SEQ ID NO: 341330 - RNA, 21 nt, Human
caaaauggcagcauggcccag

SEQ ID NO: 341331 - RNA, 21 nt, Human
caaaauggcuuccuacauuua

SEQ ID NO: 341332 - RNA, 32 nt, Human
caaaauggggaugucaagccaaagagucagaa

SEQ ID NO: 341333 - RNA, 32 nt, Human
caaaaugguaaauacucauuaccucucucagc

SEQ ID NO: 341334 - RNA, 32 nt, Human
caaaauguaaauuauguauaccugccaagaua

SEQ ID NO: 341335 - RNA, 24 nt, Human
caaaauguauaauuucuuaauuug

SEQ ID NO: 341336 - RNA, 32 nt, Human
caaaauguauuuauauguucucugcugauguu

SEQ ID NO: 341337 - RNA, 32 nt, Human
caaaaugucucaauggugcuauaauaaauaaa

SEQ ID NO: 341338 - RNA, 32 nt, Human
caaaaugucucuggacaaagagagucagagaa

SEQ ID NO: 341339 - RNA, 32 nt, Human
caaaaugugcaaggaagaauaauggaagcccc

SEQ ID NO: 341340 - RNA, 32 nt, Human
caaaauguggaaugcauccaaauaggagucuu

SEQ ID NO: 341341 - RNA, 32 nt, Human
caaaauguuccaagcacuuuaggcagacacca

SEQ ID NO: 341342 - RNA, 32 nt, Human
caaaauguucuuuguucuuuggcuccaaaaag

SEQ ID NO: 341343 - RNA, 23 nt, Human
caaaauguugagauugcaggcau

SEQ ID NO: 341344 - RNA, 23 nt, Human
caaaauguugcaauuacaggcau

SEQ ID NO: 341345 - RNA, 19 nt, Human
caaaauguuggcuuuuucu

SEQ ID NO: 341346 - RNA, 32 nt, Human
caaaauguuuucuccagcaucacagauccugc

SEQ ID NO: 341347 - RNA, 32 nt, Human
caaaauuaaaaacacaacaguggaagagaaac

SEQ ID NO: 341348 - RNA, 32 nt, Human
caaaauuacagacaggucuugcuuucuuugua

SEQ ID NO: 341349 - RNA, 32 nt, Human
caaaauuaccuguacaccacaccccugugaca

SEQ ID NO: 341350 - RNA, 32 nt, Human
caaaauuacgccacugcacuccagccugggca

SEQ ID NO: 341351 - RNA, 32 nt, Human
caaaauuagaaaaauaacucccuacuuuucca

SEQ ID NO: 341352 - RNA, 32 nt, Human
caaaauuagccgggcaugguggaacacaccug

SEQ ID NO: 341353 - RNA, 32 nt, Human
caaaauuagcuaggcacuaucucauucauacu

SEQ ID NO: 341354 - RNA, 32 nt, Human
caaaauuauuuccauauucauaugaaaaaccc

SEQ ID NO: 341355 - RNA, 32 nt, Human
caaaauuauuuguaaagaacaucuuuccuacu

SEQ ID NO: 341356 - RNA, 22 nt, Human
caaaauuauuuucaaaucaaga

SEQ ID NO: 341357 - RNA, 32 nt, Human
caaaauucaaauaacauaaacuucaccacuuu

SEQ ID NO: 341358 - RNA, 32 nt, Human
caaaauucaagcaauucuccugccucagccuc

SEQ ID NO: 341359 - RNA, 32 nt, Human
caaaauucagcaccuuguacauauaucagaua

SEQ ID NO: 341360 - RNA, 28 nt, Human
caaaauucagcugcugccucugucuuga

SEQ ID NO: 341361 - RNA, 32 nt, Human
caaaauucaguaaaccacacaaaucagguaag

SEQ ID NO: 341362 - RNA, 32 nt, Human
caaaauucauuugcuugcaaucuaaucugaac

SEQ ID NO: 341363 - RNA, 32 nt, Human
caaaauuccuagaauaccauguuuucaugguu

SEQ ID NO: 341364 - RNA, 32 nt, Human
caaaauucuagggaaaaauacugcuaaaaaug

SEQ ID NO: 341365 - RNA, 32 nt, Human
caaaauucucauuuaauuuucuggucagcaag

SEQ ID NO: 341366 - RNA, 32 nt, Human
caaaauucuccacaauccuccaccuccgcucu

SEQ ID NO: 341367 - RNA, 23 nt, Human
caaaauucugggauuacaggcau

SEQ ID NO: 341368 - RNA, 32 nt, Human
caaaauugagcauaguaauuacccacagaagg

SEQ ID NO: 341369 - RNA, 32 nt, Human
caaaauugcaccacugcacacugcacuccauc

SEQ ID NO: 341370 - RNA, 32 nt, Human
caaaauugcaccacugcacuccagccugggaa

SEQ ID NO: 341371 - RNA, 32 nt, Human
caaaauugcaccacugcacuccagccugggag

SEQ ID NO: 341372 - RNA, 32 nt, Human
caaaauugcaccacugcacuccauccugggca

SEQ ID NO: 341373 - RNA, 32 nt, Human
caaaauugcaccacugcacugcagccugggaa

SEQ ID NO: 341374 - RNA, 32 nt, Human
caaaauugccuccuuuucaucuccucauauug

SEQ ID NO: 341375 - RNA, 32 nt, Human
caaaauuggaaauguuggcuucaccagaaccu

SEQ ID NO: 341376 - RNA, 32 nt, Human
caaaauuggagacacuccaacgaggcuaaguu

SEQ ID NO: 341377 - RNA, 32 nt, Human
caaaauuggcacaaagugcuaggguuuauaua

SEQ ID NO: 341378 - RNA, 32 nt, Human
caaaauuguuaaaaauaccuuuagaaggucua

SEQ ID NO: 341379 - RNA, 32 nt, Human
caaaauuguucuggaaacuuugguggugguca

SEQ ID NO: 341380 - RNA, 32 nt, Human
caaaauuuaggauuugccgcuuccauaaauca

SEQ ID NO: 341381 - RNA, 32 nt, Human
caaaauuuagucugggccuagugcaguggcuc

SEQ ID NO: 341382 - RNA, 32 nt, Human
caaaauuucaggcuuuuucuccacacuuguau

SEQ ID NO: 341383 - RNA, 32 nt, Human
caaaauuuccuugagacucuuuagcauucaua

SEQ ID NO: 341384 - RNA, 32 nt, Human
caaaauuucuguauuuggagggaccaguagac

SEQ ID NO: 341385 - RNA, 23 nt, Human
caaaauuugugcucuuucauuug

SEQ ID NO: 341386 - RNA, 24 nt, Human
caaaauuuuaaauuuaacucugcc

SEQ ID NO: 341387 - RNA, 32 nt, Human
caaaauuuugacugucagcuacauguugguaa

SEQ ID NO: 341388 - RNA, 32 nt, Human
caaaauuuuguuguuucuagauaacuguucug

SEQ ID NO: 341389 - RNA, 26 nt, Human
caaaauuuuuugcucuuuuacauuua

SEQ ID NO: 341390 - RNA, 32 nt, Human
caaacaaaaaccauagcauucugaaacaauag

SEQ ID NO: 341391 - RNA, 22 nt, Human
caaacaaaaagagaggcauuuu

SEQ ID NO: 341392 - RNA, 22 nt, Human
caaacaaaaggugggcuuuccu

SEQ ID NO: 341393 - RNA, 32 nt, Human
caaacaaaauaggagcucacauggauauauuu

SEQ ID NO: 341394 - RNA, 32 nt, Human
caaacaaaauuagcugggcaugguggcggaca

SEQ ID NO: 341395 - RNA, 31 nt, Human
caaacaaacaaaacaacuagcuagggauggu

SEQ ID NO: 341396 - RNA, 32 nt, Human
caaacaaacagccuuguuucucuagucacauc

SEQ ID NO: 341397 - RNA, 32 nt, Human
caaacaaacauacacucucuccagcaaagcuu

SEQ ID NO: 341398 - RNA, 32 nt, Human
caaacaaagcagcaggcuuuugggaacaucug

SEQ ID NO: 341399 - RNA, 32 nt, Human
caaacaaagccagaagcugagcaccaggggau

SEQ ID NO: 341400 - RNA, 32 nt, Human
caaacaaagcuacaauaaguucauguguauug

SEQ ID NO: 341401 - RNA, 32 nt, Human
caaacaaaguagggggaaaagaauaagcaaua

SEQ ID NO: 341402 - RNA, 32 nt, Human
caaacaaauacaaaauccuucuccagacccca

SEQ ID NO: 341403 - RNA, 22 nt, Human
caaacaaauuaucuucuuuuaa

SEQ ID NO: 341404 - RNA, 32 nt, Human
caaacaacaacaagacauucauucccaacgau

SEQ ID NO: 341405 - RNA, 32 nt, Human
caaacaacagaaacguauugcucacaguccug

SEQ ID NO: 341406 - RNA, 32 nt, Human
caaacaaccagcuacugcccagcucuuuaucc

SEQ ID NO: 341407 - RNA, 20 nt, Human
caaacaaccauccacacugc

SEQ ID NO: 341408 - RNA, 32 nt, Human
caaacaaccaugugguuggauuacauggaguc

SEQ ID NO: 341409 - RNA, 32 nt, Human
caaacaaccgcagccgcuguucccaggauggu

SEQ ID NO: 341410 - RNA, 32 nt, Human
caaacaacuuggggaaaccgaggcagaaagcc

SEQ ID NO: 341411 - RNA, 32 nt, Human
caaacaagacacaaacaaacagucuuuugcuu

SEQ ID NO: 341412 - RNA, 32 nt, Human
caaacaaguuagagcuggcagcugaaugauag

SEQ ID NO: 341413 - RNA, 32 nt, Human
caaacaaugagguuguagggggagguagggaa

SEQ ID NO: 341414 - RNA, 32 nt, Human
caaacaauuuucucuuggugguguggaaacuc

SEQ ID NO: 341415 - RNA, 32 nt, Human
caaacacaacuaaggccucugguacccucugc

SEQ ID NO: 341416 - RNA, 32 nt, Human
caaacacaagaggcaggucaaagggcuuugga

SEQ ID NO: 341417 - RNA, 32 nt, Human
caaacacacacaaaugcccaaccagcucuaag

SEQ ID NO: 341418 - RNA, 32 nt, Human
caaacacacacccggcagacuucaagagucuc

SEQ ID NO: 341419 - RNA, 32 nt, Human
caaacacacaugcacacagcacaauucagaaa

SEQ ID NO: 341420 - RNA, 32 nt, Human
caaacacacaugcccacacaaugcucacagug

SEQ ID NO: 341421 - RNA, 22 nt, Human
caaacacaccaagaagcauuuu

SEQ ID NO: 341422 - RNA, 23 nt, Human
caaacacacccugccucccccag

SEQ ID NO: 341423 - RNA, 32 nt, Human
caaacacacuccugcucaaauggcguuauucu

SEQ ID NO: 341424 - RNA, 32 nt, Human
caaacacagcauggaggacacagaugacucuu

SEQ ID NO: 341425 - RNA, 32 nt, Human
caaacacaggaaaauaaaaugcauaacuauac

SEQ ID NO: 341426 - RNA, 31 nt, Human
caaacacaguuucacacugauucuuaacauu

SEQ ID NO: 341427 - RNA, 32 nt, Human
caaacaccaaucucucaaaggcagcagauugu

SEQ ID NO: 341428 - RNA, 32 nt, Human
caaacaccagaaggagcugucuggaagguuug

SEQ ID NO: 341429 - RNA, 23 nt, Human
caaacaccagaaugauguucgac

SEQ ID NO: 341430 - RNA, 32 nt, Human
caaacacccaaacuguuuggauugauugcuuu

SEQ ID NO: 341431 - RNA, 32 nt, Human
caaacacccaagccacaggauaccucagaugg

SEQ ID NO: 341432 - RNA, 32 nt, Human
caaacacccagcucagccacacacaacuaccc

SEQ ID NO: 341433 - RNA, 32 nt, Human
caaacaccuccaccacugccccgcaacaucca

SEQ ID NO: 341434 - RNA, 32 nt, Human
caaacaccugccucccccuccagccuucucca

SEQ ID NO: 341435 - RNA, 32 nt, Human
caaacacgggccuugcucuuguggagcuuaga

SEQ ID NO: 341436 - RNA, 32 nt, Human
caaacacgugcucacccucacacucgccccgg

SEQ ID NO: 341437 - RNA, 32 nt, Human
caaacacuaguggaacuuggagcauuguggug

SEQ ID NO: 341438 - RNA, 32 nt, Human
caaacacuccacccccuccagcuccaguuucc

SEQ ID NO: 341439 - RNA, 32 nt, Human
caaacacuccacccuccaccuuccauuuuccc

SEQ ID NO: 341440 - RNA, 32 nt, Human
caaacacucgagcuuccaucuuguugaggagg

SEQ ID NO: 341441 - RNA, 32 nt, Human
caaacacugcagcaucuuccccagcguugaga

SEQ ID NO: 341442 - RNA, 32 nt, Human
caaacacugcaggaggugagggugucugacgu

SEQ ID NO: 341443 - RNA, 32 nt, Human
caaacacuggagaaagcugggcccuacagaaa

SEQ ID NO: 341444 - RNA, 22 nt, Human
caaacacugguuugcaucccag

SEQ ID NO: 341445 - RNA, 32 nt, Human
caaacacugugccuacagccucccaggggugg

SEQ ID NO: 341446 - RNA, 32 nt, Human
caaacacuguggcuccuccaccaccuucaaac

SEQ ID NO: 341447 - RNA, 32 nt, Human
caaacacuguugcccaggcuggagugcaguga

SEQ ID NO: 341448 - RNA, 32 nt, Human
caaacacuuacugacaaaucggguccugaguu

SEQ ID NO: 341449 - RNA, 32 nt, Human
caaacacuuucacuuugagcugggcaaaucuu

SEQ ID NO: 341450 - RNA, 32 nt, Human
caaacagaaagaaaucugcaugaguugcuuuu

SEQ ID NO: 341451 - RNA, 21 nt, Human
caaacagaaggagaagcauuu

SEQ ID NO: 341452 - RNA, 32 nt, Human
caaacagaccaccaccaggacugugccugaac

SEQ ID NO: 341453 - RNA, 32 nt, Human
caaacagcaaaacugagugugugucucuguuu

SEQ ID NO: 341454 - RNA, 32 nt, Human
caaacagcaaagacccaagaacugaauaugcu

SEQ ID NO: 341455 - RNA, 20 nt, Human
caaacagcaccugcggagcc

SEQ ID NO: 341456 - RNA, 32 nt, Human
caaacagccccugggcugugccuggauccccc

SEQ ID NO: 341457 - RNA, 32 nt, Human
caaacagcccuucacuuccucucccacuucag

SEQ ID NO: 341458 - RNA, 32 nt, Human
caaacagccuacucgggguucuuggguagccu

SEQ ID NO: 341459 - RNA, 32 nt, Human
caaacagcucacuguccucuggaucugcugcg

SEQ ID NO: 341460 - RNA, 32 nt, Human
caaacagcuuugaacaagaucuagucauguaa

SEQ ID NO: 341461 - RNA, 32 nt, Human
caaacaggaacacuagagaccaaaaaggggac

SEQ ID NO: 341462 - RNA, 20 nt, Human
caaacaggaccaggccuccu

SEQ ID NO: 341463 - RNA, 24 nt, Human
caaacaggacccuggcagccuccc

SEQ ID NO: 341464 - RNA, 32 nt, Human
caaacaggcacucaaccacuauuuguugaaug

SEQ ID NO: 341465 - RNA, 32 nt, Human
caaacaggcagcgcgcgacaauggcggucgcu

SEQ ID NO: 341466 - RNA, 32 nt, Human
caaacagggcgagaggucgcugggcagcguuc

SEQ ID NO: 341467 - RNA, 32 nt, Human
caaacaggguccuuagcuggggcaggggagcc

SEQ ID NO: 341468 - RNA, 32 nt, Human
caaacaggucaggugcuuguucuguccucuug

SEQ ID NO: 341469 - RNA, 32 nt, Human
caaacagucaguggaguggaggcuccagucag

SEQ ID NO: 341470 - RNA, 32 nt, Human
caaacagucccuguccagcuuggacgcugcuc

SEQ ID NO: 341471 - RNA, 32 nt, Human
caaacagugggacaaugguuggaaagcauugg

SEQ ID NO: 341472 - RNA, 32 nt, Human
caaacaguuccagcaggcucucuaaagaaaaa

SEQ ID NO: 341473 - RNA, 32 nt, Human
caaacaguuccaucugccguuuauggguaaaa

SEQ ID NO: 341474 - RNA, 32 nt, Human
caaacaguucccaaacagaaauuccagagaug

SEQ ID NO: 341475 - RNA, 32 nt, Human
caaacaguugcuugaugugauauggaguagaa

SEQ ID NO: 341476 - RNA, 32 nt, Human
caaacaguugugccuuuuuccucuuuugguuu

SEQ ID NO: 341477 - RNA, 32 nt, Human
caaacauacccuaguccuucagccuggggcuc

SEQ ID NO: 341478 - RNA, 32 nt, Human
caaacauacuguucccauacauaguacaaaga

SEQ ID NO: 341479 - RNA, 32 nt, Human
caaacauauauguauguaugaauguacauaaa

SEQ ID NO: 341480 - RNA, 32 nt, Human
caaacaucaggcaauuuccaggguuggucuag

SEQ ID NO: 341481 - RNA, 32 nt, Human
caaacauccagucccucucauauugccuuuga

SEQ ID NO: 341482 - RNA, 17 nt, Human
caaacaucccccaauga

SEQ ID NO: 341483 - RNA, 32 nt, Human
caaacaucccuucugcugaaacaagcugugau

SEQ ID NO: 341484 - RNA, 32 nt, Human
caaacaucguauguucucaauuauaagaggga

SEQ ID NO: 341485 - RNA, 32 nt, Human
caaacaucuccagcacuaauguuuccaucuua

SEQ ID NO: 341486 - RNA, 32 nt, Human
caaacaucugagauuccauuuuugccaugugu

SEQ ID NO: 341487 - RNA, 32 nt, Human
caaacaugaagcucuggccuccuuuccucagc

SEQ ID NO: 341488 - RNA, 32 nt, Human
caaacaugagacaaagcugacuguucacacug

SEQ ID NO: 341489 - RNA, 32 nt, Human
caaacaugcacacacacauaugcauaucuuga

SEQ ID NO: 341490 - RNA, 32 nt, Human
caaacauggcgaaaccccaucuguacugaaaa

SEQ ID NO: 341491 - RNA, 32 nt, Human
caaacauggguuuaguuuucaccagaauggaa

SEQ ID NO: 341492 - RNA, 32 nt, Human
caaacauuagauuugaaagaguaauaguuuau

SEQ ID NO: 341493 - RNA, 32 nt, Human
caaacauucuuuaucccucccaccccagggaa

SEQ ID NO: 341494 - RNA, 32 nt, Human
caaacauuggccuucccuuggagggauccucu

SEQ ID NO: 341495 - RNA, 32 nt, Human
caaaccaaaacacacaccaaauaaucagaaac

SEQ ID NO: 341496 - RNA, 32 nt, Human
caaaccaaacuuuuucucaaaccagggacuau

SEQ ID NO: 341497 - RNA, 32 nt, Human
caaaccaaagagaccguucguggagucuaaug

SEQ ID NO: 341498 - RNA, 31 nt, Human
caaaccaacaacacagcuggggcgggcccug

SEQ ID NO: 341499 - RNA, 32 nt, Human
caaaccaacuccaccaaccucuggcucuuaaa

SEQ ID NO: 341500 - RNA, 32 nt, Human
caaaccaacuccaccaaccucuggcucuuaca

SEQ ID NO: 341501 - RNA, 32 nt, Human
caaaccaagccgcggcgguguccgcggcccug

SEQ ID NO: 341502 - RNA, 32 nt, Human
caaaccaauuugggauaucuaacucuaaagag

SEQ ID NO: 341503 - RNA, 32 nt, Human
caaaccacagccuauccucugcuccauuucac

SEQ ID NO: 341504 - RNA, 32 nt, Human
caaaccacauuagaagucugugcagacauccc

SEQ ID NO: 341505 - RNA, 32 nt, Human
caaaccacccuccaaggccugucccacacgau

SEQ ID NO: 341506 - RNA, 32 nt, Human
caaaccacucacuggguaccccaccuccucuc

SEQ ID NO: 341507 - RNA, 32 nt, Human
caaaccacucagccucugugugccucaguuuu

SEQ ID NO: 341508 - RNA, 32 nt, Human
caaaccacugcaauccagccugggcaacgagc

SEQ ID NO: 341509 - RNA, 32 nt, Human
caaaccacuguaguccagccugagugacagag

SEQ ID NO: 341510 - RNA, 32 nt, Human
caaaccacuguggagccugaagcuccuuaaga

SEQ ID NO: 341511 - RNA, 32 nt, Human
caaaccagacugggcuaaguucugcugcuauc

SEQ ID NO: 341512 - RNA, 32 nt, Human
caaaccagagguggaggaagaacgguaggaag

SEQ ID NO: 341513 - RNA, 32 nt, Human
caaaccagcccagagcagggucucucuaaagg

SEQ ID NO: 341514 - RNA, 32 nt, Human
caaaccagccuccuggugcuugaagguuucau

SEQ ID NO: 341515 - RNA, 32 nt, Human
caaaccagccugggcaauagagugagacccug

SEQ ID NO: 341516 - RNA, 32 nt, Human
caaaccagcuuuguggccuguuuuaugucauc

SEQ ID NO: 341517 - RNA, 32 nt, Human
caaaccaggaaaacagcaggagaggguggcuc

SEQ ID NO: 341518 - RNA, 32 nt, Human
caaaccaggaauauucuugaaaagaacgugag

SEQ ID NO: 341519 - RNA, 32 nt, Human
caaaccagucaccucucuccuagauucauucu

SEQ ID NO: 341520 - RNA, 32 nt, Human
caaaccagucugcugguuaaauggaaacuuaa

SEQ ID NO: 341521 - RNA, 32 nt, Human
caaaccaguucugaagcaguuuccccuagagc

SEQ ID NO: 341522 - RNA, 32 nt, Human
caaaccauaagccugaggagguuuuuaucaac

SEQ ID NO: 341523 - RNA, 32 nt, Human
caaaccauagcugucuguccagugcucucuuc

SEQ ID NO: 341524 - RNA, 32 nt, Human
caaaccaugacgugaagaaugagauaggagac

SEQ ID NO: 341525 - RNA, 32 nt, Human
caaacccaaaacaaacaagaaaagcaaaagga

SEQ ID NO: 341526 - RNA, 32 nt, Human
caaacccaacagcccaaaaccaggcacagcca

SEQ ID NO: 341527 - RNA, 32 nt, Human
caaacccaaccauaucagcugcugcucuuuau

SEQ ID NO: 341528 - RNA, 32 nt, Human
caaacccaagaggcggagguugaguaagcuga

SEQ ID NO: 341529 - RNA, 32 nt, Human
caaacccaaggaggugacaggaggagcccccg

SEQ ID NO: 341530 - RNA, 32 nt, Human
caaacccaccucacaggaacuaaagcaacuuu

SEQ ID NO: 341531 - RNA, 32 nt, Human
caaacccaccuccaccaugggggccaugacuc

SEQ ID NO: 341532 - RNA, 32 nt, Human
caaacccaccuugcucuguguucucaggcccc

SEQ ID NO: 341533 - RNA, 32 nt, Human
caaacccagaauucuuaaccaguacccaacag

SEQ ID NO: 341534 - RNA, 31 nt, Human
caaacccagagagccaaacuuguagaggugg

SEQ ID NO: 341535 - RNA, 32 nt, Human
caaacccagccuuuugcgauuauggcuugugg

SEQ ID NO: 341536 - RNA, 32 nt, Human
caaacccaggaggcagaaguugcaagguugag

SEQ ID NO: 341537 - RNA, 18 nt, Human
caaacccagggcugaggc

SEQ ID NO: 341538 - RNA, 32 nt, Human
caaacccagguguggcuccagagcccauccuc

SEQ ID NO: 341539 - RNA, 32 nt, Human
caaacccaguggcuugaaacuuccugagaaac

SEQ ID NO: 341540 - RNA, 32 nt, Human
caaacccauucauucccaucccugucaccagu

SEQ ID NO: 341541 - RNA, 23 nt, Human
caaacccauugagcuuggggcug

SEQ ID NO: 341542 - RNA, 32 nt, Human
caaacccauuuuggcuuugugcgucauauccu

SEQ ID NO: 341543 - RNA, 17 nt, Human
caaaccccaaacugggg

SEQ ID NO: 341544 - RNA, 32 nt, Human
caaaccccaaggcccucaucugccuuuguccc

SEQ ID NO: 341545 - RNA, 32 nt, Human
caaaccccaaugugucaagacagacuuguuua

SEQ ID NO: 341546 - RNA, 32 nt, Human
caaaccccacacacacucaaggggucgaaaac

SEQ ID NO: 341547 - RNA, 32 nt, Human
caaaccccuccaccaucccacacccuccuccu

SEQ ID NO: 341548 - RNA, 32 nt, Human
caaaccccuccaggauucccgcaggccggugu

SEQ ID NO: 341549 - RNA, 32 nt, Human
caaaccccucucuccuccucaugccacugccu

SEQ ID NO: 341550 - RNA, 32 nt, Human
caaacccgagcagggagcaggagcaggaaaag

SEQ ID NO: 341551 - RNA, 32 nt, Human
caaacccgggaggcagagguugcagugaccca

SEQ ID NO: 341552 - RNA, 32 nt, Human
caaacccgggaggcggagauugcagugagcca

SEQ ID NO: 341553 - RNA, 32 nt, Human
caaacccgguggcugcuucaugagccugacug

SEQ ID NO: 341554 - RNA, 32 nt, Human
caaacccuacagucugcaggggacuuggacaa

SEQ ID NO: 341555 - RNA, 18 nt, Human
caaacccuccaagugauu

SEQ ID NO: 341556 - RNA, 32 nt, Human
caaacccuccacugguucccauggcccaugcc

SEQ ID NO: 341557 - RNA, 32 nt, Human
caaacccuccaggccucaguuucuucaccugu

SEQ ID NO: 341558 - RNA, 32 nt, Human
caaacccugacccaccuccuuccuuuccucca

SEQ ID NO: 341559 - RNA, 32 nt, Human
caaacccuggcuccagugucauggaauccguc

SEQ ID NO: 341560 - RNA, 32 nt, Human
caaacccugguguuuggagaggccccagggag

SEQ ID NO: 341561 - RNA, 32 nt, Human
caaacccuugcugccaguuccucuuugauaaa

SEQ ID NO: 341562 - RNA, 32 nt, Human
caaaccgaaguuggcugggaagaaagaugagu

SEQ ID NO: 341563 - RNA, 32 nt, Human
caaaccuacacugucuaugacagcucuaguug

SEQ ID NO: 341564 - RNA, 32 nt, Human
caaaccuaccacugcaugacaguuuuaguuug

SEQ ID NO: 341565 - RNA, 32 nt, Human
caaaccuaccccggaucucuggcuucagccgc

SEQ ID NO: 341566 - RNA, 32 nt, Human
caaaccuaggagagggcaguggguagauucuc

SEQ ID NO: 341567 - RNA, 32 nt, Human
caaaccucacauccucccuucaguuuaaugca

SEQ ID NO: 341568 - RNA, 32 nt, Human
caaaccucacguggccucugauuucauugugg

SEQ ID NO: 341569 - RNA, 32 nt, Human
caaaccucaguucugaaagagcuacagaaugc

SEQ ID NO: 341570 - RNA, 32 nt, Human
caaaccucauauaccacucucuuccgaggauu

SEQ ID NO: 341571 - RNA, 32 nt, Human
caaaccucaugcuccccacuugcccuuauugg

SEQ ID NO: 341572 - RNA, 32 nt, Human
caaaccucuccucaugucuccucaugucuuau

SEQ ID NO: 341573 - RNA, 32 nt, Human
caaaccucuccucugcugcaguuuauuccaaa

SEQ ID NO: 341574 - RNA, 32 nt, Human
caaaccucucugcuagcucuucagucuacaaa

SEQ ID NO: 341575 - RNA, 32 nt, Human
caaaccucugcagcaucugcuuuauugccaaa

SEQ ID NO: 341576 - RNA, 32 nt, Human
caaaccucugccgcccuccacaccucuaaaca

SEQ ID NO: 341577 - RNA, 32 nt, Human
caaaccugaacugggcaguggggugagaggag

SEQ ID NO: 341578 - RNA, 26 nt, Human
caaaccugacgaagcagaagcugcau

SEQ ID NO: 341579 - RNA, 32 nt, Human
caaaccugagucccaccaggcccagggcuuca

SEQ ID NO: 341580 - RNA, 32 nt, Human
caaaccugagucuagcacaaugcagcuggagg

SEQ ID NO: 341581 - RNA, 32 nt, Human
caaaccugccuggguuuaaggggagaggaaau

SEQ ID NO: 341582 - RNA, 32 nt, Human
caaaccugcuaaucccacuaauucaggaauuu

SEQ ID NO: 341583 - RNA, 32 nt, Human
caaaccugcuugcugaccucaggcuuggccgu

SEQ ID NO: 341584 - RNA, 32 nt, Human
caaaccuggaugccaccuggagcugcuuccug

SEQ ID NO: 341585 - RNA, 32 nt, Human
caaaccugggaggcgaagauugcagugagcug

SEQ ID NO: 341586 - RNA, 32 nt, Human
caaaccugggcaauguggggagaccccaucuc

SEQ ID NO: 341587 - RNA, 32 nt, Human
caaaccuguaagugucuugggcucagggacca

SEQ ID NO: 341588 - RNA, 32 nt, Human
caaaccuguagucccagcuaccugggaggcug

SEQ ID NO: 341589 - RNA, 32 nt, Human
caaaccuguggagucuguuacuguucuuucug

SEQ ID NO: 341590 - RNA, 32 nt, Human
caaaccuguuucugcuggguugguuaggucug

SEQ ID NO: 341591 - RNA, 32 nt, Human
caaaccuguuuuccacacucugucuuugcagu

SEQ ID NO: 341592 - RNA, 32 nt, Human
caaaccuucaguggugcugucccuggaugggg

SEQ ID NO: 341593 - RNA, 32 nt, Human
caaaccuucauccggcuggagggcagcaugcg

SEQ ID NO: 341594 - RNA, 32 nt, Human
caaaccuucauccuucugucuccagggccuga

SEQ ID NO: 341595 - RNA, 32 nt, Human
caaaccuucuaaguccagagcuaacuuaguac

SEQ ID NO: 341596 - RNA, 32 nt, Human
caaaccuucugccuuugauguuacagauuuaa

SEQ ID NO: 341597 - RNA, 32 nt, Human
caaaccuugggaacagggaguuauggaaacgu

SEQ ID NO: 341598 - RNA, 32 nt, Human
caaaccuuggguuugaaaaggcugggaccccc

SEQ ID NO: 341599 - RNA, 32 nt, Human
caaaccuugguauagaucacuuccuuuucugu

SEQ ID NO: 341600 - RNA, 20 nt, Human
caaaccuuucagcuggcaga

SEQ ID NO: 341601 - RNA, 32 nt, Human
caaaccuuugaagaaacuggaguaggcuguua

SEQ ID NO: 341602 - RNA, 32 nt, Human
caaacgagagucagccuuuaacgaaaugacca

SEQ ID NO: 341603 - RNA, 32 nt, Human
caaacgagauucacccagcgcgaggaggaaga

SEQ ID NO: 341604 - RNA, 32 nt, Human
caaacgaggcauuccaaguuugacagcaugga

SEQ ID NO: 341605 - RNA, 31 nt, Human
caaacgcaggcuaaggagaccaaagcggcga

SEQ ID NO: 341606 - RNA, 32 nt, Human
caaacgcaucccagggccgagugcagggccuc

SEQ ID NO: 341607 - RNA, 32 nt, Human
caaacgcauucacucggggcaguauuaaccgu

SEQ ID NO: 341608 - RNA, 32 nt, Human
caaacgcccucuccgccgucauggcccggcau

SEQ ID NO: 341609 - RNA, 32 nt, Human
caaacgcugccacccuccacuucccaacccag

SEQ ID NO: 341610 - RNA, 32 nt, Human
caaacgggagccaaaacucgaagcuuggaaga

SEQ ID NO: 341611 - RNA, 32 nt, Human
caaacggggaggcagagggaggagggaaggcu

SEQ ID NO: 341612 - RNA, 32 nt, Human
caaacguaugguaaaaugcagcccagccugaa

SEQ ID NO: 341613 - RNA, 32 nt, Human
caaacguauugguucgaugaaggaagggccca

SEQ ID NO: 341614 - RNA, 32 nt, Human
caaacgucugcagcuucacuccugaagccagc

SEQ ID NO: 341615 - RNA, 32 nt, Human
caaacgugagccacugugcuuggccacacaca

SEQ ID NO: 341616 - RNA, 32 nt, Human
caaacgugagccaucgcaccuagccucuuuga

SEQ ID NO: 341617 - RNA, 32 nt, Human
caaacguggaaauggcgccuccaagacccuga

SEQ ID NO: 341618 - RNA, 32 nt, Human
caaacguuaccugacaguuaaggagaggagcu

SEQ ID NO: 341619 - RNA, 32 nt, Human
caaacguuuaauuugcuaaauauuuuaacaag

SEQ ID NO: 341620 - RNA, 18 nt, Human
caaacuaaaaacugggua

SEQ ID NO: 341621 - RNA, 32 nt, Human
caaacuaaaggccacagaaaugggcacuaccu

SEQ ID NO: 341622 - RNA, 32 nt, Human
caaacuaaccagcugggauuacagguaugagc

SEQ ID NO: 341623 - RNA, 32 nt, Human
caaacuaagauaucccucacacccagccccca

SEQ ID NO: 341624 - RNA, 32 nt, Human
caaacuacacagaagaauauuagaacaauuuc

SEQ ID NO: 341625 - RNA, 32 nt, Human
caaacuacagcccaaaggccaaauccauccug

SEQ ID NO: 341626 - RNA, 32 nt, Human
caaacuacauucugaucugcucagggagaagc

SEQ ID NO: 341627 - RNA, 32 nt, Human
caaacuacuaacaugcauugugagaaugccgu

SEQ ID NO: 341628 - RNA, 32 nt, Human
caaacuacuacuggaccuuauuuuggaacuau

SEQ ID NO: 341629 - RNA, 32 nt, Human
caaacuacuauucuuuuuaaacuucuaggauu

SEQ ID NO: 341630 - RNA, 32 nt, Human
caaacuacuguagcagauacuuugccaccuuu

SEQ ID NO: 341631 - RNA, 32 nt, Human
caaacuagccauauuucaagugcucaacagcc

SEQ ID NO: 341632 - RNA, 32 nt, Human
caaacuauuuuccagaguggcugcagucauuu

SEQ ID NO: 341633 - RNA, 32 nt, Human
caaacucaaaauguggaccaguucccucagcc

SEQ ID NO: 341634 - RNA, 32 nt, Human
caaacucaaagcuagguccugaugucucaagg

SEQ ID NO: 341635 - RNA, 32 nt, Human
caaacucaaaggacagauuagggaucgagauu

SEQ ID NO: 341636 - RNA, 32 nt, Human
caaacucaaggaccaggugcugcuggaggggg

SEQ ID NO: 341637 - RNA, 32 nt, Human
caaacucaaguuaugucauaccuuuggauacg

SEQ ID NO: 341638 - RNA, 32 nt, Human
caaacucacagcccucuccaaacuggcugggg

SEQ ID NO: 341639 - RNA, 32 nt, Human
caaacucacuuagaaggagcaagaagcaacug

SEQ ID NO: 341640 - RNA, 32 nt, Human
caaacucaggaagaaaaaggaaagcagaagug

SEQ ID NO: 341641 - RNA, 28 nt, Human
caaacuccaagaccugccucaccucacc

SEQ ID NO: 341642 - RNA, 20 nt, Human
caaacuccagaauuggaggc

SEQ ID NO: 341643 - RNA, 26 nt, Human
caaacucccaaccucaagugauccgc

SEQ ID NO: 341644 - RNA, 21 nt, Human
caaacuccccaucugaagcug

SEQ ID NO: 341645 - RNA, 20 nt, Human
caaacucccccagcccugga

SEQ ID NO: 341646 - RNA, 32 nt, Human
caaacuccccuccaggcugccccugggacaug

SEQ ID NO: 341647 - RNA, 26 nt, Human
caaacucccgaccucaggugauccac

SEQ ID NO: 341648 - RNA, 26 nt, Human
caaacucccgaccucaggugauccgc

SEQ ID NO: 341649 - RNA, 32 nt, Human
caaacucccuuucugugaaagaggccuguggg

SEQ ID NO: 341650 - RNA, 26 nt, Human
caaacuccuaaccucaacugauccac

SEQ ID NO: 341651 - RNA, 24 nt, Human
caaacuccuaaccuugugauccgc

SEQ ID NO: 341652 - RNA, 21 nt, Human
caaacuccuaaggucauccac

SEQ ID NO: 341653 - RNA, 24 nt, Human
caaacuccuacugcuugauggcug

SEQ ID NO: 341654 - RNA, 17 nt, Human
caaacuccucaacuggg

SEQ ID NO: 341655 - RNA, 32 nt, Human
caaacuccucaugauaacugcacacaaucuga

SEQ ID NO: 341656 - RNA, 32 nt, Human
caaacuccuccuccucagccguggcauccuga

SEQ ID NO: 341657 - RNA, 31 nt, Human
caaacuccucuucucaccugccaaagaugga

SEQ ID NO: 341658 - RNA, 24 nt, Human
caaacuccugacccugugauccgc

SEQ ID NO: 341659 - RNA, 26 nt, Human
caaacuccugaccgcaggugauccac

SEQ ID NO: 341660 - RNA, 24 nt, Human
caaacuccugaccuagugauccac

SEQ ID NO: 341661 - RNA, 24 nt, Human
caaacuccugaccuagugaugcac

SEQ ID NO: 341662 - RNA, 26 nt, Human
caaacuccugaccucaaaugauccac

SEQ ID NO: 341663 - RNA, 26 nt, Human
caaacuccugaccucaaguaauccac

SEQ ID NO: 341664 - RNA, 26 nt, Human
caaacuccugaccucaagugauccac

SEQ ID NO: 341665 - RNA, 26 nt, Human
caaacuccugaccucaagugauccgc

SEQ ID NO: 341666 - RNA, 26 nt, Human
caaacuccugaccucagaugauccac

SEQ ID NO: 341667 - RNA, 26 nt, Human
caaacuccugaccucagaugauccgc

SEQ ID NO: 341668 - RNA, 26 nt, Human
caaacuccugaccucagaugaucuac

SEQ ID NO: 341669 - RNA, 26 nt, Human
caaacuccugaccucaggugauccac

SEQ ID NO: 341670 - RNA, 26 nt, Human
caaacuccugaccucaggugauccgc

SEQ ID NO: 341671 - RNA, 26 nt, Human
caaacuccugaccucaggugaucuac

SEQ ID NO: 341672 - RNA, 26 nt, Human
caaacuccugaccucaguugauccac

SEQ ID NO: 341673 - RNA, 24 nt, Human
caaacuccugaccucaugauccac

SEQ ID NO: 341674 - RNA, 26 nt, Human
caaacuccugaccucauguaauccac

SEQ ID NO: 341675 - RNA, 25 nt, Human
caaacuccugaccuccagugaucca

SEQ ID NO: 341676 - RNA, 24 nt, Human
caaacuccugaccucguaauccac

SEQ ID NO: 341677 - RNA, 24 nt, Human
caaacuccugaccucgugauccac

SEQ ID NO: 341678 - RNA, 24 nt, Human
caaacuccugaccucgugauccgc

SEQ ID NO: 341679 - RNA, 24 nt, Human
caaacuccugaccucgugaugcac

SEQ ID NO: 341680 - RNA, 24 nt, Human
caaacuccugaccucuugauccgc

SEQ ID NO: 341681 - RNA, 23 nt, Human
caaacuccugaccuuaggugauc

SEQ ID NO: 341682 - RNA, 24 nt, Human
caaacuccugaccuuauaauccgc

SEQ ID NO: 341683 - RNA, 24 nt, Human
caaacuccugaccuugugauccac

SEQ ID NO: 341684 - RNA, 24 nt, Human
caaacuccugaccuugugauccgc

SEQ ID NO: 341685 - RNA, 22 nt, Human
caaacuccugaccuugugaucu

SEQ ID NO: 341686 - RNA, 24 nt, Human
caaacuccugaccuugugguccac

SEQ ID NO: 341687 - RNA, 26 nt, Human
caaacuccugacuucaaaugauccac

SEQ ID NO: 341688 - RNA, 24 nt, Human
caaacuccugacuuugugauccac

SEQ ID NO: 341689 - RNA, 23 nt, Human
caaacuccugaucucaagugauc

SEQ ID NO: 341690 - RNA, 22 nt, Human
caaacuccugggcucaagugau

SEQ ID NO: 341691 - RNA, 32 nt, Human
caaacuccuggucuugaacuccuggccacaag

SEQ ID NO: 341692 - RNA, 19 nt, Human
caaacuccugguuggugau

SEQ ID NO: 341693 - RNA, 32 nt, Human
caaacuccuuuacugcagccugggcucccucu

SEQ ID NO: 341694 - RNA, 20 nt, Human
caaacucgcaggacauuccu

SEQ ID NO: 341695 - RNA, 32 nt, Human
caaacucuaaaagaaggacgcauuuuagguaa

SEQ ID NO: 341696 - RNA, 32 nt, Human
caaacucuagcuguuucaguaguucuaugagg

SEQ ID NO: 341697 - RNA, 32 nt, Human
caaacucuccccaucucuacugccucaccccg

SEQ ID NO: 341698 - RNA, 32 nt, Human
caaacucugccuggaccccauugucugucugc

SEQ ID NO: 341699 - RNA, 32 nt, Human
caaacucugcucaucuucgagcucucuggaac

SEQ ID NO: 341700 - RNA, 32 nt, Human
caaacucugggaacaggcgagauggaacaggg

SEQ ID NO: 341701 - RNA, 32 nt, Human
caaacucugggcagccucaggaagucaggcag

SEQ ID NO: 341702 - RNA, 32 nt, Human
caaacugaagcagcaaacccacaaagcaucaa

SEQ ID NO: 341703 - RNA, 32 nt, Human
caaacugacagaaaccgucaccacacuggucu

SEQ ID NO: 341704 - RNA, 32 nt, Human
caaacugaggcccagaggggcagggaguuacc

SEQ ID NO: 341705 - RNA, 32 nt, Human
caaacugcagugacuguaaauuggccuggcgu

SEQ ID NO: 341706 - RNA, 32 nt, Human
caaacugccacuccacuccaggugggccacuc

SEQ ID NO: 341707 - RNA, 32 nt, Human
caaacugccagcugccacuggcuuaucaggag

SEQ ID NO: 341708 - RNA, 21 nt, Human
caaacugcccagacuugagcc

SEQ ID NO: 341709 - RNA, 32 nt, Human
caaacugcccaggagugaguagcugcuuucgg

SEQ ID NO: 341710 - RNA, 32 nt, Human
caaacugccguaaccucugccguucaggaacc

SEQ ID NO: 341711 - RNA, 32 nt, Human
caaacugccucacuguuacuucaucaaucaca

SEQ ID NO: 341712 - RNA, 32 nt, Human
caaacugcgggcagaaacuacacacaugugga

SEQ ID NO: 341713 - RNA, 32 nt, Human
caaacugcugaagagugacaagcccuaucacu

SEQ ID NO: 341714 - RNA, 32 nt, Human
caaacugcugaagagugacaagcccuaucauu

SEQ ID NO: 341715 - RNA, 23 nt, Human
caaacugcugggauuacaggcgu

SEQ ID NO: 341716 - RNA, 32 nt, Human
caaacugcuugacccaggaacaaguggcuuag

SEQ ID NO: 341717 - RNA, 32 nt, Human
caaacuggagcaaagucugucuucucacaggg

SEQ ID NO: 341718 - RNA, 32 nt, Human
caaacuggccagacuguucuguagguuaaguc

SEQ ID NO: 341719 - RNA, 32 nt, Human
caaacuggcuacugcugcuuccuguggccucc

SEQ ID NO: 341720 - RNA, 32 nt, Human
caaacugggacugccuuucccucuccucagcc

SEQ ID NO: 341721 - RNA, 32 nt, Human
caaacugggucaucgccuguucacaaaaugcu

SEQ ID NO: 341722 - RNA, 32 nt, Human
caaacuggucucaaacuccuggccucaagcaa

SEQ ID NO: 341723 - RNA, 23 nt, Human
caaacuggugagauuacaggcau

SEQ ID NO: 341724 - RNA, 32 nt, Human
caaacuguacagacucucccaccccaaccucc

SEQ ID NO: 341725 - RNA, 32 nt, Human
caaacuguaugguggagaaagaagugggaagg

SEQ ID NO: 341726 - RNA, 32 nt, Human
caaacugucaaugcacagacuuuucaaagaag

SEQ ID NO: 341727 - RNA, 32 nt, Human
caaacugugaaacagccacuucccuaggcacu

SEQ ID NO: 341728 - RNA, 32 nt, Human
caaacugugcagguccacccacagggauguuu

SEQ ID NO: 341729 - RNA, 32 nt, Human
caaacugugguguuuggaauuggguuuuucaa

SEQ ID NO: 341730 - RNA, 21 nt, Human
caaacugugucucaaggaggu

SEQ ID NO: 341731 - RNA, 32 nt, Human
caaacuguuccagccucugccuguuacccagu

SEQ ID NO: 341732 - RNA, 32 nt, Human
caaacuuaaaagcaaaaucuagccaggugccg

SEQ ID NO: 341733 - RNA, 32 nt, Human
caaacuuaaaaugcccaugucauuucacgagu

SEQ ID NO: 341734 - RNA, 32 nt, Human
caaacuucagcuggcuuggcccucucucugac

SEQ ID NO: 341735 - RNA, 32 nt, Human
caaacuucccagagaguaugugagaaccaacc

SEQ ID NO: 341736 - RNA, 24 nt, Human
caaacuucugaccucgugauccac

SEQ ID NO: 341737 - RNA, 32 nt, Human
caaacuucuggcucccucuucuuucagacuug

SEQ ID NO: 341738 - RNA, 23 nt, Human
caaacuucugggauuacaggcgu

SEQ ID NO: 341739 - RNA, 32 nt, Human
caaacuugaacaaagcugcaggcuccagcguc

SEQ ID NO: 341740 - RNA, 32 nt, Human
caaacuugaggaaugggcaugaauaacuggcu

SEQ ID NO: 341741 - RNA, 32 nt, Human
caaacuugcuugaccuccacuuuucaggagac

SEQ ID NO: 341742 - RNA, 32 nt, Human
caaacuugggcaauucuguuuguguaacuccc

SEQ ID NO: 341743 - RNA, 32 nt, Human
caaacuugguggcaacuugccucccggugcgg

SEQ ID NO: 341744 - RNA, 22 nt, Human
caaacuugugacaaguucuuuu

SEQ ID NO: 341745 - RNA, 32 nt, Human
caaacuuuacuugauaugaaacuccuauuaac

SEQ ID NO: 341746 - RNA, 32 nt, Human
caaacuuucagucucccaccuccagagagggg

SEQ ID NO: 341747 - RNA, 32 nt, Human
caaacuuucaguggugcugucccuggaugggg

SEQ ID NO: 341748 - RNA, 32 nt, Human
caaagaaaaagaaaaagauacgcuugaagaua

SEQ ID NO: 341749 - RNA, 32 nt, Human
caaagaaaacaaaccauugcuuaugcuguuau

SEQ ID NO: 341750 - RNA, 32 nt, Human
caaagaaacagaugccccagccugcuuucaca

SEQ ID NO: 341751 - RNA, 32 nt, Human
caaagaaagaaagcccaaagucaaaguuguua

SEQ ID NO: 341752 - RNA, 32 nt, Human
caaagaaagucacagcaucaauggaggagguu

SEQ ID NO: 341753 - RNA, 19 nt, Human
caaagaaauaaaagaaauc

SEQ ID NO: 341754 - RNA, 32 nt, Human
caaagaacaaagacagacuggaaaguauguga

SEQ ID NO: 341755 - RNA, 32 nt, Human
caaagaacaaauuccagccggcaaauaaauuc

SEQ ID NO: 341756 - RNA, 32 nt, Human
caaagaacacagaaagaggaggagcaaguggg

SEQ ID NO: 341757 - RNA, 24 nt, Human
caaagaacagcucagaugcacaaa

SEQ ID NO: 341758 - RNA, 32 nt, Human
caaagaaccaccaggaaagcaaaucaguuugg

SEQ ID NO: 341759 - RNA, 18 nt, Human
caaagaacuccugccuug

SEQ ID NO: 341760 - RNA, 25 nt, Human
caaagaacugccccaucuccuccca

SEQ ID NO: 341761 - RNA, 23 nt, Human
caaagaacugggauuacaggcau

SEQ ID NO: 341762 - RNA, 32 nt, Human
caaagaacuuguccagaagaaaaaccuguuaa

SEQ ID NO: 341763 - RNA, 22 nt, Human
caaagaacuuuacagaaaucaa

SEQ ID NO: 341764 - RNA, 24 nt, Human
caaagaagaaaauaaaaugagcua

SEQ ID NO: 341765 - RNA, 32 nt, Human
caaagaagaaaaucacucucagaaaugcauug

SEQ ID NO: 341766 - RNA, 32 nt, Human
caaagaagaauaagcaagaaagaaaagaagga

SEQ ID NO: 341767 - RNA, 32 nt, Human
caaagaagcaagaaauaguaugcauguuuggg

SEQ ID NO: 341768 - RNA, 32 nt, Human
caaagaagccaagaugcuagcuaaggugacua

SEQ ID NO: 341769 - RNA, 25 nt, Human
caaagaaggcagcucacuccugcuc

SEQ ID NO: 341770 - RNA, 32 nt, Human
caaagaaggggugggaggagggaacaggggac

SEQ ID NO: 341771 - RNA, 32 nt, Human
caaagaaggguggcgagaagaaaacgggccgu

SEQ ID NO: 341772 - RNA, 32 nt, Human
caaagaagguauaaaguccagagaugagaaaa

SEQ ID NO: 341773 - RNA, 32 nt, Human
caaagaaguucugcaaaccuccccuggacccu

SEQ ID NO: 341774 - RNA, 32 nt, Human
caaagaauaagccagauguaucagggccugag

SEQ ID NO: 341775 - RNA, 32 nt, Human
caaagaauacgaacauuagcugggucugaugg

SEQ ID NO: 341776 - RNA, 32 nt, Human
caaagaaucggcaaauggagugguuagaaggc

SEQ ID NO: 341777 - RNA, 32 nt, Human
caaagaaucucuucuagggauauuguaagaau

SEQ ID NO: 341778 - RNA, 32 nt, Human
caaagaaugcacucugcaggccuggcagaaga

SEQ ID NO: 341779 - RNA, 32 nt, Human
caaagaaugucagaaauuuguagaaaaugacu

SEQ ID NO: 341780 - RNA, 32 nt, Human
caaagaauuggacaaaacacacaaacaaagca

SEQ ID NO: 341781 - RNA, 32 nt, Human
caaagacaagaugggaaggggcuuccauuuau

SEQ ID NO: 341782 - RNA, 32 nt, Human
caaagacaagaugggaaggggcuuccauuugu

SEQ ID NO: 341783 - RNA, 32 nt, Human
caaagacagagucuugcucuuguuguccaggc

SEQ ID NO: 341784 - RNA, 32 nt, Human
caaagacagcaaccaaugagccagagguuucu

SEQ ID NO: 341785 - RNA, 32 nt, Human
caaagacaggcgucuggcuggcugcaggaguc

SEQ ID NO: 341786 - RNA, 32 nt, Human
caaagacaggggacuugccugaauggcauccg

SEQ ID NO: 341787 - RNA, 24 nt, Human
caaagacaggugaacgcucagcca

SEQ ID NO: 341788 - RNA, 32 nt, Human
caaagaccaaaacaaccaaaugccaccgcugc

SEQ ID NO: 341789 - RNA, 32 nt, Human
caaagaccaaccaaagagccagccagaguaag

SEQ ID NO: 341790 - RNA, 32 nt, Human
caaagacccacugcuacaggagcccccagccu

SEQ ID NO: 341791 - RNA, 32 nt, Human
caaagacccaguccaagauccauccagauuau

SEQ ID NO: 341792 - RNA, 25 nt, Human
caaagacccuggcuuucauuuucuc

SEQ ID NO: 341793 - RNA, 32 nt, Human
caaagaccuacauuccucauuguuucauguuu

SEQ ID NO: 341794 - RNA, 32 nt, Human
caaagaccucaagcucauucugcccaggauua

SEQ ID NO: 341795 - RNA, 32 nt, Human
caaagaccugccugugugcuccggagaugaau

SEQ ID NO: 341796 - RNA, 32 nt, Human
caaagaccuugugcccuucccaggagccgcgg

SEQ ID NO: 341797 - RNA, 32 nt, Human
caaagacgcuucuggggagugagggaagcggu

SEQ ID NO: 341798 - RNA, 31 nt, Human
caaagacggcuucagcaccauccugcaccug

SEQ ID NO: 341799 - RNA, 31 nt, Human
caaagacgguagagagaaacagcuugaugcu

SEQ ID NO: 341800 - RNA, 32 nt, Human
caaagacggugccaccaggcacggccaccgga

SEQ ID NO: 341801 - RNA, 32 nt, Human
caaagacgguggaaugcucucagaggagcccc

SEQ ID NO: 341802 - RNA, 32 nt, Human
caaagacuaauggggagagggagggccgggaa

SEQ ID NO: 341803 - RNA, 32 nt, Human
caaagacucccuccucccugaugcugggaugu

SEQ ID NO: 341804 - RNA, 24 nt, Human
caaagacucgaauucauuuucuca

SEQ ID NO: 341805 - RNA, 32 nt, Human
caaagacugugcaccuugccaacauuaaccuu

SEQ ID NO: 341806 - RNA, 32 nt, Human
caaagacuguuuggugcuucugucuuucacca

SEQ ID NO: 341807 - RNA, 32 nt, Human
caaagacuuauucgacucauuaaugaggaaac

SEQ ID NO: 341808 - RNA, 32 nt, Human
caaagacuuccucuggcuccccaaggcugcaa

SEQ ID NO: 341809 - RNA, 32 nt, Human
caaagacuuuccucuuagucgagccaaguuaa

SEQ ID NO: 341810 - RNA, 32 nt, Human
caaagacuuuucucccaauucugcgcuuccug

SEQ ID NO: 341811 - RNA, 32 nt, Human
caaagagaaaggagagccaggagcauuuaaaa

SEQ ID NO: 341812 - RNA, 32 nt, Human
caaagagaaauccugcacccaucagccaacac

SEQ ID NO: 341813 - RNA, 32 nt, Human
caaagagaagcuucuuuaaaagcugcuauuga

SEQ ID NO: 341814 - RNA, 32 nt, Human
caaagagaagggggagaaaaccuagcagacca

SEQ ID NO: 341815 - RNA, 23 nt, Human
caaagagaauauucauuuucuua

SEQ ID NO: 341816 - RNA, 32 nt, Human
caaagagaccuccuuguuucagcugggccugc

SEQ ID NO: 341817 - RNA, 32 nt, Human
caaagagacuacuagguuaccacucugggcau

SEQ ID NO: 341818 - RNA, 32 nt, Human
caaagagagagaaagaaagaaggaaggaagga

SEQ ID NO: 341819 - RNA, 32 nt, Human
caaagagauacaaccuaauccccaaccuacuu

SEQ ID NO: 341820 - RNA, 32 nt, Human
caaagagauacuuucucaguccugcaggcugu

SEQ ID NO: 341821 - RNA, 32 nt, Human
caaagagaugcugcaguccaggucugaggucc

SEQ ID NO: 341822 - RNA, 32 nt, Human
caaagagcaacaacucugcugccagcaccaaa

SEQ ID NO: 341823 - RNA, 32 nt, Human
caaagagcaaggaaagagagaaaacaacaaag

SEQ ID NO: 341824 - RNA, 32 nt, Human
caaagagcagaggacccaccccaccagccaug

SEQ ID NO: 341825 - RNA, 32 nt, Human
caaagagcagggcagaggguggcaguggcaca

SEQ ID NO: 341826 - RNA, 32 nt, Human
caaagagccauugagaaacauuucucaaacag

SEQ ID NO: 341827 - RNA, 32 nt, Human
caaagagccucaggggcucuggggcccuggag

SEQ ID NO: 341828 - RNA, 32 nt, Human
caaagagccugccgggccgccugcugccgggg

SEQ ID NO: 341829 - RNA, 32 nt, Human
caaagagcgugccuuuuuccuccaucauaacc

SEQ ID NO: 341830 - RNA, 32 nt, Human
caaagagcuacuuugaauacauaauucucuuc

SEQ ID NO: 341831 - RNA, 32 nt, Human
caaagagcucagcagaggcucacguggcccag

SEQ ID NO: 341832 - RNA, 23 nt, Human
caaagagcugagauuacaggcgu

SEQ ID NO: 341833 - RNA, 23 nt, Human
caaagagcugggauuacaggcgu

SEQ ID NO: 341834 - RNA, 32 nt, Human
caaagagcugggucuggcugagcaccagcugc

SEQ ID NO: 341835 - RNA, 32 nt, Human
caaagaggaaaggagaaaaacaaacagaccaa

SEQ ID NO: 341836 - RNA, 32 nt, Human
caaagaggaaauggagguuuugccugagcccc

SEQ ID NO: 341837 - RNA, 32 nt, Human
  misc_feature (31)..(31): n is a, c, g, or u
caaagaggacuucacagcccuggggaggcanc

SEQ ID NO: 341838 - RNA, 32 nt, Human
caaagaggagcucugcugucccuuccuaagcu

SEQ ID NO: 341839 - RNA, 32 nt, Human
caaagaggaggaggcaggagaagcaggcagcc

SEQ ID NO: 341840 - RNA, 32 nt, Human
caaagaggccaacugcccagagccacagaaaa

SEQ ID NO: 341841 - RNA, 32 nt, Human
caaagagggaguuggcuggaucuuuuggugga

SEQ ID NO: 341842 - RNA, 32 nt, Human
caaagaggggagugauacggggugggggcacu

SEQ ID NO: 341843 - RNA, 32 nt, Human
caaagagguacacgaggaaauggaauugguau

SEQ ID NO: 341844 - RNA, 32 nt, Human
caaagagguauauguaaaguugcucaacaucg

SEQ ID NO: 341845 - RNA, 32 nt, Human
caaagaggugcccaggccugagguacucacau

SEQ ID NO: 341846 - RNA, 32 nt, Human
caaagaguaaguaagcaguauucuugggaguc

SEQ ID NO: 341847 - RNA, 32 nt, Human
caaagagucuccugccagcaccaagcaagcuu

SEQ ID NO: 341848 - RNA, 32 nt, Human
caaagagugugugggcuuuccuguuucuaaac

SEQ ID NO: 341849 - RNA, 32 nt, Human
caaagauaaagaaaguguacugcgaaaauaug

SEQ ID NO: 341850 - RNA, 32 nt, Human
caaagauagauggcugaacaucaggguguggc

SEQ ID NO: 341851 - RNA, 32 nt, Human
caaagauagggagggaagggggaacaugagcc

SEQ ID NO: 341852 - RNA, 32 nt, Human
caaagaucauuccacucagccugggacgaugg

SEQ ID NO: 341853 - RNA, 24 nt, Human
caaagauccccuacugccucagcc

SEQ ID NO: 341854 - RNA, 32 nt, Human
caaagauccucucaccuccaccucccaaagug

SEQ ID NO: 341855 - RNA, 32 nt, Human
caaagaucucagaagaaaucuaagaugucaua

SEQ ID NO: 341856 - RNA, 32 nt, Human
caaagaucuuugucucuuucugcuggaaugcg

SEQ ID NO: 341857 - RNA, 32 nt, Human
caaagaugaaagugcagcaaagcaaugaaaaa

SEQ ID NO: 341858 - RNA, 32 nt, Human
caaagaugaccaggauaaaacugagaaggauu

SEQ ID NO: 341859 - RNA, 32 nt, Human
caaagaugagggcagauuccuuaccugucugc

SEQ ID NO: 341860 - RNA, 32 nt, Human
caaagaugccugaaguguuggggaggaugaca

SEQ ID NO: 341861 - RNA, 30 nt, Human
caaagauggagcggcgggaggagcagccgg

SEQ ID NO: 341862 - RNA, 32 nt, Human
caaagaugggccuucucucucccagauaaguu

SEQ ID NO: 341863 - RNA, 32 nt, Human
caaagaugggggcagagagaaggucugagucc

SEQ ID NO: 341864 - RNA, 32 nt, Human
caaagauguaaacgcagcgugugcccacgcuc

SEQ ID NO: 341865 - RNA, 32 nt, Human
caaagaugucaccauuccuaguuauuugucac

SEQ ID NO: 341866 - RNA, 32 nt, Human
caaagauguccagauguccaugugcuagucuc

SEQ ID NO: 341867 - RNA, 30 nt, Human
caaagauguuugccaggaugucugaucucc

SEQ ID NO: 341868 - RNA, 32 nt, Human
caaagauucaccaagaaauaaagucaaccaaa

SEQ ID NO: 341869 - RNA, 32 nt, Human
caaagauucuccccaucucacagacaaggaaa

SEQ ID NO: 341870 - RNA, 32 nt, Human
caaagauuucaaaaucaggcugcaguacuuug

SEQ ID NO: 341871 - RNA, 32 nt, Human
caaagcaaaaguacauugguaauuugggcaca

SEQ ID NO: 341872 - RNA, 22 nt, Human
caaagcaaacauccuuaacuga

SEQ ID NO: 341873 - RNA, 32 nt, Human
caaagcaaacccuuacacacacaaagccccgg

SEQ ID NO: 341874 - RNA, 32 nt, Human
caaagcaaaccugcuuugacuuaauuuauuug

SEQ ID NO: 341875 - RNA, 32 nt, Human
caaagcaaacugccuugcuccuuuggggugau

SEQ ID NO: 341876 - RNA, 32 nt, Human
caaagcaaagagaaccaaagucucaguucugc

SEQ ID NO: 341877 - RNA, 22 nt, Human
caaagcaaagagucacugcauc

SEQ ID NO: 341878 - RNA, 32 nt, Human
caaagcaacgggagguggaggauccuggaggu

SEQ ID NO: 341879 - RNA, 32 nt, Human
caaagcaagcauucagaagaaaaagaagcaac

SEQ ID NO: 341880 - RNA, 21 nt, Human
caaagcaaggacuccaugacc

SEQ ID NO: 341881 - RNA, 32 nt, Human
caaagcaauaaaaucacuguauaucuuucuaa

SEQ ID NO: 341882 - RNA, 21 nt, Human
caaagcaaugucuaaaaacuc

SEQ ID NO: 341883 - RNA, 32 nt, Human
caaagcacacagagccccuggccccgccgcgg

SEQ ID NO: 341884 - RNA, 32 nt, Human
caaagcacagccccaguuucuggaggcagaug

SEQ ID NO: 341885 - RNA, 32 nt, Human
caaagcacagccuggccaacauggugaaaucc

SEQ ID NO: 341886 - RNA, 32 nt, Human
caaagcacagcuccagcucggacagcacccuc

SEQ ID NO: 341887 - RNA, 32 nt, Human
caaagcacaguaauguggcacugagcccuacc

SEQ ID NO: 341888 - RNA, 32 nt, Human
caaagcacauuuuuggggaucauagaagguug

SEQ ID NO: 341889 - RNA, 25 nt, Human
caaagcaccagacagaaagcaguca

SEQ ID NO: 341890 - RNA, 32 nt, Human
caaagcacgcacgggcauccugacugauccug

SEQ ID NO: 341891 - RNA, 32 nt, Human
caaagcacugccucuacugggcgugcugccaa

SEQ ID NO: 341892 - RNA, 23 nt, Human
caaagcacugggauuacaagcau

SEQ ID NO: 341893 - RNA, 23 nt, Human
caaagcacugggauuacaggcau

SEQ ID NO: 341894 - RNA, 23 nt, Human
caaagcacugggauuacaggcgu

SEQ ID NO: 341895 - RNA, 32 nt, Human
caaagcagaccaccuggugaaugaaaucaaug

SEQ ID NO: 341896 - RNA, 32 nt, Human
caaagcagaccagccuggggcagauauaccua

SEQ ID NO: 341897 - RNA, 21 nt, Human
caaagcagacucaaugcacug

SEQ ID NO: 341898 - RNA, 32 nt, Human
caaagcagacugcagugcaacggcacgaucuu

SEQ ID NO: 341899 - RNA, 18 nt, Human
caaagcagagcuggcaga

SEQ ID NO: 341900 - RNA, 22 nt, Human
caaagcagaggggcaggcagca

SEQ ID NO: 341901 - RNA, 32 nt, Human
caaagcagcaguguccagagaccccucaaucc

SEQ ID NO: 341902 - RNA, 32 nt, Human
caaagcagccccuuggagcugcagggagcuuc

SEQ ID NO: 341903 - RNA, 32 nt, Human
caaagcagcuugccaacagucaaaucacugau

SEQ ID NO: 341904 - RNA, 22 nt, Human
caaagcaggaccagcaggcaca

SEQ ID NO: 341905 - RNA, 23 nt, Human
caaagcaggaccuauuuggagca

SEQ ID NO: 341906 - RNA, 32 nt, Human
caaagcaggacgaucacuugagcccaggaguu

SEQ ID NO: 341907 - RNA, 32 nt, Human
caaagcaggaggaagaaaaggaagaaagaaaa

SEQ ID NO: 341908 - RNA, 32 nt, Human
caaagcaggaggaucacuugagccuaggaauu

SEQ ID NO: 341909 - RNA, 32 nt, Human
caaagcaggaggaucgcuugagcccaggaguu

SEQ ID NO: 341910 - RNA, 32 nt, Human
caaagcaggcuggggcaccaggugugcaugug

SEQ ID NO: 341911 - RNA, 32 nt, Human
caaagcagguggaucacgguaucaggaaacug

SEQ ID NO: 341912 - RNA, 32 nt, Human
caaagcaguagagaaaaauguaagauaggaag

SEQ ID NO: 341913 - RNA, 32 nt, Human
caaagcaguuccaagcaugcuuuggaaguaag

SEQ ID NO: 341914 - RNA, 32 nt, Human
caaagcauaagcucaguaacugugcaucuggu

SEQ ID NO: 341915 - RNA, 32 nt, Human
caaagcauaucgaugcagaauacugcgucuau

SEQ ID NO: 341916 - RNA, 32 nt, Human
caaagcaucccccgccguugugccacuuuugc

SEQ ID NO: 341917 - RNA, 32 nt, Human
caaagcaucccucuuagucuagguccuuguug

SEQ ID NO: 341918 - RNA, 32 nt, Human
caaagcaucuggaagaggaagaagagaggaau

SEQ ID NO: 341919 - RNA, 23 nt, Human
caaagcauugggauuacaggcau

SEQ ID NO: 341920 - RNA, 32 nt, Human
caaagccaaacaauacucuuggaguugauauu

SEQ ID NO: 341921 - RNA, 32 nt, Human
caaagccaaacagaugcccgccuaccaaagau

SEQ ID NO: 341922 - RNA, 32 nt, Human
caaagccaaauacccucaaggggagcagugug

SEQ ID NO: 341923 - RNA, 32 nt, Human
caaagccaagcccaauggcaagaagcccgcug

SEQ ID NO: 341924 - RNA, 32 nt, Human
caaagccaagugaagguguauuggggauucuc

SEQ ID NO: 341925 - RNA, 23 nt, Human
caaagccacaaggcuggccagca

SEQ ID NO: 341926 - RNA, 31 nt, Human
caaagccacagcuaacgagaggcagagagag

SEQ ID NO: 341927 - RNA, 32 nt, Human
caaagccacaugcaccaacgugacauauaagc

SEQ ID NO: 341928 - RNA, 32 nt, Human
caaagccacuaucagccuguuuccugagggaa

SEQ ID NO: 341929 - RNA, 32 nt, Human
caaagccacugccucugaucccacggaaugac

SEQ ID NO: 341930 - RNA, 32 nt, Human
caaagccagagaagaaagaugggguguccuuc

SEQ ID NO: 341931 - RNA, 32 nt, Human
caaagccagcaccacuuugccuuacuugaguc

SEQ ID NO: 341932 - RNA, 32 nt, Human
caaagccagcucccucuuuugucuguggcuag

SEQ ID NO: 341933 - RNA, 32 nt, Human
caaagccagcuugaaaccuucacuuaggaacg

SEQ ID NO: 341934 - RNA, 22 nt, Human
caaagccaggcacaacaaggga

SEQ ID NO: 341935 - RNA, 32 nt, Human
caaagccaggcagagccaggggugagaggcag

SEQ ID NO: 341936 - RNA, 32 nt, Human
caaagccaggcaggccaagacuugaguuggca

SEQ ID NO: 341937 - RNA, 32 nt, Human
caaagccaggcaggccauggggcucugggcgc

SEQ ID NO: 341938 - RNA, 32 nt, Human
caaagccaggccaggguacagugagaacacgg

SEQ ID NO: 341939 - RNA, 32 nt, Human
caaagccauggugaaacaucucugugcuaauu

SEQ ID NO: 341940 - RNA, 22 nt, Human
caaagcccaaccccuuaaugaa

SEQ ID NO: 341941 - RNA, 32 nt, Human
caaagcccaaggcaccagaagguuuguuucag

SEQ ID NO: 341942 - RNA, 32 nt, Human
caaagcccaccaugccccaggcucagccagga

SEQ ID NO: 341943 - RNA, 32 nt, Human
caaagcccagcccagcuggagagaucagcccu

SEQ ID NO: 341944 - RNA, 32 nt, Human
caaagcccagggaugcaaagguugcagugagu

SEQ ID NO: 341945 - RNA, 32 nt, Human
caaagcccauagcacugggcucugauggcugc

SEQ ID NO: 341946 - RNA, 26 nt, Human
caaagccccaaacacagcugcacuga

SEQ ID NO: 341947 - RNA, 26 nt, Human
caaagccccaaacacaggugcacuga

SEQ ID NO: 341948 - RNA, 32 nt, Human
caaagccccaggaaaccuaccaaagcuagaau

SEQ ID NO: 341949 - RNA, 32 nt, Human
caaagccccaggagaacaggcuggacagagga

SEQ ID NO: 341950 - RNA, 21 nt, Human
caaagccccccagcucccaca

SEQ ID NO: 341951 - RNA, 32 nt, Human
caaagcccuucacuggcuccccaaagccuaug

SEQ ID NO: 341952 - RNA, 32 nt, Human
caaagcccuucaggcuggaguauaguggcaug

SEQ ID NO: 341953 - RNA, 32 nt, Human
caaagcccuucaucuaauauuuguugcuauug

SEQ ID NO: 341954 - RNA, 32 nt, Human
caaagccgggcugggcuuggagcugcucaugg

SEQ ID NO: 341955 - RNA, 32 nt, Human
caaagccuccgaguccuugcagcuggucuuug

SEQ ID NO: 341956 - RNA, 32 nt, Human
caaagccucuaugugugaaacacagggguacc

SEQ ID NO: 341957 - RNA, 32 nt, Human
caaagccugcagaggaggccagccugaguccu

SEQ ID NO: 341958 - RNA, 32 nt, Human
caaagccugcagcguggcaagcacuuugcaca

SEQ ID NO: 341959 - RNA, 24 nt, Human
caaagccugcaguccccucugcca

SEQ ID NO: 341960 - RNA, 32 nt, Human
caaagccugcuguuucaggcugucaggaagaa

SEQ ID NO: 341961 - RNA, 32 nt, Human
caaagccuggaggccuuccugccugccuucca

SEQ ID NO: 341962 - RNA, 32 nt, Human
caaagccugggcaggugccaccgggaaggaau

SEQ ID NO: 341963 - RNA, 32 nt, Human
caaagccuuuaaauaccaacugcagcauggag

SEQ ID NO: 341964 - RNA, 32 nt, Human
caaagccuuuccgcacccuccugacuguccug

SEQ ID NO: 341965 - RNA, 22 nt, Human
caaagccuuuggcaagcaguca

SEQ ID NO: 341966 - RNA, 32 nt, Human
caaagcgaagccugugcuacugugagucuugc

SEQ ID NO: 341967 - RNA, 23 nt, Human
caaagcgauaggauuacaggcgu

SEQ ID NO: 341968 - RNA, 23 nt, Human
caaagcgcuaggauuacaagcau

SEQ ID NO: 341969 - RNA, 32 nt, Human
caaagcgcucaucuugcccucuaccuccugau

SEQ ID NO: 341970 - RNA, 20 nt, Human
caaagcgcuggauuacaggc

SEQ ID NO: 341971 - RNA, 21 nt, Human
caaagcgcuggauuacaggca

SEQ ID NO: 341972 - RNA, 23 nt, Human
caaagcgcugggauuacaggcgu

SEQ ID NO: 341973 - RNA, 32 nt, Human
caaagcggugagcaguagggaggcagaguauc

SEQ ID NO: 341974 - RNA, 32 nt, Human
caaagcguauuuuugugaaaucuuuuaagagc

SEQ ID NO: 341975 - RNA, 32 nt, Human
caaagcgugccacccuuuuauuuuccgucagg

SEQ ID NO: 341976 - RNA, 23 nt, Human
caaagcguugggauuauaggcau

SEQ ID NO: 341977 - RNA, 32 nt, Human
caaagcuacugaaacuccuccaccugcuucua

SEQ ID NO: 341978 - RNA, 32 nt, Human
caaagcuagagucagagguuccgguugagauc

SEQ ID NO: 341979 - RNA, 21 nt, Human
caaagcucaaaacaaucaaga

SEQ ID NO: 341980 - RNA, 32 nt, Human
caaagcucacugcagccuugaacuccuaggcu

SEQ ID NO: 341981 - RNA, 32 nt, Human
caaagcucacugcagccuugaauuccugggcu

SEQ ID NO: 341982 - RNA, 32 nt, Human
caaagcucagcccucugggcgguccccuugcc

SEQ ID NO: 341983 - RNA, 32 nt, Human
caaagcucauucuucugaaucuaauaucacua

SEQ ID NO: 341984 - RNA, 32 nt, Human
caaagcucauuucaaaugccccuucauuugug

SEQ ID NO: 341985 - RNA, 32 nt, Human
caaagcuccccaccccagccugguggcagagg

SEQ ID NO: 341986 - RNA, 32 nt, Human
caaagcucugaugacagagaucauugacauuu

SEQ ID NO: 341987 - RNA, 20 nt, Human
caaagcucugucccccugcu

SEQ ID NO: 341988 - RNA, 32 nt, Human
caaagcugagacugacgggugauguugcucau

SEQ ID NO: 341989 - RNA, 32 nt, Human
caaagcugaggugcuggagaugccaagggaag

SEQ ID NO: 341990 - RNA, 32 nt, Human
caaagcugcaccugaugaugcugccucuccuc

SEQ ID NO: 341991 - RNA, 32 nt, Human
caaagcugcgcaaaccaugcaggaugauuuac

SEQ ID NO: 341992 - RNA, 32 nt, Human
caaagcugcuucucuuccccagacccaugcug

SEQ ID NO: 341993 - RNA, 32 nt, Human
caaagcugggauuacaggugugagcauaguga

SEQ ID NO: 341994 - RNA, 21 nt, Human
caaagcugucacaccugccuc

SEQ ID NO: 341995 - RNA, 32 nt, Human
caaagcugugugaccggcugggcaugguggcu

SEQ ID NO: 341996 - RNA, 32 nt, Human
caaagcuguuuugcagcuguuuucccuuaaag

SEQ ID NO: 341997 - RNA, 28 nt, Human
caaagcuuaaccgcugccuccugucccc

SEQ ID NO: 341998 - RNA, 21 nt, Human
caaagcuuaugcagaacagca

SEQ ID NO: 341999 - RNA, 32 nt, Human
caaagcuuccaauauuugauguugguuaagcu

SEQ ID NO: 342000 - RNA, 32 nt, Human
caaagcuuccacccuucuccccucagagagga

SEQ ID NO: 342001 - RNA, 32 nt, Human
caaagcuuccagcacgggaaaaugagaaacac

SEQ ID NO: 342002 - RNA, 32 nt, Human
caaagcuucucaagugcggacaggguuaccua

SEQ ID NO: 342003 - RNA, 32 nt, Human
caaagcuugugggcacaugggcacauacagac

SEQ ID NO: 342004 - RNA, 32 nt, Human
caaagcuuuauuuuuccacaucaugcuuacaa

SEQ ID NO: 342005 - RNA, 32 nt, Human
caaagcuuugcuuaucucagcaaagaagguuu

SEQ ID NO: 342006 - RNA, 32 nt, Human
caaagcuuuuuaaugcauaaaaguauaauuga

SEQ ID NO: 342007 - RNA, 32 nt, Human
caaaggaaaaggcaaugggaguaaauagacaa

SEQ ID NO: 342008 - RNA, 32 nt, Human
caaaggaaaugcacagaacauaucuucacauu

SEQ ID NO: 342009 - RNA, 32 nt, Human
caaaggaacucugaccucugaaguacuugagc

SEQ ID NO: 342010 - RNA, 32 nt, Human
caaaggaagagacuccagcagcagaugcagca

SEQ ID NO: 342011 - RNA, 32 nt, Human
caaaggaagcagcugggacagguggagaagga

SEQ ID NO: 342012 - RNA, 32 nt, Human
caaaggaagcuuuuaaacucagcagcugcacc

SEQ ID NO: 342013 - RNA, 32 nt, Human
caaaggaaucacccuuucccuaccuucagacu

SEQ ID NO: 342014 - RNA, 32 nt, Human
caaaggaaucugccuuuccuccgucucaaguc

SEQ ID NO: 342015 - RNA, 32 nt, Human
caaaggaaugagaaaagacaaguuaagaaugc

SEQ ID NO: 342016 - RNA, 32 nt, Human
caaaggaauuggauauggucugugauaacuau

SEQ ID NO: 342017 - RNA, 32 nt, Human
caaaggacaagaaaacacuucucacuaugaau

SEQ ID NO: 342018 - RNA, 32 nt, Human
caaaggacagagaauuuaagcacagaaauccc

SEQ ID NO: 342019 - RNA, 32 nt, Human
caaaggacagccgccuggagaugacuugaggc

SEQ ID NO: 342020 - RNA, 21 nt, Human
caaaggaccccaccucaccca

SEQ ID NO: 342021 - RNA, 24 nt, Human
caaaggacucuggugucucaccca

SEQ ID NO: 342022 - RNA, 32 nt, Human
caaaggacucuuaugucacugcagugucccau

SEQ ID NO: 342023 - RNA, 32 nt, Human
caaaggacuucaccgaucuacuuuugcagucg

SEQ ID NO: 342024 - RNA, 32 nt, Human
caaaggacuuccuagugggugugaaaggcagc

SEQ ID NO: 342025 - RNA, 32 nt, Human
caaaggacuuugcccaguggaugccauucaua

SEQ ID NO: 342026 - RNA, 32 nt, Human
caaaggagaaaaggaagugauuggagaauuaa

SEQ ID NO: 342027 - RNA, 32 nt, Human
caaaggagacaguuguuuguguuuguaugguu

SEQ ID NO: 342028 - RNA, 32 nt, Human
caaaggagacuccugagggauuuagaaauuca

SEQ ID NO: 342029 - RNA, 32 nt, Human
caaaggagaugcagagaugcccaugccgagac

SEQ ID NO: 342030 - RNA, 32 nt, Human
caaaggagcaagagguauaauggauauggcau

SEQ ID NO: 342031 - RNA, 32 nt, Human
caaaggagccccgcugccugcccacccacccu

SEQ ID NO: 342032 - RNA, 32 nt, Human
caaaggaggaagaauuaaaagagugggaaugg

SEQ ID NO: 342033 - RNA, 32 nt, Human
caaaggagggagcccugcagggcacagcaaga

SEQ ID NO: 342034 - RNA, 32 nt, Human
caaaggagggcaccucugucugguuuccucuu

SEQ ID NO: 342035 - RNA, 32 nt, Human
caaaggagggcugcggcuuccuucccucacug

SEQ ID NO: 342036 - RNA, 32 nt, Human
caaaggagggucaggaaggaugagcauuuagg

SEQ ID NO: 342037 - RNA, 32 nt, Human
caaaggagguggggagcaggagagagagggua

SEQ ID NO: 342038 - RNA, 32 nt, Human
caaaggagugugagagaggaguggauggucaa

SEQ ID NO: 342039 - RNA, 32 nt, Human
caaaggauaaaagaguagcauaagcugcugaa

SEQ ID NO: 342040 - RNA, 32 nt, Human
caaaggauaaucuuucuuuucauugacaacac

SEQ ID NO: 342041 - RNA, 24 nt, Human
caaaggaugaccccuaaacacaga

SEQ ID NO: 342042 - RNA, 32 nt, Human
caaaggauucaggcaaaccccagcaaguuucu

SEQ ID NO: 342043 - RNA, 32 nt, Human
caaaggauucugggaaggagaauaaagagaaa

SEQ ID NO: 342044 - RNA, 32 nt, Human
caaaggauuuuaaaaucugagcacuuagguga

SEQ ID NO: 342045 - RNA, 32 nt, Human
caaaggcaacuuggcuucacaggaucugccug

SEQ ID NO: 342046 - RNA, 32 nt, Human
caaaggcaccuaaaccuuuuguuucuuuuucu

SEQ ID NO: 342047 - RNA, 32 nt, Human
caaaggcacuguuacucguugugugaccccgc

SEQ ID NO: 342048 - RNA, 32 nt, Human
caaaggcagaaugcuugugagauuauaagccu

SEQ ID NO: 342049 - RNA, 32 nt, Human
caaaggcagagccacagaggggcugcuggucc

SEQ ID NO: 342050 - RNA, 32 nt, Human
caaaggcagagcuuacugucauggcucagaug

SEQ ID NO: 342051 - RNA, 32 nt, Human
caaaggcaggcagaucaccugaggucaggagu

SEQ ID NO: 342052 - RNA, 32 nt, Human
caaaggcaggccuggcugggugcaguggcuca

SEQ ID NO: 342053 - RNA, 32 nt, Human
caaaggcagguggaucaccugaggucaggagu

SEQ ID NO: 342054 - RNA, 32 nt, Human
caaaggcauccugcaaccaccccauccaucca

SEQ ID NO: 342055 - RNA, 32 nt, Human
caaaggcaugguaccucagucugguauccaga

SEQ ID NO: 342056 - RNA, 32 nt, Human
caaaggcaugugauugauuaaugauucccccu

SEQ ID NO: 342057 - RNA, 32 nt, Human
caaaggccaacuucagccuggcacggcggcgc

SEQ ID NO: 342058 - RNA, 32 nt, Human
caaaggccacaguccccuccugugcuggcagc

SEQ ID NO: 342059 - RNA, 32 nt, Human
caaaggccacaucuucugugaagacuguguug

SEQ ID NO: 342060 - RNA, 32 nt, Human
caaaggccaggaguuugaggcugcagugagcu

SEQ ID NO: 342061 - RNA, 32 nt, Human
caaaggccaggcuugggaaggaaggagggauc

SEQ ID NO: 342062 - RNA, 32 nt, Human
caaaggccaucuccuauggaccaaggacccca

SEQ ID NO: 342063 - RNA, 32 nt, Human
caaaggcccaaugcagaggagcccgcggagca

SEQ ID NO: 342064 - RNA, 32 nt, Human
caaaggcccccuuucuauguucauguuaguuu

SEQ ID NO: 342065 - RNA, 32 nt, Human
caaaggccccgcagucccucucccaggaggac

SEQ ID NO: 342066 - RNA, 32 nt, Human
caaaggcccgaaagaggagcugggcggggugg

SEQ ID NO: 342067 - RNA, 32 nt, Human
caaaggcccugaggugggugcaguaauaccac

SEQ ID NO: 342068 - RNA, 32 nt, Human
caaaggccuagauuugagacaagagcugaugu

SEQ ID NO: 342069 - RNA, 31 nt, Human
caaaggccucagccugugccugugucgagcu

SEQ ID NO: 342070 - RNA, 32 nt, Human
caaaggccucagccugugccugugucgagcuc

SEQ ID NO: 342071 - RNA, 32 nt, Human
caaaggccugagagcuggagucaguguggugu

SEQ ID NO: 342072 - RNA, 32 nt, Human
caaaggcgagggacaagagagaguuaacaucu

SEQ ID NO: 342073 - RNA, 32 nt, Human
caaaggcgggcagaucaccugaggucaggagu

SEQ ID NO: 342074 - RNA, 32 nt, Human
caaaggcgggcggaucaccugaggucaggagu

SEQ ID NO: 342075 - RNA, 19 nt, Human
caaaggcggggguugaaga

SEQ ID NO: 342076 - RNA, 32 nt, Human
caaaggcuacacagcagcccacaguccacagu

SEQ ID NO: 342077 - RNA, 32 nt, Human
caaaggcucaacaaccagagggaauggugaga

SEQ ID NO: 342078 - RNA, 32 nt, Human
caaaggcugaaaucucugccugaccuggcagc

SEQ ID NO: 342079 - RNA, 32 nt, Human
caaaggcugagaaaugcaaaggcucauauuua

SEQ ID NO: 342080 - RNA, 32 nt, Human
caaaggcugcaacccuauggccucuuggagac

SEQ ID NO: 342081 - RNA, 32 nt, Human
caaaggcugccaggacccuugaagaugcuuuu

SEQ ID NO: 342082 - RNA, 32 nt, Human
caaaggcugcucccggcaaccccugcccagcu

SEQ ID NO: 342083 - RNA, 32 nt, Human
caaaggcugugaugcugcuguggcuuucuaug

SEQ ID NO: 342084 - RNA, 32 nt, Human
caaaggcuuacugauaaacuugagucugcccu

SEQ ID NO: 342085 - RNA, 32 nt, Human
caaagggaagaguaugcaugcagccuggaggu

SEQ ID NO: 342086 - RNA, 32 nt, Human
caaagggaaucaggauucuguggcuguagacu

SEQ ID NO: 342087 - RNA, 32 nt, Human
caaagggacgauccuccagaucugcugcaaag

SEQ ID NO: 342088 - RNA, 32 nt, Human
caaagggacuccugugaaacugcugccaaaaa

SEQ ID NO: 342089 - RNA, 32 nt, Human
caaagggaggaggccagcugguaggcagccug

SEQ ID NO: 342090 - RNA, 32 nt, Human
caaagggaggcuagggacaggaaagccaucuc

SEQ ID NO: 342091 - RNA, 32 nt, Human
caaagggauccuggggaaggaggggaacaugc

SEQ ID NO: 342092 - RNA, 32 nt, Human
caaagggauugcuuuuuccucucauugucuug

SEQ ID NO: 342093 - RNA, 32 nt, Human
caaagggcacauggaguauggaagggggcaug

SEQ ID NO: 342094 - RNA, 32 nt, Human
caaagggcagaggcaggaucagccacgggauu

SEQ ID NO: 342095 - RNA, 32 nt, Human
caaagggccguucgccuuucauggccuccaca

SEQ ID NO: 342096 - RNA, 32 nt, Human
caaagggccuuguuggacagggggacuggcug

SEQ ID NO: 342097 - RNA, 32 nt, Human
caaaggggaaggcagggguggggccguggcug

SEQ ID NO: 342098 - RNA, 32 nt, Human
caaaggggcagggccuggcuuugcuacaagau

SEQ ID NO: 342099 - RNA, 32 nt, Human
caaaggggcauguugcuccugagcagcaugaa

SEQ ID NO: 342100 - RNA, 32 nt, Human
caaagggggaaagaaacaccugagcagaaugg

SEQ ID NO: 342101 - RNA, 32 nt, Human
caaagggggcacaugucccuggaguugcuucc

SEQ ID NO: 342102 - RNA, 32 nt, Human
caaagggguaccccaaauccagagcugccuac

SEQ ID NO: 342103 - RNA, 32 nt, Human
caaaggggugggggcugggugcaguggcucac

SEQ ID NO: 342104 - RNA, 32 nt, Human
caaaggguccucaccucuccccuaguacacuu

SEQ ID NO: 342105 - RNA, 32 nt, Human
caaagggucugagucugccaccuacgugcccg

SEQ ID NO: 342106 - RNA, 32 nt, Human
caaagggucugcccuuucccugccugaguugc

SEQ ID NO: 342107 - RNA, 32 nt, Human
caaaggguguuuaaauggucugcccaaaguca

SEQ ID NO: 342108 - RNA, 23 nt, Human
caaaggguugggauuaccggcau

SEQ ID NO: 342109 - RNA, 32 nt, Human
caaaggguugugagucccggcccagccccucc

SEQ ID NO: 342110 - RNA, 31 nt, Human
caaagguagguguccaugcagauuuuauugg

SEQ ID NO: 342111 - RNA, 32 nt, Human
caaaggucagaaaagcuuuacugacauucuau

SEQ ID NO: 342112 - RNA, 32 nt, Human
caaaggucaggaacucucuccacugcaugaaa

SEQ ID NO: 342113 - RNA, 32 nt, Human
caaaggucaggaguucgagaccagccuggcca

SEQ ID NO: 342114 - RNA, 32 nt, Human
caaagguccaauaaaaugccucaaccacggaa

SEQ ID NO: 342115 - RNA, 32 nt, Human
caaagguccacauguaagacacacuggaaaaa

SEQ ID NO: 342116 - RNA, 32 nt, Human
caaagguccuugguggccuguccccugcccug

SEQ ID NO: 342117 - RNA, 32 nt, Human
caaaggucucuuccagcucaaaaauauuguca

SEQ ID NO: 342118 - RNA, 32 nt, Human
caaaggucugcagcuucacuccugaagccagc

SEQ ID NO: 342119 - RNA, 32 nt, Human
caaaggugagccuuguuugggaaaucagcgcc

SEQ ID NO: 342120 - RNA, 32 nt, Human
caaaggugauggauucugcagugaacauuucc

SEQ ID NO: 342121 - RNA, 32 nt, Human
caaaggugcacuccagacucuggggguggaca

SEQ ID NO: 342122 - RNA, 32 nt, Human
caaaggugcaguuucuccucuccugggcaccu

SEQ ID NO: 342123 - RNA, 32 nt, Human
caaaggugccugaggcucugguaagggugaag

SEQ ID NO: 342124 - RNA, 32 nt, Human
caaaggugccuucuguagacacuccugcucuc

SEQ ID NO: 342125 - RNA, 32 nt, Human
caaaggugcucuugcauugguggagaggggcu

SEQ ID NO: 342126 - RNA, 32 nt, Human
caaagguggauuuaagaauuaaaccauuacau

SEQ ID NO: 342127 - RNA, 32 nt, Human
caaagguggcagcugagcaucccuggagaggg

SEQ ID NO: 342128 - RNA, 32 nt, Human
caaagguggcuaaggcagaggcugagggggcu

SEQ ID NO: 342129 - RNA, 32 nt, Human
caaagguggguagaucaccugaggucgggagu

SEQ ID NO: 342130 - RNA, 32 nt, Human
caaagguguccaagucacacagagccacggaa

SEQ ID NO: 342131 - RNA, 32 nt, Human
caaagguguggaggaggaggggagggaggaag

SEQ ID NO: 342132 - RNA, 32 nt, Human
caaagguguuggagagcagcuuuggguucugu

SEQ ID NO: 342133 - RNA, 32 nt, Human
caaagguuaaaaagaccaaaucaagcugaggu

SEQ ID NO: 342134 - RNA, 32 nt, Human
caaagguuagcaugcagaagugaaagugucaa

SEQ ID NO: 342135 - RNA, 32 nt, Human
caaagguucagaauggggaauguguuaaacaa

SEQ ID NO: 342136 - RNA, 32 nt, Human
caagauggcgccacuacacuccagccugggcg

SEQ ID NO: 342137 - RNA, 32 nt, Human
caagauggcgccacugcacuccagccugggug

SEQ ID NO: 342138 - RNA, 32 nt, Human
caagauggcgccacugcacuccagucugggcg

SEQ ID NO: 342139 - RNA, 32 nt, Human
caagauggcgccacugcauuccagccugggca

SEQ ID NO: 342140 - RNA, 32 nt, Human
caagauggcgccauugcacuccagccugggug

SEQ ID NO: 342141 - RNA, 29 nt, Human
caagauggcgccgguggggguggagaaga

SEQ ID NO: 342142 - RNA, 32 nt, Human
caagauggcugcaucacauuuucaaaugauuu

SEQ ID NO: 342143 - RNA, 32 nt, Human
caagauggcugugacacccugcccucaccucc

SEQ ID NO: 342144 - RNA, 32 nt, Human
caagaugggaagaucacuugagcucaggagua

SEQ ID NO: 342145 - RNA, 32 nt, Human
caagaugggaggagugcuugagguuaggcguu

SEQ ID NO: 342146 - RNA, 32 nt, Human
caagaugggaggaucacuugaagccaggaguu

SEQ ID NO: 342147 - RNA, 32 nt, Human
caagaugggaggaucauuugagcccaggaguu

SEQ ID NO: 342148 - RNA, 32 nt, Human
caagaugggaggaucgcuugagcccaggagcu

SEQ ID NO: 342149 - RNA, 32 nt, Human
caagaugggaggauugcuugagcccagaaguu

SEQ ID NO: 342150 - RNA, 32 nt, Human
caagaugggauuaugggggcgcagccgcggug

SEQ ID NO: 342151 - RNA, 32 nt, Human
caagaugggcaaaucacuugagucuaggaguu

SEQ ID NO: 342152 - RNA, 32 nt, Human
caagauggucucaagcuccugaccucgugauc

SEQ ID NO: 342153 - RNA, 32 nt, Human
caagauggugcggugcuggugccuugggaccu

SEQ ID NO: 342154 - RNA, 32 nt, Human
caagauggugcuggugcugcgccauccuuugu

SEQ ID NO: 342155 - RNA, 32 nt, Human
caagaugucagccgaggugacagugaagauau

SEQ ID NO: 342156 - RNA, 21 nt, Human
caagaugucccuguggacucc

SEQ ID NO: 342157 - RNA, 29 nt, Human
caagaugucccuugugacuguccccuucu

SEQ ID NO: 342158 - RNA, 32 nt, Human
caagaugucuaaggaaaaagcucaggucugug

SEQ ID NO: 342159 - RNA, 32 nt, Human
caagaugugcccaggagguggcgguggcgcac

SEQ ID NO: 342160 - RNA, 29 nt, Human
caagaugugcucucugggguuguucccuc

SEQ ID NO: 342161 - RNA, 32 nt, Human
caagauguggcccaagggguuaagugggaaca

SEQ ID NO: 342162 - RNA, 32 nt, Human
caagauguggcugaagaucagaggcucaguua

SEQ ID NO: 342163 - RNA, 32 nt, Human
caagauguggugaugacagaaucagcuuuugu

SEQ ID NO: 342164 - RNA, 32 nt, Human
caagauguucucuuuucagaucuugggaacug

SEQ ID NO: 342165 - RNA, 32 nt, Human
caagauguugaggcgagcagggcaggcccccg

SEQ ID NO: 342166 - RNA, 32 nt, Human
caagauguuuccaucacagucaaaacuugaua

SEQ ID NO: 342167 - RNA, 32 nt, Human
caagauuaacaccccuccugcaggaggaagac

SEQ ID NO: 342168 - RNA, 32 nt, Human
caagauuacgccacugcacuccagccugggug

SEQ ID NO: 342169 - RNA, 32 nt, Human
caagauuauaaauaugaacugauuaugaucug

SEQ ID NO: 342170 - RNA, 32 nt, Human
caagauuaugccacugcacuccagccugggug

SEQ ID NO: 342171 - RNA, 32 nt, Human
caagauuaugccacugcacuucagccugggug

SEQ ID NO: 342172 - RNA, 32 nt, Human
caagauuaugccauugcacuccagccugggug

SEQ ID NO: 342173 - RNA, 32 nt, Human
caagauucauucucccugaaucuuaccaacaa

SEQ ID NO: 342174 - RNA, 32 nt, Human
caagauuccacauucauauuacuuacuuauac

SEQ ID NO: 342175 - RNA, 32 nt, Human
caagauuccagauccuucucuccuggaguucu

SEQ ID NO: 342176 - RNA, 32 nt, Human
caagauuccugucaaucccaucugcagggaac

SEQ ID NO: 342177 - RNA, 32 nt, Human
caagauugagccacugcacuccagccugggug

SEQ ID NO: 342178 - RNA, 32 nt, Human
caagauugcacacugcacuccagccuggguga

SEQ ID NO: 342179 - RNA, 32 nt, Human
caagauugcaccaccacacuccagccugggug

SEQ ID NO: 342180 - RNA, 32 nt, Human
caagauugcaccacggcacgcuagccugggug

SEQ ID NO: 342181 - RNA, 32 nt, Human
caagauugcaccacugcacuacagcuugggug

SEQ ID NO: 342182 - RNA, 32 nt, Human
caagauugcaccacugcacuccagccggggug

SEQ ID NO: 342183 - RNA, 32 nt, Human
caagauugcaccacugcacuccagccugggca

SEQ ID NO: 342184 - RNA, 32 nt, Human
caagauugcaccacugcacuccagccugggcg

SEQ ID NO: 342185 - RNA, 32 nt, Human
caagauugcaccacugcauuccagcauggcca

SEQ ID NO: 342186 - RNA, 32 nt, Human
caagauugcaccacugcucuccagccugggga

SEQ ID NO: 342187 - RNA, 32 nt, Human
caagauugcaccacuguacuccagccugggca

SEQ ID NO: 342188 - RNA, 32 nt, Human
caagauugcaccacuguacuccagccugggug

SEQ ID NO: 342189 - RNA, 32 nt, Human
caagauugcaccagugcacuccagcugggcga

SEQ ID NO: 342190 - RNA, 32 nt, Human
caagauugcaccauugaacuccagccugggca

SEQ ID NO: 342191 - RNA, 32 nt, Human
caagauugcaccauugcacuccagccuggcga

SEQ ID NO: 342192 - RNA, 32 nt, Human
caagauugcaccauugcacuccagccugggug

SEQ ID NO: 342193 - RNA, 32 nt, Human
caagauugcaccauugcauuccagccugggug

SEQ ID NO: 342194 - RNA, 32 nt, Human
caagauugcacccugcacucuagccugggcaa

SEQ ID NO: 342195 - RNA, 32 nt, Human
caagauugcacuacuacacuccagccugguga

SEQ ID NO: 342196 - RNA, 32 nt, Human
caagauugcacuacugcacuccagccugggug

SEQ ID NO: 342197 - RNA, 32 nt, Human
caagauugcaucacugcacuccagcuugggug

SEQ ID NO: 342198 - RNA, 32 nt, Human
caagauugccaagggcaucuucuggggcaucc

SEQ ID NO: 342199 - RNA, 32 nt, Human
caagauugccacggcaaaccuaggcaaguucc

SEQ ID NO: 342200 - RNA, 32 nt, Human
caagauugccccacugcacuccacccugggca

SEQ ID NO: 342201 - RNA, 32 nt, Human
caagauugcgccacugcacuccacccugggug

SEQ ID NO: 342202 - RNA, 32 nt, Human
caagauugcgccacugcacuccagccagggcg

SEQ ID NO: 342203 - RNA, 32 nt, Human
caagauugcgccacugcacuccagccugacga

SEQ ID NO: 342204 - RNA, 32 nt, Human
caagauugcgccacugcacuccagccugggca

SEQ ID NO: 342205 - RNA, 32 nt, Human
caagauugcgccacugcacuccagccugggug

SEQ ID NO: 342206 - RNA, 32 nt, Human
caagauugcgccauugcacuccagccugggca

SEQ ID NO: 342207 - RNA, 32 nt, Human
caagauugcgccauugcauuccagccugggca

SEQ ID NO: 342208 - RNA, 32 nt, Human
caagauugcgucacugcacugcagccugggug

SEQ ID NO: 342209 - RNA, 32 nt, Human
caagauuggggcugcugcauuccagguucccu

SEQ ID NO: 342210 - RNA, 32 nt, Human
caagauuguaaccagagagcagccaggagcuu

SEQ ID NO: 342211 - RNA, 32 nt, Human
caagauuguaccacugcacuccaaccuggguu

SEQ ID NO: 342212 - RNA, 32 nt, Human
caagauuguaccacugcacuccagccugggca

SEQ ID NO: 342213 - RNA, 32 nt, Human
caagauuguaccacugcacuccaguuuggcaa

SEQ ID NO: 342214 - RNA, 32 nt, Human
caagauugugacacugcacuccagccugggca

SEQ ID NO: 342215 - RNA, 32 nt, Human
caagauugugcacugcacucuagccuggggga

SEQ ID NO: 342216 - RNA, 32 nt, Human
caagauugugccacuacuguacucuagccugg

SEQ ID NO: 342217 - RNA, 32 nt, Human
caagauugugccacugaacucuagccugggua

SEQ ID NO: 342218 - RNA, 32 nt, Human
caagauugugccacugcacuccacccugggca

SEQ ID NO: 342219 - RNA, 32 nt, Human
caagauugugccacugcacuccagccugagca

SEQ ID NO: 342220 - RNA, 32 nt, Human
caagauugugccacugcacuccagccugggca

SEQ ID NO: 342221 - RNA, 32 nt, Human
caagauugugccacugcacuccagccugggcg

SEQ ID NO: 342222 - RNA, 32 nt, Human
caagauugugccacugcacuccagccugggug

SEQ ID NO: 342223 - RNA, 32 nt, Human
caagauugugccacugcacuccagcgugggca

SEQ ID NO: 342224 - RNA, 32 nt, Human
caagauugugccacugcacucuagccuaggug

SEQ ID NO: 342225 - RNA, 32 nt, Human
caagauugugccacugcacucuagccugggca

SEQ ID NO: 342226 - RNA, 32 nt, Human
caagauugugccacugcacugcaggcugggug

SEQ ID NO: 342227 - RNA, 32 nt, Human
caagauugugccauugcacuccagccugggca

SEQ ID NO: 342228 - RNA, 32 nt, Human
caagauugugccauugcacuccagccugggug

SEQ ID NO: 342229 - RNA, 32 nt, Human
caagauugugccauugcacucuagccugggca

SEQ ID NO: 342230 - RNA, 32 nt, Human
caagauugugccccugcauucuagccugggug

SEQ ID NO: 342231 - RNA, 32 nt, Human
caagauuguuuguucagauguaggccuaacaa

SEQ ID NO: 342232 - RNA, 32 nt, Human
caagauuuaagguaaauuucuuaaacauuauc

SEQ ID NO: 342233 - RNA, 32 nt, Human
caagauuuaauaacagaggcugcucuggucac

SEQ ID NO: 342234 - RNA, 32 nt, Human
caagauuucaaagaagauuuugggggagagag

SEQ ID NO: 342235 - RNA, 32 nt, Human
caagauuucccaaugugccucuauucuuacau

SEQ ID NO: 342236 - RNA, 32 nt, Human
caagauuuccuccauuaaaacuccugaggcac

SEQ ID NO: 342237 - RNA, 32 nt, Human
caagauuuccuuaaaaucucuaauagaggcau

SEQ ID NO: 342238 - RNA, 32 nt, Human
caagauuuuaaauucaaauaaagccuaauauc

SEQ ID NO: 342239 - RNA, 32 nt, Human
caagauuuugucccauuuucccaugaagcuac

SEQ ID NO: 342240 - RNA, 32 nt, Human
caagcaaaccaccucaccacacuauccagggg

SEQ ID NO: 342241 - RNA, 32 nt, Human
caagcaaagagagguuaaacauuucuccaagu

SEQ ID NO: 342242 - RNA, 32 nt, Human
caagcaaaggcagagagggaggacggcaccga

SEQ ID NO: 342243 - RNA, 32 nt, Human
caagcaaaucccaaauucuccuccugaacccu

SEQ ID NO: 342244 - RNA, 32 nt, Human
caagcaacacacaagggcgucaagucacuggc

SEQ ID NO: 342245 - RNA, 32 nt, Human
caagcaaccucuagcucccacaauucaguguu

SEQ ID NO: 342246 - RNA, 32 nt, Human
caagcaacucuucugccucagcaucccaagua

SEQ ID NO: 342247 - RNA, 32 nt, Human
caagcaagaagaggaguggaagcacaguugcc

SEQ ID NO: 342248 - RNA, 32 nt, Human
caagcaagacacaccagagcucuucccucgau

SEQ ID NO: 342249 - RNA, 32 nt, Human
caagcaagaggugaagaaggcaggagagagac

SEQ ID NO: 342250 - RNA, 32 nt, Human
caagcaagaugggguucucaucaguucuuccu

SEQ ID NO: 342251 - RNA, 32 nt, Human
caagcaagccagugagcagcccugccagacua

SEQ ID NO: 342252 - RNA, 32 nt, Human
caagcaagcccccagaggccgugucucuggac

SEQ ID NO: 342253 - RNA, 32 nt, Human
caagcaagccugggacucagagacagaugugc

SEQ ID NO: 342254 - RNA, 32 nt, Human
caagcaagccugggagccggcgggaggucugc

SEQ ID NO: 342255 - RNA, 32 nt, Human
caagcaaggaagcagagcacuguguaaccagc

SEQ ID NO: 342256 - RNA, 32 nt, Human
caagcaaggguacauccugacacucacugaga

SEQ ID NO: 342257 - RNA, 32 nt, Human
caagcaaguccacauggagauuuggaggacac

SEQ ID NO: 342258 - RNA, 32 nt, Human
caagcaauccaagugauccucccaccucaacc

SEQ ID NO: 342259 - RNA, 32 nt, Human
caagcaaucccccagccucggccucccaaagu

SEQ ID NO: 342260 - RNA, 20 nt, Human
caagcaauccucccaccuca

SEQ ID NO: 342261 - RNA, 22 nt, Human
caagcaaugcgagcuuccucuc

SEQ ID NO: 342262 - RNA, 32 nt, Human
caagcaauucacugcaucccucugugccucag

SEQ ID NO: 342263 - RNA, 32 nt, Human
caagcaauucauuagaugacuacagccuagau

SEQ ID NO: 342264 - RNA, 32 nt, Human
caagcaauucuccugccccagccuccugagua

SEQ ID NO: 342265 - RNA, 32 nt, Human
caagcacaaucagcaaaucuagcagagccguu

SEQ ID NO: 342266 - RNA, 32 nt, Human
caagcacacaugcauggcauuuguuccugaac

SEQ ID NO: 342267 - RNA, 32 nt, Human
caagcacagaaucuuucccacucuccagaagc

SEQ ID NO: 342268 - RNA, 32 nt, Human
caagcacagagggagagguucaggagucaggu

SEQ ID NO: 342269 - RNA, 32 nt, Human
caagcacaucugggcggggaggccguggaggg

SEQ ID NO: 342270 - RNA, 32 nt, Human
caagcaccaccaggucggaaggaggagaccca

SEQ ID NO: 342271 - RNA, 32 nt, Human
caagcaccagccaccaugccuggcuaauuuug

SEQ ID NO: 342272 - RNA, 32 nt, Human
caagcacccacugccaagcuaccccaccccuu

SEQ ID NO: 342273 - RNA, 32 nt, Human
caagcaccccagagauaugaggcacccuuugc

SEQ ID NO: 342274 - RNA, 32 nt, Human
caagcaccccagcauagccacccagggauggc

SEQ ID NO: 342275 - RNA, 32 nt, Human
caagcaccccagggcuggagugcggaucucca

SEQ ID NO: 342276 - RNA, 32 nt, Human
caagcaccgagugaggggucuguuggggacgc

SEQ ID NO: 342277 - RNA, 32 nt, Human
caagcaccgcacagcaaugacgucuguccugg

SEQ ID NO: 342278 - RNA, 23 nt, Human
caagcaccugggauuacaagcau

SEQ ID NO: 342279 - RNA, 32 nt, Human
caagcaccugucuuccccuccucccauccagg

SEQ ID NO: 342280 - RNA, 32 nt, Human
caagcaccuuaaucccagcuacuugggaggca

SEQ ID NO: 342281 - RNA, 32 nt, Human
caagcacgaagcccuuucccacccgucgggcu

SEQ ID NO: 342282 - RNA, 32 nt, Human
caagcacguagcccuuuaccucuuggggaagg

SEQ ID NO: 342283 - RNA, 32 nt, Human
caagcacucacacacaugcaaugguauaugug

SEQ ID NO: 342284 - RNA, 32 nt, Human
caagcacucacucuugggugaacuaugcuucu

SEQ ID NO: 342285 - RNA, 32 nt, Human
caagcacuccacccaccucggccucccaaagu

SEQ ID NO: 342286 - RNA, 32 nt, Human
caagcacugagaaauucuuucucagguuucuu

SEQ ID NO: 342287 - RNA, 32 nt, Human
caagcacugcagcugccugcacccccgggcuu

SEQ ID NO: 342288 - RNA, 32 nt, Human
caagcacugccucccuccggggucuguaagag

SEQ ID NO: 342289 - RNA, 32 nt, Human
caagcacugccucccuccugcucuguccaggu

SEQ ID NO: 342290 - RNA, 32 nt, Human
caagcacugcucacgucucugccgccugcguu

SEQ ID NO: 342291 - RNA, 32 nt, Human
caagcacuggaagagagguuccggggcugggc

SEQ ID NO: 342292 - RNA, 32 nt, Human
caagcacuggacuacaagggcauggcucacaa

SEQ ID NO: 342293 - RNA, 32 nt, Human
caagcacuggggugccuccucucaccuggcca

SEQ ID NO: 342294 - RNA, 32 nt, Human
caagcacuugcuggaaaagauaucagauugga

SEQ ID NO: 342295 - RNA, 32 nt, Human
caagcagacacacacauauauacauacgcaau

SEQ ID NO: 342296 - RNA, 32 nt, Human
caagcagacagcccggugccacacccugggca

SEQ ID NO: 342297 - RNA, 32 nt, Human
caagcagagcacucccucagagacccaaacag

SEQ ID NO: 342298 - RNA, 32 nt, Human
caagcagagccccaggaaugaagcacaaaauc

SEQ ID NO: 342299 - RNA, 32 nt, Human
caagcagaggagacacagcagugagggaggcg

SEQ ID NO: 342300 - RNA, 32 nt, Human
caagcagaggcuccccucaugaaggaagccau

SEQ ID NO: 342301 - RNA, 19 nt, Human
caagcagaggcugugcaaa

SEQ ID NO: 342302 - RNA, 23 nt, Human
caagcagaucacccaaggucagg

SEQ ID NO: 342303 - RNA, 23 nt, Human
caagcagaucacuugaggucagg

SEQ ID NO: 342304 - RNA, 32 nt, Human
caagcagcaccagcaggccugcccaggaugcu

SEQ ID NO: 342305 - RNA, 32 nt, Human
caagcagcaccugucugucugccggcccaggu

SEQ ID NO: 342306 - RNA, 32 nt, Human
caagcagcacugcuccccucugacagagugag

SEQ ID NO: 342307 - RNA, 32 nt, Human
caagcagcagagcaccugggauagagaaagug

SEQ ID NO: 342308 - RNA, 32 nt, Human
caagcagcagcgggccgcgacgcccagccugc

SEQ ID NO: 342309 - RNA, 24 nt, Human
caagcagcagcucuccagcaucuc

SEQ ID NO: 342310 - RNA, 21 nt, Human
caagcagcauucccagcagcu

SEQ ID NO: 342311 - RNA, 24 nt, Human
caagcagccagcagccuagcagcc

SEQ ID NO: 342312 - RNA, 22 nt, Human
caagcagccagccuccaagcuc

SEQ ID NO: 342313 - RNA, 32 nt, Human
caagcagccaugcuuucugggcauuuucgucc

SEQ ID NO: 342314 - RNA, 32 nt, Human
caagcagcccaggcagcugugggcagugcugg

SEQ ID NO: 342315 - RNA, 20 nt, Human
caagcagcccuccugccuag

SEQ ID NO: 342316 - RNA, 32 nt, Human
caagcagcccuccuggacuucauguuaaagac

SEQ ID NO: 342317 - RNA, 32 nt, Human
caagcagccgcugagacggacgguuccaugcc

SEQ ID NO: 342318 - RNA, 32 nt, Human
caagcagcguggcuggaagcugaugggaaacg

SEQ ID NO: 342319 - RNA, 32 nt, Human
caagcagcugaguagauauacaacugucacaa

SEQ ID NO: 342320 - RNA, 23 nt, Human
caagcaggaaugggauccaaaga

SEQ ID NO: 342321 - RNA, 32 nt, Human
caagcaggaaugggauccaaagagacucccac

SEQ ID NO: 342322 - RNA, 32 nt, Human
caagcaggaggagaagcggaagaagagggccu

SEQ ID NO: 342323 - RNA, 32 nt, Human
caagcaggcaggacacaggagggauggcacug

SEQ ID NO: 342324 - RNA, 22 nt, Human
caagcaggccuggacccagaga

SEQ ID NO: 342325 - RNA, 32 nt, Human
caagcagggcacauugcuugggcuuguuccca

SEQ ID NO: 342326 - RNA, 32 nt, Human
caagcagggccccuccuuccuccugucuuuau

SEQ ID NO: 342327 - RNA, 32 nt, Human
caagcagggccugucuuuugccugguacaagg

SEQ ID NO: 342328 - RNA, 32 nt, Human
caagcagggcucugccccagaggccucucucu

SEQ ID NO: 342329 - RNA, 32 nt, Human
caagcaggugugaagagcagggcucagcagca

SEQ ID NO: 342330 - RNA, 32 nt, Human
caagcaguagcauuugcuuccucccaacaagc

SEQ ID NO: 342331 - RNA, 32 nt, Human
caagcaguccacagcagucuggcuggcagguc

SEQ ID NO: 342332 - RNA, 32 nt, Human
caagcaguccuccccacucagccucucuagua

SEQ ID NO: 342333 - RNA, 32 nt, Human
caagcagucuccccaccccuugagucucagca

SEQ ID NO: 342334 - RNA, 32 nt, Human
caagcaguggacauuccuauccauucaaggcu

SEQ ID NO: 342335 - RNA, 32 nt, Human
caagcaguggacugcccacccacucccacacc

SEQ ID NO: 342336 - RNA, 32 nt, Human
caagcagugggaggaggagaaggaggaggagg

SEQ ID NO: 342337 - RNA, 32 nt, Human
caagcaguuccccugccucaagggcuucuuuu

SEQ ID NO: 342338 - RNA, 32 nt, Human
caagcaguucuuuucagcagauuuugcccacu

SEQ ID NO: 342339 - RNA, 23 nt, Human
caagcaguugggacuacaggcgu

SEQ ID NO: 342340 - RNA, 32 nt, Human
caagcauacaugcacacugauacauacagaga

SEQ ID NO: 342341 - RNA, 32 nt, Human
caagcauacaugcacacugauacauacaugua

SEQ ID NO: 342342 - RNA, 32 nt, Human
caagcauagaauugcauccauucuucugaaau

SEQ ID NO: 342343 - RNA, 32 nt, Human
caagcauagcugccugcacucugucucuccaa

SEQ ID NO: 342344 - RNA, 32 nt, Human
caagcauaugcauacacacauauauacaugua

SEQ ID NO: 342345 - RNA, 32 nt, Human
caagcaucaauacuccuagggcucaggacaag

SEQ ID NO: 342346 - RNA, 32 nt, Human
caagcaucccagcgggcaucucaccacgacuu

SEQ ID NO: 342347 - RNA, 32 nt, Human
caagcaucccuugccaggauuuguuaucacug

SEQ ID NO: 342348 - RNA, 32 nt, Human
caagcauccugcugggggcuucaaagaugaaa

SEQ ID NO: 342349 - RNA, 32 nt, Human
caagcaucugguucagcggaaaugggauguga

SEQ ID NO: 342350 - RNA, 30 nt, Human
caagcaugacuucugccagcccugaagacc

SEQ ID NO: 342351 - RNA, 32 nt, Human
caagcaugagccaccacaccuggccuaugugu

SEQ ID NO: 342352 - RNA, 32 nt, Human
caagcaugagccaccacaccuggccuguuauu

SEQ ID NO: 342353 - RNA, 32 nt, Human
caagcaugagccaccacgccugagcuuucugc

SEQ ID NO: 342354 - RNA, 32 nt, Human
caagcaugagccaccgcaccugaccaaauuua

SEQ ID NO: 342355 - RNA, 32 nt, Human
caagcaugagccacugugcccagccuguucca

SEQ ID NO: 342356 - RNA, 32 nt, Human
caagcaugagccacugugcccagccuucuuua

SEQ ID NO: 342357 - RNA, 32 nt, Human
caagcaugauuuuacauguguaccaaauuucc

SEQ ID NO: 342358 - RNA, 32 nt, Human
caagcaugcaccacuacacucagccaaauacu

SEQ ID NO: 342359 - RNA, 30 nt, Human
caagcauggacgccguggaugccaccaugg

SEQ ID NO: 342360 - RNA, 32 nt, Human
caagcauggaggaaaggcaaugccuggaccac

SEQ ID NO: 342361 - RNA, 32 nt, Human
caagcauggagugcucugagcaagggcaauca

SEQ ID NO: 342362 - RNA, 32 nt, Human
caagcaugguaucaucucacuuuucuaauuua

SEQ ID NO: 342363 - RNA, 31 nt, Human
caagcaugucugcaaauuaggagggaguuag

SEQ ID NO: 342364 - RNA, 32 nt, Human
caagcauguggcagagcuggagugcaggccau

SEQ ID NO: 342365 - RNA, 24 nt, Human
caagcauuuauuuuuaguacauuu

SEQ ID NO: 342366 - RNA, 20 nt, Human
caagccaaagcaacuguggg

SEQ ID NO: 342367 - RNA, 19 nt, Human
caagccaagcccaaggaca

SEQ ID NO: 342368 - RNA, 32 nt, Human
caagccaagcuggccccugccuguuccuguag

SEQ ID NO: 342369 - RNA, 32 nt, Human
caagccaaggaaaaagauacaagagcagaaua

SEQ ID NO: 342370 - RNA, 32 nt, Human
caagccaagucaacagugucucugggguggca

SEQ ID NO: 342371 - RNA, 32 nt, Human
caagccaauauuugugacuuugcucugcuacc

SEQ ID NO: 342372 - RNA, 32 nt, Human
caagccacauaucaacacagguuuuuaggugg

SEQ ID NO: 342373 - RNA, 32 nt, Human
caagccacauuuccucccagugcugggugcgc

SEQ ID NO: 342374 - RNA, 32 nt, Human
caagccacccagcccagcuucuuuccauuccu

SEQ ID NO: 342375 - RNA, 32 nt, Human
caagccacugcacuccagccugggcgacagag

SEQ ID NO: 342376 - RNA, 32 nt, Human
caagccacugcugagacccuucccagggagga

SEQ ID NO: 342377 - RNA, 32 nt, Human
caagccacuggguggagcaaugugcucugggg

SEQ ID NO: 342378 - RNA, 32 nt, Human
caagccacuucccaucucugggccucgucuuu

SEQ ID NO: 342379 - RNA, 32 nt, Human
caagccacuuccuuuaggcuaacacacugcua

SEQ ID NO: 342380 - RNA, 32 nt, Human
caagccagaaaacuguccuguaccaaagcuug

SEQ ID NO: 342381 - RNA, 32 nt, Human
caagccagaaauucaggcugcuugcagagugg

SEQ ID NO: 342382 - RNA, 32 nt, Human
caagccagacucugcaauuucucccaaggcuc

SEQ ID NO: 342383 - RNA, 22 nt, Human
caagccagagcgccuccucuca

SEQ ID NO: 342384 - RNA, 32 nt, Human
caagccagauggugaccagagcuugccucuga

SEQ ID NO: 342385 - RNA, 32 nt, Human
caagccagcagaaacagccucagccuaccgca

SEQ ID NO: 342386 - RNA, 32 nt, Human
caagccagccaucagggcaaguguuuugaauc

SEQ ID NO: 342387 - RNA, 32 nt, Human
caagccagccccacccuuaagcuuccucugac

SEQ ID NO: 342388 - RNA, 32 nt, Human
caagccagcccuuaggagauacugaacaaggc

SEQ ID NO: 342389 - RNA, 32 nt, Human
caagccagccugcugagacucccuagccacag

SEQ ID NO: 342390 - RNA, 32 nt, Human
caagccagcucugccuguaccauuuuccucug

SEQ ID NO: 342391 - RNA, 32 nt, Human
caagccagcugcagaaauuugcauaacuagca

SEQ ID NO: 342392 - RNA, 21 nt, Human
caagccagcugccuugucuga

SEQ ID NO: 342393 - RNA, 32 nt, Human
caagccaggaaggcagcuuucgcuuguuccug

SEQ ID NO: 342394 - RNA, 32 nt, Human
caagccaggaagggaaggagucuguguggugu

SEQ ID NO: 342395 - RNA, 32 nt, Human
caagccaggaguuuauuucagguaauuugggc

SEQ ID NO: 342396 - RNA, 21 nt, Human
caagccagggaagcaacuggg

SEQ ID NO: 342397 - RNA, 32 nt, Human
caagccagggcuccuccuccugucgugggcuc

SEQ ID NO: 342398 - RNA, 32 nt, Human
caagccaguacaguaaaugacacuggggccgc

SEQ ID NO: 342399 - RNA, 22 nt, Human
caagccaguggggaucuucuga

SEQ ID NO: 342400 - RNA, 21 nt, Human
caagccagugucuucagcuga

SEQ ID NO: 342401 - RNA, 32 nt, Human
caagccauccuccugccucagcauccacagua

SEQ ID NO: 342402 - RNA, 32 nt, Human
caagccaucucuccucuuuaugcucguguuuc

SEQ ID NO: 342403 - RNA, 32 nt, Human
caagccaucuuccuuagccucccaaguagcua

SEQ ID NO: 342404 - RNA, 32 nt, Human
caagccaugguggcagaggagcuggugugaac

SEQ ID NO: 342405 - RNA, 32 nt, Human
caagccauugcacuccagccugggcaacaaga

SEQ ID NO: 342406 - RNA, 32 nt, Human
caagccauugcacucuagcccggacgacagag

SEQ ID NO: 342407 - RNA, 32 nt, Human
caagccauuguacuccagccuggacaacaaga

SEQ ID NO: 342408 - RNA, 32 nt, Human
caagccauuuuucugccucagcuuuucgagua

SEQ ID NO: 342409 - RNA, 32 nt, Human
caagcccaagagccaucccaggccuguucagg

SEQ ID NO: 342410 - RNA, 32 nt, Human
caagcccaccugccucucuccugcugcuccuc

SEQ ID NO: 342411 - RNA, 21 nt, Human
caagcccacugcugcagcugc

SEQ ID NO: 342412 - RNA, 32 nt, Human
caagcccagaagagaggccucggaaggaaccg

SEQ ID NO: 342413 - RNA, 32 nt, Human
caagcccagccagcaaaccucaccgaugaaac

SEQ ID NO: 342414 - RNA, 19 nt, Human
caagcccagcccuaggagg

SEQ ID NO: 342415 - RNA, 19 nt, Human
caagcccagcuggcaccaa

SEQ ID NO: 342416 - RNA, 32 nt, Human
caagcccaggaccuucguggagcugcuucucc

SEQ ID NO: 342417 - RNA, 32 nt, Human
caagcccaggcagacgagaccucugcccugaa

SEQ ID NO: 342418 - RNA, 32 nt, Human
caagcccaggcccugcgcggagcggagcggcg

SEQ ID NO: 342419 - RNA, 32 nt, Human
caagcccagggagucugaaugugaguccaagg

SEQ ID NO: 342420 - RNA, 32 nt, Human
caagcccagggcaaggauccugugcugcuguc

SEQ ID NO: 342421 - RNA, 19 nt, Human
caagcccaugcugcugcag

SEQ ID NO: 342422 - RNA, 32 nt, Human
caagcccauggcaauuugucauccccuccuua

SEQ ID NO: 342423 - RNA, 32 nt, Human
caagcccauugucaccuggcucaaggagggga

SEQ ID NO: 342424 - RNA, 32 nt, Human
caagccccaagacauccccuuagaugaucuga

SEQ ID NO: 342425 - RNA, 32 nt, Human
caagccccagaacucagacaacagaaaggaaa

SEQ ID NO: 342426 - RNA, 32 nt, Human
caagccccagcagccccagccccagccccagg

SEQ ID NO: 342427 - RNA, 32 nt, Human
caagcccccaagaggauggcagccugggcguc

SEQ ID NO: 342428 - RNA, 32 nt, Human
caagcccccuggcagcugccccuccuggagca

SEQ ID NO: 342429 - RNA, 32 nt, Human
caagccccgcuucuaccagccuguggaguuca

SEQ ID NO: 342430 - RNA, 32 nt, Human
caagccccuccaggaggguccuggggugggcc

SEQ ID NO: 342431 - RNA, 32 nt, Human
caagccccuccccacgucgcccccuccugcac

SEQ ID NO: 342432 - RNA, 32 nt, Human
caagccccuccccuccacuccccuuccugcgu

SEQ ID NO: 342433 - RNA, 32 nt, Human
caagccccugcucccuuuaugggucugccuca

SEQ ID NO: 342434 - RNA, 32 nt, Human
caagccccuuccccucucugggccucaguuuc

SEQ ID NO: 342435 - RNA, 32 nt, Human
caagccccuuucucucccuauggucaacaucu

SEQ ID NO: 342436 - RNA, 32 nt, Human
caagcccgacuugcuguuuuguucugugguuu

SEQ ID NO: 342437 - RNA, 32 nt, Human
caagcccgaguaacaaacuuucuuaucuucca

SEQ ID NO: 342438 - RNA, 18 nt, Human
caagcccgcggcagcugc

SEQ ID NO: 342439 - RNA, 18 nt, Human
caagcccgcuacagcugc

SEQ ID NO: 342440 - RNA, 18 nt, Human
caagcccgcugcagcugc

SEQ ID NO: 342441 - RNA, 32 nt, Human
caagcccgcuuccuccugaugaugcucagcau

SEQ ID NO: 342442 - RNA, 32 nt, Human
caagcccgggcugaggagggggcggcggcggc

SEQ ID NO: 342443 - RNA, 32 nt, Human
caagcccuagguugcaguggggcuaagcacga

SEQ ID NO: 342444 - RNA, 31 nt, Human
caagcccucaauaaauaaauauugaaugaau

SEQ ID NO: 342445 - RNA, 32 nt, Human
caagcccucauuuugccugcugccaucuauau

SEQ ID NO: 342446 - RNA, 32 nt, Human
caagcccuccaauccccaucccaggcuugcug

SEQ ID NO: 342447 - RNA, 32 nt, Human
caagcccuccugugauaacagaauaaagcacu

SEQ ID NO: 342448 - RNA, 17 nt, Human
caagcccugacugugga

SEQ ID NO: 342449 - RNA, 32 nt, Human
caagcccugaugcuauggacuccauacuguug

SEQ ID NO: 342450 - RNA, 32 nt, Human
caagcccugcagccuccgacuccugcuggcuc

SEQ ID NO: 342451 - RNA, 32 nt, Human
caagcccugcagcgacugagacugucuauuca

SEQ ID NO: 342452 - RNA, 32 nt, Human
caagcccugccucugauucugcagguauggaa

SEQ ID NO: 342453 - RNA, 32 nt, Human
caagcccugcuguguggcugucguuuacauuu

SEQ ID NO: 342454 - RNA, 32 nt, Human
caagcccugggaggucaaggcugcagugagcu

SEQ ID NO: 342455 - RNA, 32 nt, Human
caagcccuguauccuuuugaaggacaugacaa

SEQ ID NO: 342456 - RNA, 32 nt, Human
caagcccugucugaccgccaaggcuucauacu

SEQ ID NO: 342457 - RNA, 32 nt, Human
caagccgaacacugagggcugaggagaaagcu

SEQ ID NO: 342458 - RNA, 32 nt, Human
caagccgcaguuuucugugcuggcugugccuc

SEQ ID NO: 342459 - RNA, 32 nt, Human
caagccgcuacccugaaucuuuguggcggguu

SEQ ID NO: 342460 - RNA, 32 nt, Human
caagccgcuccccguguccucccuggcuggcc

SEQ ID NO: 342461 - RNA, 32 nt, Human
caagccggggccuggucggcagcugggccgcc

SEQ ID NO: 342462 - RNA, 32 nt, Human
caagccggucucaaacuccugagcucaaguga

SEQ ID NO: 342463 - RNA, 32 nt, Human
caagccgugcugcugauuccgucucacaguuu

SEQ ID NO: 342464 - RNA, 32 nt, Human
caagccuaaaggauucccacagcugggagcca

SEQ ID NO: 342465 - RNA, 32 nt, Human
caagccuagagccaccagcccagcuuccuucu

SEQ ID NO: 342466 - RNA, 32 nt, Human
caagccuaugccagugcugaugaagcuggagg

SEQ ID NO: 342467 - RNA, 32 nt, Human
caagccucaaauggugaauaauucuuucccua

SEQ ID NO: 342468 - RNA, 32 nt, Human
caagccucagagucugaaugccuccagucugc

SEQ ID NO: 342469 - RNA, 32 nt, Human
caagccucagccugccaaauugccagaauuac

SEQ ID NO: 342470 - RNA, 32 nt, Human
caagccucccacucugaacaucaccuccugua

SEQ ID NO: 342471 - RNA, 32 nt, Human
caagccucccgccucugccacccgcauagcua

SEQ ID NO: 342472 - RNA, 32 nt, Human
caagccucccuccucauccucagugugccugu

SEQ ID NO: 342473 - RNA, 32 nt, Human
caagccuccuccuuccugccagccucuuucuc

SEQ ID NO: 342474 - RNA, 19 nt, Human
caagccucgcagcagcugc

SEQ ID NO: 342475 - RNA, 32 nt, Human
caagccucucucucuuccuacugagcaccugu

SEQ ID NO: 342476 - RNA, 32 nt, Human
caagccucugccuuuccuucugcuccagagca

SEQ ID NO: 342477 - RNA, 32 nt, Human
caagccucuggguuuucccuuuaccagucugu

SEQ ID NO: 342478 - RNA, 23 nt, Human
caagccucuuaguacuuaauuua

SEQ ID NO: 342479 - RNA, 32 nt, Human
caagccucuuggccaccuccucccuuagccuu

SEQ ID NO: 342480 - RNA, 32 nt, Human
caagccugaaaccacacaguacgacagcuuug

SEQ ID NO: 342481 - RNA, 32 nt, Human
caagccugagcaacauaucaaaaccccaucuc

SEQ ID NO: 342482 - RNA, 32 nt, Human
caagccugagcaacauaucaaaaccccgucuc

SEQ ID NO: 342483 - RNA, 32 nt, Human
caagccugagccaagcucaucuucauugaaug

SEQ ID NO: 342484 - RNA, 32 nt, Human
caagccugagucugucccgugcuucugcugcu

SEQ ID NO: 342485 - RNA, 22 nt, Human
caagccugaugggcagcacaga

SEQ ID NO: 342486 - RNA, 19 nt, Human
caagccugcagucaucuug

SEQ ID NO: 342487 - RNA, 32 nt, Human
caagccugccaacaagcugaaaccccaucucc

SEQ ID NO: 342488 - RNA, 21 nt, Human
caagccugcccacugauggca

SEQ ID NO: 342489 - RNA, 32 nt, Human
caagccugcuaacauggaggagcugaccgaag

SEQ ID NO: 342490 - RNA, 32 nt, Human
caagccugcucacccacugcuucugcuuuaag

SEQ ID NO: 342491 - RNA, 32 nt, Human
caagccugcuccagucccaggggcaggccauu

SEQ ID NO: 342492 - RNA, 32 nt, Human
caagccugcugcuucuccucccugcagacuua

SEQ ID NO: 342493 - RNA, 32 nt, Human
caagccugcuggcugcggcccccucucggcca

SEQ ID NO: 342494 - RNA, 32 nt, Human
caagccuggccauggcccugcccucaccccac

SEQ ID NO: 342495 - RNA, 32 nt, Human
caagccuggcugacacaggugugaagaggcca

SEQ ID NO: 342496 - RNA, 32 nt, Human
caagccugggcaacagagugagacacugucuc

SEQ ID NO: 342497 - RNA, 32 nt, Human
caagccugggcaacagagugagaccccaacuu

SEQ ID NO: 342498 - RNA, 32 nt, Human
caagccugggcaacauagugagaccuucuccc

SEQ ID NO: 342499 - RNA, 32 nt, Human
caagccugggcaacauggugaaacugucucua

SEQ ID NO: 342500 - RNA, 32 nt, Human
caagccugggcugcaguccuugcuauguuccc

SEQ ID NO: 342501 - RNA, 32 nt, Human
caagccugggcuggaagaggauggcagaggcu

SEQ ID NO: 342502 - RNA, 32 nt, Human
caagccuggggugagagcacagaggagugggc

SEQ ID NO: 342503 - RNA, 32 nt, Human
caagccuggggugcucuucuccaccccagauu

SEQ ID NO: 342504 - RNA, 32 nt, Human
caagccuggguggcagaugaacagugcuuccu

SEQ ID NO: 342505 - RNA, 32 nt, Human
caagccuggugugcccacacaccacuuacuuc

SEQ ID NO: 342506 - RNA, 32 nt, Human
caagccuguaaucccagcuauuugggaggcug

SEQ ID NO: 342507 - RNA, 32 nt, Human
caagccuguagucccagcuacucgggaggcug

SEQ ID NO: 342508 - RNA, 32 nt, Human
caagccugucaguggcccucccuggugcacug

SEQ ID NO: 342509 - RNA, 32 nt, Human
caagccuguggcuggagcuggggucuguuuac

SEQ ID NO: 342510 - RNA, 32 nt, Human
caagccuguggguagaggaaagagugaucugg

SEQ ID NO: 342511 - RNA, 32 nt, Human
caagccugugugugugcaugcuugggcggagu

SEQ ID NO: 342512 - RNA, 31 nt, Human
caagccuuaauaaauauaaguagacugaaau

SEQ ID NO: 342513 - RNA, 32 nt, Human
caagccuuagaugaccuccagcaacuucaguu

SEQ ID NO: 342514 - RNA, 21 nt, Human
caagccuuaggggcugugaga

SEQ ID NO: 342515 - RNA, 31 nt, Human
caagccuuauccaaggaggaagagauggaga

SEQ ID NO: 342516 - RNA, 32 nt, Human
caagccuugaaaggcaggcuucacagugccga

SEQ ID NO: 342517 - RNA, 32 nt, Human
caagccuugcccaucugggcugcucgcuuuac

SEQ ID NO: 342518 - RNA, 32 nt, Human
caagccuuucaucugcugcuucuccguccagc

SEQ ID NO: 342519 - RNA, 32 nt, Human
caagccuuuucaaaacacuuaucugcagucca

SEQ ID NO: 342520 - RNA, 32 nt, Human
caagcgacaaguguacccagaguagaaggccu

SEQ ID NO: 342521 - RNA, 20 nt, Human
caagcgacccucccaccuca

SEQ ID NO: 342522 - RNA, 32 nt, Human
caagcgaggcagggguugcacuggaccaaagg

SEQ ID NO: 342523 - RNA, 32 nt, Human
caagcgagguccaagcacaucuugucaacaug

SEQ ID NO: 342524 - RNA, 32 nt, Human
caagcgauccuccagccucggccucucaaagu

SEQ ID NO: 342525 - RNA, 20 nt, Human
caagcgauccucccaccuca

SEQ ID NO: 342526 - RNA, 32 nt, Human
caagcgauucuccagccucagccuccugagua

SEQ ID NO: 342527 - RNA, 32 nt, Human
caagcgauucuccagccucagcuuccugagua

SEQ ID NO: 342528 - RNA, 18 nt, Human
caagcgauucuccugccu

SEQ ID NO: 342529 - RNA, 32 nt, Human
caagcgauucuccugccucagcauccuaauua

SEQ ID NO: 342530 - RNA, 18 nt, Human
caagcgauucuccugcuu

SEQ ID NO: 342531 - RNA, 18 nt, Human
caagcgauucuccugucu

SEQ ID NO: 342532 - RNA, 18 nt, Human
caagcgauucucuugccu

SEQ ID NO: 342533 - RNA, 32 nt, Human
caagcgauuuuucugccucagccucuggugua

SEQ ID NO: 342534 - RNA, 32 nt, Human
caagcgcagagagggagagaauucuccacaaa

SEQ ID NO: 342535 - RNA, 32 nt, Human
caagcgcaggauucagggcagggguccucuug

SEQ ID NO: 342536 - RNA, 32 nt, Human
caagcgcaucuuaggaaugacaguaacagcgg

SEQ ID NO: 342537 - RNA, 32 nt, Human
caagcgcuccacccucucucccaccauggccc

SEQ ID NO: 342538 - RNA, 32 nt, Human
caagcgcucuugcuggccgucugggugcacac

SEQ ID NO: 342539 - RNA, 32 nt, Human
caagcgcugcccagguccuggggugguggcag

SEQ ID NO: 342540 - RNA, 32 nt, Human
caagcgcugccugggcuccgccggcucacuaa

SEQ ID NO: 342541 - RNA, 32 nt, Human
caagcgcuucuccagccucagccuccugagua

SEQ ID NO: 342542 - RNA, 20 nt, Human
caagcggagguugcagugag

SEQ ID NO: 342543 - RNA, 32 nt, Human
caagcggauauuuuagagguacaguguaauau

SEQ ID NO: 342544 - RNA, 24 nt, Human
caagcggaucuacaagggcaccca

SEQ ID NO: 342545 - RNA, 32 nt, Human
caagcggcauccaggcuucucucaccuccauu

SEQ ID NO: 342546 - RNA, 31 nt, Human
caagcgggccgucucccuuggcccagagacg

SEQ ID NO: 342547 - RNA, 32 nt, Human
caagcgggucauaaggcuucagcuucugggug

SEQ ID NO: 342548 - RNA, 32 nt, Human
caagcgguaugagucucauccagucugugcug

SEQ ID NO: 342549 - RNA, 32 nt, Human
caagcgguggugaggcaggcucgccuccucca

SEQ ID NO: 342550 - RNA, 32 nt, Human
caagcggugucucucauccugacuggggaucc

SEQ ID NO: 342551 - RNA, 32 nt, Human
caagcgugagccaccauuccuggacccucgua

SEQ ID NO: 342552 - RNA, 32 nt, Human
caagcgugagccaccgaccccugccgaggauu

SEQ ID NO: 342553 - RNA, 32 nt, Human
caagcgugagccaccgccccugacaugagcca

SEQ ID NO: 342554 - RNA, 32 nt, Human
caagcgugagccaccgggccuggccugcauuu

SEQ ID NO: 342555 - RNA, 32 nt, Human
caagcgugagccaccgugccuggccugccauc

SEQ ID NO: 342556 - RNA, 32 nt, Human
caagcgugagccacugcacccagccuguaaaa

SEQ ID NO: 342557 - RNA, 32 nt, Human
caagcgugagccacugcaccgggccacagaga

SEQ ID NO: 342558 - RNA, 32 nt, Human
caagcuaaacaagcaugcucuaacccaaugca

SEQ ID NO: 342559 - RNA, 32 nt, Human
caagcuaagccagcucagagaacacggggagc

SEQ ID NO: 342560 - RNA, 22 nt, Human
caagcuaauaaagaccuggaga

SEQ ID NO: 342561 - RNA, 32 nt, Human
caagcuacaaugaagaggagggaggcagucug

SEQ ID NO: 342562 - RNA, 32 nt, Human
caagcuacagcagcagcacuucccaagccugc

SEQ ID NO: 342563 - RNA, 32 nt, Human
caagcuacuggcacauagugaaagauuacuuc

SEQ ID NO: 342564 - RNA, 32 nt, Human
caagcuacuggcacauaugaaagauuacuucu

SEQ ID NO: 342565 - RNA, 32 nt, Human
caagcuacuugaaggcugagacaggaggaucg

SEQ ID NO: 342566 - RNA, 32 nt, Human
caagcuacuuuggcuucugccuggcucaggaa

SEQ ID NO: 342567 - RNA, 32 nt, Human
caagcuagaaagccaccaaggccaggcuuugu

SEQ ID NO: 342568 - RNA, 32 nt, Human
caagcuagaacuugcugaugugaacaguuuca

SEQ ID NO: 342569 - RNA, 32 nt, Human
caagcuagacugugucugaaucaugucuguau

SEQ ID NO: 342570 - RNA, 32 nt, Human
caagcuagagggcugggcccuaugacuguggu

SEQ ID NO: 342571 - RNA, 32 nt, Human
caagcuagaguuucaggucugugcggcugcua

SEQ ID NO: 342572 - RNA, 32 nt, Human
caagcuaggaaagaggaggcagaaagauuugg

SEQ ID NO: 342573 - RNA, 32 nt, Human
caagcuaggaagcacagaacugcaggccagag

SEQ ID NO: 342574 - RNA, 32 nt, Human
caagcuaguucucugaaaauuuugccauuuau

SEQ ID NO: 342575 - RNA, 20 nt, Human
caagcuauccucccaccuca

SEQ ID NO: 342576 - RNA, 32 nt, Human
caagcuaugggcuacuccagccgcuucagacu

SEQ ID NO: 342577 - RNA, 32 nt, Human
caagcucaagcccuacgagaagaaggacuggc

SEQ ID NO: 342578 - RNA, 32 nt, Human
caagcucacacagcaggaacugagccagaaac

SEQ ID NO: 342579 - RNA, 32 nt, Human
caagcucacaucuuccugugggaaaccuucua

SEQ ID NO: 342580 - RNA, 32 nt, Human
caagcucacugcaaccucugugcagguucaag

SEQ ID NO: 342581 - RNA, 32 nt, Human
caagcucacuucacugcacuccagucugggug

SEQ ID NO: 342582 - RNA, 32 nt, Human
caagcucagagagguuaacuugcccacagucu

SEQ ID NO: 342583 - RNA, 32 nt, Human
caagcucagagcagccucuguccuggcugugc

SEQ ID NO: 342584 - RNA, 18 nt, Human
caagcucagcucagcguc

SEQ ID NO: 342585 - RNA, 32 nt, Human
caagcucaggaaggccaagaaaagaauccauu

SEQ ID NO: 342586 - RNA, 20 nt, Human
caagcucaggagcagccucg

SEQ ID NO: 342587 - RNA, 32 nt, Human
caagcucaggaguucaagaccagccuggccaa

SEQ ID NO: 342588 - RNA, 32 nt, Human
caagcucaggcaggaggugggcagugaagggg

SEQ ID NO: 342589 - RNA, 32 nt, Human
caagcucagugaauguaucccggcaugggugg

SEQ ID NO: 342590 - RNA, 24 nt, Human
caagcucagugggcagcagcugca

SEQ ID NO: 342591 - RNA, 32 nt, Human
caagcucaguuucaaugcuguaaacuuaaagc

SEQ ID NO: 342592 - RNA, 32 nt, Human
caagcucauggccacaugaagaagauacauug

SEQ ID NO: 342593 - RNA, 32 nt, Human
caagcucauguuuucuccugaucaagaaaauc

SEQ ID NO: 342594 - RNA, 32 nt, Human
caagcuccaagaagguuaagagacauuaacag

SEQ ID NO: 342595 - RNA, 32 nt, Human
caagcuccagaacaguaaccaagugggaaaau

SEQ ID NO: 342596 - RNA, 32 nt, Human
caagcuccagcagagaguggccagauguggug

SEQ ID NO: 342597 - RNA, 32 nt, Human
caagcuccauaacuccuuuuggugcuaaugau

SEQ ID NO: 342598 - RNA, 32 nt, Human
caagcucccugcucugugcuaggcccuggcuu

SEQ ID NO: 342599 - RNA, 32 nt, Human
caagcuccuuggucuucuugccaagcaggaag

SEQ ID NO: 342600 - RNA, 18 nt, Human
caagcucgcugcagcugc

SEQ ID NO: 342601 - RNA, 32 nt, Human
caagcucgggcugaggagggaggacuccuggc

SEQ ID NO: 342602 - RNA, 32 nt, Human
caagcucucaacugcugaucacccagugauug

SEQ ID NO: 342603 - RNA, 32 nt, Human
caagcucuccugucccauugugcauugucugu

SEQ ID NO: 342604 - RNA, 32 nt, Human
caagcucugauugacacagucaccuucccugu

SEQ ID NO: 342605 - RNA, 32 nt, Human
caagcucuggccaccagaacugugagcaaaua

SEQ ID NO: 342606 - RNA, 32 nt, Human
caagcucuggccccuaggacucaggccugcca

SEQ ID NO: 342607 - RNA, 32 nt, Human
caagcucugggcuuugagagcugaauagcauu

SEQ ID NO: 342608 - RNA, 32 nt, Human
caagcucugggguuuugccaugaaucagcagc

SEQ ID NO: 342609 - RNA, 32 nt, Human
caagcucuuacagaguugacagucuaguuuca

SEQ ID NO: 342610 - RNA, 32 nt, Human
caagcucuucauuguuccuaucugccaaauca

SEQ ID NO: 342611 - RNA, 32 nt, Human
caagcucuuccucccaaaggcuucugcaggcc

SEQ ID NO: 342612 - RNA, 24 nt, Human
caagcugaaaccccaucuccacua

SEQ ID NO: 342613 - RNA, 32 nt, Human
caagcugaagugaagccagugaagagcccacc

SEQ ID NO: 342614 - RNA, 32 nt, Human
caagcugacaagggguggacuuguggaccuaa

SEQ ID NO: 342615 - RNA, 32 nt, Human
caagcugacuccagccuugggcucagcagcac

SEQ ID NO: 342616 - RNA, 32 nt, Human
caagcugacuccagccuuggggucagcagcac

SEQ ID NO: 342617 - RNA, 32 nt, Human
caagcugacuuggaauugugugcugcuugcug

SEQ ID NO: 342618 - RNA, 32 nt, Human
caagcugagaggggagaccugccccuuuccaa

SEQ ID NO: 342619 - RNA, 32 nt, Human
caagcugagccucuauguggcaccaauuccug

SEQ ID NO: 342620 - RNA, 32 nt, Human
caagcugauaaggaaaacaauuuggagaauga

SEQ ID NO: 342621 - RNA, 32 nt, Human
caagcugauccaguagugcagcugccgcagcc

SEQ ID NO: 342622 - RNA, 32 nt, Human
caagcugaucucaaacuccugaccucaaguga

SEQ ID NO: 342623 - RNA, 32 nt, Human
caagcugauucacuuucuuucugguaagcuca

SEQ ID NO: 342624 - RNA, 32 nt, Human
caagcugcaaagugccuugcucauuugaaaau

SEQ ID NO: 342625 - RNA, 32 nt, Human
caagcugcagaucgucgugccgaugaaagaga

SEQ ID NO: 342626 - RNA, 32 nt, Human
caagcugcaucgugcaaccucuuuggugccag

SEQ ID NO: 342627 - RNA, 32 nt, Human
caagcugcauggcaaguucugugguucugaga

SEQ ID NO: 342628 - RNA, 32 nt, Human
caagcugccacuggucggccaguacagccucc

SEQ ID NO: 342629 - RNA, 32 nt, Human
caagcugccuccagaaccucagagcuucccug

SEQ ID NO: 342630 - RNA, 32 nt, Human
caagcugccuccccucuccuuccugugugucc

SEQ ID NO: 342631 - RNA, 32 nt, Human
caagcugccugcugccccagguccucaccuca

SEQ ID NO: 342632 - RNA, 32 nt, Human
caagcugccuuguuuagccugcuuuacauugu

SEQ ID NO: 342633 - RNA, 32 nt, Human
caagcugcguaacugucgugugccucaguuuc

SEQ ID NO: 342634 - RNA, 32 nt, Human
caagcugcuacaaauaaauucuguguucuuuu

SEQ ID NO: 342635 - RNA, 32 nt, Human
caagcugcugaaggagggucaccgcauggaca

SEQ ID NO: 342636 - RNA, 32 nt, Human
caagcugcuggcacagcgcagggagggccaga

SEQ ID NO: 342637 - RNA, 32 nt, Human
caagcugcuuugccuccagcugccucagucuc

SEQ ID NO: 342638 - RNA, 32 nt, Human
caagcuggacccauccucccugcucacagagg

SEQ ID NO: 342639 - RNA, 32 nt, Human
caagcuggagaagggaagaguuauuccuccau

SEQ ID NO: 342640 - RNA, 32 nt, Human
caagcuggagggcaauggcgccaucucagcuc

SEQ ID NO: 342641 - RNA, 32 nt, Human
caagcuggagguaguggagcaaacaagaucag

SEQ ID NO: 342642 - RNA, 32 nt, Human
caagcuggagugcacuggcaugauauuggcuc

SEQ ID NO: 342643 - RNA, 32 nt, Human
caagcuggagugcaguggcacaaucauaccuc

SEQ ID NO: 342644 - RNA, 32 nt, Human
caagcuggagugcaguggugcaaugugggcuc

SEQ ID NO: 342645 - RNA, 32 nt, Human
caagcuggaugugggagccacggagggccaag

SEQ ID NO: 342646 - RNA, 32 nt, Human
caagcuggcagccuggccaccaggcuggcugu

SEQ ID NO: 342647 - RNA, 32 nt, Human
caagcuggcauuucaguaguugcuuuugaaua

SEQ ID NO: 342648 - RNA, 19 nt, Human
caagcuggcugggguggcc

SEQ ID NO: 342649 - RNA, 32 nt, Human
caagcugggacuucuccaggccuguguucccu

SEQ ID NO: 342650 - RNA, 32 nt, Human
caagcugggagagagaaaugacugagaugaau

SEQ ID NO: 342651 - RNA, 32 nt, Human
caagcugggaggaccaaggccgggcagccggg

SEQ ID NO: 342652 - RNA, 32 nt, Human
caagcugggaggaucgcuugaggccaggaguu

SEQ ID NO: 342653 - RNA, 18 nt, Human
caagcugggcaucgggga

SEQ ID NO: 342654 - RNA, 32 nt, Human
caagcugggcccaagcccagagccccugccug

SEQ ID NO: 342655 - RNA, 32 nt, Human
caagcuggggaauagcaacucagucccugccc

SEQ ID NO: 342656 - RNA, 32 nt, Human
caagcuggggacccacccuccuucccuuucug

SEQ ID NO: 342657 - RNA, 32 nt, Human
caagcuggguuauguuggcacacaggcaguag

SEQ ID NO: 342658 - RNA, 32 nt, Human
caagcuggguuugcacaucugucugcaggcug

SEQ ID NO: 342659 - RNA, 32 nt, Human
caagcuggucucaaacuccuagucuuaagcaa

SEQ ID NO: 342660 - RNA, 32 nt, Human
caagcuggucucaaacuccugaccucagguaa

SEQ ID NO: 342661 - RNA, 32 nt, Human
caagcuggucucaaacuccugaccucagguga

SEQ ID NO: 342662 - RNA, 32 nt, Human
caagcuggucucaaacuccuggccucaagcag

SEQ ID NO: 342663 - RNA, 32 nt, Human
caagcuggucucaaacuccuggguucaagcca

SEQ ID NO: 342664 - RNA, 32 nt, Human
caagcuggucucaagcuccugggcucaagcaa

SEQ ID NO: 342665 - RNA, 32 nt, Human
caagcuguccgagcuggaggccgcccugcagc

SEQ ID NO: 342666 - RNA, 32 nt, Human
caagcugugaaagaaaauggcuggaggugugc

SEQ ID NO: 342667 - RNA, 32 nt, Human
caagcugugggggaagaagugggaccuucgga

SEQ ID NO: 342668 - RNA, 32 nt, Human
caagcuucagagagaauagacugugaauguua

SEQ ID NO: 342669 - RNA, 19 nt, Human
caagcuuccggagcugggg

SEQ ID NO: 342670 - RNA, 32 nt, Human
caagcuucgccaugcagagcacugaccuaggc

SEQ ID NO: 342671 - RNA, 32 nt, Human
caagcuucuaccuguaccuuauguaagguaga

SEQ ID NO: 342672 - RNA, 32 nt, Human
caagcuucuaggacaagagccaggaagaaacc

SEQ ID NO: 342673 - RNA, 32 nt, Human
caagcuucuuggaggaggcagggagaccgugg

SEQ ID NO: 342674 - RNA, 32 nt, Human
caagcuugagacacaggagagcccauggugug

SEQ ID NO: 342675 - RNA, 32 nt, Human
caagcuugcaaguguauuuuguguacauuuua

SEQ ID NO: 342676 - RNA, 32 nt, Human
caagcuuggcauugacaugugcugcuaguuua

SEQ ID NO: 342677 - RNA, 32 nt, Human
caagcuuggcugcuuuccuagauccacacuuu

SEQ ID NO: 342678 - RNA, 32 nt, Human
caagcuugggagccagccugccaacagccacc

SEQ ID NO: 342679 - RNA, 32 nt, Human
caagcuugggagccagccugccaagagccgcc

SEQ ID NO: 342680 - RNA, 32 nt, Human
caagcuugggcaacacagugagauccugucua

SEQ ID NO: 342681 - RNA, 23 nt, Human
caagcuuggucaaacuuuuccca

SEQ ID NO: 342682 - RNA, 32 nt, Human
caagcuugguggaucgcuugagcccagcgguu

SEQ ID NO: 342683 - RNA, 32 nt, Human
caagcuuuacaauaaucgccaagcagaagcuu

SEQ ID NO: 342684 - RNA, 32 nt, Human
caagcuuucagaugaggccacaauccuagcca

SEQ ID NO: 342685 - RNA, 32 nt, Human
caagcuuuugggaucgggggaauaagagggua

SEQ ID NO: 342686 - RNA, 32 nt, Human
caaggaaaacucaggaccaugauggcucaguu

SEQ ID NO: 342687 - RNA, 32 nt, Human
caaggaaaagcuacacaaaaagccuggaucac

SEQ ID NO: 342688 - RNA, 19 nt, Human
caaggaaaccgcuggcaga

SEQ ID NO: 342689 - RNA, 19 nt, Human
caaggaaaccugggcccuc

SEQ ID NO: 342690 - RNA, 32 nt, Human
caaggaaagaguacugugugcugagagaccau

SEQ ID NO: 342691 - RNA, 17 nt, Human
caaggaaagcuggcaaa

SEQ ID NO: 342692 - RNA, 32 nt, Human
caaggaaaucaagaugaaaagcacucauuaag

SEQ ID NO: 342693 - RNA, 32 nt, Human
caaggaaaucugugucaguggaugcugcucug

SEQ ID NO: 342694 - RNA, 32 nt, Human
caaggaaaugcagagacagggaaggagcaucu

SEQ ID NO: 342695 - RNA, 32 nt, Human
caaggaaauggccaguuaaguagugucuucuc

SEQ ID NO: 342696 - RNA, 32 nt, Human
caaggaaaugguccuggacaucaaagaucuga

SEQ ID NO: 342697 - RNA, 32 nt, Human
caaggaacaagacugaauagcucagcagcucc

SEQ ID NO: 342698 - RNA, 32 nt, Human
caaggaacaauccaaugucuccuacuccugcc

SEQ ID NO: 342699 - RNA, 18 nt, Human
caaggaacacuuggcaaa

SEQ ID NO: 342700 - RNA, 32 nt, Human
caaggaacaucaagaagaaccggggccuguac

SEQ ID NO: 342701 - RNA, 32 nt, Human
caaggaaccaacaccgaugacauggacucagg

SEQ ID NO: 342702 - RNA, 32 nt, Human
caaggaacuacauuccagauuuaaagaaauga

SEQ ID NO: 342703 - RNA, 32 nt, Human
caaggaacugaacucagccuccaugagcucug

SEQ ID NO: 342704 - RNA, 22 nt, Human
caaggaacuggacauuaccuca

SEQ ID NO: 342705 - RNA, 32 nt, Human
caaggaacuggaggagaagacagccacgcuca

SEQ ID NO: 342706 - RNA, 32 nt, Human
caaggaagaaaggaaggaaggaaggcgagaga

SEQ ID NO: 342707 - RNA, 32 nt, Human
caaggaagagaguaugggaagaaggaggaaug

SEQ ID NO: 342708 - RNA, 32 nt, Human
caaggaagaggaagaggaggagaggccgggga

SEQ ID NO: 342709 - RNA, 32 nt, Human
caaggaagaggaguuggccaacaggcagcagg

SEQ ID NO: 342710 - RNA, 32 nt, Human
caaggaagagucauucacauggaagguccggg

SEQ ID NO: 342711 - RNA, 32 nt, Human
caaggaagagugauuucucuaugucuaguaag

SEQ ID NO: 342712 - RNA, 32 nt, Human
caaggaagcccaaguaggagauuugggaaaca

SEQ ID NO: 342713 - RNA, 32 nt, Human
caaggaagcugccugaauuugccuguauacuc

SEQ ID NO: 342714 - RNA, 32 nt, Human
caaggaaggaaugccauccaccaggagcaguc

SEQ ID NO: 342715 - RNA, 32 nt, Human
caaggaaggagaggaagaggacacucuuauuu

SEQ ID NO: 342716 - RNA, 32 nt, Human
caaggaaggaggauugcuugagcucaggaguu

SEQ ID NO: 342717 - RNA, 32 nt, Human
caaggaaggaguagaauaaggagcaggcagag

SEQ ID NO: 342718 - RNA, 32 nt, Human
caaggaaggcagggugguuggaacagaacaag

SEQ ID NO: 342719 - RNA, 32 nt, Human
caaggaaggcauuuggaccccugccuuuucau

SEQ ID NO: 342720 - RNA, 32 nt, Human
caaggaaggcugggcugcucagucccuucaug

SEQ ID NO: 342721 - RNA, 32 nt, Human
caaggaagggaagccgggggagaggggccagg

SEQ ID NO: 342722 - RNA, 32 nt, Human
caaggaaggggccugguggugcuccacuugca

SEQ ID NO: 342723 - RNA, 32 nt, Human
caaggaaguagcugccccaguguaugucuugc

SEQ ID NO: 342724 - RNA, 32 nt, Human
caaggaagucugcugcuccccgcagcugcgga

SEQ ID NO: 342725 - RNA, 32 nt, Human
caaggaagucugugucuaccagaagccagaau

SEQ ID NO: 342726 - RNA, 32 nt, Human
caaggaauacaaaaaugauuaagacuucuucc

SEQ ID NO: 342727 - RNA, 32 nt, Human
caaggaauacaucagcuuauugccuggcaugg

SEQ ID NO: 342728 - RNA, 19 nt, Human
caaggaauacguuccccca

SEQ ID NO: 342729 - RNA, 32 nt, Human
caaggaaugaggaagaucagggacaaccuggg

SEQ ID NO: 342730 - RNA, 31 nt, Human
caaggaaugggaggccuuucacuggguccag

SEQ ID NO: 342731 - RNA, 32 nt, Human
caaggaauucuuccaucuccuucuaaagcccc

SEQ ID NO: 342732 - RNA, 32 nt, Human
caaggaauuucgagguagaacaauacaccaaa

SEQ ID NO: 342733 - RNA, 32 nt, Human
caaggacaaagucuccagcccacguucucucu

SEQ ID NO: 342734 - RNA, 21 nt, Human
caaggacaacugacuccccca

SEQ ID NO: 342735 - RNA, 32 nt, Human
caaggacaagcuucucauuauggcaggcauaa

SEQ ID NO: 342736 - RNA, 32 nt, Human
caaggacaagggcaucgcgcccauauuccucc

SEQ ID NO: 342737 - RNA, 32 nt, Human
caaggacaaggucagguugaaugaguaggagg

SEQ ID NO: 342738 - RNA, 21 nt, Human
caaggacaaugaauccacuca

SEQ ID NO: 342739 - RNA, 32 nt, Human
caaggacacacagcaaguuauggcugcaccag

SEQ ID NO: 342740 - RNA, 22 nt, Human
caaggacacagacauucccuca

SEQ ID NO: 342741 - RNA, 22 nt, Human
caaggacacagcugcuccccuc

SEQ ID NO: 342742 - RNA, 20 nt, Human
caaggacacagguuccccca

SEQ ID NO: 342743 - RNA, 32 nt, Human
caaggacaccaggagcccccaaggaguuggaa

SEQ ID NO: 342744 - RNA, 17 nt, Human
caaggacacccucccuc

SEQ ID NO: 342745 - RNA, 19 nt, Human
caaggacacccucccugca

SEQ ID NO: 342746 - RNA, 20 nt, Human
caaggacacgcgccccccuc

SEQ ID NO: 342747 - RNA, 19 nt, Human
caaggacacgcucucccca

SEQ ID NO: 342748 - RNA, 32 nt, Human
caaggacacuccugaggucuuuguucucacug

SEQ ID NO: 342749 - RNA, 32 nt, Human
caaggacagaacagcaauuuccagggagcguc

SEQ ID NO: 342750 - RNA, 32 nt, Human
caaggacaggcagaagccggacaggggcccuu

SEQ ID NO: 342751 - RNA, 31 nt, Human
caaggacaguggcuuccuugccaagggcugu

SEQ ID NO: 342752 - RNA, 32 nt, Human
caaggacauggugagucuauuuuuaaugcacc

SEQ ID NO: 342753 - RNA, 32 nt, Human
caaggacauuggagagauagagucacuauuac

SEQ ID NO: 342754 - RNA, 32 nt, Human
caaggaccaaauccuggaguucucccaacuuu

SEQ ID NO: 342755 - RNA, 32 nt, Human
caaggaccaagaaggggacaguauccugaucu

SEQ ID NO: 342756 - RNA, 32 nt, Human
caaggaccacgggaggagguguaggagagaag

SEQ ID NO: 342757 - RNA, 32 nt, Human
caaggaccagcuggguccccuuugcuuucuug

SEQ ID NO: 342758 - RNA, 32 nt, Human
caaggaccagugccaccuuauggcaaagagcu

SEQ ID NO: 342759 - RNA, 32 nt, Human
caaggaccaucccaacucaggaugaacccucc

SEQ ID NO: 342760 - RNA, 32 nt, Human
caaggacccacuguucuucaucagugacccag

SEQ ID NO: 342761 - RNA, 32 nt, Human
caaggacccacuguucuuccucagugacccag

SEQ ID NO: 342762 - RNA, 32 nt, Human
caaggacccagccaucaaaaccagccucaaau

SEQ ID NO: 342763 - RNA, 32 nt, Human
caaggacccagccuuuguucugcacuuaauaa

SEQ ID NO: 342764 - RNA, 32 nt, Human
caaggacccccaaacucugcuccgugcacguc

SEQ ID NO: 342765 - RNA, 32 nt, Human
caaggacccccagcucucacugggcucugugg

SEQ ID NO: 342766 - RNA, 32 nt, Human
caaggaccgcgccgaaggaggugcccacugga

SEQ ID NO: 342767 - RNA, 32 nt, Human
caaggaccuaggcgucucuaagucuuaguuuc

SEQ ID NO: 342768 - RNA, 18 nt, Human
caaggaccucacaugcca

SEQ ID NO: 342769 - RNA, 32 nt, Human
caaggaccugggccucccagcccagcccagcc

SEQ ID NO: 342770 - RNA, 32 nt, Human
caaggacggacgggagcuccacugugaaucgg

SEQ ID NO: 342771 - RNA, 32 nt, Human
caaggacgggucaggaaggaaggagaggcuuu

SEQ ID NO: 342772 - RNA, 32 nt, Human
caaggacuagauuccuccucaaaccaguugua

SEQ ID NO: 342773 - RNA, 32 nt, Human
caaggacuagggucagggucucuggcucucag

SEQ ID NO: 342774 - RNA, 32 nt, Human
caaggacucaggucuaggucccuucccagaag

SEQ ID NO: 342775 - RNA, 32 nt, Human
caaggacucgguggucaugcugcuccaccacg

SEQ ID NO: 342776 - RNA, 32 nt, Human
caaggacugcacuaguccagggaguaggggac

SEQ ID NO: 342777 - RNA, 32 nt, Human
caaggacugcagcuucgccuauggcaguggca

SEQ ID NO: 342778 - RNA, 32 nt, Human
caaggacugccucaggugacgggccgugagag

SEQ ID NO: 342779 - RNA, 32 nt, Human
caaggacugccucugacccucccccugccuuc

SEQ ID NO: 342780 - RNA, 32 nt, Human
caaggacugcugggaccuucaacccugaucuu

SEQ ID NO: 342781 - RNA, 32 nt, Human
caaggacuggacuccaugccgaagguaucugg

SEQ ID NO: 342782 - RNA, 32 nt, Human
caaggacuggacuuagcucccuaggugccaca

SEQ ID NO: 342783 - RNA, 32 nt, Human
caaggacuggccccagcauggauaacagguag

SEQ ID NO: 342784 - RNA, 19 nt, Human
caaggacugggcuggcaaa

SEQ ID NO: 342785 - RNA, 32 nt, Human
caaggacugucaggcuggacaaaaauaacugc

SEQ ID NO: 342786 - RNA, 32 nt, Human
caaggacuguccaaaagccagccaguucaggg

SEQ ID NO: 342787 - RNA, 32 nt, Human
caaggacuucuaacaauaaacucucuuuugca

SEQ ID NO: 342788 - RNA, 32 nt, Human
caaggacuugugcugaagacucacaggugcag

SEQ ID NO: 342789 - RNA, 32 nt, Human
caaggacuuuguacauuugggaguuuuuauga

SEQ ID NO: 342790 - RNA, 32 nt, Human
caaggagaaaaaugggaagaaccaguuuuauc

SEQ ID NO: 342791 - RNA, 20 nt, Human
caaggagaaaacauucccuc

SEQ ID NO: 342792 - RNA, 32 nt, Human
caaggagaaaccuggcagauaccaccuuaacc

SEQ ID NO: 342793 - RNA, 32 nt, Human
caaggagaaagaggagagacagcagugcuggg

SEQ ID NO: 342794 - RNA, 32 nt, Human
caaggagaagaaaagagugacuagaagacucc

SEQ ID NO: 342795 - RNA, 32 nt, Human
caaggagaagaggaagggaggaagggaacaga

SEQ ID NO: 342796 - RNA, 32 nt, Human
caaggagaaggagguuuauucauaccccugaa

SEQ ID NO: 342797 - RNA, 32 nt, Human
caaggagaagguggagugagggcuggggucgg

SEQ ID NO: 342798 - RNA, 32 nt, Human
caaggagacaguggcauggagcuuugaaagac

SEQ ID NO: 342799 - RNA, 32 nt, Human
caaggagagacacuaucauucaucucuaccgg

SEQ ID NO: 342800 - RNA, 32 nt, Human
caaggagagagaaucacuugaggccaggaguu

SEQ ID NO: 342801 - RNA, 32 nt, Human
caaggagagaugaccucucauuuugccgagag

SEQ ID NO: 342802 - RNA, 32 nt, Human
caaggagauaaauguuguuuucaugcuuggua

SEQ ID NO: 342803 - RNA, 32 nt, Human
caaggagaugccacucugcucugccuuacugu

SEQ ID NO: 342804 - RNA, 32 nt, Human
caaggagauggccaugcuuaagccagcaauug

SEQ ID NO: 342805 - RNA, 32 nt, Human
caaggagcaaaguccuaucacagcgggagggg

SEQ ID NO: 342806 - RNA, 32 nt, Human
caaggagcagggagacaggaggcagagaagag

SEQ ID NO: 342807 - RNA, 32 nt, Human
caaggagccaugagucuuaggcuugacacuag

SEQ ID NO: 342808 - RNA, 32 nt, Human
caaggagcccaggcccccucccugccuccucc

SEQ ID NO: 342809 - RNA, 32 nt, Human
caaggagccccgcggcggccugggcagcgccu

SEQ ID NO: 342810 - RNA, 32 nt, Human
caaggagccuccagaaggaaaggaggaagaaa

SEQ ID NO: 342811 - RNA, 32 nt, Human
caaggagcuacacucccacuucuucagcuugg

SEQ ID NO: 342812 - RNA, 32 nt, Human
caaggagcuaugaacauagaaacccuauacau

SEQ ID NO: 342813 - RNA, 32 nt, Human
caaggagcucaaccucccugugccucaauuuc

SEQ ID NO: 342814 - RNA, 32 nt, Human
caaggagcucacuuggccugcuugcccugccc

SEQ ID NO: 342815 - RNA, 32 nt, Human
caaggagcugcacuccgaggccuugggccaaa

SEQ ID NO: 342816 - RNA, 32 nt, Human
caaggagcugggacucacaggagugugggcac

SEQ ID NO: 342817 - RNA, 22 nt, Human
caaggagcugggauuacaggca

SEQ ID NO: 342818 - RNA, 32 nt, Human
caaggagcuuuuccacaccugccaugcagcug

SEQ ID NO: 342819 - RNA, 32 nt, Human
caaggagcuuuucccccuuuugcucaggacuc

SEQ ID NO: 342820 - RNA, 26 nt, Human
caaggaggaagagaccaagaaauaaa

SEQ ID NO: 342821 - RNA, 32 nt, Human
caaggaggagagaagagaagggaagccccgag

SEQ ID NO: 342822 - RNA, 32 nt, Human
caaggaggaggcugaaagagccugagcugugc

SEQ ID NO: 342823 - RNA, 32 nt, Human
caaggaggaggcugccaaagaaaacaaaggcc

SEQ ID NO: 342824 - RNA, 32 nt, Human
caaggaggaugagcugcugucccuggaagaga

SEQ ID NO: 342825 - RNA, 32 nt, Human
caaggaggauuaugugugacuggguggccugg

SEQ ID NO: 342826 - RNA, 32 nt, Human
caaggaggcccaggaguagaggcugcagcgcc

SEQ ID NO: 342827 - RNA, 32 nt, Human
caaggaggcccagguguggccucacagaaaac

SEQ ID NO: 342828 - RNA, 32 nt, Human
caaggaggcugugcagcccgaggcucucaaag

SEQ ID NO: 342829 - RNA, 32 nt, Human
caaggagggaaacccaguucuguggggaaggu

SEQ ID NO: 342830 - RNA, 32 nt, Human
caaggagggaggaucacuugaacucaggaauu

SEQ ID NO: 342831 - RNA, 32 nt, Human
caaggagggaggaucacuugagccugggaguu

SEQ ID NO: 342832 - RNA, 32 nt, Human
caaggagggaggaucgcuuaagcccaggaauu

SEQ ID NO: 342833 - RNA, 32 nt, Human
caaggagggcagaucacuucaggucaggaguu

SEQ ID NO: 342834 - RNA, 32 nt, Human
caaggagggcccugcugcuggcuguccuggcc

SEQ ID NO: 342835 - RNA, 32 nt, Human
caaggagggcccuguuagcucccacuguccug

SEQ ID NO: 342836 - RNA, 32 nt, Human
caaggaggggcuuuugcugugcuaauuaggau

SEQ ID NO: 342837 - RNA, 32 nt, Human
caaggaggguccuacagacaagguggcaucuc

SEQ ID NO: 342838 - RNA, 32 nt, Human
caaggaggguggaucacuuaaggucaggaguu

SEQ ID NO: 342839 - RNA, 32 nt, Human
caaggaggguggaucacuugagaucaggaguu

SEQ ID NO: 342840 - RNA, 32 nt, Human
caaggaggguggaucacuugaggucaggaguu

SEQ ID NO: 342841 - RNA, 32 nt, Human
caaggagguaggaagagagggaggaggaaagg

SEQ ID NO: 342842 - RNA, 32 nt, Human
caaggaggugcagguaaagggugcagugcagc

SEQ ID NO: 342843 - RNA, 32 nt, Human
caaggagguugacuugccucucgggccccgua

SEQ ID NO: 342844 - RNA, 32 nt, Human
caaggaguagggcggcugccagcugggccggg

SEQ ID NO: 342845 - RNA, 32 nt, Human
caaggaguauauggacacuacacuggggcccu

SEQ ID NO: 342846 - RNA, 32 nt, Human
caaggaguauuuucuggguggaucucccauac

SEQ ID NO: 342847 - RNA, 24 nt, Human
caaggagucaaauuuauuuuccca

SEQ ID NO: 342848 - RNA, 32 nt, Human
caaggagucacugagaccaaggcuuucucuac

SEQ ID NO: 342849 - RNA, 32 nt, Human
caaggagucauuaacuuccucccucuaugccc

SEQ ID NO: 342850 - RNA, 32 nt, Human
caaggagucugcaugucuaagugcuagacaug

SEQ ID NO: 342851 - RNA, 32 nt, Human
caaggaguugccugggugcuggcuggucacug

SEQ ID NO: 342852 - RNA, 32 nt, Human
caaggaguuggguuuggaucaaaaguguuuaa

SEQ ID NO: 342853 - RNA, 32 nt, Human
caaggauaacaaccaacauuuucagagcacuu

SEQ ID NO: 342854 - RNA, 32 nt, Human
caaggauaagcagaguugauccaucugagaaa

SEQ ID NO: 342855 - RNA, 32 nt, Human
caaggauacaucagagaauuccugccucaucu

SEQ ID NO: 342856 - RNA, 32 nt, Human
caaggauauagguuuuucucauguaucuuuuu

SEQ ID NO: 342857 - RNA, 32 nt, Human
caaggaucaagaaaauuucuuucuucaugacc

SEQ ID NO: 342858 - RNA, 32 nt, Human
caaggaucaucagcaaucagcaaaucauuaau

SEQ ID NO: 342859 - RNA, 32 nt, Human
caaggauccaaagugccccaccaggggacagc

SEQ ID NO: 342860 - RNA, 32 nt, Human
caaggauccugagucuccuucagccuaacagc

SEQ ID NO: 342861 - RNA, 32 nt, Human
caaggaugaaugaaaauguauagcaucugccc

SEQ ID NO: 342862 - RNA, 32 nt, Human
caaggaugagcagcaugaagaugucagaucag

SEQ ID NO: 342863 - RNA, 32 nt, Human
caaggaugagccugaucuggggagagggccgg

SEQ ID NO: 342864 - RNA, 32 nt, Human
caaggaugauauguacucccaccccagagugc

SEQ ID NO: 342865 - RNA, 32 nt, Human
caaggaugccuacucuaaccaugccuauccaa

SEQ ID NO: 342866 - RNA, 32 nt, Human
caaggauggagaaagggagacagcuugcagau

SEQ ID NO: 342867 - RNA, 32 nt, Human
caaggauggagcaaaugucaacaggcacagau

SEQ ID NO: 342868 - RNA, 29 nt, Human
caaggauggcugcuaucaauucuuccuuu

SEQ ID NO: 342869 - RNA, 32 nt, Human
caaggauggucagcaaagccagcaaccuugaa

SEQ ID NO: 342870 - RNA, 32 nt, Human
caaggauggugcuaggucauucauggcuggcc

SEQ ID NO: 342871 - RNA, 32 nt, Human
caaggauguacauuuuaugaagaauuacaauc

SEQ ID NO: 342872 - RNA, 32 nt, Human
caaggaugugggguuuaaauggguuagugcac

SEQ ID NO: 342873 - RNA, 32 nt, Human
caaggauguuguagagcugccauaccaguccu

SEQ ID NO: 342874 - RNA, 32 nt, Human
caaggauguuuggucuuuaaugaaaagcugaa

SEQ ID NO: 342875 - RNA, 32 nt, Human
caaggauuagaagaaaagcagcaacacugaua

SEQ ID NO: 342876 - RNA, 32 nt, Human
caaggcaaaagaaucacuugagcccaggaguu

SEQ ID NO: 342877 - RNA, 21 nt, Human
caaggcaaagaucugcucacu

SEQ ID NO: 342878 - RNA, 32 nt, Human
caaggcaacacuuaucuuccacaggguaacag

SEQ ID NO: 342879 - RNA, 32 nt, Human
caaggcaaccagacacauccaugggugucaca

SEQ ID NO: 342880 - RNA, 32 nt, Human
caaggcaacuccccuucuccaagucacuuaca

SEQ ID NO: 342881 - RNA, 17 nt, Human
caaggcaagaaacugcu

SEQ ID NO: 342882 - RNA, 32 nt, Human
caaggcaagaggaucacuugagcccaggcguu

SEQ ID NO: 342883 - RNA, 32 nt, Human
caaggcaagaggcagagaugaugauuccauuu

SEQ ID NO: 342884 - RNA, 32 nt, Human
caaggcaagagguggaaggguacugacugggu

SEQ ID NO: 342885 - RNA, 32 nt, Human
caaggcaagcaaaucacuugagcucaggaguu

SEQ ID NO: 342886 - RNA, 24 nt, Human
caaggcaaggagcauccaugcacc

SEQ ID NO: 342887 - RNA, 32 nt, Human
caaggcaaggauuugccaaaaauguucugggg

SEQ ID NO: 342888 - RNA, 32 nt, Human
caaggcaagggcccugcucaccccaagguagg

SEQ ID NO: 342889 - RNA, 32 nt, Human
caaggcaaggggaucacuugagcccaggaguc

SEQ ID NO: 342890 - RNA, 32 nt, Human
caaggcaaguggaucacuucaggucaggaguu

SEQ ID NO: 342891 - RNA, 32 nt, Human
caaggcaauaacauauucagcaaugcaggucu

SEQ ID NO: 342892 - RNA, 32 nt, Human
caaggcaaugaccagaaugauaugcuuccugc

SEQ ID NO: 342893 - RNA, 22 nt, Human
caaggcacacauauauuggaaa

SEQ ID NO: 342894 - RNA, 32 nt, Human
caaggcacacauauauuggaaagaucauguug

SEQ ID NO: 342895 - RNA, 22 nt, Human
caaggcacagcgccuguuggaa

SEQ ID NO: 342896 - RNA, 18 nt, Human
caaggcacauuuggcaaa

SEQ ID NO: 342897 - RNA, 32 nt, Human
caaggcacccaggauugauugcaggaauaucu

SEQ ID NO: 342898 - RNA, 22 nt, Human
caaggcacccccugaccugccu

SEQ ID NO: 342899 - RNA, 32 nt, Human
caaggcaccgggcccuuucgcucugcagaacu

SEQ ID NO: 342900 - RNA, 32 nt, Human
caaggcaccugaggccauggcacucccagagg

SEQ ID NO: 342901 - RNA, 18 nt, Human
caaggcaccugcuggcaa

SEQ ID NO: 342902 - RNA, 23 nt, Human
caaggcacgcgcuccugacagcc

SEQ ID NO: 342903 - RNA, 32 nt, Human
caaggcacugagaccuccacccacuguggacu

SEQ ID NO: 342904 - RNA, 32 nt, Human
caaggcacugccugauggaccugucacgauug

SEQ ID NO: 342905 - RNA, 32 nt, Human
caaggcacuuacugcugccaggccggccagga

SEQ ID NO: 342906 - RNA, 32 nt, Human
caaggcagaagcagcaggggauggcgugguca

SEQ ID NO: 342907 - RNA, 32 nt, Human
caaggcagaaggaucacuugaacccaggaguu

SEQ ID NO: 342908 - RNA, 32 nt, Human
caaggcagaaggaucacuugagaccaggaguu

SEQ ID NO: 342909 - RNA, 32 nt, Human
caaggcagaaggaucacuugagcccaggaauu

SEQ ID NO: 342910 - RNA, 32 nt, Human
caaggcagaccgggacugggaagcugcccgga

SEQ ID NO: 342911 - RNA, 32 nt, Human
caaggcagagcugaggggacagggaggagcag

SEQ ID NO: 342912 - RNA, 32 nt, Human
caaggcagauggaacacuugaggucaggaguu

SEQ ID NO: 342913 - RNA, 32 nt, Human
caaggcagauggaucaugaggucagggguuca

SEQ ID NO: 342914 - RNA, 32 nt, Human
caaggcagcagaaaggagucacccagccaaag

SEQ ID NO: 342915 - RNA, 32 nt, Human
caaggcagccaagaacugccauaaacacuaca

SEQ ID NO: 342916 - RNA, 32 nt, Human
caaggcagccccuuccuuccagccugggcucu

SEQ ID NO: 342917 - RNA, 32 nt, Human
caaggcagcucacagcgggaaaacucugggac

SEQ ID NO: 342918 - RNA, 32 nt, Human
caaggcagcugggccagaucucaggccagccg

SEQ ID NO: 342919 - RNA, 32 nt, Human
caaggcagcuuccugauaauaaggcuguagga

SEQ ID NO: 342920 - RNA, 32 nt, Human
caaggcaggaagagaauugggcaucggguacg

SEQ ID NO: 342921 - RNA, 32 nt, Human
caaggcaggaagaucccuggagcucaggaguu

SEQ ID NO: 342922 - RNA, 24 nt, Human
caaggcaggaaggagacagacagc

SEQ ID NO: 342923 - RNA, 32 nt, Human
caaggcaggaaggggguggugccugcuggggc

SEQ ID NO: 342924 - RNA, 21 nt, Human
caaggcaggaaugagaaagca

SEQ ID NO: 342925 - RNA, 32 nt, Human
caaggcaggaggaguuaaaaccagcuuccugg

SEQ ID NO: 342926 - RNA, 32 nt, Human
caaggcaggaggaucacuugaaccuaggaguu

SEQ ID NO: 342927 - RNA, 32 nt, Human
caaggcaggaggaucacuugagccugggaguu

SEQ ID NO: 342928 - RNA, 32 nt, Human
caaggcaggaggaucacuugaggccagugagc

SEQ ID NO: 342929 - RNA, 32 nt, Human
caaggcaggaggaucacuugaggcuaggaguu

SEQ ID NO: 342930 - RNA, 32 nt, Human
caaggcaggaggaucacuuggagccaggaguu

SEQ ID NO: 342931 - RNA, 32 nt, Human
caaggcaggaggaucacuuuagcccaggaggu

SEQ ID NO: 342932 - RNA, 32 nt, Human
caaggcaggaggaucgcuggagcccaguaggu

SEQ ID NO: 342933 - RNA, 32 nt, Human
caaggcaggaggaucgcuugagcccaggaguu

SEQ ID NO: 342934 - RNA, 32 nt, Human
caaggcaggaggaucgcuugaggucagaaguu

SEQ ID NO: 342935 - RNA, 32 nt, Human
caaggcaggaggaucgcuugaggucaggaguu

SEQ ID NO: 342936 - RNA, 32 nt, Human
caaggcaggaggaucguuugaggccaggaggu

SEQ ID NO: 342937 - RNA, 32 nt, Human
caaggcaggaggaucucuugagcccaggaguu

SEQ ID NO: 342938 - RNA, 32 nt, Human
caaggcaggaggaucucuugaggccaggaguu

SEQ ID NO: 342939 - RNA, 32 nt, Human
caaggcaggaggauggcuugagcucaguaguu

SEQ ID NO: 342940 - RNA, 32 nt, Human
caaggcaggcagaucacuugaggucaggacuu

SEQ ID NO: 342941 - RNA, 32 nt, Human
caaggcaggcagaucacuugaggucaggaguu

SEQ ID NO: 342942 - RNA, 32 nt, Human
caaggcaggcagaucacuugaggucgggcguu

SEQ ID NO: 342943 - RNA, 32 nt, Human
caaggcaggcagcaguggggcugugacaggaa

SEQ ID NO: 342944 - RNA, 32 nt, Human
caaggcaggcauaucacuugagccgaggcgga

SEQ ID NO: 342945 - RNA, 32 nt, Human
caaggcaggcggaucacuugaggccaggaguu

SEQ ID NO: 342946 - RNA, 32 nt, Human
caaggcaggcggaucacuugaggccagggguu

SEQ ID NO: 342947 - RNA, 32 nt, Human
caaggcaggcucucacaugccuggacgccugg

SEQ ID NO: 342948 - RNA, 32 nt, Human
caaggcaggcuggaggugccggugggccugug

SEQ ID NO: 342949 - RNA, 32 nt, Human
caaggcaggcuggaucaccugaggacaggagu

SEQ ID NO: 342950 - RNA, 32 nt, Human
caaggcagguagaucacuugaugccaggaguu

SEQ ID NO: 342951 - RNA, 32 nt, Human
caaggcaggugcaucacuugaggccaggaguu

SEQ ID NO: 342952 - RNA, 32 nt, Human
caaggcagguggaucacuuaagaucaggaguu

SEQ ID NO: 342953 - RNA, 32 nt, Human
caaggcagguggaucacuugaggucaggagcu

SEQ ID NO: 342954 - RNA, 32 nt, Human
caaggcagguggaucacuugggucgggaguuc

SEQ ID NO: 342955 - RNA, 32 nt, Human
caaggcagguggaucccuugagcccaggaguu

SEQ ID NO: 342956 - RNA, 32 nt, Human
caaggcagguggaucccuugagcucaggaguu

SEQ ID NO: 342957 - RNA, 32 nt, Human
caaggcagguggaucgcuugagcucaggaguu

SEQ ID NO: 342958 - RNA, 32 nt, Human
caaggcagguggaugacuugagcucaggaguu

SEQ ID NO: 342959 - RNA, 32 nt, Human
caaggcagguggauugcuugagcccaggaguu

SEQ ID NO: 342960 - RNA, 32 nt, Human
caaggcagugggggugaacauccagggccuac

SEQ ID NO: 342961 - RNA, 31 nt, Human
caaggcauaacuucccaacauuuaagaaacc

SEQ ID NO: 342962 - RNA, 32 nt, Human
caaggcauaguggcuuaugccuguaaucccgg

SEQ ID NO: 342963 - RNA, 32 nt, Human
caaggcaucccccagccccaagccugcgcgca

SEQ ID NO: 342964 - RNA, 32 nt, Human
caaggcauccucacaacaaagaagagauguga

SEQ ID NO: 342965 - RNA, 20 nt, Human
caaggcauccucccaccuca

SEQ ID NO: 342966 - RNA, 22 nt, Human
caaggcauggacccugacaccu

SEQ ID NO: 342967 - RNA, 32 nt, Human
caaggcauggcagacugagcuggaggaagaug

SEQ ID NO: 342968 - RNA, 32 nt, Human
caaggcauguacaaagcugaguaacugcaucu

SEQ ID NO: 342969 - RNA, 32 nt, Human
caaggccaaagccugcccugagcccagacaca

SEQ ID NO: 342970 - RNA, 32 nt, Human
caaggccaacagcugugcaaagccacaaguua

SEQ ID NO: 342971 - RNA, 22 nt, Human
caaggccaaccacaacacagaa

SEQ ID NO: 342972 - RNA, 24 nt, Human
caaggccaagauacgugcuuuuca

SEQ ID NO: 342973 - RNA, 32 nt, Human
caaggccacaaacuguucaacacacacaaagu

SEQ ID NO: 342974 - RNA, 32 nt, Human
caaggccacaaccuccauucucccagaaaaga

SEQ ID NO: 342975 - RNA, 32 nt, Human
caaggccacacagcuggcuugaacuucagcac

SEQ ID NO: 342976 - RNA, 32 nt, Human
caaggccacagaaagagccugauguccaugau

SEQ ID NO: 342977 - RNA, 32 nt, Human
caaggccacaugcagggaugcacccacaaugu

SEQ ID NO: 342978 - RNA, 32 nt, Human
caaggccacggcucuacuaaaagagagagagg

SEQ ID NO: 342979 - RNA, 32 nt, Human
caaggccacucggcuacucaggacagggcugg

SEQ ID NO: 342980 - RNA, 24 nt, Human
caaggccagaccaaggaggcagca

SEQ ID NO: 342981 - RNA, 32 nt, Human
caaggccagagcaggcucccucagcuugcagg

SEQ ID NO: 342982 - RNA, 32 nt, Human
caaggccagcagcugcaacaacugcugcaagc

SEQ ID NO: 342983 - RNA, 24 nt, Human
caaggccagccugggcaacauaga

SEQ ID NO: 342984 - RNA, 22 nt, Human
caaggccagccuuucuggcaaa

SEQ ID NO: 342985 - RNA, 32 nt, Human
caaggccaggaggaccaggggugcagacagaa

SEQ ID NO: 342986 - RNA, 32 nt, Human
caaggccaggaguucaagaccagccuggccaa

SEQ ID NO: 342987 - RNA, 32 nt, Human
caaggccaggcccccggcccaccagcuuucgg

SEQ ID NO: 342988 - RNA, 32 nt, Human
caaggccagucuccagaugaggggacuauagc

SEQ ID NO: 342989 - RNA, 22 nt, Human
caaggccauaaaaaacaaggaa

SEQ ID NO: 342990 - RNA, 22 nt, Human
caaggccaucaaagacaaggaa

SEQ ID NO: 342991 - RNA, 32 nt, Human
caaggccauccuggggaagggccggaagcuga

SEQ ID NO: 342992 - RNA, 32 nt, Human
caaggccauggaaguggaggcugcagaggccc

SEQ ID NO: 342993 - RNA, 32 nt, Human
caaggccaugggcauggaugugcugaacgagg

SEQ ID NO: 342994 - RNA, 32 nt, Human
caaggcccacuucuucucagaaaagaggccag

SEQ ID NO: 342995 - RNA, 32 nt, Human
caaggcccagcagagcugagaugugacugcag

SEQ ID NO: 342996 - RNA, 25 nt, Human
caaggcccagccaaaacaacacaga

SEQ ID NO: 342997 - RNA, 32 nt, Human
caaggcccagcccugggcaaggaagcuuugga

SEQ ID NO: 342998 - RNA, 32 nt, Human
caaggcccccgcgcucggcaagugagccuggc

SEQ ID NO: 342999 - RNA, 32 nt, Human
caaggccccugaccucagcucagcuuuuguag

SEQ ID NO: 343000 - RNA, 32 nt, Human
caaggcccgccccuuccuugugcucaaauggc

SEQ ID NO: 343001 - RNA, 32 nt, Human
caaggcccuagacugcaguaaaacccagaacu

SEQ ID NO: 343002 - RNA, 32 nt, Human
caaggcccucaagguggcccucagccaccacc

SEQ ID NO: 343003 - RNA, 32 nt, Human
caaggcccucagaagcagauuauuccuguuuu

SEQ ID NO: 343004 - RNA, 32 nt, Human
caaggcccugaaggagggccgugagccugacu

SEQ ID NO: 343005 - RNA, 32 nt, Human
caaggcccugacagcccugccuucugcccucu

SEQ ID NO: 343006 - RNA, 32 nt, Human
caaggcccugaccacuucugugccaguugucu

SEQ ID NO: 343007 - RNA, 32 nt, Human
caaggcccugcaggaacgcgccgaggucuccc

SEQ ID NO: 343008 - RNA, 32 nt, Human
caaggcccuggccgccaugguggaggaccuga

SEQ ID NO: 343009 - RNA, 32 nt, Human
caaggcccugggaggcaacaggcuagcccuua

SEQ ID NO: 343010 - RNA, 32 nt, Human
caaggccgagggccaggcagaauggcugcacg

SEQ ID NO: 343011 - RNA, 32 nt, Human
caaggccgagguagaagaaucgcuugagacua

SEQ ID NO: 343012 - RNA, 32 nt, Human
caaggccgcaagguggaggagcugcgguggca

SEQ ID NO: 343013 - RNA, 32 nt, Human
caaggccgcccaccugcaucagccucuggcca

SEQ ID NO: 343014 - RNA, 32 nt, Human
caaggccggagcagugccuggcaguuggccaa

SEQ ID NO: 343015 - RNA, 32 nt, Human
caaggccgggcgugcgugaggccagguccacg

SEQ ID NO: 343016 - RNA, 32 nt, Human
caaggccuacagagacagagcuauaggaaggc

SEQ ID NO: 343017 - RNA, 32 nt, Human
caaggccucacacgcagccacuucuucaagag

SEQ ID NO: 343018 - RNA, 32 nt, Human
caaggccucagaagaaaaguugucugggaaug

SEQ ID NO: 343019 - RNA, 32 nt, Human
caaggccuccaaugcucaccgaugcccucugc

SEQ ID NO: 343020 - RNA, 20 nt, Human
caaggccuccaauuggcaaa

SEQ ID NO: 343021 - RNA, 32 nt, Human
caaggccuccuggauccaaagcaccaugucag

SEQ ID NO: 343022 - RNA, 32 nt, Human
caaggccucucagacccagaugugacggggug

SEQ ID NO: 343023 - RNA, 32 nt, Human
caaggccucucagccuuacuccuggcuucaua

SEQ ID NO: 343024 - RNA, 32 nt, Human
caaggccucugccucucagccucuuccauggu

SEQ ID NO: 343025 - RNA, 25 nt, Human
caaggccucugcugccacugacagc

SEQ ID NO: 343026 - RNA, 32 nt, Human
caaggccugagaaaggaaaggaagggaaaggc

SEQ ID NO: 343027 - RNA, 32 nt, Human
caaggccugccgagcuguggccuucucugaag

SEQ ID NO: 343028 - RNA, 32 nt, Human
caaggccuguauugcagucuucauacaaaaca

SEQ ID NO: 343029 - RNA, 32 nt, Human
caaggccuuaucuucaccccacaaacaauaaa

SEQ ID NO: 343030 - RNA, 32 nt, Human
caaggccuucacugcagccccaucuccuccuc

SEQ ID NO: 343031 - RNA, 32 nt, Human
caaggccuuggauuucuggcucccagaccacc

SEQ ID NO: 343032 - RNA, 32 nt, Human
caaggccuuggggagcuuaggggaccuggugg

SEQ ID NO: 343033 - RNA, 32 nt, Human
caaggccuuuccagcauugcacaucuaugaua

SEQ ID NO: 343034 - RNA, 24 nt, Human
caaggcgaaacccugucucuacua

SEQ ID NO: 343035 - RNA, 32 nt, Human
caaggcgcaaauggcccuggcuucauuuauuc

SEQ ID NO: 343036 - RNA, 32 nt, Human
caaggcgcagcgggagcgcacaggugccccgc

SEQ ID NO: 343037 - RNA, 32 nt, Human
caaggcgccauuggcuuccugggacucugagu

SEQ ID NO: 343038 - RNA, 32 nt, Human
caaggcgcgucccccucggccucccagcgcuc

SEQ ID NO: 343039 - RNA, 32 nt, Human
caaggcggacagaucacuugagcucaggaguu

SEQ ID NO: 343040 - RNA, 32 nt, Human
caaggcggacggaucacuugagguuaggaguu

SEQ ID NO: 343041 - RNA, 21 nt, Human
caaggcggagcuugcagugag

SEQ ID NO: 343042 - RNA, 32 nt, Human
caaggcggaucugggcuuccacccucaugaac

SEQ ID NO: 343043 - RNA, 32 nt, Human
caaggcggauggaucacuugagcccaggaguu

SEQ ID NO: 343044 - RNA, 32 nt, Human
caaggcggcccagaggcugggcccugcacaua

SEQ ID NO: 343045 - RNA, 18 nt, Human
caaggcggcuauggcaga

SEQ ID NO: 343046 - RNA, 32 nt, Human
caaggcgggaggaucacuugaggucaggaguu

SEQ ID NO: 343047 - RNA, 32 nt, Human
caaggcgggaggaucgcuugagcccagagguu

SEQ ID NO: 343048 - RNA, 32 nt, Human
caaggcgggaggauggcuugagccugggaggu

SEQ ID NO: 343049 - RNA, 32 nt, Human
caaggcgggaggauugcuugagcccaggaguu

SEQ ID NO: 343050 - RNA, 32 nt, Human
caaggcgggaggguugcuugagcucaggaguu

SEQ ID NO: 343051 - RNA, 32 nt, Human
caaggcgggcagaucacuugagaucaggaguu

SEQ ID NO: 343052 - RNA, 32 nt, Human
caaggcgggcagaucacuugaggucaggaguu

SEQ ID NO: 343053 - RNA, 32 nt, Human
caaggcgggcagaucacuugaggucgggaguu

SEQ ID NO: 343054 - RNA, 32 nt, Human
caaggcgggcagaucgcuugagcucaacaguu

SEQ ID NO: 343055 - RNA, 32 nt, Human
caaggcgggcagauugccugaccucaggaguu

SEQ ID NO: 343056 - RNA, 32 nt, Human
caaggcgggcggaucacuuaaagucaggaguc

SEQ ID NO: 343057 - RNA, 32 nt, Human
caaggcgggcggaucacuugaggucaggaguu

SEQ ID NO: 343058 - RNA, 32 nt, Human
caaggcgggcggaucacuugcggucaggaguu

SEQ ID NO: 343059 - RNA, 32 nt, Human
caaggcgggcggauugccugagcucaggaguu

SEQ ID NO: 343060 - RNA, 32 nt, Human
caaggcggguagaucacuugaggucaggaguu

SEQ ID NO: 343061 - RNA, 32 nt, Human
caaggcggguggaacacuugaggucaggaguu

SEQ ID NO: 343062 - RNA, 27 nt, Human
caaggcggguggaucacuugagaccag

SEQ ID NO: 343063 - RNA, 32 nt, Human
caaggcggguggaucacuugaggccaggaguu

SEQ ID NO: 343064 - RNA, 32 nt, Human
caaggcggguggaucacuugaggucaggaguu

SEQ ID NO: 343065 - RNA, 32 nt, Human
caaggcggguggcucacuugaggcuaggaguu

SEQ ID NO: 343066 - RNA, 32 nt, Human
caaggcgguagucacuuccgcucugcagcuag

SEQ ID NO: 343067 - RNA, 32 nt, Human
caaggcgguucagcuaccagacugcacuauaa

SEQ ID NO: 343068 - RNA, 32 nt, Human
caaggcguagggcuggagggcaggggcgggcc

SEQ ID NO: 343069 - RNA, 32 nt, Human
caaggcgucaguagugggcacuggccuggggg

SEQ ID NO: 343070 - RNA, 32 nt, Human
caaggcuaaaccugccugugcucacacacgca

SEQ ID NO: 343071 - RNA, 32 nt, Human
caaggcuaaaggcagagccagauggagaagga

SEQ ID NO: 343072 - RNA, 32 nt, Human
caaggcuaacaucccacuuagccgcacccugc

SEQ ID NO: 343073 - RNA, 18 nt, Human
caaggcuacacugucaag

SEQ ID NO: 343074 - RNA, 19 nt, Human
caaggcuacagacauggug

SEQ ID NO: 343075 - RNA, 19 nt, Human
caaggcuacagcgaccgga

SEQ ID NO: 343076 - RNA, 18 nt, Human
caaggcuacagcgucgaa

SEQ ID NO: 343077 - RNA, 19 nt, Human
caaggcuacaguaaccaaa

SEQ ID NO: 343078 - RNA, 18 nt, Human
caaggcuaccaacugcaa

SEQ ID NO: 343079 - RNA, 17 nt, Human
caaggcuacgcugacaa

SEQ ID NO: 343080 - RNA, 18 nt, Human
caaggcuacuuuggugaa

SEQ ID NO: 343081 - RNA, 18 nt, Human
caaggcuagaaaacagca

SEQ ID NO: 343082 - RNA, 17 nt, Human
caaggcuaggucacaaa

SEQ ID NO: 343083 - RNA, 19 nt, Human
caaggcuaguugugacaga

SEQ ID NO: 343084 - RNA, 32 nt, Human
caaggcucaaggcuuccccagcaaagauuagg

SEQ ID NO: 343085 - RNA, 32 nt, Human
caaggcucaaugcuauucuaacuaaugacaag

SEQ ID NO: 343086 - RNA, 31 nt, Human
caaggcucaauuccgaacuguugaaggaaga

SEQ ID NO: 343087 - RNA, 32 nt, Human
caaggcucacugcaaccucaaccuucugguuu

SEQ ID NO: 343088 - RNA, 32 nt, Human
caaggcucacugcagccucaaccuucuggguu

SEQ ID NO: 343089 - RNA, 32 nt, Human
caaggcucacugcagccuggaccuccugguuc

SEQ ID NO: 343090 - RNA, 32 nt, Human
caaggcucagccaucugugccuuagggagcuc

SEQ ID NO: 343091 - RNA, 32 nt, Human
caaggcucccgccgcugcuccagcgcggcgca

SEQ ID NO: 343092 - RNA, 32 nt, Human
caaggcucccguacugucuguguccuuguaua

SEQ ID NO: 343093 - RNA, 32 nt, Human
caaggcucccuaaugcuggucucugcuccacu

SEQ ID NO: 343094 - RNA, 32 nt, Human
caaggcucccugccccuccucaugccccucug

SEQ ID NO: 343095 - RNA, 32 nt, Human
caaggcuccuugugggauuccucagcagcacc

SEQ ID NO: 343096 - RNA, 32 nt, Human
caaggcugacuacgagaggaggcuccagcacc

SEQ ID NO: 343097 - RNA, 17 nt, Human
caaggcugagcggcaga

SEQ ID NO: 343098 - RNA, 32 nt, Human
caaggcugaggcaggagaaucgcuugaaccug

SEQ ID NO: 343099 - RNA, 32 nt, Human
caaggcugaggcaggagaauugcuugagccca

SEQ ID NO: 343100 - RNA, 32 nt, Human
caaggcugaggcaggaggcucucuugagaaua

SEQ ID NO: 343101 - RNA, 17 nt, Human
caaggcugcaaagcaaa

SEQ ID NO: 343102 - RNA, 19 nt, Human
caaggcugcagccagcaaa

SEQ ID NO: 343103 - RNA, 16 nt, Human
caaggcugcagucaaa

SEQ ID NO: 343104 - RNA, 32 nt, Human
caaggcugcauuccaguaugguaucaaaaugu

SEQ ID NO: 343105 - RNA, 32 nt, Human
caaggcugcccagcuggugguguuaagccaga

SEQ ID NO: 343106 - RNA, 21 nt, Human
caaggcugcccccucagcaga

SEQ ID NO: 343107 - RNA, 32 nt, Human
caaggcugcugaggccuggucuccaguuggaa

SEQ ID NO: 343108 - RNA, 32 nt, Human
caaggcugcugccggaaucacuucuccaauca

SEQ ID NO: 343109 - RNA, 17 nt, Human
caaggcugcuggacaaa

SEQ ID NO: 343110 - RNA, 32 nt, Human
caaggcugcuugugcuaccaguuuguuggugg

SEQ ID NO: 343111 - RNA, 32 nt, Human
caaggcuggagagagaacaggaggugaaagaa

SEQ ID NO: 343112 - RNA, 32 nt, Human
caaggcuggagugcaguggaacgaucuuggcu

SEQ ID NO: 343113 - RNA, 32 nt, Human
caaggcuggagugcaguggugugaucucggcu

SEQ ID NO: 343114 - RNA, 19 nt, Human
caaggcuggcagugacaga

SEQ ID NO: 343115 - RNA, 32 nt, Human
caaggcuggccacacaccacuuuuacuggcca

SEQ ID NO: 343116 - RNA, 17 nt, Human
caaggcuggccagcaag

SEQ ID NO: 343117 - RNA, 29 nt, Human
caaggcuggcugcagcuggccuccgccgc

SEQ ID NO: 343118 - RNA, 32 nt, Human
caaggcugggauuacagguaugcaccaccacg

SEQ ID NO: 343119 - RNA, 19 nt, Human
caaggcugggcgggacaga

SEQ ID NO: 343120 - RNA, 32 nt, Human
caaggcugggcuggugaaaggaguucacucaa

SEQ ID NO: 343121 - RNA, 19 nt, Human
caaggcuggggcauggcaa

SEQ ID NO: 343122 - RNA, 32 nt, Human
caaggcuggggcuggagaaugagagacugcgc

SEQ ID NO: 343123 - RNA, 32 nt, Human
caaggcuggguguggaggcucacaccuguaau

SEQ ID NO: 343124 - RNA, 21 nt, Human
caaggcuggugccuggggcua

SEQ ID NO: 343125 - RNA, 17 nt, Human
caaggcugucguggcaa

SEQ ID NO: 343126 - RNA, 32 nt, Human
caaggcuguggaccauggaguggcagcccagc

SEQ ID NO: 343127 - RNA, 32 nt, Human
caaggcuguggagucccagagccagcaguuca

SEQ ID NO: 343128 - RNA, 19 nt, Human
caaggcuguggguccacca

SEQ ID NO: 343129 - RNA, 32 nt, Human
caaggcuguuuccaacucuccccauuuuccug

SEQ ID NO: 343130 - RNA, 32 nt, Human
caaggcuguuucugugugugaggaacuuugcc

SEQ ID NO: 343131 - RNA, 32 nt, Human
caaggcuuauucuucuacauccauagaugcuu

SEQ ID NO: 343132 - RNA, 32 nt, Human
caaggcuucaggaagggccagccacaugccau

SEQ ID NO: 343133 - RNA, 32 nt, Human
caaggcuugaaauccagcaggauggaggacuu

SEQ ID NO: 343134 - RNA, 32 nt, Human
caaggcuugccagagccaacaggaagugagcc

SEQ ID NO: 343135 - RNA, 32 nt, Human
caaggcuuggaaacuaugaggggcagggagga

SEQ ID NO: 343136 - RNA, 32 nt, Human
caaggcuuuaaagcugagagacccuggccuca

SEQ ID NO: 343137 - RNA, 32 nt, Human
caaggcuuucugugccaagaaucccaagugac

SEQ ID NO: 343138 - RNA, 32 nt, Human
caaggcuuucuugagccccgccccuuucuuuc

SEQ ID NO: 343139 - RNA, 32 nt, Human
caaggcuuugauaccugucacccaggguaucu

SEQ ID NO: 343140 - RNA, 32 nt, Human
caagggaaaaacaaaaaccccacaaaauaccc

SEQ ID NO: 343141 - RNA, 32 nt, Human
caagggaaaaccugcguuguaaacaugaggau

SEQ ID NO: 343142 - RNA, 32 nt, Human
caagggaaaagcaguuuucuguggggcuuauu

SEQ ID NO: 343143 - RNA, 32 nt, Human
caagggaaagagacuugcuggagcagcugccg

SEQ ID NO: 343144 - RNA, 32 nt, Human
caagggaaaguuucagcucacugugaagccag

SEQ ID NO: 343145 - RNA, 32 nt, Human
caagggaaaucaggaaaacuguccugauugaa

SEQ ID NO: 343146 - RNA, 32 nt, Human
caagggaacucauacugucuacacaucagacc

SEQ ID NO: 343147 - RNA, 32 nt, Human
caagggaacuguggggaugcacgaggaugccc

SEQ ID NO: 343148 - RNA, 32 nt, Human
caagggaaugcacagggcugcacagagugacu

SEQ ID NO: 343149 - RNA, 32 nt, Human
caagggacaaaccaaaucccaauugccuauag

SEQ ID NO: 343150 - RNA, 32 nt, Human
caagggacaagaggagcagaggacaggugaug

SEQ ID NO: 343151 - RNA, 32 nt, Human
caagggacagaggcggggguccuagcugacgg

SEQ ID NO: 343152 - RNA, 32 nt, Human
caagggacagcaagugagcagagauguacugc

SEQ ID NO: 343153 - RNA, 32 nt, Human
caagggaccaaggucugucaccaggagaucag

SEQ ID NO: 343154 - RNA, 17 nt, Human
caagggacccuggcaga

SEQ ID NO: 343155 - RNA, 32 nt, Human
caagggacccuuugccuuucuucugcccuuuc

SEQ ID NO: 343156 - RNA, 18 nt, Human
caagggacuccuggagcc

SEQ ID NO: 343157 - RNA, 32 nt, Human
caagggacugagugagccuuuugcaggaaaag

SEQ ID NO: 343158 - RNA, 32 nt, Human
caagggagaagagcugccaggagaagcaaggg

SEQ ID NO: 343159 - RNA, 32 nt, Human
caagggagcaggcaguccagagaacuggccuc

SEQ ID NO: 343160 - RNA, 32 nt, Human
caagggagcaggcugccuaaugaaggagccag

SEQ ID NO: 343161 - RNA, 32 nt, Human
caagggaggaaagaauucuggaaagaauucuu

SEQ ID NO: 343162 - RNA, 32 nt, Human
caagggaggaagcagagggaggcagaagcgug

SEQ ID NO: 343163 - RNA, 32 nt, Human
caagggaggaggaucacuugagcccaggaguu

SEQ ID NO: 343164 - RNA, 32 nt, Human
caagggagggccuggacugagggggaccaggu

SEQ ID NO: 343165 - RNA, 20 nt, Human
caagggagggguguuggaga

SEQ ID NO: 343166 - RNA, 24 nt, Human
caagggagugacagaaucuggaaa

SEQ ID NO: 343167 - RNA, 32 nt, Human
caagggauaggcucguuggugacauugugaau

SEQ ID NO: 343168 - RNA, 32 nt, Human
caagggaucuuucugccucagcuucccaaagu

SEQ ID NO: 343169 - RNA, 23 nt, Human
caagggaugcaccuucagucaaa

SEQ ID NO: 343170 - RNA, 32 nt, Human
caagggcaacauaguacuucuccuucacccau

SEQ ID NO: 343171 - RNA, 32 nt, Human
caagggcaagugcuagaguugcagugaauuua

SEQ ID NO: 343172 - RNA, 32 nt, Human
caagggcacacaaguucacacagcagagucag

SEQ ID NO: 343173 - RNA, 32 nt, Human
caagggcacagaaacagccaggccacaccaac

SEQ ID NO: 343174 - RNA, 32 nt, Human
caagggcacagcuguccguaucuccuuuggau

SEQ ID NO: 343175 - RNA, 32 nt, Human
caagggcagaagugagaaaaauaaccaucacc

SEQ ID NO: 343176 - RNA, 32 nt, Human
caagggcagaggugggagauugaugguucauu

SEQ ID NO: 343177 - RNA, 32 nt, Human
caagggcagcacccccagccuccaagggccgu

SEQ ID NO: 343178 - RNA, 32 nt, Human
caagggcagccaugcacucccccugggugucg

SEQ ID NO: 343179 - RNA, 32 nt, Human
caagggcagcccugggcucuggcuggggauga

SEQ ID NO: 343180 - RNA, 32 nt, Human
caagggcaggaagaggcgucucagggaacccc

SEQ ID NO: 343181 - RNA, 32 nt, Human
caagggcaggguggguccagccuugagccccu

SEQ ID NO: 343182 - RNA, 32 nt, Human
caagggcauccacuccaaugcccaccuaguac

SEQ ID NO: 343183 - RNA, 32 nt, Human
caagggcaugacagugcuggaggccgucuugg

SEQ ID NO: 343184 - RNA, 32 nt, Human
caagggccagccuggccaacauggugaaaccc

SEQ ID NO: 343185 - RNA, 32 nt, Human
caagggccaggccagagacccaggaaggcaga

SEQ ID NO: 343186 - RNA, 32 nt, Human
caagggccaggccagagacccaggaaggcagc

SEQ ID NO: 343187 - RNA, 32 nt, Human
caagggccauucaguacaucaggaaaguggca

SEQ ID NO: 343188 - RNA, 32 nt, Human
caagggcccaagcagaaguacacccacaagca

SEQ ID NO: 343189 - RNA, 24 nt, Human
caagggccgccgggggcuggacga

SEQ ID NO: 343190 - RNA, 32 nt, Human
caagggccuagauuuggagacuuuguuccuua

SEQ ID NO: 343191 - RNA, 32 nt, Human
caagggccuauccugcagccggcccgcuccgg

SEQ ID NO: 343192 - RNA, 32 nt, Human
caagggccuccacaguguggaggucccauuuu

SEQ ID NO: 343193 - RNA, 18 nt, Human
caagggccuggacucaga

SEQ ID NO: 343194 - RNA, 19 nt, Human
caagggcgacauccccccg

SEQ ID NO: 343195 - RNA, 32 nt, Human
caagggcgaggcaagggcgcuuucugccgacg

SEQ ID NO: 343196 - RNA, 32 nt, Human
caagggcuccugucuguccuuugcuguuuuau

SEQ ID NO: 343197 - RNA, 20 nt, Human
caagggcucgggacuggaga

SEQ ID NO: 343198 - RNA, 24 nt, Human
caagggcucugcaaaugccaguuu

SEQ ID NO: 343199 - RNA, 32 nt, Human
caagggcugauggucccuccccugugcgccuu

SEQ ID NO: 343200 - RNA, 32 nt, Human
caagggcuggaaggacaccagaacgcucccga

SEQ ID NO: 343201 - RNA, 20 nt, Human
caagggcuggagcccagaga

SEQ ID NO: 343202 - RNA, 20 nt, Human
caagggcuggcacuuuuuua

SEQ ID NO: 343203 - RNA, 22 nt, Human
caagggcugggcuguccguuca

SEQ ID NO: 343204 - RNA, 32 nt, Human
caagggcugguucugggagaggcgcaagggca

SEQ ID NO: 343205 - RNA, 23 nt, Human
caagggcuguacauccagcuaca

SEQ ID NO: 343206 - RNA, 32 nt, Human
caagggcugugccugcgcccagaagcagcuac

SEQ ID NO: 343207 - RNA, 21 nt, Human
caagggcuuagggguuggagg

SEQ ID NO: 343208 - RNA, 32 nt, Human
caagggcuugcagccuaguaggagcugagcuu

SEQ ID NO: 343209 - RNA, 32 nt, Human
caagggcuuuguuuccugcucuccucugcccu

SEQ ID NO: 343210 - RNA, 32 nt, Human
caagggcuuuuccuugcugucaucuggcuuga

SEQ ID NO: 343211 - RNA, 32 nt, Human
caaggggaaaccuguagugacagugugcccug

SEQ ID NO: 343212 - RNA, 32 nt, Human
caaggggaaggacuguugcugguaugaagcag

SEQ ID NO: 343213 - RNA, 32 nt, Human
caaggggacauggagaaagcagacauggugga

SEQ ID NO: 343214 - RNA, 32 nt, Human
caaggggaccccggccuaggaggcaggaagcc

SEQ ID NO: 343215 - RNA, 32 nt, Human
caaggggacgucgggcucagaggcagacgaug

SEQ ID NO: 343216 - RNA, 19 nt, Human
caaggggaggaguuggaga

SEQ ID NO: 343217 - RNA, 32 nt, Human
caaggggagggaggggcguggggagccggaac

SEQ ID NO: 343218 - RNA, 32 nt, Human
caaggggcaaaaagaucuauuuauagaucuau

SEQ ID NO: 343219 - RNA, 32 nt, Human
caaggggcaauauuuuuaucuuuuccaaaaua

SEQ ID NO: 343220 - RNA, 32 nt, Human
caaggggcaggcggcaggcccggggagacgga

SEQ ID NO: 343221 - RNA, 32 nt, Human
caaggggccaggagccaacaccagaggccacu

SEQ ID NO: 343222 - RNA, 19 nt, Human
caaggggcccagagccccc

SEQ ID NO: 343223 - RNA, 32 nt, Human
caaggggcccagccuccucuggacuccaccuu

SEQ ID NO: 343224 - RNA, 32 nt, Human
caaggggcccaggcccuguccucugucccuca

SEQ ID NO: 343225 - RNA, 32 nt, Human
caaggggccgcuaagacagugucuccuaaguc

SEQ ID NO: 343226 - RNA, 32 nt, Human
caaggggcuacuguuaguccucuuguuagaug

SEQ ID NO: 343227 - RNA, 32 nt, Human
caaggggcuucaggcauccucaguuucuuuau

SEQ ID NO: 343228 - RNA, 32 nt, Human
caagggggacgaggcagaugacgagagaagcg

SEQ ID NO: 343229 - RNA, 32 nt, Human
caagggggaggaagaggaggaagguuggaccu

SEQ ID NO: 343230 - RNA, 32 nt, Human
caagggggaggggagcccacaggccugcagcc

SEQ ID NO: 343231 - RNA, 32 nt, Human
caagggggcugcugcuccucucuuggguaggg

SEQ ID NO: 343232 - RNA, 32 nt, Human
caagggggcugugccguggagcugggcucgcg

SEQ ID NO: 343233 - RNA, 32 nt, Human
caaggggucacagcaugccuccugccuuaccg

SEQ ID NO: 343234 - RNA, 32 nt, Human
caaggggucaugccaauuuaaggaaaugcccc

SEQ ID NO: 343235 - RNA, 32 nt, Human
caagggguccaauccagucuucagggccaaca

SEQ ID NO: 343236 - RNA, 32 nt, Human
caaggggugcugcuggccacacugcacuagca

SEQ ID NO: 343237 - RNA, 32 nt, Human
caaggggugggccacagccauggugggagugg

SEQ ID NO: 343238 - RNA, 18 nt, Human
caaggguagguguggcag

SEQ ID NO: 343239 - RNA, 32 nt, Human
caaggguaguuucuuuccuaugcauacucuag

SEQ ID NO: 343240 - RNA, 32 nt, Human
caagggucacccaaauagcugagugcaguccu

SEQ ID NO: 343241 - RNA, 32 nt, Human
caagggucagcccucuugacugucacaugcug

SEQ ID NO: 343242 - RNA, 32 nt, Human
caaggguccggggcggaggaugcuuuguucuu

SEQ ID NO: 343243 - RNA, 32 nt, Human
caaggguccugucaucccucauggccaccccg

SEQ ID NO: 343244 - RNA, 32 nt, Human
caagggucucacaaccccaacaucuucagacu

SEQ ID NO: 343245 - RNA, 32 nt, Human
caagggucuuaccauguugcccaggcuggucu

SEQ ID NO: 343246 - RNA, 23 nt, Human
caagggucuucucacccguaaug

SEQ ID NO: 343247 - RNA, 32 nt, Human
caagggugacucuuuaccacaggaugaauaaa

SEQ ID NO: 343248 - RNA, 32 nt, Human
caagggugagccaccaugcccggccguaaaug

SEQ ID NO: 343249 - RNA, 32 nt, Human
caagggugagccagcagcaaggggcuggcuau

SEQ ID NO: 343250 - RNA, 32 nt, Human
caagggugccaagcugugugagagggccaccg

SEQ ID NO: 343251 - RNA, 32 nt, Human
caagggugcccagggguguggugucucugagc

SEQ ID NO: 343252 - RNA, 32 nt, Human
caagggugggaugggagggcagaggggaaaua

SEQ ID NO: 343253 - RNA, 32 nt, Human
caagggugggggagggagggagggaguuggca

SEQ ID NO: 343254 - RNA, 32 nt, Human
caagggugggguggccagcagauggacugcug

SEQ ID NO: 343255 - RNA, 32 nt, Human
caaggguggugaccaaugcauuaccuucuguu

SEQ ID NO: 343256 - RNA, 32 nt, Human
caaggguggugugacaguuaauacugaguguc

SEQ ID NO: 343257 - RNA, 32 nt, Human
caagggugugugugacuacaaguacacacuac

SEQ ID NO: 343258 - RNA, 31 nt, Human
caaggguuggguaaggagguuuuaagggaga

SEQ ID NO: 343259 - RNA, 22 nt, Human
caaggguugugcuccucagcuu

SEQ ID NO: 343260 - RNA, 21 nt, Human
caaggguuuagagucuggaga

SEQ ID NO: 343261 - RNA, 24 nt, Human
caaggguuucauuaaggucaccuu

SEQ ID NO: 343262 - RNA, 32 nt, Human
caagguaaaauuauugucaaaguuuaaauacc

SEQ ID NO: 343263 - RNA, 32 nt, Human
caagguaaacucugacaugcacuagguaugug

SEQ ID NO: 343264 - RNA, 32 nt, Human
caagguaaacucugacaugcacuaguaugugc

SEQ ID NO: 343265 - RNA, 32 nt, Human
caagguaacucugggcuacagaguccuugcug

SEQ ID NO: 343266 - RNA, 32 nt, Human
caagguaaggagcagaggaggcaugagcaugg

SEQ ID NO: 343267 - RNA, 32 nt, Human
caagguacacagauggcagugccauaagcaag

SEQ ID NO: 343268 - RNA, 32 nt, Human
caagguacccagaauuuuuagaagccuucaga

SEQ ID NO: 343269 - RNA, 21 nt, Human
caagguacucuggcuggcaaa

SEQ ID NO: 343270 - RNA, 32 nt, Human
caagguagaaaaggguuggaaaagaaugauaa

SEQ ID NO: 343271 - RNA, 32 nt, Human
caagguagaagaaucacuugagcccaggaguu

SEQ ID NO: 343272 - RNA, 32 nt, Human
caagguagagaguggaaggaaugaaggggugg

SEQ ID NO: 343273 - RNA, 32 nt, Human
caagguagagugagccaauggcgagagaucag

SEQ ID NO: 343274 - RNA, 32 nt, Human
caagguagaugaaguugcuuugccaguaagga

SEQ ID NO: 343275 - RNA, 32 nt, Human
caagguagcagugugguaggauagagacaaaa

SEQ ID NO: 343276 - RNA, 32 nt, Human
caagguaggagaaucgcuugagcucaggaguu

SEQ ID NO: 343277 - RNA, 32 nt, Human
caagguaggcagagguugcagugagccaagau

SEQ ID NO: 343278 - RNA, 16 nt, Human
caagguaggcugcaaa

SEQ ID NO: 343279 - RNA, 32 nt, Human
caagguaugaagcagaugagggaccagcacuc

SEQ ID NO: 343280 - RNA, 32 nt, Human
caagguauuauuuagaaaagaagagaauguuu

SEQ ID NO: 343281 - RNA, 32 nt, Human
caaggucaagagaucaagaccauccucgccaa

SEQ ID NO: 343282 - RNA, 32 nt, Human
caaggucaagagaucaagaccauucuggccaa

SEQ ID NO: 343283 - RNA, 31 nt, Human
caaggucaagaggcaacgacagcagaggugg

SEQ ID NO: 343284 - RNA, 32 nt, Human
caaggucaagaguucgagaccagccugaccaa

SEQ ID NO: 343285 - RNA, 32 nt, Human
caaggucaagaguucgagaccagccuggccaa

SEQ ID NO: 343286 - RNA, 32 nt, Human
caaggucaagaguucgugaccagccuggccaa

SEQ ID NO: 343287 - RNA, 32 nt, Human
caaggucacacagcagagcuggaacuagagcu

SEQ ID NO: 343288 - RNA, 32 nt, Human
caaggucacacagcuggcuggggcaggauugg

SEQ ID NO: 343289 - RNA, 32 nt, Human
caaggucacaccacugcacuccagccugggcu

SEQ ID NO: 343290 - RNA, 32 nt, Human
caaggucacaccauugcacuccaaccugggcg

SEQ ID NO: 343291 - RNA, 32 nt, Human
caaggucacccagcugugaaugaacgugguca

SEQ ID NO: 343292 - RNA, 32 nt, Human
caaggucacgucacugcacucuagccugggca

SEQ ID NO: 343293 - RNA, 32 nt, Human
caaggucacucugccagacgccuuuuugccug

SEQ ID NO: 343294 - RNA, 32 nt, Human
caaggucagcaguucaagaccagccugaccaa

SEQ ID NO: 343295 - RNA, 32 nt, Human
caaggucagcugcccccugcccucucucuggg

SEQ ID NO: 343296 - RNA, 32 nt, Human
caaggucaggagaucaagaccauccuggccaa

SEQ ID NO: 343297 - RNA, 32 nt, Human
caaggucaggagaucaagaccauccuggcuaa

SEQ ID NO: 343298 - RNA, 32 nt, Human
caaggucaggaguucaagaccagccugaccaa

SEQ ID NO: 343299 - RNA, 32 nt, Human
caaggucaggaguucaagaccagccuggacaa

SEQ ID NO: 343300 - RNA, 32 nt, Human
caaggucaggaguucaagaccagccuggccaa

SEQ ID NO: 343301 - RNA, 32 nt, Human
caaggucaggaguucaagaccagccuggccca

SEQ ID NO: 343302 - RNA, 32 nt, Human
caaggucaggaguucaagaccagcugaccaac

SEQ ID NO: 343303 - RNA, 24 nt, Human
caaggucaggaguuccagaccagc

SEQ ID NO: 343304 - RNA, 32 nt, Human
caaggucaggaguugagaccagccuggccaac

SEQ ID NO: 343305 - RNA, 32 nt, Human
caaggucaggaguuuugagaccagccuggcca

SEQ ID NO: 343306 - RNA, 32 nt, Human
caaggucauagagugagugccugagucaucca

SEQ ID NO: 343307 - RNA, 32 nt, Human
caaggucauccaggcagcacuuccagaaacuu

SEQ ID NO: 343308 - RNA, 32 nt, Human
caaggucauccuggagaugggauccaggacgu

SEQ ID NO: 343309 - RNA, 32 nt, Human
caaggucaucgaugaccucccgcugacaaacu

SEQ ID NO: 343310 - RNA, 32 nt, Human
caaggucaucuccugggggcccucucuggagc

SEQ ID NO: 343311 - RNA, 32 nt, Human
caaggucaugccacugcacuccagccugggag

SEQ ID NO: 343312 - RNA, 32 nt, Human
caaggucaugccacugcacucuagccugggug

SEQ ID NO: 343313 - RNA, 32 nt, Human
caaggucauuggagagaacuucuguaugggca

SEQ ID NO: 343314 - RNA, 32 nt, Human
caaggucauuuugcacugauucauacuuugag

SEQ ID NO: 343315 - RNA, 32 nt, Human
caagguccagaguucaagagcagccuggccaa

SEQ ID NO: 343316 - RNA, 32 nt, Human
caagguccaggauauagaaucuacagagucca

SEQ ID NO: 343317 - RNA, 32 nt, Human
caaggucccaccgcccucacagccaaugaggg

SEQ ID NO: 343318 - RNA, 32 nt, Human
caagguccuccaggccuggggacaggaaagcc

SEQ ID NO: 343319 - RNA, 32 nt, Human
caagguccugggugcagccgggugcauggcag

SEQ ID NO: 343320 - RNA, 32 nt, Human
caaggucgcaccgcuacacuccagccugggug

SEQ ID NO: 343321 - RNA, 19 nt, Human
caaggucgcgacacugcac

SEQ ID NO: 343322 - RNA, 32 nt, Human
caaggucgcgccacugcacuccagccugggca

SEQ ID NO: 343323 - RNA, 32 nt, Human
caaggucgcgccacugcacuccagccugggcg

SEQ ID NO: 343324 - RNA, 32 nt, Human
caaggucgcgccacugcgcuccagccuggaca

SEQ ID NO: 343325 - RNA, 32 nt, Human
caaggucgcgccauugcacuccagccugggcg

SEQ ID NO: 343326 - RNA, 32 nt, Human
caaggucgcuucucuuuuccucuucucuccca

SEQ ID NO: 343327 - RNA, 32 nt, Human
caaggucggaggagacaggggaugaggaaggc

SEQ ID NO: 343328 - RNA, 32 nt, Human
caaggucggggaggggagggaaaagcagcacc

SEQ ID NO: 343329 - RNA, 32 nt, Human
caaggucucacucugcugcucaggcuggagug

SEQ ID NO: 343330 - RNA, 18 nt, Human
caaggucucacucuguca

SEQ ID NO: 343331 - RNA, 32 nt, Human
caaggucuccagcagcccccagaaggagggca

SEQ ID NO: 343332 - RNA, 32 nt, Human
caaggucucccaguccagaaacagucugguga

SEQ ID NO: 343333 - RNA, 23 nt, Human
caaggucucugaagaagagaaug

SEQ ID NO: 343334 - RNA, 32 nt, Human
caaggucucuucuccauuguugcucucuauac

SEQ ID NO: 343335 - RNA, 32 nt, Human
caaggucugagugccacguggacuucuucagg

SEQ ID NO: 343336 - RNA, 32 nt, Human
caaggucugggaauuuaucgagaagcucuuug

SEQ ID NO: 343337 - RNA, 32 nt, Human
caaggucugugccucuccugcagccccgccac

SEQ ID NO: 343338 - RNA, 20 nt, Human
caaggucuucagucuagcuu

SEQ ID NO: 343339 - RNA, 24 nt, Human
caaggugaaaccccaucucuacua

SEQ ID NO: 343340 - RNA, 24 nt, Human
caaggugaaaccccgucucuacua

SEQ ID NO: 343341 - RNA, 32 nt, Human
caaggugaaagcuucuaauggagacacuccua

SEQ ID NO: 343342 - RNA, 21 nt, Human
caaggugaaccagcugguaaa

SEQ ID NO: 343343 - RNA, 32 nt, Human
caaggugaacugggacauucuucuuucucaga

SEQ ID NO: 343344 - RNA, 32 nt, Human
caaggugaagaggacuccgaaguccuuuguca

SEQ ID NO: 343345 - RNA, 32 nt, Human
caaggugaagccugagacgaauggcuuuccca

SEQ ID NO: 343346 - RNA, 32 nt, Human
caaggugagcaagucacuugaggucgggaguu

SEQ ID NO: 343347 - RNA, 32 nt, Human
caaggugagcccagagaugaauugggcacaca

SEQ ID NO: 343348 - RNA, 32 nt, Human
caaggugaggagcaaggaagccagucugaguc

SEQ ID NO: 343349 - RNA, 32 nt, Human
caaggugaggccuugagcucuuuguuuuuaua

SEQ ID NO: 343350 - RNA, 32 nt, Human
caaggugaggcugugccuucuggugccaggac

SEQ ID NO: 343351 - RNA, 26 nt, Human
caaggugauaaaacccgucucuacua

SEQ ID NO: 343352 - RNA, 32 nt, Human
caaggugcacacaucuugaccaacucagcagc

SEQ ID NO: 343353 - RNA, 32 nt, Human
caaggugcacacugcuguguguaccuugcaga

SEQ ID NO: 343354 - RNA, 32 nt, Human
caaggugcagaagacucagggaaggguagucu

SEQ ID NO: 343355 - RNA, 17 nt, Human
caaggugcagcugacaa

SEQ ID NO: 343356 - RNA, 32 nt, Human
caaggugcccccaucugccugccuguagaaau

SEQ ID NO: 343357 - RNA, 32 nt, Human
caaggugcccugagcuccccugggcagcaccc

SEQ ID NO: 343358 - RNA, 32 nt, Human
caaggugccucccgccucuccucccccagacc

SEQ ID NO: 343359 - RNA, 32 nt, Human
caaggugccuccuccucuccuuagcuggcccg

SEQ ID NO: 343360 - RNA, 23 nt, Human
caaggugcuaggauuacaggcau

SEQ ID NO: 343361 - RNA, 23 nt, Human
caaggugcuggaauuacaggcgu

SEQ ID NO: 343362 - RNA, 22 nt, Human
caaggugcuggauuacaggcau

SEQ ID NO: 343363 - RNA, 32 nt, Human
caaggugcuggcaagauuugaaggcaaaaguc

SEQ ID NO: 343364 - RNA, 23 nt, Human
caaggugcugggacuacaggcgu

SEQ ID NO: 343365 - RNA, 23 nt, Human
caaggugcugggauuacaagcgu

SEQ ID NO: 343366 - RNA, 22 nt, Human
caaggugcugggauuacaggca

SEQ ID NO: 343367 - RNA, 23 nt, Human
caaggugcugggauuacaggcau

SEQ ID NO: 343368 - RNA, 32 nt, Human
caaggugcugggauuacaggcaugagggacca

SEQ ID NO: 343369 - RNA, 32 nt, Human
caaggugcuguuccagcacacaugcuuccugc

SEQ ID NO: 343370 - RNA, 32 nt, Human
caagguggaaggaucacuuagagcuaggaguu

SEQ ID NO: 343371 - RNA, 32 nt, Human
caagguggagugaaacggggugcggggguggg

SEQ ID NO: 343372 - RNA, 32 nt, Human
caagguggagugaaucaaggagcauguggagg

SEQ ID NO: 343373 - RNA, 24 nt, Human
caagguggcaagcaggcuaccugu

SEQ ID NO: 343374 - RNA, 20 nt, Human
caagguggcaggcgccugua

SEQ ID NO: 343375 - RNA, 32 nt, Human
caagguggcgcaugccuauaaucccagguacu

SEQ ID NO: 343376 - RNA, 32 nt, Human
caagguggcucacaccuauaaucccagcccuu

SEQ ID NO: 343377 - RNA, 32 nt, Human
caagguggcucacgccuguaaucccagcacuu

SEQ ID NO: 343378 - RNA, 32 nt, Human
caagguggcucaugccuuuaaucccagcauuu

SEQ ID NO: 343379 - RNA, 32 nt, Human
caagguggcugugucagccagugugagggccc

SEQ ID NO: 343380 - RNA, 32 nt, Human
caaggugggaagaucacuugagcccaggaauu

SEQ ID NO: 343381 - RNA, 32 nt, Human
caaggugggaagauugccugagcucaggaguu

SEQ ID NO: 343382 - RNA, 32 nt, Human
caaggugggagcaucacuugauccugggaguu

SEQ ID NO: 343383 - RNA, 32 nt, Human
caaggugggaggaucaauugaggccagaguuu

SEQ ID NO: 343384 - RNA, 32 nt, Human
caaggugggaggaucaccagagccugggaagg

SEQ ID NO: 343385 - RNA, 32 nt, Human
caaggugggaggaucaccugaggucaggaguu

SEQ ID NO: 343386 - RNA, 32 nt, Human
caaggugggaggaucaccugaugucgggaguu

SEQ ID NO: 343387 - RNA, 32 nt, Human
caaggugggaggaucacuggaggucaggaguu

SEQ ID NO: 343388 - RNA, 32 nt, Human
caaggugggaggaucacuugagcccaggaguu

SEQ ID NO: 343389 - RNA, 32 nt, Human
caaggugggaggaucacuugaggccaggaguu

SEQ ID NO: 343390 - RNA, 32 nt, Human
caaggugggaggaucacuuuaguccaggaguu

SEQ ID NO: 343391 - RNA, 32 nt, Human
caaggugggaggaucaguugagccccagaguu

SEQ ID NO: 343392 - RNA, 32 nt, Human
caaggugggaggaucgcuugagaccaggaguu

SEQ ID NO: 343393 - RNA, 32 nt, Human
caaggugggaggaucgcuugagcccaggaguu

SEQ ID NO: 343394 - RNA, 32 nt, Human
caaggugggaggaucguuugagcccaggaguu

SEQ ID NO: 343395 - RNA, 32 nt, Human
caaggugggaggauuacuugagaccaggaguu

SEQ ID NO: 343396 - RNA, 32 nt, Human
caaggugggaggauugcuugaacccaggaguu

SEQ ID NO: 343397 - RNA, 32 nt, Human
caaggugggaggauugcuugagccagaaguuc

SEQ ID NO: 343398 - RNA, 32 nt, Human
caaggugggaggauugcuugagcccaagaguu

SEQ ID NO: 343399 - RNA, 32 nt, Human
caaggugggaggauugcuugagcccaggaguu

SEQ ID NO: 343400 - RNA, 32 nt, Human
caaggugggaggauugcuugagcccaguaguu

SEQ ID NO: 343401 - RNA, 32 nt, Human
caaggugggaggauugcuugagccuaggaguu

SEQ ID NO: 343402 - RNA, 32 nt, Human
caaggugggaggauugcuugagcguagccauu

SEQ ID NO: 343403 - RNA, 32 nt, Human
caaggugggaggauugcuugagcucaggaguu

SEQ ID NO: 343404 - RNA, 32 nt, Human
caaggugggaggauugcuugagcucggaagau

SEQ ID NO: 343405 - RNA, 32 nt, Human
caaggugggaggauugcuugaggccaggaguu

SEQ ID NO: 343406 - RNA, 32 nt, Human
caaggugggaggauugucuuaagcccgggacu

SEQ ID NO: 343407 - RNA, 32 nt, Human
caaggugggaggugggauggggcaggacuuuc

SEQ ID NO: 343408 - RNA, 19 nt, Human
caaggugggagguugaaga

SEQ ID NO: 343409 - RNA, 32 nt, Human
caaggugggauggugaucccuuugaccccugc

SEQ ID NO: 343410 - RNA, 32 nt, Human
caaggugggcagaucacuugaagucaggaguu

SEQ ID NO: 343411 - RNA, 32 nt, Human
caaggugggcagaucacuugagcccagcaguu

SEQ ID NO: 343412 - RNA, 32 nt, Human
caaggugggcagaucacuugaggucaggaguu

SEQ ID NO: 343413 - RNA, 32 nt, Human
caaggugggcagauccccugagcucaggaguc

SEQ ID NO: 343414 - RNA, 32 nt, Human
caaggugggcagauugccugagcucaggaguu

SEQ ID NO: 343415 - RNA, 32 nt, Human
caaggugggcaguuugccugagcucaggaguu

SEQ ID NO: 343416 - RNA, 32 nt, Human
caaggugggcggaucaccugagcucaggaguu

SEQ ID NO: 343417 - RNA, 32 nt, Human
caaggugggcggaucaccuugaggucaggagu

SEQ ID NO: 343418 - RNA, 32 nt, Human
caaggugggcggaucacuugagaucaggaguu

SEQ ID NO: 343419 - RNA, 32 nt, Human
caaggugggcggaucacuugaggccaggaauu

SEQ ID NO: 343420 - RNA, 32 nt, Human
caaggugggcggaucacuugaggucaggaauu

SEQ ID NO: 343421 - RNA, 32 nt, Human
caaggugggcggaucacuugaggucaggaguu

SEQ ID NO: 343422 - RNA, 32 nt, Human
caaggugggcggauugcuugagcuuaggaguu

SEQ ID NO: 343423 - RNA, 32 nt, Human
caaggugggcgggucacuugagaucaggaguu

SEQ ID NO: 343424 - RNA, 32 nt, Human
caaggugggcugaucacuugaucccaggaguu

SEQ ID NO: 343425 - RNA, 21 nt, Human
caagguggggaaaucuggaaa

SEQ ID NO: 343426 - RNA, 31 nt, Human
caaggugggguggaagcuuggggaagaccca

SEQ ID NO: 343427 - RNA, 32 nt, Human
caaggugggguggaagcuuggggaagacccau

SEQ ID NO: 343428 - RNA, 32 nt, Human
caagguggguaaaucacuugaggucaggaguu

SEQ ID NO: 343429 - RNA, 32 nt, Human
caagguggguagaucacuugaggucaggaguu

SEQ ID NO: 343430 - RNA, 18 nt, Human
caaggugggugacagaga

SEQ ID NO: 343431 - RNA, 32 nt, Human
caagguggguggaucacuugaagccaggaguu

SEQ ID NO: 343432 - RNA, 32 nt, Human
caagguggguggaucacuugagccuaagagau

SEQ ID NO: 343433 - RNA, 32 nt, Human
caagguggguggaucacuugaggccaggaguu

SEQ ID NO: 343434 - RNA, 32 nt, Human
caagguggguggaucacuugaggucaggaguu

SEQ ID NO: 343435 - RNA, 32 nt, Human
caagguggguggaucacuugaggucgggaguu

SEQ ID NO: 343436 - RNA, 32 nt, Human
caagguggguggaucacuugaguucaggaguu

SEQ ID NO: 343437 - RNA, 32 nt, Human
caagguggguggaucgcuugagcccaggcagu

SEQ ID NO: 343438 - RNA, 32 nt, Human
caagguggguggaucgcuugagcucaggaguu

SEQ ID NO: 343439 - RNA, 32 nt, Human
caaggugggugggucacuugaacccaggaguu

SEQ ID NO: 343440 - RNA, 32 nt, Human
caagguggguggguugcuugagcucaggaguu

SEQ ID NO: 343441 - RNA, 32 nt, Human
caagguggguugaucacuuggggcuagggguu

SEQ ID NO: 343442 - RNA, 32 nt, Human
caagguggugcaccccuguaaucccagcuacu

SEQ ID NO: 343443 - RNA, 32 nt, Human
caaggugguggagacauucugagcagggcuga

SEQ ID NO: 343444 - RNA, 32 nt, Human
caagguguccuucugaaaugcaugcccugugg

SEQ ID NO: 343445 - RNA, 32 nt, Human
caaggugucggcugccccagauugcuucauuu

SEQ ID NO: 343446 - RNA, 32 nt, Human
caaggugucuaguccagcucccauggagggug

SEQ ID NO: 343447 - RNA, 32 nt, Human
caaggugucucaucugaaaagaaaccugagcc

SEQ ID NO: 343448 - RNA, 32 nt, Human
caaggugugagcauuugagcugugcuggaagg

SEQ ID NO: 343449 - RNA, 32 nt, Human
caaggugugcagggcaggucagggaagggcag

SEQ ID NO: 343450 - RNA, 32 nt, Human
caaggugugcccagcagaagugcaauagccag

SEQ ID NO: 343451 - RNA, 32 nt, Human
caagguguuccgcaaggaggaggacuccacgg

SEQ ID NO: 343452 - RNA, 32 nt, Human
caagguguucucuguagcucaaucugcaaaca

SEQ ID NO: 343453 - RNA, 23 nt, Human
caagguguugggaccacaggcgu

SEQ ID NO: 343454 - RNA, 32 nt, Human
caagguguuuccaaagcacauccucugauccu

SEQ ID NO: 343455 - RNA, 32 nt, Human
caagguuaaucaggaaaaauagcuuuugacag

SEQ ID NO: 343456 - RNA, 17 nt, Human
caagguuaggguuggag

SEQ ID NO: 343457 - RNA, 32 nt, Human
caagguuagucaggucuggcuauauuuccacu

SEQ ID NO: 343458 - RNA, 32 nt, Human
caagguuaugccaaauuuccaggccuuuuuga

SEQ ID NO: 343459 - RNA, 32 nt, Human
caagguucacuacaaaacaaacaguuccuggu

SEQ ID NO: 343460 - RNA, 32 nt, Human
caagguucaugaguugccugacuugcccaccg

SEQ ID NO: 343461 - RNA, 32 nt, Human
caagguuccccucugcucaucccuccucauuc

SEQ ID NO: 343462 - RNA, 16 nt, Human
caagguuccugguaaa

SEQ ID NO: 343463 - RNA, 32 nt, Human
caagguucuauacaaaugcaagggaauuaaug

SEQ ID NO: 343464 - RNA, 32 nt, Human
caagguucuccaaguagcucauacagcuuuga

SEQ ID NO: 343465 - RNA, 32 nt, Human
caagguucucuccccucuuuccucucacauac

SEQ ID NO: 343466 - RNA, 32 nt, Human
caagguugcgccacugcacuccagccugggca

SEQ ID NO: 343467 - RNA, 19 nt, Human
caagguugcucacugcaaa

SEQ ID NO: 343468 - RNA, 32 nt, Human
caagguuggaaaggagagcuugcugaaguggg

SEQ ID NO: 343469 - RNA, 32 nt, Human
caagguuggggaggggaacaggagagaggcaa

SEQ ID NO: 343470 - RNA, 32 nt, Human
caagguuggugagacggcaacaggguaggagg

SEQ ID NO: 343471 - RNA, 32 nt, Human
caagguuguagcugugcucaggcuucagcuug

SEQ ID NO: 343472 - RNA, 32 nt, Human
caagguugugccacugcacuccagccugggca

SEQ ID NO: 343473 - RNA, 32 nt, Human
caagguugugcuuucaaacacauauuaguccu

SEQ ID NO: 343474 - RNA, 31 nt, Human
caagguuucaauaaauauuugcuaaaugagu

SEQ ID NO: 343475 - RNA, 32 nt, Human
caagguuugcaagcucccugccccagggagcu

SEQ ID NO: 343476 - RNA, 17 nt, Human
caagguuugcuggcaga

SEQ ID NO: 343477 - RNA, 32 nt, Human
caaguaaaaccagcacaaccagccaccagugg

SEQ ID NO: 343478 - RNA, 32 nt, Human
caaguaaacuuacuuuccuguuucuggaauac

SEQ ID NO: 343479 - RNA, 32 nt, Human
caaguaaaugagcagagacagccccugguuua

SEQ ID NO: 343480 - RNA, 32 nt, Human
caaguaaauucagggaaacacauuuacuugaa

SEQ ID NO: 343481 - RNA, 32 nt, Human
caaguaacagaaaccugguugaaaugcuuaac

SEQ ID NO: 343482 - RNA, 21 nt, Human
caaguaaccagcuucucacuc

SEQ ID NO: 343483 - RNA, 23 nt, Human
caaguaacugggauuacaggcau

SEQ ID NO: 343484 - RNA, 32 nt, Human
caaguaacuuauaucuuuuuauuugaauguau

SEQ ID NO: 343485 - RNA, 32 nt, Human
caaguaacuugucucugcuauuuuuaauguau

SEQ ID NO: 343486 - RNA, 32 nt, Human
caaguaagaggagcuucaucucagccugcuag

SEQ ID NO: 343487 - RNA, 32 nt, Human
caaguaagcuuaaaaugcauucucuagcaaag

SEQ ID NO: 343488 - RNA, 32 nt, Human
caaguaaggaagaggaagaccuccagcauugg

SEQ ID NO: 343489 - RNA, 32 nt, Human
caaguaaggaagucucaagcccaaagagcagc

SEQ ID NO: 343490 - RNA, 32 nt, Human
caaguaaggcagcgugggggaaaggaaacgug

SEQ ID NO: 343491 - RNA, 32 nt, Human
caaguaaggguucucauuguugccuuuuaaga

SEQ ID NO: 343492 - RNA, 32 nt, Human
caaguaaguagcuuccuucaucuguguguacu

SEQ ID NO: 343493 - RNA, 32 nt, Human
caaguaaguugcaaaccacauauccgacaagg

SEQ ID NO: 343494 - RNA, 32 nt, Human
caaguaauauagaauaacuuuccuuaaaauga

SEQ ID NO: 343495 - RNA, 32 nt, Human
caaguaauccugcugauccaguuguacuuaag

SEQ ID NO: 343496 - RNA, 18 nt, Human
caaguacagaaaccucca

SEQ ID NO: 343497 - RNA, 23 nt, Human
caaguacagaagaccuuccuuuc

SEQ ID NO: 343498 - RNA, 32 nt, Human
caaguacagagggagggagggccccagcccac

SEQ ID NO: 343499 - RNA, 32 nt, Human
caaguacagauggacugaguauggccugacgu

SEQ ID NO: 343500 - RNA, 32 nt, Human
caaguacaucuguauucaacuggguaaagcca

SEQ ID NO: 343501 - RNA, 32 nt, Human
caaguacaucuucucccagauucucuggccuu

SEQ ID NO: 343502 - RNA, 32 nt, Human
caaguacaugcacgaccacuaccuggacaagu

SEQ ID NO: 343503 - RNA, 32 nt, Human
caaguaccacuccauccagccuugggcaagau

SEQ ID NO: 343504 - RNA, 32 nt, Human
caaguaccagccagcaacaccaaccaaaugcu

SEQ ID NO: 343505 - RNA, 19 nt, Human
caaguacccuuuccucuca

SEQ ID NO: 343506 - RNA, 23 nt, Human
caaguaccugggacuacaggcgu

SEQ ID NO: 343507 - RNA, 32 nt, Human
caaguaccuggggcuagcagggcagauaccag

SEQ ID NO: 343508 - RNA, 32 nt, Human
caaguaccuugcagcauuucucugccauugcu

SEQ ID NO: 343509 - RNA, 32 nt, Human
caaguacuggggacacaucaaagugugguguu

SEQ ID NO: 343510 - RNA, 32 nt, Human
caaguacuuaacaaaaagaugaaaacuugaag

SEQ ID NO: 343511 - RNA, 32 nt, Human
caaguagaaggugagcaaggugaagaggugcu

SEQ ID NO: 343512 - RNA, 32 nt, Human
caaguagaggugagccauuccccagaggaaga

SEQ ID NO: 343513 - RNA, 18 nt, Human
caaguagcagaagcugug

SEQ ID NO: 343514 - RNA, 23 nt, Human
caaguagcggggaucacaggcau

SEQ ID NO: 343515 - RNA, 32 nt, Human
caaguagcuagcaugcaguugcagcucaauga

SEQ ID NO: 343516 - RNA, 32 nt, Human
caaguagcucaguucuugcguuuuauauuagg

SEQ ID NO: 343517 - RNA, 22 nt, Human
caaguagcugagauuacaggca

SEQ ID NO: 343518 - RNA, 23 nt, Human
caaguagcugagauuacaggcau

SEQ ID NO: 343519 - RNA, 22 nt, Human
caaguagcuggaauuacaggca

SEQ ID NO: 343520 - RNA, 23 nt, Human
caaguagcuggaauuacaggcau

SEQ ID NO: 343521 - RNA, 23 nt, Human
caaguagcuggaauuacaggcgu

SEQ ID NO: 343522 - RNA, 22 nt, Human
caaguagcugggaauacaggca

SEQ ID NO: 343523 - RNA, 23 nt, Human
caaguagcugggaccacaggcau

SEQ ID NO: 343524 - RNA, 23 nt, Human
caaguagcugggaccacaggcgu

SEQ ID NO: 343525 - RNA, 32 nt, Human
caaguagcugggacuacagaugugggccacca

SEQ ID NO: 343526 - RNA, 22 nt, Human
caaguagcugggacuacaggca

SEQ ID NO: 343527 - RNA, 23 nt, Human
caaguagcugggacuacaggcau

SEQ ID NO: 343528 - RNA, 23 nt, Human
caaguagcugggacuacaggcgu

SEQ ID NO: 343529 - RNA, 23 nt, Human
caaguagcugggacugcaggcau

SEQ ID NO: 343530 - RNA, 32 nt, Human
caaguagcugggacuucagagauggcuggagc

SEQ ID NO: 343531 - RNA, 23 nt, Human
caaguagcugggaucacaggcgu

SEQ ID NO: 343532 - RNA, 23 nt, Human
caaguagcugggauuacagacau

SEQ ID NO: 343533 - RNA, 22 nt, Human
caaguagcugggauuacaggca

SEQ ID NO: 343534 - RNA, 23 nt, Human
caaguagcugggauuacaggcau

SEQ ID NO: 343535 - RNA, 22 nt, Human
caaguagcugggauuacaggcg

SEQ ID NO: 343536 - RNA, 23 nt, Human
caaguagcugggauuacgggcau

SEQ ID NO: 343537 - RNA, 23 nt, Human
caaguagcugggguuacaggcau

SEQ ID NO: 343538 - RNA, 32 nt, Human
caaguagcuuauacugaggugugcuucaaggg

SEQ ID NO: 343539 - RNA, 32 nt, Human
caaguaggaguaaaccaaaaagugugauuuuu

SEQ ID NO: 343540 - RNA, 32 nt, Human
caaguaggcaaacugaggcucugggagaugua

SEQ ID NO: 343541 - RNA, 21 nt, Human
caaguagggacugucuucuca

SEQ ID NO: 343542 - RNA, 23 nt, Human
caaguaggugggauuacaggcau

SEQ ID NO: 343543 - RNA, 32 nt, Human
caaguagugccccucccucccccuggccaagc

SEQ ID NO: 343544 - RNA, 32 nt, Human
caaguaguguuugguugcauggaaaaguucuu

SEQ ID NO: 343545 - RNA, 32 nt, Human
caaguaguuagcaaagggaggcccaaauucuc

SEQ ID NO: 343546 - RNA, 32 nt, Human
caaguaguucacaaaucucauugugaagaggc

SEQ ID NO: 343547 - RNA, 32 nt, Human
caaguaguugcuaaugugccucuuggucuacc

SEQ ID NO: 343548 - RNA, 32 nt, Human
caaguaguugcuaaugugccucuuggucugcc

SEQ ID NO: 343549 - RNA, 22 nt, Human
caaguaguugggauuacaggca

SEQ ID NO: 343550 - RNA, 23 nt, Human
caaguaguugggauuacgggcau

SEQ ID NO: 343551 - RNA, 22 nt, Human
caaguaguugggauugcaggca

SEQ ID NO: 343552 - RNA, 32 nt, Human
caaguauaauagccggccacugcucugcucac

SEQ ID NO: 343553 - RNA, 32 nt, Human
caaguauagguugcacugauccugaccuuuug

SEQ ID NO: 343554 - RNA, 32 nt, Human
caaguaucaguguguggcagagcuguggcgga

SEQ ID NO: 343555 - RNA, 32 nt, Human
caaguaucuaauacuagagcauugguucugac

SEQ ID NO: 343556 - RNA, 23 nt, Human
caaguaucugggacuacaggcau

SEQ ID NO: 343557 - RNA, 32 nt, Human
caaguaucuguucauauuuccaauugucuccu

SEQ ID NO: 343558 - RNA, 24 nt, Human
caaguaugaccagaagccaggaca

SEQ ID NO: 343559 - RNA, 32 nt, Human
caaguauggacucaugagcuauuguugguugc

SEQ ID NO: 343560 - RNA, 32 nt, Human
caaguauggcuccuccauaucucccucuuccc

SEQ ID NO: 343561 - RNA, 32 nt, Human
caaguaugggcaggaggcauggggcagggugg

SEQ ID NO: 343562 - RNA, 31 nt, Human
caaguauguauucagcaccuguugcaguaug

SEQ ID NO: 343563 - RNA, 22 nt, Human
caaguaugugggacuacaggua

SEQ ID NO: 343564 - RNA, 32 nt, Human
caaguauuacuuuuugggcaaaacuacucauu

SEQ ID NO: 343565 - RNA, 32 nt, Human
caaguauucauuucaugauguaaagaaacuga

SEQ ID NO: 343566 - RNA, 32 nt, Human
caaguauuccaugagccacauagcccagauac

SEQ ID NO: 343567 - RNA, 32 nt, Human
caagucaaacaugguccaaucuuggcaauuuc

SEQ ID NO: 343568 - RNA, 32 nt, Human
caagucaacauggugaaaccucaucucugcua

SEQ ID NO: 343569 - RNA, 32 nt, Human
caagucaaccucucuguucaggcacagaucug

SEQ ID NO: 343570 - RNA, 32 nt, Human
caagucaagaauugagguuugggaaccuccac

SEQ ID NO: 343571 - RNA, 32 nt, Human
caagucaauucagguuccggugccauccgcag

SEQ ID NO: 343572 - RNA, 32 nt, Human
caagucacacaaaacucaaaaacuguauuaaa

SEQ ID NO: 343573 - RNA, 32 nt, Human
caagucacagagagacagagaggaggggacga

SEQ ID NO: 343574 - RNA, 32 nt, Human
caagucacagcuaaacuuacuaauucugauuu

SEQ ID NO: 343575 - RNA, 32 nt, Human
caagucacaggagauuauaugcaccaaugaca

SEQ ID NO: 343576 - RNA, 32 nt, Human
caagucacauuacauuugucauguuccaaagu

SEQ ID NO: 343577 - RNA, 32 nt, Human
caagucaccacacuccagccugggugacagag

SEQ ID NO: 343578 - RNA, 32 nt, Human
caagucacguaauguuuuugugccucaacaau

SEQ ID NO: 343579 - RNA, 22 nt, Human
caagucacucaguuuuauuuua

SEQ ID NO: 343580 - RNA, 32 nt, Human
caagucagaacccaggguucauccugagcugg

SEQ ID NO: 343581 - RNA, 32 nt, Human
caagucagaauagaaguguccuuuauauuacc

SEQ ID NO: 343582 - RNA, 32 nt, Human
caagucagagacugcagaaccagguaggcaga

SEQ ID NO: 343583 - RNA, 32 nt, Human
caagucagccuccaccugcuuuuccugggucc

SEQ ID NO: 343584 - RNA, 32 nt, Human
caagucagccuccucccuccaugccucucugg

SEQ ID NO: 343585 - RNA, 32 nt, Human
caagucagcguaaaccucuuugccuuucucuc

SEQ ID NO: 343586 - RNA, 32 nt, Human
caagucaggaauagaaacugaugagcugauug

SEQ ID NO: 343587 - RNA, 32 nt, Human
caagucaggagacacuguucccaaagccuuga

SEQ ID NO: 343588 - RNA, 22 nt, Human
caagucagggaccacuugcuga

SEQ ID NO: 343589 - RNA, 32 nt, Human
caagucagggagcagggcuggccgcaggaacu

SEQ ID NO: 343590 - RNA, 32 nt, Human
caagucagggcuaaauaugacagaucacaaug

SEQ ID NO: 343591 - RNA, 32 nt, Human
caagucaggucugagggaacccaucggcuucu

SEQ ID NO: 343592 - RNA, 32 nt, Human
caagucaucaaaccacuucaggucucaguuuu

SEQ ID NO: 343593 - RNA, 32 nt, Human
caagucaucaguuucauguggagaacucagug

SEQ ID NO: 343594 - RNA, 20 nt, Human
caagucauccucccaccuca

SEQ ID NO: 343595 - RNA, 32 nt, Human
caagucaucguuugugaucuggacccgcggug

SEQ ID NO: 343596 - RNA, 32 nt, Human
caagucauuuggaaccugccgagugagcacug

SEQ ID NO: 343597 - RNA, 22 nt, Human
caaguccaaccugggcagcacg

SEQ ID NO: 343598 - RNA, 32 nt, Human
caaguccaagaaaagagggagggguggcagag

SEQ ID NO: 343599 - RNA, 32 nt, Human
caaguccaagcuaccauacuccugccugagcu

SEQ ID NO: 343600 - RNA, 20 nt, Human
caaguccaaguaucaucuua

SEQ ID NO: 343601 - RNA, 22 nt, Human
caaguccaauagcacucacuua

SEQ ID NO: 343602 - RNA, 32 nt, Human
caaguccacugaggcccggaccccggacugcg

SEQ ID NO: 343603 - RNA, 32 nt, Human
caaguccagcaaccugcacuccagccugggug

SEQ ID NO: 343604 - RNA, 23 nt, Human
caaguccagccugggcuacauag

SEQ ID NO: 343605 - RNA, 21 nt, Human
caaguccagcucaggcccagg

SEQ ID NO: 343606 - RNA, 21 nt, Human
caaguccagcugcaacccaga

SEQ ID NO: 343607 - RNA, 32 nt, Human
caaguccaggagagagacacggaucccgccac

SEQ ID NO: 343608 - RNA, 32 nt, Human
caaguccaggcagagcggcgcaggcagcugug

SEQ ID NO: 343609 - RNA, 20 nt, Human
caaguccagggcucauuuug

SEQ ID NO: 343610 - RNA, 32 nt, Human
caaguccagucaauuuuacaugauauccuaca

SEQ ID NO: 343611 - RNA, 30 nt, Human
caaguccaguuugcuguagaaagaccaguc

SEQ ID NO: 343612 - RNA, 32 nt, Human
caagucccaaaaacuaagggacagcuaagaag

SEQ ID NO: 343613 - RNA, 32 nt, Human
caagucccaggcccaaugccuaagagaccaga

SEQ ID NO: 343614 - RNA, 32 nt, Human
caaguccccaaacuaccucuuguuacaguagc

SEQ ID NO: 343615 - RNA, 32 nt, Human
caaguccccacuccacgcauccuuccucacca

SEQ ID NO: 343616 - RNA, 32 nt, Human
caaguccccagcccagggccagagcgacagcc

SEQ ID NO: 343617 - RNA, 32 nt, Human
caaguccccaggaaacccaaucaugagguccu

SEQ ID NO: 343618 - RNA, 32 nt, Human
caaguccccugccuggucccccacaaggacuc

SEQ ID NO: 343619 - RNA, 32 nt, Human
caagucccuaggcugcacacacaugucagggg

SEQ ID NO: 343620 - RNA, 32 nt, Human
caagucccuauuuggcuaccuacuucucuaca

SEQ ID NO: 343621 - RNA, 32 nt, Human
caagucccugcagugagcacuagggacagucu

SEQ ID NO: 343622 - RNA, 32 nt, Human
caagucccugcucugggcugggugaucuuaga

SEQ ID NO: 343623 - RNA, 32 nt, Human
caaguccuaacuuuucaauuguaaauguuauu

SEQ ID NO: 343624 - RNA, 20 nt, Human
caaguccuacagucaucuua

SEQ ID NO: 343625 - RNA, 32 nt, Human
caaguccucacaccccugucaucccaggagau

SEQ ID NO: 343626 - RNA, 32 nt, Human
caaguccuccauccugcuggacuucaagccuu

SEQ ID NO: 343627 - RNA, 32 nt, Human
caaguccugcagccucagcaugcgcuggccgg

SEQ ID NO: 343628 - RNA, 32 nt, Human
caaguccuggaggcagggagaucacugccugc

SEQ ID NO: 343629 - RNA, 20 nt, Human
caaguccuggcuacauccca

SEQ ID NO: 343630 - RNA, 32 nt, Human
caaguccugugcaauagccccaggauuggauu

SEQ ID NO: 343631 - RNA, 32 nt, Human
caaguccugugugugcacgugugugcaagugc

SEQ ID NO: 343632 - RNA, 32 nt, Human
caaguccuuccaauuauauuucccaaguauau

SEQ ID NO: 343633 - RNA, 32 nt, Human
caaguccuuccucuuggcgcauucccacacuc

SEQ ID NO: 343634 - RNA, 32 nt, Human
caagucgacaucaccauguguuacuggccugg

SEQ ID NO: 343635 - RNA, 20 nt, Human
caagucgcguggguuggaga

SEQ ID NO: 343636 - RNA, 32 nt, Human
caagucgcugggauaugaaauuagggaauaaa

SEQ ID NO: 343637 - RNA, 32 nt, Human
caagucggaacagcagauaacaaugcagcaag

SEQ ID NO: 343638 - RNA, 32 nt, Human
caagucggaggcaggggcuagggguggaggcc

SEQ ID NO: 343639 - RNA, 32 nt, Human
caagucggaugguggcagggaggagagcaaga

SEQ ID NO: 343640 - RNA, 30 nt, Human
caagucggccucuccaugcccagccuccug

SEQ ID NO: 343641 - RNA, 32 nt, Human
caagucggccuggaagugggccuggaagagca

SEQ ID NO: 343642 - RNA, 32 nt, Human
caagucggccuggaauuaggccuggaagagca

SEQ ID NO: 343643 - RNA, 25 nt, Human
caagucguggccuggggaacacaga

SEQ ID NO: 343644 - RNA, 32 nt, Human
caagucuagaaaccaguauggaagggaggggu

SEQ ID NO: 343645 - RNA, 32 nt, Human
caagucuagagucucagaaacuccccuggggg

SEQ ID NO: 343646 - RNA, 32 nt, Human
caagucuaugugaaauuggguagguguggaau

SEQ ID NO: 343647 - RNA, 32 nt, Human
caagucucaaagauaaccuaccuuuacauucu

SEQ ID NO: 343648 - RNA, 32 nt, Human
caagucucaggcggaggagaaaaagagaucgg

SEQ ID NO: 343649 - RNA, 20 nt, Human
caagucucccacaggccaug

SEQ ID NO: 343650 - RNA, 18 nt, Human
caagucucccacucaucu

SEQ ID NO: 343651 - RNA, 32 nt, Human
caagucucccgccucacaccugccucggcggg

SEQ ID NO: 343652 - RNA, 32 nt, Human
caagucucccuuucccugucuggcuucucccu

SEQ ID NO: 343653 - RNA, 32 nt, Human
caagucuccuccuuccugccagccucuuucuc

SEQ ID NO: 343654 - RNA, 32 nt, Human
caagucuccugccucagccuccgaguagcugg

SEQ ID NO: 343655 - RNA, 32 nt, Human
caagucuccuguccuccuccuggagcagcaga

SEQ ID NO: 343656 - RNA, 20 nt, Human
caagucucgcuccucauuuu

SEQ ID NO: 343657 - RNA, 18 nt, Human
caagucucgucuggcaaa

SEQ ID NO: 343658 - RNA, 21 nt, Human
caagucucuauacaaugucuu

SEQ ID NO: 343659 - RNA, 19 nt, Human
caagucucuauccauguua

SEQ ID NO: 343660 - RNA, 32 nt, Human
caagucucuccucgagugcugggcuauuccgg

SEQ ID NO: 343661 - RNA, 32 nt, Human
caagucucugaggugaccucaggguggaauuc

SEQ ID NO: 343662 - RNA, 32 nt, Human
caagucucugauuucagaagagacuguuaaaa

SEQ ID NO: 343663 - RNA, 22 nt, Human
caagucucugggcuauuuuuua

SEQ ID NO: 343664 - RNA, 32 nt, Human
caagucucugggggaggaguuggggcucugca

SEQ ID NO: 343665 - RNA, 21 nt, Human
caagucucugguacucaggcu

SEQ ID NO: 343666 - RNA, 32 nt, Human
caagucucuguuuccuuuuuguguuuuguugc

SEQ ID NO: 343667 - RNA, 19 nt, Human
caagucucuucuagucuua

SEQ ID NO: 343668 - RNA, 19 nt, Human
caagucucuuucucuuuua

SEQ ID NO: 343669 - RNA, 22 nt, Human
caagucugagcuauuucuucca

SEQ ID NO: 343670 - RNA, 18 nt, Human
caagucugagcuggcaga

SEQ ID NO: 343671 - RNA, 32 nt, Human
caagucugagucuaacaguuuuuggcuuagau

SEQ ID NO: 343672 - RNA, 32 nt, Human
caagucugauuccacuucaugccaucuauuug

SEQ ID NO: 343673 - RNA, 32 nt, Human
caagucugccauaaucuccaucuguguuggaa

SEQ ID NO: 343674 - RNA, 32 nt, Human
caagucugcccuaggcaggagugccuagugca

SEQ ID NO: 343675 - RNA, 32 nt, Human
caagucugccuggcugccucuuaggauaugac

SEQ ID NO: 343676 - RNA, 32 nt, Human
caagucugggagggcaugggagcagugagcag

SEQ ID NO: 343677 - RNA, 21 nt, Human
caagucugggcugcuuaucuu

SEQ ID NO: 343678 - RNA, 22 nt, Human
caagucuguaaucccagcacuu

SEQ ID NO: 343679 - RNA, 32 nt, Human
caagucuguccuuuucuuguggucuacuauaa

SEQ ID NO: 343680 - RNA, 32 nt, Human
caagucuguggcuuggugagucuguguggcca

SEQ ID NO: 343681 - RNA, 32 nt, Human
caagucuguggggcaagaggcugcaauauucc

SEQ ID NO: 343682 - RNA, 21 nt, Human
caagucuuauacucacucuug

SEQ ID NO: 343683 - RNA, 32 nt, Human
caagucuuauuuccucaacguugcuccccauc

SEQ ID NO: 343684 - RNA, 30 nt, Human
caagucuucaauaaagacucuugaauauug

SEQ ID NO: 343685 - RNA, 32 nt, Human
caagucuuccccucagccucuggaguagcugg

SEQ ID NO: 343686 - RNA, 23 nt, Human
caagucuuggccgggaacacaga

SEQ ID NO: 343687 - RNA, 20 nt, Human
caagucuuguagucauuuug

SEQ ID NO: 343688 - RNA, 19 nt, Human
caagucuuuaaauuucuug

SEQ ID NO: 343689 - RNA, 20 nt, Human
caagucuuuguaaaauuuua

SEQ ID NO: 343690 - RNA, 21 nt, Human
caagucuuuuuggcaaucuug

SEQ ID NO: 343691 - RNA, 32 nt, Human
caagugaaaaguguuaaauuucaagcaucuga

SEQ ID NO: 343692 - RNA, 32 nt, Human
caagugaaaccagcuuccuucaucucuaaggc

SEQ ID NO: 343693 - RNA, 32 nt, Human
caagugaaagacagagugaugcugucaaugaa

SEQ ID NO: 343694 - RNA, 32 nt, Human
caagugaagacaagggcuuuuuaugcaaguuu

SEQ ID NO: 343695 - RNA, 32 nt, Human
caagugaaguugcaaucuccuccaucacagcu

SEQ ID NO: 343696 - RNA, 32 nt, Human
caagugaaugccugcccugccgcuagccccac

SEQ ID NO: 343697 - RNA, 23 nt, Human
caagugacaaaaagaucuucuca

SEQ ID NO: 343698 - RNA, 32 nt, Human
caagugacaauauugguguagauuuguacuua

SEQ ID NO: 343699 - RNA, 32 nt, Human
caagugacauuccucaagucaccagagagaau

SEQ ID NO: 343700 - RNA, 32 nt, Human
caagugacauuugcagagaaacagguguacag

SEQ ID NO: 343701 - RNA, 32 nt, Human
caagugacccugacagugcugcaccugucaua

SEQ ID NO: 343702 - RNA, 32 nt, Human
caagugaccuucagagcagcugccacaacugg

SEQ ID NO: 343703 - RNA, 32 nt, Human
caagugacggccuccugguuccucucaguuca

SEQ ID NO: 343704 - RNA, 32 nt, Human
caagugacugacacagguggucuaaaaauuac

SEQ ID NO: 343705 - RNA, 32 nt, Human
caagugacugugugugggguuugacaacugug

SEQ ID NO: 343706 - RNA, 32 nt, Human
caagugagaacaugugguauuuacuuuuguuc

SEQ ID NO: 343707 - RNA, 32 nt, Human
caagugagagcaucugcaaaaugcaaagagaa

SEQ ID NO: 343708 - RNA, 32 nt, Human
caagugagcccaagccuuucguccuugacacu

SEQ ID NO: 343709 - RNA, 22 nt, Human
caagugaggaaagugaucuaga

SEQ ID NO: 343710 - RNA, 32 nt, Human
caagugaggugcuggagccacauucaaaugug

SEQ ID NO: 343711 - RNA, 32 nt, Human
caagugagucucggcuggagugcaguggugca

SEQ ID NO: 343712 - RNA, 32 nt, Human
caagugagugaggaggaggaggaggagaagga

SEQ ID NO: 343713 - RNA, 32 nt, Human
caagugauaaccagacccaucucuccuccacc

SEQ ID NO: 343714 - RNA, 32 nt, Human
caagugauaccccacccccaucugggagguaa

SEQ ID NO: 343715 - RNA, 32 nt, Human
caagugaucagacuuugagugacaucaagaaa

SEQ ID NO: 343716 - RNA, 32 nt, Human
caagugauccacccaccucggccuccgaaagu

SEQ ID NO: 343717 - RNA, 20 nt, Human
caagugauccucccaccuca

SEQ ID NO: 343718 - RNA, 32 nt, Human
caagugauccucccaccucaaccuucggagua

SEQ ID NO: 343719 - RNA, 32 nt, Human
caagugauccucccaucucugccuugaguagc

SEQ ID NO: 343720 - RNA, 32 nt, Human
caagugauccuccugccccagccuccugaagu

SEQ ID NO: 343721 - RNA, 32 nt, Human
caagugauucuccagccucagccuccugagua

SEQ ID NO: 343722 - RNA, 18 nt, Human
caagugauucuccugccu

SEQ ID NO: 343723 - RNA, 32 nt, Human
caagugauucuccugccucugccuccugagua

SEQ ID NO: 343724 - RNA, 32 nt, Human
caagugcaacccaggcagccacggcuguuucg

SEQ ID NO: 343725 - RNA, 19 nt, Human
caagugcaagcuuggcaaa

SEQ ID NO: 343726 - RNA, 32 nt, Human
caagugcaaguguuugccauuuuguaaaacau

SEQ ID NO: 343727 - RNA, 32 nt, Human
caagugcacugaggaccugucaggcccagggg

SEQ ID NO: 343728 - RNA, 32 nt, Human
caagugcagcaacccagcccauggagauugcc

SEQ ID NO: 343729 - RNA, 32 nt, Human
caagugcagugucgugagcauguacagaggga

SEQ ID NO: 343730 - RNA, 32 nt, Human
caagugcaugagaggacagagagagaagggaa

SEQ ID NO: 343731 - RNA, 32 nt, Human
caagugccaggguugggcugagcugcuaugac

SEQ ID NO: 343732 - RNA, 32 nt, Human
caagugcccagccuguggagagacccugcaag

SEQ ID NO: 343733 - RNA, 32 nt, Human
caagugccccacagggaccccagccugggugg

SEQ ID NO: 343734 - RNA, 32 nt, Human
caagugcccccaggacuccugggcccugcuuc

SEQ ID NO: 343735 - RNA, 32 nt, Human
caagugccgacuccugaauuuucccauggugu

SEQ ID NO: 343736 - RNA, 32 nt, Human
caagugccgucgccgcgccccuucccccuccc

SEQ ID NO: 343737 - RNA, 31 nt, Human
caagugccucagugugcccuguugaaacuua

SEQ ID NO: 343738 - RNA, 32 nt, Human
caagugccugagagcaacuacaggacuaacug

SEQ ID NO: 343739 - RNA, 32 nt, Human
caagugccugugucccuguccuucaggcccau

SEQ ID NO: 343740 - RNA, 32 nt, Human
caagugcgaauggggagguggggcaggaggag

SEQ ID NO: 343741 - RNA, 32 nt, Human
caagugcgcacacacaccgauguacacacaca

SEQ ID NO: 343742 - RNA, 32 nt, Human
caagugcgcauugaguaaaacccggcccgccu

SEQ ID NO: 343743 - RNA, 31 nt, Human
caagugcuauuucagcaacaaccaucucauc

SEQ ID NO: 343744 - RNA, 31 nt, Human
caagugcucaauaaaugcuugcugauugacu

SEQ ID NO: 343745 - RNA, 32 nt, Human
caagugcuccacugaggcuuccguaacaccuc

SEQ ID NO: 343746 - RNA, 32 nt, Human
caagugcucccuauccaguccaaaggacccuc

SEQ ID NO: 343747 - RNA, 32 nt, Human
caagugcucucauaguucuauccucuaauucc

SEQ ID NO: 343748 - RNA, 32 nt, Human
caagugcucugccagccccuguucauccaagu

SEQ ID NO: 343749 - RNA, 32 nt, Human
caagugcucuguaaucacaggcagugguuuuc

SEQ ID NO: 343750 - RNA, 32 nt, Human
caagugcugaagaugaaauggaagagaaccgu

SEQ ID NO: 343751 - RNA, 32 nt, Human
caagugcugcauggaaaggcaauaucucuggu

SEQ ID NO: 343752 - RNA, 32 nt, Human
caagugcuggggcucauggugcucugagcugg

SEQ ID NO: 343753 - RNA, 32 nt, Human
caagugcugggucaagugucucaucauacugg

SEQ ID NO: 343754 - RNA, 32 nt, Human
caagugcuucacuuccaaauggagguucaugu

SEQ ID NO: 343755 - RNA, 32 nt, Human
caagugcuuccaggaacucagccugcacagag

SEQ ID NO: 343756 - RNA, 32 nt, Human
caagugcuucccagcccagaacagggguggau

SEQ ID NO: 343757 - RNA, 23 nt, Human
caaguggaaagccauucaucuua

SEQ ID NO: 343758 - RNA, 32 nt, Human
caaguggaagagaagaacuugaacccaggucc

SEQ ID NO: 343759 - RNA, 32 nt, Human
caaguggaaguuggaagaaccaguucuggagc

SEQ ID NO: 343760 - RNA, 32 nt, Human
caaguggacacauggcugugcaggccaggagg

SEQ ID NO: 343761 - RNA, 32 nt, Human
caaguggagacagugaagucaccccguguccu

SEQ ID NO: 343762 - RNA, 32 nt, Human
caaguggagaggguuaguuggcaguuaguucu

SEQ ID NO: 343763 - RNA, 32 nt, Human
caaguggagcuuuugcugauguguuccugacc

SEQ ID NO: 343764 - RNA, 32 nt, Human
caaguggaggcggaggaggaggcggaggaggg

SEQ ID NO: 343765 - RNA, 32 nt, Human
caaguggauaagaggagcggccugcaaccaug

SEQ ID NO: 343766 - RNA, 32 nt, Human
caaguggaugugucauauauugccaaacauua

SEQ ID NO: 343767 - RNA, 32 nt, Human
caaguggcauaacccauggauuuucuaaaggu

SEQ ID NO: 343768 - RNA, 32 nt, Human
caaguggcauuuucaucucgcuuucacccuga

SEQ ID NO: 343769 - RNA, 32 nt, Human
caaguggccaaagguggccuggguuuaauacu

SEQ ID NO: 343770 - RNA, 32 nt, Human
caaguggccaagauaaaguagaaaaaugcaca

SEQ ID NO: 343771 - RNA, 32 nt, Human
caaguggccaggaauucuccuccugcaccggg

SEQ ID NO: 343772 - RNA, 32 nt, Human
caaguggcucaagggauccuuuaugaucacag

SEQ ID NO: 343773 - RNA, 32 nt, Human
caaguggcucacaaccuccucagggcaccaga

SEQ ID NO: 343774 - RNA, 32 nt, Human
caaguggcugaucugaagaacucucuggggag

SEQ ID NO: 343775 - RNA, 23 nt, Human
caaguggcugggacugcaggcau

SEQ ID NO: 343776 - RNA, 22 nt, Human
caaguggcugggauuacaggcg

SEQ ID NO: 343777 - RNA, 23 nt, Human
caaguggcugggauugcaggcau

SEQ ID NO: 343778 - RNA, 32 nt, Human
caaguggcuguucugggaccauggaagccugg

SEQ ID NO: 343779 - RNA, 32 nt, Human
caagugggaggcaagcacaaguacaaaggcau

SEQ ID NO: 343780 - RNA, 32 nt, Human
caagugggaggcacagcgcagccgggaguugc

SEQ ID NO: 343781 - RNA, 32 nt, Human
caagugggaguuaagagaggucuggaaagugu

SEQ ID NO: 343782 - RNA, 32 nt, Human
caagugggcgguguccauuaaagagcagacuc

SEQ ID NO: 343783 - RNA, 32 nt, Human
caagugggcugcacuccuuucucuccaaccag

SEQ ID NO: 343784 - RNA, 32 nt, Human
caaguggggaggcaggugacagggacuccgag

SEQ ID NO: 343785 - RNA, 32 nt, Human
caagugggggcagagggcagaggcuggaggca

SEQ ID NO: 343786 - RNA, 32 nt, Human
caagugggggcugaggcagaggcagggauagc

SEQ ID NO: 343787 - RNA, 32 nt, Human
caaguggucccuggaccucucuugcauccauu

SEQ ID NO: 343788 - RNA, 32 nt, Human
caaguggucuucuacccugucuucuauguuug

SEQ ID NO: 343789 - RNA, 32 nt, Human
caaguggugugugcggcgguucaugccuguaa

SEQ ID NO: 343790 - RNA, 32 nt, Human
caagugguuaggacagugccuggcacauagua

SEQ ID NO: 343791 - RNA, 32 nt, Human
caaguguaacaucacaucuuggguacuucacc

SEQ ID NO: 343792 - RNA, 32 nt, Human
caaguguacagccacagcaaggagcccgacac

SEQ ID NO: 343793 - RNA, 32 nt, Human
caaguguaccucugcacucaaugcuggaauca

SEQ ID NO: 343794 - RNA, 32 nt, Human
caaguguacuugguuuaugcugugaaggaauu

SEQ ID NO: 343795 - RNA, 32 nt, Human
caaguguaguauccugaacuucucccauuaau

SEQ ID NO: 343796 - RNA, 32 nt, Human
caaguguaugggauuaacuaaucauugaaggc

SEQ ID NO: 343797 - RNA, 21 nt, Human
caagugucaugguuuaucuua

SEQ ID NO: 343798 - RNA, 32 nt, Human
caagugucccucuguacccacacccacccacu

SEQ ID NO: 343799 - RNA, 32 nt, Human
caagugucccuuuauauuuaaauuugaaaguu

SEQ ID NO: 343800 - RNA, 23 nt, Human
caaguguccggcuccagcaacuc

SEQ ID NO: 343801 - RNA, 32 nt, Human
caaguguccucccacuugagugccaccacgcc

SEQ ID NO: 343802 - RNA, 32 nt, Human
caaguguccuggacccuggccuaaagaauccc

SEQ ID NO: 343803 - RNA, 32 nt, Human
caagugucuaacuucugugccuguuaaucaug

SEQ ID NO: 343804 - RNA, 32 nt, Human
caagugucuccaggaacuggacguuggggcca

SEQ ID NO: 343805 - RNA, 29 nt, Human
caagugucucugugugugggugggugagg

SEQ ID NO: 343806 - RNA, 32 nt, Human
caagugucugggcuccuggcccagggguccgu

SEQ ID NO: 343807 - RNA, 32 nt, Human
caagugugaaaccucuggauccuauggauuug

SEQ ID NO: 343808 - RNA, 32 nt, Human
caagugugacauccuucagcacccagggacaa

SEQ ID NO: 343809 - RNA, 32 nt, Human
caagugugacuccacucaaguguccuuuucug

SEQ ID NO: 343810 - RNA, 32 nt, Human
caagugugagagaacugagcggggccuggaaa

SEQ ID NO: 343811 - RNA, 32 nt, Human
caagugugagccaccacacccagccuaaugua

SEQ ID NO: 343812 - RNA, 32 nt, Human
caagugugagccaccacaccuggccuggaagg

SEQ ID NO: 343813 - RNA, 32 nt, Human
caagugugagccaccacaccuggcuccagaaa

SEQ ID NO: 343814 - RNA, 32 nt, Human
caagugugagccaccacgccaagccugacuuu

SEQ ID NO: 343815 - RNA, 32 nt, Human
caagugugagccaccgcgccuggcccaagccc

SEQ ID NO: 343816 - RNA, 32 nt, Human
caagugugagccacugugccaggcacaauggu

SEQ ID NO: 343817 - RNA, 32 nt, Human
caagugugagccuauuguguuacuugaccuua

SEQ ID NO: 343818 - RNA, 32 nt, Human
caagugugagcugcggcugagcccagcgcucg

SEQ ID NO: 343819 - RNA, 32 nt, Human
caagugugagggcugaaagaaugccccagucu

SEQ ID NO: 343820 - RNA, 32 nt, Human
caagugugcaccaccaugccuggcuaauuuuu

SEQ ID NO: 343821 - RNA, 32 nt, Human
caagugugcacuccagcuucggaggcccugcg

SEQ ID NO: 343822 - RNA, 32 nt, Human
caagugugggcaacacagcaagaccccaucuc

SEQ ID NO: 343823 - RNA, 32 nt, Human
caaguguguaccaccaugccuggcugaacacu

SEQ ID NO: 343824 - RNA, 31 nt, Human
caaguguguggacgaaagaaagacugauggc

SEQ ID NO: 343825 - RNA, 32 nt, Human
caaguguucauaaugacuuuccaauuggcccu

SEQ ID NO: 343826 - RNA, 32 nt, Human
caaguguuccugcugccaguucuuuccucuuu

SEQ ID NO: 343827 - RNA, 32 nt, Human
caaguguuucaaggagcaaguagcuaagugug

SEQ ID NO: 343828 - RNA, 32 nt, Human
caaguuaaguguuuccuucccucucucaauaa

SEQ ID NO: 343829 - RNA, 32 nt, Human
caaguuaauaacaucaccuacucuccacuaau

SEQ ID NO: 343830 - RNA, 32 nt, Human
caaguuacccccagaggaucagagagggguug

SEQ ID NO: 343831 - RNA, 32 nt, Human
caaguuaccucaccuaauuuuugcuucucagg

SEQ ID NO: 343832 - RNA, 32 nt, Human
caaguuacgggagagucggcugugaaggagac

SEQ ID NO: 343833 - RNA, 32 nt, Human
caaguuaggaagcagaggaucagagaugggaa

SEQ ID NO: 343834 - RNA, 32 nt, Human
caaguuaucgagcuccuccucauguuucaaca

SEQ ID NO: 343835 - RNA, 32 nt, Human
caaguuaucuuucuguuccacacacaccuuau

SEQ ID NO: 343836 - RNA, 32 nt, Human
caaguuaugaggaaaagagggcugagggccug

SEQ ID NO: 343837 - RNA, 32 nt, Human
caaguuauuucuccuucucucugcuucaugca

SEQ ID NO: 343838 - RNA, 32 nt, Human
caaguucaagccaagagacuagcagagaaggu

SEQ ID NO: 343839 - RNA, 32 nt, Human
caaguucacaccacugccauuuccuccugggc

SEQ ID NO: 343840 - RNA, 32 nt, Human
caaguucacaccauucuccugccucagccucc

SEQ ID NO: 343841 - RNA, 32 nt, Human
caaguucagccgccaccggcacggccaggcca

SEQ ID NO: 343842 - RNA, 32 nt, Human
caaguucaggaggucaagaccauccuggcuaa

SEQ ID NO: 343843 - RNA, 32 nt, Human
caaguucagguggaacuuggccgacugaugcu

SEQ ID NO: 343844 - RNA, 32 nt, Human
caaguucaugccauucuccugccucagccucc

SEQ ID NO: 343845 - RNA, 32 nt, Human
caaguucauguaucuucugaauucuauccgug

SEQ ID NO: 343846 - RNA, 32 nt, Human
caaguuccacaggucugcuaccacaggccauc

SEQ ID NO: 343847 - RNA, 32 nt, Human
caaguuccacucccgcuuuccccacacauuac

SEQ ID NO: 343848 - RNA, 32 nt, Human
caaguuccaguaaaccacaaguauggcaaagc

SEQ ID NO: 343849 - RNA, 32 nt, Human
caaguuccaguaggugggacagugaugccguc

SEQ ID NO: 343850 - RNA, 32 nt, Human
caaguuccaguaugggaauuauugcaaauacu

SEQ ID NO: 343851 - RNA, 32 nt, Human
caaguucccaggugaugcugugcugcuugucc

SEQ ID NO: 343852 - RNA, 32 nt, Human
caaguucccuccaccuucuguauuuauacgcu

SEQ ID NO: 343853 - RNA, 32 nt, Human
caaguucccuucuccuuucucucccccggcgg

SEQ ID NO: 343854 - RNA, 32 nt, Human
caaguuccgccaggcccugccccaucgccagu

SEQ ID NO: 343855 - RNA, 32 nt, Human
caaguuccuccagcaaagcccagaacagaguu

SEQ ID NO: 343856 - RNA, 32 nt, Human
caaguuccucggagaucugccucugccucacc

SEQ ID NO: 343857 - RNA, 32 nt, Human
caaguucgaccagcuucuuugugccucuuuuc

SEQ ID NO: 343858 - RNA, 32 nt, Human
caaguucgccuuggcccugccuccagcucagg

SEQ ID NO: 343859 - RNA, 32 nt, Human
caaguucggcagugggagaguugaccguguca

SEQ ID NO: 343860 - RNA, 32 nt, Human
caaguucuacagccguucagugcugaguuguu

SEQ ID NO: 343861 - RNA, 32 nt, Human
caaguucuacagccuguagcccuggcccuucu

SEQ ID NO: 343862 - RNA, 32 nt, Human
caaguucuaggguacauguccacaaugcacau

SEQ ID NO: 343863 - RNA, 24 nt, Human
caaguucuauuucuugaagaauaa

SEQ ID NO: 343864 - RNA, 32 nt, Human
caaguucuauuuucucuacuucccaagggggu

SEQ ID NO: 343865 - RNA, 32 nt, Human
caaguucucccaggaaccccaguuggggaagg

SEQ ID NO: 343866 - RNA, 32 nt, Human
caaguugagcucugguaacugaucuuaauagc

SEQ ID NO: 343867 - RNA, 32 nt, Human
caaguugaggcugaacccggguacagucgcaa

SEQ ID NO: 343868 - RNA, 32 nt, Human
caaguugagggcugggucacaaaagugaguuc

SEQ ID NO: 343869 - RNA, 32 nt, Human
caaguugagggucucugguggggaaggacagg

SEQ ID NO: 343870 - RNA, 20 nt, Human
caaguugauguggauccuga

SEQ ID NO: 343871 - RNA, 32 nt, Human
caaguugcaacugaccuugaacugaaucacuc

SEQ ID NO: 343872 - RNA, 32 nt, Human
caaguugcaguuuaagguggucucagccaauu

SEQ ID NO: 343873 - RNA, 32 nt, Human
caaguugccaacaccugugggacccaggugag

SEQ ID NO: 343874 - RNA, 32 nt, Human
caaguugcccugcuaggcaguuguaaucuggc

SEQ ID NO: 343875 - RNA, 19 nt, Human
caaguugccggcuggcaaa

SEQ ID NO: 343876 - RNA, 32 nt, Human
caaguugcugcugagagaagaccugaguucag

SEQ ID NO: 343877 - RNA, 32 nt, Human
caaguugcugucuccccuucccucaccuccuc

SEQ ID NO: 343878 - RNA, 32 nt, Human
caaguuggaagguuguggauuuacaggaauga

SEQ ID NO: 343879 - RNA, 32 nt, Human
caaguuggagaaaaugugccuuucauucauua

SEQ ID NO: 343880 - RNA, 32 nt, Human
caaguuggagugaugcagccggaagggaaggg

SEQ ID NO: 343881 - RNA, 32 nt, Human
caaguuggcaaaauagacuguucacagaaacu

SEQ ID NO: 343882 - RNA, 32 nt, Human
caaguuggcaguugccuggugaucgagaaaga

SEQ ID NO: 343883 - RNA, 32 nt, Human
caaguugggaggcugaggcgggcagaucaucu

SEQ ID NO: 343884 - RNA, 32 nt, Human
caaguugggcccugaccuuucuguugcugucu

SEQ ID NO: 343885 - RNA, 32 nt, Human
caaguuggguggaugcugggaggcaggaggcu

SEQ ID NO: 343886 - RNA, 32 nt, Human
caaguuggucucaaacuccugaccucaaguga

SEQ ID NO: 343887 - RNA, 19 nt, Human
caaguugguuuggcaguaa

SEQ ID NO: 343888 - RNA, 32 nt, Human
caaguuguacucaaagcauucaguuaaagugu

SEQ ID NO: 343889 - RNA, 32 nt, Human
caaguuguauucccuggcaaaauggacuuucu

SEQ ID NO: 343890 - RNA, 32 nt, Human
caaguuguauucuuuuaaguucuuuuauucuc

SEQ ID NO: 343891 - RNA, 32 nt, Human
caaguuguccgagcuggaggccgcccugcagc

SEQ ID NO: 343892 - RNA, 32 nt, Human
caaguugugcuuuguggggacaaucauucuuu

SEQ ID NO: 343893 - RNA, 32 nt, Human
caaguuuaaugccaccuuccucugucugccau

SEQ ID NO: 343894 - RNA, 24 nt, Human
caaguuuacuuaggcaacacaaga

SEQ ID NO: 343895 - RNA, 32 nt, Human
caaguuuagguucucauaguguauuugaagua

SEQ ID NO: 343896 - RNA, 32 nt, Human
caaguuucacaaaucccaaugcugugcauuga

SEQ ID NO: 343897 - RNA, 32 nt, Human
caaguuucacucuuguggcugaugccaucauu

SEQ ID NO: 343898 - RNA, 32 nt, Human
caaguuucacucuuguggcugaugccauuauu

SEQ ID NO: 343899 - RNA, 32 nt, Human
caaguuucaguaagguguuuuagaugaacauc

SEQ ID NO: 343900 - RNA, 32 nt, Human
caaguuuccagaaagagaauagccauauaaau

SEQ ID NO: 343901 - RNA, 22 nt, Human
caaguuuccccagcuucaucuu

SEQ ID NO: 343902 - RNA, 32 nt, Human
caaguuuccgcaggaaguuuggugcugagcug

SEQ ID NO: 343903 - RNA, 32 nt, Human
caaguuuccuagcucugugcucaguuucaguu

SEQ ID NO: 343904 - RNA, 32 nt, Human
caaguuuccugaggcccucaccagaagcucau

SEQ ID NO: 343905 - RNA, 26 nt, Human
caaguuucuaauacagaauuauuuua

SEQ ID NO: 343906 - RNA, 21 nt, Human
caaguuucuagcagauauuuu

SEQ ID NO: 343907 - RNA, 32 nt, Human
caaguuucuccucugacccaucagcucccugu

SEQ ID NO: 343908 - RNA, 32 nt, Human
caaguuucuuugaggccacuugcccccaagca

SEQ ID NO: 343909 - RNA, 32 nt, Human
caaguuugaaguuucgccgcuuuugucaacua

SEQ ID NO: 343910 - RNA, 32 nt, Human
caaguuugagccacugcaccuggcuaacuugc

SEQ ID NO: 343911 - RNA, 23 nt, Human
caaguuugcauaaccuacuuuca

SEQ ID NO: 343912 - RNA, 32 nt, Human
caaguuugcugugcucucugcagcuacaaaac

SEQ ID NO: 343913 - RNA, 32 nt, Human
caaguuugcuuugcaaaccuuauggccuugca

SEQ ID NO: 343914 - RNA, 32 nt, Human
caaguuuggaauuggaugacuugugaagaggc

SEQ ID NO: 343915 - RNA, 32 nt, Human
caaguuuggccuggccuuagcuguugcaggag

SEQ ID NO: 343916 - RNA, 32 nt, Human
caaguuuggcgauuugcugucggugccucagc

SEQ ID NO: 343917 - RNA, 32 nt, Human
caaguuugugccucacacuccagccuggguaa

SEQ ID NO: 343918 - RNA, 22 nt, Human
caaguuuuaaauacuuaucuug

SEQ ID NO: 343919 - RNA, 32 nt, Human
caaguuuuaacucagaugcaagcuuuggcucu

SEQ ID NO: 343920 - RNA, 18 nt, Human
caaguuuuagcuggcaga

SEQ ID NO: 343921 - RNA, 32 nt, Human
caaguuuucagguaaaccucagcucaggacug

SEQ ID NO: 343922 - RNA, 32 nt, Human
caaguuuuccuaggaggaagggaagacagggu

SEQ ID NO: 343923 - RNA, 32 nt, Human
caaguuuugagaugcagagcuuuuauuccucu

SEQ ID NO: 343924 - RNA, 32 nt, Human
caaguuuugggcuugcuauauaauccauuuuu

SEQ ID NO: 343925 - RNA, 22 nt, Human
caaguuuuuaaauuuacucuug

SEQ ID NO: 343926 - RNA, 20 nt, Human
caaguuuuucagacucauuu

SEQ ID NO: 343927 - RNA, 18 nt, Human
caauaaaaacaacuuuca

SEQ ID NO: 343928 - RNA, 27 nt, Human
caauaaaaacauuugaagaauuguggc

SEQ ID NO: 343929 - RNA, 32 nt, Human
caauaaaagagaaaaucuccuggagaaaaaga

SEQ ID NO: 343930 - RNA, 32 nt, Human
caauaaaccaaggucaugagcauucgagcuaa

SEQ ID NO: 343931 - RNA, 32 nt, Human
caauaaaccuaaccuuuuaacagggucuaaca

SEQ ID NO: 343932 - RNA, 32 nt, Human
caauaaagaagaaaaacuguaguuguguagcu

SEQ ID NO: 343933 - RNA, 31 nt, Human
caauaaagcaacaacaagcuucaaggaauuc

SEQ ID NO: 343934 - RNA, 32 nt, Human
caauaaagguuuauggaacagaaacaaaguca

SEQ ID NO: 343935 - RNA, 32 nt, Human
caauaaaguugcaugguaaauauuucauuaca

SEQ ID NO: 343936 - RNA, 32 nt, Human
caauaaaguuuuccucuuccucuccucguacg

SEQ ID NO: 343937 - RNA, 32 nt, Human
caauaaauacaacagaaaauugcacagucaau

SEQ ID NO: 343938 - RNA, 32 nt, Human
caauaaaugucaaaugaaacaagcucuugugu

SEQ ID NO: 343939 - RNA, 32 nt, Human
caauaaaugugaauguuggaccccaaaugauu

SEQ ID NO: 343940 - RNA, 32 nt, Human
caauaaauuccugagauacauucuuccaaucu

SEQ ID NO: 343941 - RNA, 32 nt, Human
caauaaauugccuauaugugcaaagaaagaau

SEQ ID NO: 343942 - RNA, 32 nt, Human
caauaacacccaggcugagagucaaaccaaga

SEQ ID NO: 343943 - RNA, 23 nt, Human
caauaacaccuuccaaaaaccug

SEQ ID NO: 343944 - RNA, 32 nt, Human
caauaacagcaggucacagcugcucuucugga

SEQ ID NO: 343945 - RNA, 32 nt, Human
caauaacaggagacuuccauaaguuuguguau

SEQ ID NO: 343946 - RNA, 32 nt, Human
caauaacccuguuuaaagaggaauggagauug

SEQ ID NO: 343947 - RNA, 32 nt, Human
caauaacuaguaauaccaaagacuauuucaaa

SEQ ID NO: 343948 - RNA, 32 nt, Human
caauaacuauugcacaaccaccugucccugcc

SEQ ID NO: 343949 - RNA, 32 nt, Human
caauaacucagggagcuuauagaagugaagau

SEQ ID NO: 343950 - RNA, 32 nt, Human
caauaagaaaugcuagaaagcaauagggcggg

SEQ ID NO: 343951 - RNA, 32 nt, Human
caauaagagucuccuucucuucucuucuuugg

SEQ ID NO: 343952 - RNA, 32 nt, Human
caauaagauaugcacacacagguauuuuguug

SEQ ID NO: 343953 - RNA, 32 nt, Human
caauaagauauuacuacacaccugccaaaaug

SEQ ID NO: 343954 - RNA, 32 nt, Human
caauaagcaaagaaauaaaugcaugauguaau

SEQ ID NO: 343955 - RNA, 32 nt, Human
caauaaggcacuugugggugcacuacauagau

SEQ ID NO: 343956 - RNA, 32 nt, Human
caauaagguccaggcugagguagucucagaug

SEQ ID NO: 343957 - RNA, 32 nt, Human
caauaaggugccaugaaaucaaaaucaaaggg

SEQ ID NO: 343958 - RNA, 32 nt, Human
caauaaguauauacaucugagcacagauuauu

SEQ ID NO: 343959 - RNA, 32 nt, Human
caauaauacuuuuauccaugugcucaagaaag

SEQ ID NO: 343960 - RNA, 32 nt, Human
caauaauccauucaauagaauggaauuaaaac

SEQ ID NO: 343961 - RNA, 32 nt, Human
caauaauccuguuucacuugaaugaagggagu

SEQ ID NO: 343962 - RNA, 32 nt, Human
caauaaugacuauuucaaaauugcuaaaagau

SEQ ID NO: 343963 - RNA, 32 nt, Human
caauaaugcaauacaggagcugaaagaugaaa

SEQ ID NO: 343964 - RNA, 32 nt, Human
caauaaugcuguucuaacuacagugcucaaua

SEQ ID NO: 343965 - RNA, 32 nt, Human
caauaaugguggccuguagcugcuaagagcuu

SEQ ID NO: 343966 - RNA, 32 nt, Human
caauaauuaacucuuccucucuucugauaaau

SEQ ID NO: 343967 - RNA, 32 nt, Human
caauaauugccacauuuauuguccucaaaauu

SEQ ID NO: 343968 - RNA, 32 nt, Human
caauacaaaguagcacacuguguacuuugcaa

SEQ ID NO: 343969 - RNA, 32 nt, Human
caauacaagauuccugguuaaauuugaauuuc

SEQ ID NO: 343970 - RNA, 32 nt, Human
caauacacuguaguuacugccuagccagcagc

SEQ ID NO: 343971 - RNA, 32 nt, Human
caauacagacaacuuuguggcucuccuguucu

SEQ ID NO: 343972 - RNA, 32 nt, Human
caauacagcaggacauccaggacugaccacgu

SEQ ID NO: 343973 - RNA, 31 nt, Human
caauacaggaaauguucucagaugcugaugu

SEQ ID NO: 343974 - RNA, 32 nt, Human
caauacaggccuugcccugcugaaacuucccu

SEQ ID NO: 343975 - RNA, 18 nt, Human
caauacagucacacauca

SEQ ID NO: 343976 - RNA, 32 nt, Human
caauacaugaauaugguacagcucuucauuua

SEQ ID NO: 343977 - RNA, 24 nt, Human
caauacaugagaaagaugucuaug

SEQ ID NO: 343978 - RNA, 32 nt, Human
caauacaugggaagcuuugcugaaaaaguaaa

SEQ ID NO: 343979 - RNA, 32 nt, Human
caauacauuaacagacccuuuaucaacauaaa

SEQ ID NO: 343980 - RNA, 18 nt, Human
caauacauucuguguaua

SEQ ID NO: 343981 - RNA, 32 nt, Human
caauaccacaacaacacauuuugcagagcuuu

SEQ ID NO: 343982 - RNA, 23 nt, Human
caauaccaccaccaccaccacca

SEQ ID NO: 343983 - RNA, 32 nt, Human
caauacccugcucuuuacucaaugguacccag

SEQ ID NO: 343984 - RNA, 32 nt, Human
caauacccuuuauuuaaccccuacucuguuuu

SEQ ID NO: 343985 - RNA, 32 nt, Human
caauaccgauugcaccaccaaacuccauugca

SEQ ID NO: 343986 - RNA, 32 nt, Human
caauaccuagguuaccacacaccacuuuuuga

SEQ ID NO: 343987 - RNA, 32 nt, Human
caauaccucgaauuuccaaaagaggucaccag

SEQ ID NO: 343988 - RNA, 32 nt, Human
caauaccugggaccaugcucuccugggacugu

SEQ ID NO: 343989 - RNA, 32 nt, Human
caauaccugguuuccaccuuggacugacuuug

SEQ ID NO: 343990 - RNA, 32 nt, Human
caauacgcuaggauagaccggccacacgucag

SEQ ID NO: 343991 - RNA, 32 nt, Human
caauacgugagagcaugggcaagugaggauuu

SEQ ID NO: 343992 - RNA, 32 nt, Human
caauacuccagccuggugacagagugagacuc

SEQ ID NO: 343993 - RNA, 32 nt, Human
caauacucuagccccgcucucuuccccucuuu

SEQ ID NO: 343994 - RNA, 32 nt, Human
caauacucuuuugagguagauaccagaaccau

SEQ ID NO: 343995 - RNA, 32 nt, Human
caauacugaaugucccuuucuuugccauaaaa

SEQ ID NO: 343996 - RNA, 32 nt, Human
caauacugacauccuucaugacguuuucccga

SEQ ID NO: 343997 - RNA, 32 nt, Human
caauacugcaaucacgucucacugcagccuca

SEQ ID NO: 343998 - RNA, 32 nt, Human
caauacugccgcugcccccacccugcuucugc

SEQ ID NO: 343999 - RNA, 32 nt, Human
caauacuggcuauuuucucuucucgccguagu

SEQ ID NO: 344000 - RNA, 32 nt, Human
caauacuguccgguggacaaaaugacaauuga

SEQ ID NO: 344001 - RNA, 26 nt, Human
caauacugugacuuccaaacaauguu

SEQ ID NO: 344002 - RNA, 31 nt, Human
caauacugugagagaaagacuguacuccaua

SEQ ID NO: 344003 - RNA, 32 nt, Human
caauacuuacuucaaagaacguaauuuguggc

SEQ ID NO: 344004 - RNA, 32 nt, Human
caauacuugguauccaccggguaagagugguu

SEQ ID NO: 344005 - RNA, 32 nt, Human
caauacuuugggaggccgaggugggcagauca

SEQ ID NO: 344006 - RNA, 32 nt, Human
caauacuuugggaggcugaggcaagugaagca

SEQ ID NO: 344007 - RNA, 32 nt, Human
caauacuuuuugaaauugauguacuuaguuuc

SEQ ID NO: 344008 - RNA, 32 nt, Human
caauagaaaauguagagugcuuaaacaaaaau

SEQ ID NO: 344009 - RNA, 32 nt, Human
caauagaaaucaagaaagugauggucaggcca

SEQ ID NO: 344010 - RNA, 32 nt, Human
caauagaaaugagauuugguggagucuggauu

SEQ ID NO: 344011 - RNA, 24 nt, Human
caauagaacugugccccuccucag

SEQ ID NO: 344012 - RNA, 30 nt, Human
caauagaccagccugcaagaaagacaugug

SEQ ID NO: 344013 - RNA, 32 nt, Human
caauagaguauuucaaaauggaaucaggaucu

SEQ ID NO: 344014 - RNA, 31 nt, Human
caauagaguugaccuguuauuggauuuccug

SEQ ID NO: 344015 - RNA, 32 nt, Human
caauagaucugcaaauaaugaggacugaugua

SEQ ID NO: 344016 - RNA, 32 nt, Human
caauagaucuuccucaucccccaaacccaaca

SEQ ID NO: 344017 - RNA, 32 nt, Human
caauagcaacagacauuugcuuccugguggca

SEQ ID NO: 344018 - RNA, 32 nt, Human
caauagcaaucuuggcugaugugcacagucug

SEQ ID NO: 344019 - RNA, 32 nt, Human
caauagcacagcccuuguugaggucagcaggg

SEQ ID NO: 344020 - RNA, 32 nt, Human
caauagcaugaucacgacuuacugcagccuug

SEQ ID NO: 344021 - RNA, 32 nt, Human
caauagcccaggcuggagugcaguggcagagu

SEQ ID NO: 344022 - RNA, 24 nt, Human
caauagccccaucucuccugcuca

SEQ ID NO: 344023 - RNA, 32 nt, Human
caauagcccuggaaggcaagagcuguuuccuu

SEQ ID NO: 344024 - RNA, 32 nt, Human
caauagccuccauaauccucucagccuacaga

SEQ ID NO: 344025 - RNA, 32 nt, Human
caauagcucaaaaacacuaucauuucaacaua

SEQ ID NO: 344026 - RNA, 32 nt, Human
caauagcugcuggguccuggccgccuccuccc

SEQ ID NO: 344027 - RNA, 32 nt, Human
caauagcuuagagugggacuccugaucucccu

SEQ ID NO: 344028 - RNA, 32 nt, Human
caauagcuugcgcccauuggaaggggaaacgc

SEQ ID NO: 344029 - RNA, 21 nt, Human
caauaggaaaccccaacaggu

SEQ ID NO: 344030 - RNA, 32 nt, Human
caauaggacuguuuacugcccaccuccgccug

SEQ ID NO: 344031 - RNA, 32 nt, Human
caauaggaucuuauuuaguuauuugaaucugu

SEQ ID NO: 344032 - RNA, 32 nt, Human
caauaggauggcaccuuggaaagaaaaaugaa

SEQ ID NO: 344033 - RNA, 31 nt, Human
caauaggcauucaauaaauguugaaauaaug

SEQ ID NO: 344034 - RNA, 32 nt, Human
caauaggccugggaaagucgcacuuucaucca

SEQ ID NO: 344035 - RNA, 24 nt, Human
caauaggcucagcucaugaugaca

SEQ ID NO: 344036 - RNA, 32 nt, Human
caauaggcuucuccuugugugaucucagcuuc

SEQ ID NO: 344037 - RNA, 32 nt, Human
caauagggcgcagaggagagaacuuccgaagg

SEQ ID NO: 344038 - RNA, 32 nt, Human
caauagggcuguugggacuuucuugaaaagaa

SEQ ID NO: 344039 - RNA, 32 nt, Human
caauaguaaaacacaucaggucaggggguuaa

SEQ ID NO: 344040 - RNA, 32 nt, Human
caauagugaaugcuugcaaagauguggagaag

SEQ ID NO: 344041 - RNA, 32 nt, Human
caauagugagcagcacuguggugaggucccuu

SEQ ID NO: 344042 - RNA, 32 nt, Human
caauaguggacccagaggcagugcauaaaacc

SEQ ID NO: 344043 - RNA, 32 nt, Human
caauaguucauuccuggcugggcgcgguggcu

SEQ ID NO: 344044 - RNA, 24 nt, Human
caauaguuggcuucuccccuguca

SEQ ID NO: 344045 - RNA, 32 nt, Human
caauaguuugacauuuuucccucuuuuacauu

SEQ ID NO: 344046 - RNA, 32 nt, Human
caauauaucuuagaaaaagcacaggaaacaga

SEQ ID NO: 344047 - RNA, 32 nt, Human
caauaucaaaugcuauucaucagguuucuaua

SEQ ID NO: 344048 - RNA, 32 nt, Human
caauaucauaugcauuauaugcauaauaugau

SEQ ID NO: 344049 - RNA, 32 nt, Human
caauaucauccaguaccuuaagcccugauugu

SEQ ID NO: 344050 - RNA, 32 nt, Human
caauaucaugccacugcacuccagccugggug

SEQ ID NO: 344051 - RNA, 32 nt, Human
caauaucccaguaacaugugaagagaaagacu

SEQ ID NO: 344052 - RNA, 32 nt, Human
caauauccuuuuuauaaaaauucaugucugua

SEQ ID NO: 344053 - RNA, 32 nt, Human
caauaucgcaccacugcacuccagccugggca

SEQ ID NO: 344054 - RNA, 32 nt, Human
caauaucgugccacugcauuccagccugggug

SEQ ID NO: 344055 - RNA, 32 nt, Human
caauaugaauacagggcaugcauuuugcagca

SEQ ID NO: 344056 - RNA, 32 nt, Human
caauaugaccacacuccagccaaggacaaaau

SEQ ID NO: 344057 - RNA, 32 nt, Human
caauaugcauuuaaauacagucuuccauuugc

SEQ ID NO: 344058 - RNA, 19 nt, Human
caauauggcaaaacccugu

SEQ ID NO: 344059 - RNA, 32 nt, Human
caauauguacacgucucucaaacuaugaagag

SEQ ID NO: 344060 - RNA, 32 nt, Human
caauauguauuaaccugaaaaguguucaugau

SEQ ID NO: 344061 - RNA, 32 nt, Human
caauauucaaccacaguaaaagacucagugag

SEQ ID NO: 344062 - RNA, 31 nt, Human
caauauucaauaaagcugcugagaaucuagc

SEQ ID NO: 344063 - RNA, 32 nt, Human
caauauucagcugccgcugagaagauuagacu

SEQ ID NO: 344064 - RNA, 32 nt, Human
caauauucauuugguuguggagacugauuugc

SEQ ID NO: 344065 - RNA, 32 nt, Human
caauauucccugacccuucacccccaaucacc

SEQ ID NO: 344066 - RNA, 32 nt, Human
caauauucuuuuaaccucucugcagcauuuua

SEQ ID NO: 344067 - RNA, 32 nt, Human
caauauugaaaggaggugggggauugagggag

SEQ ID NO: 344068 - RNA, 32 nt, Human
caauauugcaaucacagcucacugcagccuca

SEQ ID NO: 344069 - RNA, 32 nt, Human
caauauugcaccauugcacuccugccugggca

SEQ ID NO: 344070 - RNA, 32 nt, Human
caauauuggcugcuugcuguggcucuccccgg

SEQ ID NO: 344071 - RNA, 32 nt, Human
caauauuggugacuaccuaaaugugauuuuug

SEQ ID NO: 344072 - RNA, 23 nt, Human
caauauuguaauccuagcacuuu

SEQ ID NO: 344073 - RNA, 32 nt, Human
caauauuugauguauaacuuccccuuaauuua

SEQ ID NO: 344074 - RNA, 21 nt, Human
caauauuuuccaguaacauua

SEQ ID NO: 344075 - RNA, 32 nt, Human
caaucaaagcaguuuccggcaaaggucagcug

SEQ ID NO: 344076 - RNA, 32 nt, Human
caaucaaauguguuugugggauuuucaguccg

SEQ ID NO: 344077 - RNA, 32 nt, Human
caaucaacacccugugucuagcucaggguuug

SEQ ID NO: 344078 - RNA, 32 nt, Human
caaucaacuuucagacuugaaccuucuuagcc

SEQ ID NO: 344079 - RNA, 32 nt, Human
caaucaauaacauuaucccugccugcauacau

SEQ ID NO: 344080 - RNA, 32 nt, Human
caaucaauacauguaacauguacauuguuuug

SEQ ID NO: 344081 - RNA, 32 nt, Human
caaucaaucaaugccagcgucguggcgggcgc

SEQ ID NO: 344082 - RNA, 32 nt, Human
caaucacaaggguagagaucuguugcgaggaa

SEQ ID NO: 344083 - RNA, 32 nt, Human
caaucacacagaaccacuuuuauucaacauag

SEQ ID NO: 344084 - RNA, 32 nt, Human
caaucacaccacuacucuccaaccugggugac

SEQ ID NO: 344085 - RNA, 32 nt, Human
caaucacaccugccugagaaggagugggcugu

SEQ ID NO: 344086 - RNA, 32 nt, Human
caaucacaccugcgggaaggaccaggaauaaa

SEQ ID NO: 344087 - RNA, 32 nt, Human
caaucacagcuacucaggaggcugaggcagaa

SEQ ID NO: 344088 - RNA, 32 nt, Human
caaucacaggcaggaagaugaagguucugugg

SEQ ID NO: 344089 - RNA, 32 nt, Human
caaucacagucuccagaagaucagcucaauug

SEQ ID NO: 344090 - RNA, 32 nt, Human
caaucacauaagagggaggcagaggagacuug

SEQ ID NO: 344091 - RNA, 32 nt, Human
caaucacaucacagaucacacugcaguuucca

SEQ ID NO: 344092 - RNA, 32 nt, Human
caaucaccauccuuuauaccaggauuugcaua

SEQ ID NO: 344093 - RNA, 32 nt, Human
caaucacgagacugggggaccggccgggccug

SEQ ID NO: 344094 - RNA, 32 nt, Human
caaucacucucuuuaccccaugcaugccaucc

SEQ ID NO: 344095 - RNA, 32 nt, Human
caaucacuguaaccugauucauccugggaugu

SEQ ID NO: 344096 - RNA, 32 nt, Human
caaucacuguccuggccaguugcaguggcuca

SEQ ID NO: 344097 - RNA, 32 nt, Human
caaucacuuuaccuauacaaaaugacugcuau

SEQ ID NO: 344098 - RNA, 32 nt, Human
caaucacuuucucuuugcuuuuagaggauagc

SEQ ID NO: 344099 - RNA, 20 nt, Human
caaucagaaucaucauauca

SEQ ID NO: 344100 - RNA, 32 nt, Human
caaucagacaugaaaacucuggcuccaaaaau

SEQ ID NO: 344101 - RNA, 32 nt, Human
caaucagacaugaaaucucuggcuccaaaaau

SEQ ID NO: 344102 - RNA, 32 nt, Human
caaucagagacugucucgaucucuccacucac

SEQ ID NO: 344103 - RNA, 32 nt, Human
caaucagaugcagcuuucuccuucgucugguc

SEQ ID NO: 344104 - RNA, 32 nt, Human
caaucagauugguuuuauucuuuuauuuuacg

SEQ ID NO: 344105 - RNA, 32 nt, Human
caaucagcagaugacccccaggccuuggcagc

SEQ ID NO: 344106 - RNA, 32 nt, Human
caaucagcugccauccugcccuccagggacaa

SEQ ID NO: 344107 - RNA, 32 nt, Human
caaucagcuggguuuacugugauucaguaagg

SEQ ID NO: 344108 - RNA, 32 nt, Human
caaucaggagaaggguucugccucccaucccc

SEQ ID NO: 344109 - RNA, 32 nt, Human
caaucagggucauaaccauccaugcagacaug

SEQ ID NO: 344110 - RNA, 32 nt, Human
caaucaggucagaaagggaugagugaagaagc

SEQ ID NO: 344111 - RNA, 32 nt, Human
caaucaggucuaccccagagagguccuagggc

SEQ ID NO: 344112 - RNA, 32 nt, Human
caaucagguggaggcugcauggcuggaaggcc

SEQ ID NO: 344113 - RNA, 32 nt, Human
caaucagguuucuaaauaaacaacuggaccau

SEQ ID NO: 344114 - RNA, 32 nt, Human
caaucaguaagcccacagggaaauguuugauu

SEQ ID NO: 344115 - RNA, 32 nt, Human
caaucagucaccaggcucuccccaaaaccaug

SEQ ID NO: 344116 - RNA, 32 nt, Human
caaucagucaugugaccacacccuccucccuc

SEQ ID NO: 344117 - RNA, 32 nt, Human
caaucaguggggcagccagagcucagaccuga

SEQ ID NO: 344118 - RNA, 32 nt, Human
caaucagugguuuggagcaacagugaaagcuc

SEQ ID NO: 344119 - RNA, 32 nt, Human
caaucauaaagugaaugacaaacccuuugaau

SEQ ID NO: 344120 - RNA, 32 nt, Human
caaucauacaugcacacugacucugaacuggg

SEQ ID NO: 344121 - RNA, 32 nt, Human
caaucauagcaagcaagaaaggcuccaguguc

SEQ ID NO: 344122 - RNA, 32 nt, Human
caaucauaguacaggcaucacaggcagaaaaa

SEQ ID NO: 344123 - RNA, 32 nt, Human
caaucauauaggucuggaauacaucuuucauu

SEQ ID NO: 344124 - RNA, 32 nt, Human
caaucaucacuuagugguggugagugacuugu

SEQ ID NO: 344125 - RNA, 32 nt, Human
caaucaucugacccuucuuggagucucauauu

SEQ ID NO: 344126 - RNA, 32 nt, Human
caaucaucuuuauauacuuuccuuacaaaccc

SEQ ID NO: 344127 - RNA, 32 nt, Human
caaucaugagugcguggcuggggacagaccuc

SEQ ID NO: 344128 - RNA, 32 nt, Human
caaucaugcaauucuucagcucuuccagggag

SEQ ID NO: 344129 - RNA, 32 nt, Human
caaucaugcccugccuugucccucucacuccc

SEQ ID NO: 344130 - RNA, 30 nt, Human
caaucauggacagcaacaauuucuuaggca

SEQ ID NO: 344131 - RNA, 32 nt, Human
caaucaugggugagcugauuuacaucuuuaua

SEQ ID NO: 344132 - RNA, 32 nt, Human
caaucauguauuucaccguuugcacuuuuugu

SEQ ID NO: 344133 - RNA, 32 nt, Human
caaucaugucgagucacuggacucugaaaauc

SEQ ID NO: 344134 - RNA, 32 nt, Human
caaucauguggacacaagcauaaguaaagaaa

SEQ ID NO: 344135 - RNA, 32 nt, Human
caaucauugucuccugagauuuuucuaauuag

SEQ ID NO: 344136 - RNA, 32 nt, Human
caauccaagagucugaugauuucuugaaaagg

SEQ ID NO: 344137 - RNA, 32 nt, Human
caauccacaaaugaugcaggugcaaaugguuu

SEQ ID NO: 344138 - RNA, 32 nt, Human
caauccacuucuucaagcuccaacacaaaugc

SEQ ID NO: 344139 - RNA, 32 nt, Human
caauccagaaauucauguuagaacauugucag

SEQ ID NO: 344140 - RNA, 32 nt, Human
caauccagacacacucacacucucaucucuuu

SEQ ID NO: 344141 - RNA, 32 nt, Human
caauccagcaugcuuucauucuuucugaauaa

SEQ ID NO: 344142 - RNA, 32 nt, Human
caauccagcauuuguagcagguuuugaauggg

SEQ ID NO: 344143 - RNA, 32 nt, Human
caauccagccugggcaacagagcgaggucccg

SEQ ID NO: 344144 - RNA, 32 nt, Human
caauccagccugggcaacgagcaagacccagu

SEQ ID NO: 344145 - RNA, 32 nt, Human
caauccagccugggcgacaaagcaagacucug

SEQ ID NO: 344146 - RNA, 32 nt, Human
caauccagccugggcgauagagugagacuacg

SEQ ID NO: 344147 - RNA, 32 nt, Human
caauccagccugggcggagccggaguugcgag

SEQ ID NO: 344148 - RNA, 32 nt, Human
caauccagcggcagaggagugagaggacugug

SEQ ID NO: 344149 - RNA, 32 nt, Human
caauccaggcuacaaucuucauuuaauauaaa

SEQ ID NO: 344150 - RNA, 32 nt, Human
caauccaggcuggaguugguuuauccuuggca

SEQ ID NO: 344151 - RNA, 32 nt, Human
caauccaucuggaagguggauagccauggcag

SEQ ID NO: 344152 - RNA, 32 nt, Human
caaucccaacacuuugggaggcugaggaaggg

SEQ ID NO: 344153 - RNA, 32 nt, Human
caaucccaacagccaaacuucugccacucaca

SEQ ID NO: 344154 - RNA, 32 nt, Human
caaucccaacuaagggcaggacccaggcagaa

SEQ ID NO: 344155 - RNA, 32 nt, Human
caaucccaaucccaccaccgggaacacccagg

SEQ ID NO: 344156 - RNA, 32 nt, Human
caaucccagacuuuucuuuuguagucaccuca

SEQ ID NO: 344157 - RNA, 32 nt, Human
caaucccagcacuuuggaaggccgaggugggc

SEQ ID NO: 344158 - RNA, 32 nt, Human
caaucccagcacuuugggaggccgaggcaggu

SEQ ID NO: 344159 - RNA, 32 nt, Human
caaucccagcacuuugggaggccgaggcgggc

SEQ ID NO: 344160 - RNA, 32 nt, Human
caaucccagcacuuugggaggccgaggugggc

SEQ ID NO: 344161 - RNA, 32 nt, Human
caaucccagccugucacgucaugccuagugag

SEQ ID NO: 344162 - RNA, 32 nt, Human
caaucccagcuacaugggaggcugaggcagga

SEQ ID NO: 344163 - RNA, 32 nt, Human
caaucccagcuacucaagaggcugaggcagga

SEQ ID NO: 344164 - RNA, 32 nt, Human
caaucccagcuacucaggaggcugaggcagga

SEQ ID NO: 344165 - RNA, 32 nt, Human
caaucccagcuacucauaaggcugagguggga

SEQ ID NO: 344166 - RNA, 32 nt, Human
caaucccagcuacucgggaggcugaggcaaga

SEQ ID NO: 344167 - RNA, 32 nt, Human
caaucccagcuacucgggaggcugaggcacaa

SEQ ID NO: 344168 - RNA, 32 nt, Human
caaucccagcuacuugagaggcugaggccgga

SEQ ID NO: 344169 - RNA, 32 nt, Human
caaucccagcuacuuggaaggcugaggcagga

SEQ ID NO: 344170 - RNA, 32 nt, Human
caaucccagcuacuugggaggcugaggcagga

SEQ ID NO: 344171 - RNA, 32 nt, Human
caaucccagcuauuugggaggcugaggcgaga

SEQ ID NO: 344172 - RNA, 32 nt, Human
caaucccagugcuuugggaggcugagguggga

SEQ ID NO: 344173 - RNA, 32 nt, Human
caaucccaucucgcaggagagcagggucuggg

SEQ ID NO: 344174 - RNA, 32 nt, Human
caauccccaacaauuaggaacuggacccuggg

SEQ ID NO: 344175 - RNA, 32 nt, Human
caauccccucaaggaucugcauucaggccugc

SEQ ID NO: 344176 - RNA, 32 nt, Human
caauccccugcauacacacuucccaggggaca

SEQ ID NO: 344177 - RNA, 32 nt, Human
caauccccuugccaccacuuugcaucaccugg

SEQ ID NO: 344178 - RNA, 32 nt, Human
caauccccuuugccaucucugcucucacuggg

SEQ ID NO: 344179 - RNA, 32 nt, Human
caaucccggcauccagccuucagucccgccca

SEQ ID NO: 344180 - RNA, 32 nt, Human
caaucccgugaggugagcagagcaguauuugu

SEQ ID NO: 344181 - RNA, 19 nt, Human
caaucccuaugcauugcca

SEQ ID NO: 344182 - RNA, 32 nt, Human
caaucccucacugcugccucaacuuccugggc

SEQ ID NO: 344183 - RNA, 32 nt, Human
caaucccucuccacucuucucuccuuucuccc

SEQ ID NO: 344184 - RNA, 32 nt, Human
caaucccucugcacuccaaaaccggagcccgu

SEQ ID NO: 344185 - RNA, 32 nt, Human
caaucccugaguaucucgggaaggaggugucc

SEQ ID NO: 344186 - RNA, 32 nt, Human
caauccgccucccagguucaagcgauucuccc

SEQ ID NO: 344187 - RNA, 32 nt, Human
caauccggguccugccuuccaacuacaacuuu

SEQ ID NO: 344188 - RNA, 32 nt, Human
caauccuacuuuucgaacaccaaaaaugaugc

SEQ ID NO: 344189 - RNA, 32 nt, Human
caauccuagcacuuugggaggcugaggugagc

SEQ ID NO: 344190 - RNA, 32 nt, Human
caauccucaaauagugauuauuucauuuguuc

SEQ ID NO: 344191 - RNA, 32 nt, Human
caauccucagccacuuugguguuuucucaagg

SEQ ID NO: 344192 - RNA, 32 nt, Human
caauccucagggaagugggggugccggaggag

SEQ ID NO: 344193 - RNA, 32 nt, Human
caauccucauucucugccuccuggacccucau

SEQ ID NO: 344194 - RNA, 32 nt, Human
caauccuccugccucagccucccaaagcacgg

SEQ ID NO: 344195 - RNA, 32 nt, Human
caauccuccugccucagccucccaagcagcug

SEQ ID NO: 344196 - RNA, 32 nt, Human
caauccuccugccucagccucccuaguagcug

SEQ ID NO: 344197 - RNA, 32 nt, Human
caauccuccugccucagccuccugaacagcug

SEQ ID NO: 344198 - RNA, 32 nt, Human
caauccuccugccucagccuccugaguagcug

SEQ ID NO: 344199 - RNA, 32 nt, Human
caauccuccugccucagccucgcaaguagcug

SEQ ID NO: 344200 - RNA, 32 nt, Human
caauccuccugccucagcuccugaguagcugg

SEQ ID NO: 344201 - RNA, 32 nt, Human
caauccuccugccucugcccccugagcagcug

SEQ ID NO: 344202 - RNA, 32 nt, Human
caauccuccugccucugccucccaaguagcug

SEQ ID NO: 344203 - RNA, 32 nt, Human
caauccucuugguggaggaagcucggcugauu

SEQ ID NO: 344204 - RNA, 32 nt, Human
caauccugaagcacagugaacuugaaagaucu

SEQ ID NO: 344205 - RNA, 32 nt, Human
caauccugccucacuggccuuacccuccuccu

SEQ ID NO: 344206 - RNA, 31 nt, Human
caauccugccucuuuauggucugguucacag

SEQ ID NO: 344207 - RNA, 32 nt, Human
caauccugcuuuguuaaagcaaaaacuaugcg

SEQ ID NO: 344208 - RNA, 32 nt, Human
caauccuggcccugagccucagccucugccau

SEQ ID NO: 344209 - RNA, 32 nt, Human
caauccugggagaagaggaaaaaggagcuaau

SEQ ID NO: 344210 - RNA, 32 nt, Human
caauccuguggccacauggcacaaaacaccaa

SEQ ID NO: 344211 - RNA, 32 nt, Human
caauccugugggugaagagagagggaaacaca

SEQ ID NO: 344212 - RNA, 32 nt, Human
caauccuuccaccucagacuccaaagcauugg

SEQ ID NO: 344213 - RNA, 23 nt, Human
caauccuuccaccuugcccuccc

SEQ ID NO: 344214 - RNA, 32 nt, Human
caauccuuccuuguaucaaaauucccaggucu

SEQ ID NO: 344215 - RNA, 32 nt, Human
caaucgacauccuagccccacccagagguggc

SEQ ID NO: 344216 - RNA, 32 nt, Human
caaucgcggagagaucaaagggucugagucug

SEQ ID NO: 344217 - RNA, 32 nt, Human
caaucggacuccuggucuccuccggggaugcu

SEQ ID NO: 344218 - RNA, 31 nt, Human
caaucggaguucuccccuugccggagcugcc

SEQ ID NO: 344219 - RNA, 32 nt, Human
caaucggcaauuugacuugcucugcugcaugu

SEQ ID NO: 344220 - RNA, 32 nt, Human
caaucggcuacuguucuguucuguauuuuggc

SEQ ID NO: 344221 - RNA, 32 nt, Human
caaucgguagagaagagacaguuuaauauuug

SEQ ID NO: 344222 - RNA, 32 nt, Human
caaucgguccgaguggcugucggcucuucagc

SEQ ID NO: 344223 - RNA, 32 nt, Human
caaucgucacccacauuggagugcagugguac

SEQ ID NO: 344224 - RNA, 32 nt, Human
caaucgugagaucauauuugagguaucuucuu

SEQ ID NO: 344225 - RNA, 32 nt, Human
caaucuaagccccauucccugucucuuuacau

SEQ ID NO: 344226 - RNA, 32 nt, Human
caaucuacaaaaccaguagccaaacaggaucu

SEQ ID NO: 344227 - RNA, 32 nt, Human
caaucuagccugggugacagagcaagacuuug

SEQ ID NO: 344228 - RNA, 32 nt, Human
caaucuauucuugccacaucaagggauuguua

SEQ ID NO: 344229 - RNA, 32 nt, Human
caaucucaacuuugauuucacucggaguuacc

SEQ ID NO: 344230 - RNA, 32 nt, Human
caaucucacugcaaccuccgccuuccaguugc

SEQ ID NO: 344231 - RNA, 32 nt, Human
caaucucacugcaagcucugccucccagguuc

SEQ ID NO: 344232 - RNA, 32 nt, Human
caaucucacugcauccuccgccucccggguuc

SEQ ID NO: 344233 - RNA, 32 nt, Human
caaucucagcuacucaggaggcugaggcagga

SEQ ID NO: 344234 - RNA, 32 nt, Human
caaucucagcuacucgggaggcugaggcagga

SEQ ID NO: 344235 - RNA, 32 nt, Human
caaucucagcuucagaccaggagccaagagac

SEQ ID NO: 344236 - RNA, 32 nt, Human
caaucuccaucuuuagggucuccacagacuaa

SEQ ID NO: 344237 - RNA, 32 nt, Human
caaucucccaggaaggcagggggcagaaucuu

SEQ ID NO: 344238 - RNA, 19 nt, Human
caaucuccccucccuccca

SEQ ID NO: 344239 - RNA, 32 nt, Human
caaucuccccucccucccaucccccaccuucg

SEQ ID NO: 344240 - RNA, 24 nt, Human
caaucuccugaccucaugauccac

SEQ ID NO: 344241 - RNA, 24 nt, Human
caaucuccugaccucgugauccac

SEQ ID NO: 344242 - RNA, 24 nt, Human
caaucuccugaccuugugauccac

SEQ ID NO: 344243 - RNA, 32 nt, Human
caaucuccugacugcacuggccugacugcccc

SEQ ID NO: 344244 - RNA, 32 nt, Human
caaucuccugagaccagccucuaccuccagau

SEQ ID NO: 344245 - RNA, 32 nt, Human
caaucucgacucugcucuuugccaguucaguc

SEQ ID NO: 344246 - RNA, 32 nt, Human
caaucucggcucacugcagucaccuccucuca

SEQ ID NO: 344247 - RNA, 32 nt, Human
caaucucggcucauggcaagcuccgccuccug

SEQ ID NO: 344248 - RNA, 32 nt, Human
caaucucuagccccucuccugcucucagaggu

SEQ ID NO: 344249 - RNA, 18 nt, Human
caaucucuaggacucucc

SEQ ID NO: 344250 - RNA, 32 nt, Human
caaucucucuccccaucuucgcauauucugau

SEQ ID NO: 344251 - RNA, 32 nt, Human
caaucucucucccccucauuucucuuccuccu

SEQ ID NO: 344252 - RNA, 32 nt, Human
caaucucugcuucagacucuggguaauuacua

SEQ ID NO: 344253 - RNA, 32 nt, Human
caaucugaagacagaauacuucuaacacccag

SEQ ID NO: 344254 - RNA, 32 nt, Human
caaucugacuaacacggugaaaccccaucucu

SEQ ID NO: 344255 - RNA, 32 nt, Human
caaucugacugagcccugacugccuuuguuuu

SEQ ID NO: 344256 - RNA, 32 nt, Human
caaucugagggaggggauaaagaggaagcaau

SEQ ID NO: 344257 - RNA, 32 nt, Human
caaucugcaaaauggggauggggaagguucaa

SEQ ID NO: 344258 - RNA, 32 nt, Human
caaucugcacuguccagccuagcaggccgccg

SEQ ID NO: 344259 - RNA, 32 nt, Human
caaucuggaaggcagagguugcagugagauug

SEQ ID NO: 344260 - RNA, 32 nt, Human
caaucuggacauugaauaaauauucauuuucc

SEQ ID NO: 344261 - RNA, 31 nt, Human
caaucuggacucucuggacacugugcaugcu

SEQ ID NO: 344262 - RNA, 32 nt, Human
caaucuggacucucuggacacugugcaugcua

SEQ ID NO: 344263 - RNA, 21 nt, Human
caaucuggauggcuucaucca

SEQ ID NO: 344264 - RNA, 32 nt, Human
caaucuggccaacauggcgaaaccccgucuuu

SEQ ID NO: 344265 - RNA, 32 nt, Human
caaucuggccaacauggugaaaccccaucucu

SEQ ID NO: 344266 - RNA, 32 nt, Human
caaucugggaauggguuggauggggagggaga

SEQ ID NO: 344267 - RNA, 32 nt, Human
caaucugggagccuuccuggccagucugagug

SEQ ID NO: 344268 - RNA, 32 nt, Human
caaucugggagguggaaguugcagugagccga

SEQ ID NO: 344269 - RNA, 32 nt, Human
caaucugggcaacauggggaaaccccagcucu

SEQ ID NO: 344270 - RNA, 32 nt, Human
caaucugucacccaggcuggagcgcaguggug

SEQ ID NO: 344271 - RNA, 32 nt, Human
caaucugucagccaggugugguggcucaggcc

SEQ ID NO: 344272 - RNA, 32 nt, Human
caaucugugcagacauucauguuuagaugauu

SEQ ID NO: 344273 - RNA, 21 nt, Human
caaucuguguugaagcugcuu

SEQ ID NO: 344274 - RNA, 32 nt, Human
caaucuguuacccaggcuggagugcaguggug

SEQ ID NO: 344275 - RNA, 32 nt, Human
caaucuuacuauauguaacuucagacaaagug

SEQ ID NO: 344276 - RNA, 32 nt, Human
caaucuucaaacugagccaugcuuuaggggag

SEQ ID NO: 344277 - RNA, 32 nt, Human
caaucuucaagcaaucuuggaauccucaacug

SEQ ID NO: 344278 - RNA, 32 nt, Human
caaucuucacuccagucucugccucuguguuc

SEQ ID NO: 344279 - RNA, 32 nt, Human
caaucuucaguauuuuuaaauuguaaaugaau

SEQ ID NO: 344280 - RNA, 32 nt, Human
caaucuuccugccucaggcuucugaguagcua

SEQ ID NO: 344281 - RNA, 32 nt, Human
caaucuugaacccucuaugcagugagagcauu

SEQ ID NO: 344282 - RNA, 32 nt, Human
caaucuugaccaucacuaucacugccuucuuu

SEQ ID NO: 344283 - RNA, 32 nt, Human
caaucuugccuucugguuucuuccagccacau

SEQ ID NO: 344284 - RNA, 32 nt, Human
caaucuugugaaucugccacagcuccaagaug

SEQ ID NO: 344285 - RNA, 32 nt, Human
caaucuuucaggccauuucccccaccaucaac

SEQ ID NO: 344286 - RNA, 32 nt, Human
caaucuuucauucugugugacagaaguaguag

SEQ ID NO: 344287 - RNA, 32 nt, Human
caaucuuuccuucugucaacggcaggggcagg

SEQ ID NO: 344288 - RNA, 32 nt, Human
caaucuuucucccagccugccuccaagggaau

SEQ ID NO: 344289 - RNA, 32 nt, Human
caaucuuuuucccaggccccagccucucuggc

SEQ ID NO: 344290 - RNA, 32 nt, Human
caaugaaaacagucccaucgcucuuacccggu

SEQ ID NO: 344291 - RNA, 32 nt, Human
caaugaaaacagucccaucgcucuuagccggu

SEQ ID NO: 344292 - RNA, 24 nt, Human
caaugaaaacauguacuacagcua

SEQ ID NO: 344293 - RNA, 32 nt, Human
caaugaaagauaacacucugggcacagcuaaa

SEQ ID NO: 344294 - RNA, 32 nt, Human
caaugaaaggcuauccucugagaggagcaggg

SEQ ID NO: 344295 - RNA, 32 nt, Human
caaugaaauaucucccuggcaggguccucuuc

SEQ ID NO: 344296 - RNA, 17 nt, Human
caaugaaaucaaugaaa

SEQ ID NO: 344297 - RNA, 32 nt, Human
caaugaaaugagaagauaaaauucagcguugg

SEQ ID NO: 344298 - RNA, 32 nt, Human
caaugaacaguuucaggcuggcguggugugcc

SEQ ID NO: 344299 - RNA, 32 nt, Human
caaugaagaaucaucuuucuucauucaacaca

SEQ ID NO: 344300 - RNA, 32 nt, Human
caaugaaggagagaggagcauggggugucccg

SEQ ID NO: 344301 - RNA, 32 nt, Human
caaugaaggccuuucugaugaggucucagaug

SEQ ID NO: 344302 - RNA, 32 nt, Human
caaugaaucaaaacacagauaaaaucaguggu

SEQ ID NO: 344303 - RNA, 32 nt, Human
caaugaaucaguacuuuguuuccccagguaga

SEQ ID NO: 344304 - RNA, 32 nt, Human
caaugaauccacccugcuccacugcgcgccuc

SEQ ID NO: 344305 - RNA, 32 nt, Human
caaugaauugaauaucuaauaaggagauuuaa

SEQ ID NO: 344306 - RNA, 32 nt, Human
caaugacaaacacacaacauuacacacauaua

SEQ ID NO: 344307 - RNA, 32 nt, Human
caaugacaaacacacauuacacacacaacauc

SEQ ID NO: 344308 - RNA, 32 nt, Human
caaugacaacaacauuacuaaccuguggaguc

SEQ ID NO: 344309 - RNA, 32 nt, Human
caaugacaacaucacaaggggaagggagggau

SEQ ID NO: 344310 - RNA, 32 nt, Human
caaugacacacacaucacacacacaucacaau

SEQ ID NO: 344311 - RNA, 32 nt, Human
caaugacaccagucuggacucugggguggaca

SEQ ID NO: 344312 - RNA, 32 nt, Human
caaugacauggucaugcgucacugcagccucc

SEQ ID NO: 344313 - RNA, 32 nt, Human
caaugacauguacagccaucugggacaugccu

SEQ ID NO: 344314 - RNA, 32 nt, Human
caaugaccagagaauuuucucugcccuuucug

SEQ ID NO: 344315 - RNA, 32 nt, Human
caaugaccagccugcaaccauccugccuuucc

SEQ ID NO: 344316 - RNA, 32 nt, Human
caaugaccaucuugaaccacagauuucugcua

SEQ ID NO: 344317 - RNA, 32 nt, Human
caaugaccuaugucacaagagguggcguguaa

SEQ ID NO: 344318 - RNA, 32 nt, Human
caaugacggcaaccucugagccaucccagagc

SEQ ID NO: 344319 - RNA, 32 nt, Human
caaugacggggugggagaggggagaggagaga

SEQ ID NO: 344320 - RNA, 32 nt, Human
caaugacuccggcuuugacacaacaccuuacc

SEQ ID NO: 344321 - RNA, 32 nt, Human
caaugacugagcaggcccagccccagaggaca

SEQ ID NO: 344322 - RNA, 32 nt, Human
caaugacugcagcaccuccugggcuuacacaa

SEQ ID NO: 344323 - RNA, 32 nt, Human
caaugacuggcugggugcaguggcucaugccu

SEQ ID NO: 344324 - RNA, 32 nt, Human
caaugacugugcuacugucuuuggaaaaaugu

SEQ ID NO: 344325 - RNA, 32 nt, Human
caaugacuugaucaucugcuuccuuuuugaau

SEQ ID NO: 344326 - RNA, 32 nt, Human
caaugagacugugcacaaugaagagaaaggag

SEQ ID NO: 344327 - RNA, 32 nt, Human
caaugagagcaguccuguuucauucacauggg

SEQ ID NO: 344328 - RNA, 32 nt, Human
caaugagaggaaccagguaccucuguuggaaa

SEQ ID NO: 344329 - RNA, 32 nt, Human
caaugagauaucacaucacaacuguuaggaug

SEQ ID NO: 344330 - RNA, 32 nt, Human
caaugagauggaaacuccucccucauucagau

SEQ ID NO: 344331 - RNA, 32 nt, Human
caaugagcagcccaggccugggcaaaaagcgc

SEQ ID NO: 344332 - RNA, 32 nt, Human
caaugagcccccaacagagcucuucaucuuac

SEQ ID NO: 344333 - RNA, 32 nt, Human
caaugagcuacugcuuuccgcugccuuccaca

SEQ ID NO: 344334 - RNA, 31 nt, Human
caaugagcuccuuguuuuugccaaaguuucu

SEQ ID NO: 344335 - RNA, 32 nt, Human
caaugagcugggcuuuguugggccaguuucau

SEQ ID NO: 344336 - RNA, 32 nt, Human
caaugagcuuucugaacagcugguguagcuac

SEQ ID NO: 344337 - RNA, 32 nt, Human
caaugaggaccccagccccacuucccuggaac

SEQ ID NO: 344338 - RNA, 32 nt, Human
caaugaggagagaccugcuuuugcagguggau

SEQ ID NO: 344339 - RNA, 32 nt, Human
caaugaggcaguaggagguggggaagaaaaga

SEQ ID NO: 344340 - RNA, 32 nt, Human
caaugagggaggcaggcaauaugcagugaaaa

SEQ ID NO: 344341 - RNA, 32 nt, Human
caaugaggggcaggaaagggguacagaaugaa

SEQ ID NO: 344342 - RNA, 32 nt, Human
caaugaggucaucucauccuugaggggagcag

SEQ ID NO: 344343 - RNA, 19 nt, Human
caaugagucucaguucuga

SEQ ID NO: 344344 - RNA, 32 nt, Human
caaugagucugccugggaugugugugaauccc

SEQ ID NO: 344345 - RNA, 32 nt, Human
caaugagucuguuucuuguaauggcugaccag

SEQ ID NO: 344346 - RNA, 32 nt, Human
caaugagugaugaggcaggaaaagagggccag

SEQ ID NO: 344347 - RNA, 32 nt, Human
caaugagugggggaggagagcagcuggauauc

SEQ ID NO: 344348 - RNA, 32 nt, Human
caaugaguguaauguauuuucucccaauagua

SEQ ID NO: 344349 - RNA, 32 nt, Human
caaugaguguuacagagagcuugcugugacua

SEQ ID NO: 344350 - RNA, 32 nt, Human
caaugaguucuacgcgugagcuugcuuguggg

SEQ ID NO: 344351 - RNA, 32 nt, Human
caaugauagggagguuggacagcucaguuccc

SEQ ID NO: 344352 - RNA, 32 nt, Human
caaugaugccuagugaguauguguccacaggc

SEQ ID NO: 344353 - RNA, 32 nt, Human
caaugauggaaauuauuucaucagguggaaag

SEQ ID NO: 344354 - RNA, 32 nt, Human
caaugauggagucccuguuaaaggucaaaaau

SEQ ID NO: 344355 - RNA, 30 nt, Human
caaugaugggguccccagugagucaucugc

SEQ ID NO: 344356 - RNA, 32 nt, Human
caaugauguagccaccuccuaaccuucccuuc

SEQ ID NO: 344357 - RNA, 32 nt, Human
caaugaugucuuuccauauucuuaucugggcu

SEQ ID NO: 344358 - RNA, 32 nt, Human
caaugauguuggcucuguggcuuggggguuuu

SEQ ID NO: 344359 - RNA, 32 nt, Human
caaugauguuucugaaacugcuauguacaacc

SEQ ID NO: 344360 - RNA, 32 nt, Human
caaugauuuguuguucaccugaaauucaaauu

SEQ ID NO: 344361 - RNA, 32 nt, Human
caaugauuuuggucagggagagucagacaagg

SEQ ID NO: 344362 - RNA, 32 nt, Human
caaugcaaagcagaguuggaucuucaaacuga

SEQ ID NO: 344363 - RNA, 32 nt, Human
caaugcaaggcacuggccacaccaggcuggcc

SEQ ID NO: 344364 - RNA, 32 nt, Human
caaugcaaugaagccggguugcagagauuagg

SEQ ID NO: 344365 - RNA, 32 nt, Human
caaugcaauuugucacagaaggauguuaugua

SEQ ID NO: 344366 - RNA, 22 nt, Human
caaugcacacaugguacaauga

SEQ ID NO: 344367 - RNA, 32 nt, Human
caaugcacugaaccuggacuugggggaaagag

SEQ ID NO: 344368 - RNA, 32 nt, Human
caaugcagaagccaggcuuuggggguagaaag

SEQ ID NO: 344369 - RNA, 32 nt, Human
caaugcaggcccuggaggacugugcgucaccc

SEQ ID NO: 344370 - RNA, 32 nt, Human
caaugcagggcaccuccgaggccacggcgagc

SEQ ID NO: 344371 - RNA, 32 nt, Human
caaugcaguguucucaguaggaaauguucauc

SEQ ID NO: 344372 - RNA, 32 nt, Human
caaugcaguuagguggcucuuuccaagacucu

SEQ ID NO: 344373 - RNA, 32 nt, Human
caaugcaucauaaaaccuucagaaggaaagga

SEQ ID NO: 344374 - RNA, 20 nt, Human
caaugcauccuagcaucaca

SEQ ID NO: 344375 - RNA, 32 nt, Human
caaugcaucguaaaaccuucagaaggaaagga

SEQ ID NO: 344376 - RNA, 27 nt, Human
caaugcaugaugacucuucuuaucaca

SEQ ID NO: 344377 - RNA, 32 nt, Human
caaugcauucuaaguguaagacugguuacauu

SEQ ID NO: 344378 - RNA, 32 nt, Human
caaugccaaacauuucugcacagggaagcuag

SEQ ID NO: 344379 - RNA, 32 nt, Human
caaugccaaggacuucagcccagggcuguuug

SEQ ID NO: 344380 - RNA, 32 nt, Human
caaugccagcugguaggaucccugagccccuu

SEQ ID NO: 344381 - RNA, 32 nt, Human
caaugccagguaggaggaagggcuggggcaau

SEQ ID NO: 344382 - RNA, 32 nt, Human
caaugccauuucuccccaccacggaaccuucc

SEQ ID NO: 344383 - RNA, 32 nt, Human
caaugcccaacaaccaaccagcuggcccuugg

SEQ ID NO: 344384 - RNA, 21 nt, Human
caaugcccacccgcaucgcca

SEQ ID NO: 344385 - RNA, 32 nt, Human
caaugcccagacaaacgugagcacacccacca

SEQ ID NO: 344386 - RNA, 32 nt, Human
caaugcccaguguggcuguguuugaagugagg

SEQ ID NO: 344387 - RNA, 32 nt, Human
caaugccccugcuuccauuucuccccaccuca

SEQ ID NO: 344388 - RNA, 32 nt, Human
caaugccucuacuucccgcaaggccuaccggg

SEQ ID NO: 344389 - RNA, 32 nt, Human
caaugcgagcuuccucuccugucccauguugg

SEQ ID NO: 344390 - RNA, 32 nt, Human
caaugcgccgucaccaucuccaccucccacca

SEQ ID NO: 344391 - RNA, 32 nt, Human
caaugcggagcuggggcugagaugcuccaggu

SEQ ID NO: 344392 - RNA, 32 nt, Human
caaugcuacccagcaccccaugugccaaaaga

SEQ ID NO: 344393 - RNA, 32 nt, Human
caaugcucaugugcuucuucugggcuuguaac

SEQ ID NO: 344394 - RNA, 32 nt, Human
caaugcucccuccuucccaggguccacaggcg

SEQ ID NO: 344395 - RNA, 32 nt, Human
caaugcucuguaggugcuuccucugccaaaaa

SEQ ID NO: 344396 - RNA, 32 nt, Human
caaugcugagcaggaagcagcagcugcaggcc

SEQ ID NO: 344397 - RNA, 27 nt, Human
caaugcugaggcugcuggcguccgggu

SEQ ID NO: 344398 - RNA, 31 nt, Human
caaugcuggguggaggagggcagaaacgcag

SEQ ID NO: 344399 - RNA, 32 nt, Human
caaugcuguggaugaacgaugaugucaauguc

SEQ ID NO: 344400 - RNA, 32 nt, Human
caaugcuucuggagacuuccugccuaggccuc

SEQ ID NO: 344401 - RNA, 32 nt, Human
caaugcuucuuuuugaccuuucccaaggagaa

SEQ ID NO: 344402 - RNA, 32 nt, Human
caaugcuuuccagaggauggaguccuuuuugu

SEQ ID NO: 344403 - RNA, 32 nt, Human
caauggaacccuugauuuccuaccucagugua

SEQ ID NO: 344404 - RNA, 32 nt, Human
caauggaagaacaagacaucaaacuucgugaa

SEQ ID NO: 344405 - RNA, 32 nt, Human
caauggaagggaggggacaagaaauaggggcc

SEQ ID NO: 344406 - RNA, 32 nt, Human
caauggaauuauucauuuuucucuaucuuuua

SEQ ID NO: 344407 - RNA, 27 nt, Human
caauggacaagcaugugggcuuuucau

SEQ ID NO: 344408 - RNA, 32 nt, Human
caauggacaauaaacccagccuggugggcccc

SEQ ID NO: 344409 - RNA, 32 nt, Human
caauggacaggcaccuucgggaucaaaguaca

SEQ ID NO: 344410 - RNA, 32 nt, Human
caauggacccuucacaaguguuucuccugccc

SEQ ID NO: 344411 - RNA, 32 nt, Human
caauggacuuccacuuucaucaacuuuccauc

SEQ ID NO: 344412 - RNA, 32 nt, Human
caauggagaacuuauagcugugcaaagaucua

SEQ ID NO: 344413 - RNA, 32 nt, Human
caauggagagcuaccuuguccugcugcugccc

SEQ ID NO: 344414 - RNA, 32 nt, Human
caauggagauagaucauuguucucuccaucuc

SEQ ID NO: 344415 - RNA, 32 nt, Human
caauggagaucuacggcauacgcccagggccu

SEQ ID NO: 344416 - RNA, 27 nt, Human
caauggaggaggaggaugaggaagcgc

SEQ ID NO: 344417 - RNA, 32 nt, Human
caauggaggcuucagugagcaggaccagcugc

SEQ ID NO: 344418 - RNA, 32 nt, Human
caauggaguccauuccuuccccuagaacaggg

SEQ ID NO: 344419 - RNA, 32 nt, Human
caauggaguggcugagccuuugagcacaccac

SEQ ID NO: 344420 - RNA, 32 nt, Human
caauggaucaucaaaccacuccacaagcacag

SEQ ID NO: 344421 - RNA, 21 nt, Human
caauggaugugaagaagaaau

SEQ ID NO: 344422 - RNA, 32 nt, Human
caauggauugugcugcucucguuucagcuuug

SEQ ID NO: 344423 - RNA, 23 nt, Human
caauggcaaaaccccgucucuac

SEQ ID NO: 344424 - RNA, 32 nt, Human
caauggcaaugccaguggaaccacacugcuug

SEQ ID NO: 344425 - RNA, 32 nt, Human
caauggcacaaccuccaccuccuggguucaag

SEQ ID NO: 344426 - RNA, 32 nt, Human
caauggcacaugcuuccacuccauccauacug

SEQ ID NO: 344427 - RNA, 32 nt, Human
caauggcagaaggagaugcucagggcuccugg

SEQ ID NO: 344428 - RNA, 32 nt, Human
caauggcagccuuggcacaaugccuggguguc

SEQ ID NO: 344429 - RNA, 32 nt, Human
caauggcagcuuuggggaccuuuugucuuugc

SEQ ID NO: 344430 - RNA, 32 nt, Human
caauggcaggaggcggacguggggugucgugc

SEQ ID NO: 344431 - RNA, 32 nt, Human
caauggccacccaacuccuucccaacccuccc

SEQ ID NO: 344432 - RNA, 27 nt, Human
caauggccacugucccuggccuccagc

SEQ ID NO: 344433 - RNA, 32 nt, Human
caauggccacugugagccacagaaggaagaca

SEQ ID NO: 344434 - RNA, 32 nt, Human
caauggccccuggaacaugccagcacacacug

SEQ ID NO: 344435 - RNA, 23 nt, Human
caauggcccuucagggccugccu

SEQ ID NO: 344436 - RNA, 32 nt, Human
caauggccucuuuagacccagcuccugccucc

SEQ ID NO: 344437 - RNA, 32 nt, Human
caauggccugggaaguugaggucacuuuuuac

SEQ ID NO: 344438 - RNA, 27 nt, Human
caauggccuuucaggaccuccuggguc

SEQ ID NO: 344439 - RNA, 32 nt, Human
caauggcucacaccuguaaugccagcccuuug

SEQ ID NO: 344440 - RNA, 21 nt, Human
caauggcucacgccuguaauc

SEQ ID NO: 344441 - RNA, 32 nt, Human
caauggcucacugcagccucaaccuccugagc

SEQ ID NO: 344442 - RNA, 21 nt, Human
caauggcucaugcuuguaauc

SEQ ID NO: 344443 - RNA, 32 nt, Human
caauggcucuaggaguuagccaacaagggacu

SEQ ID NO: 344444 - RNA, 27 nt, Human
caauggcugaacaaguccuuccucagg

SEQ ID NO: 344445 - RNA, 32 nt, Human
caauggcugcugcaacgggagcagcugagucc

SEQ ID NO: 344446 - RNA, 32 nt, Human
caauggcuucauuuugaagaaaagccacagaa

SEQ ID NO: 344447 - RNA, 32 nt, Human
caauggcuugaucuuccgcucacugcaaccuc

SEQ ID NO: 344448 - RNA, 32 nt, Human
caauggcuuggaccaggccagagcuguucucc

SEQ ID NO: 344449 - RNA, 32 nt, Human
caaugggaaaagagucucuaccccuuucuguu

SEQ ID NO: 344450 - RNA, 32 nt, Human
caaugggaaacugcagucucagaggaaggccc

SEQ ID NO: 344451 - RNA, 32 nt, Human
caaugggaaaugcagggcaguguggcaggugg

SEQ ID NO: 344452 - RNA, 32 nt, Human
caaugggacagaaaggccaugugggcacacgg

SEQ ID NO: 344453 - RNA, 32 nt, Human
caaugggacugaagcaggagagaaggcugggc

SEQ ID NO: 344454 - RNA, 32 nt, Human
caaugggaucguccuucaagaggaccucacag

SEQ ID NO: 344455 - RNA, 32 nt, Human
caaugggauuaaaccaaccugcuuggucucua

SEQ ID NO: 344456 - RNA, 32 nt, Human
caaugggcaagacuggugcuguuuauuaaaaa

SEQ ID NO: 344457 - RNA, 32 nt, Human
caaugggcagcagggagagagcaggguuucca

SEQ ID NO: 344458 - RNA, 32 nt, Human
caaugggcaggcggguuguacuuaguguggug

SEQ ID NO: 344459 - RNA, 24 nt, Human
caaugggcauaguaaaagugcaug

SEQ ID NO: 344460 - RNA, 32 nt, Human
caaugggcucuguggggcaggugcagaggccc

SEQ ID NO: 344461 - RNA, 32 nt, Human
caauggggccggccucacagagagcgccgugu

SEQ ID NO: 344462 - RNA, 32 nt, Human
caauggggcuuccuuucuauagggaggauacc

SEQ ID NO: 344463 - RNA, 32 nt, Human
caauggggguggggaaaagcccaggagagcag

SEQ ID NO: 344464 - RNA, 32 nt, Human
caauggggucacggugccugaagagggccuga

SEQ ID NO: 344465 - RNA, 32 nt, Human
caaugggguucacuaaggggguucccgaggcc

SEQ ID NO: 344466 - RNA, 32 nt, Human
caaugggugagaugagauccuggagagagaac

SEQ ID NO: 344467 - RNA, 32 nt, Human
caaugggugagucuuucucacccuccauuucu

SEQ ID NO: 344468 - RNA, 32 nt, Human
caaugguagaagcacaaacaagcaagcuccuu

SEQ ID NO: 344469 - RNA, 32 nt, Human
caauggucagcuuuagugaaaaugagugaaaa

SEQ ID NO: 344470 - RNA, 32 nt, Human
caaugguccacccacaaaugaauuaucaggag

SEQ ID NO: 344471 - RNA, 32 nt, Human
caaugguccacccacaaaugaauuaucaggug

SEQ ID NO: 344472 - RNA, 32 nt, Human
caauggucccugccaccuagagcugcuagcau

SEQ ID NO: 344473 - RNA, 32 nt, Human
caaugguccuaagaucuccaccaacaggagaa

SEQ ID NO: 344474 - RNA, 32 nt, Human
caauggugcaaucucaagcucacugcaaccuc

SEQ ID NO: 344475 - RNA, 32 nt, Human
caauggugcccaggcuggagugcaguggcgug

SEQ ID NO: 344476 - RNA, 32 nt, Human
caauggugcggucacagcucacugccuccugg

SEQ ID NO: 344477 - RNA, 32 nt, Human
caaugguguccaggcuggagugcaguggcgug

SEQ ID NO: 344478 - RNA, 32 nt, Human
caaugguuacuuuugucauauucacuuuaaau

SEQ ID NO: 344479 - RNA, 32 nt, Human
caaugguucucuucccuuuuccauccuccaaa

SEQ ID NO: 344480 - RNA, 32 nt, Human
caaugguugagcaguggagugggagcccaggu

SEQ ID NO: 344481 - RNA, 32 nt, Human
caaugguuggccacagauggguguacugcaaa

SEQ ID NO: 344482 - RNA, 32 nt, Human
caaugguugggacaauggcaauaggacaaaac

SEQ ID NO: 344483 - RNA, 32 nt, Human
caauguaaaggaugaucaaacacuggaauaua

SEQ ID NO: 344484 - RNA, 32 nt, Human
caauguacaagagacucaaaucuaaacauuua

SEQ ID NO: 344485 - RNA, 32 nt, Human
caauguacacugccaaacacaagaguaggaca

SEQ ID NO: 344486 - RNA, 32 nt, Human
caauguacauuuugaaacuuucuuucaggggu

SEQ ID NO: 344487 - RNA, 32 nt, Human
caauguacuaaaggagggauguacuuucagau

SEQ ID NO: 344488 - RNA, 32 nt, Human
caauguagagagaguuccaaaccaccaauuuu

SEQ ID NO: 344489 - RNA, 32 nt, Human
caauguagaguuaagaaccaggaggcaggaac

SEQ ID NO: 344490 - RNA, 32 nt, Human
caauguagcagccacugucauuucucaguggu

SEQ ID NO: 344491 - RNA, 32 nt, Human
caauguauaaagauuguacuuagccaguucaa

SEQ ID NO: 344492 - RNA, 32 nt, Human
caauguauaagucuuauacuucuuuuauuaaa

SEQ ID NO: 344493 - RNA, 32 nt, Human
caauguauuaugaaccagucagcuaucugucu

SEQ ID NO: 344494 - RNA, 32 nt, Human
caaugucaccacccucugcauggcccugugug

SEQ ID NO: 344495 - RNA, 32 nt, Human
caaugucauaacaggcauugccaaccucacug

SEQ ID NO: 344496 - RNA, 32 nt, Human
caaugucaucuucuccaugaagaccacugaau

SEQ ID NO: 344497 - RNA, 32 nt, Human
caauguccagugcuaggauuauuugcagguuu

SEQ ID NO: 344498 - RNA, 32 nt, Human
caaugucccaccuuggagcucuccuuguugaa

SEQ ID NO: 344499 - RNA, 32 nt, Human
caaugucugcuguuuccaacacuggugauuuc

SEQ ID NO: 344500 - RNA, 32 nt, Human
caaugucuuccccuagccacagguucaaccaa

SEQ ID NO: 344501 - RNA, 32 nt, Human
caaugugaaacaauuuucucucuuuauacuaa

SEQ ID NO: 344502 - RNA, 32 nt, Human
caaugugaacucagggaacuggggaaggcuga

SEQ ID NO: 344503 - RNA, 32 nt, Human
caaugugacaguguuacauuuggagagaagug

SEQ ID NO: 344504 - RNA, 32 nt, Human
caaugugaucugagccuccaucauuguccucc

SEQ ID NO: 344505 - RNA, 32 nt, Human
caaugugcagccuucagguuugcggaaaggga

SEQ ID NO: 344506 - RNA, 32 nt, Human
caaugugccgucuucugucuuuggaaaauggg

SEQ ID NO: 344507 - RNA, 32 nt, Human
caaugugcgugggcaucugugagaagaagaga

SEQ ID NO: 344508 - RNA, 32 nt, Human
caaugugcugcugcaaguccuccugggcuucc

SEQ ID NO: 344509 - RNA, 23 nt, Human
caaugugcugggauuacaggcau

SEQ ID NO: 344510 - RNA, 32 nt, Human
caauguggaaaagccuuuauuucuuucaguuc

SEQ ID NO: 344511 - RNA, 32 nt, Human
caauguggaaagggaaggaaaggaagcuguau

SEQ ID NO: 344512 - RNA, 32 nt, Human
caauguggagaaacuuuuggccagauuccaga

SEQ ID NO: 344513 - RNA, 32 nt, Human
caauguggauuucggcaauggccggcagaaac

SEQ ID NO: 344514 - RNA, 19 nt, Human
caauguggcaaaacccugu

SEQ ID NO: 344515 - RNA, 32 nt, Human
caauguggccuaaaaaugcaacuucuuuuuau

SEQ ID NO: 344516 - RNA, 32 nt, Human
caauguggcugcaagggugguggugguggugg

SEQ ID NO: 344517 - RNA, 32 nt, Human
caaugugggaaagccuuuauuucuuucacuuc

SEQ ID NO: 344518 - RNA, 32 nt, Human
caaugugggaggcaggaugcagggaugggcuc

SEQ ID NO: 344519 - RNA, 32 nt, Human
caaugugggcaggggcugggcaggaggguggg

SEQ ID NO: 344520 - RNA, 32 nt, Human
caaugugggcauccuugugcucuuccugcacg

SEQ ID NO: 344521 - RNA, 32 nt, Human
caauguggguaaucaguaagacaguauggcac

SEQ ID NO: 344522 - RNA, 32 nt, Human
caaugugucauauacucgcacaacuuaaauag

SEQ ID NO: 344523 - RNA, 31 nt, Human
caaugugucugggucaucacagcagugaaua

SEQ ID NO: 344524 - RNA, 32 nt, Human
caauguguguuuuagauaaauaggauugggua

SEQ ID NO: 344525 - RNA, 26 nt, Human
caauguguucuuuguuccacuggaaa

SEQ ID NO: 344526 - RNA, 32 nt, Human
caauguuaaucuguuugagucuuuggagaaag

SEQ ID NO: 344527 - RNA, 32 nt, Human
caauguuagugccaccaccuucugaacacagu

SEQ ID NO: 344528 - RNA, 32 nt, Human
caauguuccucuucauauguuaacuuuucuua

SEQ ID NO: 344529 - RNA, 32 nt, Human
caauguucuacaacuuggaaaguuuucauuuu

SEQ ID NO: 344530 - RNA, 32 nt, Human
caauguucucucugccacauuaaucagagaaa

SEQ ID NO: 344531 - RNA, 32 nt, Human
caauguugaaaccucaucucuugaaugcagac

SEQ ID NO: 344532 - RNA, 32 nt, Human
caauguugcccaggcuggagugcaguggcgug

SEQ ID NO: 344533 - RNA, 32 nt, Human
caauguuggucaguaacagaaugaguugguuu

SEQ ID NO: 344534 - RNA, 31 nt, Human
caauguuuacucaaggguguucuuaggaggc

SEQ ID NO: 344535 - RNA, 32 nt, Human
caauguuuagcuuuuguuaacuccucacucuu

SEQ ID NO: 344536 - RNA, 32 nt, Human
caauguuucccaggaaaucaaagauguaaaug

SEQ ID NO: 344537 - RNA, 32 nt, Human
caauguuuggaggauguugucacagcuaguag

SEQ ID NO: 344538 - RNA, 25 nt, Human
caauguuuguguccaccaccagcca

SEQ ID NO: 344539 - RNA, 32 nt, Human
caauguuuuuacuuuuuguauaaugggguggg

SEQ ID NO: 344540 - RNA, 32 nt, Human
caauguuuuuauagaugguguggaaagacuuu

SEQ ID NO: 344541 - RNA, 32 nt, Human
caauguuuuucugcuuuuugccuuccccauau

SEQ ID NO: 344542 - RNA, 32 nt, Human
caauguuuuugcaacauaugagagaagauagu

SEQ ID NO: 344543 - RNA, 32 nt, Human
caauuaaaacacuaugugucuccuuauagagg

SEQ ID NO: 344544 - RNA, 26 nt, Human
caauuaaaaugaaggaaugcugaguu

SEQ ID NO: 344545 - RNA, 32 nt, Human
caauuaaacuucuuuuucuucccagucucggg

SEQ ID NO: 344546 - RNA, 32 nt, Human
caauuaaagcaauugauuuucuagugcuggua

SEQ ID NO: 344547 - RNA, 32 nt, Human
caauuaaaugacuuagaaacaauguuugcuuu

SEQ ID NO: 344548 - RNA, 32 nt, Human
caauuaaguggcccugaugauguuaccaagcc

SEQ ID NO: 344549 - RNA, 32 nt, Human
caauuaaucaggagaaaaguaaauauaaaaac

SEQ ID NO: 344550 - RNA, 32 nt, Human
caauuaauucuagagcaacuuugccccagcga

SEQ ID NO: 344551 - RNA, 32 nt, Human
caauuacaauuaaaagcacauuguuggaccau

SEQ ID NO: 344552 - RNA, 32 nt, Human
caauuacacagcacaaaaugauauccacgugg

SEQ ID NO: 344553 - RNA, 32 nt, Human
caauuacaggagccugccaccaugcccgugcu

SEQ ID NO: 344554 - RNA, 32 nt, Human
caauuaccauuuucuucuuucucaggauuugg

SEQ ID NO: 344555 - RNA, 32 nt, Human
caauuacugcuggcaucuuaguugagaguaua

SEQ ID NO: 344556 - RNA, 32 nt, Human
caauuagaaagucuccaccacuuucaaaaauc

SEQ ID NO: 344557 - RNA, 32 nt, Human
caauuagcaaaggagaaacuuucucaauuuaa

SEQ ID NO: 344558 - RNA, 32 nt, Human
caauuagcacaaauacgccaagggaacagggu

SEQ ID NO: 344559 - RNA, 32 nt, Human
caauuagcaguuaugcaauggaccugauucua

SEQ ID NO: 344560 - RNA, 32 nt, Human
caauuagcucuauucaucuugucuccuagcug

SEQ ID NO: 344561 - RNA, 32 nt, Human
caauuagcugauuggagaauguggaaugcaga

SEQ ID NO: 344562 - RNA, 32 nt, Human
caauuaggcccagccugccauggcagcuccaa

SEQ ID NO: 344563 - RNA, 32 nt, Human
caauuagggagaagaagcagcagaaaaggaga

SEQ ID NO: 344564 - RNA, 32 nt, Human
caauuaguccauguacccuccuuccucacuac

SEQ ID NO: 344565 - RNA, 32 nt, Human
caauuagucuuucuccccuggacuagaaaucc

SEQ ID NO: 344566 - RNA, 32 nt, Human
caauuauaucagaauaccuuucugaauuugag

SEQ ID NO: 344567 - RNA, 32 nt, Human
caauuauauuuuucucaguuauacuagaaaau

SEQ ID NO: 344568 - RNA, 32 nt, Human
caauuaucagguuugcuagaaauauaacuuuu

SEQ ID NO: 344569 - RNA, 32 nt, Human
caauuauccaguuuuagaagagagagacuuua

SEQ ID NO: 344570 - RNA, 32 nt, Human
caauuauccugccucaggcucccgaguagcug

SEQ ID NO: 344571 - RNA, 32 nt, Human
caauuaucuccucccccucuucucuccugucu

SEQ ID NO: 344572 - RNA, 32 nt, Human
caauuaugaaucugugaauucucuuaagucuu

SEQ ID NO: 344573 - RNA, 24 nt, Human
caauuaugaauuccaaauucugac

SEQ ID NO: 344574 - RNA, 32 nt, Human
caauuaugauaaaggacaaaauaagcuguuug

SEQ ID NO: 344575 - RNA, 32 nt, Human
caauuaugcuuugguuuuuagugaaugaaaaa

SEQ ID NO: 344576 - RNA, 32 nt, Human
caauuauucuaaucugaacacaguuaucagga

SEQ ID NO: 344577 - RNA, 32 nt, Human
caauucaaaaugaagagagaccucuggauccc

SEQ ID NO: 344578 - RNA, 32 nt, Human
caauucaaaugcagacuaauuauagggaauuu

SEQ ID NO: 344579 - RNA, 32 nt, Human
caauucaagaugagauuugggugaggacacag

SEQ ID NO: 344580 - RNA, 32 nt, Human
caauucaaggguuagguugcagagagcuggcu

SEQ ID NO: 344581 - RNA, 32 nt, Human
caauucaccaacacaguugggacccaaaacac

SEQ ID NO: 344582 - RNA, 32 nt, Human
caauucaccaccaacuaggugugugaccgugg

SEQ ID NO: 344583 - RNA, 32 nt, Human
caauucaccauggagcuuugucucuggcccuu

SEQ ID NO: 344584 - RNA, 32 nt, Human
caauucaccugccuuuccuucucccauccuuu

SEQ ID NO: 344585 - RNA, 32 nt, Human
caauucagaaacggagcauggaagcaucagaa

SEQ ID NO: 344586 - RNA, 32 nt, Human
caauucagccugggugacauagagagacucca

SEQ ID NO: 344587 - RNA, 32 nt, Human
caauucaggaaucaagggcuguggagaaacuc

SEQ ID NO: 344588 - RNA, 32 nt, Human
caauucaguuuccuuagaccagugccagugug

SEQ ID NO: 344589 - RNA, 32 nt, Human
caauucauaguaugaucagggaaaguguaacu

SEQ ID NO: 344590 - RNA, 32 nt, Human
caauucaucaguuucugagaccacagaaucag

SEQ ID NO: 344591 - RNA, 32 nt, Human
caauucaugaagugaauuaaugaugaggaucu

SEQ ID NO: 344592 - RNA, 32 nt, Human
caauucauuaacguucuugccuagagauacug

SEQ ID NO: 344593 - RNA, 32 nt, Human
caauucauuccuccucuuccucucaaaggcug

SEQ ID NO: 344594 - RNA, 32 nt, Human
caauucauuuucucccacccucggcccucuug

SEQ ID NO: 344595 - RNA, 32 nt, Human
caauuccaccucugagggcuguccucagaaug

SEQ ID NO: 344596 - RNA, 32 nt, Human
caauuccagaacuauaguuacuuccacagugc

SEQ ID NO: 344597 - RNA, 32 nt, Human
caauuccagagcugucuggugaucacuuuaug

SEQ ID NO: 344598 - RNA, 32 nt, Human
caauuccagcauauccagugaguuuugacagu

SEQ ID NO: 344599 - RNA, 32 nt, Human
caauuccaggugugcacagaaaaccgagaaua

SEQ ID NO: 344600 - RNA, 32 nt, Human
caauuccauccuggcgagauccaagugcuuac

SEQ ID NO: 344601 - RNA, 32 nt, Human
caauuccaucuucucccauggaaccucaaaga

SEQ ID NO: 344602 - RNA, 32 nt, Human
caauucccaccaagcugaaggaagagagaugg

SEQ ID NO: 344603 - RNA, 32 nt, Human
caauucccagcgucaccccauggcuuguguug

SEQ ID NO: 344604 - RNA, 32 nt, Human
caauucccauccuucccaccccggcuaggugu

SEQ ID NO: 344605 - RNA, 32 nt, Human
caauuccccaggagguacucaccccaagucug

SEQ ID NO: 344606 - RNA, 32 nt, Human
caauucccccuucuuucagaaggaaagaagga

SEQ ID NO: 344607 - RNA, 32 nt, Human
caauuccccugccucagcuuccugaguagcug

SEQ ID NO: 344608 - RNA, 32 nt, Human
caauuccccugccuuugccucccgaguagcug

SEQ ID NO: 344609 - RNA, 32 nt, Human
caauucccugaagguggccacuuuaagagaga

SEQ ID NO: 344610 - RNA, 32 nt, Human
caauucccuuucucucugucacugcuucagca

SEQ ID NO: 344611 - RNA, 32 nt, Human
caauucccuuuuccuuucuucagccuaacccg

SEQ ID NO: 344612 - RNA, 32 nt, Human
caauuccggggugggauugcuagggggagagu

SEQ ID NO: 344613 - RNA, 32 nt, Human
caauuccuccagcuacccuugugaccuaaguc

SEQ ID NO: 344614 - RNA, 32 nt, Human
caauuccucugcaacuccucccccuuuuauuu

SEQ ID NO: 344615 - RNA, 32 nt, Human
caauuccugagagcccuggagcgguuuccuac

SEQ ID NO: 344616 - RNA, 32 nt, Human
caauuccugaguagggccuugcuugaguucuu

SEQ ID NO: 344617 - RNA, 32 nt, Human
caauuccugcagcugggaagcauggcgacuca

SEQ ID NO: 344618 - RNA, 32 nt, Human
caauuccuucugagcccuugaggacaggaccu

SEQ ID NO: 344619 - RNA, 32 nt, Human
caauuccuugauaucuggaguuucuucaccau

SEQ ID NO: 344620 - RNA, 32 nt, Human
caauucgagguugcugagcuucucuccaaagu

SEQ ID NO: 344621 - RNA, 32 nt, Human
caauucguucucucugccccaaggaggcugga

SEQ ID NO: 344622 - RNA, 32 nt, Human
caauucuacugucaaaacaaaggggguuuaca

SEQ ID NO: 344623 - RNA, 32 nt, Human
caauucucacuuuguuuagauaccagaggggc

SEQ ID NO: 344624 - RNA, 32 nt, Human
caauucuccagaggacuaucucacauaaguca

SEQ ID NO: 344625 - RNA, 32 nt, Human
caauucuccugccucagccucacgaguagcug

SEQ ID NO: 344626 - RNA, 32 nt, Human
caauucuccugccucagccuccagaauagcug

SEQ ID NO: 344627 - RNA, 32 nt, Human
caauucuccugccucagccucccaaauagcgg

SEQ ID NO: 344628 - RNA, 32 nt, Human
cacauaugcuggcugcuguuuacacacccugc

SEQ ID NO: 344629 - RNA, 21 nt, Human
cacauaugcuugucacuggga

SEQ ID NO: 344630 - RNA, 32 nt, Human
cacauauggcaacccccaacucccaggggguu

SEQ ID NO: 344631 - RNA, 32 nt, Human
cacauauguggcagcagaggcagugagaguuu

SEQ ID NO: 344632 - RNA, 32 nt, Human
cacauauguguauguguggaguauguguguuu

SEQ ID NO: 344633 - RNA, 32 nt, Human
cacauauguguauguguguggaucuguacaca

SEQ ID NO: 344634 - RNA, 32 nt, Human
cacaucaaccuauuuuguuuuacccuuuuucu

SEQ ID NO: 344635 - RNA, 32 nt, Human
cacaucaacuggcacacaugcacacgaauucu

SEQ ID NO: 344636 - RNA, 32 nt, Human
cacaucaaugauuuuucacaaguggagcacgu

SEQ ID NO: 344637 - RNA, 32 nt, Human
cacaucacagcugaaaacaugaagagcaguuu

SEQ ID NO: 344638 - RNA, 32 nt, Human
cacaucaccaagcccagccaaauuuuguuuuu

SEQ ID NO: 344639 - RNA, 21 nt, Human
cacaucacuccagccugggca

SEQ ID NO: 344640 - RNA, 32 nt, Human
cacaucacugacagcuugacacaugccuccua

SEQ ID NO: 344641 - RNA, 32 nt, Human
cacaucacugcacuccagccuggguaacagag

SEQ ID NO: 344642 - RNA, 32 nt, Human
cacaucacugcacuccauccugggugacagag

SEQ ID NO: 344643 - RNA, 32 nt, Human
cacaucacugcaguccagccugggugacagag

SEQ ID NO: 344644 - RNA, 32 nt, Human
cacaucacuguccuucugccauggcccugugg

SEQ ID NO: 344645 - RNA, 32 nt, Human
cacaucagagucaggacaaaaagaagauacga

SEQ ID NO: 344646 - RNA, 32 nt, Human
cacaucagccuaccucccuccuggcugcuggc

SEQ ID NO: 344647 - RNA, 32 nt, Human
cacaucagccugggugauagauugaggcccca

SEQ ID NO: 344648 - RNA, 22 nt, Human
cacaucaggccagcugugggcc

SEQ ID NO: 344649 - RNA, 32 nt, Human
cacaucagugcugugaaggcaaccucaccaug

SEQ ID NO: 344650 - RNA, 20 nt, Human
cacaucaguuuuaaaguguu

SEQ ID NO: 344651 - RNA, 32 nt, Human
cacaucauagaacauacacaggggagaaaccc

SEQ ID NO: 344652 - RNA, 32 nt, Human
cacaucaucugccuacuuaacgcccagcucug

SEQ ID NO: 344653 - RNA, 32 nt, Human
cacaucaucuucucucuguguaugauggugcc

SEQ ID NO: 344654 - RNA, 32 nt, Human
cacaucauguacuggaaugaucugcauuaaac

SEQ ID NO: 344655 - RNA, 32 nt, Human
cacaucauuccagagaccaaaaccuuacucau

SEQ ID NO: 344656 - RNA, 32 nt, Human
cacaucauucuggcuggagagugcaauguguc

SEQ ID NO: 344657 - RNA, 32 nt, Human
cacaucauuuggucaacuccuuuucccugguu

SEQ ID NO: 344658 - RNA, 25 nt, Human
cacauccaaguuucugccucuuuua

SEQ ID NO: 344659 - RNA, 32 nt, Human
cacauccacacacaccacagacuucaacacau

SEQ ID NO: 344660 - RNA, 32 nt, Human
cacauccacaccucugcucuuuccuguuccug

SEQ ID NO: 344661 - RNA, 32 nt, Human
cacauccacccuccaccucuagcccagacacc

SEQ ID NO: 344662 - RNA, 32 nt, Human
cacauccacgcacucccaaaggccagaaguau

SEQ ID NO: 344663 - RNA, 32 nt, Human
cacauccagaagcuacuucucaguguugcaua

SEQ ID NO: 344664 - RNA, 32 nt, Human
cacauccagaccuugaguauuguuaaauggag

SEQ ID NO: 344665 - RNA, 32 nt, Human
cacauccagcaacugggcccagcuuuaaccag

SEQ ID NO: 344666 - RNA, 32 nt, Human
cacauccagcacugugucuugccuuucagauc

SEQ ID NO: 344667 - RNA, 32 nt, Human
cacauccagggguguucacaggcuuucacagc

SEQ ID NO: 344668 - RNA, 21 nt, Human
cacauccaguucuuuucuuuu

SEQ ID NO: 344669 - RNA, 32 nt, Human
cacauccaucuugcagagaaguuuacagaacu

SEQ ID NO: 344670 - RNA, 32 nt, Human
cacauccauggaaucagagcaagauuuccuuu

SEQ ID NO: 344671 - RNA, 32 nt, Human
cacaucccaacacccaccccagggagaguucc

SEQ ID NO: 344672 - RNA, 32 nt, Human
cacaucccaauccugaauccaagagucuaaga

SEQ ID NO: 344673 - RNA, 32 nt, Human
cacaucccaauucugacaagaccucaugccug

SEQ ID NO: 344674 - RNA, 32 nt, Human
cacaucccaccauacacugcugcccaggcagu

SEQ ID NO: 344675 - RNA, 32 nt, Human
cacaucccaccuacagacuaccaccuuucgag

SEQ ID NO: 344676 - RNA, 32 nt, Human
cacaucccacucugaguccaaauguucucucc

SEQ ID NO: 344677 - RNA, 32 nt, Human
cacaucccaggcaggacagagcaggagaucau

SEQ ID NO: 344678 - RNA, 32 nt, Human
cacauccccagcugccuggcuggguccugaag

SEQ ID NO: 344679 - RNA, 23 nt, Human
cacaucccccagcaagccagcca

SEQ ID NO: 344680 - RNA, 32 nt, Human
cacauccccuaaacucucaucuccuguggccc

SEQ ID NO: 344681 - RNA, 32 nt, Human
cacaucccggcacagacagacacacacgaggc

SEQ ID NO: 344682 - RNA, 18 nt, Human
cacaucccugauggcaga

SEQ ID NO: 344683 - RNA, 32 nt, Human
cacaucccugcucccuacuuccuggcagccaa

SEQ ID NO: 344684 - RNA, 31 nt, Human
cacaucccugggugaagauggggagacagug

SEQ ID NO: 344685 - RNA, 32 nt, Human
cacaucccuggucucccgccuccugggcaagc

SEQ ID NO: 344686 - RNA, 32 nt, Human
cacauccgcugccauggucugugucgugccag

SEQ ID NO: 344687 - RNA, 32 nt, Human
cacauccguccuccugucucagggcuggcagg

SEQ ID NO: 344688 - RNA, 32 nt, Human
cacauccgugagccuguguccgcagcugcugc

SEQ ID NO: 344689 - RNA, 26 nt, Human
cacauccucaauaaaaccuguuguau

SEQ ID NO: 344690 - RNA, 32 nt, Human
cacauccucagcaucccugccuccugcaucca

SEQ ID NO: 344691 - RNA, 32 nt, Human
cacauccucgagccaggcagggcgcccggcuu

SEQ ID NO: 344692 - RNA, 32 nt, Human
cacauccucuccaggaaggcagugaggggcug

SEQ ID NO: 344693 - RNA, 20 nt, Human
cacauccugccugccccuca

SEQ ID NO: 344694 - RNA, 32 nt, Human
cacauccugccugccccucagcccuggcccag

SEQ ID NO: 344695 - RNA, 32 nt, Human
cacauccugccugcuguugcagccuggcuggg

SEQ ID NO: 344696 - RNA, 32 nt, Human
cacauccugggugggacagagcaggacaaugc

SEQ ID NO: 344697 - RNA, 32 nt, Human
cacauccuguccuaucucccccaaaccauacc

SEQ ID NO: 344698 - RNA, 32 nt, Human
cacauccugugcacugcugaaggacccuacgc

SEQ ID NO: 344699 - RNA, 25 nt, Human
cacauccuucuccugcucucuuuca

SEQ ID NO: 344700 - RNA, 32 nt, Human
cacauccuucuugcucaaccacugggugcaca

SEQ ID NO: 344701 - RNA, 32 nt, Human
cacauccuugugcacacauagauccaugcaca

SEQ ID NO: 344702 - RNA, 32 nt, Human
cacaucguaacuuugaccccaccgcaacccuu

SEQ ID NO: 344703 - RNA, 32 nt, Human
cacaucuaaucucauuucacaugaaagaagaa

SEQ ID NO: 344704 - RNA, 32 nt, Human
cacaucuacacccccaagcacacacacauggu

SEQ ID NO: 344705 - RNA, 32 nt, Human
cacaucuacucaacuauccgaauauguccauu

SEQ ID NO: 344706 - RNA, 32 nt, Human
cacaucuagaauucagcuucugacuaccaauc

SEQ ID NO: 344707 - RNA, 32 nt, Human
cacaucuagcauccagaacagugagaauguau

SEQ ID NO: 344708 - RNA, 32 nt, Human
cacaucuauguucacugccacucugaaaaagg

SEQ ID NO: 344709 - RNA, 32 nt, Human
cacaucucacgcagcugggaacaugugcaggc

SEQ ID NO: 344710 - RNA, 32 nt, Human
cacaucuccauucuaguugucuugaaccacgu

SEQ ID NO: 344711 - RNA, 32 nt, Human
cacaucuccuagagcugggaaugugucccuaa

SEQ ID NO: 344712 - RNA, 32 nt, Human
cacaucuccuccugcccaagauguaaggaagc

SEQ ID NO: 344713 - RNA, 32 nt, Human
cacaucucgcccuucuggaccugcacugggag

SEQ ID NO: 344714 - RNA, 32 nt, Human
cacaucucuagucccaauuacucaggaggcug

SEQ ID NO: 344715 - RNA, 32 nt, Human
cacaucucuagucccagcuacucgggaggcug

SEQ ID NO: 344716 - RNA, 32 nt, Human
cacaucugaaaaggaaggugugagaagcaaag

SEQ ID NO: 344717 - RNA, 32 nt, Human
cacaucugaauuccuucucuguggcauaugcu

SEQ ID NO: 344718 - RNA, 32 nt, Human
cacaucugaguugcugccuguucuucacacuu

SEQ ID NO: 344719 - RNA, 32 nt, Human
cacaucugcaccugugagaggccaguuugagg

SEQ ID NO: 344720 - RNA, 31 nt, Human
cacaucugcagcugccggccugugaucgugc

SEQ ID NO: 344721 - RNA, 32 nt, Human
cacaucugcccauggggaguguuuucacagcc

SEQ ID NO: 344722 - RNA, 31 nt, Human
cacaucugccucuggcugccugcguccucuc

SEQ ID NO: 344723 - RNA, 32 nt, Human
cacaucugcuuccacuguguucccacgggugc

SEQ ID NO: 344724 - RNA, 18 nt, Human
cacaucugggacaggagg

SEQ ID NO: 344725 - RNA, 32 nt, Human
cacaucugggagacaaaugcaccaucagggag

SEQ ID NO: 344726 - RNA, 22 nt, Human
cacaucuguaaucccagcacuu

SEQ ID NO: 344727 - RNA, 23 nt, Human
cacaucuguaaucccagcacuuu

SEQ ID NO: 344728 - RNA, 32 nt, Human
cacaucuguaaucccagcuacucgggaggcug

SEQ ID NO: 344729 - RNA, 32 nt, Human
cacaucuguagucccagcuacucuggaggcug

SEQ ID NO: 344730 - RNA, 32 nt, Human
cacaucuguauuccagccugggcaauagagca

SEQ ID NO: 344731 - RNA, 32 nt, Human
cacaucugucaugcaguaguuugcugcaaggu

SEQ ID NO: 344732 - RNA, 32 nt, Human
cacaucugucugcaggcugucucuccaggcac

SEQ ID NO: 344733 - RNA, 32 nt, Human
cacaucugugaaacagggagcaugaggcacaa

SEQ ID NO: 344734 - RNA, 32 nt, Human
cacaucugugagguggagggcugguguggagg

SEQ ID NO: 344735 - RNA, 32 nt, Human
cacaucuguggucccagcuacuggggaggcug

SEQ ID NO: 344736 - RNA, 32 nt, Human
cacaucuguggucccagcuacuugagaggcug

SEQ ID NO: 344737 - RNA, 32 nt, Human
cacaucuguggucccagcugcuggggaggcug

SEQ ID NO: 344738 - RNA, 32 nt, Human
cacaucuguguguugcauagcauaagccaaau

SEQ ID NO: 344739 - RNA, 32 nt, Human
cacaucuguuggagagauaaucacuccuuuuc

SEQ ID NO: 344740 - RNA, 32 nt, Human
cacaucuguuggaggacaucccagauuugcuu

SEQ ID NO: 344741 - RNA, 32 nt, Human
cacaucuuauaguaugagaaggaagguuuggg

SEQ ID NO: 344742 - RNA, 32 nt, Human
cacaucuucagccuccuccugggccagcucuu

SEQ ID NO: 344743 - RNA, 24 nt, Human
cacaucuuccacaggucucagaau

SEQ ID NO: 344744 - RNA, 32 nt, Human
cacaucuucccaagccaggccagccaggagcg

SEQ ID NO: 344745 - RNA, 32 nt, Human
cacaucuuccugucuucuucugagccuucuaa

SEQ ID NO: 344746 - RNA, 32 nt, Human
cacaucuugcagcauuuuucuuaaggcuaugc

SEQ ID NO: 344747 - RNA, 32 nt, Human
cacaucuugccaugaucucugcuggaggaagc

SEQ ID NO: 344748 - RNA, 32 nt, Human
cacaucuugcucugcugacagacacaggcccg

SEQ ID NO: 344749 - RNA, 32 nt, Human
cacaucuuggccucuuacccagcuucagcagu

SEQ ID NO: 344750 - RNA, 32 nt, Human
cacaugaaagccucugaggcuucuguugcgag

SEQ ID NO: 344751 - RNA, 20 nt, Human
cacaugaacacaugcacaug

SEQ ID NO: 344752 - RNA, 32 nt, Human
cacaugaagaagcacacgggggagcggcccua

SEQ ID NO: 344753 - RNA, 32 nt, Human
cacaugaagguuuacuugagcuuuugugauuc

SEQ ID NO: 344754 - RNA, 32 nt, Human
cacaugacacccaggagggguugugaggacuc

SEQ ID NO: 344755 - RNA, 32 nt, Human
cacaugacagcccauucuuucuuucuggguga

SEQ ID NO: 344756 - RNA, 22 nt, Human
cacaugacagugaccaagugga

SEQ ID NO: 344757 - RNA, 32 nt, Human
cacaugacagugccugaagggcucccuucaag

SEQ ID NO: 344758 - RNA, 32 nt, Human
cacaugacauugaagaccaucccaagcuaucg

SEQ ID NO: 344759 - RNA, 32 nt, Human
cacaugaccugugguagcuggaaguggggcag

SEQ ID NO: 344760 - RNA, 32 nt, Human
cacaugacguguccccuacaagcacagacaca

SEQ ID NO: 344761 - RNA, 32 nt, Human
cacaugacucuaguuauugauugcuuuuaaug

SEQ ID NO: 344762 - RNA, 32 nt, Human
cacaugagaaacuuuuaaaaaugcagaugcuu

SEQ ID NO: 344763 - RNA, 28 nt, Human
cacaugagacaaaugcgcucagcuucaa

SEQ ID NO: 344764 - RNA, 32 nt, Human
cacaugagacauggucagaaacagugcuugga

SEQ ID NO: 344765 - RNA, 32 nt, Human
cacaugagcagggugagaggugaggcaagguu

SEQ ID NO: 344766 - RNA, 32 nt, Human
cacaugagcccaggagguugaggcugcaguga

SEQ ID NO: 344767 - RNA, 32 nt, Human
cacaugagccugcucccuacugccaacaccgu

SEQ ID NO: 344768 - RNA, 31 nt, Human
cacaugagccuucucccaugcaaagcuuccc

SEQ ID NO: 344769 - RNA, 28 nt, Human
cacaugagcuacucucagggcaccaguc

SEQ ID NO: 344770 - RNA, 26 nt, Human
cacaugagugggucuauagcccgcuc

SEQ ID NO: 344771 - RNA, 25 nt, Human
cacaugauauuaaaacguacacuca

SEQ ID NO: 344772 - RNA, 32 nt, Human
cacaugaugaacaccuggcucauccauagagu

SEQ ID NO: 344773 - RNA, 32 nt, Human
cacaugcaaaaauacacacaugcacaaagaug

SEQ ID NO: 344774 - RNA, 32 nt, Human
cacaugcaacccaacagcagugcagugugaua

SEQ ID NO: 344775 - RNA, 32 nt, Human
cacaugcacacacacucacgcaugagcaaacg

SEQ ID NO: 344776 - RNA, 20 nt, Human
cacaugcacacacauaugca

SEQ ID NO: 344777 - RNA, 18 nt, Human
cacaugcacacacaugca

SEQ ID NO: 344778 - RNA, 22 nt, Human
cacaugcacacacaugcaugca

SEQ ID NO: 344779 - RNA, 32 nt, Human
cacaugcacacacgcacacacaugcacacacg

SEQ ID NO: 344780 - RNA, 32 nt, Human
cacaugcacacagaacucugacacaggaucag

SEQ ID NO: 344781 - RNA, 19 nt, Human
cacaugcacacagcaugca

SEQ ID NO: 344782 - RNA, 32 nt, Human
cacaugcacacauacacgcacaugcacacaua

SEQ ID NO: 344783 - RNA, 20 nt, Human
cacaugcacacaugcaugca

SEQ ID NO: 344784 - RNA, 32 nt, Human
cacaugcacacaugcaugcacacucacauaca

SEQ ID NO: 344785 - RNA, 32 nt, Human
cacaugcacacaugcaugcacacucauacacu

SEQ ID NO: 344786 - RNA, 32 nt, Human
cacaugcaccuguaaucccagcuacucaggaa

SEQ ID NO: 344787 - RNA, 32 nt, Human
cacaugcacgauuaaagaggagacgccgggac

SEQ ID NO: 344788 - RNA, 32 nt, Human
cacaugcacgcacacacacauauggggaccug

SEQ ID NO: 344789 - RNA, 32 nt, Human
cacaugcacgugugugcacguacacacacaua

SEQ ID NO: 344790 - RNA, 32 nt, Human
cacaugcagcucccaugccacccuccagaauu

SEQ ID NO: 344791 - RNA, 32 nt, Human
cacaugcagcugggcugagugaugucagcgag

SEQ ID NO: 344792 - RNA, 32 nt, Human
cacaugcaggcagauggaggcagggcucacac

SEQ ID NO: 344793 - RNA, 32 nt, Human
cacaugcaguccucaauucuucauugagcuag

SEQ ID NO: 344794 - RNA, 32 nt, Human
cacaugcauaaauauuaugugucaauaaaauu

SEQ ID NO: 344795 - RNA, 32 nt, Human
cacaugcaugcacacauacacaugcacacaca

SEQ ID NO: 344796 - RNA, 32 nt, Human
cacaugcaugcacacucauacacucacgcacu

SEQ ID NO: 344797 - RNA, 32 nt, Human
cacaugccaauuucagcacccaacugagaucc

SEQ ID NO: 344798 - RNA, 32 nt, Human
cacaugccaccugagcaaaacugccugcacuu

SEQ ID NO: 344799 - RNA, 32 nt, Human
cacaugccauucaguuuacccauugcuagugu

SEQ ID NO: 344800 - RNA, 32 nt, Human
cacaugcccaaacucuggguggggaagaggaa

SEQ ID NO: 344801 - RNA, 32 nt, Human
cacaugcccacauacucaugcacucacauuca

SEQ ID NO: 344802 - RNA, 32 nt, Human
cacaugcccacugcagcccuccagccucuggu

SEQ ID NO: 344803 - RNA, 32 nt, Human
cacaugccccaggggagcgaggagaacucuug

SEQ ID NO: 344804 - RNA, 32 nt, Human
cacaugccuauaaucccagcacuuugggaggc

SEQ ID NO: 344805 - RNA, 32 nt, Human
cacaugccugcgccugcugccugcugagauga

SEQ ID NO: 344806 - RNA, 32 nt, Human
cacaugccuguaacccagcuacucgggaggcu

SEQ ID NO: 344807 - RNA, 32 nt, Human
cacaugccuguaaucccagauacuugggaggc

SEQ ID NO: 344808 - RNA, 32 nt, Human
cacaugccuguaaucccagcacuuugggaagc

SEQ ID NO: 344809 - RNA, 32 nt, Human
cacaugccuguaaucccagcacuuugggaggc

SEQ ID NO: 344810 - RNA, 32 nt, Human
cacaugccuguaaucccagcacuuuggggguc

SEQ ID NO: 344811 - RNA, 32 nt, Human
cacaugccuguaaucccagcuacuuggcaggc

SEQ ID NO: 344812 - RNA, 32 nt, Human
cacaugccuguaaucccagcuacuugggaggc

SEQ ID NO: 344813 - RNA, 32 nt, Human
cacaugccuguaauccgagugcuuugggaggc

SEQ ID NO: 344814 - RNA, 32 nt, Human
cacaugccuguaauccuagcacuuugggaggc

SEQ ID NO: 344815 - RNA, 32 nt, Human
cacaugccuguaauccuagcuacucgggaggc

SEQ ID NO: 344816 - RNA, 32 nt, Human
cacaugccuguaaucucagcuacuugggaggc

SEQ ID NO: 344817 - RNA, 32 nt, Human
cacaugccugugaucccagcacuuugggaugc

SEQ ID NO: 344818 - RNA, 32 nt, Human
cacaugccuuccucccccuauuccacccccaa

SEQ ID NO: 344819 - RNA, 32 nt, Human
cacaugccuugaucauagcacuugccugcgcu

SEQ ID NO: 344820 - RNA, 32 nt, Human
cacaugcgaaggacagccugcagugaccagag

SEQ ID NO: 344821 - RNA, 32 nt, Human
cacaugcgcacacacacuugcauucaugaauc

SEQ ID NO: 344822 - RNA, 32 nt, Human
cacaugcgcacacgcacacucggacucacacg

SEQ ID NO: 344823 - RNA, 32 nt, Human
cacaugcgccuguaaucccagcuacucgggca

SEQ ID NO: 344824 - RNA, 32 nt, Human
cacaugcgugucagcacauacagccgcuuccu

SEQ ID NO: 344825 - RNA, 32 nt, Human
cacaugcguuucuguggcagcuguggggacuu

SEQ ID NO: 344826 - RNA, 31 nt, Human
cacaugcucaauaaauauuuuaaaugaguga

SEQ ID NO: 344827 - RNA, 32 nt, Human
cacaugcucacugccagcuccuguccugagua

SEQ ID NO: 344828 - RNA, 32 nt, Human
cacaugcucacuguucuccccauccuuguccu

SEQ ID NO: 344829 - RNA, 32 nt, Human
cacaugcucacuguuuuccccauccuuguccu

SEQ ID NO: 344830 - RNA, 32 nt, Human
cacaugcucagggccaccugagacugucacug

SEQ ID NO: 344831 - RNA, 32 nt, Human
cacaugcucaucuacagcuuucuuggaagaag

SEQ ID NO: 344832 - RNA, 32 nt, Human
cacaugcuguuuucucugccuggcucucucuu

SEQ ID NO: 344833 - RNA, 32 nt, Human
cacaugcuuccugcggccucuucauccuugaa

SEQ ID NO: 344834 - RNA, 32 nt, Human
cacaugcuuguaaucccagcuacucgggagcu

SEQ ID NO: 344835 - RNA, 32 nt, Human
cacaugcuuguaaucccagcuacucgggaggc

SEQ ID NO: 344836 - RNA, 32 nt, Human
cacauggaagaggucagaguguguggucacca

SEQ ID NO: 344837 - RNA, 32 nt, Human
cacauggaaucuaccagcaucucccaagaaga

SEQ ID NO: 344838 - RNA, 32 nt, Human
cacauggacacacacccaagccacaagaaauc

SEQ ID NO: 344839 - RNA, 32 nt, Human
cacauggacacaugauggggaacaacacacac

SEQ ID NO: 344840 - RNA, 23 nt, Human
cacauggacccagucuacacuca

SEQ ID NO: 344841 - RNA, 32 nt, Human
cacauggaccccuugggcugagcaccaagacc

SEQ ID NO: 344842 - RNA, 32 nt, Human
cacauggacucuuccagggagagagaccagcu

SEQ ID NO: 344843 - RNA, 32 nt, Human
cacauggagcuaaauggcucaguggcuccaga

SEQ ID NO: 344844 - RNA, 21 nt, Human
cacauggaggcuuuucuuuca

SEQ ID NO: 344845 - RNA, 32 nt, Human
cacauggaggucuacggauggcccaggcaaug

SEQ ID NO: 344846 - RNA, 28 nt, Human
cacauggcaacagcaggagcaagugaga

SEQ ID NO: 344847 - RNA, 32 nt, Human
cacauggcagcccagggggcaggagaagcccg

SEQ ID NO: 344848 - RNA, 32 nt, Human
cacauggccauggagucagccucagcccuguc

SEQ ID NO: 344849 - RNA, 32 nt, Human
cacauggcccaggaguggcaccauguugcagg

SEQ ID NO: 344850 - RNA, 32 nt, Human
cacauggcccuugagaaauguccuugcacauu

SEQ ID NO: 344851 - RNA, 32 nt, Human
cacauggccuccaaggagugggacuccuggac

SEQ ID NO: 344852 - RNA, 18 nt, Human
cacauggcucccucgccu

SEQ ID NO: 344853 - RNA, 32 nt, Human
cacauggcuggacuccagccaggaggacacac

SEQ ID NO: 344854 - RNA, 32 nt, Human
cacauggcuggcuggcugcugggugcacuuac

SEQ ID NO: 344855 - RNA, 32 nt, Human
cacauggcugugcaggccaggaggcccacaga

SEQ ID NO: 344856 - RNA, 24 nt, Human
cacauggcuucuuuugcaguuuuu

SEQ ID NO: 344857 - RNA, 32 nt, Human
cacaugggaauugcacuggugacagauaaggu

SEQ ID NO: 344858 - RNA, 32 nt, Human
cacaugggagauggggacaggaaagaugauaa

SEQ ID NO: 344859 - RNA, 32 nt, Human
cacaugggcagcucuguucccuucgccucuac

SEQ ID NO: 344860 - RNA, 32 nt, Human
cacaugggcccaggcugagugugagugagcau

SEQ ID NO: 344861 - RNA, 32 nt, Human
cacaugggcugggggccagggauaauggacag

SEQ ID NO: 344862 - RNA, 32 nt, Human
cacaugggcugggggccagggcuggauggaca

SEQ ID NO: 344863 - RNA, 32 nt, Human
cacauggggccagcucaggaccaccagggcau

SEQ ID NO: 344864 - RNA, 32 nt, Human
cacaugggguuuuggagguugaauaggaguuc

SEQ ID NO: 344865 - RNA, 32 nt, Human
cacauggguaggucaguucuuugguccaagcc

SEQ ID NO: 344866 - RNA, 32 nt, Human
cacauggguauaugccaucuucaugccuggcu

SEQ ID NO: 344867 - RNA, 32 nt, Human
cacauggguguuucuauuauccuuggaagcac

SEQ ID NO: 344868 - RNA, 32 nt, Human
cacauggugccaucuucaucuuccgcuccaca

SEQ ID NO: 344869 - RNA, 32 nt, Human
cacaugguggcaccagcaccacuccuuuccuu

SEQ ID NO: 344870 - RNA, 32 nt, Human
cacauggugugggccgacaugaagagcugcca

SEQ ID NO: 344871 - RNA, 24 nt, Human
cacaugguguuucuuuuguuccuu

SEQ ID NO: 344872 - RNA, 32 nt, Human
cacaugguuauuggaaaauacuaccuacuggu

SEQ ID NO: 344873 - RNA, 32 nt, Human
cacaugguucauaauuucacuuccuuuagauc

SEQ ID NO: 344874 - RNA, 32 nt, Human
cacaugguugcagcacugacagaguguuuuga

SEQ ID NO: 344875 - RNA, 20 nt, Human
cacaugguuuccucugccuu

SEQ ID NO: 344876 - RNA, 32 nt, Human
cacauguaauccauaaccaccaaaaauacuau

SEQ ID NO: 344877 - RNA, 32 nt, Human
cacauguacauccuggaagcugcccaaggugu

SEQ ID NO: 344878 - RNA, 32 nt, Human
cacauguacaucuuauuucugccucuaguuuu

SEQ ID NO: 344879 - RNA, 32 nt, Human
cacauguagcauggucccucugucucaggcuc

SEQ ID NO: 344880 - RNA, 32 nt, Human
cacauguagcuacucaggaggcugagacaaga

SEQ ID NO: 344881 - RNA, 32 nt, Human
cacauguaucuaugcauuuucuggacccguuc

SEQ ID NO: 344882 - RNA, 32 nt, Human
cacauguaugcacacacacaugcaccgcacac

SEQ ID NO: 344883 - RNA, 32 nt, Human
cacaugucccugucacacagguuccaagaaac

SEQ ID NO: 344884 - RNA, 32 nt, Human
cacauguccggggguugccaccagagacggcu

SEQ ID NO: 344885 - RNA, 32 nt, Human
cacaugucuaacaccacuuccaccccaccccu

SEQ ID NO: 344886 - RNA, 20 nt, Human
cacaugucucagggcuaccu

SEQ ID NO: 344887 - RNA, 32 nt, Human
cacaugucuguaauccuagcacuuugggaggc

SEQ ID NO: 344888 - RNA, 32 nt, Human
cacaugucuguccucagagcaggggccagaug

SEQ ID NO: 344889 - RNA, 32 nt, Human
cacaugugcacacacccucaugcauggguguc

SEQ ID NO: 344890 - RNA, 24 nt, Human
cacaugugcacauguacacaugua

SEQ ID NO: 344891 - RNA, 32 nt, Human
cacaugugcaggacaagcccaggggagcuccc

SEQ ID NO: 344892 - RNA, 32 nt, Human
cacaugugcuaucagggauggcuggugcgcca

SEQ ID NO: 344893 - RNA, 32 nt, Human
cacauguggcuguugucauucuuucugcaucc

SEQ ID NO: 344894 - RNA, 32 nt, Human
cacauguguaugcacauuugccagaauauaag

SEQ ID NO: 344895 - RNA, 32 nt, Human
cacaugugugcacgcacacauacaaucugggu

SEQ ID NO: 344896 - RNA, 18 nt, Human
cacauguucaccauagaa

SEQ ID NO: 344897 - RNA, 32 nt, Human
cacauguuccagcucccagccugcugagcaca

SEQ ID NO: 344898 - RNA, 22 nt, Human
cacauguugccuuuuugucuuu

SEQ ID NO: 344899 - RNA, 32 nt, Human
cacauuaaaacaaugggcucucguuugcuaua

SEQ ID NO: 344900 - RNA, 32 nt, Human
cacauuaaagagcaaagucaacagaaaaucag

SEQ ID NO: 344901 - RNA, 32 nt, Human
cacauuaaaggucagauguggggaagauagau

SEQ ID NO: 344902 - RNA, 32 nt, Human
cacauuaauucccuuugcuauacugugauccu

SEQ ID NO: 344903 - RNA, 32 nt, Human
cacauuacagcccaggacucagucaaggaugc

SEQ ID NO: 344904 - RNA, 32 nt, Human
cacauuaccaguacuuagaguaugcuaguuau

SEQ ID NO: 344905 - RNA, 32 nt, Human
cacauuaccugggaaagcucuccucccuccug

SEQ ID NO: 344906 - RNA, 32 nt, Human
cacauuaggaagcacaaaauaccaauuuuccu

SEQ ID NO: 344907 - RNA, 23 nt, Human
cacauuaguguguugucucuuuc

SEQ ID NO: 344908 - RNA, 32 nt, Human
cacauuauaaaacuaaggaugaucauuuuuaa

SEQ ID NO: 344909 - RNA, 32 nt, Human
cacauuaucuggagagaaagaaaggagaauuu

SEQ ID NO: 344910 - RNA, 32 nt, Human
cacauucaccucuaccuccaccaucaccauca

SEQ ID NO: 344911 - RNA, 22 nt, Human
cacauucacgcuguuuguuuca

SEQ ID NO: 344912 - RNA, 32 nt, Human
cacauucacugcacugccaaagcugcgccccu

SEQ ID NO: 344913 - RNA, 32 nt, Human
cacauucagcacccaccaccucccucuuucgc

SEQ ID NO: 344914 - RNA, 32 nt, Human
cacauucagcuggcuggauggacagugaggaa

SEQ ID NO: 344915 - RNA, 32 nt, Human
cacauucaugaagaauggccuggagauguuuu

SEQ ID NO: 344916 - RNA, 16 nt, Human
cacauuccacagggca

SEQ ID NO: 344917 - RNA, 32 nt, Human
cacauuccauuuucuucugaucauacuuccuc

SEQ ID NO: 344918 - RNA, 32 nt, Human
cacauuccccaaccaaggacagucuauaccaa

SEQ ID NO: 344919 - RNA, 32 nt, Human
cacauucccuugggacagaggcuacagguugg

SEQ ID NO: 344920 - RNA, 32 nt, Human
cacauuccuagagaggagccaaguucuaguag

SEQ ID NO: 344921 - RNA, 32 nt, Human
cacauuccucuccuagugucagucuccaacaa

SEQ ID NO: 344922 - RNA, 32 nt, Human
cacauuccucuugaguucugcagcuucugugu

SEQ ID NO: 344923 - RNA, 32 nt, Human
cacauuccugccacccuucuucuucuugcucu

SEQ ID NO: 344924 - RNA, 32 nt, Human
cacauuccugggugccuuuggugaggacugca

SEQ ID NO: 344925 - RNA, 32 nt, Human
cacauucuaaucccucuccccauccuguuuca

SEQ ID NO: 344926 - RNA, 32 nt, Human
cacauucucccagggacccagggcgggccgug

SEQ ID NO: 344927 - RNA, 32 nt, Human
cacauucugauucagcaggccugagauucuac

SEQ ID NO: 344928 - RNA, 32 nt, Human
cacauucugcaaggacaggagccaccuuccuc

SEQ ID NO: 344929 - RNA, 32 nt, Human
cacauucugguugugcagaacccacggcgaca

SEQ ID NO: 344930 - RNA, 32 nt, Human
cacauucuuacagaggagauggagugcuauga

SEQ ID NO: 344931 - RNA, 32 nt, Human
cacauucuuagcacaccuacaccucuugaaaa

SEQ ID NO: 344932 - RNA, 32 nt, Human
cacauucuucaaggucaaagucuagaugacag

SEQ ID NO: 344933 - RNA, 32 nt, Human
cacauucuucaugauccauuucccaggagccc

SEQ ID NO: 344934 - RNA, 32 nt, Human
cacauucuuccuacagacuccaaccaaccauu

SEQ ID NO: 344935 - RNA, 32 nt, Human
cacauucuuguccuaaaaggguacuucaagca

SEQ ID NO: 344936 - RNA, 24 nt, Human
cacauucuuuggcuguuucuuuua

SEQ ID NO: 344937 - RNA, 32 nt, Human
cacauugaacauccuuccagaaagucuuugag

SEQ ID NO: 344938 - RNA, 32 nt, Human
cacauugaauagaaauagugacaacuucucaa

SEQ ID NO: 344939 - RNA, 32 nt, Human
cacauugagaaccucaaggaggagcuggccua

SEQ ID NO: 344940 - RNA, 32 nt, Human
cacauugaucacuuucucaaccuuugaucucu

SEQ ID NO: 344941 - RNA, 32 nt, Human
cacauugccuccuuccccucccucucucaugg

SEQ ID NO: 344942 - RNA, 32 nt, Human
cacauugcucuuccuggcucuaugcacaaagg

SEQ ID NO: 344943 - RNA, 32 nt, Human
cacauuggaacaaccuucuuuccagugcuaag

SEQ ID NO: 344944 - RNA, 32 nt, Human
cacauuggacaauggugcaugccucacaccug

SEQ ID NO: 344945 - RNA, 32 nt, Human
cacauuggcucacaccugugaucccagcacuu

SEQ ID NO: 344946 - RNA, 32 nt, Human
cacauugggaagaucacuugaggcaaggaguu

SEQ ID NO: 344947 - RNA, 32 nt, Human
cacauugggaauggccacaacugugaaguuag

SEQ ID NO: 344948 - RNA, 32 nt, Human
cacauugggaggccgaggcgggcagaugucuu

SEQ ID NO: 344949 - RNA, 32 nt, Human
cacauugggcagcgcccuuccucuccacccuc

SEQ ID NO: 344950 - RNA, 32 nt, Human
cacauuggugcagaccuucggggccugucuga

SEQ ID NO: 344951 - RNA, 32 nt, Human
cacauuguacaaaaauaaugugacuucugagg

SEQ ID NO: 344952 - RNA, 32 nt, Human
cacauuguauaugauucgguuuauacauauua

SEQ ID NO: 344953 - RNA, 21 nt, Human
cacauuguccauccacuggaa

SEQ ID NO: 344954 - RNA, 32 nt, Human
cacauuguguucuugguucaucauguuaaaga

SEQ ID NO: 344955 - RNA, 32 nt, Human
cacauuguuuuuccugccuuuuuauggcuguc

SEQ ID NO: 344956 - RNA, 32 nt, Human
cacauuuacagaaugguugcugagugucugug

SEQ ID NO: 344957 - RNA, 32 nt, Human
cacauuuaccacuugcacaccagaccuuauaa

SEQ ID NO: 344958 - RNA, 21 nt, Human
cacauuuagaauucagagcca

SEQ ID NO: 344959 - RNA, 31 nt, Human
cacauuucaauaaaauuguuuggaaaauaaa

SEQ ID NO: 344960 - RNA, 32 nt, Human
cacauuucagaugcucaguagccacauguggu

SEQ ID NO: 344961 - RNA, 32 nt, Human
cacauuucagcagcuuugagaaaugaggacag

SEQ ID NO: 344962 - RNA, 32 nt, Human
cacauuucagggcacucuggccugugugcugg

SEQ ID NO: 344963 - RNA, 32 nt, Human
cacauuucauucuuugcagcuuugcuaaucca

SEQ ID NO: 344964 - RNA, 32 nt, Human
cacauuuccguguuacagcagcugccugauga

SEQ ID NO: 344965 - RNA, 32 nt, Human
cacauuucuacaaaaugcaaaaauuagcuggg

SEQ ID NO: 344966 - RNA, 32 nt, Human
cacauuucucauuccuccuaaaugaucaucuu

SEQ ID NO: 344967 - RNA, 32 nt, Human
cacauuucuuagcuucucugagccuccauuuc

SEQ ID NO: 344968 - RNA, 32 nt, Human
cacauuucuuucuccauucuguuccacugcuc

SEQ ID NO: 344969 - RNA, 32 nt, Human
cacauuugcccuuggucuucucucuuucuaga

SEQ ID NO: 344970 - RNA, 32 nt, Human
cacauuuggaauugggcaccgagaagaccuga

SEQ ID NO: 344971 - RNA, 24 nt, Human
cacauuuggagguuuugcuggaaa

SEQ ID NO: 344972 - RNA, 22 nt, Human
cacauuuguaaaugucuuuuca

SEQ ID NO: 344973 - RNA, 21 nt, Human
cacauuuguccugacucuuca

SEQ ID NO: 344974 - RNA, 32 nt, Human
cacauuugucuucugagcugcuggcaguuuug

SEQ ID NO: 344975 - RNA, 32 nt, Human
cacauuuuacauaugaaagaguggauuuucag

SEQ ID NO: 344976 - RNA, 32 nt, Human
cacauuuuacucaucaagucucuuucauuucg

SEQ ID NO: 344977 - RNA, 32 nt, Human
cacauuuuccagaaaguuguucuaaguugaga

SEQ ID NO: 344978 - RNA, 32 nt, Human
cacauuuuccuauccucuucugagccuuccaa

SEQ ID NO: 344979 - RNA, 32 nt, Human
cacauuuuccugucuucuucugagcccuccaa

SEQ ID NO: 344980 - RNA, 32 nt, Human
cacauuuuccuucuaugcaaucaugccugucu

SEQ ID NO: 344981 - RNA, 32 nt, Human
cacauuuucuacccaaucaucuggauuucaag

SEQ ID NO: 344982 - RNA, 32 nt, Human
cacauuuugauacgcagaucacuugagcuugu

SEQ ID NO: 344983 - RNA, 32 nt, Human
cacauuuugcagaaacuuguucacauuuccaa

SEQ ID NO: 344984 - RNA, 32 nt, Human
cacauuuugggagcuuuucuacaugucuguuu

SEQ ID NO: 344985 - RNA, 32 nt, Human
cacauuuugugcgcaugaugaagagagcaccg

SEQ ID NO: 344986 - RNA, 32 nt, Human
cacauuuuuacuaccagcuuuagacaaaaccc

SEQ ID NO: 344987 - RNA, 32 nt, Human
cacauuuuucaugcagucauuugcagugaauu

SEQ ID NO: 344988 - RNA, 32 nt, Human
cacauuuuucauuguugcauuuagagguuuca

SEQ ID NO: 344989 - RNA, 32 nt, Human
cacauuuuucgucuuuuggacuucuggugucu

SEQ ID NO: 344990 - RNA, 32 nt, Human
cacauuuuugcuuguggaaagacuguuuucca

SEQ ID NO: 344991 - RNA, 32 nt, Human
caccaaaaaugagucagaaacacagaagacua

SEQ ID NO: 344992 - RNA, 32 nt, Human
caccaaaagaggcaaacugagaugcagacaaa

SEQ ID NO: 344993 - RNA, 32 nt, Human
caccaaaauagcugggauuacaggcgcccacc

SEQ ID NO: 344994 - RNA, 32 nt, Human
caccaaacacccaagauuaacaggcuuuuguu

SEQ ID NO: 344995 - RNA, 32 nt, Human
caccaaaccacugccccucggagccugguagu

SEQ ID NO: 344996 - RNA, 32 nt, Human
caccaaacuaccucucugauagcugguguuca

SEQ ID NO: 344997 - RNA, 32 nt, Human
caccaaacucgaacugguaagaagacuguuag

SEQ ID NO: 344998 - RNA, 32 nt, Human
caccaaacuucucccuguucccaaacccugcc

SEQ ID NO: 344999 - RNA, 32 nt, Human
caccaaagaggaagaagagcuguggaggccac

SEQ ID NO: 345000 - RNA, 18 nt, Human
caccaaagaucccaggga

SEQ ID NO: 345001 - RNA, 32 nt, Human
caccaaagccaaucugcucuagcugcccacag

SEQ ID NO: 345002 - RNA, 32 nt, Human
caccaaagccccagggauggagcccaguggcu

SEQ ID NO: 345003 - RNA, 32 nt, Human
caccaaagcuacucaggaagccaaggugugag

SEQ ID NO: 345004 - RNA, 32 nt, Human
caccaaagcugacagaaguuauaccuuacucc

SEQ ID NO: 345005 - RNA, 32 nt, Human
caccaaagcuuuauuuauaucauuccaguauc

SEQ ID NO: 345006 - RNA, 32 nt, Human
caccaaaggaagaugcagccacccuccuuuac

SEQ ID NO: 345007 - RNA, 20 nt, Human
caccaaaggcacccgggggc

SEQ ID NO: 345008 - RNA, 32 nt, Human
caccaaaggccaccaggcuaccuucacagauc

SEQ ID NO: 345009 - RNA, 32 nt, Human
caccaaagggccagauuucuaucuucagaagg

SEQ ID NO: 345010 - RNA, 32 nt, Human
caccaaaggggaagaacaauaugggagaagcg

SEQ ID NO: 345011 - RNA, 32 nt, Human
caccaaaguaugaacuggagaggguaccucag

SEQ ID NO: 345012 - RNA, 32 nt, Human
caccaaaguucugcagacagacccagccaccc

SEQ ID NO: 345013 - RNA, 22 nt, Human
caccaaaucccuguuuuugucc

SEQ ID NO: 345014 - RNA, 20 nt, Human
caccaaauccucugcguccc

SEQ ID NO: 345015 - RNA, 32 nt, Human
caccaaaucuccugcccuucccagcuccaucc

SEQ ID NO: 345016 - RNA, 32 nt, Human
caccaaaucugacgacuccuuccagagccuac

SEQ ID NO: 345017 - RNA, 32 nt, Human
caccaaauguccccugcuccagucccacuccu

SEQ ID NO: 345018 - RNA, 26 nt, Human
caccaaauuaagucauucuuaucaca

SEQ ID NO: 345019 - RNA, 32 nt, Human
caccaaauucuguuugagauccuggccaagac

SEQ ID NO: 345020 - RNA, 32 nt, Human
caccaaauucuuuuggugaaggacgcuucaga

SEQ ID NO: 345021 - RNA, 32 nt, Human
caccaacaacacagacaagacccuguuuacaa

SEQ ID NO: 345022 - RNA, 32 nt, Human
caccaacaaggcagugccugagcaccugugcu

SEQ ID NO: 345023 - RNA, 32 nt, Human
caccaacaagggaggaagucagaggggcuggu

SEQ ID NO: 345024 - RNA, 32 nt, Human
caccaacaccaccaccaccaccgcgagcugga

SEQ ID NO: 345025 - RNA, 32 nt, Human
caccaacaccacugaaauucaccguggcuucc

SEQ ID NO: 345026 - RNA, 32 nt, Human
caccaacacugccuuccuccagccugucccuc

SEQ ID NO: 345027 - RNA, 32 nt, Human
caccaacacuggacgccuucccaugaaaaauu

SEQ ID NO: 345028 - RNA, 32 nt, Human
caccaacagaaggaagagggugaggaagccau

SEQ ID NO: 345029 - RNA, 32 nt, Human
caccaacagcacagcucaucagauguuuucua

SEQ ID NO: 345030 - RNA, 32 nt, Human
caccaacagcaggcagcacagaacagcuugcu

SEQ ID NO: 345031 - RNA, 32 nt, Human
caccaacagcuccaccauggggcuggccuggg

SEQ ID NO: 345032 - RNA, 32 nt, Human
caccaacauacaagucuugacaacagcaucug

SEQ ID NO: 345033 - RNA, 32 nt, Human
caccaacaucacaugcacgcaugcccuuucac

SEQ ID NO: 345034 - RNA, 32 nt, Human
caccaacauggacuggggacuucucagaggca

SEQ ID NO: 345035 - RNA, 32 nt, Human
caccaacauggagaaaccccgucuccacuaaa

SEQ ID NO: 345036 - RNA, 32 nt, Human
caccaacauggagaaaccccgucucuacuaaa

SEQ ID NO: 345037 - RNA, 32 nt, Human
caccaacauggagaaaucccaucucuacuaaa

SEQ ID NO: 345038 - RNA, 32 nt, Human
caccaacauuuagugccagccuaggcacaacu

SEQ ID NO: 345039 - RNA, 32 nt, Human
caccaaccaaaccacuccuaucugcaugauuc

SEQ ID NO: 345040 - RNA, 32 nt, Human
caccaaccagacggugcugauccggaguggcc

SEQ ID NO: 345041 - RNA, 32 nt, Human
caccaaccagccaagaugaacauggugaagag

SEQ ID NO: 345042 - RNA, 32 nt, Human
caccaaccaggaugcuucaccaugcuucggua

SEQ ID NO: 345043 - RNA, 32 nt, Human
caccaacccaggcagcucugcuguggcuucuc

SEQ ID NO: 345044 - RNA, 32 nt, Human
caccaacccucauccaggaaucugccaugagu

SEQ ID NO: 345045 - RNA, 32 nt, Human
caccaacccuugugguagcuguuacaaguaua

SEQ ID NO: 345046 - RNA, 23 nt, Human
caccaaccuauagcaggcaccaa

SEQ ID NO: 345047 - RNA, 32 nt, Human
caccaaccuccagggucgcucuccaaucuuaa

SEQ ID NO: 345048 - RNA, 24 nt, Human
caccaaccucuacaaagaaccagc

SEQ ID NO: 345049 - RNA, 32 nt, Human
caccaaccuggcagacuugaagaacagagggc

SEQ ID NO: 345050 - RNA, 32 nt, Human
caccaacuauuauuuucccuuguuuaucuacu

SEQ ID NO: 345051 - RNA, 32 nt, Human
caccaacucaacaacaaagugcaauacaggcu

SEQ ID NO: 345052 - RNA, 32 nt, Human
caccaacucauagcaaagucacuucuguuaau

SEQ ID NO: 345053 - RNA, 32 nt, Human
caccaacuccaaaaccgugggauucugcuuuu

SEQ ID NO: 345054 - RNA, 32 nt, Human
caccaacuccacugcuuuggaggcugcccagu

SEQ ID NO: 345055 - RNA, 32 nt, Human
caccaacuccaggaaacucauucugggccagc

SEQ ID NO: 345056 - RNA, 22 nt, Human
caccaacucuccccuaaucaca

SEQ ID NO: 345057 - RNA, 32 nt, Human
caccaacucucggccugccaguucucaagcga

SEQ ID NO: 345058 - RNA, 32 nt, Human
caccaacugcacuuugggaggcugaggcugga

SEQ ID NO: 345059 - RNA, 32 nt, Human
caccaacugcaugaagcagcacuugcuagaga

SEQ ID NO: 345060 - RNA, 24 nt, Human
caccaacuugaacaacuauccaca

SEQ ID NO: 345061 - RNA, 32 nt, Human
caccaacuuggcuggcauguugcuucugccuc

SEQ ID NO: 345062 - RNA, 32 nt, Human
caccaagaaagcuucuucagagugaagaaucu

SEQ ID NO: 345063 - RNA, 32 nt, Human
caccaagaacaaugcuggagugcaguggcgug

SEQ ID NO: 345064 - RNA, 22 nt, Human
caccaagaaggaaaauccugga

SEQ ID NO: 345065 - RNA, 32 nt, Human
caccaagaaguuaaaggcagucggacaucuca

SEQ ID NO: 345066 - RNA, 32 nt, Human
caccaagacagugcugagauuggaaagggcac

SEQ ID NO: 345067 - RNA, 22 nt, Human
caccaagaccccaaaggcccag

SEQ ID NO: 345068 - RNA, 32 nt, Human
caccaagacccuucccucccaagcccucaaag

SEQ ID NO: 345069 - RNA, 32 nt, Human
caccaagacucugcacaaccagauugcuugug

SEQ ID NO: 345070 - RNA, 32 nt, Human
caccaagagcccacuugccugggauggcccca

SEQ ID NO: 345071 - RNA, 32 nt, Human
caccaagagccgcggcagcagagaggagcgcu

SEQ ID NO: 345072 - RNA, 32 nt, Human
caccaagagcggacaggaaggccuggguccca

SEQ ID NO: 345073 - RNA, 32 nt, Human
caccaagaggccaccugucacucauggccagg

SEQ ID NO: 345074 - RNA, 32 nt, Human
caccaagaggcggggguggagcagggagcugc

SEQ ID NO: 345075 - RNA, 32 nt, Human
caccaagaggguguugugaugaggugccggug

SEQ ID NO: 345076 - RNA, 32 nt, Human
caccaagaguagaagcacaaguucuucuggga

SEQ ID NO: 345077 - RNA, 32 nt, Human
caccaagaugggcguucacuccccacggccac

SEQ ID NO: 345078 - RNA, 21 nt, Human
caccaagauggguggcaccaa

SEQ ID NO: 345079 - RNA, 32 nt, Human
caccaagcacagaaccucugcagcagaucccg

SEQ ID NO: 345080 - RNA, 31 nt, Human
caccaagcacugccugugcaugcagagaaaa

SEQ ID NO: 345081 - RNA, 32 nt, Human
caccaagcauuacuccccaucgccagcugaug

SEQ ID NO: 345082 - RNA, 32 nt, Human
caccaagcccagcuaauuuuuguauuuuagua

SEQ ID NO: 345083 - RNA, 32 nt, Human
caccaagcccagcuaauuuuuguauuuuuagu

SEQ ID NO: 345084 - RNA, 32 nt, Human
caccaagcccggcuaauuuuuguauuuuuagu

SEQ ID NO: 345085 - RNA, 32 nt, Human
caccaagcccggcuugaccucuuggcuuuuac

SEQ ID NO: 345086 - RNA, 32 nt, Human
caccaagccuggcuaaguuuuguauugccaua

SEQ ID NO: 345087 - RNA, 32 nt, Human
caccaagcgagauauuuuugggaguuauuccc

SEQ ID NO: 345088 - RNA, 32 nt, Human
caccaagcucacaccuguccuucucaggcugg

SEQ ID NO: 345089 - RNA, 32 nt, Human
caccaaggaaaagcagaacaccugaaagccag

SEQ ID NO: 345090 - RNA, 31 nt, Human
caccaaggacaacuagaaaccaaagccaucu

SEQ ID NO: 345091 - RNA, 32 nt, Human
caccaaggagagcgugaaggagaugauugagc

SEQ ID NO: 345092 - RNA, 32 nt, Human
caccaaggagcagcagcuggggcagaggagcu

SEQ ID NO: 345093 - RNA, 32 nt, Human
caccaaggauuguaauccaagccugggaaaau

SEQ ID NO: 345094 - RNA, 32 nt, Human
caccaaggccagaugacuucagcauugggaag

SEQ ID NO: 345095 - RNA, 32 nt, Human
caccaaggccaucaauaaccaggugugagcua

SEQ ID NO: 345096 - RNA, 32 nt, Human
caccaaggcccucugcaguggggaggacgagg

SEQ ID NO: 345097 - RNA, 32 nt, Human
caccaaggccuuuccagcauugcacaucuaug

SEQ ID NO: 345098 - RNA, 32 nt, Human
caccaagggaaacaaggugguucucacacugg

SEQ ID NO: 345099 - RNA, 23 nt, Human
caccaagggaaggccccauuccg

SEQ ID NO: 345100 - RNA, 32 nt, Human
caccaagggcagcccugggcucuggcugggga

SEQ ID NO: 345101 - RNA, 32 nt, Human
caccaagggcucugcuccagccucucagagaa

SEQ ID NO: 345102 - RNA, 32 nt, Human
caccaaggggaucuuaacaaauuccugaacaa

SEQ ID NO: 345103 - RNA, 32 nt, Human
caccaagggugggaugggagggcagaggggaa

SEQ ID NO: 345104 - RNA, 32 nt, Human
caccaagggugggaugggagggcaggggaaaa

SEQ ID NO: 345105 - RNA, 32 nt, Human
caccaagguccugcccacagggccaggcugcc

SEQ ID NO: 345106 - RNA, 32 nt, Human
caccaaggugaugggacucagggccuuggcuu

SEQ ID NO: 345107 - RNA, 32 nt, Human
caccaaguacuaaacccacaaagcgaucgcug

SEQ ID NO: 345108 - RNA, 31 nt, Human
caccaaguacuuuucucaugagagucaacau

SEQ ID NO: 345109 - RNA, 32 nt, Human
caccaaguacuuuucuuucuagcuaaccuuug

SEQ ID NO: 345110 - RNA, 17 nt, Human
caccaaguauauuuuga

SEQ ID NO: 345111 - RNA, 32 nt, Human
caccaagucacuguucagcuugugggcaacag

SEQ ID NO: 345112 - RNA, 32 nt, Human
caccaaguccaccuggccucagaagaggacuc

SEQ ID NO: 345113 - RNA, 32 nt, Human
caccaagucccuaggcugcacacacaugucag

SEQ ID NO: 345114 - RNA, 32 nt, Human
caccaagucgcagguccucagccuggggcaug

SEQ ID NO: 345115 - RNA, 32 nt, Human
caccaagugcacuuugggaggcugaggcugga

SEQ ID NO: 345116 - RNA, 32 nt, Human
caccaagugcagcccucguccugggucugcac

SEQ ID NO: 345117 - RNA, 32 nt, Human
caccaagugcugaggcuggaagaaaaacgcac

SEQ ID NO: 345118 - RNA, 32 nt, Human
caccaauagcucccagcacagccaggguauuc

SEQ ID NO: 345119 - RNA, 21 nt, Human
caccaauauagacauucuaga

SEQ ID NO: 345120 - RNA, 32 nt, Human
caccaaucagcaccuugugucuagcucagggu

SEQ ID NO: 345121 - RNA, 32 nt, Human
caccaaucuaugaagaccucaggccagggggu

SEQ ID NO: 345122 - RNA, 32 nt, Human
caccaaucuguggcccuucaucaugcuaagaa

SEQ ID NO: 345123 - RNA, 25 nt, Human
caccaaugaaggagagaggcaccug

SEQ ID NO: 345124 - RNA, 32 nt, Human
caccaaugauuccuaaacuccagccuggccaa

SEQ ID NO: 345125 - RNA, 32 nt, Human
caccaauggauuacaugccaucugggacaggc

SEQ ID NO: 345126 - RNA, 32 nt, Human
caccacaaacgagcucccagacauguaaacac

SEQ ID NO: 345127 - RNA, 32 nt, Human
caccacaaaggaugugugugcauccuggggca

SEQ ID NO: 345128 - RNA, 19 nt, Human
caccacaacaaaggcucau

SEQ ID NO: 345129 - RNA, 32 nt, Human
caccacaaccuccagccucccuuuucagagca

SEQ ID NO: 345130 - RNA, 32 nt, Human
caccacaaccucugccuuccagguucaaguga

SEQ ID NO: 345131 - RNA, 32 nt, Human
caccacaacuggcuaauuuuuguauuuuuagu

SEQ ID NO: 345132 - RNA, 24 nt, Human
caccacaacuugacaagguugcua

SEQ ID NO: 345133 - RNA, 22 nt, Human
caccacaagcccagccuaguca

SEQ ID NO: 345134 - RNA, 31 nt, Human
caccacaaugcaaauaccugcuugcaaaaug

SEQ ID NO: 345135 - RNA, 18 nt, Human
caccacaaugccagugaa

SEQ ID NO: 345136 - RNA, 32 nt, Human
caccacaauucacaccagcaacuaucugauca

SEQ ID NO: 345137 - RNA, 32 nt, Human
caccacacaauaggaucccccuucuugcccuc

SEQ ID NO: 345138 - RNA, 32 nt, Human
caccacacacacugcaaaccaggccucuucuu

SEQ ID NO: 345139 - RNA, 32 nt, Human
caccacacagccccaaagucaggaagccuggg

SEQ ID NO: 345140 - RNA, 32 nt, Human
caccacacauagacaugcaggcaaacacaaau

SEQ ID NO: 345141 - RNA, 32 nt, Human
caccacacauggcuaauuuuuguauuuuuaau

SEQ ID NO: 345142 - RNA, 32 nt, Human
caccacacauggcuaauuuuuguauuuuuagu

SEQ ID NO: 345143 - RNA, 32 nt, Human
caccacaccacugcuuuucagcauuguacugg

SEQ ID NO: 345144 - RNA, 32 nt, Human
caccacaccacuggauauuccugggagucacu

SEQ ID NO: 345145 - RNA, 32 nt, Human
caccacaccaggcuaauuuuguauuuuuagua

SEQ ID NO: 345146 - RNA, 32 nt, Human
caccacaccaggcuaauuuuuguauuuuuagu

SEQ ID NO: 345147 - RNA, 32 nt, Human
caccacaccagguugauuuuuguauuuuuagu

SEQ ID NO: 345148 - RNA, 32 nt, Human
caccacacccagcuaauuuuguauuuuuagua

SEQ ID NO: 345149 - RNA, 32 nt, Human
caccacacccagcuaauuuuguauuuuuggua

SEQ ID NO: 345150 - RNA, 32 nt, Human
caccacacccagcuaauuuuuguauuuuuaca

SEQ ID NO: 345151 - RNA, 32 nt, Human
caccacacccagcuaauuuuuguauuuuuacu

SEQ ID NO: 345152 - RNA, 32 nt, Human
caccacacccagcuaauuuuuguauuuuuagu

SEQ ID NO: 345153 - RNA, 32 nt, Human
caccacacccagcuaauuuuuguauuuuuggu

SEQ ID NO: 345154 - RNA, 32 nt, Human
caccacacccagcuaauuuuuguguuuuuagu

SEQ ID NO: 345155 - RNA, 32 nt, Human
caccacacccagguaauuuuuguauuuuuagu

SEQ ID NO: 345156 - RNA, 32 nt, Human
caccacacccaggucuaagucaucagaaaaga

SEQ ID NO: 345157 - RNA, 32 nt, Human
caccacacccaguuaauuuuuguauuuuuaga

SEQ ID NO: 345158 - RNA, 32 nt, Human
caccacacccaguuaauuuuuguauuuuuggu

SEQ ID NO: 345159 - RNA, 32 nt, Human
caccacaccccguuaauuuuuguauuuuuagu

SEQ ID NO: 345160 - RNA, 32 nt, Human
caccacacccggcuaauuuuguauuuuuagua

SEQ ID NO: 345161 - RNA, 32 nt, Human
caccacacccggcuaauuuuguauuuuucagu

SEQ ID NO: 345162 - RNA, 32 nt, Human
caccacacccggcuaauuuuuauauuuuuagu

SEQ ID NO: 345163 - RNA, 32 nt, Human
caccacacccggcuaauuuuugcauuuuuagu

SEQ ID NO: 345164 - RNA, 32 nt, Human
caccacacccggcuaauuuuuggauuuuuagu

SEQ ID NO: 345165 - RNA, 32 nt, Human
caccacacccggcuaauuuuuguauuuucagu

SEQ ID NO: 345166 - RNA, 32 nt, Human
caccacacccggcuaauuuuuguauuuuuagu

SEQ ID NO: 345167 - RNA, 32 nt, Human
caccacacccggcuaauuuuuguauuuuuggu

SEQ ID NO: 345168 - RNA, 32 nt, Human
caccacacccgguuaauuuuuguauuuuuagu

SEQ ID NO: 345169 - RNA, 32 nt, Human
caccacacccuccacacaccagccucugcaac

SEQ ID NO: 345170 - RNA, 32 nt, Human
caccacacccugcuaauuuuuguauuuuuagu

SEQ ID NO: 345171 - RNA, 32 nt, Human
caccacaccggaguaguuuuuguauuuuuagu

SEQ ID NO: 345172 - RNA, 32 nt, Human
caccacaccgggcuaauuuuuguauuuuuagu

SEQ ID NO: 345173 - RNA, 32 nt, Human
caccacaccuagcuaauuuuguauuuuuagua

SEQ ID NO: 345174 - RNA, 32 nt, Human
caccacaccugacuaauuuuuguauuuuuagu

SEQ ID NO: 345175 - RNA, 32 nt, Human
caccacaccuggcuaacuuuuuguauuuuuag

SEQ ID NO: 345176 - RNA, 32 nt, Human
caccacaccuggcuaaguuuuuguguuuuuag

SEQ ID NO: 345177 - RNA, 32 nt, Human
caccacaccuggcuaauuuguguguuuuuagu

SEQ ID NO: 345178 - RNA, 32 nt, Human
caccacaccuggcuaauuuucauauuuuuagu

SEQ ID NO: 345179 - RNA, 32 nt, Human
caccacaccuggcuaauuuuguauuuuuagua

SEQ ID NO: 345180 - RNA, 32 nt, Human
caccacaccuggcuaauuuuuguauauuuuug

SEQ ID NO: 345181 - RNA, 32 nt, Human
caccacaccuggcuaauuuuuguauuuuuagc

SEQ ID NO: 345182 - RNA, 32 nt, Human
caccacaccuggcuaauuuuuguauuuuuagu

SEQ ID NO: 345183 - RNA, 32 nt, Human
caccacaccuggcuaauuuuuguauuuuuggu

SEQ ID NO: 345184 - RNA, 32 nt, Human
caccacaccuggcuaauuuuuguguuguuagu

SEQ ID NO: 345185 - RNA, 32 nt, Human
caccacaccuggcuaauuuuuguguuuuuagu

SEQ ID NO: 345186 - RNA, 32 nt, Human
caccacaccuggcuaguguuuuguauuuuuag

SEQ ID NO: 345187 - RNA, 32 nt, Human
caccacaccuggcuaguuuuguguuuuuagua

SEQ ID NO: 345188 - RNA, 32 nt, Human
caccacaccuggcuaguuuuuauauuuuuagu

SEQ ID NO: 345189 - RNA, 32 nt, Human
caccacaccuggcuaguuuuuguauuuucagu

SEQ ID NO: 345190 - RNA, 32 nt, Human
caccacaccuggcuaguuuuuguauuuuuagu

SEQ ID NO: 345191 - RNA, 32 nt, Human
caccacaccugggugauuuuuguauuuuuagu

SEQ ID NO: 345192 - RNA, 32 nt, Human
caccacacgcagcuaauuuuuguauuuuuagu

SEQ ID NO: 345193 - RNA, 32 nt, Human
caccacacucaaccgucccuugugcuuguaac

SEQ ID NO: 345194 - RNA, 32 nt, Human
caccacacucagcuaauuuuuguauuuucagu

SEQ ID NO: 345195 - RNA, 32 nt, Human
caccacacucccacacuccagccuggguaaca

SEQ ID NO: 345196 - RNA, 24 nt, Human
caccacacucugccugaaggcuca

SEQ ID NO: 345197 - RNA, 32 nt, Human
caccacacugccuugagguaggaaaaggaggc

SEQ ID NO: 345198 - RNA, 32 nt, Human
caccacacuuggcuaauuuuuguauuauuagu

SEQ ID NO: 345199 - RNA, 32 nt, Human
caccacagacacacccacgacaccugaucucg

SEQ ID NO: 345200 - RNA, 32 nt, Human
caccacagagacaugcaacgguacaucuuaca

SEQ ID NO: 345201 - RNA, 20 nt, Human
caccacagagaccugcacca

SEQ ID NO: 345202 - RNA, 32 nt, Human
caccacagaggcagaaggggugaugagugaga

SEQ ID NO: 345203 - RNA, 32 nt, Human
caccacagcacaccucaccacaccacaccgca

SEQ ID NO: 345204 - RNA, 32 nt, Human
caccacagcacuccaaccugggugacagagug

SEQ ID NO: 345205 - RNA, 32 nt, Human
caccacagcacuccagcccaggcggcagugag

SEQ ID NO: 345206 - RNA, 24 nt, Human
caccacagcacugcagccuagaca

SEQ ID NO: 345207 - RNA, 32 nt, Human
caccacagcagaacagcacccagaccaacggg

SEQ ID NO: 345208 - RNA, 18 nt, Human
caccacagcagccccagg

SEQ ID NO: 345209 - RNA, 32 nt, Human
caccacagccugcuaauuuuuguauuuuuagu

SEQ ID NO: 345210 - RNA, 19 nt, Human
caccacagcgagcugcagg

SEQ ID NO: 345211 - RNA, 32 nt, Human
caccacagcgcuccagccuggucgacagagug

SEQ ID NO: 345212 - RNA, 32 nt, Human
caccacagcgggcuccccagcuuagggagguc

SEQ ID NO: 345213 - RNA, 32 nt, Human
caccacagcguccuccuccucccuggagaaga

SEQ ID NO: 345214 - RNA, 32 nt, Human
caccacagcuggagaguccuggcugagccuug

SEQ ID NO: 345215 - RNA, 22 nt, Human
caccacaggagcgugagccacu

SEQ ID NO: 345216 - RNA, 32 nt, Human
caccacagggucuggaagugugugugacgccc

SEQ ID NO: 345217 - RNA, 32 nt, Human
caccacaggugaaggaaguaaagaccacuucu

SEQ ID NO: 345218 - RNA, 32 nt, Human
caccacagucaggccuugaugggaucuucuag

SEQ ID NO: 345219 - RNA, 32 nt, Human
caccacauagaauuauccgaccccagauguca

SEQ ID NO: 345220 - RNA, 32 nt, Human
caccacaucaauaaucuuuuacucacauucug

SEQ ID NO: 345221 - RNA, 32 nt, Human
caccacaucagccuguggccauugaacuaugg

SEQ ID NO: 345222 - RNA, 32 nt, Human
caccacauccaccucgccccagagaggcucug

SEQ ID NO: 345223 - RNA, 32 nt, Human
caccacauccagcuaauuuuuguauuuuuagu

SEQ ID NO: 345224 - RNA, 32 nt, Human
caccacauccggcuaauguuuguauuuuuagc

SEQ ID NO: 345225 - RNA, 32 nt, Human
caccacauccgguuaauuuuuguauuuuuagu

SEQ ID NO: 345226 - RNA, 32 nt, Human
caccacaucuggcgaauuuuuguauuuuuagu

SEQ ID NO: 345227 - RNA, 32 nt, Human
caccacaucuggcuaacuuuuuguauuuuuag

SEQ ID NO: 345228 - RNA, 32 nt, Human
caccacaucuggcuaauuuuuguauuuuuagu

SEQ ID NO: 345229 - RNA, 32 nt, Human
caccacauggcccagccccaacauuucacucc

SEQ ID NO: 345230 - RNA, 22 nt, Human
caccacauuuaucuaagaagug

SEQ ID NO: 345231 - RNA, 32 nt, Human
caccaccaacaccaccaccaccaccgcgagcu

SEQ ID NO: 345232 - RNA, 32 nt, Human
caccaccaaggagagagguugacaugaccucc

SEQ ID NO: 345233 - RNA, 20 nt, Human
caccaccacacccagccuag

SEQ ID NO: 345234 - RNA, 24 nt, Human
caccaccacacuccagccugagca

SEQ ID NO: 345235 - RNA, 32 nt, Human
caccaccacacuccagccugagcagcagagcg

SEQ ID NO: 345236 - RNA, 23 nt, Human
caccaccacacuccagccugcgc

SEQ ID NO: 345237 - RNA, 23 nt, Human
caccaccacacuccagccugggu

SEQ ID NO: 345238 - RNA, 32 nt, Human
caccaccacacuccagccugggugacaagagc

SEQ ID NO: 345239 - RNA, 32 nt, Human
caccaccacacuccagccugggugacagagcg

SEQ ID NO: 345240 - RNA, 32 nt, Human
caccaccacacuccagccugggugacagagug

SEQ ID NO: 345241 - RNA, 32 nt, Human
caccaccacagcuugaucucucucacaacuuc

SEQ ID NO: 345242 - RNA, 32 nt, Human
caccaccaccaacaccaccaccaccaccgcga

SEQ ID NO: 345243 - RNA, 32 nt, Human
caccaccaccacagcaacccagacagcuaggc

SEQ ID NO: 345244 - RNA, 32 nt, Human
caccaccaccaccaacaccaccaccaccaccg

SEQ ID NO: 345245 - RNA, 16 nt, Human
caccaccaccaccacc

SEQ ID NO: 345246 - RNA, 32 nt, Human
caccaccaccaccaccaccaacaccaccacca

SEQ ID NO: 345247 - RNA, 32 nt, Human
caccaccaccaccaccaccaccaccaccacua

SEQ ID NO: 345248 - RNA, 32 nt, Human
caccaccaccaccaccaccaccaccacuacca

SEQ ID NO: 345249 - RNA, 32 nt, Human
caccaccaccaccaccaccaccaccuacuuca

SEQ ID NO: 345250 - RNA, 32 nt, Human
caccaccaccaccaccaccaccacuaccacca

SEQ ID NO: 345251 - RNA, 32 nt, Human
caccaccaccaccaccaccaccaucaccacca

SEQ ID NO: 345252 - RNA, 32 nt, Human
caccaccaccaccaccaccaccuacuucaaga

SEQ ID NO: 345253 - RNA, 32 nt, Human
caccaccaccaccaccaccacuaccaccacca

SEQ ID NO: 345254 - RNA, 32 nt, Human
caccaccaccaccaccaccaucaccaccacca

SEQ ID NO: 345255 - RNA, 32 nt, Human
caccaccaccaccaccaccccuacuaccccug

SEQ ID NO: 345256 - RNA, 32 nt, Human
caccaccaccaccaccaccuacuucaagaugc

SEQ ID NO: 345257 - RNA, 32 nt, Human
caccaccaccaccaccagcaccaccacuccau

SEQ ID NO: 345258 - RNA, 32 nt, Human
caccaccaccaccaccauuacagcgccuccuu

SEQ ID NO: 345259 - RNA, 32 nt, Human
caccaccaccaccacccacugccugcagcagg

SEQ ID NO: 345260 - RNA, 17 nt, Human
caccaccaccacccugg

SEQ ID NO: 345261 - RNA, 32 nt, Human
caccaccaccacugagauccggcuugcuacaa

SEQ ID NO: 345262 - RNA, 32 nt, Human
caccaccacccaggagcucagagaucuaagcu

SEQ ID NO: 345263 - RNA, 32 nt, Human
caccaccacccccaaaugcauacugcuggccu

SEQ ID NO: 345264 - RNA, 32 nt, Human
caccaccaccgccaccacuaccaccaucacua

SEQ ID NO: 345265 - RNA, 32 nt, Human
caccaccaccuucuccccauagcgacucuucu

SEQ ID NO: 345266 - RNA, 32 nt, Human
caccaccacgcccagcuaauuuuguagagaug

SEQ ID NO: 345267 - RNA, 32 nt, Human
caccaccacgcccagcuaauuuuuggauuuuu

SEQ ID NO: 345268 - RNA, 32 nt, Human
caccaccagagggcgcccgagcacagagacgc

SEQ ID NO: 345269 - RNA, 32 nt, Human
caccaccagcguaacuggcaaguuaccaaggu

SEQ ID NO: 345270 - RNA, 32 nt, Human
caccaccaggguggaccaggccuggagggcac

SEQ ID NO: 345271 - RNA, 32 nt, Human
caccaccaucaccaccaccaucaccaccacca

SEQ ID NO: 345272 - RNA, 32 nt, Human
caccaccaucaucaucauugucaucgucauca

SEQ ID NO: 345273 - RNA, 32 nt, Human
caccaccauggcucucugcagccuugaccucu

SEQ ID NO: 345274 - RNA, 32 nt, Human
caccaccauggugaaacccuaucucuacuaaa

SEQ ID NO: 345275 - RNA, 32 nt, Human
caccaccauuauagucagacugggcaccguuu

SEQ ID NO: 345276 - RNA, 17 nt, Human
caccaccauuuccccca

SEQ ID NO: 345277 - RNA, 28 nt, Human
caccacccaagcugugccucauggaguc

SEQ ID NO: 345278 - RNA, 28 nt, Human
caccacccaaguguccagccucucugug

SEQ ID NO: 345279 - RNA, 19 nt, Human
caccacccaccugcuggcc

SEQ ID NO: 345280 - RNA, 32 nt, Human
caccacccaccuuucuccuccuggggaguguc

SEQ ID NO: 345281 - RNA, 32 nt, Human
caccacccacugcaccguggucucgggcucac

SEQ ID NO: 345282 - RNA, 32 nt, Human
caccacccagccugaccuguguuuuggcaagg

SEQ ID NO: 345283 - RNA, 32 nt, Human
caccaccccaccccaagccacagugagcuugg

SEQ ID NO: 345284 - RNA, 32 nt, Human
caccaccccacccuccuccugucccgugguuu

SEQ ID NO: 345285 - RNA, 32 nt, Human
caccaccccagccaugggccauacgggggucc

SEQ ID NO: 345286 - RNA, 32 nt, Human
caccaccccagcugcuccccucccuccucugu

SEQ ID NO: 345287 - RNA, 32 nt, Human
caccacccccagcuaauuuuuguauuuuuagu

SEQ ID NO: 345288 - RNA, 19 nt, Human
caccaccccccaugccacc

SEQ ID NO: 345289 - RNA, 32 nt, Human
caccaccccucccucugcucucauaggaguua

SEQ ID NO: 345290 - RNA, 32 nt, Human
caccaccccuggcuaaauuuguauuuucagua

SEQ ID NO: 345291 - RNA, 32 nt, Human
caccaccccuggcuaauuuuuguauuuuuagu

SEQ ID NO: 345292 - RNA, 25 nt, Human
caccaccccuuccccaccuccuggg

SEQ ID NO: 345293 - RNA, 32 nt, Human
caccaccccuugcccagccaauggacacagua

SEQ ID NO: 345294 - RNA, 32 nt, Human
caccacccgagcgcuccuucucugauauuggc

SEQ ID NO: 345295 - RNA, 22 nt, Human
caccacccguccaguaccacca

SEQ ID NO: 345296 - RNA, 32 nt, Human
caccacccucacuguccuccagcccaggaugg

SEQ ID NO: 345297 - RNA, 21 nt, Human
caccacccuccagccugggca

SEQ ID NO: 345298 - RNA, 32 nt, Human
caccacccuccgucucuucggcugcuugcucu

SEQ ID NO: 345299 - RNA, 32 nt, Human
caccacccugaaggagcuucuuuuccucuggg

SEQ ID NO: 345300 - RNA, 32 nt, Human
caccacccugauggugacagagggggacagcc

SEQ ID NO: 345301 - RNA, 32 nt, Human
caccacccugcuguccaguccccagccuggcc

SEQ ID NO: 345302 - RNA, 21 nt, Human
caccacccuggacuggcccag

SEQ ID NO: 345303 - RNA, 32 nt, Human
caccacccuggagucuagaccaacacacaaag

SEQ ID NO: 345304 - RNA, 32 nt, Human
caccacccuguauuccagaaacaggugcaauu

SEQ ID NO: 345305 - RNA, 32 nt, Human
caccaccgcacuccacccugggaagcaaagug

SEQ ID NO: 345306 - RNA, 23 nt, Human
caccaccgcacuccagccugggu

SEQ ID NO: 345307 - RNA, 32 nt, Human
caccaccgcacuccagccugggugacagagcg

SEQ ID NO: 345308 - RNA, 16 nt, Human
caccaccgccaccacc

SEQ ID NO: 345309 - RNA, 32 nt, Human
caccaccgccaccaccaccaccaucaucacca

SEQ ID NO: 345310 - RNA, 32 nt, Human
caccaccgccccaugugaaccugucccacucc

SEQ ID NO: 345311 - RNA, 32 nt, Human
caccaccgcugccaccaccaccgccaccaccg

SEQ ID NO: 345312 - RNA, 32 nt, Human
caccaccguucccgcccgccucccugcggcuc

SEQ ID NO: 345313 - RNA, 19 nt, Human
caccaccuacagcccagug

SEQ ID NO: 345314 - RNA, 19 nt, Human
caccaccuacaggcacacc

SEQ ID NO: 345315 - RNA, 16 nt, Human
caccaccuaccccucc

SEQ ID NO: 345316 - RNA, 18 nt, Human
caccaccuacgugcacac

SEQ ID NO: 345317 - RNA, 18 nt, Human
caccaccuauucccccca

SEQ ID NO: 345318 - RNA, 32 nt, Human
caccaccucacacgcccucuucccuggcccca

SEQ ID NO: 345319 - RNA, 24 nt, Human
caccaccucacuccagccugggca

SEQ ID NO: 345320 - RNA, 32 nt, Human
caccaccucacuccagccugggcaacauagug

SEQ ID NO: 345321 - RNA, 32 nt, Human
caccaccucauuguucucaucuggaacugaaa

SEQ ID NO: 345322 - RNA, 32 nt, Human
caccaccuccaccaccaccaccaccaccacca

SEQ ID NO: 345323 - RNA, 32 nt, Human
caccaccuccacugccaugaccaggccgaagg

SEQ ID NO: 345324 - RNA, 32 nt, Human
caccaccucccaggauggcaaggaagugagag

SEQ ID NO: 345325 - RNA, 17 nt, Human
caccaccuccccaucca

SEQ ID NO: 345326 - RNA, 32 nt, Human
caccaccuccuccaaagcacugagguccuggc

SEQ ID NO: 345327 - RNA, 32 nt, Human
caccaccucucacuucucaaggcugugggucc

SEQ ID NO: 345328 - RNA, 32 nt, Human
caccaccugcagcuucucagccaaugcugauu

SEQ ID NO: 345329 - RNA, 32 nt, Human
caccaccugcagcuugucuccggauucagcca

SEQ ID NO: 345330 - RNA, 20 nt, Human
caccaccugcccucccgcga

SEQ ID NO: 345331 - RNA, 32 nt, Human
caccaccugccugcuugcuucucuggcugccu

SEQ ID NO: 345332 - RNA, 18 nt, Human
caccaccugcuccagcca

SEQ ID NO: 345333 - RNA, 32 nt, Human
caccaccuggacaauaauugaugcccuuaaaa

SEQ ID NO: 345334 - RNA, 32 nt, Human
caccaccuggagugaucaccucuuggggaccc

SEQ ID NO: 345335 - RNA, 32 nt, Human
caccaccuggcccagccuccaucagggacccc

SEQ ID NO: 345336 - RNA, 17 nt, Human
caccaccugugccccca

SEQ ID NO: 345337 - RNA, 17 nt, Human
caccaccuuucccauca

SEQ ID NO: 345338 - RNA, 32 nt, Human
caccaccuuugucugauacuuguuuccaggga

SEQ ID NO: 345339 - RNA, 17 nt, Human
caccaccuuuuguccca

SEQ ID NO: 345340 - RNA, 32 nt, Human
caccacgacuggcuaauuuuuauauuuuuagu

SEQ ID NO: 345341 - RNA, 32 nt, Human
caccacgacuggcuaauuuuuguauuuuuagu

SEQ ID NO: 345342 - RNA, 22 nt, Human
caccacgcaagcccagggccug

SEQ ID NO: 345343 - RNA, 32 nt, Human
caccacgcacaacacuguccccugccagcucc

SEQ ID NO: 345344 - RNA, 32 nt, Human
caccacgcacaacuaauuuuuguauuuuuagu

SEQ ID NO: 345345 - RNA, 32 nt, Human
caccacgcacggcuaauuuuuguauuuuuagu

SEQ ID NO: 345346 - RNA, 32 nt, Human
caccacgcagaggcgcuucaggucaugacagu

SEQ ID NO: 345347 - RNA, 32 nt, Human
caccacgcagccgccgccgcccacgccggccu

SEQ ID NO: 345348 - RNA, 32 nt, Human
caccacgcauggcuaaucuuuuuguguuuuug

SEQ ID NO: 345349 - RNA, 32 nt, Human
caccacgccaagcuaauuuuuguauuuuuagu

SEQ ID NO: 345350 - RNA, 32 nt, Human
caccacgccacugcacuccagccugggugaca

SEQ ID NO: 345351 - RNA, 32 nt, Human
caccacgccacugcacuccagcgugggcaaca

SEQ ID NO: 345352 - RNA, 32 nt, Human
caccacgccaggcuaauuuuguauuuuuagua

SEQ ID NO: 345353 - RNA, 32 nt, Human
caccacgccaggcuaauuuuguauuuuuggug

SEQ ID NO: 345354 - RNA, 32 nt, Human
caccacgccaggcuaauuuuuguauuuuuagu

SEQ ID NO: 345355 - RNA, 32 nt, Human
caccacgccaggcuacuuuuuguauuuuuagu

SEQ ID NO: 345356 - RNA, 32 nt, Human
caccacgcccaacuaauuuuguauuuuuagua

SEQ ID NO: 345357 - RNA, 32 nt, Human
caccacgcccaacuaauuuuuauauuuuuagu

SEQ ID NO: 345358 - RNA, 32 nt, Human
caccacgcccaacugauuuuuguauuuuuagu

SEQ ID NO: 345359 - RNA, 18 nt, Human
caccacgcccaacuggga

SEQ ID NO: 345360 - RNA, 32 nt, Human
caccacgcccagcuaauuuuauguauuuuuag

SEQ ID NO: 345361 - RNA, 32 nt, Human
caccacgcccagcuaauuuuguauuuuuagua

SEQ ID NO: 345362 - RNA, 32 nt, Human
caccacgcccagcuaauuuuuauauuuuuagu

SEQ ID NO: 345363 - RNA, 32 nt, Human
caccacgcccagcuaauuuuugcauuuuuagu

SEQ ID NO: 345364 - RNA, 32 nt, Human
caccacgcccagcuaauuuuuguauuauuuua

SEQ ID NO: 345365 - RNA, 32 nt, Human
caccacgcccagcuaauuuuuguauuucuuuu

SEQ ID NO: 345366 - RNA, 32 nt, Human
caccacgcccagcuaauuuuuguauuugagua

SEQ ID NO: 345367 - RNA, 32 nt, Human
caccacgcccagcuaauuuuuguauuuucagu

SEQ ID NO: 345368 - RNA, 32 nt, Human
caccacgcccagcuaauuuuuguauuuuuaca

SEQ ID NO: 345369 - RNA, 32 nt, Human
caccacgcccagcuaauuuuuguauuuuuagc

SEQ ID NO: 345370 - RNA, 32 nt, Human
caccacgcccagcuaauuuuuguauuuuuagu

SEQ ID NO: 345371 - RNA, 32 nt, Human
caccacgcccagcuaauuuuuguauuuuuggu

SEQ ID NO: 345372 - RNA, 32 nt, Human
caccacgcccagcuaauuuuuguauuuuugua

SEQ ID NO: 345373 - RNA, 32 nt, Human
caccacgcccagcuaauuuuuguguuuuuagu

SEQ ID NO: 345374 - RNA, 32 nt, Human
caccacgcccagcuacuuuuuguauuuuuagu

SEQ ID NO: 345375 - RNA, 32 nt, Human
caccacgcccagcuaguuuuuguauuuuuggu

SEQ ID NO: 345376 - RNA, 32 nt, Human
caccacgcccagcugauuuuuguauuuuuagu

SEQ ID NO: 345377 - RNA, 32 nt, Human
caccacgcccaguugauuuuuguauuuuugau

SEQ ID NO: 345378 - RNA, 32 nt, Human
caccacgccccacuaauuuuuguauuuuuggu

SEQ ID NO: 345379 - RNA, 32 nt, Human
caccacgccccgcuaauuuuuguauuuuuggu

SEQ ID NO: 345380 - RNA, 32 nt, Human
caccacgcccggccaauuuuuguguuuucagu

SEQ ID NO: 345381 - RNA, 32 nt, Human
caccacgcccggcuaauguuuguauuuuuagu

SEQ ID NO: 345382 - RNA, 32 nt, Human
caccacgcccggcuaauuucuguauuuuuagu

SEQ ID NO: 345383 - RNA, 32 nt, Human
caccacgcccggcuaauuuguguauuuuuagu

SEQ ID NO: 345384 - RNA, 32 nt, Human
caccacgcccggcuaauuuuguauuucuagua

SEQ ID NO: 345385 - RNA, 32 nt, Human
caccacgcccggcuaauuuuguauuuucaguc

SEQ ID NO: 345386 - RNA, 32 nt, Human
caccacgcccggcuaauuuuguauuuuuaagu

SEQ ID NO: 345387 - RNA, 32 nt, Human
caccacgcccggcuaauuuuguauuuuuagua

SEQ ID NO: 345388 - RNA, 32 nt, Human
caccacgcccggcuaauuuuguauuuuucaua

SEQ ID NO: 345389 - RNA, 32 nt, Human
caccacgcccggcuaauuuuuauauuuuuggu

SEQ ID NO: 345390 - RNA, 32 nt, Human
caccacgcccggcuaauuuuuauguuuuuagu

SEQ ID NO: 345391 - RNA, 32 nt, Human
caccacgcccggcuaauuuuuguauucuuagu

SEQ ID NO: 345392 - RNA, 32 nt, Human
caccacgcccggcuaauuuuuguauuuucagu

SEQ ID NO: 345393 - RNA, 32 nt, Human
caccacgcccggcuaauuuuuguauuuuguau

SEQ ID NO: 345394 - RNA, 32 nt, Human
caccacgcccggcuaauuuuuguauuuuuaau

SEQ ID NO: 345395 - RNA, 32 nt, Human
caccacgcccggcuaauuuuuguauuuuuagu

SEQ ID NO: 345396 - RNA, 32 nt, Human
caccacgcccggcuaauuuuuguguuuuuagu

SEQ ID NO: 345397 - RNA, 32 nt, Human
caccacgcccggcugauuuuuguguuuuuagu

SEQ ID NO: 345398 - RNA, 32 nt, Human
caccacgcccguguaauuuuuguauuuuuagu

SEQ ID NO: 345399 - RNA, 32 nt, Human
caccacgcccugcuaauuuuuguauucuuagu

SEQ ID NO: 345400 - RNA, 32 nt, Human
caccacgccuagcuaauuucuguauuuuuagu

SEQ ID NO: 345401 - RNA, 32 nt, Human
caccacgccuagcuaauuucuuuguauuuuug

SEQ ID NO: 345402 - RNA, 32 nt, Human
caccacgccuagcuaauuuuuauauuuuuagu

SEQ ID NO: 345403 - RNA, 32 nt, Human
caccacgccuagcuaauuuuuguauuuuuagc

SEQ ID NO: 345404 - RNA, 32 nt, Human
caccacgccucgcugauuuuuguauuuuagua

SEQ ID NO: 345405 - RNA, 32 nt, Human
caccacgccugacuaauuuuguauuuuuagua

SEQ ID NO: 345406 - RNA, 32 nt, Human
caccacgccugacuaauuuuuguauuuuuagu

SEQ ID NO: 345407 - RNA, 32 nt, Human
caccacgccuggcuaaauuuuguauuuuuagg

SEQ ID NO: 345408 - RNA, 32 nt, Human
caccacgccuggcuaaauuuuguauuuuuagu

SEQ ID NO: 345409 - RNA, 32 nt, Human
caccacgccuggcuaauguuguauuuuaguag

SEQ ID NO: 345410 - RNA, 32 nt, Human
caccacgccuggcuaauuuguguauuuuuagu

SEQ ID NO: 345411 - RNA, 32 nt, Human
caccacgccuggcuaauuuucguauuuuuagu

SEQ ID NO: 345412 - RNA, 32 nt, Human
caccacgccuggcuaauuuuguauuuuuagua

SEQ ID NO: 345413 - RNA, 32 nt, Human
caccacgccuggcuaauuuuguuuuuguauuu

SEQ ID NO: 345414 - RNA, 32 nt, Human
caccacgccuggcuaauuuuugaauuuuuagu

SEQ ID NO: 345415 - RNA, 32 nt, Human
caccacgccuggcuaauuuuuguacuuuucau

SEQ ID NO: 345416 - RNA, 32 nt, Human
caccacgccuggcuaauuuuuguaguuuuagu

SEQ ID NO: 345417 - RNA, 32 nt, Human
caccacgccuggcuaauuuuuguauauuuaag

SEQ ID NO: 345418 - RNA, 32 nt, Human
caccacgccuggcuaauuuuuguauuuuagug

SEQ ID NO: 345419 - RNA, 32 nt, Human
caccacgccuggcuaauuuuuguauuuuuaau

SEQ ID NO: 345420 - RNA, 32 nt, Human
caccacgccuggcuaauuuuuguauuuuuagu

SEQ ID NO: 345421 - RNA, 32 nt, Human
caccacgccuggcuaauuuuuguauuuuuggu

SEQ ID NO: 345422 - RNA, 32 nt, Human
caccacgccuggcugauuuuuguauuuuuagu

SEQ ID NO: 345423 - RNA, 32 nt, Human
caccacgccuggcugauuuuuguguuuuuagu

SEQ ID NO: 345424 - RNA, 32 nt, Human
caccacgccuggguaauuuuuguauuuuuacu

SEQ ID NO: 345425 - RNA, 32 nt, Human
caccacgccugguuaauuuuuguauuuauagu

SEQ ID NO: 345426 - RNA, 32 nt, Human
caccacgcguggcuaauguuuuuguauuuuua

SEQ ID NO: 345427 - RNA, 32 nt, Human
caccacgcucagcuaauuuuuguauuuuuagu

SEQ ID NO: 345428 - RNA, 32 nt, Human
caccacgcucagcuaauuuuuguguuuuagua

SEQ ID NO: 345429 - RNA, 32 nt, Human
caccacgcucgacuaauuuuuguauuuuuagu

SEQ ID NO: 345430 - RNA, 32 nt, Human
caccacgcucggcuaauuuuuguauuuuuagu

SEQ ID NO: 345431 - RNA, 32 nt, Human
caccacgcucugcuaauuuuuguauuuuuagu

SEQ ID NO: 345432 - RNA, 32 nt, Human
caccacgcuggggucugggaggaauggacaga

SEQ ID NO: 345433 - RNA, 32 nt, Human
caccacgcuuggcuaauuuuuguauuuuuagu

SEQ ID NO: 345434 - RNA, 32 nt, Human
caccacgcuugguuaauuuuuguauuuuuagu

SEQ ID NO: 345435 - RNA, 32 nt, Human
caccacggcacacaccuccagccucgagcccg

SEQ ID NO: 345436 - RNA, 32 nt, Human
caccacggcacucaagccugggcaauguagca

SEQ ID NO: 345437 - RNA, 32 nt, Human
caccacggcacuccagccugggugacagagug

SEQ ID NO: 345438 - RNA, 32 nt, Human
caccacggcacuucagccugggugacagaaug

SEQ ID NO: 345439 - RNA, 19 nt, Human
caccacggccugggcccca

SEQ ID NO: 345440 - RNA, 32 nt, Human
caccacgggacaggaaggugagauccgggacc

SEQ ID NO: 345441 - RNA, 24 nt, Human
caccacggggcagcaugaccacca

SEQ ID NO: 345442 - RNA, 32 nt, Human
caccacguccagcuaauuguuguauuuuugau

SEQ ID NO: 345443 - RNA, 32 nt, Human
caccacguccagcuaauuuuuauauuuuuagu

SEQ ID NO: 345444 - RNA, 32 nt, Human
caccacguccagcuaauuuuuguauuuucagu

SEQ ID NO: 345445 - RNA, 32 nt, Human
caccacguccagcuaauuuuuguauuuuuagu

SEQ ID NO: 345446 - RNA, 32 nt, Human
caccacguccggcuaauuuuuguauuuuuagu

SEQ ID NO: 345447 - RNA, 32 nt, Human
caccacgucuggcuaauuuuguauuuuuagua

SEQ ID NO: 345448 - RNA, 32 nt, Human
caccacgucuggcuaauuuuuguauuuuuagu

SEQ ID NO: 345449 - RNA, 22 nt, Human
caccacgugcuccaccuagaca

SEQ ID NO: 345450 - RNA, 32 nt, Human
caccacgugcuucacacuucauuuuucuccuc

SEQ ID NO: 345451 - RNA, 32 nt, Human
caccacguggcuggccccuuccucugcugcuc

SEQ ID NO: 345452 - RNA, 32 nt, Human
caccacguuaacugcauuuuacacauugacaa

SEQ ID NO: 345453 - RNA, 32 nt, Human
caccacguucggcuaauuuuuguauuuucagu

SEQ ID NO: 345454 - RNA, 32 nt, Human
caccacguuggccaggcuggucucaaacuccu

SEQ ID NO: 345455 - RNA, 32 nt, Human
caccacguuggccaggcuggucuggaacuccu

SEQ ID NO: 345456 - RNA, 32 nt, Human
caccacguuggccaggguggucuugagcuccu

SEQ ID NO: 345457 - RNA, 32 nt, Human
caccacuaacaccucagacgcuugggcaggga

SEQ ID NO: 345458 - RNA, 32 nt, Human
caccacuaaguuucagaacuuuccuuaggacu

SEQ ID NO: 345459 - RNA, 24 nt, Human
caccacuacacuccagccaaagca

SEQ ID NO: 345460 - RNA, 23 nt, Human
caccacuacacuccagcccgggc

SEQ ID NO: 345461 - RNA, 32 nt, Human
caccacuacacuccagcccgggcgacagagca

SEQ ID NO: 345462 - RNA, 24 nt, Human
caccacuacacuccagccuaggca

SEQ ID NO: 345463 - RNA, 32 nt, Human
caccacuacacuccagccuaggcaacagagca

SEQ ID NO: 345464 - RNA, 21 nt, Human
caccacuacacuccagccugg

SEQ ID NO: 345465 - RNA, 24 nt, Human
caccacuacacuccagccuggaca

SEQ ID NO: 345466 - RNA, 32 nt, Human
caccacuacacuccagccuggaugacagagug

SEQ ID NO: 345467 - RNA, 23 nt, Human
caccacuacacuccagccugggc

SEQ ID NO: 345468 - RNA, 24 nt, Human
caccacuacacuccagccugggca

SEQ ID NO: 345469 - RNA, 32 nt, Human
caccacuacacuccagccugggcaacagagag

SEQ ID NO: 345470 - RNA, 32 nt, Human
caccacuacacuccagccugggcgacagagug

SEQ ID NO: 345471 - RNA, 32 nt, Human
caccacuacacuccagccugggcgagacggca

SEQ ID NO: 345472 - RNA, 23 nt, Human
caccacuacacuccagccugggu

SEQ ID NO: 345473 - RNA, 32 nt, Human
caccacuacacuccagccugggugacaaagca

SEQ ID NO: 345474 - RNA, 32 nt, Human
caccacuacacuccagccugggugacagcaag

SEQ ID NO: 345475 - RNA, 32 nt, Human
caccacuacacuguagccugggugacaaagug

SEQ ID NO: 345476 - RNA, 32 nt, Human
caccacuacgacuuaguccgggauaagggccu

SEQ ID NO: 345477 - RNA, 32 nt, Human
caccacuacuauaugaugaauagcacuaauac

SEQ ID NO: 345478 - RNA, 32 nt, Human
caccacuagaacuuuaauaacuacccagggag

SEQ ID NO: 345479 - RNA, 32 nt, Human
caccacuagagggugcuacagaauguaaagca

SEQ ID NO: 345480 - RNA, 32 nt, Human
caccacuaguagauagaaauucuaacaacuug

SEQ ID NO: 345481 - RNA, 32 nt, Human
caccacuaucucuguuccaucugggcuuauau

SEQ ID NO: 345482 - RNA, 32 nt, Human
caccacucacagauuccucacacuggggaaau

SEQ ID NO: 345483 - RNA, 32 nt, Human
caccacucagccacccagaguacguguuuaca

SEQ ID NO: 345484 - RNA, 17 nt, Human
caccacucaugucacca

SEQ ID NO: 345485 - RNA, 32 nt, Human
caccacuccagccugggcaacaagagcgagac

SEQ ID NO: 345486 - RNA, 32 nt, Human
caccacucccagcuaauuuuuguauuuuuagu

SEQ ID NO: 345487 - RNA, 32 nt, Human
caccacucccucugcagguagcuccugcccca

SEQ ID NO: 345488 - RNA, 32 nt, Human
caccacuccgggcuaauuuuuguguuuuaagu

SEQ ID NO: 345489 - RNA, 21 nt, Human
caccacuccugccugccccca

SEQ ID NO: 345490 - RNA, 32 nt, Human
caccacugaacuccagccugggcgacaagagg

SEQ ID NO: 345491 - RNA, 32 nt, Human
caccacugaacuccagccugggcgacagaggg

SEQ ID NO: 345492 - RNA, 32 nt, Human
caccacugaccucuagccugguggcagaguga

SEQ ID NO: 345493 - RNA, 32 nt, Human
caccacugagccuagaccauggagccuuggca

SEQ ID NO: 345494 - RNA, 32 nt, Human
caccacugcaauccagccucgguaacacagcg

SEQ ID NO: 345495 - RNA, 32 nt, Human
caccacugcaauccagccugggcgacaaagca

SEQ ID NO: 345496 - RNA, 32 nt, Human
caccacugcacacugcacuccauccugggcga

SEQ ID NO: 345497 - RNA, 24 nt, Human
caccacugcaccccagccugggca

SEQ ID NO: 345498 - RNA, 32 nt, Human
caccacugcaccccagccugggcaacaagagu

SEQ ID NO: 345499 - RNA, 32 nt, Human
caccacugcaccccagccugggugacagcgag

SEQ ID NO: 345500 - RNA, 32 nt, Human
caccacugcaccucggaggccagcccugucca

SEQ ID NO: 345501 - RNA, 32 nt, Human
caccacugcacgcacuccagccugggugacag

SEQ ID NO: 345502 - RNA, 32 nt, Human
caccacugcacgccagccugggugaaagagug

SEQ ID NO: 345503 - RNA, 32 nt, Human
caccacugcacuacagccugggcgacagaacg

SEQ ID NO: 345504 - RNA, 24 nt, Human
caccacugcacucaagccugggca

SEQ ID NO: 345505 - RNA, 32 nt, Human
caccacugcacucaagccugggcaacagagug

SEQ ID NO: 345506 - RNA, 32 nt, Human
caccacugcacucaagccugggcgacagagca

SEQ ID NO: 345507 - RNA, 32 nt, Human
caccacugcacucaagccugggcgacagaggg

SEQ ID NO: 345508 - RNA, 32 nt, Human
caccacugcacucagccugggugacagagcaa

SEQ ID NO: 345509 - RNA, 24 nt, Human
caccacugcacuccaaccuaggua

SEQ ID NO: 345510 - RNA, 32 nt, Human
caccacugcacuccaaccuagguaacagagag

SEQ ID NO: 345511 - RNA, 24 nt, Human
caccacugcacuccaaccuggaca

SEQ ID NO: 345512 - RNA, 22 nt, Human
caccacugcacuccaaccuggg

SEQ ID NO: 345513 - RNA, 32 nt, Human
caccacugcacuccaaccugggaaacgcagug

SEQ ID NO: 345514 - RNA, 24 nt, Human
caccacugcacuccaaccugggca

SEQ ID NO: 345515 - RNA, 32 nt, Human
caccacugcacuccaaccugggcaacagaggg

SEQ ID NO: 345516 - RNA, 23 nt, Human
caccacugcacuccaaccugggu

SEQ ID NO: 345517 - RNA, 32 nt, Human
caccacugcacuccaaccugggugacaagagu

SEQ ID NO: 345518 - RNA, 32 nt, Human
caccacugcacuccaaccugggugacagagug

SEQ ID NO: 345519 - RNA, 32 nt, Human
caccacugcacuccaaccugggugacgaguga

SEQ ID NO: 345520 - RNA, 32 nt, Human
caccacugcacuccaaucugggcaagagaacg

SEQ ID NO: 345521 - RNA, 32 nt, Human
caccacugcacuccacccugggcagaggugga

SEQ ID NO: 345522 - RNA, 32 nt, Human
caccacugcacuccagcacuccagccugggug

SEQ ID NO: 345523 - RNA, 32 nt, Human
caccacugcacuccagcaugagugacagagac

SEQ ID NO: 345524 - RNA, 24 nt, Human
caccacugcacuccagcaugggca

SEQ ID NO: 345525 - RNA, 21 nt, Human
caccacugcacuccagccagg

SEQ ID NO: 345526 - RNA, 32 nt, Human
caccacugcacuccagccaggaaugaggcaga

SEQ ID NO: 345527 - RNA, 22 nt, Human
caccacugcacuccagccaggg

SEQ ID NO: 345528 - RNA, 24 nt, Human
caccacugcacuccagccagggca

SEQ ID NO: 345529 - RNA, 24 nt, Human
caccacugcacuccagcccaggca

SEQ ID NO: 345530 - RNA, 32 nt, Human
caccacugcacuccagcccaggcaacagagug

SEQ ID NO: 345531 - RNA, 24 nt, Human
caccacugcacuccagcccaggua

SEQ ID NO: 345532 - RNA, 32 nt, Human
caccacugcacuccagcccaggugacagagca

SEQ ID NO: 345533 - RNA, 21 nt, Human
caccacugcacuccagccggg

SEQ ID NO: 345534 - RNA, 32 nt, Human
caccacugcacuccagccggggugacagagug

SEQ ID NO: 345535 - RNA, 23 nt, Human
caccacugcacuccagccuaggc

SEQ ID NO: 345536 - RNA, 24 nt, Human
caccacugcacuccagccuaggca

SEQ ID NO: 345537 - RNA, 32 nt, Human
caccacugcacuccagccuaggcgacggggca

SEQ ID NO: 345538 - RNA, 23 nt, Human
caccacugcacuccagccuaggu

SEQ ID NO: 345539 - RNA, 32 nt, Human
caccacugcacuccagccuaggugacagagug

SEQ ID NO: 345540 - RNA, 23 nt, Human
caccacugcacuccagccugagc

SEQ ID NO: 345541 - RNA, 23 nt, Human
caccacugcacuccagccugagu

SEQ ID NO: 345542 - RNA, 32 nt, Human
caccacugcacuccagccugagugacagagcg

SEQ ID NO: 345543 - RNA, 32 nt, Human
caccacugcacuccagccugagugaggaagca

SEQ ID NO: 345544 - RNA, 21 nt, Human
caccacugcacuccagccugg

SEQ ID NO: 345545 - RNA, 32 nt, Human
caccacugcacuccagccuggaaaacggagug

SEQ ID NO: 345546 - RNA, 32 nt, Human
caccacugcacuccagccuggaagaccaaacg

SEQ ID NO: 345547 - RNA, 24 nt, Human
caccacugcacuccagccuggaca

SEQ ID NO: 345548 - RNA, 32 nt, Human
caccacugcacuccagccuggacgacagagcg

SEQ ID NO: 345549 - RNA, 32 nt, Human
caccacugcacuccagccuggacgacagagug

SEQ ID NO: 345550 - RNA, 32 nt, Human
caccacugcacuccagccuggaugacaaagca

SEQ ID NO: 345551 - RNA, 32 nt, Human
caccacugcacuccagccuggaugacagagug

SEQ ID NO: 345552 - RNA, 23 nt, Human
caccacugcacuccagccuggca

SEQ ID NO: 345553 - RNA, 32 nt, Human
caccacugcacuccagccuggcaacagagcga

SEQ ID NO: 345554 - RNA, 23 nt, Human
caccacugcacuccagccuggcg

SEQ ID NO: 345555 - RNA, 32 nt, Human
caccacugcacuccagccuggcgacaaaguga

SEQ ID NO: 345556 - RNA, 22 nt, Human
caccacugcacuccagccuggg

SEQ ID NO: 345557 - RNA, 32 nt, Human
caccacugcacuccagccugggaagcagagug

SEQ ID NO: 345558 - RNA, 32 nt, Human
caccacugcacuccagccugggagacacagcg

SEQ ID NO: 345559 - RNA, 32 nt, Human
caccacugcacuccagccugggagacagagca

SEQ ID NO: 345560 - RNA, 32 nt, Human
caccacugcacuccagccugggagacagagcg

SEQ ID NO: 345561 - RNA, 32 nt, Human
caccacugcacuccagccugggagacagaguc

SEQ ID NO: 345562 - RNA, 32 nt, Human
caccacugcacuccagccugggagacagagug

SEQ ID NO: 345563 - RNA, 32 nt, Human
caccacugcacuccagccugggagauacagcg

SEQ ID NO: 345564 - RNA, 23 nt, Human
caccacugcacuccagccugggc

SEQ ID NO: 345565 - RNA, 24 nt, Human
caccacugcacuccagccugggca

SEQ ID NO: 345566 - RNA, 32 nt, Human
caccacugcacuccagccugggcaacaaagug

SEQ ID NO: 345567 - RNA, 32 nt, Human
caccacugcacuccagccugggcaacaagagc

SEQ ID NO: 345568 - RNA, 32 nt, Human
caccacugcacuccagccugggcaacaagagu

SEQ ID NO: 345569 - RNA, 32 nt, Human
caccacugcacuccagccugggcaacacagug

SEQ ID NO: 345570 - RNA, 32 nt, Human
caccacugcacuccagccugggcaacagaacg

SEQ ID NO: 345571 - RNA, 32 nt, Human
caccacugcacuccagccugggcaacagaggg

SEQ ID NO: 345572 - RNA, 32 nt, Human
caccacugcacuccagccugggcaacagagua

SEQ ID NO: 345573 - RNA, 32 nt, Human
caccacugcacuccagccugggcaacagagug

SEQ ID NO: 345574 - RNA, 32 nt, Human
caccacugcacuccagccugggcaacugagca

SEQ ID NO: 345575 - RNA, 32 nt, Human
caccacugcacuccagccugggcaauagagua

SEQ ID NO: 345576 - RNA, 32 nt, Human
caccacugcacuccagccugggcaauagagug

SEQ ID NO: 345577 - RNA, 32 nt, Human
caccacugcacuccagccugggcagcagagcg

SEQ ID NO: 345578 - RNA, 32 nt, Human
caccacugcacuccagccugggcgaaagggca

SEQ ID NO: 345579 - RNA, 32 nt, Human
caccacugcacuccagccugggcgacaaagug

SEQ ID NO: 345580 - RNA, 32 nt, Human
caccacugcacuccagccugggcgacacagcg

SEQ ID NO: 345581 - RNA, 32 nt, Human
caccacugcacuccagccugggcgacagaaug

SEQ ID NO: 345582 - RNA, 32 nt, Human
caccacugcacuccagccugggcgacagaccg

SEQ ID NO: 345583 - RNA, 32 nt, Human
caccacugcacuccagccugggcgacagagac

SEQ ID NO: 345584 - RNA, 32 nt, Human
caccacugcacuccagccugggcgacagagca

SEQ ID NO: 345585 - RNA, 32 nt, Human
caccacugcacuccagccugggcgacagagcg

SEQ ID NO: 345586 - RNA, 32 nt, Human
caccacugcacuccagccugggcgacagaggg

SEQ ID NO: 345587 - RNA, 32 nt, Human
caccacugcacuccagccugggcgacagagua

SEQ ID NO: 345588 - RNA, 32 nt, Human
caccacugcacuccagccugggcgacagagug

SEQ ID NO: 345589 - RNA, 32 nt, Human
caccacugcacuccagccugggcgacagugag

SEQ ID NO: 345590 - RNA, 32 nt, Human
caccacugcacuccagccugggcgacugugag

SEQ ID NO: 345591 - RNA, 32 nt, Human
caccacugcacuccagccugggcggcagagca

SEQ ID NO: 345592 - RNA, 32 nt, Human
caccacugcacuccagccuggggacagagcaa

SEQ ID NO: 345593 - RNA, 32 nt, Human
caccacugcacuccagccugggggacagagcg

SEQ ID NO: 345594 - RNA, 32 nt, Human
caccacugcacuccagccuggggugauagaac

SEQ ID NO: 345595 - RNA, 23 nt, Human
caccacugcacuccagccugggu

SEQ ID NO: 345596 - RNA, 32 nt, Human
caccacugcacuccagccugggugacaagagc

SEQ ID NO: 345597 - RNA, 32 nt, Human
caccacugcacuccagccugggugacagagac

SEQ ID NO: 345598 - RNA, 32 nt, Human
caccacugcacuccagccugggugacagagag

SEQ ID NO: 345599 - RNA, 32 nt, Human
caccacugcacuccagccugggugacagagca

SEQ ID NO: 345600 - RNA, 32 nt, Human
caccacugcacuccagccugggugacagagcc

SEQ ID NO: 345601 - RNA, 32 nt, Human
caccacugcacuccagccugggugacagagcg

SEQ ID NO: 345602 - RNA, 32 nt, Human
caccacugcacuccagccugggugacagaggg

SEQ ID NO: 345603 - RNA, 32 nt, Human
caccacugcacuccagccugggugacagagua

SEQ ID NO: 345604 - RNA, 32 nt, Human
caccacugcacuccagccugggugacagagug

SEQ ID NO: 345605 - RNA, 32 nt, Human
caccacugcacuccagccugggugacagauug

SEQ ID NO: 345606 - RNA, 32 nt, Human
caccacugcacuccagccugggugacagcaag

SEQ ID NO: 345607 - RNA, 32 nt, Human
caccacugcacuccagccugggugagagagca

SEQ ID NO: 345608 - RNA, 32 nt, Human
caccacugcacuccagccugggugauagagca

SEQ ID NO: 345609 - RNA, 32 nt, Human
caccacugcacuccagccugggugauagagug

SEQ ID NO: 345610 - RNA, 32 nt, Human
caccacugcacuccagccugggugauggagca

SEQ ID NO: 345611 - RNA, 32 nt, Human
caccacugcacuccagccuggguggcagagca

SEQ ID NO: 345612 - RNA, 32 nt, Human
caccacugcacuccagccuggguggcagagug

SEQ ID NO: 345613 - RNA, 32 nt, Human
caccacugcacuccagccugggugucagagca

SEQ ID NO: 345614 - RNA, 32 nt, Human
caccacugcacuccagccugggugucagagcg

SEQ ID NO: 345615 - RNA, 22 nt, Human
caccacugcacuccagccuggu

SEQ ID NO: 345616 - RNA, 24 nt, Human
caccacugcacuccagccugguca

SEQ ID NO: 345617 - RNA, 32 nt, Human
caccacugcacuccagccuggucaacagagca

SEQ ID NO: 345618 - RNA, 24 nt, Human
caccacugcacuccagccuggucg

SEQ ID NO: 345619 - RNA, 32 nt, Human
caccacugcacuccagccuggucgacagcgag

SEQ ID NO: 345620 - RNA, 30 nt, Human
caccacugcacuccagccuggugacagagc

SEQ ID NO: 345621 - RNA, 32 nt, Human
caccacugcacuccagccuggugacagagcaa

SEQ ID NO: 345622 - RNA, 32 nt, Human
caccacugcacuccagccuggugacagagcua

SEQ ID NO: 345623 - RNA, 32 nt, Human
caccacugcacuccagccuggugacagggcga

SEQ ID NO: 345624 - RNA, 32 nt, Human
caccacugcacuccagccugguuacagagcaa

SEQ ID NO: 345625 - RNA, 23 nt, Human
caccacugcacuccagccugugu

SEQ ID NO: 345626 - RNA, 23 nt, Human
caccacugcacuccagccuuggc

SEQ ID NO: 345627 - RNA, 23 nt, Human
caccacugcacuccagccuuggu

SEQ ID NO: 345628 - RNA, 32 nt, Human
caccacugcacuccagccuuggugacagagug

SEQ ID NO: 345629 - RNA, 32 nt, Human
caccacugcacuccagcucgggugacaagagu

SEQ ID NO: 345630 - RNA, 32 nt, Human
caccacugcacuccagcuugggggauagagug

SEQ ID NO: 345631 - RNA, 32 nt, Human
caccacugcacuccagcuugggugacagagug

SEQ ID NO: 345632 - RNA, 32 nt, Human
caccacugcacuccagcuugguucauggagac

SEQ ID NO: 345633 - RNA, 24 nt, Human
caccacugcacuccaggcugggua

SEQ ID NO: 345634 - RNA, 32 nt, Human
caccacugcacuccaggcugggugacagagcg

SEQ ID NO: 345635 - RNA, 32 nt, Human
caccacugcacuccagucuggaugacaaagca

SEQ ID NO: 345636 - RNA, 23 nt, Human
caccacugcacuccagucuggca

SEQ ID NO: 345637 - RNA, 32 nt, Human
caccacugcacuccagucuggcaacagagcaa

SEQ ID NO: 345638 - RNA, 24 nt, Human
caccacugcacuccagucugggca

SEQ ID NO: 345639 - RNA, 24 nt, Human
caccacugcacuccagucugggua

SEQ ID NO: 345640 - RNA, 32 nt, Human
caccacugcacuccagucugggugagagugag

SEQ ID NO: 345641 - RNA, 32 nt, Human
caccacugcacuccagucugguugagagagug

SEQ ID NO: 345642 - RNA, 32 nt, Human
caccacugcacuccauccagccugggugacag

SEQ ID NO: 345643 - RNA, 24 nt, Human
caccacugcacuccauccugggca

SEQ ID NO: 345644 - RNA, 32 nt, Human
caccacugcacuccauccugggcaacagagug

SEQ ID NO: 345645 - RNA, 32 nt, Human
caccacugcacuccauccugggugacagagca

SEQ ID NO: 345646 - RNA, 32 nt, Human
caccacugcacucccgcuuggcaauagaguga

SEQ ID NO: 345647 - RNA, 24 nt, Human
caccacugcacuccggccuaggca

SEQ ID NO: 345648 - RNA, 32 nt, Human
caccacugcacuccggccugggcgacagagcg

SEQ ID NO: 345649 - RNA, 32 nt, Human
caccacugcacuccugccugggcaauagagcc

SEQ ID NO: 345650 - RNA, 32 nt, Human
caccacugcacucuacucugggugacagaaug

SEQ ID NO: 345651 - RNA, 32 nt, Human
caccacugcacucuagccugcgugacacaacc

SEQ ID NO: 345652 - RNA, 24 nt, Human
caccacugcacucuagccugggca

SEQ ID NO: 345653 - RNA, 32 nt, Human
caccacugcacucuagccugggcaacagagcg

SEQ ID NO: 345654 - RNA, 32 nt, Human
caccacugcacucuagccugggcaacagagug

SEQ ID NO: 345655 - RNA, 32 nt, Human
caccacugcacucuagccugggcaagagaaca

SEQ ID NO: 345656 - RNA, 32 nt, Human
caccacugcacucuagccuggggaacagagug

SEQ ID NO: 345657 - RNA, 32 nt, Human
caccacugcacucuagccuggguaacaagcac

SEQ ID NO: 345658 - RNA, 32 nt, Human
caccacugcacucuagccugggugaaagagcg

SEQ ID NO: 345659 - RNA, 32 nt, Human
caccacugcacucuagccugggugacagagca

SEQ ID NO: 345660 - RNA, 32 nt, Human
caccacugcacucuagccugggugaccgaggg

SEQ ID NO: 345661 - RNA, 24 nt, Human
caccacugcacucuagccuuggca

SEQ ID NO: 345662 - RNA, 32 nt, Human
caccacugcacucuagccuuggcaacagugca

SEQ ID NO: 345663 - RNA, 32 nt, Human
caccacugcacucuggccugcaugcacucugg

SEQ ID NO: 345664 - RNA, 23 nt, Human
caccacugcacugcagccuggca

SEQ ID NO: 345665 - RNA, 32 nt, Human
caccacugcacugcagccuggcaacaagagcg

SEQ ID NO: 345666 - RNA, 32 nt, Human
caccacugcacugcagccugggaaacagagug

SEQ ID NO: 345667 - RNA, 32 nt, Human
caccacugcacugcagccugggugacagagug

SEQ ID NO: 345668 - RNA, 32 nt, Human
caccacugcacuucagccuggaugacagagug

SEQ ID NO: 345669 - RNA, 32 nt, Human
caccacugcacuucagccugggcaacagagug

SEQ ID NO: 345670 - RNA, 32 nt, Human
caccacugcacuucagccugggugacagaggg

SEQ ID NO: 345671 - RNA, 32 nt, Human
caccacugcacuucagccugggugacagagug

SEQ ID NO: 345672 - RNA, 32 nt, Human
caccacugcacuucagccuggugacagagcga

SEQ ID NO: 345673 - RNA, 24 nt, Human
caccacugcacuucauccuaggca

SEQ ID NO: 345674 - RNA, 24 nt, Human
caccacugcacuugagccugggca

SEQ ID NO: 345675 - RNA, 32 nt, Human
caccacugcacuuuagccugggcgacaagagc

SEQ ID NO: 345676 - RNA, 32 nt, Human
caccacugcacuuuagucugggugacagagca

SEQ ID NO: 345677 - RNA, 32 nt, Human
caccacugcaguccagccuaggcaacagugag

SEQ ID NO: 345678 - RNA, 32 nt, Human
caccacugcaguccagccugggcgacagagug

SEQ ID NO: 345679 - RNA, 32 nt, Human
caccacugcaguucagccuggaugaugagagu

SEQ ID NO: 345680 - RNA, 24 nt, Human
caccacugcaugcaagccugggca

SEQ ID NO: 345681 - RNA, 32 nt, Human
caccacugcaugcaagccugggcaauagagcg

SEQ ID NO: 345682 - RNA, 23 nt, Human
caccacugcauucagccugagca

SEQ ID NO: 345683 - RNA, 24 nt, Human
caccacugcauuccagccuaagca

SEQ ID NO: 345684 - RNA, 24 nt, Human
caccacugcauuccagccuaggca

SEQ ID NO: 345685 - RNA, 32 nt, Human
caccacugcauuccagccuggaugacagagca

SEQ ID NO: 345686 - RNA, 32 nt, Human
caccacugcauuccagccuggcgacagaguga

SEQ ID NO: 345687 - RNA, 24 nt, Human
caccacugcauuccagccugggca

SEQ ID NO: 345688 - RNA, 32 nt, Human
caccacugcauuccagccugggcacuagagug

SEQ ID NO: 345689 - RNA, 32 nt, Human
caccacugcauuccagccugggugacagagca

SEQ ID NO: 345690 - RNA, 32 nt, Human
caccacugcauuccagccugggugacagagcc

SEQ ID NO: 345691 - RNA, 32 nt, Human
caccacugcauuccagccugggugacagagug

SEQ ID NO: 345692 - RNA, 24 nt, Human
caccacugcauucuagccugggca

SEQ ID NO: 345693 - RNA, 32 nt, Human
caccacugcauucuagccugggcaacagagug

SEQ ID NO: 345694 - RNA, 32 nt, Human
caccacugcauucuggccugggugacagaguu

SEQ ID NO: 345695 - RNA, 32 nt, Human
caccacugcauugcagccuggugacagaguga

SEQ ID NO: 345696 - RNA, 32 nt, Human
caccacugccaccaccaccaaccacgaccacc

SEQ ID NO: 345697 - RNA, 32 nt, Human
caccacugcccaggugggugacuuugaccugg

SEQ ID NO: 345698 - RNA, 32 nt, Human
caccacugcccuccagccuggaugacagagug

SEQ ID NO: 345699 - RNA, 32 nt, Human
caccacugcccuccagccugggugacagagcg

SEQ ID NO: 345700 - RNA, 32 nt, Human
caccacugcccuuucuccuuuuccauaaaacu

SEQ ID NO: 345701 - RNA, 32 nt, Human
caccacugcccuuugaauguacaccuucauau

SEQ ID NO: 345702 - RNA, 32 nt, Human
caccacugcgcuccagccugggugaggagacc

SEQ ID NO: 345703 - RNA, 32 nt, Human
caccacuggaaauguuagcauaaaagaacuug

SEQ ID NO: 345704 - RNA, 32 nt, Human
caccacuggaacucacaaaggucuccuucacc

SEQ ID NO: 345705 - RNA, 32 nt, Human
caccacuggacuccagccugggcgacagagug

SEQ ID NO: 345706 - RNA, 24 nt, Human
caccacuggacugggcuggcccag

SEQ ID NO: 345707 - RNA, 25 nt, Human
caccacuggcacuccagccugggca

SEQ ID NO: 345708 - RNA, 32 nt, Human
caccacuggcacuccagccugggcaacagagu

SEQ ID NO: 345709 - RNA, 32 nt, Human
caccacuggcccacagauguagacccuucuac

SEQ ID NO: 345710 - RNA, 32 nt, Human
caccacuggccgccucuccuugccaggccugc

SEQ ID NO: 345711 - RNA, 31 nt, Human
caccacugggaaaucucagccacaccuuuuc

SEQ ID NO: 345712 - RNA, 32 nt, Human
caccacugggagccacccugcccuccugcuau

SEQ ID NO: 345713 - RNA, 32 nt, Human
caccacugggcagaggcuggacagcacggacu

SEQ ID NO: 345714 - RNA, 23 nt, Human
caccacuguacuccagcccggca

SEQ ID NO: 345715 - RNA, 32 nt, Human
caccacuguacuccagccugagugacaaagug

SEQ ID NO: 345716 - RNA, 32 nt, Human
caccacuguacuccagccuggaugacagagug

SEQ ID NO: 345717 - RNA, 24 nt, Human
caccacuguacuccagccugggca

SEQ ID NO: 345718 - RNA, 32 nt, Human
caccacuguacuccagccugggcaacagaaga

SEQ ID NO: 345719 - RNA, 32 nt, Human
caccacuguacuccagccugggcaacagaggg

SEQ ID NO: 345720 - RNA, 32 nt, Human
caccacuguacuccagccugggcaacagagug

SEQ ID NO: 345721 - RNA, 32 nt, Human
caccacuguacuccagccugggcgacggagug

SEQ ID NO: 345722 - RNA, 32 nt, Human
caccacuguacuccagccugggcgauacaaca

SEQ ID NO: 345723 - RNA, 32 nt, Human
caccacuguacuccagccugggugacaaaguc

SEQ ID NO: 345724 - RNA, 32 nt, Human
caccacuguacuccagccugggugacaaagug

SEQ ID NO: 345725 - RNA, 32 nt, Human
caccacuguacuccagccugggugacagagca

SEQ ID NO: 345726 - RNA, 32 nt, Human
caccacuguacuccagccugggugacagagcg

SEQ ID NO: 345727 - RNA, 32 nt, Human
caccacuguacuccagccugggugacagggca

SEQ ID NO: 345728 - RNA, 32 nt, Human
caccacuguacuccagccugggugacugagcg

SEQ ID NO: 345729 - RNA, 32 nt, Human
caccacuguacuccagccuggugacagagcca

SEQ ID NO: 345730 - RNA, 32 nt, Human
caccacuguaguucucucauuuccaaaccauc

SEQ ID NO: 345731 - RNA, 32 nt, Human
caccacuguauuccagccuggaugacaaagca

SEQ ID NO: 345732 - RNA, 32 nt, Human
caccacuguauuccagccugggugacagagug

SEQ ID NO: 345733 - RNA, 32 nt, Human
caccacuguauuccagccugggugacugagac

SEQ ID NO: 345734 - RNA, 32 nt, Human
caccacuguauuuugaaaacauguuugguuuc

SEQ ID NO: 345735 - RNA, 32 nt, Human
caccacugugaccuuccucgugccccaauugc

SEQ ID NO: 345736 - RNA, 32 nt, Human
caccacugugauuuguucuccugguggagaga

SEQ ID NO: 345737 - RNA, 22 nt, Human
caccacugugcucaaccagaca

SEQ ID NO: 345738 - RNA, 32 nt, Human
caccacuguggaccccugcucugcacccccag

SEQ ID NO: 345739 - RNA, 32 nt, Human
caccacuguguauuuaacugccuuguguacag

SEQ ID NO: 345740 - RNA, 32 nt, Human
caccacugugugaccuugggcaagucacuuca

SEQ ID NO: 345741 - RNA, 32 nt, Human
caccacuuaccggccuccuccaccuucucggc

SEQ ID NO: 345742 - RNA, 23 nt, Human
caccacuuacuccagccugggca

SEQ ID NO: 345743 - RNA, 32 nt, Human
caccacuuauugcacuccagcccgggcgacag

SEQ ID NO: 345744 - RNA, 21 nt, Human
caccacuucaagugaccacca

SEQ ID NO: 345745 - RNA, 32 nt, Human
caccacuucacuccagccugggugacggagug

SEQ ID NO: 345746 - RNA, 32 nt, Human
caccacuucuauucccccagacugcuugggac

SEQ ID NO: 345747 - RNA, 32 nt, Human
caccacuuggaaaugacuaguauuaucagaag

SEQ ID NO: 345748 - RNA, 32 nt, Human
caccacuuggagagacacaggaagguaauauu

SEQ ID NO: 345749 - RNA, 32 nt, Human
caccacuuggggaccucucugagcaggcucuc

SEQ ID NO: 345750 - RNA, 32 nt, Human
caccacuuguaacuccagccugggcaacagag

SEQ ID NO: 345751 - RNA, 32 nt, Human
caccacuuuacuuagccugggugacagaguga

SEQ ID NO: 345752 - RNA, 32 nt, Human
caccacuuuccaccaucagcugccaaacuggu

SEQ ID NO: 345753 - RNA, 21 nt, Human
caccacuuuggaaggccgagg

SEQ ID NO: 345754 - RNA, 32 nt, Human
caccacuuugggaggccgaggcgggcagauca

SEQ ID NO: 345755 - RNA, 32 nt, Human
caccagaaacagacaucuugcaguguuucacu

SEQ ID NO: 345756 - RNA, 32 nt, Human
caccagaaagccugccuaacucugccuggugg

SEQ ID NO: 345757 - RNA, 32 nt, Human
caccagaacacaguccgugcugugcugcgcua

SEQ ID NO: 345758 - RNA, 32 nt, Human
caccagaagcaguucuggagaaagcuuagcuc

SEQ ID NO: 345759 - RNA, 32 nt, Human
caccagaagcugagauuggagcuguucguaau

SEQ ID NO: 345760 - RNA, 32 nt, Human
caccagaccauccugcgcgccugggccgugaa

SEQ ID NO: 345761 - RNA, 32 nt, Human
caccagaccuggcuaauuuuuguauuuuuagu

SEQ ID NO: 345762 - RNA, 32 nt, Human
caccagacucuccugagggugaaagaagacac

SEQ ID NO: 345763 - RNA, 32 nt, Human
caccagagacagcggacuuuccuccgaugguu

SEQ ID NO: 345764 - RNA, 32 nt, Human
caccagagccuucugcaagaugcuucugauuc

SEQ ID NO: 345765 - RNA, 32 nt, Human
caccagaggaagagagcuuggcaggaaaguua

SEQ ID NO: 345766 - RNA, 32 nt, Human
caccagaguaguuuggaggcaggccugcaggc

SEQ ID NO: 345767 - RNA, 32 nt, Human
caccagagucccugugcaaacaccuagacuca

SEQ ID NO: 345768 - RNA, 32 nt, Human
caccagaugcuggacacccucuucccaucugu

SEQ ID NO: 345769 - RNA, 32 nt, Human
caccagauguuaccgcucgguugaaugugucc

SEQ ID NO: 345770 - RNA, 22 nt, Human
caccagcaaccccccagugcca

SEQ ID NO: 345771 - RNA, 32 nt, Human
caccagcaacugacaggagcuugggagcucgg

SEQ ID NO: 345772 - RNA, 32 nt, Human
caccagcacagcaaacccgccgggaucaaagu

SEQ ID NO: 345773 - RNA, 32 nt, Human
caccagcacaugcaugcacaccaguacacaca

SEQ ID NO: 345774 - RNA, 21 nt, Human
caccagcaccaacaccacggu

SEQ ID NO: 345775 - RNA, 20 nt, Human
caccagcaccacagucaggc

SEQ ID NO: 345776 - RNA, 31 nt, Human
caccagcaccaccagcaccuacccagcauuc

SEQ ID NO: 345777 - RNA, 24 nt, Human
caccagcaccaccagccccaggcg

SEQ ID NO: 345778 - RNA, 32 nt, Human
caccagcaccagagcccagcugcccagcuuaa

SEQ ID NO: 345779 - RNA, 32 nt, Human
caccagcaccucagugggggauacugcaaguu

SEQ ID NO: 345780 - RNA, 32 nt, Human
caccagcaccuccuggcugaaggucagcccac

SEQ ID NO: 345781 - RNA, 22 nt, Human
caccagcacuacgcugccggcg

SEQ ID NO: 345782 - RNA, 20 nt, Human
caccagcacuguggcaaggc

SEQ ID NO: 345783 - RNA, 32 nt, Human
caccagcacuuugugggaaagacagaggcggg

SEQ ID NO: 345784 - RNA, 32 nt, Human
caccagcacuuugugggaaagacagagguggg

SEQ ID NO: 345785 - RNA, 18 nt, Human
caccagcagauaguggga

SEQ ID NO: 345786 - RNA, 19 nt, Human
caccagcagccccaguagc

SEQ ID NO: 345787 - RNA, 32 nt, Human
caccagcagccccugacacagccaccucuagc

SEQ ID NO: 345788 - RNA, 32 nt, Human
caccagcagcugguccuggccuuggagcgcaa

SEQ ID NO: 345789 - RNA, 32 nt, Human
caccagcaggcagguggacugacuguguuggg

SEQ ID NO: 345790 - RNA, 32 nt, Human
caccagcaggugucuggacgaaaacaucaaug

SEQ ID NO: 345791 - RNA, 32 nt, Human
caccagcaucaucuuaacuaacauucugaacu

SEQ ID NO: 345792 - RNA, 32 nt, Human
caccagcaucccuccucuccccaaggugaagu

SEQ ID NO: 345793 - RNA, 32 nt, Human
caccagcaucggcagaggugauagcugaggag

SEQ ID NO: 345794 - RNA, 32 nt, Human
caccagcaucucucaacagucucagcucgcuc

SEQ ID NO: 345795 - RNA, 19 nt, Human
caccagcaugauggcccca

SEQ ID NO: 345796 - RNA, 32 nt, Human
caccagcauuuauuuucauuauuugaggauau

SEQ ID NO: 345797 - RNA, 32 nt, Human
caccagccaagaaaugcugucagugccuggaa

SEQ ID NO: 345798 - RNA, 32 nt, Human
caccagccaagcccagccugagccagcaccug

SEQ ID NO: 345799 - RNA, 32 nt, Human
caccagccauuuuggcuucaaaggaccccacc

SEQ ID NO: 345800 - RNA, 32 nt, Human
caccagcccagagaggccucucaccacagcag

SEQ ID NO: 345801 - RNA, 32 nt, Human
caccagcccagcucugucccuccccuagguaa

SEQ ID NO: 345802 - RNA, 19 nt, Human
caccagcccagggcugauc

SEQ ID NO: 345803 - RNA, 32 nt, Human
caccagcccccggcagaggcugagguggcagu

SEQ ID NO: 345804 - RNA, 32 nt, Human
caccagccccuugcugcucucccuuuaaugcc

SEQ ID NO: 345805 - RNA, 32 nt, Human
caccagccccuuucaucccuccuuccuccccc

SEQ ID NO: 345806 - RNA, 32 nt, Human
caccagcccucagaacccuccugggcuugccc

SEQ ID NO: 345807 - RNA, 32 nt, Human
caccagcccugagcucccagagcacugguggc

SEQ ID NO: 345808 - RNA, 32 nt, Human
caccagcccugaggugucagcugccuucagag

SEQ ID NO: 345809 - RNA, 32 nt, Human
caccagcccuggagaggaggaagggacugacu

SEQ ID NO: 345810 - RNA, 32 nt, Human
caccagcccuggcaacugcuaaucuacuuucu

SEQ ID NO: 345811 - RNA, 32 nt, Human
caccagcccuugcccaugguggggaggacauc

SEQ ID NO: 345812 - RNA, 32 nt, Human
caccagcccuugugggacucccaacacaagac

SEQ ID NO: 345813 - RNA, 32 nt, Human
caccagccgccccucuccuccugggcugcaga

SEQ ID NO: 345814 - RNA, 32 nt, Human
caccagccuccacgaagucguggaaaaggaga

SEQ ID NO: 345815 - RNA, 32 nt, Human
caccagccuccaggagcacugggccagggccc

SEQ ID NO: 345816 - RNA, 24 nt, Human
caccagccuccaggcccagugcca

SEQ ID NO: 345817 - RNA, 16 nt, Human
caccagccuccugguc

SEQ ID NO: 345818 - RNA, 32 nt, Human
caccagccucucugggguucucaggccauccc

SEQ ID NO: 345819 - RNA, 32 nt, Human
caccagccucugauggcucaggaggacuugug

SEQ ID NO: 345820 - RNA, 32 nt, Human
caccagccugacucucucccucccucuguuug

SEQ ID NO: 345821 - RNA, 32 nt, Human
caccagccugacugcacacagcuaggcaugcc

SEQ ID NO: 345822 - RNA, 32 nt, Human
caccagccugcucuccgcaggcccacuguccu

SEQ ID NO: 345823 - RNA, 19 nt, Human
caccagccuggacaggaag

SEQ ID NO: 345824 - RNA, 32 nt, Human
caccagccuggaccuccaccuccccuggaaau

SEQ ID NO: 345825 - RNA, 25 nt, Human
caccagccugggugacagagcaaga

SEQ ID NO: 345826 - RNA, 25 nt, Human
caccagccugggugacagagcgaga

SEQ ID NO: 345827 - RNA, 32 nt, Human
caccagccugucucccugaggacacagugagc

SEQ ID NO: 345828 - RNA, 32 nt, Human
caccagccuuucucccaggccaggcuccuucc

SEQ ID NO: 345829 - RNA, 32 nt, Human
caccagccuuucuuccccuuuguguguguggu

SEQ ID NO: 345830 - RNA, 32 nt, Human
caccagcgcagcaguccuggagcugugaggag

SEQ ID NO: 345831 - RNA, 32 nt, Human
caccagcggcuguccccaccagcucuucucag

SEQ ID NO: 345832 - RNA, 20 nt, Human
caccagcuaccacuaccacc

SEQ ID NO: 345833 - RNA, 32 nt, Human
caccagcuagaggcaccugcugccaacacgau

SEQ ID NO: 345834 - RNA, 21 nt, Human
caccagcuaucagauaaggca

SEQ ID NO: 345835 - RNA, 20 nt, Human
caccagcuccauuccuuagc

SEQ ID NO: 345836 - RNA, 32 nt, Human
caccagcucccucaccaccaaugcgaccaugg

SEQ ID NO: 345837 - RNA, 32 nt, Human
caccagcucggcaaccgcacagagccaggucc

SEQ ID NO: 345838 - RNA, 20 nt, Human
caccagcucguuccccucca

SEQ ID NO: 345839 - RNA, 32 nt, Human
caccagcucguuccccuccagccuggugcugg

SEQ ID NO: 345840 - RNA, 20 nt, Human
caccagcucuagacugcaga

SEQ ID NO: 345841 - RNA, 22 nt, Human
caccagcucuccccacagggcc

SEQ ID NO: 345842 - RNA, 32 nt, Human
caccagcucugcagccagccuauggcaauuau

SEQ ID NO: 345843 - RNA, 19 nt, Human
caccagcugacaauggacu

SEQ ID NO: 345844 - RNA, 32 nt, Human
caccagcugagaugucaccugcuuuauuucug

SEQ ID NO: 345845 - RNA, 32 nt, Human
caccagcugcagcugauccaauacaccaagcc

SEQ ID NO: 345846 - RNA, 22 nt, Human
caccagcugccaagagaauccc

SEQ ID NO: 345847 - RNA, 23 nt, Human
caccagcugccaguacaccucca

SEQ ID NO: 345848 - RNA, 22 nt, Human
caccagcugccaguggcuccca

SEQ ID NO: 345849 - RNA, 32 nt, Human
caccagcugcccugagcugcuuguacaaccaa

SEQ ID NO: 345850 - RNA, 32 nt, Human
caccagcugccuccuccacucagcauuccaug

SEQ ID NO: 345851 - RNA, 32 nt, Human
caccagcugccugggccccacccuccugacuc

SEQ ID NO: 345852 - RNA, 32 nt, Human
caccagcugcucccccucauccccuucacccu

SEQ ID NO: 345853 - RNA, 32 nt, Human
caccagcugcucucuuuccucuuccaaguaga

SEQ ID NO: 345854 - RNA, 32 nt, Human
caccagcugcugcccagcuacuuuggacacag

SEQ ID NO: 345855 - RNA, 23 nt, Human
caccagcuggaugaccucaggca

SEQ ID NO: 345856 - RNA, 32 nt, Human
caccagcuggcuggccgucugccuggcccaug

SEQ ID NO: 345857 - RNA, 32 nt, Human
caccagcuuccccaagagagugucagaaucuu

SEQ ID NO: 345858 - RNA, 21 nt, Human
caccagcuucuccucuggagc

SEQ ID NO: 345859 - RNA, 21 nt, Human
caccagcuuucagccaccaug

SEQ ID NO: 345860 - RNA, 32 nt, Human
caccaggaagacaacaguugaagguuccuuag

SEQ ID NO: 345861 - RNA, 32 nt, Human
caccaggaagccugagaaugaauccugagggc

SEQ ID NO: 345862 - RNA, 32 nt, Human
caccaggaagcgugagccccuguugcauuucu

SEQ ID NO: 345863 - RNA, 32 nt, Human
caccaggaaggaacucugcguccgacggcuuc

SEQ ID NO: 345864 - RNA, 21 nt, Human
caccaggaaggagaaccacca

SEQ ID NO: 345865 - RNA, 21 nt, Human
caccaggaaggaggaccacca

SEQ ID NO: 345866 - RNA, 32 nt, Human
caccaggaaggaugcugcuucggaugggagcc

SEQ ID NO: 345867 - RNA, 32 nt, Human
caccaggaaggcggaggacgcaggagccaaga

SEQ ID NO: 345868 - RNA, 32 nt, Human
caccaggaagguguggcugagccccagagccc

SEQ ID NO: 345869 - RNA, 32 nt, Human
caccaggacuccuuguucugcucuggcaagag

SEQ ID NO: 345870 - RNA, 32 nt, Human
caccaggagacggccacagacacacacugcua

SEQ ID NO: 345871 - RNA, 32 nt, Human
caccaggagcaguucuggaacaggccucucca

SEQ ID NO: 345872 - RNA, 32 nt, Human
caccaggagcccugccuucgucuccauaggaa

SEQ ID NO: 345873 - RNA, 32 nt, Human
caccaggagcuggagaggccugggacagagcc

SEQ ID NO: 345874 - RNA, 32 nt, Human
caccaggaggagguuggauuucugccaguggg

SEQ ID NO: 345875 - RNA, 32 nt, Human
caccaggaggcccucgagguugcucuggaucc

SEQ ID NO: 345876 - RNA, 32 nt, Human
caccaggagggugagggggagugaagaagggu

SEQ ID NO: 345877 - RNA, 32 nt, Human
caccaggaggugagcuugcucugggaggcaua

SEQ ID NO: 345878 - RNA, 32 nt, Human
caccaggagugcguggaucucagucucucugu

SEQ ID NO: 345879 - RNA, 32 nt, Human
caccaggaguuagagagcagccugggcaacau

SEQ ID NO: 345880 - RNA, 32 nt, Human
caccaggaugagcaagcugcccagggagcuga

SEQ ID NO: 345881 - RNA, 32 nt, Human
caccaggauugagacuuccugugggcaccaaa

SEQ ID NO: 345882 - RNA, 32 nt, Human
caccaggcauggugacuugugccugaaauccc

SEQ ID NO: 345883 - RNA, 32 nt, Human
caccaggcauggugauuugugccugaaaucuc

SEQ ID NO: 345884 - RNA, 32 nt, Human
caccaggcauugaaaagacaugacuuacccag

SEQ ID NO: 345885 - RNA, 32 nt, Human
caccaggccacagcccaaggcagagcuggcag

SEQ ID NO: 345886 - RNA, 22 nt, Human
caccaggccacccugcagucca

SEQ ID NO: 345887 - RNA, 32 nt, Human
caccaggccagcagccucaucccugccauuca

SEQ ID NO: 345888 - RNA, 32 nt, Human
caccaggccagccccacugggaauggggucag

SEQ ID NO: 345889 - RNA, 32 nt, Human
caccaggccagccugccugaggacuuuggcaa

SEQ ID NO: 345890 - RNA, 32 nt, Human
caccaggccaggcuaauuuuuguauuuuuagu

SEQ ID NO: 345891 - RNA, 32 nt, Human
caccaggcccagcuaauuuuuguauuuuuaau

SEQ ID NO: 345892 - RNA, 32 nt, Human
caccaggcccagcugauuuuuguauuuuuguu

SEQ ID NO: 345893 - RNA, 32 nt, Human
caccaggcccaggagcuggcgccucagcaacu

SEQ ID NO: 345894 - RNA, 32 nt, Human
caccaggcccagggcuucaccugcugagcugu

SEQ ID NO: 345895 - RNA, 32 nt, Human
caccaggccccaggcacauggcugcccugaac

SEQ ID NO: 345896 - RNA, 32 nt, Human
caccaggccucgggccccagaggucccgcucc

SEQ ID NO: 345897 - RNA, 20 nt, Human
caccaggccuuccucagggg

SEQ ID NO: 345898 - RNA, 32 nt, Human
caccaggcgaggaaacgagaccucuuucguuc

SEQ ID NO: 345899 - RNA, 32 nt, Human
caccaggcgggugggacucaagggcaggcugg

SEQ ID NO: 345900 - RNA, 22 nt, Human
caccaggcuagaggcaacugcc

SEQ ID NO: 345901 - RNA, 32 nt, Human
caccaggcuccccagagacaaugcucaguauu

SEQ ID NO: 345902 - RNA, 32 nt, Human
caccaggcuccucaggcaccuucaccaucggc

SEQ ID NO: 345903 - RNA, 32 nt, Human
caccaggcugcagggggcuggagaagcaacac

SEQ ID NO: 345904 - RNA, 32 nt, Human
caccaggcugcuuccagcccuggguagaauga

SEQ ID NO: 345905 - RNA, 32 nt, Human
caccaggcugggcagggacaaccaccaggugu

SEQ ID NO: 345906 - RNA, 19 nt, Human
caccaggcugggugcaaug

SEQ ID NO: 345907 - RNA, 32 nt, Human
caccaggcuggucaccccaggccagcgucugu

SEQ ID NO: 345908 - RNA, 32 nt, Human
caccagggagagacagagacagagaugacaga

SEQ ID NO: 345909 - RNA, 32 nt, Human
caccagggauccuuagcacccaaccggucugc

SEQ ID NO: 345910 - RNA, 32 nt, Human
caccagggaucuccaggagaaacuucacaggc

SEQ ID NO: 345911 - RNA, 32 nt, Human
caccagggcaggcagaugggggcggcggcaca

SEQ ID NO: 345912 - RNA, 31 nt, Human
caccagggcauaagucuacucacuuauaucu

SEQ ID NO: 345913 - RNA, 32 nt, Human
caccagggccuccccacgucugccuuugaggg

SEQ ID NO: 345914 - RNA, 32 nt, Human
caccaggggaggugggguuuggugagagacgc

SEQ ID NO: 345915 - RNA, 32 nt, Human
caccaggggcaggcacagcacagggauccgac

SEQ ID NO: 345916 - RNA, 32 nt, Human
caccaggggugaguccgggcaaggagguuagg

SEQ ID NO: 345917 - RNA, 32 nt, Human
caccaggguugaccccagaggauugcugcccc

SEQ ID NO: 345918 - RNA, 18 nt, Human
caccagguagccuacuga

SEQ ID NO: 345919 - RNA, 32 nt, Human
caccaggucacuuuaugcugggugauauaguc

SEQ ID NO: 345920 - RNA, 32 nt, Human
caccaggucaggcugggugcgccaugguugag

SEQ ID NO: 345921 - RNA, 32 nt, Human
caccaggucccggggagagggauugagccaag

SEQ ID NO: 345922 - RNA, 32 nt, Human
caccagguccucgucagacuccugugcucuuc

SEQ ID NO: 345923 - RNA, 24 nt, Human
caccaggucucccaggcuuccuca

SEQ ID NO: 345924 - RNA, 22 nt, Human
caccaggucucccgggaagcca

SEQ ID NO: 345925 - RNA, 32 nt, Human
caccagguggauugauaccauggcuguagcug

SEQ ID NO: 345926 - RNA, 32 nt, Human
caccagguggcaccaaggguccugaguccugg

SEQ ID NO: 345927 - RNA, 32 nt, Human
caccaggugucaggauagucacagugauacca

SEQ ID NO: 345928 - RNA, 32 nt, Human
caccaggugugggcagggcaccaagcagggag

SEQ ID NO: 345929 - RNA, 22 nt, Human
caccagguuggagaggcaccug

SEQ ID NO: 345930 - RNA, 32 nt, Human
caccagguuucugucucccaguauaaucauau

SEQ ID NO: 345931 - RNA, 32 nt, Human
caccaguaaauccugcuacaucauguacugug

SEQ ID NO: 345932 - RNA, 32 nt, Human
caccaguaacucuuguguucaccaggacccag

SEQ ID NO: 345933 - RNA, 21 nt, Human
caccaguaaucccagcuacuc

SEQ ID NO: 345934 - RNA, 32 nt, Human
caccaguagcguugugugugauuucugauaaa

SEQ ID NO: 345935 - RNA, 22 nt, Human
caccaguagucccagcuacuca

SEQ ID NO: 345936 - RNA, 32 nt, Human
caccagucccagaacccgccaaugcuggggaa

SEQ ID NO: 345937 - RNA, 32 nt, Human
caccagucccagaacccgcuaaugcuggggaa

SEQ ID NO: 345938 - RNA, 32 nt, Human
caccagucccccagacugggugaagguacagc

SEQ ID NO: 345939 - RNA, 21 nt, Human
caccagucccggcaguggcca

SEQ ID NO: 345940 - RNA, 24 nt, Human
caccagucccuguccggaaugcca

SEQ ID NO: 345941 - RNA, 32 nt, Human
caccagucccuuacucuguucucccccaguga

SEQ ID NO: 345942 - RNA, 32 nt, Human
caccaguccucccagggaguccucgagucgcc

SEQ ID NO: 345943 - RNA, 24 nt, Human
caccagucuccuccugcagugcca

SEQ ID NO: 345944 - RNA, 32 nt, Human
caccagucucugcucuucccagccucuccggc

SEQ ID NO: 345945 - RNA, 32 nt, Human
caccagucucuuucucuuuccugcuucacccc

SEQ ID NO: 345946 - RNA, 20 nt, Human
caccagucugaagcagugcc

SEQ ID NO: 345947 - RNA, 32 nt, Human
caccagucugaccucaguccucccucccucug

SEQ ID NO: 345948 - RNA, 25 nt, Human
caccagucugccaacgcuccuggcu

SEQ ID NO: 345949 - RNA, 32 nt, Human
caccagugaaacaaacaggagaugcuaucacc

SEQ ID NO: 345950 - RNA, 32 nt, Human
caccagugaacggagaccucucugaacuaaga

SEQ ID NO: 345951 - RNA, 32 nt, Human
caccagugaaguuuaaucuagcuaaacacugg

SEQ ID NO: 345952 - RNA, 32 nt, Human
caccagugacgguggucacaguugcaauaaag

SEQ ID NO: 345953 - RNA, 32 nt, Human
caccagugcaaaccccagcaccagcgggagug

SEQ ID NO: 345954 - RNA, 32 nt, Human
caccagugcaagcagaugacaaaaaggugcag

SEQ ID NO: 345955 - RNA, 24 nt, Human
caccagugcacuccagccugggca

SEQ ID NO: 345956 - RNA, 32 nt, Human
caccagugcacuccagccugggcgacagagag

SEQ ID NO: 345957 - RNA, 32 nt, Human
caccagugcacuccagccugggugacagagca

SEQ ID NO: 345958 - RNA, 32 nt, Human
caccagugcacuccagccuuggugacaauggg

SEQ ID NO: 345959 - RNA, 32 nt, Human
caccagugcacuccagcugggcgacagagcga

SEQ ID NO: 345960 - RNA, 32 nt, Human
caccaguggcgguggaggugugcugagcucag

SEQ ID NO: 345961 - RNA, 32 nt, Human
caccaguggggaucagugcgggugggggagaa

SEQ ID NO: 345962 - RNA, 32 nt, Human
caccaguggucuucauucuuccucauucauuc

SEQ ID NO: 345963 - RNA, 32 nt, Human
caccaguguguacacuggaaguuuuguuuugu

SEQ ID NO: 345964 - RNA, 26 nt, Human
caccagugugugaggggagcaggcag

SEQ ID NO: 345965 - RNA, 32 nt, Human
caccaguucauggggagccagguccaagucuu

SEQ ID NO: 345966 - RNA, 32 nt, Human
caccaguuccucugcaacccacucugagccuc

SEQ ID NO: 345967 - RNA, 32 nt, Human
caccauaaagagagcuccauguucuuuugcuc

SEQ ID NO: 345968 - RNA, 32 nt, Human
caccauaaccaccaaccugucugccucaggcg

SEQ ID NO: 345969 - RNA, 32 nt, Human
caccauacaguggccucaaagcaaccauggcc

SEQ ID NO: 345970 - RNA, 32 nt, Human
caccauacccagcuaauuuuuguauuuuuagu

SEQ ID NO: 345971 - RNA, 32 nt, Human
caccauacccggcuaauuuuuauauuuuuaga

SEQ ID NO: 345972 - RNA, 32 nt, Human
caccauaccuagcuaauuuuuccucuuuuuag

SEQ ID NO: 345973 - RNA, 32 nt, Human
caccauaccuggcuaauuuuuguauuuuuagu

SEQ ID NO: 345974 - RNA, 32 nt, Human
caccauaccuggcuaauuuuuguauuuuuggu

SEQ ID NO: 345975 - RNA, 32 nt, Human
caccauacuccaggcccugcauggcuucuucc

SEQ ID NO: 345976 - RNA, 20 nt, Human
caccauaggguuuucugcuc

SEQ ID NO: 345977 - RNA, 32 nt, Human
caccaucaagcuuuuccaggaaugcuguccuu

SEQ ID NO: 345978 - RNA, 32 nt, Human
caccaucaagguuugcuugccuguggaggucg

SEQ ID NO: 345979 - RNA, 32 nt, Human
caccaucaccaccaccaccaccaucaccacca

SEQ ID NO: 345980 - RNA, 32 nt, Human
caccaucaccaccaccaccaucaucaucauug

SEQ ID NO: 345981 - RNA, 17 nt, Human
caccaucacgccuggcu

SEQ ID NO: 345982 - RNA, 23 nt, Human
caccaucagacaccugacccuca

SEQ ID NO: 345983 - RNA, 32 nt, Human
caccaucagggcuggaaggaagagaaagggga

SEQ ID NO: 345984 - RNA, 32 nt, Human
caccaucauccucccuuccucaucaucauccu

SEQ ID NO: 345985 - RNA, 32 nt, Human
caccaucauuaaggagaggaguguggaggccg

SEQ ID NO: 345986 - RNA, 32 nt, Human
caccauccaagaggugguagguuggaguaaga

SEQ ID NO: 345987 - RNA, 32 nt, Human
caccauccaugguaucaccucaucucacuucc

SEQ ID NO: 345988 - RNA, 25 nt, Human
caccaucccagcugugaggcugcca

SEQ ID NO: 345989 - RNA, 32 nt, Human
caccaucccauccuggggccccuucagugacu

SEQ ID NO: 345990 - RNA, 20 nt, Human
caccauccccagcagggccu

SEQ ID NO: 345991 - RNA, 32 nt, Human
caccaucccuaaaaguuacaguuuggggagag

SEQ ID NO: 345992 - RNA, 32 nt, Human
caccauccuacaaguaccucagucuccagcag

SEQ ID NO: 345993 - RNA, 32 nt, Human
caccauccugagccagggaacagccccagggu

SEQ ID NO: 345994 - RNA, 32 nt, Human
caccauccuguauucuucaaccagugaucccc

SEQ ID NO: 345995 - RNA, 32 nt, Human
caccauccugugagcccaugcccggccccacu

SEQ ID NO: 345996 - RNA, 32 nt, Human
caccauccuguggccccgcacccggccccucu

SEQ ID NO: 345997 - RNA, 32 nt, Human
caccaucguaccacugcacuccagccuggaug

SEQ ID NO: 345998 - RNA, 32 nt, Human
caccaucgucuugcugauuauaugucaaguuc

SEQ ID NO: 345999 - RNA, 32 nt, Human
caccaucguucuguuugugcuuaaauggcaca

SEQ ID NO: 346000 - RNA, 32 nt, Human
caccaucuacagccaccugccugcuccuaugu

SEQ ID NO: 346001 - RNA, 32 nt, Human
caccaucuacagcucauuuccccguccuccaa

SEQ ID NO: 346002 - RNA, 32 nt, Human
caccaucuccacccugccugcuguggaaucuc

SEQ ID NO: 346003 - RNA, 32 nt, Human
caccaucuccaccucccaccaaaccaccagca

SEQ ID NO: 346004 - RNA, 32 nt, Human
caccaucuccagcugcucacagacaccagcaa

SEQ ID NO: 346005 - RNA, 32 nt, Human
caccaucuccagcugcucacagacgccagcaa

SEQ ID NO: 346006 - RNA, 32 nt, Human
caccaucugaagcuuuugaaacuccuguugua

SEQ ID NO: 346007 - RNA, 32 nt, Human
caccaucugaaggagagugccaucauccuuag

SEQ ID NO: 346008 - RNA, 32 nt, Human
caccaucugagggagaggaacguggaacagga

SEQ ID NO: 346009 - RNA, 17 nt, Human
caccaucugcaccccca

SEQ ID NO: 346010 - RNA, 32 nt, Human
caccaucuggaagccagcugggccacagcaga

SEQ ID NO: 346011 - RNA, 32 nt, Human
caccaucuggacaacagagcaagacuccgucu

SEQ ID NO: 346012 - RNA, 32 nt, Human
caccaucugucaccuucccuugcagcuuaagg

SEQ ID NO: 346013 - RNA, 32 nt, Human
caccaucuucugaagugaacugaucugcccuu

SEQ ID NO: 346014 - RNA, 32 nt, Human
caccaucuucugcaguugccucuuuguugggc

SEQ ID NO: 346015 - RNA, 32 nt, Human
caccaucuuggggucccucccacccucacgga

SEQ ID NO: 346016 - RNA, 32 nt, Human
caccaucuuguaagacugugcccagccccacu

SEQ ID NO: 346017 - RNA, 23 nt, Human
caccaucuuuuauccccgagcag

SEQ ID NO: 346018 - RNA, 29 nt, Human
caccaugaacagcacccccaggaaugccc

SEQ ID NO: 346019 - RNA, 21 nt, Human
caccaugaauuaaaggugcca

SEQ ID NO: 346020 - RNA, 32 nt, Human
caccaugacagcccggcuuugccuugacugac

SEQ ID NO: 346021 - RNA, 22 nt, Human
caccaugacaugaaggaggcca

SEQ ID NO: 346022 - RNA, 32 nt, Human
caccaugaccagcuaauguuuguauuuuuagu

SEQ ID NO: 346023 - RNA, 32 nt, Human
caccaugagcuccccuccccugucuccgggcc

SEQ ID NO: 346024 - RNA, 22 nt, Human
caccaugagggggaggcugcca

SEQ ID NO: 346025 - RNA, 32 nt, Human
caccaugaucuucaucacagucuuugauaugu

SEQ ID NO: 346026 - RNA, 23 nt, Human
caccaugcacuccagccuagaca

SEQ ID NO: 346027 - RNA, 29 nt, Human
caccaugcaggagcugcaucugcucuggu

SEQ ID NO: 346028 - RNA, 29 nt, Human
caccaugccacugcacuccagccugggug

SEQ ID NO: 346029 - RNA, 32 nt, Human
caccaugccaggcuaauuuuuauauuuuuaga

SEQ ID NO: 346030 - RNA, 32 nt, Human
caccaugccaggcuaauuuuuauguuuuuagu

SEQ ID NO: 346031 - RNA, 32 nt, Human
caccaugccaggcuaauuuuuguauuuuuagu

SEQ ID NO: 346032 - RNA, 32 nt, Human
caccaugccaggcucauuguuguauuuuuggu

SEQ ID NO: 346033 - RNA, 32 nt, Human
caccaugcccaacuaauuuuuguauuuuuaua

SEQ ID NO: 346034 - RNA, 32 nt, Human
caccaugcccacauaauuuuuguauuuuuauu

SEQ ID NO: 346035 - RNA, 32 nt, Human
caccaugcccagccaauuuuuguauuuuuagu

SEQ ID NO: 346036 - RNA, 32 nt, Human
caccaugcccagcuaacuuuuguauuuuuagu

SEQ ID NO: 346037 - RNA, 32 nt, Human
caccaugcccagcuaacuuuuguauuuuuggc

SEQ ID NO: 346038 - RNA, 32 nt, Human
caccaugcccagcuaaguuuuguauuuuuagu

SEQ ID NO: 346039 - RNA, 32 nt, Human
caccaugcccagcuaauucuuguauuuuuagu

SEQ ID NO: 346040 - RNA, 32 nt, Human
caccaugcccagcuaauuuguguauuucuagu

SEQ ID NO: 346041 - RNA, 32 nt, Human
caccaugcccagcuaauuuguuguauuuuuag

SEQ ID NO: 346042 - RNA, 32 nt, Human
caccaugcccagcuaauuuuguauuuuuagua

SEQ ID NO: 346043 - RNA, 32 nt, Human
caccaugcccagcuaauuuuguauuuuuauua

SEQ ID NO: 346044 - RNA, 32 nt, Human
caccaugcccagcuaauuuuuauauuuuuagu

SEQ ID NO: 346045 - RNA, 32 nt, Human
caccaugcccagcuaauuuuuguauuauuauu

SEQ ID NO: 346046 - RNA, 32 nt, Human
caccaugcccagcuaauuuuuguauuuuagua

SEQ ID NO: 346047 - RNA, 32 nt, Human
caccaugcccagcuaauuuuuguauuuucagu

SEQ ID NO: 346048 - RNA, 32 nt, Human
caccaugcccagcuaauuuuuguauuuuuaau

SEQ ID NO: 346049 - RNA, 32 nt, Human
caccaugcccagcuaauuuuuguauuuuuagc

SEQ ID NO: 346050 - RNA, 32 nt, Human
caccaugcccagcuaauuuuuguauuuuuagu

SEQ ID NO: 346051 - RNA, 32 nt, Human
caccaugcccagcuaauuuuuguguuuuuagu

SEQ ID NO: 346052 - RNA, 32 nt, Human
caccaugcccagcuaauuuuuguuuuucuugu

SEQ ID NO: 346053 - RNA, 32 nt, Human
caccaugcccagcuaguuuuuguauuuuuagu

SEQ ID NO: 346054 - RNA, 32 nt, Human
caccaugcccagguaauuuuuguauuuuuaau

SEQ ID NO: 346055 - RNA, 32 nt, Human
caccaugcccaguuaacuuuuguauuuuuagu

SEQ ID NO: 346056 - RNA, 32 nt, Human
caccaugcccaucuaauauuuguauuuuuagu

SEQ ID NO: 346057 - RNA, 29 nt, Human
caccaugccccggcagcucagcgcggcgg

SEQ ID NO: 346058 - RNA, 32 nt, Human
caccaugccccggcuauuuuuguauuuuuagu

SEQ ID NO: 346059 - RNA, 32 nt, Human
caccaugcccgacuaauuuuuguauuuugagu

SEQ ID NO: 346060 - RNA, 32 nt, Human
caccaugcccggauaauuuuuguauuuuuagu

SEQ ID NO: 346061 - RNA, 32 nt, Human
caccaugcccggcaaauguuuguauuuuuagu

SEQ ID NO: 346062 - RNA, 32 nt, Human
caccaugcccggcuaacuuuuguauuuuuagu

SEQ ID NO: 346063 - RNA, 32 nt, Human
caccaugcccggcuaauacuuguauuuuuagu

SEQ ID NO: 346064 - RNA, 32 nt, Human
caccaugcccggcuaaucuuuguauuuuuagu

SEQ ID NO: 346065 - RNA, 32 nt, Human
caccaugcccggcuaauuuaguuguauuuuua

SEQ ID NO: 346066 - RNA, 32 nt, Human
caccaugcccggcuaauuuuguauuuuuagua

SEQ ID NO: 346067 - RNA, 32 nt, Human
caccaugcccggcuaauuuuuauauuuuuaau

SEQ ID NO: 346068 - RNA, 32 nt, Human
caccaugcccggcuaauuuuugcauuuuuagu

SEQ ID NO: 346069 - RNA, 32 nt, Human
caccaugcccggcuaauuuuuguauuauaagu

SEQ ID NO: 346070 - RNA, 32 nt, Human
caccaugcccggcuaauuuuuguauucuuagu

SEQ ID NO: 346071 - RNA, 32 nt, Human
caccaugcccggcuaauuuuuguauuuuagua

SEQ ID NO: 346072 - RNA, 32 nt, Human
caccaugcccggcuaauuuuuguauuuuuagu

SEQ ID NO: 346073 - RNA, 32 nt, Human
caccaugcccggcuaauuuuuguauuuuuggu

SEQ ID NO: 346074 - RNA, 32 nt, Human
caccaugcccggcuaauuuuuguuuuuguauu

SEQ ID NO: 346075 - RNA, 32 nt, Human
caccaugcccggcuaguuuuuguauuuuuaau

SEQ ID NO: 346076 - RNA, 32 nt, Human
caccaugcccggcugauuuuuguauuuuuaau

SEQ ID NO: 346077 - RNA, 32 nt, Human
caccaugcccggguaaguuuuguauuuuuagu

SEQ ID NO: 346078 - RNA, 32 nt, Human
caccaugcccugcuaauuuuuguguuuuaagu

SEQ ID NO: 346079 - RNA, 32 nt, Human
caccaugccgagcuaauuuuuguauuuauaau

SEQ ID NO: 346080 - RNA, 32 nt, Human
caccaugccggugugaggagcaucuguucuuc

SEQ ID NO: 346081 - RNA, 32 nt, Human
caccaugccuagcaaauuuuuguauuuuuagu

SEQ ID NO: 346082 - RNA, 32 nt, Human
caccaugccuagcuaauuuuuguauuuuuagu

SEQ ID NO: 346083 - RNA, 32 nt, Human
caccaugccucacaugguagaccccaguggga

SEQ ID NO: 346084 - RNA, 32 nt, Human
caccaugccucacuaauuuuuguauuauuuuu

SEQ ID NO: 346085 - RNA, 29 nt, Human
caccaugccucggggaagccgcagcgcgg

SEQ ID NO: 346086 - RNA, 32 nt, Human
caccaugccugaccaauuuuuguauuuuuagu

SEQ ID NO: 346087 - RNA, 32 nt, Human
caccaugccuggcuaaaauucuuuuguauuuu

SEQ ID NO: 346088 - RNA, 32 nt, Human
caccaugccuggcuaaauuuuguauuuuuaau

SEQ ID NO: 346089 - RNA, 32 nt, Human
caccaugccuggcuaauuucuguauuuuuagu

SEQ ID NO: 346090 - RNA, 32 nt, Human
caccaugccuggcuaauuuucuguauuuuuag

SEQ ID NO: 346091 - RNA, 32 nt, Human
caccaugccuggcuaauuuugguauuuuuagu

SEQ ID NO: 346092 - RNA, 32 nt, Human
caccaugccuggcuaauuuuguauauuuagua

SEQ ID NO: 346093 - RNA, 32 nt, Human
caccaugccuggcuaauuuuguauuucuagua

SEQ ID NO: 346094 - RNA, 32 nt, Human
caccaugccuggcuaauuuuguauuuguagua

SEQ ID NO: 346095 - RNA, 32 nt, Human
caccaugccuggcuaauuuuguauuuuuagua

SEQ ID NO: 346096 - RNA, 32 nt, Human
caccaugccuggcuaauuuuguguuuuuagua

SEQ ID NO: 346097 - RNA, 32 nt, Human
caccaugccuggcuaauuuuguguuuuuagug

SEQ ID NO: 346098 - RNA, 32 nt, Human
caccaugccuggcuaauuuuuaguauuuuuag

SEQ ID NO: 346099 - RNA, 32 nt, Human
caccaugccuggcuaauuuuuauauuuucagu

SEQ ID NO: 346100 - RNA, 32 nt, Human
caccaugccuggcuaauuuuugcauuuuuagu

SEQ ID NO: 346101 - RNA, 32 nt, Human
caccaugccuggcuaauuuuuguacuuuugcu

SEQ ID NO: 346102 - RNA, 32 nt, Human
caccaugccuggcuaauuuuuguaguauuagu

SEQ ID NO: 346103 - RNA, 32 nt, Human
caccaugccuggcuaauuuuuguauuaguaga

SEQ ID NO: 346104 - RNA, 32 nt, Human
caccaugccuggcuaauuuuuguauuuuaugu

SEQ ID NO: 346105 - RNA, 32 nt, Human
caccaugccuggcuaauuuuuguauuuuuaau

SEQ ID NO: 346106 - RNA, 32 nt, Human
caccaugccuggcuaauuuuuguauuuuuagu

SEQ ID NO: 346107 - RNA, 32 nt, Human
caccaugccuggcuaauuuuuguauuuuuggu

SEQ ID NO: 346108 - RNA, 32 nt, Human
caccaugccuggcuaauuuuuguguuuuuagu

SEQ ID NO: 346109 - RNA, 32 nt, Human
caccaugccuggcuacuuuuuguauuuuuagu

SEQ ID NO: 346110 - RNA, 32 nt, Human
caccaugccuggcuaguuuuuguauuuuuagu

SEQ ID NO: 346111 - RNA, 32 nt, Human
caccaugccuggcucauuuuuguauuuuuagu

SEQ ID NO: 346112 - RNA, 32 nt, Human
caccaugccuggcugauauuuauauuuuuagu

SEQ ID NO: 346113 - RNA, 32 nt, Human
caccaugccuggcugauuuuuguauuuuuagu

SEQ ID NO: 346114 - RNA, 32 nt, Human
caccaugccuggcuggguauuuauauuaucau

SEQ ID NO: 346115 - RNA, 32 nt, Human
caccaugccuggcugguuuuuguauuuuuagu

SEQ ID NO: 346116 - RNA, 32 nt, Human
caccaugccugguucauuuuuguguuuuuagu

SEQ ID NO: 346117 - RNA, 32 nt, Human
caccaugcguggcuaaauuuuguauuuuuaau

SEQ ID NO: 346118 - RNA, 32 nt, Human
caccaugcucacagaacugggcucagagcucc

SEQ ID NO: 346119 - RNA, 32 nt, Human
caccaugcucagcuaauuuuuguauuuuuagu

SEQ ID NO: 346120 - RNA, 32 nt, Human
caccaugcugggcuaauuuuuguauuuuuaau

SEQ ID NO: 346121 - RNA, 32 nt, Human
caccaugcuuggcuaauuuuuguauuuuuagu

SEQ ID NO: 346122 - RNA, 32 nt, Human
caccaugcuuggcucauuuuuguauuuuuagu

SEQ ID NO: 346123 - RNA, 29 nt, Human
caccauggacaguggugaaugggacgugc

SEQ ID NO: 346124 - RNA, 29 nt, Human
caccauggaccaaagugggauggagauuc

SEQ ID NO: 346125 - RNA, 29 nt, Human
caccauggauccugaacacgccaaaccug

SEQ ID NO: 346126 - RNA, 29 nt, Human
caccauggauccugaacacgccaagcuaa

SEQ ID NO: 346127 - RNA, 32 nt, Human
caccauggaugccauggauuagcugugcaacu

SEQ ID NO: 346128 - RNA, 32 nt, Human
caccauggauuuggcugccucacccaggugag

SEQ ID NO: 346129 - RNA, 32 nt, Human
caccauggccagcuaauuuuuguauuuuuagu

SEQ ID NO: 346130 - RNA, 32 nt, Human
caccauggcccacacuuguaaucccagcacuu

SEQ ID NO: 346131 - RNA, 32 nt, Human
caccauggcccuccuaaagacacucuaggaaa

SEQ ID NO: 346132 - RNA, 29 nt, Human
caccauggcccugcugcacuccggccgcg

SEQ ID NO: 346133 - RNA, 29 nt, Human
caccauggccgagccucugaaggaggaag

SEQ ID NO: 346134 - RNA, 27 nt, Human
caccauggccugccugcccugccuccg

SEQ ID NO: 346135 - RNA, 32 nt, Human
caccauggcucacgccuguaaucccaggacuu

SEQ ID NO: 346136 - RNA, 32 nt, Human
caccauggcuccuguccuccugcugcuccucu

SEQ ID NO: 346137 - RNA, 29 nt, Human
caccauggcugaagaagaggaaacugcug

SEQ ID NO: 346138 - RNA, 32 nt, Human
caccauggcuggcuaauuuuuguauuuuuagu

SEQ ID NO: 346139 - RNA, 32 nt, Human
caccauggcuggcuaauuuuuguauuuuuggu

SEQ ID NO: 346140 - RNA, 32 nt, Human
caccaugggaaacuguugugggcgcugcuucc

SEQ ID NO: 346141 - RNA, 29 nt, Human
caccaugggacccaccucaggucccagcc

SEQ ID NO: 346142 - RNA, 32 nt, Human
caccaugggaggcugagcaggaggauggcucg

SEQ ID NO: 346143 - RNA, 29 nt, Human
caccaugggccuccaccuccgccccuacc

SEQ ID NO: 346144 - RNA, 32 nt, Human
caccauggggaccugagagggaaggggacaga

SEQ ID NO: 346145 - RNA, 32 nt, Human
caccauggggcugcugcccucaaauaccuccc

SEQ ID NO: 346146 - RNA, 32 nt, Human
caccaugguagacucuuuuugguaaugguauu

SEQ ID NO: 346147 - RNA, 29 nt, Human
caccauggugggccccgcgccgcggcggc

SEQ ID NO: 346148 - RNA, 32 nt, Human
caccaugguugaaaaccuucucuagauguagu

SEQ ID NO: 346149 - RNA, 32 nt, Human
caccauguaaggacacagcagaaggugcuauc

SEQ ID NO: 346150 - RNA, 32 nt, Human
caccaugucacccaggcucaucgcaagccugu

SEQ ID NO: 346151 - RNA, 32 nt, Human
caccaugucauuguuuugguccaaucagguac

SEQ ID NO: 346152 - RNA, 32 nt, Human
caccauguccagcuaauuuuuguauuuuuagu

SEQ ID NO: 346153 - RNA, 32 nt, Human
caccauguccaucagggugauccagaaguccu

SEQ ID NO: 346154 - RNA, 32 nt, Human
caccaugucccaaggcugcacagagcaggggg

SEQ ID NO: 346155 - RNA, 32 nt, Human
caccauguccccauuacaccagagggccaucg

SEQ ID NO: 346156 - RNA, 32 nt, Human
caccauguccggcuaauuuuuguauuuuuagc

SEQ ID NO: 346157 - RNA, 32 nt, Human
caccaugucucaaacuccugaccucaggcgau

SEQ ID NO: 346158 - RNA, 32 nt, Human
caccaugucucccaggcuggucucaaacuccu

SEQ ID NO: 346159 - RNA, 32 nt, Human
caccaugucuuccucuuccucucucuuccaga

SEQ ID NO: 346160 - RNA, 29 nt, Human
caccauguggccccuguggcucugcuggg

SEQ ID NO: 346161 - RNA, 32 nt, Human
caccaugugggacuccaggcaccaucuguucu

SEQ ID NO: 346162 - RNA, 32 nt, Human
caccauguguguguccugaguuuccagugcaa

SEQ ID NO: 346163 - RNA, 32 nt, Human
caccauguguuacuggccuggaaacugaaggg

SEQ ID NO: 346164 - RNA, 32 nt, Human
caccauguuacccagccuggucucaaacuccc

SEQ ID NO: 346165 - RNA, 32 nt, Human
caccauguuacccaggauggucucaauauccu

SEQ ID NO: 346166 - RNA, 32 nt, Human
caccauguuacccaggcuggucucaaacuccu

SEQ ID NO: 346167 - RNA, 32 nt, Human
caccauguuaccuaggguggucucggcuagug

SEQ ID NO: 346168 - RNA, 32 nt, Human
caccauguuacucaggcuggucucaaacuccc

SEQ ID NO: 346169 - RNA, 32 nt, Human
caccauguuagccaggcuggucucaaacuccu

SEQ ID NO: 346170 - RNA, 32 nt, Human
caccauguuagccaggcuggucucgaacuccu

SEQ ID NO: 346171 - RNA, 32 nt, Human
caccauguucaagaggagguugaaguggcaug

SEQ ID NO: 346172 - RNA, 29 nt, Human
caccauguuccccagcccugcucucacgc

SEQ ID NO: 346173 - RNA, 32 nt, Human
caccauguucgccaggcuggucuggaacuccu

SEQ ID NO: 346174 - RNA, 32 nt, Human
caccauguugaccaggcuggucucaaacuccu

SEQ ID NO: 346175 - RNA, 32 nt, Human
caccauguugcccaggcuggcuucaaacuccu

SEQ ID NO: 346176 - RNA, 32 nt, Human
caccauguugcccaggcuggucucaaaccccc

SEQ ID NO: 346177 - RNA, 32 nt, Human
caccauguugcccaggcuggucucaaacuccu

SEQ ID NO: 346178 - RNA, 32 nt, Human
caccauguugcccaggcuggucucaaccuccu

SEQ ID NO: 346179 - RNA, 32 nt, Human
caccauguugcccaggcuggucucaacuccug

SEQ ID NO: 346180 - RNA, 32 nt, Human
caccauguugcccaggcuggucucgaacuccu

SEQ ID NO: 346181 - RNA, 32 nt, Human
caccauguugcccaggcuggucuugauuccug

SEQ ID NO: 346182 - RNA, 32 nt, Human
caccauguugcccaggcuggugucaaacuccu

SEQ ID NO: 346183 - RNA, 32 nt, Human
caccauguugcccaggcugguuucgaacuccu

SEQ ID NO: 346184 - RNA, 32 nt, Human
caccauguugcucaggcuggucacaaacucca

SEQ ID NO: 346185 - RNA, 32 nt, Human
caccauguugcucaggcuggucucaaacuccu

SEQ ID NO: 346186 - RNA, 32 nt, Human
caccauguuggccaggcuggccucaaacuccu

SEQ ID NO: 346187 - RNA, 32 nt, Human
caccauguuggccaggcugguaucgaccuccu

SEQ ID NO: 346188 - RNA, 32 nt, Human
caccauguuggccaggcuggucacaaacuccu

SEQ ID NO: 346189 - RNA, 32 nt, Human
caccauguuggccaggcuggucucaaacaccu

SEQ ID NO: 346190 - RNA, 32 nt, Human
caccauguuggccaggcuggucucaaacgcca

SEQ ID NO: 346191 - RNA, 32 nt, Human
caccauguuggccaggcuggucucaaacuccu

SEQ ID NO: 346192 - RNA, 32 nt, Human
caccauguuggccaggcuggucucaaacucuc

SEQ ID NO: 346193 - RNA, 32 nt, Human
caccauguuggccaggcuggucucaaacucuu

SEQ ID NO: 346194 - RNA, 32 nt, Human
caccauguuggccaggcuggucucaaacugcu

SEQ ID NO: 346195 - RNA, 32 nt, Human
caccauguuggccaggcuggucucaaacuucu

SEQ ID NO: 346196 - RNA, 32 nt, Human
caccauguuggccaggcuggucucaaauuccu

SEQ ID NO: 346197 - RNA, 32 nt, Human
caccauguuggccaggcuggucucaaauucuu

SEQ ID NO: 346198 - RNA, 32 nt, Human
caccauguuggccaggcuggucucaaccucug

SEQ ID NO: 346199 - RNA, 32 nt, Human
caccauguuggccaggcuggucucaacuccug

SEQ ID NO: 346200 - RNA, 32 nt, Human
caccauguuggccaggcuggucuccaacuccu

SEQ ID NO: 346201 - RNA, 32 nt, Human
caccauguuggccaggcuggucucgaacgccu

SEQ ID NO: 346202 - RNA, 32 nt, Human
caccauguuggccaggcuggucucgaacuacu

SEQ ID NO: 346203 - RNA, 32 nt, Human
caccauguuggccaggcuggucucgaacucau

SEQ ID NO: 346204 - RNA, 32 nt, Human
caccauguuggccaggcuggucucgaacuccc

SEQ ID NO: 346205 - RNA, 32 nt, Human
caccauguuggccaggcuggucucgaacuccg

SEQ ID NO: 346206 - RNA, 32 nt, Human
caccauguuggccaggcuggucucgaacuccu

SEQ ID NO: 346207 - RNA, 32 nt, Human
caccauguuggccaggcuggucucgaacucgu

SEQ ID NO: 346208 - RNA, 32 nt, Human
caccauguuggccaggcuggucucgaacucug

SEQ ID NO: 346209 - RNA, 32 nt, Human
caccauguuggccaggcuggucucgaacucuu

SEQ ID NO: 346210 - RNA, 32 nt, Human
caccauguuggccaggcuggucucgaaugucu

SEQ ID NO: 346211 - RNA, 32 nt, Human
caccauguuggccaggcuggucucgaauucca

SEQ ID NO: 346212 - RNA, 32 nt, Human
caccauguuggccaggcuggucucgaucuccu

SEQ ID NO: 346213 - RNA, 32 nt, Human
caccauguuggccaggcuggucuggaaccccu

SEQ ID NO: 346214 - RNA, 32 nt, Human
caccauguuggccaggcuggucuggaacuccu

SEQ ID NO: 346215 - RNA, 32 nt, Human
caccauguuggccaggcuggucuucaacucca

SEQ ID NO: 346216 - RNA, 32 nt, Human
caccauguuggccaggcugguuucaaacuccu

SEQ ID NO: 346217 - RNA, 32 nt, Human
caccauguuggccaggcugguuucgaacuccu

SEQ ID NO: 346218 - RNA, 32 nt, Human
caccauguuggccaggcuguucuugaaauccu

SEQ ID NO: 346219 - RNA, 32 nt, Human
caccauguuguccaggcuggucucaaacuccu

SEQ ID NO: 346220 - RNA, 32 nt, Human
caccauuaaaggcuuagcauuuaaguagcaac

SEQ ID NO: 346221 - RNA, 32 nt, Human
caccauuaaauggugugcaagcauaauucugu

SEQ ID NO: 346222 - RNA, 32 nt, Human
caccauuaauccagagagaaugaacauagguc

SEQ ID NO: 346223 - RNA, 24 nt, Human
caccauuacacuccagccugggca

SEQ ID NO: 346224 - RNA, 32 nt, Human
caccauuacacuccagccugggcaacagugac

SEQ ID NO: 346225 - RNA, 32 nt, Human
caccauuacacuccagccugggcgacaagaac

SEQ ID NO: 346226 - RNA, 32 nt, Human
caccauuacacuccagccugggcgacaagagc

SEQ ID NO: 346227 - RNA, 32 nt, Human
caccauucaguaggauucaauucaauguggaa

SEQ ID NO: 346228 - RNA, 32 nt, Human
caccauucauuuuaccuccuguucuuacagaa

SEQ ID NO: 346229 - RNA, 20 nt, Human
caccauucccagcagggccu

SEQ ID NO: 346230 - RNA, 32 nt, Human
caccauucccagcuaauuuuuguauuuuuagu

SEQ ID NO: 346231 - RNA, 32 nt, Human
caccauuccccuaggcaggcccugcagguccc

SEQ ID NO: 346232 - RNA, 32 nt, Human
caccauucccggcuaauuuuuguauuuuuggu

SEQ ID NO: 346233 - RNA, 32 nt, Human
caccauucccuugagcagggcccgcucaggag

SEQ ID NO: 346234 - RNA, 32 nt, Human
caccauuccuggcuaauuuuuguauuuucagu

SEQ ID NO: 346235 - RNA, 32 nt, Human
caccauuccuggcuaauuuuuguauuuuuagu

SEQ ID NO: 346236 - RNA, 32 nt, Human
caccauucucacuggaaaacaguggucugcug

SEQ ID NO: 346237 - RNA, 32 nt, Human
caccauucuuuuugccguacuuccuagaagca

SEQ ID NO: 346238 - RNA, 24 nt, Human
caccauugaacuccagccugggca

SEQ ID NO: 346239 - RNA, 32 nt, Human
caccauugaacuccagccugggcaacaagagc

SEQ ID NO: 346240 - RNA, 32 nt, Human
caccauugaugaauucaaacaaauggcuguaa

SEQ ID NO: 346241 - RNA, 32 nt, Human
caccauugcaacaaaauacauucuuuuugcuc

SEQ ID NO: 346242 - RNA, 24 nt, Human
caccauugcaccccagccugagca

SEQ ID NO: 346243 - RNA, 24 nt, Human
caccauugcacccgagccuaggca

SEQ ID NO: 346244 - RNA, 32 nt, Human
caccauugcacccuagccugggcaacagagca

SEQ ID NO: 346245 - RNA, 32 nt, Human
caccauugcaccuccagccugggcaacagagu

SEQ ID NO: 346246 - RNA, 32 nt, Human
caccauugcacuccaaccugggcaacaagagc

SEQ ID NO: 346247 - RNA, 32 nt, Human
caccauugcacuccaaccugggcgacagggcg

SEQ ID NO: 346248 - RNA, 32 nt, Human
caccauugcacuccacccugggcgacagagca

SEQ ID NO: 346249 - RNA, 32 nt, Human
caccauugcacuccagccuagauaacaagagu

SEQ ID NO: 346250 - RNA, 24 nt, Human
caccauugcacuccagccuaggca

SEQ ID NO: 346251 - RNA, 32 nt, Human
caccauugcacuccagccuaggcauggugaga

SEQ ID NO: 346252 - RNA, 32 nt, Human
caccauugcacuccagccugagcaacagagug

SEQ ID NO: 346253 - RNA, 32 nt, Human
caccauugcacuccagccugagugacagagug

SEQ ID NO: 346254 - RNA, 32 nt, Human
caccauugcacuccagccuggaugacagagaa

SEQ ID NO: 346255 - RNA, 32 nt, Human
caccauugcacuccagccuggaugacagagug

SEQ ID NO: 346256 - RNA, 32 nt, Human
caccauugcacuccagccuggaugauagagug

SEQ ID NO: 346257 - RNA, 32 nt, Human
caccauugcacuccagccuggcgaccgagcgg

SEQ ID NO: 346258 - RNA, 24 nt, Human
caccauugcacuccagccugggca

SEQ ID NO: 346259 - RNA, 32 nt, Human
caccauugcacuccagccugggcaaaaagagc

SEQ ID NO: 346260 - RNA, 32 nt, Human
caccauugcacuccagccugggcaacaagaac

SEQ ID NO: 346261 - RNA, 32 nt, Human
caccauugcacuccagccugggcaacaagagc

SEQ ID NO: 346262 - RNA, 32 nt, Human
caccauugcacuccagccugggcaacaagagu

SEQ ID NO: 346263 - RNA, 32 nt, Human
caccauugcacuccagccugggcaacagagua

SEQ ID NO: 346264 - RNA, 32 nt, Human
caccauugcacuccagccugggcaacagagug

SEQ ID NO: 346265 - RNA, 32 nt, Human
caccauugcacuccagccugggcaacagcagc

SEQ ID NO: 346266 - RNA, 32 nt, Human
caccauugcacuccagccugggcaauaagagc

SEQ ID NO: 346267 - RNA, 32 nt, Human
caccauugcacuccagccugggcgacaagagc

SEQ ID NO: 346268 - RNA, 32 nt, Human
caccauugcacuccagccugggcgacaagagu

SEQ ID NO: 346269 - RNA, 32 nt, Human
caccauugcacuccagccugggcgacagagca

SEQ ID NO: 346270 - RNA, 32 nt, Human
caccauugcacuccagccugggcgacagaguc

SEQ ID NO: 346271 - RNA, 32 nt, Human
caccauugcacuccagccugggcgacagggug

SEQ ID NO: 346272 - RNA, 32 nt, Human
caccauugcacuccagccugggcgacuccauc

SEQ ID NO: 346273 - RNA, 32 nt, Human
caccauugcacuccagccugggcgacugagcg

SEQ ID NO: 346274 - RNA, 32 nt, Human
caccauugcacuccagccugggugacaagagc

SEQ ID NO: 346275 - RNA, 32 nt, Human
caccauugcacuccagccugggugacagagcg

SEQ ID NO: 346276 - RNA, 32 nt, Human
caccauugcacuccagccugugcaacaagcga

SEQ ID NO: 346277 - RNA, 32 nt, Human
caccauugcacuccagccuugggcgacaaaaa

SEQ ID NO: 346278 - RNA, 32 nt, Human
caccauugcacuccagcugggagacacagcaa

SEQ ID NO: 346279 - RNA, 32 nt, Human
caccauugcacuccagcuugggcaacaauagc

SEQ ID NO: 346280 - RNA, 32 nt, Human
caccauugcacuccagcuugggugacagagcg

SEQ ID NO: 346281 - RNA, 32 nt, Human
caccauugcacuccugccugggcaacaagagc

SEQ ID NO: 346282 - RNA, 32 nt, Human
caccauugcacuccugccugggcaacaagagu

SEQ ID NO: 346283 - RNA, 32 nt, Human
caccauugcacucuagccuggcaacagagcga

SEQ ID NO: 346284 - RNA, 32 nt, Human
caccauugcacugcagccugggugaagaaaca

SEQ ID NO: 346285 - RNA, 32 nt, Human
caccauugcacuucagccugggcaacaagagc

SEQ ID NO: 346286 - RNA, 32 nt, Human
caccauugcacuucagccugggcgacacagcg

SEQ ID NO: 346287 - RNA, 32 nt, Human
caccauugcagggaggaugccgccaccaugag

SEQ ID NO: 346288 - RNA, 24 nt, Human
caccauugcauuccagccuaggca

SEQ ID NO: 346289 - RNA, 32 nt, Human
caccauugcauuccagccugggcaacaagagc

SEQ ID NO: 346290 - RNA, 32 nt, Human
caccauugcauuccagccugggcaacaagagg

SEQ ID NO: 346291 - RNA, 32 nt, Human
caccauugcauuccagccugggcaacaagagu

SEQ ID NO: 346292 - RNA, 32 nt, Human
caccauugcauuccagccugggugacagagcg

SEQ ID NO: 346293 - RNA, 19 nt, Human
caccauugccaccuacugc

SEQ ID NO: 346294 - RNA, 32 nt, Human
caccauugcccuccagccugggcaacaagagc

SEQ ID NO: 346295 - RNA, 32 nt, Human
caccauugcccuccagccugggugacagagug

SEQ ID NO: 346296 - RNA, 32 nt, Human
caccauugcgcucuagccugggcaacaacagc

SEQ ID NO: 346297 - RNA, 32 nt, Human
caccauugcgcuucagccugggcaacaagagu

SEQ ID NO: 346298 - RNA, 32 nt, Human
caccauugcuguccagccugggugacagagca

SEQ ID NO: 346299 - RNA, 32 nt, Human
caccauuggaccccacccagccuggaucuacc

SEQ ID NO: 346300 - RNA, 23 nt, Human
caccauuggccguagccagcagg

SEQ ID NO: 346301 - RNA, 32 nt, Human
caccauuggcugcuccgagcagcuucucagag

SEQ ID NO: 346302 - RNA, 24 nt, Human
caccauuguacuccagccugggca

SEQ ID NO: 346303 - RNA, 32 nt, Human
caccauuguacuccagccugggcaacaagagu

SEQ ID NO: 346304 - RNA, 32 nt, Human
caccauuguacuccagccugggcaauaagagc

SEQ ID NO: 346305 - RNA, 32 nt, Human
caccauuguacuccagccugugugacagagca

SEQ ID NO: 346306 - RNA, 32 nt, Human
caccauuguggaggccagaggcagcugcguau

SEQ ID NO: 346307 - RNA, 24 nt, Human
caccauuguggcagcugagccacu

SEQ ID NO: 346308 - RNA, 32 nt, Human
caccauuguuaaaugucagccuguacggcaga

SEQ ID NO: 346309 - RNA, 32 nt, Human
caccauuuaggugaucauacaggacaggcugc

SEQ ID NO: 346310 - RNA, 32 nt, Human
caccauuuauucagcaccuguuauguaccagg

SEQ ID NO: 346311 - RNA, 32 nt, Human
caccauuucauuccagccugggcaacaugagu

SEQ ID NO: 346312 - RNA, 32 nt, Human
caccauuucucuccaggcuuucugccuccgag

SEQ ID NO: 346313 - RNA, 21 nt, Human
caccauuugggagaccuaggu

SEQ ID NO: 346314 - RNA, 32 nt, Human
caccauuuucucaguuucucccucucucuccc

SEQ ID NO: 346315 - RNA, 32 nt, Human
cacccaaaauagagagaugaggguaaaauaag

SEQ ID NO: 346316 - RNA, 32 nt, Human
cacccaaaaugcugggauuacaggcaugagcc

SEQ ID NO: 346317 - RNA, 32 nt, Human
cacccaaaggcaacaugacggaaccuugccaa

SEQ ID NO: 346318 - RNA, 32 nt, Human
cacccaaaggugcuaauuccagcaguuuggga

SEQ ID NO: 346319 - RNA, 32 nt, Human
cacccaaagugcuaggauuacagguaugagcc

SEQ ID NO: 346320 - RNA, 32 nt, Human
cacccaaagugcuaggguuacaggcaugagcc

SEQ ID NO: 346321 - RNA, 32 nt, Human
cacccaaagugcugggauuacaggcgugaacc

SEQ ID NO: 346322 - RNA, 32 nt, Human
cacccaaaguguugggauuacaggcaugagcc

SEQ ID NO: 346323 - RNA, 32 nt, Human
cacccaaaguguugggauuacaggugugagcc

SEQ ID NO: 346324 - RNA, 32 nt, Human
cacccaaaguguugggauuauaggcaugagcc

SEQ ID NO: 346325 - RNA, 32 nt, Human
cacccaacacccagaaucugugcaguuauuug

SEQ ID NO: 346326 - RNA, 32 nt, Human
cacccaacccccaggaccucaggcugcuguca

SEQ ID NO: 346327 - RNA, 32 nt, Human
cacccaacccuuggcagccaucugucccugca

SEQ ID NO: 346328 - RNA, 32 nt, Human
cacccaaccucuccaucaccaucccgccaccc

SEQ ID NO: 346329 - RNA, 32 nt, Human
cacccaaccucucccaccuccaccccacaaug

SEQ ID NO: 346330 - RNA, 23 nt, Human
cacccaacuaauuuuuguauuuu

SEQ ID NO: 346331 - RNA, 23 nt, Human
cacccaacuaauuuuuguguuuu

SEQ ID NO: 346332 - RNA, 18 nt, Human
cacccaacuuucccccuc

SEQ ID NO: 346333 - RNA, 32 nt, Human
cacccaagaacgucaccuccuccaucagauug

SEQ ID NO: 346334 - RNA, 32 nt, Human
cacccaagacacaagcuucagcagcaucggaa

SEQ ID NO: 346335 - RNA, 32 nt, Human
cacccaagacggucacagguaacucccaucug

SEQ ID NO: 346336 - RNA, 32 nt, Human
cacccaagagaagagauggaagggcauggccc

SEQ ID NO: 346337 - RNA, 32 nt, Human
cacccaagaugcagggugguuggggccaggag

SEQ ID NO: 346338 - RNA, 32 nt, Human
cacccaagcagaagggagacugagugccucag

SEQ ID NO: 346339 - RNA, 32 nt, Human
cacccaagcccucuccaguucucccccaagcu

SEQ ID NO: 346340 - RNA, 21 nt, Human
cacccaagcuccaaccacaga

SEQ ID NO: 346341 - RNA, 32 nt, Human
cacccaagcugcuggccuccagucccaucucc

SEQ ID NO: 346342 - RNA, 20 nt, Human
cacccaagcuggagugcagu

SEQ ID NO: 346343 - RNA, 21 nt, Human
cacccaagcuggagugcagug

SEQ ID NO: 346344 - RNA, 32 nt, Human
cacccaaggaagcccagcacagaccaucucag

SEQ ID NO: 346345 - RNA, 32 nt, Human
cacccaaggaagcccagcacagaccaucucau

SEQ ID NO: 346346 - RNA, 32 nt, Human
cacccaaggagcagugccggacaacugucggc

SEQ ID NO: 346347 - RNA, 32 nt, Human
cacccaaggcggagugcagugacgacaucaca

SEQ ID NO: 346348 - RNA, 32 nt, Human
cacccaaggcugccuccagccccagcaacccg

SEQ ID NO: 346349 - RNA, 32 nt, Human
cacccaagguucagugacacagggugguuugg

SEQ ID NO: 346350 - RNA, 32 nt, Human
cacccaaguagcuggaauuacaggcaccugcc

SEQ ID NO: 346351 - RNA, 32 nt, Human
cacccaaguagugaacauaguaccaaauaggu

SEQ ID NO: 346352 - RNA, 22 nt, Human
cacccaagucaccgaccacaga

SEQ ID NO: 346353 - RNA, 32 nt, Human
cacccaagucugagaaacccuuaauuacugag

SEQ ID NO: 346354 - RNA, 32 nt, Human
cacccaagugccugaugccucaggugacagaa

SEQ ID NO: 346355 - RNA, 22 nt, Human
cacccaauaucuccagccgcgc

SEQ ID NO: 346356 - RNA, 32 nt, Human
cacccaauggcaggaugggaacagaaaagcaa

SEQ ID NO: 346357 - RNA, 32 nt, Human
cacccaauggggaaggaaggggguuucaacca

SEQ ID NO: 346358 - RNA, 19 nt, Human
cacccaauuccaccacaga

SEQ ID NO: 346359 - RNA, 32 nt, Human
cacccaauucugccauuguagugcaaaagcag

SEQ ID NO: 346360 - RNA, 23 nt, Human
cacccacacacauacacauuuca

SEQ ID NO: 346361 - RNA, 32 nt, Human
cacccacacagcugcccuagcugaccccgaga

SEQ ID NO: 346362 - RNA, 32 nt, Human
cacccacaccaggucugcuuguuucucacaug

SEQ ID NO: 346363 - RNA, 32 nt, Human
cacccacacccacaggucgauuuggucucuuu

SEQ ID NO: 346364 - RNA, 32 nt, Human
cacccacacccacaguaaagaggagacugaau

SEQ ID NO: 346365 - RNA, 19 nt, Human
cacccacacuccaccagca

SEQ ID NO: 346366 - RNA, 32 nt, Human
cacccacagacagaggaugcagggcuucauuu

SEQ ID NO: 346367 - RNA, 32 nt, Human
cacccacagacccuuucucuggcugcgaugcu

SEQ ID NO: 346368 - RNA, 32 nt, Human
cacccacagccuucccuuugggaucuggcaug

SEQ ID NO: 346369 - RNA, 32 nt, Human
cacccacagcucccuucucaucucuuauguuc

SEQ ID NO: 346370 - RNA, 32 nt, Human
cacccacaggagagaauaaaauuaccugugca

SEQ ID NO: 346371 - RNA, 24 nt, Human
cacccacaguaagcaccaugguca

SEQ ID NO: 346372 - RNA, 22 nt, Human
cacccacauaaucaccaucuca

SEQ ID NO: 346373 - RNA, 32 nt, Human
cacccacauccucucuuuuccacacacaacua

SEQ ID NO: 346374 - RNA, 24 nt, Human
cacccacauuugccuguguccuug

SEQ ID NO: 346375 - RNA, 32 nt, Human
cacccaccaccaggauauuuggaaguaacuuc

SEQ ID NO: 346376 - RNA, 32 nt, Human
cacccaccaggccaagcccucugugauucuga

SEQ ID NO: 346377 - RNA, 32 nt, Human
cacccaccaugucucggcaguccuccaucacc

SEQ ID NO: 346378 - RNA, 32 nt, Human
cacccacccaggcuggagccauggauaaauuc

SEQ ID NO: 346379 - RNA, 32 nt, Human
cacccaccccacccuuugcuuucauuucaggu

SEQ ID NO: 346380 - RNA, 25 nt, Human
cacccaccccauuccuggacuccuc

SEQ ID NO: 346381 - RNA, 32 nt, Human
cacccacccccuggcccugccagcugguaguc

SEQ ID NO: 346382 - RNA, 19 nt, Human
cacccacccgaccagcaga

SEQ ID NO: 346383 - RNA, 21 nt, Human
cacccacccgcagccuaggca

SEQ ID NO: 346384 - RNA, 32 nt, Human
cacccacccgccgccucccacggcaccucggg

SEQ ID NO: 346385 - RNA, 32 nt, Human
cacccacccuccaggaccccagcaaguggauu

SEQ ID NO: 346386 - RNA, 32 nt, Human
cacccacccuccugcccuucucagcccagaug

SEQ ID NO: 346387 - RNA, 32 nt, Human
cacccacccucugguccuucugaccccacuua

SEQ ID NO: 346388 - RNA, 32 nt, Human
cacccaccucagccucccaacaugcugcaauu

SEQ ID NO: 346389 - RNA, 32 nt, Human
cacccaccugaguuccgaggagcaccugggaa

SEQ ID NO: 346390 - RNA, 32 nt, Human
cacccaccugcugcugccaugaggcaccuugg

SEQ ID NO: 346391 - RNA, 32 nt, Human
cacccaccuucccaagacccaggaucauguac

SEQ ID NO: 346392 - RNA, 32 nt, Human
cacccaccuuccuugcgaccaccaacacacag

SEQ ID NO: 346393 - RNA, 32 nt, Human
cacccaccuuucuccuccuggggagugucgug

SEQ ID NO: 346394 - RNA, 32 nt, Human
cacccacgaggcccuguccuugcugccagagg

SEQ ID NO: 346395 - RNA, 18 nt, Human
cacccacgccgcaccuca

SEQ ID NO: 346396 - RNA, 32 nt, Human
cacccacgccgccgcggccccacgcugggcga

SEQ ID NO: 346397 - RNA, 32 nt, Human
cacccacgcgcaccgccgugugcaguggccgg

SEQ ID NO: 346398 - RNA, 32 nt, Human
cacccacgugaacaccaccaccagcgccacac

SEQ ID NO: 346399 - RNA, 32 nt, Human
cacccacuaacucugugcucccuucccucucc

SEQ ID NO: 346400 - RNA, 32 nt, Human
cacccacuacucuguccucugccugugcuccg

SEQ ID NO: 346401 - RNA, 25 nt, Human
cacccacucaccguccuugcugcug

SEQ ID NO: 346402 - RNA, 32 nt, Human
cacccacucauguacaugcucacacaugcaga

SEQ ID NO: 346403 - RNA, 32 nt, Human
cacccacucauuuuuauuuuugcucaauauaa

SEQ ID NO: 346404 - RNA, 32 nt, Human
cacccacuccauggaccucaagcagcccucag

SEQ ID NO: 346405 - RNA, 32 nt, Human
cacccacuccccucagaucucaguuagaacau

SEQ ID NO: 346406 - RNA, 32 nt, Human
cacccacucccuugaaguuguggaggagguga

SEQ ID NO: 346407 - RNA, 21 nt, Human
cacccacucucuccagcugca

SEQ ID NO: 346408 - RNA, 32 nt, Human
cacccacucucugaaacuucuuugcuaauaaa

SEQ ID NO: 346409 - RNA, 32 nt, Human
cacccacucuggggcuggccucaugacuuugu

SEQ ID NO: 346410 - RNA, 32 nt, Human
cacccacugcagcugcgcacagucgcauuucu

SEQ ID NO: 346411 - RNA, 32 nt, Human
cacccacugccucugugaccuuggguggguua

SEQ ID NO: 346412 - RNA, 32 nt, Human
cacccacugugaaguccuacaggaaguagaac

SEQ ID NO: 346413 - RNA, 32 nt, Human
cacccacuuccagcuccacuucugcaagguua

SEQ ID NO: 346414 - RNA, 21 nt, Human
cacccacuucccuguguuuca

SEQ ID NO: 346415 - RNA, 27 nt, Human
cacccacuugaugccacagccaugcca

SEQ ID NO: 346416 - RNA, 32 nt, Human
cacccacuuuuuccagaucuuccucuugcucu

SEQ ID NO: 346417 - RNA, 32 nt, Human
cacccagaaagccucacauugugcaguggaga

SEQ ID NO: 346418 - RNA, 32 nt, Human
cacccagaacaguuggaaguguggaaaggagg

SEQ ID NO: 346419 - RNA, 32 nt, Human
cacccagaagugaagaagcagauacacaaggc

SEQ ID NO: 346420 - RNA, 32 nt, Human
cacccagacacacgcacgcacacacacgcgcg

SEQ ID NO: 346421 - RNA, 32 nt, Human
cacccagacagagggaugaccuucaaccucau

SEQ ID NO: 346422 - RNA, 32 nt, Human
cacccagaccgagagacacagugaugaccuca

SEQ ID NO: 346423 - RNA, 32 nt, Human
cacccagaccuccagacagccggcuagcccca

SEQ ID NO: 346424 - RNA, 32 nt, Human
cacccagaccucuggguccuugcucaggcagc

SEQ ID NO: 346425 - RNA, 32 nt, Human
cacccagacucagggaugagugcagcgucaag

SEQ ID NO: 346426 - RNA, 32 nt, Human
cacccagagagggcauggaggcuccacgcaac

SEQ ID NO: 346427 - RNA, 32 nt, Human
cacccagagauggaggaagggucagccauuug

SEQ ID NO: 346428 - RNA, 32 nt, Human
cacccagagccaguguggucaguauuccaaac

SEQ ID NO: 346429 - RNA, 32 nt, Human
cacccagagcccacccucccaagcucaggggc

SEQ ID NO: 346430 - RNA, 32 nt, Human
cacccagagcuuuagaagagagcugugcuucu

SEQ ID NO: 346431 - RNA, 32 nt, Human
cacccagaguagccaugaggaggcagagaggg

SEQ ID NO: 346432 - RNA, 32 nt, Human
cacccagaucccucccucccagucccaugauu

SEQ ID NO: 346433 - RNA, 32 nt, Human
cacccagaucucagacuuccagccuccagaac

SEQ ID NO: 346434 - RNA, 32 nt, Human
cacccagaugagugggagagacacccagggcc

SEQ ID NO: 346435 - RNA, 32 nt, Human
cacccagaugucccuuugauggcccuuguuga

SEQ ID NO: 346436 - RNA, 32 nt, Human
cacccagcaagguugaaguucaugaguucgcc

SEQ ID NO: 346437 - RNA, 32 nt, Human
cacccagcacacacacagaugucagggaccag

SEQ ID NO: 346438 - RNA, 32 nt, Human
cacccagcacccagugcugcagguuucuccug

SEQ ID NO: 346439 - RNA, 32 nt, Human
cacccagcacggcugucagccucggcaggagg

SEQ ID NO: 346440 - RNA, 32 nt, Human
cacccagcacucagcgacucuuccugcagaac

SEQ ID NO: 346441 - RNA, 24 nt, Human
cacccagcacucucauugcugcug

SEQ ID NO: 346442 - RNA, 32 nt, Human
cacccagcagaauuacuggaagagcgaagacu

SEQ ID NO: 346443 - RNA, 32 nt, Human
cacccagcagagccacuggagcuggcuagucc

SEQ ID NO: 346444 - RNA, 32 nt, Human
cacccagcagaggcuucuccccauagcacgag

SEQ ID NO: 346445 - RNA, 32 nt, Human
cacccagcaguggguugcagagcuccccaugc

SEQ ID NO: 346446 - RNA, 32 nt, Human
cacccagcaugcagcucugccuccgcagccuc

SEQ ID NO: 346447 - RNA, 32 nt, Human
cacccagcaugguggagggaaugccagccggc

SEQ ID NO: 346448 - RNA, 19 nt, Human
cacccagccaccuuccuca

SEQ ID NO: 346449 - RNA, 32 nt, Human
cacccagccaggcagagcugggauugaaggac

SEQ ID NO: 346450 - RNA, 32 nt, Human
cacccagcccacgaaucaucucccucuugaag

SEQ ID NO: 346451 - RNA, 32 nt, Human
cacccagcccagagaagaguuuagugacugag

SEQ ID NO: 346452 - RNA, 32 nt, Human
cacccagcccagggcuggcagucuuugcagcg

SEQ ID NO: 346453 - RNA, 32 nt, Human
cacccagccccagccccauccccagccccagc

SEQ ID NO: 346454 - RNA, 32 nt, Human
cacccagcccccacauccugugccuccaucag

SEQ ID NO: 346455 - RNA, 32 nt, Human
cacccagccggcccuccgucuccugagggacg

SEQ ID NO: 346456 - RNA, 32 nt, Human
cacccagccgugggaggaagggggcguggcaa

SEQ ID NO: 346457 - RNA, 32 nt, Human
cacccagccguuggcagcaucuacucagcaag

SEQ ID NO: 346458 - RNA, 32 nt, Human
cacccagccugugggaccucaggagggucaga

SEQ ID NO: 346459 - RNA, 24 nt, Human
cacccagcgucuccccugcugcug

SEQ ID NO: 346460 - RNA, 23 nt, Human
cacccagcuaacuuuuguauuuu

SEQ ID NO: 346461 - RNA, 24 nt, Human
cacccagcuaacuuuuuguauuuu

SEQ ID NO: 346462 - RNA, 20 nt, Human
cacccagcuaaucuucaucu

SEQ ID NO: 346463 - RNA, 22 nt, Human
cacccagcuaaucuuuguacuu

SEQ ID NO: 346464 - RNA, 23 nt, Human
cacccagcuaauuuucguauuuu

SEQ ID NO: 346465 - RNA, 23 nt, Human
cacccagcuaauuuucgucuuuu

SEQ ID NO: 346466 - RNA, 21 nt, Human
cacccagcuaauuuuguauuu

SEQ ID NO: 346467 - RNA, 22 nt, Human
cacccagcuaauuuuguauuuu

SEQ ID NO: 346468 - RNA, 23 nt, Human
cacccagcuaauuuuuauguuuu

SEQ ID NO: 346469 - RNA, 23 nt, Human
cacccagcuaauuuuugcauuuu

SEQ ID NO: 346470 - RNA, 23 nt, Human
cacccagcuaauuuuuguauuuu

SEQ ID NO: 346471 - RNA, 23 nt, Human
cacccagcuaauuuuuguguuuu

SEQ ID NO: 346472 - RNA, 22 nt, Human
cacccagcuaauuuuuguuuuu

SEQ ID NO: 346473 - RNA, 23 nt, Human
cacccagcuaauuuuuuauacuu

SEQ ID NO: 346474 - RNA, 23 nt, Human
cacccagcuaauuuuuuguauuu

SEQ ID NO: 346475 - RNA, 24 nt, Human
cacccagcuaauuuuuuguauuuu

SEQ ID NO: 346476 - RNA, 32 nt, Human
cacccagcucaaggagcuuaugcaggagcagg

SEQ ID NO: 346477 - RNA, 32 nt, Human
cacccagcucugucaccuccugacugaaccua

SEQ ID NO: 346478 - RNA, 27 nt, Human
cacccagcugccugagacccuccuuca

SEQ ID NO: 346479 - RNA, 19 nt, Human
cacccagcugggugcagug

SEQ ID NO: 346480 - RNA, 32 nt, Human
cacccagcugugaaugaacguggucagaacac

SEQ ID NO: 346481 - RNA, 32 nt, Human
cacccagcuugauguccacuggacacuggcaa

SEQ ID NO: 346482 - RNA, 32 nt, Human
cacccaggaacucccuggcaguggauuguggg

SEQ ID NO: 346483 - RNA, 32 nt, Human
cacccaggacacccaggauauggucuuugcug

SEQ ID NO: 346484 - RNA, 32 nt, Human
cacccaggacuuugcucugccugguggagggu

SEQ ID NO: 346485 - RNA, 32 nt, Human
cacccaggagcagaagaccauguuguuggauu

SEQ ID NO: 346486 - RNA, 32 nt, Human
cacccaggaggagugggcuuugcuggauccuu

SEQ ID NO: 346487 - RNA, 32 nt, Human
cacccaggaggagugggcuuugcuggguccuu

SEQ ID NO: 346488 - RNA, 32 nt, Human
cacccaggaggaguggggccagcuggaccuag

SEQ ID NO: 346489 - RNA, 32 nt, Human
cacccaggaggaguuuuuacauuuuggucuaa

SEQ ID NO: 346490 - RNA, 32 nt, Human
cacccaggaggccggcccugaccacacuguuc

SEQ ID NO: 346491 - RNA, 32 nt, Human
cacccaggagguggagguugcagugagccgag

SEQ ID NO: 346492 - RNA, 32 nt, Human
cacccaggcacugggcaagugaagaguuugcc

SEQ ID NO: 346493 - RNA, 32 nt, Human
cacccaggccagaauaacagagcuuucuuagu

SEQ ID NO: 346494 - RNA, 21 nt, Human
cacccaggccgaccuccugcu

SEQ ID NO: 346495 - RNA, 32 nt, Human
cacccaggccuuacaguccaaccuuuuucugu

SEQ ID NO: 346496 - RNA, 24 nt, Human
cacccaggccuugaugccgagcgg

SEQ ID NO: 346497 - RNA, 32 nt, Human
cacccaggcugaagcuccugagggacucacau

SEQ ID NO: 346498 - RNA, 32 nt, Human
cacccaggcugaguaucaucuccugggccaca

SEQ ID NO: 346499 - RNA, 32 nt, Human
cacccaggcugcagggugaggccaggcaggcc

SEQ ID NO: 346500 - RNA, 32 nt, Human
cacccaggcuggaaugcagugcaguggcacaa

SEQ ID NO: 346501 - RNA, 20 nt, Human
cacccaggcuggaguacagu

SEQ ID NO: 346502 - RNA, 21 nt, Human
cacccaggcuggaguacagug

SEQ ID NO: 346503 - RNA, 20 nt, Human
cacccaggcuggaguccagu

SEQ ID NO: 346504 - RNA, 21 nt, Human
cacccaggcuggaguccagug

SEQ ID NO: 346505 - RNA, 21 nt, Human
cacccaggcuggagugcagug

SEQ ID NO: 346506 - RNA, 21 nt, Human
cacccaggcuggagugcugug

SEQ ID NO: 346507 - RNA, 32 nt, Human
cacccaggcuggcagaucaugguagcagcagc

SEQ ID NO: 346508 - RNA, 32 nt, Human
cacccaggcugggagcuugccaggaacccagu

SEQ ID NO: 346509 - RNA, 32 nt, Human
cacccagggaaaaugggcuugacgaggccggc

SEQ ID NO: 346510 - RNA, 32 nt, Human
cacccagggacccccuuuccucagccuccacc

SEQ ID NO: 346511 - RNA, 32 nt, Human
cacccagggaggccgaggcgggaggaucgcug

SEQ ID NO: 346512 - RNA, 16 nt, Human
cacccagggccagucg

SEQ ID NO: 346513 - RNA, 32 nt, Human
cacccagggcccagagagacccaggacagagg

SEQ ID NO: 346514 - RNA, 32 nt, Human
cacccagggcccuguccugugucugccaccac

SEQ ID NO: 346515 - RNA, 21 nt, Human
cacccagggccgggcggcugc

SEQ ID NO: 346516 - RNA, 32 nt, Human
cacccagggcuaagcuuuugaacacuuucuuu

SEQ ID NO: 346517 - RNA, 20 nt, Human
cacccagguccugggcaguc

SEQ ID NO: 346518 - RNA, 32 nt, Human
cacccaggugccgaggaaagagacugagggca

SEQ ID NO: 346519 - RNA, 32 nt, Human
cacccaguaguauacccaaaauagcgaaauau

SEQ ID NO: 346520 - RNA, 32 nt, Human
cacccaguccccauaacaaaaccacuguccaa

SEQ ID NO: 346521 - RNA, 32 nt, Human
cacccagucccucccucugguccacugccuuu

SEQ ID NO: 346522 - RNA, 32 nt, Human
cacccagucuaagggcagguucugucccauug

SEQ ID NO: 346523 - RNA, 19 nt, Human
cacccagucuggagugcag

SEQ ID NO: 346524 - RNA, 20 nt, Human
cacccagucuggagugcagu

SEQ ID NO: 346525 - RNA, 21 nt, Human
cacccagucuggagugcagug

SEQ ID NO: 346526 - RNA, 32 nt, Human
cacccagucuucauguacggccgaccgcaggc

SEQ ID NO: 346527 - RNA, 32 nt, Human
cacccagugcugcagguuucuccugggugaag

SEQ ID NO: 346528 - RNA, 32 nt, Human
cacccauaccacagcauccccuagagagagug

SEQ ID NO: 346529 - RNA, 32 nt, Human
cacccauaucuauccuggauucugaacucuuc

SEQ ID NO: 346530 - RNA, 32 nt, Human
cacccaucaccaccaccaccacggugacccca

SEQ ID NO: 346531 - RNA, 32 nt, Human
cacccaucaccuagcaacaggaugcagccuuc

SEQ ID NO: 346532 - RNA, 32 nt, Human
cacccaucagccaacacuccccaacccaucgg

SEQ ID NO: 346533 - RNA, 32 nt, Human
cacccauccacacacaccuacacucacacacg

SEQ ID NO: 346534 - RNA, 32 nt, Human
cacccauccccuggugggcuccugggcggccu

SEQ ID NO: 346535 - RNA, 32 nt, Human
cacccauccuauuagccucccacauucaaggc

SEQ ID NO: 346536 - RNA, 32 nt, Human
cacccaucuaccugaaaacaaaacaggcacag

SEQ ID NO: 346537 - RNA, 32 nt, Human
cacccaucucacucacacacacaggcauccau

SEQ ID NO: 346538 - RNA, 32 nt, Human
cacccaucuccacaaagccaagugaaggugua

SEQ ID NO: 346539 - RNA, 32 nt, Human
cacccaucucuuaguguugccugagacuaaag

SEQ ID NO: 346540 - RNA, 32 nt, Human
cacccaucugguuuggccauuccuccuuggug

SEQ ID NO: 346541 - RNA, 32 nt, Human
cacccaucuuuguucccaucugaggacucagg

SEQ ID NO: 346542 - RNA, 32 nt, Human
cacccaugaggggaaacguggggaagaaggaa

SEQ ID NO: 346543 - RNA, 32 nt, Human
cacccaugaugcugugccuuccagaaaccugu

SEQ ID NO: 346544 - RNA, 32 nt, Human
cacccaugcacgcacacacauacacacugaag

SEQ ID NO: 346545 - RNA, 32 nt, Human
cacccaugccaucucaaccucuuccccgcccg

SEQ ID NO: 346546 - RNA, 32 nt, Human
cacccaugccucccucuuccuccucuuuccuc

SEQ ID NO: 346547 - RNA, 32 nt, Human
cacccaugcucccuccuuuaggcaggcccaga

SEQ ID NO: 346548 - RNA, 32 nt, Human
cacccauggcugcaguggaggggccagggcug

SEQ ID NO: 346549 - RNA, 29 nt, Human
cacccauggcugcugugacuccuaccagg

SEQ ID NO: 346550 - RNA, 32 nt, Human
cacccauggcuguaauggaugaacaugccacc

SEQ ID NO: 346551 - RNA, 32 nt, Human
cacccaugugaacaccaccaccagugccacac

SEQ ID NO: 346552 - RNA, 32 nt, Human
cacccaugugccaccuaacugaacuugaauau

SEQ ID NO: 346553 - RNA, 31 nt, Human
cacccauucaauaaauauguauugaacaucu

SEQ ID NO: 346554 - RNA, 32 nt, Human
cacccauucauucauuuauucauucacagcac

SEQ ID NO: 346555 - RNA, 32 nt, Human
cacccauuccaggugccacaggcaggggaugu

SEQ ID NO: 346556 - RNA, 32 nt, Human
cacccauucccccauaaaacagcuuauugucu

SEQ ID NO: 346557 - RNA, 32 nt, Human
cacccauuuaaaugcacaagcaaccaaaauug

SEQ ID NO: 346558 - RNA, 32 nt, Human
cacccauuucaccaccaccaugacaccgggca

SEQ ID NO: 346559 - RNA, 32 nt, Human
caccccaaagugcugggauuacaggcgugaag

SEQ ID NO: 346560 - RNA, 28 nt, Human
caccccaaaucuuaccccaccacuggca

SEQ ID NO: 346561 - RNA, 32 nt, Human
caccccaaccaccuugcaccagucuucucauu

SEQ ID NO: 346562 - RNA, 32 nt, Human
caccccaacccuauccacccuggaccaccucu

SEQ ID NO: 346563 - RNA, 32 nt, Human
caccccaaccugggcgacagagccagacucug

SEQ ID NO: 346564 - RNA, 32 nt, Human
caccccaaccuguucaaaccuuccgcuugguc

SEQ ID NO: 346565 - RNA, 32 nt, Human
caccccaacuaccaccucuuuucaggcacaga

SEQ ID NO: 346566 - RNA, 32 nt, Human
caccccaagccacagggacucccaccaggguc

SEQ ID NO: 346567 - RNA, 32 nt, Human
caccccaaggcgugaccaggaggaacagccug

SEQ ID NO: 346568 - RNA, 32 nt, Human
caccccaagucugcccaagugaagauggcuga

SEQ ID NO: 346569 - RNA, 32 nt, Human
caccccaaucucccaguucauuuccuaauccu

SEQ ID NO: 346570 - RNA, 32 nt, Human
caccccaauguucuggaggcugcgguucugcu

SEQ ID NO: 346571 - RNA, 32 nt, Human
caccccacaaccuucaggacagucuaucuuaa

SEQ ID NO: 346572 - RNA, 20 nt, Human
caccccacacaggcugcggc

SEQ ID NO: 346573 - RNA, 22 nt, Human
caccccacacaugacccacacc

SEQ ID NO: 346574 - RNA, 21 nt, Human
caccccacacccccacuggca

SEQ ID NO: 346575 - RNA, 18 nt, Human
caccccacaccccuccca

SEQ ID NO: 346576 - RNA, 21 nt, Human
caccccacaccugcagugcca

SEQ ID NO: 346577 - RNA, 32 nt, Human
caccccacacugauagcacuuccccaggccug

SEQ ID NO: 346578 - RNA, 32 nt, Human
caccccacagggcauagccagggggaccagca

SEQ ID NO: 346579 - RNA, 32 nt, Human
caccccacagugggugccuuccagaaauauag

SEQ ID NO: 346580 - RNA, 32 nt, Human
caccccaccagaagugccccugccuggguucu

SEQ ID NO: 346581 - RNA, 32 nt, Human
caccccaccaggcucugcuguaggcugggcuc

SEQ ID NO: 346582 - RNA, 15 nt, Human
caccccaccaggguc

SEQ ID NO: 346583 - RNA, 32 nt, Human
caccccacccaaggaagcccagcacagaccau

SEQ ID NO: 346584 - RNA, 32 nt, Human
caccccaccccagcugcccggcggcugggccc

SEQ ID NO: 346585 - RNA, 23 nt, Human
caccccacccccgggcgccuggc

SEQ ID NO: 346586 - RNA, 20 nt, Human
caccccacccccuccagcca

SEQ ID NO: 346587 - RNA, 16 nt, Human
caccccaccccuccca

SEQ ID NO: 346588 - RNA, 32 nt, Human
caccccacccuucacacccuuuccugaaaggc

SEQ ID NO: 346589 - RNA, 18 nt, Human
caccccaccuaccucaca

SEQ ID NO: 346590 - RNA, 32 nt, Human
caccccacgcugaugcagaagcucccagaaca

SEQ ID NO: 346591 - RNA, 32 nt, Human
caccccacguagcugcucacaccagccuccgg

SEQ ID NO: 346592 - RNA, 32 nt, Human
caccccacuccucaucucaccauuuggucaaa

SEQ ID NO: 346593 - RNA, 32 nt, Human
caccccacugcauuccagccugggugacagag

SEQ ID NO: 346594 - RNA, 32 nt, Human
caccccacugccaaggguggggucucaggagu

SEQ ID NO: 346595 - RNA, 32 nt, Human
caccccacuggcagcuuuguggauuaggaugg

SEQ ID NO: 346596 - RNA, 32 nt, Human
caccccacuggccuucucaggugcaaucagua

SEQ ID NO: 346597 - RNA, 32 nt, Human
caccccacuguccuccagccugggcaacagag

SEQ ID NO: 346598 - RNA, 32 nt, Human
caccccacugugcuguagccugggugacagug

SEQ ID NO: 346599 - RNA, 32 nt, Human
caccccacuuccuucucggaaggccagcucuu

SEQ ID NO: 346600 - RNA, 32 nt, Human
caccccagaagcagcaguggcagcuugggaaa

SEQ ID NO: 346601 - RNA, 32 nt, Human
caccccagaagguucucuuguauaccugcuca

SEQ ID NO: 346602 - RNA, 32 nt, Human
caccccagacacagggaucccuauguaaaaau

SEQ ID NO: 346603 - RNA, 32 nt, Human
caccccagaggugagaggaaugaggggcauug

SEQ ID NO: 346604 - RNA, 32 nt, Human
caccccagaguccucaacuggaccuaggggaa

SEQ ID NO: 346605 - RNA, 32 nt, Human
caccccagagugaggaggacgcaggggucaga

SEQ ID NO: 346606 - RNA, 32 nt, Human
caccccagcacaucugaagaugagcgccucuc

SEQ ID NO: 346607 - RNA, 32 nt, Human
caccccagcaugagugcugagauauggacucu

SEQ ID NO: 346608 - RNA, 32 nt, Human
caccccagccagccgaacaccaugaaguccag

SEQ ID NO: 346609 - RNA, 32 nt, Human
caccccagccccacugcccuccagggccagga

SEQ ID NO: 346610 - RNA, 32 nt, Human
caccccagcccgggugacagagcgagacuccg

SEQ ID NO: 346611 - RNA, 32 nt, Human
caccccagccuaagugaaagagcgagagccug

SEQ ID NO: 346612 - RNA, 32 nt, Human
caccccagccucgccuucccaccccaucgucu

SEQ ID NO: 346613 - RNA, 32 nt, Human
caccccagccuggacaacagagugagacuccu

SEQ ID NO: 346614 - RNA, 32 nt, Human
caccccagccugggcaacagagcaagacucca

SEQ ID NO: 346615 - RNA, 32 nt, Human
caccccagccugggcaacagagcaagacuccg

SEQ ID NO: 346616 - RNA, 32 nt, Human
caccccagccugggcaacagaguaagauuagg

SEQ ID NO: 346617 - RNA, 32 nt, Human
caccccagccugggcgacagagcaagagaccc

SEQ ID NO: 346618 - RNA, 32 nt, Human
caccccagccugggcgacagagccagacccug

SEQ ID NO: 346619 - RNA, 32 nt, Human
caccccagccugggcgacggagcgagacuccg

SEQ ID NO: 346620 - RNA, 32 nt, Human
caccccagccugggugacagagcgagacuccg

SEQ ID NO: 346621 - RNA, 32 nt, Human
caccccagccugggugacagagcgagacucug

SEQ ID NO: 346622 - RNA, 32 nt, Human
caccccagccugggugacagcgagauccuguc

SEQ ID NO: 346623 - RNA, 32 nt, Human
caccccagcgcugucugugggucccuugcccc

SEQ ID NO: 346624 - RNA, 19 nt, Human
caccccagcugaccaugag

SEQ ID NO: 346625 - RNA, 32 nt, Human
caccccagcugccucucuuguccugaggguua

SEQ ID NO: 346626 - RNA, 32 nt, Human
caccccaggcaaagcagagagcagagguucuu

SEQ ID NO: 346627 - RNA, 32 nt, Human
caccccaggcagugccugcuggcugggcuggu

SEQ ID NO: 346628 - RNA, 32 nt, Human
caccccagggccugagccuggccagccuacaa

SEQ ID NO: 346629 - RNA, 32 nt, Human
caccccagggccuguggcugccugggcaccuc

SEQ ID NO: 346630 - RNA, 32 nt, Human
caccccagugccugucuggagcucacccaagg

SEQ ID NO: 346631 - RNA, 32 nt, Human
caccccauagagacucucucuauaccagcaug

SEQ ID NO: 346632 - RNA, 32 nt, Human
caccccauccccaggaaacuguagcuucuuaa

SEQ ID NO: 346633 - RNA, 24 nt, Human
caccccaucccgucccccacccca

SEQ ID NO: 346634 - RNA, 32 nt, Human
caccccaucccucuccccagucuuggauacua

SEQ ID NO: 346635 - RNA, 32 nt, Human
caccccaucgugcagcugcauggcuacuugga

SEQ ID NO: 346636 - RNA, 21 nt, Human
caccccaucuccccaccacca

SEQ ID NO: 346637 - RNA, 31 nt, Human
caccccauggaggaaugcugggugacagaga

SEQ ID NO: 346638 - RNA, 32 nt, Human
caccccauggaggcgcaaugauagcagaauua

SEQ ID NO: 346639 - RNA, 32 nt, Human
caccccauuccauacccuucuucaccuggggu

SEQ ID NO: 346640 - RNA, 32 nt, Human
caccccauucuccucuccucugaccccucagc

SEQ ID NO: 346641 - RNA, 32 nt, Human
caccccauugcacuccagccuggacaacaaga

SEQ ID NO: 346642 - RNA, 32 nt, Human
caccccauuucacuccagccugggcgacaaga

SEQ ID NO: 346643 - RNA, 32 nt, Human
cacccccaaauaccaccaaagaagaaagaaag

SEQ ID NO: 346644 - RNA, 32 nt, Human
cacccccaacccaguccuaccugucacaccgg

SEQ ID NO: 346645 - RNA, 32 nt, Human
cacccccaagaguuuccauuaacuugauccca

SEQ ID NO: 346646 - RNA, 32 nt, Human
cacccccaagccugggcuugagcugcagaaug

SEQ ID NO: 346647 - RNA, 32 nt, Human
cacccccaaggcugcagccacaccauguuuca

SEQ ID NO: 346648 - RNA, 32 nt, Human
cacccccacauucucuccucuggacccccagg

SEQ ID NO: 346649 - RNA, 32 nt, Human
cacccccacauuugcacaccuuccacaggguc

SEQ ID NO: 346650 - RNA, 22 nt, Human
cacccccacccaccuccaccca

SEQ ID NO: 346651 - RNA, 32 nt, Human
cacccccacccccauucccaagccuccaacuu

SEQ ID NO: 346652 - RNA, 32 nt, Human
cacccccaccuuccuccagccugugcgcaccu

SEQ ID NO: 346653 - RNA, 32 nt, Human
cacccccaccuuuuccuuuuccucuuagacuu

SEQ ID NO: 346654 - RNA, 22 nt, Human
cacccccacuccaaccauguca

SEQ ID NO: 346655 - RNA, 32 nt, Human
cacccccacucugccucauuucugccuccagg

SEQ ID NO: 346656 - RNA, 32 nt, Human
cacccccacugcacccccuccccauggguucu

SEQ ID NO: 346657 - RNA, 32 nt, Human
cacccccagaacaggcagagacagggcacagu

SEQ ID NO: 346658 - RNA, 32 nt, Human
cacccccagaggaggcggaagaggagcccgag

SEQ ID NO: 346659 - RNA, 32 nt, Human
cacccccagcaaccccaucccagaauccuauu

SEQ ID NO: 346660 - RNA, 32 nt, Human
cacccccagcacagggggauucugagcagugc

SEQ ID NO: 346661 - RNA, 32 nt, Human
cacccccagcacuucggacauggccgaggaag

SEQ ID NO: 346662 - RNA, 32 nt, Human
cacccccagcauggcuuggaagacugaaaggc

SEQ ID NO: 346663 - RNA, 32 nt, Human
cacccccagccagaacacgcagugccagccgu

SEQ ID NO: 346664 - RNA, 32 nt, Human
cacccccagccagcucaggguuuuagaguguu

SEQ ID NO: 346665 - RNA, 22 nt, Human
cacccccagcccugcacccuca

SEQ ID NO: 346666 - RNA, 20 nt, Human
cacccccagcuccugaggug

SEQ ID NO: 346667 - RNA, 32 nt, Human
cacccccagcuggcccuccacccccaccucaa

SEQ ID NO: 346668 - RNA, 27 nt, Human
cacccccagcuuccaccucaaggaggu

SEQ ID NO: 346669 - RNA, 32 nt, Human
cacccccaggauguugcggaggcugcuggagc

SEQ ID NO: 346670 - RNA, 32 nt, Human
cacccccaggcgugggggacaaaagccaaagg

SEQ ID NO: 346671 - RNA, 32 nt, Human
cacccccaggcuuuaccaggugcccccucaga

SEQ ID NO: 346672 - RNA, 32 nt, Human
cacccccagggaggggccuggggaaagcuggu

SEQ ID NO: 346673 - RNA, 31 nt, Human
cacccccagucccagcaccugugucaguaaa

SEQ ID NO: 346674 - RNA, 32 nt, Human
cacccccagugcagggcuggucuuggggaggc

SEQ ID NO: 346675 - RNA, 32 nt, Human
cacccccaguuccuaugacacaguuaucaaaa

SEQ ID NO: 346676 - RNA, 32 nt, Human
cacccccaucaccuucucaacugggaaacccc

SEQ ID NO: 346677 - RNA, 25 nt, Human
cacccccaucccacccaaccacagg

SEQ ID NO: 346678 - RNA, 32 nt, Human
cacccccaucuccaccuccgcaugucauuucu

SEQ ID NO: 346679 - RNA, 32 nt, Human
cacccccaucuuccaccugugcccucaccacc

SEQ ID NO: 346680 - RNA, 32 nt, Human
cacccccaugccuguccuccaggcuggggcag

SEQ ID NO: 346681 - RNA, 32 nt, Human
cacccccauugcucuccuccaggggcagaaca

SEQ ID NO: 346682 - RNA, 24 nt, Human
cacccccauuuguuucaaagaggu

SEQ ID NO: 346683 - RNA, 18 nt, Human
caccccccacccaccgca

SEQ ID NO: 346684 - RNA, 24 nt, Human
caccccccgugggucucagggagg

SEQ ID NO: 346685 - RNA, 24 nt, Human
caccccccuucagccgccuggaga

SEQ ID NO: 346686 - RNA, 32 nt, Human
cacccccgcacaccugcaucccugccggaggc

SEQ ID NO: 346687 - RNA, 23 nt, Human
cacccccgcagcggcgcuacggg

SEQ ID NO: 346688 - RNA, 32 nt, Human
cacccccgcaggcugcagagcaaggaugaagc

SEQ ID NO: 346689 - RNA, 22 nt, Human
cacccccgccacagccuacacg

SEQ ID NO: 346690 - RNA, 17 nt, Human
cacccccgcccccuccc

SEQ ID NO: 346691 - RNA, 32 nt, Human
cacccccggagcucucaccccuccagugccga

SEQ ID NO: 346692 - RNA, 20 nt, Human
cacccccggagucgccacac

SEQ ID NO: 346693 - RNA, 19 nt, Human
cacccccggccucagccac

SEQ ID NO: 346694 - RNA, 32 nt, Human
cacccccguccaccccagagacccugcccuuc

SEQ ID NO: 346695 - RNA, 32 nt, Human
cacccccguggagacagggcucuggggcugau

SEQ ID NO: 346696 - RNA, 21 nt, Human
cacccccucaaacucuguuua

SEQ ID NO: 346697 - RNA, 32 nt, Human
cacccccucaacuucacaccuugauuucacuc

SEQ ID NO: 346698 - RNA, 32 nt, Human
cacccccucacugccuacuccugcuuucggga

SEQ ID NO: 346699 - RNA, 32 nt, Human
cacccccucagaaggcuggugacaucuguuga

SEQ ID NO: 346700 - RNA, 20 nt, Human
cacccccucagcgccacgga

SEQ ID NO: 346701 - RNA, 32 nt, Human
cacccccuccacucugcaucauacacccuuca

SEQ ID NO: 346702 - RNA, 32 nt, Human
cacccccuccccauggguucucuccuuccucu

SEQ ID NO: 346703 - RNA, 18 nt, Human
cacccccucccccauaga

SEQ ID NO: 346704 - RNA, 32 nt, Human
cacccccuccccuuccccuccugccugcuuug

SEQ ID NO: 346705 - RNA, 32 nt, Human
cacccccucuuccccacuucccugcacucuca

SEQ ID NO: 346706 - RNA, 32 nt, Human
cacccccugaagccacucgcucccagauuagg

SEQ ID NO: 346707 - RNA, 32 nt, Human
cacccccugauugcuggcaucugccucuucuc

SEQ ID NO: 346708 - RNA, 32 nt, Human
cacccccugcaacuucugcacauacuggggcc

SEQ ID NO: 346709 - RNA, 32 nt, Human
cacccccugcaaucccccaccuuucggggucu

SEQ ID NO: 346710 - RNA, 32 nt, Human
cacccccugcaccuccaccugccccagccccu

SEQ ID NO: 346711 - RNA, 32 nt, Human
cacccccugccugcccagccugggcccugcag

SEQ ID NO: 346712 - RNA, 32 nt, Human
cacccccugccuggaaacuuaaggaggccgga

SEQ ID NO: 346713 - RNA, 32 nt, Human
cacccccugcuccaccagcagcauggcauagc

SEQ ID NO: 346714 - RNA, 32 nt, Human
cacccccuggcuuccccaccucuccagguguc

SEQ ID NO: 346715 - RNA, 32 nt, Human
cacccccugggaacaccugagcagaaacugaa

SEQ ID NO: 346716 - RNA, 32 nt, Human
cacccccugggcaagugagagcaucugcaaaa

SEQ ID NO: 346717 - RNA, 18 nt, Human
cacccccugggcagggag

SEQ ID NO: 346718 - RNA, 32 nt, Human
cacccccuggggcugcucagccucaggcacgg

SEQ ID NO: 346719 - RNA, 32 nt, Human
cacccccuguaaucccagcacuuugggaagcc

SEQ ID NO: 346720 - RNA, 32 nt, Human
cacccccugucucuuuugguucagucuuuucg

SEQ ID NO: 346721 - RNA, 32 nt, Human
cacccccuugggccuggcuggaucccaggcag

SEQ ID NO: 346722 - RNA, 22 nt, Human
cacccccuuuucacucucuuua

SEQ ID NO: 346723 - RNA, 32 nt, Human
cacccccuuuucuuccuacucugugccuggag

SEQ ID NO: 346724 - RNA, 32 nt, Human
caccccgacuuuuccuuccuccuuccuccccg

SEQ ID NO: 346725 - RNA, 32 nt, Human
caccccgaggcagaguugggaaagcagugguc

SEQ ID NO: 346726 - RNA, 32 nt, Human
caccccgagugcggagccagagaucaaaagau

SEQ ID NO: 346727 - RNA, 32 nt, Human
caccccgauguggaccucuacuuuccaggcua

SEQ ID NO: 346728 - RNA, 32 nt, Human
caccccgcaaggcucccgcuggugucccugga

SEQ ID NO: 346729 - RNA, 32 nt, Human
caccccgcaguguccucguucuuuauuggucc

SEQ ID NO: 346730 - RNA, 32 nt, Human
caccccgccagccuacacugccagccgccacc

SEQ ID NO: 346731 - RNA, 32 nt, Human
caccccgcccagcaccuugggccccgccgcuu

SEQ ID NO: 346732 - RNA, 32 nt, Human
caccccgccccuccccuccacagcagagagug

SEQ ID NO: 346733 - RNA, 23 nt, Human
caccccgccccugcaugccuggc

SEQ ID NO: 346734 - RNA, 21 nt, Human
caccccgccugccuccuggcu

SEQ ID NO: 346735 - RNA, 32 nt, Human
caccccgccugccuccuggcucaggcccagcu

SEQ ID NO: 346736 - RNA, 32 nt, Human
caccccgcgagcccauggaggcuccgggaccc

SEQ ID NO: 346737 - RNA, 32 nt, Human
caccccgcugccucuagguucugggaagaugg

SEQ ID NO: 346738 - RNA, 32 nt, Human
caccccggcccaggacgggaugcgggucgguc

SEQ ID NO: 346739 - RNA, 32 nt, Human
caccccggcccccugcccguucuugaaaugua

SEQ ID NO: 346740 - RNA, 32 nt, Human
caccccggcuggccaugcuguccccucccugu

SEQ ID NO: 346741 - RNA, 32 nt, Human
caccccggcuuggcgcugucucucccccucgg

SEQ ID NO: 346742 - RNA, 32 nt, Human
caccccgggaucuggugacgcuggggcuggaa

SEQ ID NO: 346743 - RNA, 32 nt, Human
caccccgggcagcagagaaggcccagcugaca

SEQ ID NO: 346744 - RNA, 32 nt, Human
caccccggucccgccgaggagccuccgggugg

SEQ ID NO: 346745 - RNA, 32 nt, Human
caccccgucgcacaggcuggagugcaguggca

SEQ ID NO: 346746 - RNA, 32 nt, Human
caccccgugagggaggggaggggugggcuggg

SEQ ID NO: 346747 - RNA, 32 nt, Human
caccccgugauucugcccacgcuccuccacca

SEQ ID NO: 346748 - RNA, 32 nt, Human
caccccuaaauacccacccuguggacuuugag

SEQ ID NO: 346749 - RNA, 32 nt, Human
caccccuaacccaaaucucuggccucacccca

SEQ ID NO: 346750 - RNA, 32 nt, Human
caccccuaacugcccccugccugcuccggcac

SEQ ID NO: 346751 - RNA, 32 nt, Human
caccccuacucgccuaagagcuuucuccucuc

SEQ ID NO: 346752 - RNA, 32 nt, Human
caccccuacucuccucccuugcucccagcagc

SEQ ID NO: 346753 - RNA, 32 nt, Human
caccccuacucuggcccuccuuaugucacugc

SEQ ID NO: 346754 - RNA, 32 nt, Human
caccccuagaggcagaugggcugagauaaaag

SEQ ID NO: 346755 - RNA, 32 nt, Human
caccccuaggcuguggaagcaagugcagaccc

SEQ ID NO: 346756 - RNA, 32 nt, Human
caccccuaguaaugaugaggcagaugccuugg

SEQ ID NO: 346757 - RNA, 32 nt, Human
caccccucaaagcagcgccugccuccucccuc

SEQ ID NO: 346758 - RNA, 32 nt, Human
caccccucaccccucaccauccuuccucagga

SEQ ID NO: 346759 - RNA, 32 nt, Human
caccccucacugcaaaagcaucuccuuaagua

SEQ ID NO: 346760 - RNA, 32 nt, Human
caccccucagcccaggagggaaagggcauuuu

SEQ ID NO: 346761 - RNA, 32 nt, Human
caccccuccagccgcaguuuuuggcuacaaac

SEQ ID NO: 346762 - RNA, 32 nt, Human
caccccuccaucucaaagaaauaacaucaucc

SEQ ID NO: 346763 - RNA, 18 nt, Human
caccccucccacccccau

SEQ ID NO: 346764 - RNA, 32 nt, Human
caccccuccccaagcccuucccagucacugca

SEQ ID NO: 346765 - RNA, 19 nt, Human
caccccuccccaguacagg

SEQ ID NO: 346766 - RNA, 32 nt, Human
caccccuccccauugucccucucccauucauc

SEQ ID NO: 346767 - RNA, 21 nt, Human
caccccuccccucaccacaga

SEQ ID NO: 346768 - RNA, 22 nt, Human
caccccucccuccggcugcacg

SEQ ID NO: 346769 - RNA, 19 nt, Human
caccccucccugccacagg

SEQ ID NO: 346770 - RNA, 18 nt, Human
caccccucccugccacca

SEQ ID NO: 346771 - RNA, 32 nt, Human
caccccucccuucacccaccccacccccgggc

SEQ ID NO: 346772 - RNA, 19 nt, Human
caccccuccgcagccccau

SEQ ID NO: 346773 - RNA, 32 nt, Human
caccccuccguguggagcacuggagauagugc

SEQ ID NO: 346774 - RNA, 32 nt, Human
caccccuccucagauccgucccucuaaugggu

SEQ ID NO: 346775 - RNA, 32 nt, Human
caccccuccuccuaaacuccccaacccaccuc

SEQ ID NO: 346776 - RNA, 32 nt, Human
caccccuccugcuaggagaggcugcgggcugc

SEQ ID NO: 346777 - RNA, 32 nt, Human
caccccuccuguuaugcccguggcgguggcac

SEQ ID NO: 346778 - RNA, 32 nt, Human
caccccuccuucccucuugacccccuagguuu

SEQ ID NO: 346779 - RNA, 32 nt, Human
caccccucgaccaauccuccacaaacuucagu

SEQ ID NO: 346780 - RNA, 32 nt, Human
caccccucgcagcugcuuccuucugccuggga

SEQ ID NO: 346781 - RNA, 32 nt, Human
caccccucgggccuuugggcuggaccagccac

SEQ ID NO: 346782 - RNA, 32 nt, Human
caccccucuccucgucccuccuggucgugccc

SEQ ID NO: 346783 - RNA, 32 nt, Human
caccccucuccucugcccacccgagccccaga

SEQ ID NO: 346784 - RNA, 32 nt, Human
caccccucucuggccacgucacccccgccuuu

SEQ ID NO: 346785 - RNA, 32 nt, Human
caccccucugaccccugccuucccaggcaggg

SEQ ID NO: 346786 - RNA, 32 nt, Human
caccccucugggaugcgggugagggaagguug

SEQ ID NO: 346787 - RNA, 32 nt, Human
caccccucuguaaccuccauaauccaucaggu

SEQ ID NO: 346788 - RNA, 32 nt, Human
caccccucuuagcuguccuugcuugugccugc

SEQ ID NO: 346789 - RNA, 32 nt, Human
caccccucuugcuucuuccccaccucaccauc

SEQ ID NO: 346790 - RNA, 32 nt, Human
caccccugagccaccuguggcucugcuaccca

SEQ ID NO: 346791 - RNA, 32 nt, Human
caccccugaucuccagacucauggccccagcu

SEQ ID NO: 346792 - RNA, 32 nt, Human
caccccugcacgaugaacacacaccgggcugg

SEQ ID NO: 346793 - RNA, 32 nt, Human
caccccugcacuccagccugggcaacagagug

SEQ ID NO: 346794 - RNA, 32 nt, Human
caccccugcacuccagccugggcggcagagug

SEQ ID NO: 346795 - RNA, 32 nt, Human
caccccugcacuccagccugggugacagagug

SEQ ID NO: 346796 - RNA, 32 nt, Human
caccccugcacuccagccugggugacagcuag

SEQ ID NO: 346797 - RNA, 32 nt, Human
caccccugcacuccaggcugggcaacaguacg

SEQ ID NO: 346798 - RNA, 32 nt, Human
caccccugcacuccugccuucccgugggcacu

SEQ ID NO: 346799 - RNA, 32 nt, Human
caccccugcaggcauccaaaggagcacacaug

SEQ ID NO: 346800 - RNA, 32 nt, Human
caccccugcccugcccucucucccaggauucc

SEQ ID NO: 346801 - RNA, 32 nt, Human
caccccugccuccccuccaccccugccucucc

SEQ ID NO: 346802 - RNA, 32 nt, Human
caccccugccuccgggaugaaaggggguaacc

SEQ ID NO: 346803 - RNA, 32 nt, Human
caccccugccuucgugccauccuuccugggag

SEQ ID NO: 346804 - RNA, 32 nt, Human
caccccuggacuccagcuugggugacacagug

SEQ ID NO: 346805 - RNA, 32 nt, Human
caccccuggcagccaggcagagcaucagugcc

SEQ ID NO: 346806 - RNA, 32 nt, Human
caccccugggcugagggaagggagaggagagg

SEQ ID NO: 346807 - RNA, 32 nt, Human
caccccuggggagcacagggaggcagaggcuu

SEQ ID NO: 346808 - RNA, 32 nt, Human
caccccuguagucccagcuacuugggaggcug

SEQ ID NO: 346809 - RNA, 19 nt, Human
caccccugucaccuggagg

SEQ ID NO: 346810 - RNA, 32 nt, Human
caccccuguccucacugcucccugaagcccag

SEQ ID NO: 346811 - RNA, 18 nt, Human
caccccugucucaaggag

SEQ ID NO: 346812 - RNA, 32 nt, Human
caccccugugagaugcugagggcaggauaccu

SEQ ID NO: 346813 - RNA, 32 nt, Human
caccccugugucugcagagugccuucaaaacu

SEQ ID NO: 346814 - RNA, 32 nt, Human
caccccuguuaaaccugaucugugucauaagu

SEQ ID NO: 346815 - RNA, 19 nt, Human
caccccuguuaccccagga

SEQ ID NO: 346816 - RNA, 32 nt, Human
caccccuuagcacaccugcucgucccauuuag

SEQ ID NO: 346817 - RNA, 32 nt, Human
caccccuuagcuccccuauccugggcuaggag

SEQ ID NO: 346818 - RNA, 32 nt, Human
caccccuucaccugaggcuucuccccucucaa

SEQ ID NO: 346819 - RNA, 32 nt, Human
caccccuucaggaucagucaagggaaagcacu

SEQ ID NO: 346820 - RNA, 32 nt, Human
caccccuuccaguuaagaccugccuagcagag

SEQ ID NO: 346821 - RNA, 18 nt, Human
caccccuucccagcccca

SEQ ID NO: 346822 - RNA, 20 nt, Human
caccccuuccccaaucccau

SEQ ID NO: 346823 - RNA, 20 nt, Human
caccccuuccccaggcaaga

SEQ ID NO: 346824 - RNA, 32 nt, Human
caccccuuccuccuccuagccucucucccaaa

SEQ ID NO: 346825 - RNA, 20 nt, Human
caccccuuccugaccacgga

SEQ ID NO: 346826 - RNA, 32 nt, Human
caccccuugcacuuaacauaagcuauuuuugg

SEQ ID NO: 346827 - RNA, 32 nt, Human
caccccuugcccagagugugcccucugcaugg

SEQ ID NO: 346828 - RNA, 32 nt, Human
caccccuugccucuguggcagcugcgagugug

SEQ ID NO: 346829 - RNA, 32 nt, Human
caccccuugccuggccuggccugaggcucagc

SEQ ID NO: 346830 - RNA, 32 nt, Human
caccccuuguuacugauaaagcccagagagcu

SEQ ID NO: 346831 - RNA, 32 nt, Human
caccccuuucaucucuguuuccauacguuugc

SEQ ID NO: 346832 - RNA, 32 nt, Human
caccccuuucuuucuuucucucucugauugag

SEQ ID NO: 346833 - RNA, 32 nt, Human
caccccuuuucuguggcaucugaucugucauc

SEQ ID NO: 346834 - RNA, 32 nt, Human
cacccgacaacuaccacuccccaagccuucag

SEQ ID NO: 346835 - RNA, 32 nt, Human
cacccgaccagccccgugccauggcccuagug

SEQ ID NO: 346836 - RNA, 32 nt, Human
cacccgaccagccugggccgcauucccugcag

SEQ ID NO: 346837 - RNA, 32 nt, Human
cacccgacgagaggaggcggggugggggaggc

SEQ ID NO: 346838 - RNA, 32 nt, Human
cacccgacguaaucccagcacguugggaggcc

SEQ ID NO: 346839 - RNA, 32 nt, Human
cacccgacuaacaucucagucucugaaaaugc

SEQ ID NO: 346840 - RNA, 32 nt, Human
cacccgacuguacugccuuccugcagccucca

SEQ ID NO: 346841 - RNA, 32 nt, Human
cacccgagaggacccauaugugcaaccuggag

SEQ ID NO: 346842 - RNA, 21 nt, Human
cacccgaggcuccugcugcug

SEQ ID NO: 346843 - RNA, 32 nt, Human
cacccgaucaugugcuccaguuuaugaaauag

SEQ ID NO: 346844 - RNA, 32 nt, Human
cacccgcacacagaggcauuugcaccagcucc

SEQ ID NO: 346845 - RNA, 32 nt, Human
cacccgcacugcagucuccagccugagccaug

SEQ ID NO: 346846 - RNA, 32 nt, Human
cacccgcacuucucccaaaaggcagaugacgg

SEQ ID NO: 346847 - RNA, 32 nt, Human
cacccgcagcuccggcgccgcggcgagacgga

SEQ ID NO: 346848 - RNA, 18 nt, Human
cacccgcaggccuacuga

SEQ ID NO: 346849 - RNA, 32 nt, Human
cacccgcagggaggguggggagagcuggcagg

SEQ ID NO: 346850 - RNA, 32 nt, Human
cacccgcauucuuccuccuucuucuggugcua

SEQ ID NO: 346851 - RNA, 32 nt, Human
cacccgccaagcucucuagccucuccuggccu

SEQ ID NO: 346852 - RNA, 32 nt, Human
cacccgccaggcggaaagucacccuguuccca

SEQ ID NO: 346853 - RNA, 18 nt, Human
cacccgccauggaccauc

SEQ ID NO: 346854 - RNA, 21 nt, Human
cacccgccccagcuucugcca

SEQ ID NO: 346855 - RNA, 32 nt, Human
cacccgcccgggaucaggaggccgggggcgcc

SEQ ID NO: 346856 - RNA, 22 nt, Human
cacccgcccugcccaagcccag

SEQ ID NO: 346857 - RNA, 32 nt, Human
cacccgcccuuuccuugccuucuuuacucggc

SEQ ID NO: 346858 - RNA, 32 nt, Human
cacccgccgcacgaccaccacccgccgcacga

SEQ ID NO: 346859 - RNA, 32 nt, Human
cacccgccgcugcuaauuuuuguauuuuuagu

SEQ ID NO: 346860 - RNA, 32 nt, Human
cacccgccugccuggccgcaggugguucuccc

SEQ ID NO: 346861 - RNA, 32 nt, Human
cacccgccuguaguccagcuacuugaggcuga

SEQ ID NO: 346862 - RNA, 32 nt, Human
cacccgccuuuccuuccugacguccucugucc

SEQ ID NO: 346863 - RNA, 32 nt, Human
cacccgcuaugccugcacugcagcccagcccc

SEQ ID NO: 346864 - RNA, 32 nt, Human
cacccgcucgacccucucccggccccuccccu

SEQ ID NO: 346865 - RNA, 32 nt, Human
cacccgcugacauuuccguuguacauguuccu

SEQ ID NO: 346866 - RNA, 19 nt, Human
cacccgcuggcucuacuga

SEQ ID NO: 346867 - RNA, 32 nt, Human
cacccgcuggguuucuugaggucugaggaccg

SEQ ID NO: 346868 - RNA, 32 nt, Human
cacccgcugugaggcccgaccacccacccaga

SEQ ID NO: 346869 - RNA, 32 nt, Human
cacccggaacuuggcauccagcaaugggcccc

SEQ ID NO: 346870 - RNA, 32 nt, Human
cacccggaccuggacgcagggccaggugcugu

SEQ ID NO: 346871 - RNA, 32 nt, Human
cacccggagcaggauggggaggagcugagccg

SEQ ID NO: 346872 - RNA, 32 nt, Human
cacccggaggcagcggaggcaggcgcagcauc

SEQ ID NO: 346873 - RNA, 32 nt, Human
cacccggaggcagugggauggaggagugauug

SEQ ID NO: 346874 - RNA, 32 nt, Human
cacccggaugccugccccgcacggccagcagc

SEQ ID NO: 346875 - RNA, 32 nt, Human
cacccggcacacacccucccugccaccaggau

SEQ ID NO: 346876 - RNA, 32 nt, Human
cacccggcagggaggacaaagcagaaagggca

SEQ ID NO: 346877 - RNA, 32 nt, Human
cacccggccucagggcaguccccaccacacug

SEQ ID NO: 346878 - RNA, 32 nt, Human
cacccgggaagacgacagagacugaagauugg

SEQ ID NO: 346879 - RNA, 32 nt, Human
cacccgggaagggaaagcagccagcagcccuc

SEQ ID NO: 346880 - RNA, 32 nt, Human
cacccgggagaagggagaggguccuguugacg

SEQ ID NO: 346881 - RNA, 32 nt, Human
cacccgggagcaccgccugggcaaccacuaca

SEQ ID NO: 346882 - RNA, 32 nt, Human
cacccgggauuggaaugcaauggcgcgaucuc

SEQ ID NO: 346883 - RNA, 32 nt, Human
cacccgggcccggaggaugaugaagcucaagu

SEQ ID NO: 346884 - RNA, 21 nt, Human
cacccgggccuuggcggcugc

SEQ ID NO: 346885 - RNA, 32 nt, Human
cacccgggcucagggaccacagcaaggcaccu

SEQ ID NO: 346886 - RNA, 32 nt, Human
cacccggggcccugcuuccucacacuggcggg

SEQ ID NO: 346887 - RNA, 32 nt, Human
cacccggguccuugaagugaucucuaggcccc

SEQ ID NO: 346888 - RNA, 32 nt, Human
cacccggucccaccuggugacacugggcuucc

SEQ ID NO: 346889 - RNA, 32 nt, Human
cacccgguuaccaaagucagcaaagaagaugc

SEQ ID NO: 346890 - RNA, 22 nt, Human
cacccguaaucccagcuacuca

SEQ ID NO: 346891 - RNA, 32 nt, Human
cacccgugcccagccugagcuguuuucuucug

SEQ ID NO: 346892 - RNA, 32 nt, Human
cacccguggggaggggacggagcugugcuuag

SEQ ID NO: 346893 - RNA, 32 nt, Human
cacccguucgcccgucccccugccgcauucac

SEQ ID NO: 346894 - RNA, 32 nt, Human
cacccuaacacauacccucccacccaccuucc

SEQ ID NO: 346895 - RNA, 32 nt, Human
cacccuaacccccaccucccggcccugagcgu

SEQ ID NO: 346896 - RNA, 32 nt, Human
cacccuaaccccgacuccccagcccugggacu

SEQ ID NO: 346897 - RNA, 32 nt, Human
cacccuacacaaaauacagcacuuugacauau

SEQ ID NO: 346898 - RNA, 32 nt, Human
cacccuacaccuccccucagaacuucaaaagg

SEQ ID NO: 346899 - RNA, 32 nt, Human
cacccuacagccagaagagauaugaggaaaau

SEQ ID NO: 346900 - RNA, 32 nt, Human
cacccuacauggcugcccugugcccucgggau

SEQ ID NO: 346901 - RNA, 32 nt, Human
cacccuacauuccucuccucuucacuagccuc

SEQ ID NO: 346902 - RNA, 32 nt, Human
cacccuaccaccagacacagagcccggaccac

SEQ ID NO: 346903 - RNA, 17 nt, Human
cacccuacccccagggu

SEQ ID NO: 346904 - RNA, 32 nt, Human
cacccuacccgacgcagcugugaauggccggu

SEQ ID NO: 346905 - RNA, 32 nt, Human
cacccuacccgcccaaggagacuccacccugg

SEQ ID NO: 346906 - RNA, 32 nt, Human
cacccuaccucaccucuucucaggcaccccuc

SEQ ID NO: 346907 - RNA, 32 nt, Human
cacccuacugugaaaaggggaggggauguggu

SEQ ID NO: 346908 - RNA, 32 nt, Human
cacccuagaagaggagggagggauucugggug

SEQ ID NO: 346909 - RNA, 32 nt, Human
cacccuagaucuuccccaagagggacuggggu

SEQ ID NO: 346910 - RNA, 32 nt, Human
cacccuagccugggcaacagagcaagacaccg

SEQ ID NO: 346911 - RNA, 32 nt, Human
cacccuagcucccugcuccagggaugugagca

SEQ ID NO: 346912 - RNA, 32 nt, Human
cacccuaggaggcgcggugccacccacuacuc

SEQ ID NO: 346913 - RNA, 32 nt, Human
cacccuaucgguucuccuccaccuggacagga

SEQ ID NO: 346914 - RNA, 32 nt, Human
cacccuaugcuguacaacacacagaaagcccc

SEQ ID NO: 346915 - RNA, 32 nt, Human
cacccuauugcccaggcuggagugcaauggcg

SEQ ID NO: 346916 - RNA, 22 nt, Human
cacccucaaagccgucugccca

SEQ ID NO: 346917 - RNA, 32 nt, Human
cacccucaacaaacaccagcgcuuuggguacg

SEQ ID NO: 346918 - RNA, 32 nt, Human
cacccucaacugcucuuuuugucuuacauccc

SEQ ID NO: 346919 - RNA, 32 nt, Human
cacccucaagaggaguuagaaaagagguccuu

SEQ ID NO: 346920 - RNA, 32 nt, Human
cacccucaagcagcagaugugcagcaagggag

SEQ ID NO: 346921 - RNA, 32 nt, Human
cacccucaagguguucaucuuccaguucguca

SEQ ID NO: 346922 - RNA, 32 nt, Human
cacccucaaguagcagagacaggugugcaaag

SEQ ID NO: 346923 - RNA, 32 nt, Human
cacccucaaguagcagggacaggugugcaaaa

SEQ ID NO: 346924 - RNA, 32 nt, Human
cacccucacagacacacccaggaacaaguuua

SEQ ID NO: 346925 - RNA, 32 nt, Human
cacccucaccuguguucucuucccucucuccc

SEQ ID NO: 346926 - RNA, 32 nt, Human
cacccucaccuugccaggccucuccccugcag

SEQ ID NO: 346927 - RNA, 32 nt, Human
cacccucacuguccuccagcccaggaugggcc

SEQ ID NO: 346928 - RNA, 31 nt, Human
cacccucagagagucggggcggagugagggu

SEQ ID NO: 346929 - RNA, 32 nt, Human
cacccucagcacugaccacugugauggggacc

SEQ ID NO: 346930 - RNA, 32 nt, Human
cacccucagguaggccccaguauguuauuccu

SEQ ID NO: 346931 - RNA, 32 nt, Human
cacccucaguagcugggauuauuggcaugcac

SEQ ID NO: 346932 - RNA, 32 nt, Human
cacccucaucuuugacguggagcugcucaacu

SEQ ID NO: 346933 - RNA, 32 nt, Human
cacccucaugcaccgacccaacccaggccugg

SEQ ID NO: 346934 - RNA, 32 nt, Human
cacccuccaagccugcaccucuuaguccagca

SEQ ID NO: 346935 - RNA, 32 nt, Human
cacccuccacacaccagccucugcaaccagac

SEQ ID NO: 346936 - RNA, 23 nt, Human
cacccuccacuucccaacccaga

SEQ ID NO: 346937 - RNA, 32 nt, Human
cacccuccagccagccccucacaugcccuagg

SEQ ID NO: 346938 - RNA, 32 nt, Human
cacccuccagccugccuuaguacugcggcaag

SEQ ID NO: 346939 - RNA, 32 nt, Human
cacccuccagccugggcaacguaguaaaaccu

SEQ ID NO: 346940 - RNA, 22 nt, Human
cacccuccaggccaugcccucu

SEQ ID NO: 346941 - RNA, 32 nt, Human
cacccuccaugugauccagagaacagcaacuc

SEQ ID NO: 346942 - RNA, 32 nt, Human
cacccuccauuccuccuccccugggccucucu

SEQ ID NO: 346943 - RNA, 32 nt, Human
cacccucccacaccucccugaacuuccaucug

SEQ ID NO: 346944 - RNA, 32 nt, Human
cacccucccaucaucugcuucccccaaggccu

SEQ ID NO: 346945 - RNA, 20 nt, Human
cacccuccccaaguccacca

SEQ ID NO: 346946 - RNA, 15 nt, Human
cacccuccccacuga

SEQ ID NO: 346947 - RNA, 15 nt, Human
cacccuccccauuaa

SEQ ID NO: 346948 - RNA, 19 nt, Human
cacccucccccacuugcca

SEQ ID NO: 346949 - RNA, 22 nt, Human
cacccuccccccagucaccuca

SEQ ID NO: 346950 - RNA, 32 nt, Human
cacccuccccgugcugcuguguucugcuccuc

SEQ ID NO: 346951 - RNA, 32 nt, Human
cacccuccccuccccuccccuccccucccccg

SEQ ID NO: 346952 - RNA, 32 nt, Human
cacccuccccuccccuccccuuccucccuccc

SEQ ID NO: 346953 - RNA, 23 nt, Human
cacccuccccucccgucuacuca

SEQ ID NO: 346954 - RNA, 24 nt, Human
cacccuccccuccucuccuccuca

SEQ ID NO: 346955 - RNA, 32 nt, Human
cacccuccccuccugacccuccuacgaggcuu

SEQ ID NO: 346956 - RNA, 22 nt, Human
cacccuccccugucuucucuca

SEQ ID NO: 346957 - RNA, 32 nt, Human
cacccuccccugucuucucucaaagggaagcu

SEQ ID NO: 346958 - RNA, 32 nt, Human
cacccucccggcaucugucaccagugauccgu

SEQ ID NO: 346959 - RNA, 32 nt, Human
cacccucccgggagcugaggcuggggcucaug

SEQ ID NO: 346960 - RNA, 32 nt, Human
cacccucccgucccugccacugggugaggaca

SEQ ID NO: 346961 - RNA, 32 nt, Human
cacccucccuccacuccucucaacugccucag

SEQ ID NO: 346962 - RNA, 32 nt, Human
cacccucccuccagagccaccaguguuagagc

SEQ ID NO: 346963 - RNA, 21 nt, Human
cacccucccuggcucugcuca

SEQ ID NO: 346964 - RNA, 32 nt, Human
cacccucccugggccuuggaaucccccaaggc

SEQ ID NO: 346965 - RNA, 23 nt, Human
cacccucccuuagcucugacuca

SEQ ID NO: 346966 - RNA, 32 nt, Human
cacccucccuuuccuuuuccccucuucuaccc

SEQ ID NO: 346967 - RNA, 32 nt, Human
cacccuccggacacaugggccagcugccugug

SEQ ID NO: 346968 - RNA, 18 nt, Human
cacccuccuccacccucu

SEQ ID NO: 346969 - RNA, 32 nt, Human
cacccuccuccacggcucuggccacacccuca

SEQ ID NO: 346970 - RNA, 32 nt, Human
cacccuccuccaggaaccuccacaucuccaaa

SEQ ID NO: 346971 - RNA, 32 nt, Human
cacccuccuccaggaagcccccuucauggucu

SEQ ID NO: 346972 - RNA, 32 nt, Human
cacccuccuccaggacaccacuagguggugcu

SEQ ID NO: 346973 - RNA, 21 nt, Human
cacccuccucccaccuucuca

SEQ ID NO: 346974 - RNA, 32 nt, Human
cacccuccucccccauggagguuuccaggggu

SEQ ID NO: 346975 - RNA, 32 nt, Human
cacccuccucggccuccucucucccuccuccc

SEQ ID NO: 346976 - RNA, 32 nt, Human
cacccuccucucacccuccacccuccaggaga

SEQ ID NO: 346977 - RNA, 32 nt, Human
cacccuccugaggaccuccccaccccagugua

SEQ ID NO: 346978 - RNA, 32 nt, Human
cacccuccuuacccugcccccuugucuuguau

SEQ ID NO: 346979 - RNA, 32 nt, Human
cacccuccuuuggaccaugcagucagaggggc

SEQ ID NO: 346980 - RNA, 32 nt, Human
cacccucgccaagcuccaggguaccugccccu

SEQ ID NO: 346981 - RNA, 32 nt, Human
cacccucgcuuaucuguagauucaaagcgaug

SEQ ID NO: 346982 - RNA, 32 nt, Human
cacccucggacuccugcccuccucggccuccc

SEQ ID NO: 346983 - RNA, 32 nt, Human
cacccucuacacggcuccacccugccauggcc

SEQ ID NO: 346984 - RNA, 32 nt, Human
cacccucuacagccuuccucaggccccugucu

SEQ ID NO: 346985 - RNA, 32 nt, Human
cacccucuauauggaaauguggucaaaauacu

SEQ ID NO: 346986 - RNA, 32 nt, Human
cacccucucaagggucuuuccagcucuagguc

SEQ ID NO: 346987 - RNA, 32 nt, Human
cacccucuccaccccuaauccccaugcugcug

SEQ ID NO: 346988 - RNA, 32 nt, Human
cacccucuccaucaccugcucugcucuuacaa

SEQ ID NO: 346989 - RNA, 32 nt, Human
cacccucuccaucaccugcucugcucuuauaa

SEQ ID NO: 346990 - RNA, 32 nt, Human
cacccucucccaggacccaucacgccugugca

SEQ ID NO: 346991 - RNA, 32 nt, Human
cacccucucccaugguauuagcagagcauuuu

SEQ ID NO: 346992 - RNA, 32 nt, Human
cacccucucccccaggaaacagugccuaagga

SEQ ID NO: 346993 - RNA, 32 nt, Human
cacccucuccccuuguccacugcugccgccuc

SEQ ID NO: 346994 - RNA, 19 nt, Human
cacccucuccuugcuuuca

SEQ ID NO: 346995 - RNA, 32 nt, Human
cacccucucucccucaccccucucucugggau

SEQ ID NO: 346996 - RNA, 32 nt, Human
cacccucugcacaccuuuaacuggaggacuga

SEQ ID NO: 346997 - RNA, 32 nt, Human
cacccucugcagccccacuccugggccuucuu

SEQ ID NO: 346998 - RNA, 32 nt, Human
cacccucugccucacucccaaugucuccuuug

SEQ ID NO: 346999 - RNA, 32 nt, Human
cacccucugcugcuucagcaucuccgccugga

SEQ ID NO: 347000 - RNA, 20 nt, Human
cacccucugcuuccuggcca

SEQ ID NO: 347001 - RNA, 32 nt, Human
cacccucugcuugaacuuuuuccaaauaaauu

SEQ ID NO: 347002 - RNA, 22 nt, Human
cacccucuggugccucuacuca

SEQ ID NO: 347003 - RNA, 32 nt, Human
cacccucugucucuccugccuucugcuuauuc

SEQ ID NO: 347004 - RNA, 18 nt, Human
cacccucugugagccccu

SEQ ID NO: 347005 - RNA, 32 nt, Human
cacccucuuagcagcccuccccaggaaaagug

SEQ ID NO: 347006 - RNA, 32 nt, Human
cacccucuucgccugguacagcccucacagcu

SEQ ID NO: 347007 - RNA, 32 nt, Human
cacccucuucucucuucucuucucccugcccc

SEQ ID NO: 347008 - RNA, 32 nt, Human
cacccucuugucuucagggaauucagaggauu

SEQ ID NO: 347009 - RNA, 32 nt, Human
cacccucuuucuguuggcuccaccuccagccu

SEQ ID NO: 347010 - RNA, 23 nt, Human
cacccucuuuucccuucccaaag

SEQ ID NO: 347011 - RNA, 32 nt, Human
cacccugaacaacgagccuuuucacccuucua

SEQ ID NO: 347012 - RNA, 32 nt, Human
cacccugaacagcucagagggaggagccagac

SEQ ID NO: 347013 - RNA, 32 nt, Human
cacccugaagaugacuuccugagccagccccc

SEQ ID NO: 347014 - RNA, 32 nt, Human
cacccugaauccagcuuccugcuaugaaugaa

SEQ ID NO: 347015 - RNA, 32 nt, Human
cacccugaccaacaguccagccaucccauugg

SEQ ID NO: 347016 - RNA, 32 nt, Human
cacccugaccaacauagagaaaccccgucucc

SEQ ID NO: 347017 - RNA, 32 nt, Human
cacccugaccaacaugaaaccccgucucuacu

SEQ ID NO: 347018 - RNA, 32 nt, Human
cacccugaccaagguggugaaaccccgucucu

SEQ ID NO: 347019 - RNA, 32 nt, Human
cacccugacuaacauggagagacccugucucu

SEQ ID NO: 347020 - RNA, 32 nt, Human
cacccugacuccugucacugucuccaucccca

SEQ ID NO: 347021 - RNA, 32 nt, Human
cacccugagaaaagguccuagcuggagucagu

SEQ ID NO: 347022 - RNA, 32 nt, Human
cacccugagaauucugggagccagucugccau

SEQ ID NO: 347023 - RNA, 32 nt, Human
cacccugagauguacagaccaauacuggccau

SEQ ID NO: 347024 - RNA, 20 nt, Human
cacccugagcuccggugcuc

SEQ ID NO: 347025 - RNA, 22 nt, Human
cacccugagcugaggagcacag

SEQ ID NO: 347026 - RNA, 32 nt, Human
cacccugaggacccuggggcucaguggaggca

SEQ ID NO: 347027 - RNA, 32 nt, Human
cacccugagguccugcauuucucagucggugu

SEQ ID NO: 347028 - RNA, 32 nt, Human
cacccugaucaaaacagagaaaccccaucacu

SEQ ID NO: 347029 - RNA, 32 nt, Human
cacccugaucaaaacagagaaaccccaucucu

SEQ ID NO: 347030 - RNA, 32 nt, Human
cacccugaucaaaacauagaaaccccaucucu

SEQ ID NO: 347031 - RNA, 32 nt, Human
cacccugaugauggcccuguuggccugucagc

SEQ ID NO: 347032 - RNA, 19 nt, Human
cacccugauggccagcaga

SEQ ID NO: 347033 - RNA, 32 nt, Human
cacccugcaaagcacccuuccgaaaaucaaca

SEQ ID NO: 347034 - RNA, 32 nt, Human
cacccugcaagccugaagcuggggagcccugc

SEQ ID NO: 347035 - RNA, 32 nt, Human
cacccugcaccacuccuugucuacaagauccu

SEQ ID NO: 347036 - RNA, 32 nt, Human
cacccugcaccaggaaggaacucugcguccga

SEQ ID NO: 347037 - RNA, 32 nt, Human
cacccugcacuacccuguucuguaguuauucu

SEQ ID NO: 347038 - RNA, 32 nt, Human
cacccugcacucccucccuugccuguagaugu

SEQ ID NO: 347039 - RNA, 32 nt, Human
cacccugcagagcuauggugagguguggauaa

SEQ ID NO: 347040 - RNA, 32 nt, Human
cacccugcagcaucugcccacgaacagaugcc

SEQ ID NO: 347041 - RNA, 32 nt, Human
cacccugcagccaccagcacugccuggcucca

SEQ ID NO: 347042 - RNA, 32 nt, Human
cacccugcagccgcugccuccugggccccggg

SEQ ID NO: 347043 - RNA, 32 nt, Human
cacccugccagcugcagcagguccugggccug

SEQ ID NO: 347044 - RNA, 32 nt, Human
cacccugccaugguggcaguccugccuuacac

SEQ ID NO: 347045 - RNA, 22 nt, Human
cacccugccccaagggcaagca

SEQ ID NO: 347046 - RNA, 22 nt, Human
cacccugccccacagggaaugg

SEQ ID NO: 347047 - RNA, 22 nt, Human
cacccugccccagccugaggag

SEQ ID NO: 347048 - RNA, 24 nt, Human
cacccugcccgccucugccugcca

SEQ ID NO: 347049 - RNA, 21 nt, Human
cacccugcccggagccuggca

SEQ ID NO: 347050 - RNA, 32 nt, Human
cacccugcccuccuccccagccuggaaucggg

SEQ ID NO: 347051 - RNA, 25 nt, Human
cacccugcccugccugcaguugagg

SEQ ID NO: 347052 - RNA, 18 nt, Human
cacccugccuacaaggag

SEQ ID NO: 347053 - RNA, 19 nt, Human
cacccugccucgugggugg

SEQ ID NO: 347054 - RNA, 22 nt, Human
cacccugccugacuccaaggag

SEQ ID NO: 347055 - RNA, 17 nt, Human
cacccugccugccauca

SEQ ID NO: 347056 - RNA, 32 nt, Human
cacccugccugccuccccaacaccguggaauc

SEQ ID NO: 347057 - RNA, 20 nt, Human
cacccugccuucugaagaag

SEQ ID NO: 347058 - RNA, 21 nt, Human
cacccugccuugacaguaggu

SEQ ID NO: 347059 - RNA, 24 nt, Human
cacccugccuugucuccaggaggu

SEQ ID NO: 347060 - RNA, 18 nt, Human
cacccugccuugucuggg

SEQ ID NO: 347061 - RNA, 20 nt, Human
cacccugccuuuccacagga

SEQ ID NO: 347062 - RNA, 20 nt, Human
cacccugcuagccugccugg

SEQ ID NO: 347063 - RNA, 32 nt, Human
cacccugcucacugcuggcaucaccugagccu

SEQ ID NO: 347064 - RNA, 32 nt, Human
cacccugcugcaggaacccugggccauggcgg

SEQ ID NO: 347065 - RNA, 20 nt, Human
cacccugcuggccaaggagg

SEQ ID NO: 347066 - RNA, 32 nt, Human
cacccugcuguccaguccccagccuggcccca

SEQ ID NO: 347067 - RNA, 32 nt, Human
cacccuggaccaacagggagagcaagaaggga

SEQ ID NO: 347068 - RNA, 32 nt, Human
cacccuggacucaguguugcugggaaacaggg

SEQ ID NO: 347069 - RNA, 22 nt, Human
cacccuggagaguccaaggagg

SEQ ID NO: 347070 - RNA, 32 nt, Human
cacccuggagccaagggucuuucacaucaccu

SEQ ID NO: 347071 - RNA, 32 nt, Human
cacccuggagugagccccaggccaggaggcug

SEQ ID NO: 347072 - RNA, 32 nt, Human
cacccuggauccugaggcgccgagcuugaggg

SEQ ID NO: 347073 - RNA, 32 nt, Human
cacccuggcagcaucccaccuccugaguccuc

SEQ ID NO: 347074 - RNA, 32 nt, Human
cacccuggcagggccucaagggccaaggcugc

SEQ ID NO: 347075 - RNA, 32 nt, Human
cacccuggccaacauggcaaaaccccaucucc

SEQ ID NO: 347076 - RNA, 32 nt, Human
cacccuggccaacauggugaaaccccauaucu

SEQ ID NO: 347077 - RNA, 32 nt, Human
cacccuggccaacauggugaaaccccaucucu

SEQ ID NO: 347078 - RNA, 32 nt, Human
cacccuggccaacauggugaaaccccgucucu

SEQ ID NO: 347079 - RNA, 32 nt, Human
cacccuggccaacauggugaaaccccgucugu

SEQ ID NO: 347080 - RNA, 32 nt, Human
cacccuggccaacauggugaaacccugucucu

SEQ ID NO: 347081 - RNA, 32 nt, Human
cacccuggccaacauggugaaaccuugucucu

SEQ ID NO: 347082 - RNA, 32 nt, Human
cacccuggccaacauggugacacccugucucu

SEQ ID NO: 347083 - RNA, 32 nt, Human
cacccuggccaacaugguuaaaccccaucucu

SEQ ID NO: 347084 - RNA, 32 nt, Human
cacccuggccaaccuggugaaaccccgucucu

SEQ ID NO: 347085 - RNA, 32 nt, Human
cacccuggccaacguggugaaaccccgucucu

SEQ ID NO: 347086 - RNA, 32 nt, Human
cacccuggccaauauggugaaaccccaucucu

SEQ ID NO: 347087 - RNA, 32 nt, Human
cacccuggccagcacccagcuuagugcuggga

SEQ ID NO: 347088 - RNA, 32 nt, Human
cacccuggccagucccacuuccuggauaauuc

SEQ ID NO: 347089 - RNA, 32 nt, Human
cacccuggccuuccuuuccucuuuccuccuca

SEQ ID NO: 347090 - RNA, 32 nt, Human
cacccuggcuaacacggugaaaccccaucucu

SEQ ID NO: 347091 - RNA, 32 nt, Human
cacccuggcuaacacggugaaaccccgucucu

SEQ ID NO: 347092 - RNA, 17 nt, Human
cacccuggcugccauca

SEQ ID NO: 347093 - RNA, 32 nt, Human
cacccuggcuguggcugccuccuucauccaag

SEQ ID NO: 347094 - RNA, 32 nt, Human
cacccuggcuuccaucaugagugcagugucau

SEQ ID NO: 347095 - RNA, 32 nt, Human
cacccugggaacuguggaaaaaguaggagagg

SEQ ID NO: 347096 - RNA, 32 nt, Human
cacccugggaauuggcagcauguggaggaacu

SEQ ID NO: 347097 - RNA, 32 nt, Human
cacccugggaggccgaggcagguggaucacuu

SEQ ID NO: 347098 - RNA, 32 nt, Human
cacccugggaugucuguguaccucugucccua

SEQ ID NO: 347099 - RNA, 21 nt, Human
cacccugggcaacagagcaag

SEQ ID NO: 347100 - RNA, 32 nt, Human
cacccugggcaacauggugaaaccccuucucu

SEQ ID NO: 347101 - RNA, 32 nt, Human
cacccugggcagagagaugcagugggugcggg

SEQ ID NO: 347102 - RNA, 32 nt, Human
cacccugggcccugggcuggaaucaggaauau

SEQ ID NO: 347103 - RNA, 32 nt, Human
cacccugggccuggcccacucuuugcagggcc

SEQ ID NO: 347104 - RNA, 32 nt, Human
cacccugggcggggagggcugaggucagggag

SEQ ID NO: 347105 - RNA, 32 nt, Human
cacccugggcguggcccuggucuguggugucc

SEQ ID NO: 347106 - RNA, 32 nt, Human
cacccugggcuccacucugcagccucugugug

SEQ ID NO: 347107 - RNA, 32 nt, Human
cacccuggggcaacaugaugaaaucccaucuc

SEQ ID NO: 347108 - RNA, 32 nt, Human
cacccuggggcagaggagggugcacuggcccu

SEQ ID NO: 347109 - RNA, 32 nt, Human
cacccuggggcuaggaaauccagggugguggu

SEQ ID NO: 347110 - RNA, 32 nt, Human
cacccuggggcugagagggcccugcaggacag

SEQ ID NO: 347111 - RNA, 32 nt, Human
cacccugggugaggccuggggguuuccgaaaa

SEQ ID NO: 347112 - RNA, 18 nt, Human
cacccuggguugccacca

SEQ ID NO: 347113 - RNA, 32 nt, Human
cacccuggucuuucaggcuccaaccaucaaca

SEQ ID NO: 347114 - RNA, 32 nt, Human
cacccuguacucuccagccaccuuaccuggau

SEQ ID NO: 347115 - RNA, 19 nt, Human
cacccuguagucuuucaca

SEQ ID NO: 347116 - RNA, 32 nt, Human
cacccugucacccaggcuggaaugcaauggca

SEQ ID NO: 347117 - RNA, 32 nt, Human
cacccuguccccauuccaaggggccagcagca

SEQ ID NO: 347118 - RNA, 32 nt, Human
cacccuguccuggaaagauugggagggggcca

SEQ ID NO: 347119 - RNA, 32 nt, Human
cacccugucgcccaggcuggagugcaaugccg

SEQ ID NO: 347120 - RNA, 32 nt, Human
cacccugucuucacccagcagcuccaguuuuc

SEQ ID NO: 347121 - RNA, 32 nt, Human
cacccugugcaggaugucaaagagcagcugca

SEQ ID NO: 347122 - RNA, 32 nt, Human
cacccugugcugcugaggugcguagcugcaca

SEQ ID NO: 347123 - RNA, 20 nt, Human
cacccugugggaccuggccu

SEQ ID NO: 347124 - RNA, 32 nt, Human
cacccuguugccaggcuggaaugcaguggcgc

SEQ ID NO: 347125 - RNA, 32 nt, Human
cacccuguugcccaggcuacagugcaauggca

SEQ ID NO: 347126 - RNA, 32 nt, Human
cacccuguugcccaggcuggaauacaguggca

SEQ ID NO: 347127 - RNA, 32 nt, Human
cacccuguugcccaggcuggagugcaauggcg

SEQ ID NO: 347128 - RNA, 32 nt, Human
cacccuguugcccaggcuggagugcaauggug

SEQ ID NO: 347129 - RNA, 32 nt, Human
cacccuguuggccaggcuggagugcaguaagu

SEQ ID NO: 347130 - RNA, 32 nt, Human
cacccuguuggccaggcuggucucaaauuccu

SEQ ID NO: 347131 - RNA, 32 nt, Human
cacccuguuggccaggcuggucucgaacuccu

SEQ ID NO: 347132 - RNA, 32 nt, Human
cacccuuaucaccccucacugccuugugggaa

SEQ ID NO: 347133 - RNA, 32 nt, Human
cacccuuauguuacagacggggagacuggggc

SEQ ID NO: 347134 - RNA, 32 nt, Human
cacucauuuccccaguugguguuuccaacaaa

SEQ ID NO: 347135 - RNA, 32 nt, Human
cacucauuugauugugaaaagacuugaauucu

SEQ ID NO: 347136 - RNA, 32 nt, Human
cacucauuuuuccuggaccucagucuaucuca

SEQ ID NO: 347137 - RNA, 32 nt, Human
cacuccaacaguucuggccuccuggccuucuc

SEQ ID NO: 347138 - RNA, 32 nt, Human
cacuccaaccuaggugacagagcaagacccug

SEQ ID NO: 347139 - RNA, 32 nt, Human
cacuccaaccuggacaacagagcgagacucca

SEQ ID NO: 347140 - RNA, 32 nt, Human
cacuccaaccuggacgacagagcaagacucca

SEQ ID NO: 347141 - RNA, 32 nt, Human
cacuccaaccugggcgacagagcaagacucca

SEQ ID NO: 347142 - RNA, 32 nt, Human
cacuccaaccugggugacaagagugaaacuga

SEQ ID NO: 347143 - RNA, 22 nt, Human
cacuccaaccugggugacagag

SEQ ID NO: 347144 - RNA, 32 nt, Human
cacuccaaccugggugacagagcgaaacucca

SEQ ID NO: 347145 - RNA, 32 nt, Human
cacuccaaccugggugacagagcgagacucca

SEQ ID NO: 347146 - RNA, 32 nt, Human
cacuccaaccugggugacagagcgagacuccg

SEQ ID NO: 347147 - RNA, 32 nt, Human
cacuccaaccugggugacagagugagacccug

SEQ ID NO: 347148 - RNA, 32 nt, Human
cacuccaaccugggugacagagugagacucca

SEQ ID NO: 347149 - RNA, 32 nt, Human
cacuccaaccugggugacagagugagauucca

SEQ ID NO: 347150 - RNA, 32 nt, Human
cacuccaaccugggugacagagugagugagac

SEQ ID NO: 347151 - RNA, 32 nt, Human
cacuccaaccugggugacgagugagacuccau

SEQ ID NO: 347152 - RNA, 32 nt, Human
cacuccaaccugggugagagagcgagacccug

SEQ ID NO: 347153 - RNA, 32 nt, Human
cacuccaaccugggugauggagcaagacucca

SEQ ID NO: 347154 - RNA, 32 nt, Human
cacuccaagccagcucaagaagcaaagcaggc

SEQ ID NO: 347155 - RNA, 32 nt, Human
cacuccaagccugagcauccacacaauuccag

SEQ ID NO: 347156 - RNA, 32 nt, Human
cacuccaagccuggccccaccagugcuguuug

SEQ ID NO: 347157 - RNA, 32 nt, Human
cacuccaaggacagacacagugccucaccugu

SEQ ID NO: 347158 - RNA, 32 nt, Human
cacuccaaggaucagaaguauggaauuuucug

SEQ ID NO: 347159 - RNA, 31 nt, Human
cacuccaaguuucagcaguuuuagcgccacc

SEQ ID NO: 347160 - RNA, 32 nt, Human
cacuccaaucugggugaaagaccgagacuccg

SEQ ID NO: 347161 - RNA, 32 nt, Human
cacuccaaucugggugacagaauaagaccccg

SEQ ID NO: 347162 - RNA, 32 nt, Human
cacuccacaaaaacauuuaauuuauggauccu

SEQ ID NO: 347163 - RNA, 32 nt, Human
cacuccacacacacccuuccaaccuccuccac

SEQ ID NO: 347164 - RNA, 22 nt, Human
cacuccacacucuugagucucu

SEQ ID NO: 347165 - RNA, 32 nt, Human
cacuccacaggcucuuuggcacagcagggcuc

SEQ ID NO: 347166 - RNA, 32 nt, Human
cacuccacccaccaguuccucagucagguacu

SEQ ID NO: 347167 - RNA, 17 nt, Human
cacuccacccccuucca

SEQ ID NO: 347168 - RNA, 32 nt, Human
cacuccacccugggcgacagagcaagauucua

SEQ ID NO: 347169 - RNA, 32 nt, Human
cacuccacccugggugacagagugaagacucc

SEQ ID NO: 347170 - RNA, 20 nt, Human
cacuccacuaagcaacuggc

SEQ ID NO: 347171 - RNA, 32 nt, Human
cacuccacuacccggguauacuccaacucaga

SEQ ID NO: 347172 - RNA, 21 nt, Human
cacuccacuccagccugggca

SEQ ID NO: 347173 - RNA, 32 nt, Human
cacuccacuccccucguucugucacuuugaac

SEQ ID NO: 347174 - RNA, 18 nt, Human
cacuccacucugcuucca

SEQ ID NO: 347175 - RNA, 32 nt, Human
cacuccacugcacccaguguggccguacaccu

SEQ ID NO: 347176 - RNA, 32 nt, Human
cacuccacugcacuccagccugggcaacagag

SEQ ID NO: 347177 - RNA, 32 nt, Human
cacuccacugcacuccagccugggcgacagaa

SEQ ID NO: 347178 - RNA, 32 nt, Human
cacuccacugcacuccagccugggugacagac

SEQ ID NO: 347179 - RNA, 21 nt, Human
cacuccagaaacacccugaca

SEQ ID NO: 347180 - RNA, 21 nt, Human
cacuccagaaauguuuguuga

SEQ ID NO: 347181 - RNA, 32 nt, Human
cacuccagacaccaggauaaacuccugauggg

SEQ ID NO: 347182 - RNA, 21 nt, Human
cacuccagacgucagccggca

SEQ ID NO: 347183 - RNA, 32 nt, Human
cacuccagacugggugacacagcgagacuuca

SEQ ID NO: 347184 - RNA, 32 nt, Human
cacuccagacugguguggccacccuugucuuc

SEQ ID NO: 347185 - RNA, 32 nt, Human
cacuccagacuuggugacagagcaagacucca

SEQ ID NO: 347186 - RNA, 32 nt, Human
cacuccagaggaagaaucaaugccgugggugg

SEQ ID NO: 347187 - RNA, 32 nt, Human
cacuccagcacuccagccugggugacagagca

SEQ ID NO: 347188 - RNA, 32 nt, Human
cacuccagcaugcaugacagagugagacccug

SEQ ID NO: 347189 - RNA, 32 nt, Human
cacuccagcaugggugacagagugagauccug

SEQ ID NO: 347190 - RNA, 23 nt, Human
cacuccagccaaagcaacaagag

SEQ ID NO: 347191 - RNA, 32 nt, Human
cacuccagccaaggacaaaaugcucacaggag

SEQ ID NO: 347192 - RNA, 32 nt, Human
cacuccagccacuaaagccagaaaguugaaag

SEQ ID NO: 347193 - RNA, 32 nt, Human
cacuccagccagagugacagagcaagacucca

SEQ ID NO: 347194 - RNA, 21 nt, Human
cacuccagcccacuuucugcc

SEQ ID NO: 347195 - RNA, 32 nt, Human
cacuccagcccaggcgagagagcgagagucug

SEQ ID NO: 347196 - RNA, 29 nt, Human
cacuccagcccaggcggcagugagagacu

SEQ ID NO: 347197 - RNA, 32 nt, Human
cacuccagcccaggugacagagcaagacucca

SEQ ID NO: 347198 - RNA, 32 nt, Human
cacuccagcccaggugacagagcgagacucca

SEQ ID NO: 347199 - RNA, 32 nt, Human
cacuccagcccaggugacagagggagacucuc

SEQ ID NO: 347200 - RNA, 32 nt, Human
cacuccagcccaggugacagagugagacucug

SEQ ID NO: 347201 - RNA, 32 nt, Human
cacuccagcccaggugacagugugagacucca

SEQ ID NO: 347202 - RNA, 32 nt, Human
cacuccagccccggcucaguucagggaaaugc

SEQ ID NO: 347203 - RNA, 32 nt, Human
cacuccagcccgagugacagaaugaggcugua

SEQ ID NO: 347204 - RNA, 32 nt, Human
cacuccagcccggaugacagagcaagacucug

SEQ ID NO: 347205 - RNA, 22 nt, Human
cacuccagcccgggcgacagag

SEQ ID NO: 347206 - RNA, 32 nt, Human
cacuccagcccgggcgacagagcaagacucug

SEQ ID NO: 347207 - RNA, 32 nt, Human
cacuccagcccgggcgacagagcgagacucca

SEQ ID NO: 347208 - RNA, 32 nt, Human
cacuccagcccgggcgacagagcgagacucug

SEQ ID NO: 347209 - RNA, 32 nt, Human
cacuccagcccgggugacagagcaagacuccg

SEQ ID NO: 347210 - RNA, 32 nt, Human
cacuccagcccgggugacagagcgagacucua

SEQ ID NO: 347211 - RNA, 32 nt, Human
cacuccagcccgggugacagagcgagacucug

SEQ ID NO: 347212 - RNA, 32 nt, Human
cacuccagccggggugacagaagagaccuugu

SEQ ID NO: 347213 - RNA, 32 nt, Human
cacuccagccggggugacagagugagacuccg

SEQ ID NO: 347214 - RNA, 32 nt, Human
cacuccagccuagacgacagagcaagacuaug

SEQ ID NO: 347215 - RNA, 32 nt, Human
cacuccagccuaggcaaaaagagcaagacucc

SEQ ID NO: 347216 - RNA, 22 nt, Human
cacuccagccuaggcaacagag

SEQ ID NO: 347217 - RNA, 22 nt, Human
cacuccagccuaggcgacagag

SEQ ID NO: 347218 - RNA, 32 nt, Human
cacuccagccuaggcgacagagcgagacucug

SEQ ID NO: 347219 - RNA, 32 nt, Human
cacuccagccuaggugacagagcaagacucug

SEQ ID NO: 347220 - RNA, 32 nt, Human
cacuccagccuaggugacagagggagacucug

SEQ ID NO: 347221 - RNA, 32 nt, Human
cacuccagccuaggugacagagugagacccug

SEQ ID NO: 347222 - RNA, 32 nt, Human
cacuccagccuaggugacagagugagacucca

SEQ ID NO: 347223 - RNA, 32 nt, Human
cacuccagccuaggugacagagugagacuccg

SEQ ID NO: 347224 - RNA, 32 nt, Human
cacuccagccuaggugacagggcaagaaccug

SEQ ID NO: 347225 - RNA, 32 nt, Human
cacuccagccucggugacagagcaagacucca

SEQ ID NO: 347226 - RNA, 32 nt, Human
cacuccagccucggugacagagcaagacuguu

SEQ ID NO: 347227 - RNA, 22 nt, Human
cacuccagccugagagacagaa

SEQ ID NO: 347228 - RNA, 22 nt, Human
cacuccagccugagcaacagag

SEQ ID NO: 347229 - RNA, 32 nt, Human
cacuccagccugagcaacagagcgagacccug

SEQ ID NO: 347230 - RNA, 32 nt, Human
cacuccagccugagcacagagcaagacucuua

SEQ ID NO: 347231 - RNA, 22 nt, Human
cacuccagccugagcagcagag

SEQ ID NO: 347232 - RNA, 22 nt, Human
cacuccagccugagcgacagag

SEQ ID NO: 347233 - RNA, 32 nt, Human
cacuccagccugagcgacagagcaagacuccg

SEQ ID NO: 347234 - RNA, 32 nt, Human
cacuccagccugagcgacagagcgagacucug

SEQ ID NO: 347235 - RNA, 32 nt, Human
cacuccagccugagugacagaaugagaccuug

SEQ ID NO: 347236 - RNA, 32 nt, Human
cacuccagccugagugacagagagagauucaa

SEQ ID NO: 347237 - RNA, 32 nt, Human
cacuccagccugagugacagagcgagacccug

SEQ ID NO: 347238 - RNA, 32 nt, Human
cacuccagccugagugacagagcgagacucca

SEQ ID NO: 347239 - RNA, 32 nt, Human
cacuccagccugagugacagagcgagacucua

SEQ ID NO: 347240 - RNA, 32 nt, Human
cacuccagccugagugacagagcgagacucug

SEQ ID NO: 347241 - RNA, 32 nt, Human
cacuccagccugagugacagagugagacccug

SEQ ID NO: 347242 - RNA, 32 nt, Human
cacuccagccuggaaaacggagugagaguguc

SEQ ID NO: 347243 - RNA, 32 nt, Human
cacuccagccuggaagaccaaacgagacucug

SEQ ID NO: 347244 - RNA, 32 nt, Human
cacuccagccuggaaggcagagagagacuccg

SEQ ID NO: 347245 - RNA, 32 nt, Human
cacuccagccuggacaacaagagcaagacucc

SEQ ID NO: 347246 - RNA, 22 nt, Human
cacuccagccuggacaacagaa

SEQ ID NO: 347247 - RNA, 32 nt, Human
cacuccagccuggacaacagaaagagaccuug

SEQ ID NO: 347248 - RNA, 32 nt, Human
cacuccagccuggacaacagagcaagaccuuc

SEQ ID NO: 347249 - RNA, 32 nt, Human
cacuccagccuggacaacagagcaagacuccu

SEQ ID NO: 347250 - RNA, 32 nt, Human
cacuccagccuggacaacagagcgagacucca

SEQ ID NO: 347251 - RNA, 32 nt, Human
cacuccagccuggacaacagagcuagacucca

SEQ ID NO: 347252 - RNA, 32 nt, Human
cacuccagccuggacaacagagggagacucug

SEQ ID NO: 347253 - RNA, 32 nt, Human
cacuccagccuggacaacagagugagaaccug

SEQ ID NO: 347254 - RNA, 32 nt, Human
cacuccagccuggacaacagagugagacucgu

SEQ ID NO: 347255 - RNA, 32 nt, Human
cacuccagccuggacaacagagugggacucug

SEQ ID NO: 347256 - RNA, 32 nt, Human
cacuccagccuggacaacggagugagacucug

SEQ ID NO: 347257 - RNA, 32 nt, Human
cacuccagccuggacgacagagcaagacucag

SEQ ID NO: 347258 - RNA, 32 nt, Human
cacuccagccuggacgacagagcgagacucca

SEQ ID NO: 347259 - RNA, 32 nt, Human
cacuccagccuggacgacagagcgagacuccg

SEQ ID NO: 347260 - RNA, 32 nt, Human
cacuccagccuggacgacagagugagacgucc

SEQ ID NO: 347261 - RNA, 32 nt, Human
cacuccagccuggacgacagagugagauucug

SEQ ID NO: 347262 - RNA, 32 nt, Human
cacuccagccuggaggacagagcgagacucua

SEQ ID NO: 347263 - RNA, 32 nt, Human
cacuccagccuggaggccagagugagacuccg

SEQ ID NO: 347264 - RNA, 32 nt, Human
cacuccagccuggauaaaagagcaagacucca

SEQ ID NO: 347265 - RNA, 22 nt, Human
cacuccagccuggauaacagag

SEQ ID NO: 347266 - RNA, 32 nt, Human
cacuccagccuggauaacagagcgagacccug

SEQ ID NO: 347267 - RNA, 32 nt, Human
cacuccagccuggaugacaaagcaggacucug

SEQ ID NO: 347268 - RNA, 32 nt, Human
cacuccagccuggaugacaagagugaaacucc

SEQ ID NO: 347269 - RNA, 32 nt, Human
cacuccagccuggaugacagaacaagaaccug

SEQ ID NO: 347270 - RNA, 32 nt, Human
cacuccagccuggaugacagaacaagaaucug

SEQ ID NO: 347271 - RNA, 22 nt, Human
cacuccagccuggaugacagag

SEQ ID NO: 347272 - RNA, 32 nt, Human
cacuccagccuggaugacagagcaagacucug

SEQ ID NO: 347273 - RNA, 32 nt, Human
cacuccagccuggaugacagagcgagacuccg

SEQ ID NO: 347274 - RNA, 32 nt, Human
cacuccagccuggaugacagagugaaacccug

SEQ ID NO: 347275 - RNA, 32 nt, Human
cacuccagccuggaugacagagugagaccuug

SEQ ID NO: 347276 - RNA, 32 nt, Human
cacuccagccuggaugacagagugagacucca

SEQ ID NO: 347277 - RNA, 32 nt, Human
cacuccagccuggaugacagagugagacuccg

SEQ ID NO: 347278 - RNA, 32 nt, Human
cacuccagccuggaugacagagugagacuuca

SEQ ID NO: 347279 - RNA, 32 nt, Human
cacuccagccuggaugacagcgagacuccauc

SEQ ID NO: 347280 - RNA, 32 nt, Human
cacuccagccuggaugauagagcaagacccug

SEQ ID NO: 347281 - RNA, 32 nt, Human
cacuccagccuggaugauagagugagacugua

SEQ ID NO: 347282 - RNA, 32 nt, Human
cacuccagccuggcaacagagcaagacuccgu

SEQ ID NO: 347283 - RNA, 32 nt, Human
cacuccagccuggcaacagagcaaggcuccgu

SEQ ID NO: 347284 - RNA, 32 nt, Human
cacuccagccuggcaacagagcgagacuccau

SEQ ID NO: 347285 - RNA, 32 nt, Human
cacuccagccuggcaacagagugagacucugu

SEQ ID NO: 347286 - RNA, 21 nt, Human
cacuccagccuggccacagag

SEQ ID NO: 347287 - RNA, 32 nt, Human
cacuccagccuggccacagagcgagacucaga

SEQ ID NO: 347288 - RNA, 32 nt, Human
cacuccagccuggccacagagcgagacuccau

SEQ ID NO: 347289 - RNA, 32 nt, Human
cacuccagccuggccgacagagcaagauucug

SEQ ID NO: 347290 - RNA, 32 nt, Human
cacuccagccuggccugggcaacagagcaaga

SEQ ID NO: 347291 - RNA, 32 nt, Human
cacuccagccuggcgacaaagcgagacuccgu

SEQ ID NO: 347292 - RNA, 32 nt, Human
cacuccagccuggcgacaaagugagacuccgu

SEQ ID NO: 347293 - RNA, 32 nt, Human
cacuccagccuggcgacaagagcgagacuccg

SEQ ID NO: 347294 - RNA, 32 nt, Human
cacuccagccuggcgacaagagugagacucca

SEQ ID NO: 347295 - RNA, 32 nt, Human
cacuccagccuggcgacacagugagacucugu

SEQ ID NO: 347296 - RNA, 21 nt, Human
cacuccagccuggcgacagag

SEQ ID NO: 347297 - RNA, 32 nt, Human
cacuccagccuggcgacagagagagacuccau

SEQ ID NO: 347298 - RNA, 32 nt, Human
cacuccagccuggcgacagagcaagacuccau

SEQ ID NO: 347299 - RNA, 32 nt, Human
cacuccagccuggcgacagagcaagacucugu

SEQ ID NO: 347300 - RNA, 32 nt, Human
cacuccagccuggcgacagagcaagacuucgu

SEQ ID NO: 347301 - RNA, 32 nt, Human
cacuccagccuggcgacagagcgagacaccgu

SEQ ID NO: 347302 - RNA, 32 nt, Human
cacuccagccuggcgacagagcgagacucccu

SEQ ID NO: 347303 - RNA, 32 nt, Human
cacuccagccuggcgacagagcgagacuccgu

SEQ ID NO: 347304 - RNA, 32 nt, Human
cacuccagccuggcgacagagcgagacucguc

SEQ ID NO: 347305 - RNA, 32 nt, Human
cacuccagccuggcgacagagcgagacucugu

SEQ ID NO: 347306 - RNA, 32 nt, Human
cacuccagccuggcgacagagcgagacuuggu

SEQ ID NO: 347307 - RNA, 32 nt, Human
cacuccagccuggcgacagagugagacuccuu

SEQ ID NO: 347308 - RNA, 32 nt, Human
cacuccagccuggcgacagagugagacucugu

SEQ ID NO: 347309 - RNA, 32 nt, Human
cacuccagccuggcgaccgagcgggacuccgu

SEQ ID NO: 347310 - RNA, 32 nt, Human
cacuccagccuggcgacugagugagacuccau

SEQ ID NO: 347311 - RNA, 32 nt, Human
cacuccagccuggcuacagagugagauuccau

SEQ ID NO: 347312 - RNA, 32 nt, Human
cacuccagccuggcugacagagcgagacuguc

SEQ ID NO: 347313 - RNA, 32 nt, Human
cacuccagccuggcugacagagugagaaucug

SEQ ID NO: 347314 - RNA, 32 nt, Human
cacuccagccuggcugacagugagacacucca

SEQ ID NO: 347315 - RNA, 32 nt, Human
cacuccagccuggcugacagugcaagacucug

SEQ ID NO: 347316 - RNA, 22 nt, Human
cacuccagccugggaaacagag

SEQ ID NO: 347317 - RNA, 32 nt, Human
cacuccagccugggaaacagagugaggcucug

SEQ ID NO: 347318 - RNA, 32 nt, Human
cacuccagccugggaaauagagugagcaagac

SEQ ID NO: 347319 - RNA, 32 nt, Human
cacuccagccugggaagcagagugagacccug

SEQ ID NO: 347320 - RNA, 32 nt, Human
cacuccagccugggagacacagcgagacucug

SEQ ID NO: 347321 - RNA, 22 nt, Human
cacuccagccugggagacagag

SEQ ID NO: 347322 - RNA, 32 nt, Human
cacuccagccugggagacagagcaagacucag

SEQ ID NO: 347323 - RNA, 32 nt, Human
cacuccagccugggagacagagcaagacucca

SEQ ID NO: 347324 - RNA, 32 nt, Human
cacuccagccugggagacagagcaagacuccg

SEQ ID NO: 347325 - RNA, 32 nt, Human
cacuccagccugggagacagagcaagacucug

SEQ ID NO: 347326 - RNA, 32 nt, Human
cacuccagccugggagacagagccagacucca

SEQ ID NO: 347327 - RNA, 32 nt, Human
cacuccagccugggagacagagcgagacgcug

SEQ ID NO: 347328 - RNA, 32 nt, Human
cacuccagccugggagacagagcgagacucca

SEQ ID NO: 347329 - RNA, 32 nt, Human
cacuccagccugggagacagagcgagacuccg

SEQ ID NO: 347330 - RNA, 32 nt, Human
cacuccagccugggagacagagcgagacucug

SEQ ID NO: 347331 - RNA, 32 nt, Human
cacuccagccugggagacagagcgagacucuu

SEQ ID NO: 347332 - RNA, 32 nt, Human
cacuccagccugggagacagagugagacuccg

SEQ ID NO: 347333 - RNA, 32 nt, Human
cacuccagccugggagacagagugagacucug

SEQ ID NO: 347334 - RNA, 32 nt, Human
cacuccagccugggagacagagugagauacua

SEQ ID NO: 347335 - RNA, 32 nt, Human
cacuccagccugggagacagaguuagacuccg

SEQ ID NO: 347336 - RNA, 32 nt, Human
cacuccagccugggagauacagcgagacuguc

SEQ ID NO: 347337 - RNA, 32 nt, Human
cacuccagccugggcaaaaagagccagacucc

SEQ ID NO: 347338 - RNA, 32 nt, Human
cacuccagccugggcaaaaagagugagacucu

SEQ ID NO: 347339 - RNA, 32 nt, Human
cacuccagccugggcaaaagagugagacuccg

SEQ ID NO: 347340 - RNA, 32 nt, Human
cacuccagccugggcaacaaaacgagacuucg

SEQ ID NO: 347341 - RNA, 32 nt, Human
cacuccagccugggcaacaaagcaagacccug

SEQ ID NO: 347342 - RNA, 32 nt, Human
cacuccagccugggcaacaaagcgagacucca

SEQ ID NO: 347343 - RNA, 32 nt, Human
cacuccagccugggcaacaaagcuagacucca

SEQ ID NO: 347344 - RNA, 32 nt, Human
cacuccagccugggcaacaaagugagacucgg

SEQ ID NO: 347345 - RNA, 32 nt, Human
cacuccagccugggcaacaaagugagacucug

SEQ ID NO: 347346 - RNA, 32 nt, Human
cacuccagccugggcaacaaagugggacucug

SEQ ID NO: 347347 - RNA, 23 nt, Human
cacuccagccugggcaacaagag

SEQ ID NO: 347348 - RNA, 32 nt, Human
cacuccagccugggcaacaagagaagaaacuc

SEQ ID NO: 347349 - RNA, 32 nt, Human
cacuccagccugggcaacaagagagaaacucc

SEQ ID NO: 347350 - RNA, 32 nt, Human
cacuccagccugggcaacaagagagaaacucu

SEQ ID NO: 347351 - RNA, 32 nt, Human
cacuccagccugggcaacaagagagaaggucc

SEQ ID NO: 347352 - RNA, 32 nt, Human
cacuccagccugggcaacaagagcgaaacucc

SEQ ID NO: 347353 - RNA, 32 nt, Human
cacuccagccugggcaacaagagcgaaacucu

SEQ ID NO: 347354 - RNA, 32 nt, Human
cacuccagccugggcaacaagagcgagacugu

SEQ ID NO: 347355 - RNA, 32 nt, Human
cacuccagccugggcaacaagagcgaggcucc

SEQ ID NO: 347356 - RNA, 32 nt, Human
cacuccagccugggcaacaagaguaagacucu

SEQ ID NO: 347357 - RNA, 32 nt, Human
cacuccagccugggcaacaagagugagacucc

SEQ ID NO: 347358 - RNA, 32 nt, Human
cacuccagccugggcaacaagcgagacuccgu

SEQ ID NO: 347359 - RNA, 32 nt, Human
cacuccagccugggcaacaaugcgagauugca

SEQ ID NO: 347360 - RNA, 32 nt, Human
cacuccagccugggcaacacagagagacccug

SEQ ID NO: 347361 - RNA, 32 nt, Human
cacuccagccugggcaacacagcaagacccua

SEQ ID NO: 347362 - RNA, 32 nt, Human
cacuccagccugggcaacacagcaagacucug

SEQ ID NO: 347363 - RNA, 32 nt, Human
cacuccagccugggcaacacagcaagauccug

SEQ ID NO: 347364 - RNA, 32 nt, Human
cacuccagccugggcaacacagcgagacuccg

SEQ ID NO: 347365 - RNA, 32 nt, Human
cacuccagccugggcaacacagggagacucca

SEQ ID NO: 347366 - RNA, 32 nt, Human
cacuccagccugggcaacacagugagacucug

SEQ ID NO: 347367 - RNA, 22 nt, Human
cacuccagccugggcaacagaa

SEQ ID NO: 347368 - RNA, 32 nt, Human
cacuccagccugggcaacagaacaagaaccca

SEQ ID NO: 347369 - RNA, 32 nt, Human
cacuccagccugggcaacagaacaagacuccg

SEQ ID NO: 347370 - RNA, 32 nt, Human
cacuccagccugggcaacagaacaagauucug

SEQ ID NO: 347371 - RNA, 32 nt, Human
cacuccagccugggcaacagaacgagauucug

SEQ ID NO: 347372 - RNA, 32 nt, Human
cacuccagccugggcaacagaagaagacuuug

SEQ ID NO: 347373 - RNA, 32 nt, Human
cacuccagccugggcaacagaaugagacccuu

SEQ ID NO: 347374 - RNA, 32 nt, Human
cacuccagccugggcaacagacagagugagac

SEQ ID NO: 347375 - RNA, 22 nt, Human
cacuccagccugggcaacagag

SEQ ID NO: 347376 - RNA, 32 nt, Human
cacuccagccugggcaacagagagagacaguc

SEQ ID NO: 347377 - RNA, 32 nt, Human
cacuccagccugggcaacagagagagaccuug

SEQ ID NO: 347378 - RNA, 32 nt, Human
cacuccagccugggcaacagagagcgacucuc

SEQ ID NO: 347379 - RNA, 32 nt, Human
cacuccagccugggcaacagagcaagacccca

SEQ ID NO: 347380 - RNA, 32 nt, Human
cacuccagccugggcaacagagcaagaccuug

SEQ ID NO: 347381 - RNA, 32 nt, Human
cacuccagccugggcaacagagcaagacucca

SEQ ID NO: 347382 - RNA, 32 nt, Human
cacuccagccugggcaacagagcaagacuccg

SEQ ID NO: 347383 - RNA, 32 nt, Human
cacuccagccugggcaacagagcaagacucgg

SEQ ID NO: 347384 - RNA, 32 nt, Human
cacuccagccugggcaacagagcaagacucug

SEQ ID NO: 347385 - RNA, 32 nt, Human
cacuccagccugggcaacagagcaagacugcc

SEQ ID NO: 347386 - RNA, 32 nt, Human
cacuccagccugggcaacagagcaagacuguc

SEQ ID NO: 347387 - RNA, 32 nt, Human
cacuccagccugggcaacagagcaagaguccg

SEQ ID NO: 347388 - RNA, 32 nt, Human
cacuccagccugggcaacagagcaagauccug

SEQ ID NO: 347389 - RNA, 32 nt, Human
cacuccagccugggcaacagagcaaggcucug

SEQ ID NO: 347390 - RNA, 32 nt, Human
cacuccagccugggcaacagagcaaggcuguc

SEQ ID NO: 347391 - RNA, 32 nt, Human
cacuccagccugggcaacagagccagacuccg

SEQ ID NO: 347392 - RNA, 32 nt, Human
cacuccagccugggcaacagagccagacucug

SEQ ID NO: 347393 - RNA, 32 nt, Human
cacuccagccugggcaacagagccaggcccug

SEQ ID NO: 347394 - RNA, 32 nt, Human
cacuccagccugggcaacagagcgacacuccg

SEQ ID NO: 347395 - RNA, 32 nt, Human
cacuccagccugggcaacagagcgagacaguc

SEQ ID NO: 347396 - RNA, 32 nt, Human
cacuccagccugggcaacagagcgagaccauc

SEQ ID NO: 347397 - RNA, 32 nt, Human
cacuccagccugggcaacagagcgagacccug

SEQ ID NO: 347398 - RNA, 32 nt, Human
cacuccagccugggcaacagagcgagaccucu

SEQ ID NO: 347399 - RNA, 32 nt, Human
cacuccagccugggcaacagagcgagacuaca

SEQ ID NO: 347400 - RNA, 32 nt, Human
cacuccagccugggcaacagagcgagacucag

SEQ ID NO: 347401 - RNA, 32 nt, Human
cacuccagccugggcaacagagcgagacucca

SEQ ID NO: 347402 - RNA, 32 nt, Human
cacuccagccugggcaacagagcgagacuccg

SEQ ID NO: 347403 - RNA, 32 nt, Human
cacuccagccugggcaacagagcgagacuuca

SEQ ID NO: 347404 - RNA, 32 nt, Human
cacuccagccugggcaacagagcgagacuuug

SEQ ID NO: 347405 - RNA, 32 nt, Human
cacuccagccugggcaacagagcgagagucug

SEQ ID NO: 347406 - RNA, 32 nt, Human
cacuccagccugggcaacagagcgaggcucug

SEQ ID NO: 347407 - RNA, 32 nt, Human
cacuccagccugggcaacagagcgcgacugug

SEQ ID NO: 347408 - RNA, 32 nt, Human
cacuccagccugggcaacagagcgugacucuc

SEQ ID NO: 347409 - RNA, 32 nt, Human
cacuccagccugggcaacagagcuagacucug

SEQ ID NO: 347410 - RNA, 32 nt, Human
cacuccagccugggcaacagagggagacucca

SEQ ID NO: 347411 - RNA, 32 nt, Human
cacuccagccugggcaacagagggagacucug

SEQ ID NO: 347412 - RNA, 32 nt, Human
cacuccagccugggcaacagagggagcccccg

SEQ ID NO: 347413 - RNA, 32 nt, Human
cacuccagccugggcaacagaguaagaacugu

SEQ ID NO: 347414 - RNA, 32 nt, Human
cacuccagccugggcaacagaguaagacucca

SEQ ID NO: 347415 - RNA, 32 nt, Human
cacuccagccugggcaacagaguaagacuccg

SEQ ID NO: 347416 - RNA, 32 nt, Human
cacuccagccugggcaacagaguaagacucug

SEQ ID NO: 347417 - RNA, 32 nt, Human
cacuccagccugggcaacagaguaagauucca

SEQ ID NO: 347418 - RNA, 32 nt, Human
cacuccagccugggcaacagagugaaacucug

SEQ ID NO: 347419 - RNA, 32 nt, Human
cacuccagccugggcaacagagugacacucug

SEQ ID NO: 347420 - RNA, 32 nt, Human
cacuccagccugggcaacagagugagacccua

SEQ ID NO: 347421 - RNA, 32 nt, Human
cacuccagccugggcaacagagugagacccug

SEQ ID NO: 347422 - RNA, 32 nt, Human
cacuccagccugggcaacagagugagacgcug

SEQ ID NO: 347423 - RNA, 32 nt, Human
cacuccagccugggcaacagagugagacuauc

SEQ ID NO: 347424 - RNA, 32 nt, Human
cacuccagccugggcaacagagugagacucca

SEQ ID NO: 347425 - RNA, 32 nt, Human
cacuccagccugggcaacagagugagacuccc

SEQ ID NO: 347426 - RNA, 32 nt, Human
cacuccagccugggcaacagagugagacuccg

SEQ ID NO: 347427 - RNA, 32 nt, Human
cacuccagccugggcaacagagugagacucua

SEQ ID NO: 347428 - RNA, 32 nt, Human
cacuccagccugggcaacagagugagacucug

SEQ ID NO: 347429 - RNA, 32 nt, Human
cacuccagccugggcaacagagugagacugug

SEQ ID NO: 347430 - RNA, 32 nt, Human
cacuccagccugggcaacagagugagacuucg

SEQ ID NO: 347431 - RNA, 32 nt, Human
cacuccagccugggcaacagagugagauccag

SEQ ID NO: 347432 - RNA, 32 nt, Human
cacuccagccugggcaacagagugaggcccuu

SEQ ID NO: 347433 - RNA, 32 nt, Human
cacuccagccugggcaacagaguggacuccau

SEQ ID NO: 347434 - RNA, 32 nt, Human
cacuccagccugggcaacagagugggacucca

SEQ ID NO: 347435 - RNA, 32 nt, Human
cacuccagccugggcaacagaugaagacccua

SEQ ID NO: 347436 - RNA, 32 nt, Human
cacuccagccugggcaacagcagcgaaacucc

SEQ ID NO: 347437 - RNA, 32 nt, Human
cacuccagccugggcaacagcguaagacccug

SEQ ID NO: 347438 - RNA, 32 nt, Human
cacuccagccugggcaacagggcaagauuccg

SEQ ID NO: 347439 - RNA, 32 nt, Human
cacuccagccugggcaacagguaagacucugu

SEQ ID NO: 347440 - RNA, 32 nt, Human
cacuccagccugggcaacagugagacucugca

SEQ ID NO: 347441 - RNA, 32 nt, Human
cacuccagccugggcaacagugugagaccuug

SEQ ID NO: 347442 - RNA, 32 nt, Human
cacuccagccugggcaacaguguuaagacucu

SEQ ID NO: 347443 - RNA, 32 nt, Human
cacuccagccugggcaacauagcaagacucca

SEQ ID NO: 347444 - RNA, 32 nt, Human
cacuccagccugggcaacauagcgagaccuca

SEQ ID NO: 347445 - RNA, 32 nt, Human
cacuccagccugggcaacauagugagacccca

SEQ ID NO: 347446 - RNA, 32 nt, Human
cacuccagccugggcaaccaggugagacccug

SEQ ID NO: 347447 - RNA, 32 nt, Human
cacuccagccugggcaacgagagggaaacucu

SEQ ID NO: 347448 - RNA, 32 nt, Human
cacuccagccugggcaacgagaggggaacucc

SEQ ID NO: 347449 - RNA, 22 nt, Human
cacuccagccugggcaacggag

SEQ ID NO: 347450 - RNA, 32 nt, Human
cacuccagccugggcaacggagcaagacccug

SEQ ID NO: 347451 - RNA, 32 nt, Human
cacuccagccugggcaacggauugagacucug

SEQ ID NO: 347452 - RNA, 32 nt, Human
cacuccagccugggcaacguggugagacccug

SEQ ID NO: 347453 - RNA, 32 nt, Human
cacuccagccugggcaacugagcaagacuguc

SEQ ID NO: 347454 - RNA, 32 nt, Human
cacuccagccugggcaacugagcaagauucca

SEQ ID NO: 347455 - RNA, 32 nt, Human
cacuccagccugggcaagagaaugacacucug

SEQ ID NO: 347456 - RNA, 32 nt, Human
cacuccagccugggcaauagagcaagacucca

SEQ ID NO: 347457 - RNA, 32 nt, Human
cacuccagccugggcaauagagcaagacugca

SEQ ID NO: 347458 - RNA, 32 nt, Human
cacuccagccugggcaauagaguaagacccug

SEQ ID NO: 347459 - RNA, 32 nt, Human
cacuccagccugggcaauagagugagacuccg

SEQ ID NO: 347460 - RNA, 32 nt, Human
cacuccagccugggcaauagagugagacucug

SEQ ID NO: 347461 - RNA, 32 nt, Human
cacuccagccugggcaauagagugagauuccg

SEQ ID NO: 347462 - RNA, 32 nt, Human
cacuccagccugggcaauagagugagcccuga

SEQ ID NO: 347463 - RNA, 32 nt, Human
cacuccagccugggcaauagggcaagagucca

SEQ ID NO: 347464 - RNA, 32 nt, Human
cacuccagccugggcaauauagcaagacccca

SEQ ID NO: 347465 - RNA, 32 nt, Human
cacuccagccugggcaauggagagaggcucug

SEQ ID NO: 347466 - RNA, 32 nt, Human
cacuccagccugggcaauggagugagacuccu

SEQ ID NO: 347467 - RNA, 32 nt, Human
cacuccagccugggcaccaaugugagaaccug

SEQ ID NO: 347468 - RNA, 32 nt, Human
cacuccagccugggcaccacagcaagacuccg

SEQ ID NO: 347469 - RNA, 32 nt, Human
cacuccagccugggcaccagagcgagacuccg

SEQ ID NO: 347470 - RNA, 23 nt, Human
cacuccagccugggcaccaggaa

SEQ ID NO: 347471 - RNA, 32 nt, Human
cacuccagccugggcagcagagcgagacuccg

SEQ ID NO: 347472 - RNA, 32 nt, Human
cacuccagccugggcagcagagcgagacucug

SEQ ID NO: 347473 - RNA, 32 nt, Human
cacuccagccugggcagcagaggaagaucuug

SEQ ID NO: 347474 - RNA, 32 nt, Human
cacuccagccugggcagcagagugagacucuc

SEQ ID NO: 347475 - RNA, 32 nt, Human
cacuccagccugggcagcagagugagacuuug

SEQ ID NO: 347476 - RNA, 32 nt, Human
cacuccagccugggccacacagugagacuccg

SEQ ID NO: 347477 - RNA, 32 nt, Human
cacuccagccugggccacagaacgagacuuca

SEQ ID NO: 347478 - RNA, 32 nt, Human
cacuccagccugggccacagaaugagacucca

SEQ ID NO: 347479 - RNA, 32 nt, Human
cacuccagccugggccacagagcaagacuccg

SEQ ID NO: 347480 - RNA, 32 nt, Human
cacuccagccugggccacagagugagauucca

SEQ ID NO: 347481 - RNA, 32 nt, Human
cacuccagccugggccagaaugagacuccguc

SEQ ID NO: 347482 - RNA, 32 nt, Human
cacuccagccugggcgaaagagcgacucuguc

SEQ ID NO: 347483 - RNA, 32 nt, Human
cacuccagccugggcgaaagggcaagacucca

SEQ ID NO: 347484 - RNA, 32 nt, Human
cacuccagccugggcgaaagggugagacucca

SEQ ID NO: 347485 - RNA, 20 nt, Human
cacuccagccugggcgacaa

SEQ ID NO: 347486 - RNA, 32 nt, Human
cacuccagccugggcgacaaagcaagacuccg

SEQ ID NO: 347487 - RNA, 32 nt, Human
cacuccagccugggcgacaaagugagacucug

SEQ ID NO: 347488 - RNA, 32 nt, Human
cacuccagccugggcgacaagagcaagacucu

SEQ ID NO: 347489 - RNA, 32 nt, Human
cacuccagccugggcgacaagagcagaacucu

SEQ ID NO: 347490 - RNA, 32 nt, Human
cacuccagccugggcgacaagagcgaaacucu

SEQ ID NO: 347491 - RNA, 32 nt, Human
cacuccagccugggcgacaagagcgagacucu

SEQ ID NO: 347492 - RNA, 32 nt, Human
cacuccagccugggcgacaagagugaaacucc

SEQ ID NO: 347493 - RNA, 32 nt, Human
cacuccagccugggcgacaagagugaaacucg

SEQ ID NO: 347494 - RNA, 32 nt, Human
cacuccagccugggcgacaagagugaaacucu

SEQ ID NO: 347495 - RNA, 32 nt, Human
cacuccagccugggcgacaagagugaaauucc

SEQ ID NO: 347496 - RNA, 32 nt, Human
cacuccagccugggcgacaagcgaaacuucgu

SEQ ID NO: 347497 - RNA, 32 nt, Human
cacuccagccugggcgacacagcaagacuccg

SEQ ID NO: 347498 - RNA, 32 nt, Human
cacuccagccugggcgacacagcgagauuucc

SEQ ID NO: 347499 - RNA, 22 nt, Human
cacuccagccugggcgacagaa

SEQ ID NO: 347500 - RNA, 32 nt, Human
cacuccagccugggcgacagaacaagacuccg

SEQ ID NO: 347501 - RNA, 32 nt, Human
cacuccagccugggcgacagaacgagacccca

SEQ ID NO: 347502 - RNA, 32 nt, Human
cacuccagccugggcgacagaacgagacgcca

SEQ ID NO: 347503 - RNA, 32 nt, Human
cacuccagccugggcgacagaaugagacccug

SEQ ID NO: 347504 - RNA, 32 nt, Human
cacuccagccugggcgacagaaugagacucca

SEQ ID NO: 347505 - RNA, 32 nt, Human
cacuccagccugggcgacagaaugagacucug

SEQ ID NO: 347506 - RNA, 32 nt, Human
cacuccagccugggcgacagaccgagacuccg

SEQ ID NO: 347507 - RNA, 22 nt, Human
cacuccagccugggcgacagag

SEQ ID NO: 347508 - RNA, 32 nt, Human
cacuccagccugggcgacagagagagacucca

SEQ ID NO: 347509 - RNA, 32 nt, Human
cacuccagccugggcgacagagcaagacacug

SEQ ID NO: 347510 - RNA, 32 nt, Human
cacuccagccugggcgacagagcaagacccug

SEQ ID NO: 347511 - RNA, 32 nt, Human
cacuccagccugggcgacagagcaagacgcca

SEQ ID NO: 347512 - RNA, 32 nt, Human
cacuccagccugggcgacagagcaagacucag

SEQ ID NO: 347513 - RNA, 32 nt, Human
cacuccagccugggcgacagagcaagacucca

SEQ ID NO: 347514 - RNA, 32 nt, Human
cacuccagccugggcgacagagcaagacuccc

SEQ ID NO: 347515 - RNA, 32 nt, Human
cacuccagccugggcgacagagcaagacuccg

SEQ ID NO: 347516 - RNA, 32 nt, Human
cacuccagccugggcgacagagcaagacuccu

SEQ ID NO: 347517 - RNA, 32 nt, Human
cacuccagccugggcgacagagcaagacucgg

SEQ ID NO: 347518 - RNA, 32 nt, Human
cacuccagccugggcgacagagcaagacucuc

SEQ ID NO: 347519 - RNA, 32 nt, Human
cacuccagccugggcgacagagcaagacucug

SEQ ID NO: 347520 - RNA, 32 nt, Human
cacuccagccugggcgacagagcaagaucguu

SEQ ID NO: 347521 - RNA, 32 nt, Human
cacuccagccugggcgacagagcaagauuccg

SEQ ID NO: 347522 - RNA, 32 nt, Human
cacuccagccugggcgacagagcaaggcucug

SEQ ID NO: 347523 - RNA, 32 nt, Human
cacuccagccugggcgacagagcaggacucca

SEQ ID NO: 347524 - RNA, 32 nt, Human
cacuccagccugggcgacagagcaggacucuc

SEQ ID NO: 347525 - RNA, 32 nt, Human
cacuccagccugggcgacagagcaggacucuu

SEQ ID NO: 347526 - RNA, 32 nt, Human
cacuccagccugggcgacagagccagacccua

SEQ ID NO: 347527 - RNA, 32 nt, Human
cacuccagccugggcgacagagccagacucaa

SEQ ID NO: 347528 - RNA, 32 nt, Human
cacuccagccugggcgacagagccagacucca

SEQ ID NO: 347529 - RNA, 32 nt, Human
cacuccagccugggcgacagagccagacuccg

SEQ ID NO: 347530 - RNA, 32 nt, Human
cacuccagccugggcgacagagccagacuguc

SEQ ID NO: 347531 - RNA, 32 nt, Human
cacuccagccugggcgacagagcgaaacuccg

SEQ ID NO: 347532 - RNA, 32 nt, Human
cacuccagccugggcgacagagcgagacccca

SEQ ID NO: 347533 - RNA, 32 nt, Human
cacuccagccugggcgacagagcgagacucca

SEQ ID NO: 347534 - RNA, 32 nt, Human
cacuccagccugggcgacagagcgagacuccg

SEQ ID NO: 347535 - RNA, 32 nt, Human
cacuccagccugggcgacagagcgagacucug

SEQ ID NO: 347536 - RNA, 32 nt, Human
cacuccagccugggcgacagagcgagacuguc

SEQ ID NO: 347537 - RNA, 32 nt, Human
cacuccagccugggcgacagagcgagacuucg

SEQ ID NO: 347538 - RNA, 32 nt, Human
cacuccagccugggcgacagagcgagacuuug

SEQ ID NO: 347539 - RNA, 32 nt, Human
cacuccagccugggcgacagagcgagagucug

SEQ ID NO: 347540 - RNA, 32 nt, Human
cacuccagccugggcgacagagcgagaguuug

SEQ ID NO: 347541 - RNA, 32 nt, Human
cacuccagccugggcgacagagcgagauuccg

SEQ ID NO: 347542 - RNA, 32 nt, Human
cacuccagccugggcgacagagcgagauucug

SEQ ID NO: 347543 - RNA, 32 nt, Human
cacuccagccugggcgacagagcgauauuccg

SEQ ID NO: 347544 - RNA, 32 nt, Human
cacuccagccugggcgacagagcuagacuccg

SEQ ID NO: 347545 - RNA, 32 nt, Human
cacuccagccugggcgacagaggaagacucca

SEQ ID NO: 347546 - RNA, 32 nt, Human
cacuccagccugggcgacagagggagacacug

SEQ ID NO: 347547 - RNA, 32 nt, Human
cacuccagccugggcgacagagggagacuccg

SEQ ID NO: 347548 - RNA, 32 nt, Human
cacuccagccugggcgacagagggagacucug

SEQ ID NO: 347549 - RNA, 32 nt, Human
cacuccagccugggcgacagaguaagacugug

SEQ ID NO: 347550 - RNA, 32 nt, Human
cacuccagccugggcgacagagugacacuucu

SEQ ID NO: 347551 - RNA, 32 nt, Human
cacuccagccugggcgacagagugacccugcc

SEQ ID NO: 347552 - RNA, 32 nt, Human
cacuccagccugggcgacagagugacucuguc

SEQ ID NO: 347553 - RNA, 32 nt, Human
cacuccagccugggcgacagagugagacccug

SEQ ID NO: 347554 - RNA, 32 nt, Human
cacuccagccugggcgacagagugagacucca

SEQ ID NO: 347555 - RNA, 32 nt, Human
cacuccagccugggcgacagagugagacuccc

SEQ ID NO: 347556 - RNA, 32 nt, Human
cacuccagccugggcgacagagugagacuccg

SEQ ID NO: 347557 - RNA, 32 nt, Human
cacuccagccugggcgacagagugagacuccu

SEQ ID NO: 347558 - RNA, 32 nt, Human
cacuccagccugggcgacagagugagacucug

SEQ ID NO: 347559 - RNA, 32 nt, Human
cacuccagccugggcgacagagugagacucuu

SEQ ID NO: 347560 - RNA, 32 nt, Human
cacuccagccugggcgacagagugagacugca

SEQ ID NO: 347561 - RNA, 32 nt, Human
cacuccagccugggcgacagagugagacuuug

SEQ ID NO: 347562 - RNA, 32 nt, Human
cacuccagccugggcgacagagugaggcuccg

SEQ ID NO: 347563 - RNA, 32 nt, Human
cacuccagccugggcgacagagugggacucca

SEQ ID NO: 347564 - RNA, 32 nt, Human
cacuccagccugggcgacagcgagacuccgaa

SEQ ID NO: 347565 - RNA, 32 nt, Human
cacuccagccugggcgacagcgugagauccug

SEQ ID NO: 347566 - RNA, 32 nt, Human
cacuccagccugggcgacagggcaagacucug

SEQ ID NO: 347567 - RNA, 32 nt, Human
cacuccagccugggcgacagggugagacugug

SEQ ID NO: 347568 - RNA, 32 nt, Human
cacuccagccugggcgacaguaccagacucca

SEQ ID NO: 347569 - RNA, 32 nt, Human
cacuccagccugggcgacagugagacccuguc

SEQ ID NO: 347570 - RNA, 32 nt, Human
cacuccagccugggcgacagugagacugcuuc

SEQ ID NO: 347571 - RNA, 32 nt, Human
cacuccagccugggcgacagugagacuuuguc

SEQ ID NO: 347572 - RNA, 32 nt, Human
cacuccagccugggcgacagugcaagacucug

SEQ ID NO: 347573 - RNA, 32 nt, Human
cacuccagccugggcgacggagcgaaacuccg

SEQ ID NO: 347574 - RNA, 32 nt, Human
cacuccagccugggcgacggagcgagacucug

SEQ ID NO: 347575 - RNA, 32 nt, Human
cacuccagccugggcgacggagugagacucca

SEQ ID NO: 347576 - RNA, 32 nt, Human
cacuccagccugggcgacugagcgagacucua

SEQ ID NO: 347577 - RNA, 32 nt, Human
cacuccagccugggcgacugugagaccccguc

SEQ ID NO: 347578 - RNA, 32 nt, Human
cacuccagccugggcgagacggcaagacucca

SEQ ID NO: 347579 - RNA, 32 nt, Human
cacuccagccugggcgagagaaugagacucua

SEQ ID NO: 347580 - RNA, 32 nt, Human
cacuccagccugggcgagagagcaagacucca

SEQ ID NO: 347581 - RNA, 30 nt, Human
cacuccagccugggcgagagcgagacuccu

SEQ ID NO: 347582 - RNA, 32 nt, Human
cacuccagccugggcgauagagcaagacucug

SEQ ID NO: 347583 - RNA, 32 nt, Human
cacuccagccugggcgauagagcuagacucug

SEQ ID NO: 347584 - RNA, 32 nt, Human
cacuccagccugggcgauagagugagacucag

SEQ ID NO: 347585 - RNA, 32 nt, Human
cacuccagccugggcgauggagcaagacucca

SEQ ID NO: 347586 - RNA, 32 nt, Human
cacuccagccugggcgauggagcgagacucca

SEQ ID NO: 347587 - RNA, 32 nt, Human
cacuccagccugggcgauggagugagacucca

SEQ ID NO: 347588 - RNA, 32 nt, Human
cacuccagccugggcggcagagcaagacuccc

SEQ ID NO: 347589 - RNA, 32 nt, Human
cacuccagccugggcggcagagcaagacuccg

SEQ ID NO: 347590 - RNA, 32 nt, Human
cacuccagccugggcggcagagcaagacucug

SEQ ID NO: 347591 - RNA, 32 nt, Human
cacuccagccugggcggcagagcaagauucug

SEQ ID NO: 347592 - RNA, 32 nt, Human
cacuccagccugggcggcagagcgagacucug

SEQ ID NO: 347593 - RNA, 32 nt, Human
cacuccagccugggcggcagagugagacucug

SEQ ID NO: 347594 - RNA, 32 nt, Human
cacuccagccugggcgucagagugagaacucu

SEQ ID NO: 347595 - RNA, 32 nt, Human
cacuccagccugggcuacagagcaagacucca

SEQ ID NO: 347596 - RNA, 32 nt, Human
cacuccagccugggcuacagagcgagacacgg

SEQ ID NO: 347597 - RNA, 32 nt, Human
cacuccagccugggcuacagagcgagacucua

SEQ ID NO: 347598 - RNA, 32 nt, Human
cacuccagccugggcuacagagcgagacucug

SEQ ID NO: 347599 - RNA, 32 nt, Human
cacuccagccugggcugcagggugagguccug

SEQ ID NO: 347600 - RNA, 32 nt, Human
cacuccagccugggcuucagagcaagacucgg

SEQ ID NO: 347601 - RNA, 32 nt, Human
cacuccagccuggggaacagagcaagauucug

SEQ ID NO: 347602 - RNA, 32 nt, Human
cacuccagccuggggaacagagcgagacucca

SEQ ID NO: 347603 - RNA, 32 nt, Human
cacuccagccuggggacaaagcaagacucaau

SEQ ID NO: 347604 - RNA, 32 nt, Human
cacuccagccuggggacagagcaagacucuug

SEQ ID NO: 347605 - RNA, 32 nt, Human
cacuccagccuggggcugacagagcaagacac

SEQ ID NO: 347606 - RNA, 32 nt, Human
cacuccagccugggggaaagagcgagacuccg

SEQ ID NO: 347607 - RNA, 32 nt, Human
cacuccagccugggggacaagagugagacuua

SEQ ID NO: 347608 - RNA, 32 nt, Human
cacuccagccugggggacagaaagagacuccg

SEQ ID NO: 347609 - RNA, 32 nt, Human
cacuccagccugggggacagagcaagacccug

SEQ ID NO: 347610 - RNA, 32 nt, Human
cacuccagccugggggacagagcaagacucua

SEQ ID NO: 347611 - RNA, 32 nt, Human
cacuccagccugggggacagagcaagacuguu

SEQ ID NO: 347612 - RNA, 32 nt, Human
cacuccagccugggggacagagcaaggcuccg

SEQ ID NO: 347613 - RNA, 32 nt, Human
cacuccagccugggggacagagcgagacuccg

SEQ ID NO: 347614 - RNA, 32 nt, Human
cacuccagccugggggacagagcgagacucug

SEQ ID NO: 347615 - RNA, 32 nt, Human
cacuccagccugggggacagagugagacccug

SEQ ID NO: 347616 - RNA, 32 nt, Human
cacuccagccuggggugauagaacaagacccu

SEQ ID NO: 347617 - RNA, 22 nt, Human
cacuccagccuggguaaaagag

SEQ ID NO: 347618 - RNA, 32 nt, Human
cacuccagccuggguaaaagagugagaccuca

SEQ ID NO: 347619 - RNA, 32 nt, Human
cacuccagccuggguaacaagagcgaaacucc

SEQ ID NO: 347620 - RNA, 22 nt, Human
cacuccagccuggguaacagag

SEQ ID NO: 347621 - RNA, 32 nt, Human
cacuccagccuggguaacagagcaagaccaug

SEQ ID NO: 347622 - RNA, 32 nt, Human
cacuccagccuggguaacagagcaagacucca

SEQ ID NO: 347623 - RNA, 32 nt, Human
cacuccagccuggguaacagagcaagacucug

SEQ ID NO: 347624 - RNA, 32 nt, Human
cacuccagccuggguaacagagcaagagucug

SEQ ID NO: 347625 - RNA, 32 nt, Human
cacuccagccuggguaacagagcgagaccccg

SEQ ID NO: 347626 - RNA, 32 nt, Human
cacuccagccuggguaacagagcgagacucca

SEQ ID NO: 347627 - RNA, 32 nt, Human
cacuccagccuggguaacagagcuagacucca

SEQ ID NO: 347628 - RNA, 32 nt, Human
cacuccagccuggguaacagagugagacucca

SEQ ID NO: 347629 - RNA, 32 nt, Human
cacuccagccuggguaacagagugagacucug

SEQ ID NO: 347630 - RNA, 32 nt, Human
cacuccagccuggguaacagagugagacuguc

SEQ ID NO: 347631 - RNA, 32 nt, Human
cacuccagccuggguaacagugagaccauguc

SEQ ID NO: 347632 - RNA, 32 nt, Human
cacuccagccuggguaacagugagaggccuca

SEQ ID NO: 347633 - RNA, 32 nt, Human
cacuccagccuggguaagagagcgaggugcug

SEQ ID NO: 347634 - RNA, 32 nt, Human
cacuccagccugggugaaagagcuagauucuc

SEQ ID NO: 347635 - RNA, 20 nt, Human
cacuccagccugggugacaa

SEQ ID NO: 347636 - RNA, 32 nt, Human
cacuccagccugggugacaaaagugaaacucu

SEQ ID NO: 347637 - RNA, 32 nt, Human
cacuccagccugggugacaaagcaagacucca

SEQ ID NO: 347638 - RNA, 32 nt, Human
cacuccagccugggugacaaagcaagacugug

SEQ ID NO: 347639 - RNA, 32 nt, Human
cacuccagccugggugacaaagcaagauucug

SEQ ID NO: 347640 - RNA, 32 nt, Human
cacuccagccugggugacaaagcgagacucca

SEQ ID NO: 347641 - RNA, 32 nt, Human
cacuccagccugggugacaaaggagaccccgu

SEQ ID NO: 347642 - RNA, 32 nt, Human
cacuccagccugggugacaaagugagacucca

SEQ ID NO: 347643 - RNA, 32 nt, Human
cacuccagccugggugacaaagugagacuccg

SEQ ID NO: 347644 - RNA, 32 nt, Human
cacuccagccugggugacaagagcaagacucc

SEQ ID NO: 347645 - RNA, 32 nt, Human
cacuccagccugggugacaagagcgaaacucc

SEQ ID NO: 347646 - RNA, 32 nt, Human
cacuccagccugggugacaagagugaaacucc

SEQ ID NO: 347647 - RNA, 32 nt, Human
cacuccagccugggugacaagagugagacucc

SEQ ID NO: 347648 - RNA, 32 nt, Human
cacuccagccugggugacaagagugagacucu

SEQ ID NO: 347649 - RNA, 32 nt, Human
cacuccagccugggugacaagggaagacucuc

SEQ ID NO: 347650 - RNA, 32 nt, Human
cacuccagccugggugacacagcgacacucug

SEQ ID NO: 347651 - RNA, 32 nt, Human
cacuccagccugggugacacagcgagacuccg

SEQ ID NO: 347652 - RNA, 32 nt, Human
cacuccagccugggugacacagcgagacucug

SEQ ID NO: 347653 - RNA, 32 nt, Human
cacuccagccugggugacacagugagacucca

SEQ ID NO: 347654 - RNA, 32 nt, Human
cacuccagccugggugacagaacaagacucug

SEQ ID NO: 347655 - RNA, 32 nt, Human
cacuccagccugggugacagaacaagacuguc

SEQ ID NO: 347656 - RNA, 32 nt, Human
cacuccagccugggugacagaacgagacccug

SEQ ID NO: 347657 - RNA, 32 nt, Human
cacuccagccugggugacagaacgagacucca

SEQ ID NO: 347658 - RNA, 32 nt, Human
cacuccagccugggugacagaacgagacuccg

SEQ ID NO: 347659 - RNA, 32 nt, Human
cacuccagccugggugacagaaugagacucca

SEQ ID NO: 347660 - RNA, 32 nt, Human
cacuccagccugggugacagaaugaggcuccc

SEQ ID NO: 347661 - RNA, 32 nt, Human
cacuccagccugggugacagaccgagacucug

SEQ ID NO: 347662 - RNA, 32 nt, Human
cacuccagccugggugacagacuaagacuccg

SEQ ID NO: 347663 - RNA, 22 nt, Human
cacuccagccugggugacagag

SEQ ID NO: 347664 - RNA, 32 nt, Human
cacuccagccugggugacagagacagugagac

SEQ ID NO: 347665 - RNA, 32 nt, Human
cacuccagccugggugacagagagacucuguc

SEQ ID NO: 347666 - RNA, 32 nt, Human
cacuccagccugggugacagagagagacccug

SEQ ID NO: 347667 - RNA, 32 nt, Human
cacuccagccugggugacagagagagacucca

SEQ ID NO: 347668 - RNA, 32 nt, Human
cacuccagccugggugacagagagagacuccg

SEQ ID NO: 347669 - RNA, 32 nt, Human
cacuccagccugggugacagagagauacccug

SEQ ID NO: 347670 - RNA, 32 nt, Human
cacuccagccugggugacagagcaagaaaaua

SEQ ID NO: 347671 - RNA, 32 nt, Human
cacuccagccugggugacagagcaagaaucau

SEQ ID NO: 347672 - RNA, 32 nt, Human
cacuccagccugggugacagagcaagacauaa

SEQ ID NO: 347673 - RNA, 32 nt, Human
cacuccagccugggugacagagcaagacccug

SEQ ID NO: 347674 - RNA, 32 nt, Human
cacuccagccugggugacagagcaagacucca

SEQ ID NO: 347675 - RNA, 32 nt, Human
cacuccagccugggugacagagcaagacuccc

SEQ ID NO: 347676 - RNA, 32 nt, Human
cacuccagccugggugacagagcaagacuccg

SEQ ID NO: 347677 - RNA, 32 nt, Human
cacuccagccugggugacagagcaagacucuc

SEQ ID NO: 347678 - RNA, 32 nt, Human
cacuccagccugggugacagagcaagacucug

SEQ ID NO: 347679 - RNA, 32 nt, Human
cacuccagccugggugacagagcaagacuuca

SEQ ID NO: 347680 - RNA, 32 nt, Human
cacuccagccugggugacagagcaagacuugg

SEQ ID NO: 347681 - RNA, 32 nt, Human
cacuccagccugggugacagagcaagagaccc

SEQ ID NO: 347682 - RNA, 32 nt, Human
cacuccagccugggugacagagcaagaucuug

SEQ ID NO: 347683 - RNA, 32 nt, Human
cacuccagccugggugacagagcaagauuccg

SEQ ID NO: 347684 - RNA, 32 nt, Human
cacuccagccugggugacagagcaaggcuccc

SEQ ID NO: 347685 - RNA, 32 nt, Human
cacuccagccugggugacagagcaaggcucug

SEQ ID NO: 347686 - RNA, 32 nt, Human
cacuccagccugggugacagagcaagugagac

SEQ ID NO: 347687 - RNA, 31 nt, Human
cacuccagccugggugacagagcagacucca

SEQ ID NO: 347688 - RNA, 32 nt, Human
cacuccagccugggugacagagcaggacccug

SEQ ID NO: 347689 - RNA, 32 nt, Human
cacuccagccugggugacagagccagaccccg

SEQ ID NO: 347690 - RNA, 32 nt, Human
cacuccagccugggugacagagccagacucca

SEQ ID NO: 347691 - RNA, 32 nt, Human
cacuccagccugggugacagagccagacuccg

SEQ ID NO: 347692 - RNA, 32 nt, Human
cacuccagccugggugacagagccagacucug

SEQ ID NO: 347693 - RNA, 32 nt, Human
cacuccagccugggugacagagcgacccucug

SEQ ID NO: 347694 - RNA, 32 nt, Human
cacuccagccugggugacagagcgagaaucag

SEQ ID NO: 347695 - RNA, 32 nt, Human
cacuccagccugggugacagagcgagacccug

SEQ ID NO: 347696 - RNA, 32 nt, Human
cacuccagccugggugacagagcgagaccguc

SEQ ID NO: 347697 - RNA, 32 nt, Human
cacuccagccugggugacagagcgagacuauc

SEQ ID NO: 347698 - RNA, 32 nt, Human
cacuccagccugggugacagagcgagacucca

SEQ ID NO: 347699 - RNA, 32 nt, Human
cacuccagccugggugacagagcgagacuccg

SEQ ID NO: 347700 - RNA, 32 nt, Human
cacuccagccugggugacagagcgagacucug

SEQ ID NO: 347701 - RNA, 32 nt, Human
cacuccagccugggugacagagcgagacuguc

SEQ ID NO: 347702 - RNA, 32 nt, Human
cacuccagccugggugacagagcgagacugug

SEQ ID NO: 347703 - RNA, 32 nt, Human
cacuccagccugggugacagagcgagacuuau

SEQ ID NO: 347704 - RNA, 32 nt, Human
cacuccagccugggugacagagcgagacuuug

SEQ ID NO: 347705 - RNA, 28 nt, Human
cacuccagccugggugacagagcgaggc

SEQ ID NO: 347706 - RNA, 32 nt, Human
cacuccagccugggugacagagcgugagacuc

SEQ ID NO: 347707 - RNA, 32 nt, Human
cacuccagccugggugacagagggaaacucca

SEQ ID NO: 347708 - RNA, 32 nt, Human
cacuccagccugggugacagagggagacucca

SEQ ID NO: 347709 - RNA, 32 nt, Human
cacuccagccugggugacagagggagacuccg

SEQ ID NO: 347710 - RNA, 32 nt, Human
cacuccagccugggugacagagggagacucug

SEQ ID NO: 347711 - RNA, 32 nt, Human
cacuccagccugggugacagaguaagacccug

SEQ ID NO: 347712 - RNA, 32 nt, Human
cacuccagccugggugacagaguaagacucca

SEQ ID NO: 347713 - RNA, 32 nt, Human
cacuccagccugggugacagaguaagacuccg

SEQ ID NO: 347714 - RNA, 32 nt, Human
cacuccagccugggugacagaguaagacucug

SEQ ID NO: 347715 - RNA, 32 nt, Human
cacuccagccugggugacagaguaggacccug

SEQ ID NO: 347716 - RNA, 32 nt, Human
cacuccagccugggugacagagucagacccua

SEQ ID NO: 347717 - RNA, 32 nt, Human
cacuccagccugggugacagagucagacccug

SEQ ID NO: 347718 - RNA, 32 nt, Human
cacuccagccugggugacagagugaaacccug

SEQ ID NO: 347719 - RNA, 32 nt, Human
cacuccagccugggugacagagugaaacccuu

SEQ ID NO: 347720 - RNA, 32 nt, Human
cacuccagccugggugacagagugagacacca

SEQ ID NO: 347721 - RNA, 32 nt, Human
cacuccagccugggugacagagugagacccca

SEQ ID NO: 347722 - RNA, 32 nt, Human
cacuccagccugggugacagagugagaccccc

SEQ ID NO: 347723 - RNA, 32 nt, Human
cacuccagccugggugacagagugagacccug

SEQ ID NO: 347724 - RNA, 32 nt, Human
cacuccagccugggugacagagugagaccuca

SEQ ID NO: 347725 - RNA, 32 nt, Human
cacuccagccugggugacagagugagacucag

SEQ ID NO: 347726 - RNA, 32 nt, Human
cacuccagccugggugacagagugagacucca

SEQ ID NO: 347727 - RNA, 32 nt, Human
cacuccagccugggugacagagugagacuccg

SEQ ID NO: 347728 - RNA, 32 nt, Human
cacuccagccugggugacagagugagacucug

SEQ ID NO: 347729 - RNA, 32 nt, Human
cacuccagccugggugacagagugagacuguc

SEQ ID NO: 347730 - RNA, 32 nt, Human
cacuccagccugggugacagagugagacuuug

SEQ ID NO: 347731 - RNA, 32 nt, Human
cacuccagccugggugacagagugagagaccu

SEQ ID NO: 347732 - RNA, 32 nt, Human
cacuccagccugggugacagagugagaguccg

SEQ ID NO: 347733 - RNA, 32 nt, Human
cacuccagccugggugacagagugagaucccg

SEQ ID NO: 347734 - RNA, 32 nt, Human
cacuccagccugggugacagagugagauccug

SEQ ID NO: 347735 - RNA, 32 nt, Human
cacuccagccugggugacagagugagaucugc

SEQ ID NO: 347736 - RNA, 32 nt, Human
cacuccagccugggugacagagugagauuccg

SEQ ID NO: 347737 - RNA, 32 nt, Human
cacuccagccugggugacagagugagauucug

SEQ ID NO: 347738 - RNA, 32 nt, Human
cacuccagccugggugacagagugaggcccug

SEQ ID NO: 347739 - RNA, 32 nt, Human
cacuccagccugggugacagagugagugagac

SEQ ID NO: 347740 - RNA, 32 nt, Human
cacuccagccugggugacagauccagacucug

SEQ ID NO: 347741 - RNA, 32 nt, Human
cacuccagccugggugacagauugagacuccc

SEQ ID NO: 347742 - RNA, 26 nt, Human
cacuccagccugggugacagcaagag

SEQ ID NO: 347743 - RNA, 32 nt, Human
cacuccagccugggugacagcaagagaucuug

SEQ ID NO: 347744 - RNA, 32 nt, Human
cacuccagccugggugacagcgagacccuguc

SEQ ID NO: 347745 - RNA, 32 nt, Human
cacuccagccugggugacagcgcgagacucca

SEQ ID NO: 347746 - RNA, 32 nt, Human
cacuccagccugggugacagcguaagacucuc

SEQ ID NO: 347747 - RNA, 32 nt, Human
cacuccagccugggugacagggcaagacucug

SEQ ID NO: 347748 - RNA, 32 nt, Human
cacuccagccugggugacagugaaacuccauc

SEQ ID NO: 347749 - RNA, 32 nt, Human
cacuccagccugggugacagugagacucuguc

SEQ ID NO: 347750 - RNA, 32 nt, Human
cacuccagccugggugacagugagacuguggc

SEQ ID NO: 347751 - RNA, 32 nt, Human
cacuccagccugggugacagugagacuuuguc

SEQ ID NO: 347752 - RNA, 32 nt, Human
cacuccagccugggugacagugagucuuuguc

SEQ ID NO: 347753 - RNA, 32 nt, Human
cacuccagccugggugacagugugaaacuuug

SEQ ID NO: 347754 - RNA, 32 nt, Human
cacuccagccugggugacgagugaaacuccau

SEQ ID NO: 347755 - RNA, 32 nt, Human
cacuccagccugggugacggagcgagacucca

SEQ ID NO: 347756 - RNA, 32 nt, Human
cacuccagccugggugacggagugagacucca

SEQ ID NO: 347757 - RNA, 32 nt, Human
cacuccagccugggugacggugagacuuuguc

SEQ ID NO: 347758 - RNA, 32 nt, Human
cacuccagccugggugacugagcaagacucug

SEQ ID NO: 347759 - RNA, 32 nt, Human
cacuccagccugggugacugagcgagauucug

SEQ ID NO: 347760 - RNA, 32 nt, Human
cacuccagccugggugacugagggagacucug

SEQ ID NO: 347761 - RNA, 32 nt, Human
cacuccagccugggugacugagugagacccug

SEQ ID NO: 347762 - RNA, 32 nt, Human
cacuccagccugggugagaaagcaagacccua

SEQ ID NO: 347763 - RNA, 32 nt, Human
cacuccagccugggugagaagagcgaaacucc

SEQ ID NO: 347764 - RNA, 32 nt, Human
cacuccagccugggugagagagcaagacccug

SEQ ID NO: 347765 - RNA, 32 nt, Human
cacuccagccugggugagagagugagacacug

SEQ ID NO: 347766 - RNA, 32 nt, Human
cacuccagccugggugauaagagcaagacucu

SEQ ID NO: 347767 - RNA, 32 nt, Human
cacuccagccugggugauaagagcgaaauucu

SEQ ID NO: 347768 - RNA, 32 nt, Human
cacuccagccugggugauagagcaagacccca

SEQ ID NO: 347769 - RNA, 32 nt, Human
cacuccagccugggugauagagcaagacccua

SEQ ID NO: 347770 - RNA, 32 nt, Human
cacuccagccugggugauagagcaagacuguc

SEQ ID NO: 347771 - RNA, 32 nt, Human
cacuccagccugggugauagagcuggagggaa

SEQ ID NO: 347772 - RNA, 32 nt, Human
cacuccagccugggugauagagugagaacuug

SEQ ID NO: 347773 - RNA, 32 nt, Human
cacuccagccugggugauagagugagacacug

SEQ ID NO: 347774 - RNA, 32 nt, Human
cacuccagccugggugauagagugagacccuc

SEQ ID NO: 347775 - RNA, 32 nt, Human
cacuccagccugggugauagagugagauucag

SEQ ID NO: 347776 - RNA, 32 nt, Human
cacuccagccugggugaugaagacgagacucu

SEQ ID NO: 347777 - RNA, 32 nt, Human
cacuccagccugggugauggagcaagacucca

SEQ ID NO: 347778 - RNA, 32 nt, Human
cacuccagccuggguggacagagcaagacucc

SEQ ID NO: 347779 - RNA, 32 nt, Human
cacuccagccuggguggcaaagcaagaccccu

SEQ ID NO: 347780 - RNA, 32 nt, Human
cacuccagccuggguggcaaagugagacucug

SEQ ID NO: 347781 - RNA, 32 nt, Human
cacuccagccuggguggcagagcaagacuguc

SEQ ID NO: 347782 - RNA, 32 nt, Human
cacuccagccuggguggcagagccagacccug

SEQ ID NO: 347783 - RNA, 32 nt, Human
cacuccagccuggguggcagagugagacccug

SEQ ID NO: 347784 - RNA, 32 nt, Human
cacuccagccuggguggcagagugagacucgu

SEQ ID NO: 347785 - RNA, 32 nt, Human
cacuccagccugggugucagagcaagacucug

SEQ ID NO: 347786 - RNA, 32 nt, Human
cacuccagccugggugucagagcgagaacccg

SEQ ID NO: 347787 - RNA, 32 nt, Human
cacuccagccuggguuacagagugagacccug

SEQ ID NO: 347788 - RNA, 19 nt, Human
cacuccagccuggucaaca

SEQ ID NO: 347789 - RNA, 32 nt, Human
cacuccagccuggucaacaaagcaagacccuu

SEQ ID NO: 347790 - RNA, 32 nt, Human
cacuccagccuggucaacagagcaagacucca

SEQ ID NO: 347791 - RNA, 32 nt, Human
cacuccagccuggucaacagagugagacucug

SEQ ID NO: 347792 - RNA, 32 nt, Human
cacuccagccuggucaacagagugggacuccg

SEQ ID NO: 347793 - RNA, 32 nt, Human
cacuccagccuggucaauggagugcgacucca

SEQ ID NO: 347794 - RNA, 22 nt, Human
cacuccagccuggucgacagag

SEQ ID NO: 347795 - RNA, 32 nt, Human
cacuccagccuggucgacagagugaacucugu

SEQ ID NO: 347796 - RNA, 32 nt, Human
cacuccagccuggucgacagcgagacuccauc

SEQ ID NO: 347797 - RNA, 32 nt, Human
cacuccagccuggugacagagcaagacuccau

SEQ ID NO: 347798 - RNA, 32 nt, Human
cacuccagccuggugacagagcaagacuccgg

SEQ ID NO: 347799 - RNA, 32 nt, Human
cacuccagccuggugacagagcaagacucugu

SEQ ID NO: 347800 - RNA, 32 nt, Human
cacuccagccuggugacagagcgagacuccau

SEQ ID NO: 347801 - RNA, 32 nt, Human
cacuccagccuggugacagagcgagacuccgu

SEQ ID NO: 347802 - RNA, 32 nt, Human
cacuccagccuggugacagagcuagauuccau

SEQ ID NO: 347803 - RNA, 32 nt, Human
cacuccagccuggugacagagugagacuccau

SEQ ID NO: 347804 - RNA, 32 nt, Human
cacuccagccuggugacagagugagacuccgu

SEQ ID NO: 347805 - RNA, 32 nt, Human
cacuccagccuggugacagagugagacucugu

SEQ ID NO: 347806 - RNA, 32 nt, Human
cacuccagccuggugacagcgugagacucuuu

SEQ ID NO: 347807 - RNA, 32 nt, Human
cacuccagccuggugacagggcgagacuccgu

SEQ ID NO: 347808 - RNA, 32 nt, Human
cacuccagccuggugagagcaagacucugucu

SEQ ID NO: 347809 - RNA, 32 nt, Human
cacuccagccugguuacagagcaagacucugu

SEQ ID NO: 347810 - RNA, 32 nt, Human
cacuccagccugguugacagagcaagacuccg

SEQ ID NO: 347811 - RNA, 32 nt, Human
cacuccagccugguugacagagcaagacucug

SEQ ID NO: 347812 - RNA, 32 nt, Human
cacuccagccuuggugacagagcaagacucug

SEQ ID NO: 347813 - RNA, 32 nt, Human
cacuccagccuuggugacagagugagacucug

SEQ ID NO: 347814 - RNA, 32 nt, Human
cacuccagcgugggcaacagagcgagacucug

SEQ ID NO: 347815 - RNA, 32 nt, Human
cacuccagcgugggcgacagagcgagacuccg

SEQ ID NO: 347816 - RNA, 32 nt, Human
cacuccagcucggggaacagagcgagaccuug

SEQ ID NO: 347817 - RNA, 32 nt, Human
cacuccagcucgggugacaagagugagacccc

SEQ ID NO: 347818 - RNA, 32 nt, Human
cacuccagcuuaggugacagagugagaaccug

SEQ ID NO: 347819 - RNA, 32 nt, Human
cacuccagcuugaaugacagagggagacucug

SEQ ID NO: 347820 - RNA, 32 nt, Human
cacuccagcuugggcaacagagcgagacuccg

SEQ ID NO: 347821 - RNA, 32 nt, Human
cacuccagcuugggcgacagagcgagacucug

SEQ ID NO: 347822 - RNA, 32 nt, Human
cacuccagcuugggugacaaaguaagacccug

SEQ ID NO: 347823 - RNA, 32 nt, Human
cacuccagcuugggugacagagcaagacucca

SEQ ID NO: 347824 - RNA, 32 nt, Human
cacuccagcuugggugacagagcaagagucug

SEQ ID NO: 347825 - RNA, 32 nt, Human
cacuccagcuugggugacagagcgagacuccg

SEQ ID NO: 347826 - RNA, 32 nt, Human
cacuccagcuugggugacagagugagacgcug

SEQ ID NO: 347827 - RNA, 32 nt, Human
cacuccagcuugggugacagagugagacucca

SEQ ID NO: 347828 - RNA, 32 nt, Human
cacuccagcuugggugacagagugagacucug

SEQ ID NO: 347829 - RNA, 32 nt, Human
cacuccaggaacagcuggcacagggaguccca

SEQ ID NO: 347830 - RNA, 32 nt, Human
cacuccaggaauaagacaaaaggagaggagga

SEQ ID NO: 347831 - RNA, 32 nt, Human
cacuccaggagggacccacugccuucccgggg

SEQ ID NO: 347832 - RNA, 32 nt, Human
cacuccaggaugggacacggccccucuuucuu

SEQ ID NO: 347833 - RNA, 32 nt, Human
cacuccaggccagcucaagaagcaaagcaggc

SEQ ID NO: 347834 - RNA, 20 nt, Human
cacuccaggccucuguggca

SEQ ID NO: 347835 - RNA, 32 nt, Human
cacuccaggccugcguuucagcagggugugcc

SEQ ID NO: 347836 - RNA, 32 nt, Human
cacuccaggcuggacaacacagcaagacucca

SEQ ID NO: 347837 - RNA, 32 nt, Human
cacuccaggcuggacgacagagcaagacccug

SEQ ID NO: 347838 - RNA, 32 nt, Human
cacuccaggcugggcaauuuuguaccuggccc

SEQ ID NO: 347839 - RNA, 32 nt, Human
cacuccaggcugggcagcaagagcaagacucu

SEQ ID NO: 347840 - RNA, 32 nt, Human
cacuccaggcugggcgacagagcgagacuccg

SEQ ID NO: 347841 - RNA, 32 nt, Human
cacuccaggcugggugacagagcgagacucca

SEQ ID NO: 347842 - RNA, 32 nt, Human
cacuccaggcugggugacagauuaagcaagac

SEQ ID NO: 347843 - RNA, 20 nt, Human
cacuccagguucccucaggc

SEQ ID NO: 347844 - RNA, 32 nt, Human
cacuccaguccacuccugaccccucuccucaa

SEQ ID NO: 347845 - RNA, 32 nt, Human
cacuccagucuggaugacagagagagacccug

SEQ ID NO: 347846 - RNA, 32 nt, Human
cacuccagucugggcaacagagcgagacucca

SEQ ID NO: 347847 - RNA, 32 nt, Human
cacuccagucugggcaacagagcgagacuccc

SEQ ID NO: 347848 - RNA, 32 nt, Human
cacuccagucugggcaacagagcgauccuguu

SEQ ID NO: 347849 - RNA, 32 nt, Human
cacuccagucugggcaccagagcgagacuccg

SEQ ID NO: 347850 - RNA, 32 nt, Human
cacuccagucugggcgacagagcaagacucug

SEQ ID NO: 347851 - RNA, 32 nt, Human
cacuccagucugggcgacagagcgagacucug

SEQ ID NO: 347852 - RNA, 32 nt, Human
cacuccagucuggguaacagagcgagacuuuc

SEQ ID NO: 347853 - RNA, 32 nt, Human
cacuccagucugggugacagagagagaccaua

SEQ ID NO: 347854 - RNA, 32 nt, Human
cacuccagucugggugacagagcaagacucag

SEQ ID NO: 347855 - RNA, 32 nt, Human
cacuccagucugggugacagagcaagacucgg

SEQ ID NO: 347856 - RNA, 32 nt, Human
cacuccagucugggugacagagugagacuccg

SEQ ID NO: 347857 - RNA, 32 nt, Human
cacuccagucugggugacagagugagacucug

SEQ ID NO: 347858 - RNA, 32 nt, Human
cacuccagucugggugacagagugagaugcua

SEQ ID NO: 347859 - RNA, 26 nt, Human
cacuccagucugggugacagcaagac

SEQ ID NO: 347860 - RNA, 32 nt, Human
cacuccagucugggugagagugagacucaguc

SEQ ID NO: 347861 - RNA, 32 nt, Human
cacuccagucugguugacagagugagacucau

SEQ ID NO: 347862 - RNA, 32 nt, Human
cacuccagugcacucgagccugggugacaggg

SEQ ID NO: 347863 - RNA, 32 nt, Human
cacuccagugcccaccagccuugucuuaauaa

SEQ ID NO: 347864 - RNA, 23 nt, Human
cacuccagugucaaccacuggca

SEQ ID NO: 347865 - RNA, 32 nt, Human
cacuccaguuacuuaacuuucccuucagaaua

SEQ ID NO: 347866 - RNA, 26 nt, Human
cacuccauaaccuccaucuucuccca

SEQ ID NO: 347867 - RNA, 21 nt, Human
cacuccauauuuguaagcccu

SEQ ID NO: 347868 - RNA, 32 nt, Human
cacuccaucacccaggcuggaguccaguggug

SEQ ID NO: 347869 - RNA, 32 nt, Human
cacuccaucccucccucccguccuuccccucu

SEQ ID NO: 347870 - RNA, 32 nt, Human
cacuccauccugggugacaaagugagacuccc

SEQ ID NO: 347871 - RNA, 32 nt, Human
cacuccauccugggugacaagagcgaaacucc

SEQ ID NO: 347872 - RNA, 32 nt, Human
cacuccauccugggugacagagagagacccug

SEQ ID NO: 347873 - RNA, 32 nt, Human
cacuccauccugggugacagagcaagacuucc

SEQ ID NO: 347874 - RNA, 32 nt, Human
cacuccauccuugccaaaccucuacccaaaag

SEQ ID NO: 347875 - RNA, 32 nt, Human
cacuccaucguccaggcuggagugcaguggcg

SEQ ID NO: 347876 - RNA, 32 nt, Human
cacuccauugcccaggcuggaguacaauggug

SEQ ID NO: 347877 - RNA, 32 nt, Human
cacucccaaacaguuaaacccagcucuaauuc

SEQ ID NO: 347878 - RNA, 32 nt, Human
cacucccaaccauuuucccugcuacuacagau

SEQ ID NO: 347879 - RNA, 32 nt, Human
cacucccaagcccacacccacaggggcucacu

SEQ ID NO: 347880 - RNA, 32 nt, Human
cacucccacacacacccccuggcucugcugag

SEQ ID NO: 347881 - RNA, 32 nt, Human
cacucccacucccucucucucccucucugccu

SEQ ID NO: 347882 - RNA, 32 nt, Human
cacucccacuggugcuggaguacgcacuggug

SEQ ID NO: 347883 - RNA, 32 nt, Human
cacucccagcacuccccuugccuuccccuguc

SEQ ID NO: 347884 - RNA, 32 nt, Human
cacucccagccuguccuguggccugucccacu

SEQ ID NO: 347885 - RNA, 23 nt, Human
cacucccagcgaugcgcagcggg

SEQ ID NO: 347886 - RNA, 32 nt, Human
cacucccaggcaggcagaugccagugucugcu

SEQ ID NO: 347887 - RNA, 22 nt, Human
cacucccaggcggggcaggaag

SEQ ID NO: 347888 - RNA, 32 nt, Human
cacucccagggagggcaggagagcgccggggg

SEQ ID NO: 347889 - RNA, 32 nt, Human
cacucccagguaaaauccagggggaagaguca

SEQ ID NO: 347890 - RNA, 32 nt, Human
cacucccaugcuugccccagccugcuucuugc

SEQ ID NO: 347891 - RNA, 18 nt, Human
cacucccauuccuggcca

SEQ ID NO: 347892 - RNA, 32 nt, Human
cacuccccacauaggaauaguccauccccaga

SEQ ID NO: 347893 - RNA, 32 nt, Human
cacuccccacccaagagauugguggaauaaaa

SEQ ID NO: 347894 - RNA, 32 nt, Human
cacuccccacggccagcgugggcacaggacug

SEQ ID NO: 347895 - RNA, 32 nt, Human
cacucccccaaaaugacacccaccgucgucag

SEQ ID NO: 347896 - RNA, 32 nt, Human
cacucccccucagacccugucaagccggcucc

SEQ ID NO: 347897 - RNA, 21 nt, Human
cacucccccugggacgguaag

SEQ ID NO: 347898 - RNA, 19 nt, Human
cacuccccgacacuauugc

SEQ ID NO: 347899 - RNA, 32 nt, Human
cacuccccgggucaccugaccugcugcccagg

SEQ ID NO: 347900 - RNA, 32 nt, Human
cacuccccgugccucugcuucccaagaugcca

SEQ ID NO: 347901 - RNA, 32 nt, Human
cacuccccuaacccauagcacaggcugagucc

SEQ ID NO: 347902 - RNA, 32 nt, Human
cacuccccuaccccuuccccagccacugcugc

SEQ ID NO: 347903 - RNA, 32 nt, Human
cacuccccuccccuuuuucauuccuuccuccc

SEQ ID NO: 347904 - RNA, 32 nt, Human
cacuccccucuccuccccuuccuguuucucgu

SEQ ID NO: 347905 - RNA, 32 nt, Human
cacuccccucugacccucaggcuuucccagcu

SEQ ID NO: 347906 - RNA, 32 nt, Human
cacuccccugccccagcucgagccaggcucug

SEQ ID NO: 347907 - RNA, 23 nt, Human
cacuccccuugacucucucuguu

SEQ ID NO: 347908 - RNA, 32 nt, Human
cacucccgacaggacaugcuggagucuggccu

SEQ ID NO: 347909 - RNA, 32 nt, Human
cacucccgccugggcgacagagcgagacucug

SEQ ID NO: 347910 - RNA, 32 nt, Human
cacucccgccugggugacagagugagacucua

SEQ ID NO: 347911 - RNA, 32 nt, Human
cacucccgguggggacacagcacagaccccaa

SEQ ID NO: 347912 - RNA, 32 nt, Human
cacucccguuuggcccucagcacuuugggccu

SEQ ID NO: 347913 - RNA, 32 nt, Human
cacucccucacugccacuccucucaucccuac

SEQ ID NO: 347914 - RNA, 32 nt, Human
cacucccucccagaaaaacuggcucugauugg

SEQ ID NO: 347915 - RNA, 32 nt, Human
cacucccucccagagaacaggggcuucuuucu

SEQ ID NO: 347916 - RNA, 32 nt, Human
cacucccucccucuuuguuuccuuccuuccuu

SEQ ID NO: 347917 - RNA, 32 nt, Human
cacucccucucucuccccuugauggccacauu

SEQ ID NO: 347918 - RNA, 32 nt, Human
cacucccucugccuucaggcuucugucaauuu

SEQ ID NO: 347919 - RNA, 32 nt, Human
cacucccucuguagugaggccucugccauguc

SEQ ID NO: 347920 - RNA, 32 nt, Human
cacucccugcagcucucagcucccuguucccu

SEQ ID NO: 347921 - RNA, 32 nt, Human
cacucccugcagcuggucagcccauccuucuc

SEQ ID NO: 347922 - RNA, 32 nt, Human
cacucccugcauggucaccucaguccuggaca

SEQ ID NO: 347923 - RNA, 32 nt, Human
cacucccugcccccagccuggcuggacagcaa

SEQ ID NO: 347924 - RNA, 32 nt, Human
cacucccugcccuucccacugcagagaugaca

SEQ ID NO: 347925 - RNA, 32 nt, Human
cacucccugccugugcugguugcagccucaga

SEQ ID NO: 347926 - RNA, 19 nt, Human
cacucccuggccccuccca

SEQ ID NO: 347927 - RNA, 27 nt, Human
cacucccuguagugaauccucuguuua

SEQ ID NO: 347928 - RNA, 32 nt, Human
cacucccugugcauggucugaccccaggcccc

SEQ ID NO: 347929 - RNA, 32 nt, Human
cacucccugugccucugccaucagcacagggg

SEQ ID NO: 347930 - RNA, 20 nt, Human
cacucccuucccaaguuccu

SEQ ID NO: 347931 - RNA, 32 nt, Human
cacucccuuccccaucccaaccccuucuuucu

SEQ ID NO: 347932 - RNA, 32 nt, Human
cacucccuuccucuccaucucucccucucucc

SEQ ID NO: 347933 - RNA, 32 nt, Human
cacucccuucuagcacccccaaaggaaaagcc

SEQ ID NO: 347934 - RNA, 32 nt, Human
cacucccuuuugucuuucacauggagguugaa

SEQ ID NO: 347935 - RNA, 32 nt, Human
cacuccgacucugggcaacagagcaagacucu

SEQ ID NO: 347936 - RNA, 32 nt, Human
cacuccgagcacagccguggguuuguucccug

SEQ ID NO: 347937 - RNA, 22 nt, Human
cacuccgccgccucugcccgca

SEQ ID NO: 347938 - RNA, 32 nt, Human
cacuccgccucaccagccuucuugcgccggag

SEQ ID NO: 347939 - RNA, 32 nt, Human
cacuccgcgggcggaggacgcacgucggggcg

SEQ ID NO: 347940 - RNA, 32 nt, Human
cacuccgcugcagcggagggugugugagggag

SEQ ID NO: 347941 - RNA, 26 nt, Human
cacuccggagguagagguugugguga

SEQ ID NO: 347942 - RNA, 32 nt, Human
cacuccggagguagagguuguggugagccgag

SEQ ID NO: 347943 - RNA, 21 nt, Human
cacuccggaguuauccugcuc

SEQ ID NO: 347944 - RNA, 32 nt, Human
cacuccggcacggccucaggugcucuaccccg

SEQ ID NO: 347945 - RNA, 32 nt, Human
cacuccggcaggcagaccugcuggagcugcuu

SEQ ID NO: 347946 - RNA, 32 nt, Human
cacuccggccugggcgacagagcgagacuguc

SEQ ID NO: 347947 - RNA, 32 nt, Human
cacuccggccugggugacaaagcaagacucug

SEQ ID NO: 347948 - RNA, 32 nt, Human
cacuccggccugggugacagagccagacucca

SEQ ID NO: 347949 - RNA, 32 nt, Human
cacuccggccugggugacagagugagacccgu

SEQ ID NO: 347950 - RNA, 32 nt, Human
cacuccggccugggugauggagcaagaccucg

SEQ ID NO: 347951 - RNA, 32 nt, Human
cacuccgggaaagcccucugcccacacccaca

SEQ ID NO: 347952 - RNA, 32 nt, Human
cacuccgggcugggcgacagagcgagacccug

SEQ ID NO: 347953 - RNA, 32 nt, Human
cacuccggggccugugccgccagaaccgggcu

SEQ ID NO: 347954 - RNA, 32 nt, Human
cacuccguagugugcacuuggugagggcagca

SEQ ID NO: 347955 - RNA, 32 nt, Human
cacuccgucauccaagcuggagugcaguggug

SEQ ID NO: 347956 - RNA, 32 nt, Human
cacuccguccugggugacaaagugagacuccc

SEQ ID NO: 347957 - RNA, 32 nt, Human
cacuccgucucuggagcccaccagggaaggcc

SEQ ID NO: 347958 - RNA, 32 nt, Human
cacuccgugcaacugauagugcaucagccgac

SEQ ID NO: 347959 - RNA, 32 nt, Human
cacuccgugccuggcucccccuuggcaggugu

SEQ ID NO: 347960 - RNA, 32 nt, Human
cacuccgugcuggaaguaggaggagagucagg

SEQ ID NO: 347961 - RNA, 32 nt, Human
cacuccguugccaggcuggagugcuguggcgc

SEQ ID NO: 347962 - RNA, 32 nt, Human
cacuccuaaaaccaaaaacaacagugacaaua

SEQ ID NO: 347963 - RNA, 32 nt, Human
cacuccuacuaccaauggccacugugagccac

SEQ ID NO: 347964 - RNA, 32 nt, Human
cacuccuacuccuucucuuacugugccacugg

SEQ ID NO: 347965 - RNA, 32 nt, Human
cacuccuacugaggcuugcaggcaaagaggaa

SEQ ID NO: 347966 - RNA, 32 nt, Human
cacuccuacugccagucccaggcucuauucuu

SEQ ID NO: 347967 - RNA, 32 nt, Human
cacuccuagagaaagguacacaguuguccggc

SEQ ID NO: 347968 - RNA, 32 nt, Human
cacuccuaucucaggcuuagaggauuagauua

SEQ ID NO: 347969 - RNA, 32 nt, Human
cacuccucacuggcugguucacuguguucuga

SEQ ID NO: 347970 - RNA, 32 nt, Human
cacuccucagcuuuaauggguguggccccuuu

SEQ ID NO: 347971 - RNA, 32 nt, Human
cacuccucaugugccauuuuguccucagaggg

SEQ ID NO: 347972 - RNA, 32 nt, Human
cacuccucauucauaaggugguggugaggauu

SEQ ID NO: 347973 - RNA, 32 nt, Human
cacuccucccauuuucaccugcccccauuuug

SEQ ID NO: 347974 - RNA, 32 nt, Human
cacuccuccccaccucaaccagucccugcugg

SEQ ID NO: 347975 - RNA, 32 nt, Human
cacuccuccccacugcugacaucccccacaag

SEQ ID NO: 347976 - RNA, 32 nt, Human
cacuccuccgugggugacagagcgagaccuga

SEQ ID NO: 347977 - RNA, 32 nt, Human
cacuccucgaugcccagugaaaccagacugug

SEQ ID NO: 347978 - RNA, 32 nt, Human
cacuccucguccacuuucauguuccucccaua

SEQ ID NO: 347979 - RNA, 32 nt, Human
cacuccucuacccucugggcaccagaaggcuc

SEQ ID NO: 347980 - RNA, 32 nt, Human
cacuccucuccucugcucucgugcguccugga

SEQ ID NO: 347981 - RNA, 32 nt, Human
cacuccucugacucagggcuccuggguuuugu

SEQ ID NO: 347982 - RNA, 32 nt, Human
cacuccucuguagaugugugcccagugggagu

SEQ ID NO: 347983 - RNA, 32 nt, Human
cacuccucuuucuccucuccucagccuuacag

SEQ ID NO: 347984 - RNA, 32 nt, Human
cacuccugaauugucuccucucccucugcaug

SEQ ID NO: 347985 - RNA, 32 nt, Human
cacuccugacagaaugaaugcccucgauggug

SEQ ID NO: 347986 - RNA, 31 nt, Human
cacuccugacuucucccagccucgagaauug

SEQ ID NO: 347987 - RNA, 32 nt, Human
cacuccugcaacaacaacaaauacggcugaua

SEQ ID NO: 347988 - RNA, 32 nt, Human
cacuccugcaugggcgacugagacucugucuc

SEQ ID NO: 347989 - RNA, 32 nt, Human
cacuccugcccuccucuuccuccuccuccucc

SEQ ID NO: 347990 - RNA, 32 nt, Human
cacuccugccugggugacaaagugagacucug

SEQ ID NO: 347991 - RNA, 32 nt, Human
cacuccugccugggugacagaagagacccugu

SEQ ID NO: 347992 - RNA, 32 nt, Human
cacuccugcucugguccgagggagaucucagg

SEQ ID NO: 347993 - RNA, 32 nt, Human
cacuccugcuguuccagccucugcaggugaag

SEQ ID NO: 347994 - RNA, 31 nt, Human
cacuccugcuucucugggggccucuuucugu

SEQ ID NO: 347995 - RNA, 32 nt, Human
cacuccuggacagugauccugaugucuguugu

SEQ ID NO: 347996 - RNA, 32 nt, Human
cacuccuggcccaagacaggggccgcaggcuu

SEQ ID NO: 347997 - RNA, 22 nt, Human
cacuccugggaacugucuggca

SEQ ID NO: 347998 - RNA, 32 nt, Human
cacuccugggagcucaggaggcuucugagcuu

SEQ ID NO: 347999 - RNA, 32 nt, Human
cacuccugggcaacagagcaagacuucgucuc

SEQ ID NO: 348000 - RNA, 32 nt, Human
cacuccugggcccgggcagcagaccagucagc

SEQ ID NO: 348001 - RNA, 32 nt, Human
cacuccugggcuggguaaacaggucaucagca

SEQ ID NO: 348002 - RNA, 32 nt, Human
cacuccugguucugcugggccuguggcugcca

SEQ ID NO: 348003 - RNA, 32 nt, Human
cacuccuguaaucccagcuacuggggaggcug

SEQ ID NO: 348004 - RNA, 32 nt, Human
cacuccuguaaucccagcuacuuaggaggcug

SEQ ID NO: 348005 - RNA, 32 nt, Human
cacuccuguagucccagcacuuugggaggcug

SEQ ID NO: 348006 - RNA, 32 nt, Human
cacuccuguagucccagcuaaucaggaggcug

SEQ ID NO: 348007 - RNA, 32 nt, Human
cacuccuguagucccagcuacuaggaaggcug

SEQ ID NO: 348008 - RNA, 32 nt, Human
cacuccuguagucccaggacuuugggaggccg

SEQ ID NO: 348009 - RNA, 32 nt, Human
cacuccuguccugugcuggcuuuucuggaacg

SEQ ID NO: 348010 - RNA, 32 nt, Human
cacuccugucuucuggcuucagucuggaagau

SEQ ID NO: 348011 - RNA, 32 nt, Human
cacuccuuagaaguggggcacagcagggguga

SEQ ID NO: 348012 - RNA, 32 nt, Human
cacuccuuagaugacugacacacagauugcaa

SEQ ID NO: 348013 - RNA, 32 nt, Human
cacuccuucccaaaucugucuccccagaagac

SEQ ID NO: 348014 - RNA, 32 nt, Human
cacuccuucucccccaacucccagcccugccu

SEQ ID NO: 348015 - RNA, 32 nt, Human
cacuccuucugggcugaccagugaguccccca

SEQ ID NO: 348016 - RNA, 32 nt, Human
cacuccuugcaaccugugugacugggggcaag

SEQ ID NO: 348017 - RNA, 32 nt, Human
cacuccuugcugcugccggcgguuccagccug

SEQ ID NO: 348018 - RNA, 32 nt, Human
cacuccuuuucuccucuuggcuacauuaaaau

SEQ ID NO: 348019 - RNA, 32 nt, Human
cacucgacuuuccucuuaggaaccuggccugg

SEQ ID NO: 348020 - RNA, 32 nt, Human
cacucgagaagcaggaggccguucccugacag

SEQ ID NO: 348021 - RNA, 32 nt, Human
cacucgagccugggugacagagugagacuccg

SEQ ID NO: 348022 - RNA, 32 nt, Human
cacucgagccugggugacagggcaagacccug

SEQ ID NO: 348023 - RNA, 32 nt, Human
cacucgaggccuggggaaggggacucaggggc

SEQ ID NO: 348024 - RNA, 19 nt, Human
cacucgcaaggggacucuu

SEQ ID NO: 348025 - RNA, 32 nt, Human
cacucgcacgcucagggccacacucacacgcc

SEQ ID NO: 348026 - RNA, 32 nt, Human
cacucgcacugcaaaugccgcucucacguaug

SEQ ID NO: 348027 - RNA, 32 nt, Human
cacucgcugaggccaggcagcgcugcggagag

SEQ ID NO: 348028 - RNA, 32 nt, Human
cacucgcugccacaagugccuccuggaaaagc

SEQ ID NO: 348029 - RNA, 32 nt, Human
cacucgcuuuccagcaccucaacacggacucg

SEQ ID NO: 348030 - RNA, 20 nt, Human
cacucggauguccccugcca

SEQ ID NO: 348031 - RNA, 32 nt, Human
cacucggcacacugaagcacaugcgugggcag

SEQ ID NO: 348032 - RNA, 32 nt, Human
cacucggccaauccgcaucucagcccucucag

SEQ ID NO: 348033 - RNA, 23 nt, Human
cacucggcugggcacagugacgu

SEQ ID NO: 348034 - RNA, 32 nt, Human
cacucgggaggcugagacaggagaaucgcuua

SEQ ID NO: 348035 - RNA, 32 nt, Human
cacucgggaggcugaggcaggagaaucgcugg

SEQ ID NO: 348036 - RNA, 32 nt, Human
cacucgggccaaguaaacuugagagguuuaau

SEQ ID NO: 348037 - RNA, 32 nt, Human
cacucgucaccccagcccucggguccauagag

SEQ ID NO: 348038 - RNA, 32 nt, Human
cacucgucaccccagcuggagugcaguggugc

SEQ ID NO: 348039 - RNA, 32 nt, Human
cacucgucccccuccugccucaucuuccuucu

SEQ ID NO: 348040 - RNA, 32 nt, Human
cacucgucuuaguugcuucacacuggucacug

SEQ ID NO: 348041 - RNA, 32 nt, Human
cacucgugaugucgcgcauccgauaggcccuu

SEQ ID NO: 348042 - RNA, 32 nt, Human
cacucgugcacucacacauacaugcccacaca

SEQ ID NO: 348043 - RNA, 32 nt, Human
cacucguugcccaggcuggagugcaguggcgc

SEQ ID NO: 348044 - RNA, 32 nt, Human
cacucguugcccaggcuggaguguagaggcga

SEQ ID NO: 348045 - RNA, 32 nt, Human
cacucguuuccgaacugccucuccccaaagaa

SEQ ID NO: 348046 - RNA, 31 nt, Human
cacucuaaaccuagggagguugaagaaugag

SEQ ID NO: 348047 - RNA, 32 nt, Human
cacucuaacgaguuuucagucucucuguaugc

SEQ ID NO: 348048 - RNA, 32 nt, Human
cacucuaaguuuggagcuauuucuugauggaa

SEQ ID NO: 348049 - RNA, 32 nt, Human
cacucuaccagggaaguaugguauuggauuua

SEQ ID NO: 348050 - RNA, 32 nt, Human
cacucuaccucuaccagcgcacugauggucac

SEQ ID NO: 348051 - RNA, 23 nt, Human
cacucuacguggcacuggcccag

SEQ ID NO: 348052 - RNA, 21 nt, Human
cacucuacuccagccugggca

SEQ ID NO: 348053 - RNA, 32 nt, Human
cacucuacucugggugacagaaugagacccca

SEQ ID NO: 348054 - RNA, 32 nt, Human
cacucuagaaggccgaggcgggcggaucaccu

SEQ ID NO: 348055 - RNA, 32 nt, Human
cacucuagcccggacgacagagcgagacuguc

SEQ ID NO: 348056 - RNA, 32 nt, Human
cacucuagccggagugacagaguaagacucug

SEQ ID NO: 348057 - RNA, 32 nt, Human
cacucuagccggggcgacagagcgagacucug

SEQ ID NO: 348058 - RNA, 32 nt, Human
cacucuagccuacauagagcuuucuguugcug

SEQ ID NO: 348059 - RNA, 32 nt, Human
cacucuagccuaggugacagagugagacucca

SEQ ID NO: 348060 - RNA, 32 nt, Human
cacucuagccuagguggcugagcgagacucca

SEQ ID NO: 348061 - RNA, 32 nt, Human
cacucuagccucggugacagaguaagauucca

SEQ ID NO: 348062 - RNA, 23 nt, Human
cacucuagccugagcaacaagag

SEQ ID NO: 348063 - RNA, 32 nt, Human
cacucuagccugagugacagagcagacuccug

SEQ ID NO: 348064 - RNA, 32 nt, Human
cacucuagccugggauacagagcuagacucca

SEQ ID NO: 348065 - RNA, 32 nt, Human
cacucuagccugggcaacagagcaaggcucug

SEQ ID NO: 348066 - RNA, 32 nt, Human
cacucuagccugggcaacagagcgagacucug

SEQ ID NO: 348067 - RNA, 32 nt, Human
cacucuagccugggcaacagaguaagacaaaa

SEQ ID NO: 348068 - RNA, 32 nt, Human
cacucuagccugggcaacagagugagaucccg

SEQ ID NO: 348069 - RNA, 32 nt, Human
cacucuagccugggcaagagaacaagauccug

SEQ ID NO: 348070 - RNA, 32 nt, Human
cacucuagccugggcaauaagagcaagacugu

SEQ ID NO: 348071 - RNA, 32 nt, Human
cacucuagccugggccacagggcgagacuccg

SEQ ID NO: 348072 - RNA, 32 nt, Human
cacucuagccugggccauagagcgagagucca

SEQ ID NO: 348073 - RNA, 32 nt, Human
cacucuagccugggcgacagagcaagacuguc

SEQ ID NO: 348074 - RNA, 32 nt, Human
cacucuagccugggcgacagagcgagacucca

SEQ ID NO: 348075 - RNA, 32 nt, Human
cacucuagccugggcgacagagugagacucug

SEQ ID NO: 348076 - RNA, 32 nt, Human
cacucuagccugggcuacagagcgagacucug

SEQ ID NO: 348077 - RNA, 32 nt, Human
cacucuagccuggggaacagagugaggcccug

SEQ ID NO: 348078 - RNA, 32 nt, Human
cacucuagccuggggaauagagugagauccug

SEQ ID NO: 348079 - RNA, 32 nt, Human
cacucuagccugggggaagagugagacucugu

SEQ ID NO: 348080 - RNA, 32 nt, Human
cacucuagccugggugaaagagcgaaacucca

SEQ ID NO: 348081 - RNA, 32 nt, Human
cacucuagccugggugacaaagcaagacucca

SEQ ID NO: 348082 - RNA, 32 nt, Human
cacucuagccugggugacagagagagacuccg

SEQ ID NO: 348083 - RNA, 32 nt, Human
cacucuagccugggugacagagcaagacucug

SEQ ID NO: 348084 - RNA, 32 nt, Human
cacucuagccugggugacagagcgagaccuug

SEQ ID NO: 348085 - RNA, 32 nt, Human
cacucuagccugggugacagagcgagacucca

SEQ ID NO: 348086 - RNA, 32 nt, Human
cacucuagccugggugacagagucagacuccg

SEQ ID NO: 348087 - RNA, 32 nt, Human
cacucuagccugggugacagagugagacucca

SEQ ID NO: 348088 - RNA, 32 nt, Human
cacucuagccugggugacagugugagacucug

SEQ ID NO: 348089 - RNA, 32 nt, Human
cacucuagccugggugaccgagggaggcucug

SEQ ID NO: 348090 - RNA, 32 nt, Human
cacucuagccugugugacagagcaagacccug

SEQ ID NO: 348091 - RNA, 32 nt, Human
cacucuagcucaauauauccucuggggaccau

SEQ ID NO: 348092 - RNA, 32 nt, Human
cacucuagcuugggagacagagcgagacuccg

SEQ ID NO: 348093 - RNA, 32 nt, Human
cacucuaggaagaagacaaaugacagauucug

SEQ ID NO: 348094 - RNA, 32 nt, Human
cacucuaggacucugcacugaauggcugaccu

SEQ ID NO: 348095 - RNA, 32 nt, Human
cacucuaggagaaggaggggaaccagauguua

SEQ ID NO: 348096 - RNA, 32 nt, Human
cacucuaggaggccgaggagggcagaucaacu

SEQ ID NO: 348097 - RNA, 32 nt, Human
cacucuaucacccaagcuggagugcaguggca

SEQ ID NO: 348098 - RNA, 32 nt, Human
cacucuauccucugcacuguuaauaguaaccu

SEQ ID NO: 348099 - RNA, 32 nt, Human
cacucuauugcccaggcuggagugcacuggcg

SEQ ID NO: 348100 - RNA, 32 nt, Human
cacucuauugcucaggcuggagugugguggca

SEQ ID NO: 348101 - RNA, 32 nt, Human
cacucuauuuuggucccugugacauuuuaaau

SEQ ID NO: 348102 - RNA, 32 nt, Human
cacucucaacccaggcaaucacagucauuucc

SEQ ID NO: 348103 - RNA, 19 nt, Human
cacucucaauccuacauca

SEQ ID NO: 348104 - RNA, 32 nt, Human
cacucucacacccaggcuggagugcagucuca

SEQ ID NO: 348105 - RNA, 32 nt, Human
cacucucacagaaccgggcauguguuucaacc

SEQ ID NO: 348106 - RNA, 32 nt, Human
cacucucacagucacacacaugcacucaccac

SEQ ID NO: 348107 - RNA, 32 nt, Human
cacucucacccaggcuggagugcaguggcaca

SEQ ID NO: 348108 - RNA, 32 nt, Human
cacucucagaggauuccagacacacaccacuc

SEQ ID NO: 348109 - RNA, 32 nt, Human
cacucucagagguaccucaagagaccaaagag

SEQ ID NO: 348110 - RNA, 32 nt, Human
cacucucagccugggagacuccugccaagccc

SEQ ID NO: 348111 - RNA, 32 nt, Human
cacucucaggggccucuuucagcuggggcugg

SEQ ID NO: 348112 - RNA, 32 nt, Human
cacucucaugcuugccgcaucaugccucccug

SEQ ID NO: 348113 - RNA, 32 nt, Human
cacucucaugucuuaaguucagcuggugcuau

SEQ ID NO: 348114 - RNA, 32 nt, Human
cacucuccagcagaaugucugcuugugucuag

SEQ ID NO: 348115 - RNA, 32 nt, Human
cacucuccagccuuuuccuggcugaggagggg

SEQ ID NO: 348116 - RNA, 32 nt, Human
cacucuccaucuuucccaaagucacuccagga

SEQ ID NO: 348117 - RNA, 32 nt, Human
cacucucccacuguacccaccccuaaaucauu

SEQ ID NO: 348118 - RNA, 32 nt, Human
cacucucccccuccucuucuggucuggcggcu

SEQ ID NO: 348119 - RNA, 32 nt, Human
cacucuccccuccuccaaacuucaacuccucc

SEQ ID NO: 348120 - RNA, 32 nt, Human
cacucucccucugcuacugcugcugaucugaa

SEQ ID NO: 348121 - RNA, 32 nt, Human
cacucucccuggcaggagcccgccuggcacag

SEQ ID NO: 348122 - RNA, 32 nt, Human
cacucuccuccaccggcgccucccccuccgcu

SEQ ID NO: 348123 - RNA, 32 nt, Human
cacucuccuccccucuuuuccuuccuuccuac

SEQ ID NO: 348124 - RNA, 32 nt, Human
cacucuccucgcccaguuucugaggucagacg

SEQ ID NO: 348125 - RNA, 32 nt, Human
cacucuccuuuuucugggucccuucccacuuc

SEQ ID NO: 348126 - RNA, 32 nt, Human
cacucucucagggacauccauucuguaccagc

SEQ ID NO: 348127 - RNA, 32 nt, Human
cacucucucaucauccuguuccuuggauugga

SEQ ID NO: 348128 - RNA, 32 nt, Human
cacucucuccacccucccuucaccucccucuu

SEQ ID NO: 348129 - RNA, 32 nt, Human
cacucucucgcccaggcuggagugcaacggua

SEQ ID NO: 348130 - RNA, 32 nt, Human
cacucucucgcccaggcuggagugcaguggcg

SEQ ID NO: 348131 - RNA, 32 nt, Human
cacucucuggagguggagacugccgugauuca

SEQ ID NO: 348132 - RNA, 32 nt, Human
cacucucuggccgaaguggccgcaggcugugc

SEQ ID NO: 348133 - RNA, 32 nt, Human
cacucucugggagcuugaagcugccauguaau

SEQ ID NO: 348134 - RNA, 32 nt, Human
cacucucuguucuugcuaucuaauggccgcug

SEQ ID NO: 348135 - RNA, 32 nt, Human
cacucucuuaaccugcccucccugcacucgcu

SEQ ID NO: 348136 - RNA, 32 nt, Human
cacucucuuaggggcuauggggcaguuagcag

SEQ ID NO: 348137 - RNA, 32 nt, Human
cacucucuucaguuguugaggugccagaagag

SEQ ID NO: 348138 - RNA, 32 nt, Human
cacucucuuccacgaagagucaaugggacugg

SEQ ID NO: 348139 - RNA, 32 nt, Human
cacucucuucuuacuucugucacucuuccuuc

SEQ ID NO: 348140 - RNA, 32 nt, Human
cacucucuucuuuagaccccuaccuuugcccu

SEQ ID NO: 348141 - RNA, 32 nt, Human
cacucucuucuuuccacuuccuucucaucuuu

SEQ ID NO: 348142 - RNA, 32 nt, Human
cacucucuugcccaggcuggagugcaguggua

SEQ ID NO: 348143 - RNA, 32 nt, Human
cacucucuuucucucucccucuggcaugcaug

SEQ ID NO: 348144 - RNA, 32 nt, Human
cacucucuuugccuccccugaaucuguguggu

SEQ ID NO: 348145 - RNA, 32 nt, Human
cacucugaacaucaccuccuguacuuccagcu

SEQ ID NO: 348146 - RNA, 32 nt, Human
cacucugaagccacagcccgagcuguauguug

SEQ ID NO: 348147 - RNA, 32 nt, Human
cacucugaccaccaccuccuagcuauccaggu

SEQ ID NO: 348148 - RNA, 17 nt, Human
cacucugagccuacuga

SEQ ID NO: 348149 - RNA, 32 nt, Human
cacucugagggcccuggacugggccugagcuu

SEQ ID NO: 348150 - RNA, 32 nt, Human
cacucugauuggcagccugcuuugccaaagag

SEQ ID NO: 348151 - RNA, 32 nt, Human
cacucugcaagcccuucaggugcucaaguacu

SEQ ID NO: 348152 - RNA, 32 nt, Human
cacucugcacacaagagaaaucaacuucgugg

SEQ ID NO: 348153 - RNA, 32 nt, Human
cacucugcacucucccccucuauggaucagga

SEQ ID NO: 348154 - RNA, 32 nt, Human
cacucugcagaggcugagaugcacccaucuag

SEQ ID NO: 348155 - RNA, 32 nt, Human
cacucugcagcucaccaugcagcugaugccaa

SEQ ID NO: 348156 - RNA, 32 nt, Human
cacucugccaaggacggaggucgcauugcugu

SEQ ID NO: 348157 - RNA, 32 nt, Human
cacucugccacccaagcuggagugcaguggca

SEQ ID NO: 348158 - RNA, 32 nt, Human
cacucugccauuuuggaacugaucucauuuca

SEQ ID NO: 348159 - RNA, 21 nt, Human
cacucugccccagcucccugg

SEQ ID NO: 348160 - RNA, 32 nt, Human
cacucugccucauuucugccuccaggaugcca

SEQ ID NO: 348161 - RNA, 32 nt, Human
cacucugccucccugucaccucaggcuugacc

SEQ ID NO: 348162 - RNA, 32 nt, Human
cacucugcgccccucgaucucccaggcucuuu

SEQ ID NO: 348163 - RNA, 32 nt, Human
cacucugcuaagccugguuuucuugagcagag

SEQ ID NO: 348164 - RNA, 32 nt, Human
cacucugcucaauccaaaucacagcucucccg

SEQ ID NO: 348165 - RNA, 32 nt, Human
cacucugcugcccagccaccaggauuucugcc

SEQ ID NO: 348166 - RNA, 32 nt, Human
cacucugcugcccaggcuggaguacaguggca

SEQ ID NO: 348167 - RNA, 32 nt, Human
cacucugcugccuaggcugagugcaguggugu

SEQ ID NO: 348168 - RNA, 32 nt, Human
cacucugcugcucaggcuggagugcaguggug

SEQ ID NO: 348169 - RNA, 32 nt, Human
cacucugcuuccuuggacaauaucaguaauag

SEQ ID NO: 348170 - RNA, 32 nt, Human
cacucugcuuugcccaagugugacagcacugg

SEQ ID NO: 348171 - RNA, 32 nt, Human
cacucuggaaagaagagagaagugaaggcucu

SEQ ID NO: 348172 - RNA, 32 nt, Human
cacucuggaagccacaguggaguccucugcuu

SEQ ID NO: 348173 - RNA, 32 nt, Human
cacucuggagagaagccauaugaauguaagga

SEQ ID NO: 348174 - RNA, 32 nt, Human
cacucuggaggcggcggcagccagcgagggag

SEQ ID NO: 348175 - RNA, 32 nt, Human
cacucuggagugucuuugggaggcaggcuauu

SEQ ID NO: 348176 - RNA, 32 nt, Human
cacucuggauccagugacagcaggugucaugg

SEQ ID NO: 348177 - RNA, 32 nt, Human
cacucuggccacuccuccucugguggcaugag

SEQ ID NO: 348178 - RNA, 32 nt, Human
cacucuggccugcaugcacucuggccugcaug

SEQ ID NO: 348179 - RNA, 32 nt, Human
cacucuggccugcuuuguucccuucccugucc

SEQ ID NO: 348180 - RNA, 32 nt, Human
cacucuggcgcucuggagugcaguggugugau

SEQ ID NO: 348181 - RNA, 32 nt, Human
cacucuggcucaagccuguaaucccagcacuu

SEQ ID NO: 348182 - RNA, 32 nt, Human
cacucugggaggagaggguggagaaagcacuu

SEQ ID NO: 348183 - RNA, 32 nt, Human
cacucugggaggccaaggugggcagaucacga

SEQ ID NO: 348184 - RNA, 32 nt, Human
cacucugggaggccaagguggguugaucacuu

SEQ ID NO: 348185 - RNA, 32 nt, Human
cacucugggaggccgaggcgggaagaucacuu

SEQ ID NO: 348186 - RNA, 32 nt, Human
cacucugggaggccgaggcggguggaucaccu

SEQ ID NO: 348187 - RNA, 32 nt, Human
cacucugggaggccgagguggauggaucaccu

SEQ ID NO: 348188 - RNA, 32 nt, Human
cacucugggaggcugaggcgggcagaucaccu

SEQ ID NO: 348189 - RNA, 32 nt, Human
cacucugggaggcugaggcggguggaucacga

SEQ ID NO: 348190 - RNA, 32 nt, Human
cacucugggcagcucuaggcucagcagauguu

SEQ ID NO: 348191 - RNA, 32 nt, Human
cacucugggcugcuccagccugcaacuuagug

SEQ ID NO: 348192 - RNA, 32 nt, Human
cacucuggggacccgcugggggcuggcagagg

SEQ ID NO: 348193 - RNA, 32 nt, Human
cacucuggggcccagccugccugccgcacccc

SEQ ID NO: 348194 - RNA, 31 nt, Human
cacucuggguuccacagcacagcagacaugg

SEQ ID NO: 348195 - RNA, 32 nt, Human
cacucuggucccuauuccccagcuccuaggca

SEQ ID NO: 348196 - RNA, 32 nt, Human
cacucuggucucaaacuccugggcucaaccaa

SEQ ID NO: 348197 - RNA, 32 nt, Human
cacucuguaacccaggcuggagugcaguggcc

SEQ ID NO: 348198 - RNA, 32 nt, Human
cacucuguagcccagucuggagugcaguggua

SEQ ID NO: 348199 - RNA, 32 nt, Human
cacucuguagcccagucuggagugcaguggug

SEQ ID NO: 348200 - RNA, 32 nt, Human
cacucugucaaccaggcuggagugcacuggcg

SEQ ID NO: 348201 - RNA, 32 nt, Human
cacucugucacacaggcuggagugcaguacaa

SEQ ID NO: 348202 - RNA, 32 nt, Human
cacucugucacacaggcuggagugcaguggca

SEQ ID NO: 348203 - RNA, 32 nt, Human
cacucugucaccagacuggagugcaguggcgc

SEQ ID NO: 348204 - RNA, 32 nt, Human
cacucugucaccaggcuagagugcaguggcac

SEQ ID NO: 348205 - RNA, 32 nt, Human
cacucugucaccaggcuggagugcagugccgc

SEQ ID NO: 348206 - RNA, 32 nt, Human
cacucugucaccaggcuggagugcaguggcgc

SEQ ID NO: 348207 - RNA, 32 nt, Human
cacucugucacccaagauggagugcaauggca

SEQ ID NO: 348208 - RNA, 32 nt, Human
cacucugucacccaagcuggagugcacuggca

SEQ ID NO: 348209 - RNA, 32 nt, Human
cacucugucacccaagcuggagugcaguggug

SEQ ID NO: 348210 - RNA, 32 nt, Human
cacucugucacccaaggcggagugcagugacg

SEQ ID NO: 348211 - RNA, 32 nt, Human
cacucugucacccagacuggagugcagugcca

SEQ ID NO: 348212 - RNA, 32 nt, Human
cacucugucacccagacuggagugcaguggcg

SEQ ID NO: 348213 - RNA, 32 nt, Human
cacucugucacccaggccaaguucaauggugc

SEQ ID NO: 348214 - RNA, 32 nt, Human
cacucugucacccaggcgggaguuagguggca

SEQ ID NO: 348215 - RNA, 32 nt, Human
cacucugucacccaggcugaagugcaguggua

SEQ ID NO: 348216 - RNA, 32 nt, Human
cacucugucacccaggcugcagugcaauggcg

SEQ ID NO: 348217 - RNA, 32 nt, Human
cacucugucacccaggcugcaguguaguggug

SEQ ID NO: 348218 - RNA, 32 nt, Human
cacucugucacccaggcuggaaugacgaagug

SEQ ID NO: 348219 - RNA, 32 nt, Human
cacucugucacccaggcuggaaugcaguggug

SEQ ID NO: 348220 - RNA, 32 nt, Human
cacucugucacccaggcuggacugcaaugacg

SEQ ID NO: 348221 - RNA, 32 nt, Human
cacucugucacccaggcuggagagcaauugca

SEQ ID NO: 348222 - RNA, 32 nt, Human
cacucugucacccaggcuggaguacaauggcg

SEQ ID NO: 348223 - RNA, 32 nt, Human
cacucugucacccaggcuggaguacagugaca

SEQ ID NO: 348224 - RNA, 32 nt, Human
cacucugucacccaggcuggaguacaguggca

SEQ ID NO: 348225 - RNA, 32 nt, Human
cacucugucacccaggcuggagugcaaugcug

SEQ ID NO: 348226 - RNA, 32 nt, Human
cacucugucacccaggcuggagugcaauggca

SEQ ID NO: 348227 - RNA, 32 nt, Human
cacucugucacccaggcuggagugcaauggcg

SEQ ID NO: 348228 - RNA, 32 nt, Human
cacucugucacccaggcuggagugcaauggug

SEQ ID NO: 348229 - RNA, 32 nt, Human
cacucugucacccaggcuggagugcaguagca

SEQ ID NO: 348230 - RNA, 32 nt, Human
cacucugucacccaggcuggagugcaguagcg

SEQ ID NO: 348231 - RNA, 32 nt, Human
cacucugucacccaggcuggagugcaguggca

SEQ ID NO: 348232 - RNA, 32 nt, Human
cacucugucacccaggcuggagugcaguggcg

SEQ ID NO: 348233 - RNA, 32 nt, Human
cacucugucacccaggcuggagugcaguggcu

SEQ ID NO: 348234 - RNA, 32 nt, Human
cacucugucacccaggcuggagugcaguggua

SEQ ID NO: 348235 - RNA, 32 nt, Human
cacucugucacccaggcuggagugcaguggug

SEQ ID NO: 348236 - RNA, 32 nt, Human
cacucugucacccaggcuggagugcaguguca

SEQ ID NO: 348237 - RNA, 32 nt, Human
cacucugucacccaggcuggagugcgguggcg

SEQ ID NO: 348238 - RNA, 32 nt, Human
cacucugucacccaggcuggaguguaguggca

SEQ ID NO: 348239 - RNA, 32 nt, Human
cacucugucacccaggcuggaguguaguggug

SEQ ID NO: 348240 - RNA, 32 nt, Human
cacucugucacccaggcugggaauugcagugg

SEQ ID NO: 348241 - RNA, 32 nt, Human
cacucugucacccaggcugggaugcaguggcu

SEQ ID NO: 348242 - RNA, 32 nt, Human
cacucugucacccagguuggagugcagcaggg

SEQ ID NO: 348243 - RNA, 32 nt, Human
cacucugucacccuggcuggagugcgguggcg

SEQ ID NO: 348244 - RNA, 32 nt, Human
cacucugucaccgagguuggagugcaguggua

SEQ ID NO: 348245 - RNA, 32 nt, Human
cacucugucaccuaggcuggagugcaguggug

SEQ ID NO: 348246 - RNA, 32 nt, Human
cacucugucaccuaggcuggaguugcaguggu

SEQ ID NO: 348247 - RNA, 32 nt, Human
cacucugucaccuaggcuggauugcaauggug

SEQ ID NO: 348248 - RNA, 32 nt, Human
cacucugucacucaggcuggagugcaaugacg

SEQ ID NO: 348249 - RNA, 32 nt, Human
cacucugucacucaggcuggagugcaguggcg

SEQ ID NO: 348250 - RNA, 32 nt, Human
cacucugucacucaggcuggagugcaguggua

SEQ ID NO: 348251 - RNA, 32 nt, Human
cacucugucacucaggcuggagugcgguggua

SEQ ID NO: 348252 - RNA, 32 nt, Human
cacucugucauccaggcuggagugcaguggca

SEQ ID NO: 348253 - RNA, 32 nt, Human
cacucugucauccaggcuggagugcaguggug

SEQ ID NO: 348254 - RNA, 32 nt, Human
cacucugucccccaggcuggagugcaguggcg

SEQ ID NO: 348255 - RNA, 32 nt, Human
cacucugucgccaggcuggaaugcaguagggc

SEQ ID NO: 348256 - RNA, 32 nt, Human
cacucugucgccaggcuggagugcaguggcgu

SEQ ID NO: 348257 - RNA, 32 nt, Human
cacucugucgccaggcuggagugcaguggugu

SEQ ID NO: 348258 - RNA, 32 nt, Human
cacucugucgcccaagcuggagugcaguggca

SEQ ID NO: 348259 - RNA, 32 nt, Human
cacucugucgcccagacuggagugcaguagcg

SEQ ID NO: 348260 - RNA, 32 nt, Human
cacucugucgcccaggcuagagugcaguggca

SEQ ID NO: 348261 - RNA, 32 nt, Human
cacucugucgcccaggcuagagugcaguggcg

SEQ ID NO: 348262 - RNA, 32 nt, Human
cacucugucgcccaggcuggaaugcaguggca

SEQ ID NO: 348263 - RNA, 32 nt, Human
cacucugucgcccaggcuggaaugcaguggcg

SEQ ID NO: 348264 - RNA, 32 nt, Human
cacucugucgcccaggcuggacuacaauggca

SEQ ID NO: 348265 - RNA, 32 nt, Human
cacucugucgcccaggcuggagggcaguggcg

SEQ ID NO: 348266 - RNA, 32 nt, Human
cacucugucgcccaggcuggagugcaauacug

SEQ ID NO: 348267 - RNA, 32 nt, Human
cacucugucgcccaggcuggagugcaguagcg

SEQ ID NO: 348268 - RNA, 29 nt, Human
cacucugucgcccaggcuggagugcagug

SEQ ID NO: 348269 - RNA, 32 nt, Human
cacucugucgcccaggcuggagugcaguggca

SEQ ID NO: 348270 - RNA, 32 nt, Human
cacucugucgcccaggcuggagugcaguggcg

SEQ ID NO: 348271 - RNA, 32 nt, Human
cacucugucgcccaggcuggagugcaguggug

SEQ ID NO: 348272 - RNA, 32 nt, Human
cacucugucgcccaggcuggagugcaguguca

SEQ ID NO: 348273 - RNA, 32 nt, Human
cacucugucgcccaggcuggggugcaguggcg

SEQ ID NO: 348274 - RNA, 32 nt, Human
cacucugucgcccaggguggagugcgguggca

SEQ ID NO: 348275 - RNA, 32 nt, Human
cacucugucgccugggcuggaguacaguggug

SEQ ID NO: 348276 - RNA, 32 nt, Human
cacucugucgcgccagcuggagugcagugcca

SEQ ID NO: 348277 - RNA, 32 nt, Human
cacucugucgcucaggcuggagugcagugaug

SEQ ID NO: 348278 - RNA, 32 nt, Human
cacucugucguccagguuagagugcaauggcu

SEQ ID NO: 348279 - RNA, 32 nt, Human
cacucugucucccaggcuagagugcaguggug

SEQ ID NO: 348280 - RNA, 32 nt, Human
cacucugucucccaggcuggacugcaguggug

SEQ ID NO: 348281 - RNA, 32 nt, Human
cacucugucucccaggcuggagugcaauggug

SEQ ID NO: 348282 - RNA, 32 nt, Human
cacucugucucccaggcuggagugcaguggag

SEQ ID NO: 348283 - RNA, 32 nt, Human
cacucugucucccaggcuggagugcaguggca

SEQ ID NO: 348284 - RNA, 32 nt, Human
cacucugucucccaggcuggagugcaguggug

SEQ ID NO: 348285 - RNA, 32 nt, Human
cacucugucucccaggcuggagugugauggcg

SEQ ID NO: 348286 - RNA, 32 nt, Human
cacucugucucccaggcuggaguugcaguggu

SEQ ID NO: 348287 - RNA, 32 nt, Human
cacucugucuccuccccuccugccuggguccc

SEQ ID NO: 348288 - RNA, 32 nt, Human
cacucugucugucuccccaagcugggcagccc

SEQ ID NO: 348289 - RNA, 32 nt, Human
cacucugugaggcagcagagccugggcaggug

SEQ ID NO: 348290 - RNA, 32 nt, Human
cacucugugcaggggcccggagcccagcgccc

SEQ ID NO: 348291 - RNA, 32 nt, Human
cacucugugccucugcugagaauccagggcug

SEQ ID NO: 348292 - RNA, 21 nt, Human
cacucuguggccagccuggca

SEQ ID NO: 348293 - RNA, 32 nt, Human
cacucuguggcccaggcuggagugcaguggca

SEQ ID NO: 348294 - RNA, 32 nt, Human
cacucuguggcccaggcuggagugcaguggcg

SEQ ID NO: 348295 - RNA, 32 nt, Human
cacucuguggcccaggcuggagugcaguggug

SEQ ID NO: 348296 - RNA, 32 nt, Human
cacucuguggugucaggcacugggcugugucc

SEQ ID NO: 348297 - RNA, 32 nt, Human
cacucugugucccaggcuggagugcaguggca

SEQ ID NO: 348298 - RNA, 32 nt, Human
cacucugugucucaggcuggaguacaguggug

SEQ ID NO: 348299 - RNA, 32 nt, Human
cacucuguguucaacacacagaacaacauaga

SEQ ID NO: 348300 - RNA, 32 nt, Human
cacucuguuacccaggccggagugcaguggcg

SEQ ID NO: 348301 - RNA, 32 nt, Human
cacucuguuacccaggcuagagugcaguggcg

SEQ ID NO: 348302 - RNA, 32 nt, Human
cacucuguuacccaggcuagaguguaguggca

SEQ ID NO: 348303 - RNA, 32 nt, Human
cacucuguuacccaggcuggaaugcaguggcg

SEQ ID NO: 348304 - RNA, 32 nt, Human
cacucuguuacccaggcuggagugcaauggag

SEQ ID NO: 348305 - RNA, 32 nt, Human
cacucuguucauaagaaaaaggccugaaguga

SEQ ID NO: 348306 - RNA, 32 nt, Human
cacucuguuccccaggccggagugcaguggua

SEQ ID NO: 348307 - RNA, 32 nt, Human
cacucuguuccuacuggagauaccagagacuc

SEQ ID NO: 348308 - RNA, 32 nt, Human
cacucuguugaccaggcuggagugcaguggug

SEQ ID NO: 348309 - RNA, 32 nt, Human
cacucuguugccaaggcuggaaugcaguggcg

SEQ ID NO: 348310 - RNA, 32 nt, Human
cacucuguugccaggcuggaaugcaguggcgu

SEQ ID NO: 348311 - RNA, 32 nt, Human
cacucuguugccaggcuggagugcaguggcgc

SEQ ID NO: 348312 - RNA, 32 nt, Human
cacucuguugcccagacuggagugcaguggca

SEQ ID NO: 348313 - RNA, 32 nt, Human
cacucuguugcccagacuggagugcaguggug

SEQ ID NO: 348314 - RNA, 32 nt, Human
cacucuguugcccagccuggagugcaguggca

SEQ ID NO: 348315 - RNA, 32 nt, Human
cacucuguugcccagccuggagugcagugugu

SEQ ID NO: 348316 - RNA, 32 nt, Human
cacucuguugcccagcuggagugcaguggcgu

SEQ ID NO: 348317 - RNA, 32 nt, Human
cacucuguugcccaggauggagugcaguggug

SEQ ID NO: 348318 - RNA, 32 nt, Human
cacucuguugcccaggcuagagugcaauggca

SEQ ID NO: 348319 - RNA, 32 nt, Human
cacucuguugcccaggcuagagugcacuaaua

SEQ ID NO: 348320 - RNA, 32 nt, Human
cacucuguugcccaggcugaagugcaguggug

SEQ ID NO: 348321 - RNA, 32 nt, Human
cacucuguugcccaggcugagguacaguggcg

SEQ ID NO: 348322 - RNA, 32 nt, Human
cacucuguugcccaggcugcagugcaguggug

SEQ ID NO: 348323 - RNA, 32 nt, Human
cacucuguugcccaggcuggaaugcagugaua

SEQ ID NO: 348324 - RNA, 32 nt, Human
cacucuguugcccaggcuggaaugcaguggua

SEQ ID NO: 348325 - RNA, 32 nt, Human
cacucuguugcccaggcuggacuacaguggca

SEQ ID NO: 348326 - RNA, 32 nt, Human
cacucuguugcccaggcuggaguaaagggcag

SEQ ID NO: 348327 - RNA, 32 nt, Human
cacucuguugcccaggcuggaguacaguggca

SEQ ID NO: 348328 - RNA, 32 nt, Human
cacucuguugcccaggcuggaguacaguggcg

SEQ ID NO: 348329 - RNA, 32 nt, Human
cacucuguugcccaggcuggagugcaauggca

SEQ ID NO: 348330 - RNA, 32 nt, Human
cacucuguugcccaggcuggagugcagugaug

SEQ ID NO: 348331 - RNA, 30 nt, Human
cacucuguugcccaggcuggagugcagugg

SEQ ID NO: 348332 - RNA, 32 nt, Human
cacucuguugcccaggcuggagugcaguggca

SEQ ID NO: 348333 - RNA, 32 nt, Human
cacucuguugcccaggcuggagugcaguggcg

SEQ ID NO: 348334 - RNA, 32 nt, Human
cacucuguugcccaggcuggagugcaguggug

SEQ ID NO: 348335 - RNA, 32 nt, Human
cacucuguugcccaggcuggagugcaguguca

SEQ ID NO: 348336 - RNA, 32 nt, Human
cacucuguugcccaggcuggagugccucuuca

SEQ ID NO: 348337 - RNA, 32 nt, Human
cacucuguugcccaggcuggagugcgauggca

SEQ ID NO: 348338 - RNA, 32 nt, Human
cacucuguugcccaggcuggaguguaguggug

SEQ ID NO: 348339 - RNA, 32 nt, Human
cacucuguugcccaggcuggaguucagcggug

SEQ ID NO: 348340 - RNA, 32 nt, Human
cacucuguugcccaggguggagugcaguggca

SEQ ID NO: 348341 - RNA, 32 nt, Human
cacucuguugcccagucuggagugcaguggcg

SEQ ID NO: 348342 - RNA, 32 nt, Human
cacucuguugcccgggcuggagugcagcggcg

SEQ ID NO: 348343 - RNA, 32 nt, Human
cacucuguugcccuggcuggagugcaguagag

SEQ ID NO: 348344 - RNA, 32 nt, Human
cacucuguugccuagacuggagugcaauggcg

SEQ ID NO: 348345 - RNA, 32 nt, Human
cacucuguugccuaggcuggaggacaguggca

SEQ ID NO: 348346 - RNA, 32 nt, Human
cacucuguugccuaggcuggaguacaguggca

SEQ ID NO: 348347 - RNA, 32 nt, Human
cacucuguugcuaggcuggagugcaguggcac

SEQ ID NO: 348348 - RNA, 32 nt, Human
cacucuguugcucaggcuggagugcaguggca

SEQ ID NO: 348349 - RNA, 32 nt, Human
cacucuguuggccaggcugguuucgaacuccu

SEQ ID NO: 348350 - RNA, 32 nt, Human
cacucuguuguaagcugaauguuaacacacua

SEQ ID NO: 348351 - RNA, 32 nt, Human
cacucuguuguccaggcuggagugcagcgaua

SEQ ID NO: 348352 - RNA, 32 nt, Human
cacucuguuucuggggcugcugaggccccugg

SEQ ID NO: 348353 - RNA, 32 nt, Human
cacucuuaaauacuguacuacuucacuguaag

SEQ ID NO: 348354 - RNA, 32 nt, Human
cacucuuaagggugagaagaauaaccacaauu

SEQ ID NO: 348355 - RNA, 32 nt, Human
cacucuuacccaauuucugggcucuggauccu

SEQ ID NO: 348356 - RNA, 32 nt, Human
cacucuuacuuucuuacucucuucucagguca

SEQ ID NO: 348357 - RNA, 32 nt, Human
cacucuuagguucaccccgcggccgaucgucc

SEQ ID NO: 348358 - RNA, 32 nt, Human
cacucuuaucagcuuagaguguucaacugauc

SEQ ID NO: 348359 - RNA, 32 nt, Human
cacucuuaugcccacgcuggagugcagugagc

SEQ ID NO: 348360 - RNA, 32 nt, Human
cacucuuauuggccaggcaggggcucccacag

SEQ ID NO: 348361 - RNA, 32 nt, Human
cacucuucacagguaguucacacucugagacu

SEQ ID NO: 348362 - RNA, 32 nt, Human
cacucuucacucaggcugcagugcaguggcgc

SEQ ID NO: 348363 - RNA, 32 nt, Human
cacucuucagccaggggaguggguaggccaua

SEQ ID NO: 348364 - RNA, 32 nt, Human
cacucuucaguucugaaauagacagacuugag

SEQ ID NO: 348365 - RNA, 32 nt, Human
cacucuuccacugacuugcugugugaccuuag

SEQ ID NO: 348366 - RNA, 32 nt, Human
cacucuucccucucaucaucauggccccaccg

SEQ ID NO: 348367 - RNA, 32 nt, Human
cacucuuccuacccucucccuccuaacccucu

SEQ ID NO: 348368 - RNA, 32 nt, Human
cacucuuccucuucuccuuuuuccgcacuucu

SEQ ID NO: 348369 - RNA, 32 nt, Human
cacucuucugagaaggcuuugccuccucguac

SEQ ID NO: 348370 - RNA, 32 nt, Human
cacucuugaccuggagccaucuuccuaguggg

SEQ ID NO: 348371 - RNA, 32 nt, Human
cacucuugagccacaauaccugucaccagccu

SEQ ID NO: 348372 - RNA, 32 nt, Human
cacucuugauuacacuggcagcucuaugagua

SEQ ID NO: 348373 - RNA, 32 nt, Human
cacucuugcccaggcuggagcgcaaguggcgc

SEQ ID NO: 348374 - RNA, 32 nt, Human
cacucuugcccaggcuggagugcaguggugcg

SEQ ID NO: 348375 - RNA, 32 nt, Human
cacucuugcccaggcuggggugucguggcgug

SEQ ID NO: 348376 - RNA, 32 nt, Human
cacucuugcccaggcuguagugcuguggcacg

SEQ ID NO: 348377 - RNA, 32 nt, Human
cacucuugcccaguggaggguguccaaagugc

SEQ ID NO: 348378 - RNA, 32 nt, Human
cacucuugcugucugucuuucuugccuucuuu

SEQ ID NO: 348379 - RNA, 32 nt, Human
cacucuugggcccugguuuuguuaugauuugg

SEQ ID NO: 348380 - RNA, 32 nt, Human
cacucuuguagucccagcuauuugggaggcug

SEQ ID NO: 348381 - RNA, 32 nt, Human
cacucuugucuggagacaggcaggacaaugga

SEQ ID NO: 348382 - RNA, 32 nt, Human
cacucuugucugggugacagagugagaccccu

SEQ ID NO: 348383 - RNA, 32 nt, Human
cacucuugugcccaggcuggagugcaauagcu

SEQ ID NO: 348384 - RNA, 32 nt, Human
cacucuuguugcccaggcggagugcaguggaa

SEQ ID NO: 348385 - RNA, 32 nt, Human
cacucuuguugccuagcuggagugcaauggcg

SEQ ID NO: 348386 - RNA, 32 nt, Human
cacucuuucaauccugcgaagggagacccugu

SEQ ID NO: 348387 - RNA, 32 nt, Human
cacucuuucacccaggcuggagugcaguggca

SEQ ID NO: 348388 - RNA, 32 nt, Human
cacucuuucagagaaaccucagcuucaucaca

SEQ ID NO: 348389 - RNA, 32 nt, Human
cacucuuucaggccucuuucugccuuuuguug

SEQ ID NO: 348390 - RNA, 32 nt, Human
cacucuuucaugucacaauagcguggagcauu

SEQ ID NO: 348391 - RNA, 32 nt, Human
cacucuuucccaggcugcaguacagugacaca

SEQ ID NO: 348392 - RNA, 32 nt, Human
cacucuuucgcccaggcuggagugcaguggua

SEQ ID NO: 348393 - RNA, 32 nt, Human
cacucuuugggcaggggcgacauggcacaccu

SEQ ID NO: 348394 - RNA, 32 nt, Human
cacucuuuguugcccaggcuggagugcaaugg

SEQ ID NO: 348395 - RNA, 32 nt, Human
cacugaaacauccuuugguucucaagcuucuu

SEQ ID NO: 348396 - RNA, 23 nt, Human
cacugaaacauuucuccagaacc

SEQ ID NO: 348397 - RNA, 32 nt, Human
cacugaaacuauacuugaacaguuccaacugu

SEQ ID NO: 348398 - RNA, 32 nt, Human
cacugaaagauaagcugggagauacugaagau

SEQ ID NO: 348399 - RNA, 23 nt, Human
cacugaaagcaaggaaagccuga

SEQ ID NO: 348400 - RNA, 22 nt, Human
cacugaaagccuggugagcaga

SEQ ID NO: 348401 - RNA, 22 nt, Human
cacugaaagucccgcugccagg

SEQ ID NO: 348402 - RNA, 32 nt, Human
cacugaacaaaguuggagguuggggugggugu

SEQ ID NO: 348403 - RNA, 20 nt, Human
cacugaacccagugcuuuca

SEQ ID NO: 348404 - RNA, 32 nt, Human
cacugaaccuuaaggcuuuguaugacagugaa

SEQ ID NO: 348405 - RNA, 21 nt, Human
cacugaacuccagccugggca

SEQ ID NO: 348406 - RNA, 32 nt, Human
cacugaagaaaaucuguggugaagggaacauc

SEQ ID NO: 348407 - RNA, 32 nt, Human
cacugaagaacucuuguccucacuggcugaug

SEQ ID NO: 348408 - RNA, 32 nt, Human
cacugaagacccagcaauccugaguucagaaa

SEQ ID NO: 348409 - RNA, 32 nt, Human
cacugaagagccugagucccaggaggccuccu

SEQ ID NO: 348410 - RNA, 19 nt, Human
cacugaagagggacagcaa

SEQ ID NO: 348411 - RNA, 32 nt, Human
cacugaagccauuuaguggcuaacccacugug

SEQ ID NO: 348412 - RNA, 32 nt, Human
cacugaagccuggaugacagagugagaccuua

SEQ ID NO: 348413 - RNA, 32 nt, Human
cacugaagcuauaaauuaccuggucauuuugu

SEQ ID NO: 348414 - RNA, 22 nt, Human
cacugaagcugaacagcagcag

SEQ ID NO: 348415 - RNA, 32 nt, Human
cacugaagcugcacucugaaaacugggcaguu

SEQ ID NO: 348416 - RNA, 32 nt, Human
cacugaagcugcaggcuagaucaaggggacca

SEQ ID NO: 348417 - RNA, 32 nt, Human
cacugaagcuuagaggagugaaauguuuugag

SEQ ID NO: 348418 - RNA, 25 nt, Human
cacugaaggaaaaagaacauggaga

SEQ ID NO: 348419 - RNA, 32 nt, Human
cacugaaggccgugcaccuccaccuccagccu

SEQ ID NO: 348420 - RNA, 32 nt, Human
cacugaaggcugaggggccucaguuuacccag

SEQ ID NO: 348421 - RNA, 32 nt, Human
cacugaagggcuuguuuaaaaauaaauugugu

SEQ ID NO: 348422 - RNA, 32 nt, Human
cacugaaggggguaggggcaguguagguccug

SEQ ID NO: 348423 - RNA, 32 nt, Human
cacugaagguaggccaggcaugguggcucaug

SEQ ID NO: 348424 - RNA, 32 nt, Human
cacugaagucaccauuaggucacuuaagaagu

SEQ ID NO: 348425 - RNA, 32 nt, Human
cacugaagucuuguuucagaaaccagaccacu

SEQ ID NO: 348426 - RNA, 32 nt, Human
cacugaaguguacacagauaaagcaggucuuu

SEQ ID NO: 348427 - RNA, 32 nt, Human
cacugaauaaauucagcaucuugguggucgau

SEQ ID NO: 348428 - RNA, 27 nt, Human
cacugaauggggaaacugggggcagca

SEQ ID NO: 348429 - RNA, 32 nt, Human
cacugaauguuacugauugcggcugagggccu

SEQ ID NO: 348430 - RNA, 32 nt, Human
cacugacaauacugaauaaacaucucaccgga

SEQ ID NO: 348431 - RNA, 32 nt, Human
cacugacacagaacucaacugguccagcccuu

SEQ ID NO: 348432 - RNA, 19 nt, Human
cacugacaccccugccccu

SEQ ID NO: 348433 - RNA, 32 nt, Human
cacugacacccuguguguaagcagaaccucca

SEQ ID NO: 348434 - RNA, 21 nt, Human
cacugacagccggugugguca

SEQ ID NO: 348435 - RNA, 32 nt, Human
cacugacagcuugcacuguggccuggaaaagc

SEQ ID NO: 348436 - RNA, 32 nt, Human
cacugacagcuugcacugugugccuggaaaag

SEQ ID NO: 348437 - RNA, 32 nt, Human
cacugacaggauagccuguucuguggauguca

SEQ ID NO: 348438 - RNA, 32 nt, Human
cacugacagguauccccugaaacugagcugag

SEQ ID NO: 348439 - RNA, 32 nt, Human
cacugaccaggcacuugccuucccucucuucc

SEQ ID NO: 348440 - RNA, 32 nt, Human
cacugaccaggcccaaggaggguccaggcggg

SEQ ID NO: 348441 - RNA, 22 nt, Human
cacugaccaguaggagcagcag

SEQ ID NO: 348442 - RNA, 28 nt, Human
cacugacccccaggggccucauccuccc

SEQ ID NO: 348443 - RNA, 32 nt, Human
cacugaccuauaccucaggaugggcgcgucug

SEQ ID NO: 348444 - RNA, 32 nt, Human
cacugaccucuuucucguuuguggacaaagca

SEQ ID NO: 348445 - RNA, 25 nt, Human
cacugaccuguaugaagaauccaga

SEQ ID NO: 348446 - RNA, 32 nt, Human
cacugacuccuacucuccuacuucuccagaug

SEQ ID NO: 348447 - RNA, 32 nt, Human
cacugacuccucaaccccugugcucagccgac

SEQ ID NO: 348448 - RNA, 21 nt, Human
cacugacugaacagacuuuua

SEQ ID NO: 348449 - RNA, 21 nt, Human
cacugacugcaaaacugccug

SEQ ID NO: 348450 - RNA, 20 nt, Human
cacugacugcuugaccuuua

SEQ ID NO: 348451 - RNA, 32 nt, Human
cacugacugguaccccacucucauuucacugg

SEQ ID NO: 348452 - RNA, 32 nt, Human
cacugacuguuuccucugccuggaccccacuu

SEQ ID NO: 348453 - RNA, 32 nt, Human
cacugacuuuagcaccucuauaccucagcuga

SEQ ID NO: 348454 - RNA, 32 nt, Human
cacugagaaagaaccccuacagguggagagga

SEQ ID NO: 348455 - RNA, 23 nt, Human
cacugagaaagcuaagcccuaca

SEQ ID NO: 348456 - RNA, 32 nt, Human
cacugagacagcccgggcucugcuucccauca

SEQ ID NO: 348457 - RNA, 32 nt, Human
cacugagacguaggaauguggagggaggugcu

SEQ ID NO: 348458 - RNA, 32 nt, Human
cacugagaggccgaucacuugaggucaggagu

SEQ ID NO: 348459 - RNA, 32 nt, Human
cacugagaggggaaucugauugccaucaaggc

SEQ ID NO: 348460 - RNA, 31 nt, Human
cacugagcaaauaaauauguugagaaugaug

SEQ ID NO: 348461 - RNA, 31 nt, Human
cacugagcacagcaaggcaccaaagccccug

SEQ ID NO: 348462 - RNA, 32 nt, Human
cacugagcacuuccgggaagagcaggcaccca

SEQ ID NO: 348463 - RNA, 32 nt, Human
cacugagcauggucagggcauuggucagaggg

SEQ ID NO: 348464 - RNA, 32 nt, Human
cacugagcauuuucucauuuguugcauuacug

SEQ ID NO: 348465 - RNA, 32 nt, Human
cacugagccauccgugggucaggaugcaauua

SEQ ID NO: 348466 - RNA, 32 nt, Human
cacugagcccaggaguuuaaggcugcagugag

SEQ ID NO: 348467 - RNA, 32 nt, Human
cacugagcccucugcugcccugccagaaucug

SEQ ID NO: 348468 - RNA, 21 nt, Human
cacugagcccuuuugcugcug

SEQ ID NO: 348469 - RNA, 32 nt, Human
cacugagccuccacaggcuccauuccaaguaa

SEQ ID NO: 348470 - RNA, 19 nt, Human
cacugagccuccagacccu

SEQ ID NO: 348471 - RNA, 32 nt, Human
cacugagcugcucugcucaccucuagaugcuc

SEQ ID NO: 348472 - RNA, 32 nt, Human
cacugaggacucagagaggcugagucacuuac

SEQ ID NO: 348473 - RNA, 32 nt, Human
cacugaggaugaggcccuggggaccccagaga

SEQ ID NO: 348474 - RNA, 32 nt, Human
cacugaggccagcauggcugggcccaggaugc

SEQ ID NO: 348475 - RNA, 20 nt, Human
cacugagggaaggugaagua

SEQ ID NO: 348476 - RNA, 23 nt, Human
cacugaggggugcggugccaaca

SEQ ID NO: 348477 - RNA, 32 nt, Human
cacugaguaggcaguugguuaaagaagcaaga

SEQ ID NO: 348478 - RNA, 32 nt, Human
cacugaguccucccgauucggaccuguuuuag

SEQ ID NO: 348479 - RNA, 32 nt, Human
cacugagugcauucaccaccuuuuaaauuuug

SEQ ID NO: 348480 - RNA, 32 nt, Human
cacugaguggagugucaggcagggugugucgg

SEQ ID NO: 348481 - RNA, 32 nt, Human
cacugaguggccacuguccuuccuaaauguca

SEQ ID NO: 348482 - RNA, 32 nt, Human
cacugaguguuuuggccacuuggaggaccugg

SEQ ID NO: 348483 - RNA, 24 nt, Human
cacugaguuccaggcacacuggug

SEQ ID NO: 348484 - RNA, 32 nt, Human
cacugaguucuagaaugaagcugcagacccuc

SEQ ID NO: 348485 - RNA, 32 nt, Human
cacugauaagguuccagcaaagagauuaggac

SEQ ID NO: 348486 - RNA, 32 nt, Human
cacugauacauacauguacugauacauuccaa

SEQ ID NO: 348487 - RNA, 32 nt, Human
cacugauauuacauccacaguaccacaguauu

SEQ ID NO: 348488 - RNA, 24 nt, Human
cacugauauugaagaaccuggaga

SEQ ID NO: 348489 - RNA, 32 nt, Human
cacugaugacaugguauaggaguggguggggu

SEQ ID NO: 348490 - RNA, 32 nt, Human
cacugaugacgaucauagcucacuacagcuuc

SEQ ID NO: 348491 - RNA, 32 nt, Human
cacugaugcacacggaccuggacacagacaug

SEQ ID NO: 348492 - RNA, 32 nt, Human
cacugaugcagcuguccugaaggacuccccga

SEQ ID NO: 348493 - RNA, 32 nt, Human
cacugaugcuggaugaccuuggccugacccug

SEQ ID NO: 348494 - RNA, 32 nt, Human
cacugauggaggagguacagccguggaggaga

SEQ ID NO: 348495 - RNA, 23 nt, Human
cacugaugggcuggggcaggggc

SEQ ID NO: 348496 - RNA, 32 nt, Human
cacugaugggcuucugccccugcccuuccuca

SEQ ID NO: 348497 - RNA, 32 nt, Human
cacugauguggaccacagaaccucacaguuua

SEQ ID NO: 348498 - RNA, 18 nt, Human
cacugauguucaccuuua

SEQ ID NO: 348499 - RNA, 19 nt, Human
cacugauguuugaacugga

SEQ ID NO: 348500 - RNA, 32 nt, Human
cacugauucugucuuuuccucagaaucuggcc

SEQ ID NO: 348501 - RNA, 32 nt, Human
cacugauugcauuccagccugggugacagagc

SEQ ID NO: 348502 - RNA, 32 nt, Human
cacugcaaaaggaguguucguggcaguguucc

SEQ ID NO: 348503 - RNA, 32 nt, Human
cacugcaaaaucauaagaggcuucuggacuuc

SEQ ID NO: 348504 - RNA, 32 nt, Human
cacugcaaagagacgcuucaaguggggagaag

SEQ ID NO: 348505 - RNA, 32 nt, Human
cacugcaacaacaggagugcaaacuucucuac

SEQ ID NO: 348506 - RNA, 21 nt, Human
cacugcaacaccuccacauca

SEQ ID NO: 348507 - RNA, 32 nt, Human
cacugcaacagacucuaccagagaugcaaaga

SEQ ID NO: 348508 - RNA, 32 nt, Human
cacugcaacauccaccuccuggguucaagcaa

SEQ ID NO: 348509 - RNA, 32 nt, Human
cacugcaacauccaccuccuggguucaagcga

SEQ ID NO: 348510 - RNA, 32 nt, Human
cacugcaaccacugccucccaggcucaaguga

SEQ ID NO: 348511 - RNA, 22 nt, Human
cacugcaaccucaaccuucugg

SEQ ID NO: 348512 - RNA, 32 nt, Human
cacugcaaccucaauccugggcucaagugauc

SEQ ID NO: 348513 - RNA, 22 nt, Human
cacugcaaccucagccuccugg

SEQ ID NO: 348514 - RNA, 24 nt, Human
cacugcaaccuccaccuccugagu

SEQ ID NO: 348515 - RNA, 22 nt, Human
cacugcaaccuccaccuccugg

SEQ ID NO: 348516 - RNA, 24 nt, Human
cacugcaaccuccaccuccuggcu

SEQ ID NO: 348517 - RNA, 32 nt, Human
cacugcaaccuccaccuccugggcucaagcga

SEQ ID NO: 348518 - RNA, 24 nt, Human
cacugcaaccuccaccuccugguu

SEQ ID NO: 348519 - RNA, 32 nt, Human
cacugcaaccuccaccuccuguguucaaguga

SEQ ID NO: 348520 - RNA, 25 nt, Human
cacugcaaccuccaccuuccugguu

SEQ ID NO: 348521 - RNA, 22 nt, Human
cacugcaaccuccacuuccugg

SEQ ID NO: 348522 - RNA, 22 nt, Human
cacugcaaccuccaucuccugg

SEQ ID NO: 348523 - RNA, 24 nt, Human
cacugcaaccuccgccuccugagu

SEQ ID NO: 348524 - RNA, 22 nt, Human
cacugcaaccuccgccuccugg

SEQ ID NO: 348525 - RNA, 22 nt, Human
cacugcaaccuccgcuuccugg

SEQ ID NO: 348526 - RNA, 22 nt, Human
cacugcaaccuccgucuccugg

SEQ ID NO: 348527 - RNA, 22 nt, Human
cacugcaaccuccuccuccugg

SEQ ID NO: 348528 - RNA, 22 nt, Human
cacugcaaccucgaccuccugg

SEQ ID NO: 348529 - RNA, 22 nt, Human
cacugcaaccucgaccucuugg

SEQ ID NO: 348530 - RNA, 22 nt, Human
cacugcaaccucuaccuccugg

SEQ ID NO: 348531 - RNA, 24 nt, Human
cacugcaaccucugccuccugagc

SEQ ID NO: 348532 - RNA, 24 nt, Human
cacugcaaccucugccuccugagu

SEQ ID NO: 348533 - RNA, 22 nt, Human
cacugcaaccucugccuccugg

SEQ ID NO: 348534 - RNA, 24 nt, Human
cacugcaaccucugccuccugguu

SEQ ID NO: 348535 - RNA, 32 nt, Human
cacugcaaccucugccuuccagguucaagcaa

SEQ ID NO: 348536 - RNA, 22 nt, Human
cacugcaaccucugcuuccugg

SEQ ID NO: 348537 - RNA, 22 nt, Human
cacugcaaccucugucuccugg

SEQ ID NO: 348538 - RNA, 24 nt, Human
cacugcaaccucuuccuccugguu

SEQ ID NO: 348539 - RNA, 22 nt, Human
cacugcaaccugcgccuccugg

SEQ ID NO: 348540 - RNA, 22 nt, Human
cacugcaaccuggaccuccugg

SEQ ID NO: 348541 - RNA, 32 nt, Human
cacugcaaccugggugacagaacaagacaaaa

SEQ ID NO: 348542 - RNA, 32 nt, Human
cacugcaaccugggugacagagcgagacucca

SEQ ID NO: 348543 - RNA, 22 nt, Human
cacugcaaccuucgccuccugg

SEQ ID NO: 348544 - RNA, 24 nt, Human
cacugcaaccuugaccucccaggc

SEQ ID NO: 348545 - RNA, 24 nt, Human
cacugcaaccuuggccuccuaggu

SEQ ID NO: 348546 - RNA, 32 nt, Human
cacugcaacguccaccuccuggguucaagcga

SEQ ID NO: 348547 - RNA, 22 nt, Human
cacugcaacuaccaccuccugg

SEQ ID NO: 348548 - RNA, 32 nt, Human
cacugcaacuaccaccuccuggguucaagcga

SEQ ID NO: 348549 - RNA, 22 nt, Human
cacugcaacuuccaccuccugg

SEQ ID NO: 348550 - RNA, 32 nt, Human
cacugcaacuuccgccuccuguguucaagcga

SEQ ID NO: 348551 - RNA, 32 nt, Human
cacugcaagaggaggaggugaugcaggugcca

SEQ ID NO: 348552 - RNA, 32 nt, Human
cacugcaagcaaguaaccagcuucucacucca

SEQ ID NO: 348553 - RNA, 32 nt, Human
cacugcaagcuccaccuccuggguucaagcga

SEQ ID NO: 348554 - RNA, 32 nt, Human
cacugcaagcuccaccuccuggguucacgcca

SEQ ID NO: 348555 - RNA, 32 nt, Human
cacugcaagcuccaccuccuggguucaugcca

SEQ ID NO: 348556 - RNA, 32 nt, Human
cacugcaagggccgaggcagggccagaccaga

SEQ ID NO: 348557 - RNA, 32 nt, Human
cacugcacaagcuauucuaauagugaucuggc

SEQ ID NO: 348558 - RNA, 32 nt, Human
cacugcacacugcacuccauccugggcgacag

SEQ ID NO: 348559 - RNA, 32 nt, Human
cacugcacagacagcugcgaccagagacugga

SEQ ID NO: 348560 - RNA, 21 nt, Human
cacugcacagcaagccuucaa

SEQ ID NO: 348561 - RNA, 32 nt, Human
cacugcacauuuucaggcuugguuuccacauu

SEQ ID NO: 348562 - RNA, 16 nt, Human
cacugcaccaaaguca

SEQ ID NO: 348563 - RNA, 32 nt, Human
cacugcaccacuccagccugggcaacaagagc

SEQ ID NO: 348564 - RNA, 19 nt, Human
cacugcaccagccccaggg

SEQ ID NO: 348565 - RNA, 32 nt, Human
cacugcacccagcccaaggucuugccauggua

SEQ ID NO: 348566 - RNA, 32 nt, Human
cacugcacccagccgagugagaauuuuuaugc

SEQ ID NO: 348567 - RNA, 32 nt, Human
cacugcacccagcuaauuuuuguauuuuuagu

SEQ ID NO: 348568 - RNA, 32 nt, Human
cacugcacccaggggacaacuccaccuggacu

SEQ ID NO: 348569 - RNA, 32 nt, Human
cacugcaccccacccauucaaguccacauccc

SEQ ID NO: 348570 - RNA, 32 nt, Human
cacugcacccggcucccagucacucaaucuug

SEQ ID NO: 348571 - RNA, 22 nt, Human
cacugcacccucaaccuccugg

SEQ ID NO: 348572 - RNA, 32 nt, Human
cacugcacccucaaccuccuggguucaagcaa

SEQ ID NO: 348573 - RNA, 32 nt, Human
cacugcaccugccuccagccgccggcugugca

SEQ ID NO: 348574 - RNA, 32 nt, Human
cacugcaccuggcuaauuuuuauauuuuuggu

SEQ ID NO: 348575 - RNA, 32 nt, Human
cacugcacgacggggcuggacugaccugaaaa

SEQ ID NO: 348576 - RNA, 32 nt, Human
cacugcacgcacuccagccugggcgacagagc

SEQ ID NO: 348577 - RNA, 32 nt, Human
cacugcacgcacuccagccugggugacagagc

SEQ ID NO: 348578 - RNA, 32 nt, Human
cacugcacguggccuaaaaguuuuaaguuuua

SEQ ID NO: 348579 - RNA, 32 nt, Human
cacugcacucaaccuuaagaccuacuguucua

SEQ ID NO: 348580 - RNA, 32 nt, Human
cacugcacuccagcacuccagccugggugaca

SEQ ID NO: 348581 - RNA, 32 nt, Human
cacugcacuccagccuaggugacagggcaaga

SEQ ID NO: 348582 - RNA, 32 nt, Human
cacugcacuccagccuggaaggcagagagaga

SEQ ID NO: 348583 - RNA, 32 nt, Human
cacugcacuccagccuggccugggcaacagag

SEQ ID NO: 348584 - RNA, 21 nt, Human
cacugcacuccagccugggca

SEQ ID NO: 348585 - RNA, 32 nt, Human
cacugcacuccagccugggugacagggcaaga

SEQ ID NO: 348586 - RNA, 21 nt, Human
cacugcacuccagccuuggca

SEQ ID NO: 348587 - RNA, 32 nt, Human
cacugcacuccaggcugggcaacggagugaga

SEQ ID NO: 348588 - RNA, 32 nt, Human
cacugcacuccaggcugggugacagagcgaga

SEQ ID NO: 348589 - RNA, 32 nt, Human
cacugcacuccauccagccugggugacagggc

SEQ ID NO: 348590 - RNA, 32 nt, Human
cacugcacuccauccagccugggugacagggu

SEQ ID NO: 348591 - RNA, 32 nt, Human
cacugcacuccugggcaacagagcaagacuuc

SEQ ID NO: 348592 - RNA, 32 nt, Human
cacugcacugcacgccagccuaggcgacagag

SEQ ID NO: 348593 - RNA, 32 nt, Human
cacugcacugcacuccagccugggugacaaag

SEQ ID NO: 348594 - RNA, 32 nt, Human
cacugcacuguuagcugagagugcgggcaaga

SEQ ID NO: 348595 - RNA, 32 nt, Human
cacugcagacaggcccuggcucagaaucagag

SEQ ID NO: 348596 - RNA, 20 nt, Human
cacugcagagcccaccuggc

SEQ ID NO: 348597 - RNA, 32 nt, Human
cacugcagaggcgaaagccagugcuuugguaa

SEQ ID NO: 348598 - RNA, 32 nt, Human
cacugcagaggggaggagcugucuccuccucc

SEQ ID NO: 348599 - RNA, 32 nt, Human
cacugcagaguguguuucugcucgucagcugc

SEQ ID NO: 348600 - RNA, 32 nt, Human
cacugcagaucccugaacaccuugggggccac

SEQ ID NO: 348601 - RNA, 21 nt, Human
cacugcagaugccugcuggcu

SEQ ID NO: 348602 - RNA, 22 nt, Human
cacugcagauuccuccccuggc

SEQ ID NO: 348603 - RNA, 32 nt, Human
cacugcagcaggagucgggcccugccucccuc

SEQ ID NO: 348604 - RNA, 24 nt, Human
cacugcagccacugccucccaggu

SEQ ID NO: 348605 - RNA, 22 nt, Human
cacugcagcccacugcccagcu

SEQ ID NO: 348606 - RNA, 24 nt, Human
cacugcagccccaaccuucagggc

SEQ ID NO: 348607 - RNA, 22 nt, Human
cacugcagccccaggccccggc

SEQ ID NO: 348608 - RNA, 24 nt, Human
cacugcagcccgaguucucuggcu

SEQ ID NO: 348609 - RNA, 23 nt, Human
cacugcagcccuccagcucuggc

SEQ ID NO: 348610 - RNA, 32 nt, Human
cacugcagcccugaccuccugggcucaaggga

SEQ ID NO: 348611 - RNA, 24 nt, Human
cacugcagcccugacugccuaggc

SEQ ID NO: 348612 - RNA, 22 nt, Human
cacugcagcccugccacuugcu

SEQ ID NO: 348613 - RNA, 24 nt, Human
cacugcagcccuggcgagcaggcu

SEQ ID NO: 348614 - RNA, 32 nt, Human
cacugcagcccuuuggaagacauuguccugca

SEQ ID NO: 348615 - RNA, 24 nt, Human
cacugcagccuagaccucccagcu

SEQ ID NO: 348616 - RNA, 32 nt, Human
cacugcagccuaggugacagagcgagacccug

SEQ ID NO: 348617 - RNA, 24 nt, Human
cacugcagccucaaacuccuaggc

SEQ ID NO: 348618 - RNA, 24 nt, Human
cacugcagccucaaacuccugagc

SEQ ID NO: 348619 - RNA, 22 nt, Human
cacugcagccucaaacuccugg

SEQ ID NO: 348620 - RNA, 23 nt, Human
cacugcagccucaaacuucuggc

SEQ ID NO: 348621 - RNA, 22 nt, Human
cacugcagccucaaauuccugg

SEQ ID NO: 348622 - RNA, 24 nt, Human
cacugcagccucaaccucccaggc

SEQ ID NO: 348623 - RNA, 20 nt, Human
cacugcagccucaaccuccu

SEQ ID NO: 348624 - RNA, 24 nt, Human
cacugcagccucaaccuccugagc

SEQ ID NO: 348625 - RNA, 32 nt, Human
cacugcagccucaaccuccugagcucaagcaa

SEQ ID NO: 348626 - RNA, 22 nt, Human
cacugcagccucaaccuccugg

SEQ ID NO: 348627 - RNA, 32 nt, Human
cacugcagccucaaccuccuggacucagagau

SEQ ID NO: 348628 - RNA, 32 nt, Human
cacugcagccucaaccuccugggcucaagcaa

SEQ ID NO: 348629 - RNA, 32 nt, Human
cacugcagccucaaccuccugggcucaagcca

SEQ ID NO: 348630 - RNA, 32 nt, Human
cacugcagccucaaccuccuggguucaaguga

SEQ ID NO: 348631 - RNA, 22 nt, Human
cacugcagccucaaccugcugg

SEQ ID NO: 348632 - RNA, 22 nt, Human
cacugcagccucaaccuggguu

SEQ ID NO: 348633 - RNA, 22 nt, Human
cacugcagccucaaccuucugg

SEQ ID NO: 348634 - RNA, 24 nt, Human
cacugcagccucaacguuuugagc

SEQ ID NO: 348635 - RNA, 24 nt, Human
cacugcagccucaacuucccaggc

SEQ ID NO: 348636 - RNA, 22 nt, Human
cacugcagccucaacuuccugg

SEQ ID NO: 348637 - RNA, 32 nt, Human
cacugcagccucaacuucuuguccucaaguga

SEQ ID NO: 348638 - RNA, 23 nt, Human
cacugcagccucaaucuccuggu

SEQ ID NO: 348639 - RNA, 24 nt, Human
cacugcagccucaaucuuccaggc

SEQ ID NO: 348640 - RNA, 22 nt, Human
cacugcagccucagcguccugg

SEQ ID NO: 348641 - RNA, 22 nt, Human
cacugcagccucauacuccugg

SEQ ID NO: 348642 - RNA, 23 nt, Human
cacugcagccuccaacuccuagc

SEQ ID NO: 348643 - RNA, 24 nt, Human
cacugcagccuccaccucccaggc

SEQ ID NO: 348644 - RNA, 24 nt, Human
cacugcagccuccaccucccaggu

SEQ ID NO: 348645 - RNA, 24 nt, Human
cacugcagccuccaccuccccggu

SEQ ID NO: 348646 - RNA, 22 nt, Human
cacugcagccuccaccucccgg

SEQ ID NO: 348647 - RNA, 24 nt, Human
cacugcagccuccaccucccgggc

SEQ ID NO: 348648 - RNA, 24 nt, Human
cacugcagccuccaccuccuaggc

SEQ ID NO: 348649 - RNA, 22 nt, Human
cacugcagccuccaccuccugg

SEQ ID NO: 348650 - RNA, 32 nt, Human
cacugcagccuccaccuccugggcucaaagug

SEQ ID NO: 348651 - RNA, 32 nt, Human
cacugcagccuccaccuccugggcucaagcga

SEQ ID NO: 348652 - RNA, 32 nt, Human
cacugcagccuccaccuccugggcucauguga

SEQ ID NO: 348653 - RNA, 25 nt, Human
cacugcagccuccaccuccuugacu

SEQ ID NO: 348654 - RNA, 22 nt, Human
cacugcagccuccacuuccugg

SEQ ID NO: 348655 - RNA, 22 nt, Human
cacugcagccuccaucucccgg

SEQ ID NO: 348656 - RNA, 24 nt, Human
cacugcagccuccaucuccuaggc

SEQ ID NO: 348657 - RNA, 22 nt, Human
cacugcagccuccaucuccugg

SEQ ID NO: 348658 - RNA, 22 nt, Human
cacugcagccucccaacaggcu

SEQ ID NO: 348659 - RNA, 20 nt, Human
cacugcagccucccugccug

SEQ ID NO: 348660 - RNA, 22 nt, Human
cacugcagccuccgccucccgg

SEQ ID NO: 348661 - RNA, 24 nt, Human
cacugcagccuccgccucccuggu

SEQ ID NO: 348662 - RNA, 32 nt, Human
cacugcagccuccgccucccugguucaaacaa

SEQ ID NO: 348663 - RNA, 24 nt, Human
cacugcagccuccgcuucccuggu

SEQ ID NO: 348664 - RNA, 32 nt, Human
cacugcagccuccugagauauuuuuagagacu

SEQ ID NO: 348665 - RNA, 22 nt, Human
cacugcagccuccuucuccugg

SEQ ID NO: 348666 - RNA, 22 nt, Human
cacugcagccucgaacaccugg

SEQ ID NO: 348667 - RNA, 22 nt, Human
cacugcagccucgaacuccugg

SEQ ID NO: 348668 - RNA, 22 nt, Human
cacugcagccucgaaucccugg

SEQ ID NO: 348669 - RNA, 21 nt, Human
cacugcagccucgacaccugg

SEQ ID NO: 348670 - RNA, 24 nt, Human
cacugcagccucgaccucccaggc

SEQ ID NO: 348671 - RNA, 24 nt, Human
cacugcagccucgaccuccccagc

SEQ ID NO: 348672 - RNA, 24 nt, Human
cacugcagccucgaccucccgggc

SEQ ID NO: 348673 - RNA, 23 nt, Human
cacugcagccucgaccucccugg

SEQ ID NO: 348674 - RNA, 24 nt, Human
cacugcagccucgaccucccuggc

SEQ ID NO: 348675 - RNA, 32 nt, Human
cacugcagccucgaccuccugcgcucagguga

SEQ ID NO: 348676 - RNA, 22 nt, Human
cacugcagccucgaccuccugg

SEQ ID NO: 348677 - RNA, 32 nt, Human
cacugcagccucgaccuccuggacucaguugg

SEQ ID NO: 348678 - RNA, 32 nt, Human
cacugcagccucgaccuccugggcucaacuga

SEQ ID NO: 348679 - RNA, 32 nt, Human
cacugcagccucgaccuccugggcucaagcaa

SEQ ID NO: 348680 - RNA, 32 nt, Human
cacugcagccucgaccuccugggcucaagcag

SEQ ID NO: 348681 - RNA, 24 nt, Human
cacugcagccucgaccucuggggc

SEQ ID NO: 348682 - RNA, 22 nt, Human
cacugcagccucgacuuccugg

SEQ ID NO: 348683 - RNA, 32 nt, Human
cacugcagccucugccacccagauucaacaga

SEQ ID NO: 348684 - RNA, 24 nt, Human
cacugcagccucugccucccaggu

SEQ ID NO: 348685 - RNA, 22 nt, Human
cacugcagccucugccuccugg

SEQ ID NO: 348686 - RNA, 21 nt, Human
cacugcagccucugucccugg

SEQ ID NO: 348687 - RNA, 24 nt, Human
cacugcagccucugucucccgggc

SEQ ID NO: 348688 - RNA, 25 nt, Human
cacugcagccugaaacuccuuggcu

SEQ ID NO: 348689 - RNA, 23 nt, Human
cacugcagccugcgccucccagc

SEQ ID NO: 348690 - RNA, 22 nt, Human
cacugcagccuggaacuccugg

SEQ ID NO: 348691 - RNA, 25 nt, Human
cacugcagccuggaacuccuuggcu

SEQ ID NO: 348692 - RNA, 22 nt, Human
cacugcagccuggaauuccugg

SEQ ID NO: 348693 - RNA, 23 nt, Human
cacugcagccuggaccuccuagc

SEQ ID NO: 348694 - RNA, 24 nt, Human
cacugcagccuggaccuccugguu

SEQ ID NO: 348695 - RNA, 22 nt, Human
cacugcagccuggagcuccugg

SEQ ID NO: 348696 - RNA, 32 nt, Human
cacugcagccuggaugacagagcgagacucua

SEQ ID NO: 348697 - RNA, 32 nt, Human
cacugcagccugggaaacagagugaggcucug

SEQ ID NO: 348698 - RNA, 32 nt, Human
cacugcagccugggcaacagaaugagacugug

SEQ ID NO: 348699 - RNA, 32 nt, Human
cacugcagccugggcaacauagcaagacucug

SEQ ID NO: 348700 - RNA, 32 nt, Human
cacugcagccugggcaacauagcgagacucug

SEQ ID NO: 348701 - RNA, 32 nt, Human
cacugcagccugggcgacagagcgagauucug

SEQ ID NO: 348702 - RNA, 32 nt, Human
cacugcagccugggcuacagagagcaagacuc

SEQ ID NO: 348703 - RNA, 32 nt, Human
cacugcagccugggugacaaagcaagacccug

SEQ ID NO: 348704 - RNA, 32 nt, Human
cacugcagccugggugacagaaugugacucug

SEQ ID NO: 348705 - RNA, 32 nt, Human
cacugcagccugggugacagagugagacucug

SEQ ID NO: 348706 - RNA, 32 nt, Human
cacugcagccuggguggcagagugagacccag

SEQ ID NO: 348707 - RNA, 22 nt, Human
cacugcagccugugucuccugg

SEQ ID NO: 348708 - RNA, 22 nt, Human
cacugcagccuucaccucccgg

SEQ ID NO: 348709 - RNA, 22 nt, Human
cacugcagccuucgccucccgg

SEQ ID NO: 348710 - RNA, 24 nt, Human
cacugcagccuugaacaccugagc

SEQ ID NO: 348711 - RNA, 22 nt, Human
cacugcagccuugaacaccugg

SEQ ID NO: 348712 - RNA, 24 nt, Human
cacugcagccuugaacuccuaggc

SEQ ID NO: 348713 - RNA, 24 nt, Human
cacugcagccuugaacuccugagc

SEQ ID NO: 348714 - RNA, 22 nt, Human
cacugcagccuugaacuccugg

SEQ ID NO: 348715 - RNA, 23 nt, Human
cacugcagccuugaacuccuggc

SEQ ID NO: 348716 - RNA, 24 nt, Human
cacugcagccuugaacucugggcu

SEQ ID NO: 348717 - RNA, 22 nt, Human
cacugcagccuugaauuccugg

SEQ ID NO: 348718 - RNA, 32 nt, Human
cacugcagccuugaauuccugggcucgagcgg

SEQ ID NO: 348719 - RNA, 24 nt, Human
cacugcagccuugaccuccagggc

SEQ ID NO: 348720 - RNA, 24 nt, Human
cacugcagccuugaccucccaggc

SEQ ID NO: 348721 - RNA, 23 nt, Human
cacugcagccuugaccuccccgg

SEQ ID NO: 348722 - RNA, 24 nt, Human
cacugcagccuugaccucccgggc

SEQ ID NO: 348723 - RNA, 24 nt, Human
cacugcagccuugaccuccugagc

SEQ ID NO: 348724 - RNA, 32 nt, Human
cacugcagccuugaccuccugagcucaagcga

SEQ ID NO: 348725 - RNA, 22 nt, Human
cacugcagccuugaccuccugg

SEQ ID NO: 348726 - RNA, 23 nt, Human
cacugcagccuugaccuuccagc

SEQ ID NO: 348727 - RNA, 32 nt, Human
cacugcagccuugaccuuccagccugccaagu

SEQ ID NO: 348728 - RNA, 22 nt, Human
cacugcagccuugacuuccugg

SEQ ID NO: 348729 - RNA, 24 nt, Human
cacugcagccuugacuucucaggc

SEQ ID NO: 348730 - RNA, 24 nt, Human
cacugcagccuugauuucccgggc

SEQ ID NO: 348731 - RNA, 24 nt, Human
cacugcagccuuguccucccaggc

SEQ ID NO: 348732 - RNA, 18 nt, Human
cacugcagcgcgcuccug

SEQ ID NO: 348733 - RNA, 32 nt, Human
cacugcagcugggccaagucgcuuagcucuuc

SEQ ID NO: 348734 - RNA, 19 nt, Human
cacugcagcuuugaccucc

SEQ ID NO: 348735 - RNA, 32 nt, Human
cacugcaggaaggaggccccucugaggcgagg

SEQ ID NO: 348736 - RNA, 22 nt, Human
cacugcaggcacagucugugca

SEQ ID NO: 348737 - RNA, 32 nt, Human
cacugcaggcagcggcgcaggaagcgguggcc

SEQ ID NO: 348738 - RNA, 32 nt, Human
cacugcaggcaggacaaaccuggaugccaccu

SEQ ID NO: 348739 - RNA, 32 nt, Human
cacugcaggcaugcugaacaaggggccuccaa

SEQ ID NO: 348740 - RNA, 32 nt, Human
cacugcaggcccuccccacccaggacuccagg

SEQ ID NO: 348741 - RNA, 32 nt, Human
cacugcaggcugcugcuauucccugucugcug

SEQ ID NO: 348742 - RNA, 32 nt, Human
cacugcaggcugggugacagagugagacucca

SEQ ID NO: 348743 - RNA, 32 nt, Human
cacugcagggcccugagguggucgugucccug

SEQ ID NO: 348744 - RNA, 21 nt, Human
cacugcaguccagccuaggca

SEQ ID NO: 348745 - RNA, 24 nt, Human
cacugcagucucgaccucccaggc

SEQ ID NO: 348746 - RNA, 32 nt, Human
cacugcagucugagugacagagugagacucca

SEQ ID NO: 348747 - RNA, 32 nt, Human
cacugcaguggucacuguccuggaaaaguaac

SEQ ID NO: 348748 - RNA, 32 nt, Human
cacugcaguucugcuaggucugcuuccugccc

SEQ ID NO: 348749 - RNA, 32 nt, Human
cacugcaguuuccauguuagcacuguggaugg

SEQ ID NO: 348750 - RNA, 24 nt, Human
cacugcaguuuugaccucccaggc

SEQ ID NO: 348751 - RNA, 32 nt, Human
cacugcaucaggagucaggagaccuggcuucu

SEQ ID NO: 348752 - RNA, 32 nt, Human
cacugcaucaggcugcagggugaaggggaggu

SEQ ID NO: 348753 - RNA, 32 nt, Human
cacugcauccaggacucugucagcucugcugc

SEQ ID NO: 348754 - RNA, 22 nt, Human
cacugcauccucaaccuccugg

SEQ ID NO: 348755 - RNA, 32 nt, Human
cacugcauccucaaccuccuggguucagauua

SEQ ID NO: 348756 - RNA, 19 nt, Human
cacugcauccuugaccucc

SEQ ID NO: 348757 - RNA, 32 nt, Human
cacugcaucucuccugugaguuggagacuucu

SEQ ID NO: 348758 - RNA, 32 nt, Human
cacugcaucuuuugaaagccugugccacccca

SEQ ID NO: 348759 - RNA, 32 nt, Human
cacugcaugcaagccaugaaucuguuuugaga

SEQ ID NO: 348760 - RNA, 32 nt, Human
cacugcaugccugggaaaggccagcacuucau

SEQ ID NO: 348761 - RNA, 32 nt, Human
cacugcauggaugucccaggaggcagcucucc

SEQ ID NO: 348762 - RNA, 32 nt, Human
cacugcauggccuccugucacugugaaucgug

SEQ ID NO: 348763 - RNA, 32 nt, Human
cacugcauggucauccuguugaacugugcuca

SEQ ID NO: 348764 - RNA, 32 nt, Human
cacugcauuacaucagcagacugcauuggaga

SEQ ID NO: 348765 - RNA, 32 nt, Human
cacugcauugcacuggaccugggaugccuauc

SEQ ID NO: 348766 - RNA, 32 nt, Human
cacugccaaacaguaaccuccaggagaaaaca

SEQ ID NO: 348767 - RNA, 32 nt, Human
cacugccaacgggcaugggcugaggggaacga

SEQ ID NO: 348768 - RNA, 32 nt, Human
cacugccaagccccaguacuuggaggaacugg

SEQ ID NO: 348769 - RNA, 32 nt, Human
cacugccaagcuaccccaccccuucccccaaa

SEQ ID NO: 348770 - RNA, 32 nt, Human
cacugccaauguuugugaaccugaccuucagg

SEQ ID NO: 348771 - RNA, 32 nt, Human
cacugccacagcugugagggccaagaugcugu

SEQ ID NO: 348772 - RNA, 32 nt, Human
cacugccacauacuuguuuucucccauguucc

SEQ ID NO: 348773 - RNA, 32 nt, Human
cacugccaccugggccagcuucuggagcauga

SEQ ID NO: 348774 - RNA, 32 nt, Human
cacugccacugcauggccuccugucacuguga

SEQ ID NO: 348775 - RNA, 32 nt, Human
cacugccacuucagaaaagccuggugaccucu

SEQ ID NO: 348776 - RNA, 32 nt, Human
cacugccagcaaccucugcucucuggagaggu

SEQ ID NO: 348777 - RNA, 32 nt, Human
cacugccagcagagagggugugucugggggcc

SEQ ID NO: 348778 - RNA, 32 nt, Human
cacugccagcagcgcgcagagggagggauggg

SEQ ID NO: 348779 - RNA, 32 nt, Human
cacugccagcccacccccuuugacucuggggu

SEQ ID NO: 348780 - RNA, 16 nt, Human
cacugccagcggcugc

SEQ ID NO: 348781 - RNA, 20 nt, Human
cacugccagcucauuguuga

SEQ ID NO: 348782 - RNA, 32 nt, Human
cacugccagcuggauuggccagugcaccuugu

SEQ ID NO: 348783 - RNA, 32 nt, Human
cacugccagcuugccaguuucugcccagcaaa

SEQ ID NO: 348784 - RNA, 32 nt, Human
cacugccaggaccaaggcugagcccagcugug

SEQ ID NO: 348785 - RNA, 19 nt, Human
cacugccagucgagggaug

SEQ ID NO: 348786 - RNA, 23 nt, Human
cacugccauaauauucucacuga

SEQ ID NO: 348787 - RNA, 32 nt, Human
cacugccauaguccagaccagagcagacugcu

SEQ ID NO: 348788 - RNA, 32 nt, Human
cacugccauccaucuccagaaagcuuuucauc

SEQ ID NO: 348789 - RNA, 32 nt, Human
cacugccaucccuggcuaauguuuucauauuu

SEQ ID NO: 348790 - RNA, 32 nt, Human
cacugccaucgugggcagaugcagcuuccauc

SEQ ID NO: 348791 - RNA, 32 nt, Human
cacugccaucuauccaccugcccaccuccccu

SEQ ID NO: 348792 - RNA, 32 nt, Human
cacugccauuuucuugcuguuuuuguuuuuaa

SEQ ID NO: 348793 - RNA, 32 nt, Human
cacugcccaagacucagccauagaagaugccg

SEQ ID NO: 348794 - RNA, 32 nt, Human
cacugcccaguagcugcucaauaaaggcugug

SEQ ID NO: 348795 - RNA, 32 nt, Human
cacugccccaccccgagaacccucagcucuca

SEQ ID NO: 348796 - RNA, 32 nt, Human
cacugccccaccgcccugcacccuccacccgg

SEQ ID NO: 348797 - RNA, 32 nt, Human
cacugccccaggagcacuuuagggcucucagu

SEQ ID NO: 348798 - RNA, 32 nt, Human
cacugccccaguaagcuggaggcugcuccaga

SEQ ID NO: 348799 - RNA, 32 nt, Human
cacugccccaucucccucuccccaccaagaca

SEQ ID NO: 348800 - RNA, 32 nt, Human
cacugcccccgccaaagacccaaccaaucuuc

SEQ ID NO: 348801 - RNA, 32 nt, Human
cacugcccccucgcucccauguuuccacccgg

SEQ ID NO: 348802 - RNA, 32 nt, Human
cacugccccucacucuucucuggacccccacc

SEQ ID NO: 348803 - RNA, 32 nt, Human
cacugccccucagcagggaugacucagcaggg

SEQ ID NO: 348804 - RNA, 32 nt, Human
cacugccccucagcagggauggcucagcaggg

SEQ ID NO: 348805 - RNA, 32 nt, Human
cacugccccuccccacuguuuauuuauugcac

SEQ ID NO: 348806 - RNA, 32 nt, Human
cacugccccucggagccugguagugggccaca

SEQ ID NO: 348807 - RNA, 32 nt, Human
cacugccccuucucccuccugagagcucugug

SEQ ID NO: 348808 - RNA, 32 nt, Human
cacugcccuacaaauccucuguacccuaccaa

SEQ ID NO: 348809 - RNA, 32 nt, Human
cacugcccuaucuccuucuuuccucacgcccu

SEQ ID NO: 348810 - RNA, 32 nt, Human
cacugcccucaaacccggggcggaggauucca

SEQ ID NO: 348811 - RNA, 32 nt, Human
cacugcccucaaggcugcuugaggcucccacg

SEQ ID NO: 348812 - RNA, 32 nt, Human
cacugcccucccagagcucacugucuagccca

SEQ ID NO: 348813 - RNA, 32 nt, Human
cacugcccuccccagucucucuuaaaguugga

SEQ ID NO: 348814 - RNA, 32 nt, Human
cacugcccuccucuggcacucaugcugggccu

SEQ ID NO: 348815 - RNA, 32 nt, Human
cacugcccugcuccaucucccaccaccucccc

SEQ ID NO: 348816 - RNA, 32 nt, Human
cacugcccugcuccuggauggugggggccacu

SEQ ID NO: 348817 - RNA, 32 nt, Human
cacugcccuggcucaucucucccuucacugca

SEQ ID NO: 348818 - RNA, 32 nt, Human
cacugcccuuguccuggauccaacaccaaaua

SEQ ID NO: 348819 - RNA, 20 nt, Human
cacugcccuuugagggaugg

SEQ ID NO: 348820 - RNA, 32 nt, Human
cacugccgccucaaccucuccuggguucaggu

SEQ ID NO: 348821 - RNA, 30 nt, Human
cacugccgccucuccgagcucuugugacgc

SEQ ID NO: 348822 - RNA, 20 nt, Human
cacugccgcuguggcugcca

SEQ ID NO: 348823 - RNA, 32 nt, Human
cacugccgggccuucucuuauaaagcagguuu

SEQ ID NO: 348824 - RNA, 32 nt, Human
cacugccgucaccucucccuccucagcuccag

SEQ ID NO: 348825 - RNA, 32 nt, Human
cacugccuacaccuguuuacaaaaagaaucaa

SEQ ID NO: 348826 - RNA, 32 nt, Human
cacugccuauucgcucuuccuccagccucugg

SEQ ID NO: 348827 - RNA, 31 nt, Human
cacugccucaauaacuugguauugagcacgu

SEQ ID NO: 348828 - RNA, 32 nt, Human
cacugccucaccuggaaagccauguccugcug

SEQ ID NO: 348829 - RNA, 32 nt, Human
cacugccucacugcaccugccaaggcugcccu

SEQ ID NO: 348830 - RNA, 32 nt, Human
cacugccucagccuuugcacaugguaaugaag

SEQ ID NO: 348831 - RNA, 32 nt, Human
cacugccucuaccaccaccucucacuucucaa

SEQ ID NO: 348832 - RNA, 32 nt, Human
cacugccucuacugggcgugcugccaaggcca

SEQ ID NO: 348833 - RNA, 32 nt, Human
cacugccucucgcccuguaucugucaacuucc

SEQ ID NO: 348834 - RNA, 32 nt, Human
cacugccugauuucuuuucucucugccugaug

SEQ ID NO: 348835 - RNA, 32 nt, Human
cacugccugcagccucacucagaggggcccuu

SEQ ID NO: 348836 - RNA, 32 nt, Human
cacugccugccuggcccacgcugcugggacgg

SEQ ID NO: 348837 - RNA, 32 nt, Human
cacugccuggaguuccccuuguguacccccuu

SEQ ID NO: 348838 - RNA, 23 nt, Human
cacugccuggugcccuccuggcu

SEQ ID NO: 348839 - RNA, 32 nt, Human
cacugccugucccuccccauccuguguccucu

SEQ ID NO: 348840 - RNA, 23 nt, Human
cacugccuucccggggagcacag

SEQ ID NO: 348841 - RNA, 32 nt, Human
cacugccuucuuguuccagcuaggcaaugccu

SEQ ID NO: 348842 - RNA, 32 nt, Human
cacugccuugacaugaggaccagcaaguuuau

SEQ ID NO: 348843 - RNA, 32 nt, Human
cacugccuugcaauccaaacaguggcaauuuu

SEQ ID NO: 348844 - RNA, 32 nt, Human
cacugccuuugccccagcacagaagaggcccc

SEQ ID NO: 348845 - RNA, 32 nt, Human
cacugccuuugguuuuagcaguucuuugaaaa

SEQ ID NO: 348846 - RNA, 32 nt, Human
cacugcgauauaauacauugccaagcagaaga

SEQ ID NO: 348847 - RNA, 32 nt, Human
cacugcgauccucuugggcucuccuaggaucc

SEQ ID NO: 348848 - RNA, 32 nt, Human
cacugcgcccagcuaaauuuuguauuuuuagu

SEQ ID NO: 348849 - RNA, 32 nt, Human
cacugcgcccagcuaauuuuuguauuuuucgu

SEQ ID NO: 348850 - RNA, 32 nt, Human
cacugcgcccagcugauuuuuguauuuuuagu

SEQ ID NO: 348851 - RNA, 32 nt, Human
cacugcgccccaccucccugccuguguguguu

SEQ ID NO: 348852 - RNA, 32 nt, Human
cacugcgcggcucacauagaagccugagcugg

SEQ ID NO: 348853 - RNA, 32 nt, Human
cacugcgcuguugccgcagcauccugcucagu

SEQ ID NO: 348854 - RNA, 32 nt, Human
cacugcggagcugcagcgccuccuggacacgg

SEQ ID NO: 348855 - RNA, 32 nt, Human
cacugcggcaagaggaccccagcuggggugcu

SEQ ID NO: 348856 - RNA, 32 nt, Human
cacugcggccucaaacuccugggcucaaguga

SEQ ID NO: 348857 - RNA, 32 nt, Human
cacugcggcgucugggcugagccggagggagg

SEQ ID NO: 348858 - RNA, 32 nt, Human
cacugcgggggccaaggaaggaagaaaugugg

SEQ ID NO: 348859 - RNA, 32 nt, Human
cacugcgguaggucauucuuuugccacauccc

SEQ ID NO: 348860 - RNA, 32 nt, Human
cacugcgucuggcuaauuuuuguauuuuuagu

SEQ ID NO: 348861 - RNA, 32 nt, Human
cacugcguggcugaagccucgaggucaccagg

SEQ ID NO: 348862 - RNA, 32 nt, Human
cacugcguguggucaaaguuccucacccagca

SEQ ID NO: 348863 - RNA, 32 nt, Human
cacugcguugcccaggcuggucucaaacucuu

SEQ ID NO: 348864 - RNA, 32 nt, Human
cacugcuaaaacugaagcaccacugugugagc

SEQ ID NO: 348865 - RNA, 32 nt, Human
cacugcuaacaagccccacuggaaucauucgg

SEQ ID NO: 348866 - RNA, 32 nt, Human
cacugcuagaaaggcuucaacugugaauggga

SEQ ID NO: 348867 - RNA, 32 nt, Human
cacugcuagagcuuccuguuaagcaaguguga

SEQ ID NO: 348868 - RNA, 32 nt, Human
cacugcuagcacaggcuccucacucuucucca

SEQ ID NO: 348869 - RNA, 28 nt, Human
cacugcucacacgcugccuccucagcag

SEQ ID NO: 348870 - RNA, 32 nt, Human
cacugcucacauacuuaugugcugcuagucuc

SEQ ID NO: 348871 - RNA, 32 nt, Human
cacugcucacugcagccucgaccucccaaggc

SEQ ID NO: 348872 - RNA, 32 nt, Human
cacugcucagcccagagggccacugcagagau

SEQ ID NO: 348873 - RNA, 19 nt, Human
cacugcucagcugccgccu

SEQ ID NO: 348874 - RNA, 32 nt, Human
cacugcucaggccacugauggguaggagcaac

SEQ ID NO: 348875 - RNA, 32 nt, Human
cacugcucagugcaaccucugccucccaggau

SEQ ID NO: 348876 - RNA, 32 nt, Human
cacugcucaguguguuccuuugcucacuucau

SEQ ID NO: 348877 - RNA, 32 nt, Human
cacugcuccaaacccacccaccaaggacucug

SEQ ID NO: 348878 - RNA, 32 nt, Human
cacugcuccagccucagccagggcagggaggg

SEQ ID NO: 348879 - RNA, 32 nt, Human
cacugcuccaucucuuuuccucccucuccuuc

SEQ ID NO: 348880 - RNA, 32 nt, Human
cacugcuccccacucaccugugcucagggcga

SEQ ID NO: 348881 - RNA, 32 nt, Human
cacugcuccccagcagcuggugccucaaagca

SEQ ID NO: 348882 - RNA, 31 nt, Human
cacugcuccguggaggagguugggagggggu

SEQ ID NO: 348883 - RNA, 32 nt, Human
cacugcuccuccggcucccgggaagccgcgag

SEQ ID NO: 348884 - RNA, 32 nt, Human
cacugcuccugccucuagggugcaguguccgu

SEQ ID NO: 348885 - RNA, 32 nt, Human
cacugcuccuggauucuguucuuggggaacag

SEQ ID NO: 348886 - RNA, 32 nt, Human
cacugcucucccagcccugccugggccuaccu

SEQ ID NO: 348887 - RNA, 32 nt, Human
cacugcucuccuuuuaaucauguauucaucua

SEQ ID NO: 348888 - RNA, 20 nt, Human
cacugcucucuauguuuuaa

SEQ ID NO: 348889 - RNA, 32 nt, Human
cacugcucuguaaaggcagcuggcagcuuuuu

SEQ ID NO: 348890 - RNA, 32 nt, Human
cacugcucuguaacuauuuacaguauucuuug

SEQ ID NO: 348891 - RNA, 32 nt, Human
cacugcucugugggacgcggcgaccccucucc

SEQ ID NO: 348892 - RNA, 32 nt, Human
cacugcugaacaauguggccugggugggguuu

SEQ ID NO: 348893 - RNA, 32 nt, Human
cacugcugaccuuugcaaaggcugccgagcuu

SEQ ID NO: 348894 - RNA, 32 nt, Human
cacugcugagccacucuuagccacaccucagc

SEQ ID NO: 348895 - RNA, 32 nt, Human
cacugcugagcuccucaccuggacagucuccu

SEQ ID NO: 348896 - RNA, 32 nt, Human
cacugcugagugagguugaggggugucucggu

SEQ ID NO: 348897 - RNA, 23 nt, Human
cacugcugauugucacucuuuua

SEQ ID NO: 348898 - RNA, 32 nt, Human
cacugcugcaaccucccccuccuggguucaag

SEQ ID NO: 348899 - RNA, 32 nt, Human
cacugcugcacuccagccugcgggacagagug

SEQ ID NO: 348900 - RNA, 32 nt, Human
cacugcugcacuuuagccugggugaaaaagug

SEQ ID NO: 348901 - RNA, 32 nt, Human
cacugcugcagggccuuccugccuggacagag

SEQ ID NO: 348902 - RNA, 31 nt, Human
cacugcugccucucaaguguugcauuguccc

SEQ ID NO: 348903 - RNA, 31 nt, Human
cacugcugccucuccugggcauggcuguuag

SEQ ID NO: 348904 - RNA, 31 nt, Human
cacugcugcggaggaacugccuucagagaag

SEQ ID NO: 348905 - RNA, 22 nt, Human
cacugcugcuacugccccucuc

SEQ ID NO: 348906 - RNA, 32 nt, Human
cacugcugcuccuucccaucucgaggaacugu

SEQ ID NO: 348907 - RNA, 32 nt, Human
cacugcugcugcuucugcuccugcugccgcug

SEQ ID NO: 348908 - RNA, 32 nt, Human
cacugcuggacaggaauuaacucuccaaaggu

SEQ ID NO: 348909 - RNA, 32 nt, Human
cacugcuggaggcauaauguacaaggcaggaa

SEQ ID NO: 348910 - RNA, 32 nt, Human
cacugcuggaucccaggagcagguguggaaca

SEQ ID NO: 348911 - RNA, 32 nt, Human
cacugcuggcuauaaagauuuggagaccuggg

SEQ ID NO: 348912 - RNA, 32 nt, Human
cacugcugggaccugggccaugucuccccacc

SEQ ID NO: 348913 - RNA, 32 nt, Human
cacugcugggagaagaaacaggccgaggccca

SEQ ID NO: 348914 - RNA, 32 nt, Human
cacugcugggcuggaggagggcucgagcugcg

SEQ ID NO: 348915 - RNA, 32 nt, Human
cacugcuggggagaggagggcagugaggagcg

SEQ ID NO: 348916 - RNA, 32 nt, Human
cacugcugggugguggaggugggcaguggcac

SEQ ID NO: 348917 - RNA, 32 nt, Human
cacugcuggugcccuucucuucugaccugcug

SEQ ID NO: 348918 - RNA, 22 nt, Human
cacugcuggugggagcaggaag

SEQ ID NO: 348919 - RNA, 32 nt, Human
cacugcuguaccggccaccacccuccggccac

SEQ ID NO: 348920 - RNA, 32 nt, Human
cacugcuguccagccacagccccagcccaggc

SEQ ID NO: 348921 - RNA, 32 nt, Human
cacugcugugagugcgccucaccagaaccagu

SEQ ID NO: 348922 - RNA, 32 nt, Human
cacugcugugauucagggaucuuucuucuaaa

SEQ ID NO: 348923 - RNA, 23 nt, Human
cacugcuguggaaccaccuggcu

SEQ ID NO: 348924 - RNA, 32 nt, Human
cacugcuuaagggguuucagcaacacagaaac

SEQ ID NO: 348925 - RNA, 32 nt, Human
cacugcuuaagugccugcaggagccgccugcc

SEQ ID NO: 348926 - RNA, 32 nt, Human
cacugcuuagcccaaaguaauaguacuuuuga

SEQ ID NO: 348927 - RNA, 32 nt, Human
cacugcuucaacaggggccagaacagucugcc

SEQ ID NO: 348928 - RNA, 32 nt, Human
cacugcuucagagacacgaaccaccuugagug

SEQ ID NO: 348929 - RNA, 31 nt, Human
cacugcuuccaaacucugccugugucccaug

SEQ ID NO: 348930 - RNA, 32 nt, Human
cacugcuucucccagcauucuggugccuccaa

SEQ ID NO: 348931 - RNA, 32 nt, Human
cacugcuucucccaucucucuccugcccaacc

SEQ ID NO: 348932 - RNA, 32 nt, Human
cacugcuucugggaggggcgggcagacauggu

SEQ ID NO: 348933 - RNA, 32 nt, Human
cacugcuucugugaacagucuuugucuccucc

SEQ ID NO: 348934 - RNA, 32 nt, Human
cacugcuugaagcacagcacuugguuaggggg

SEQ ID NO: 348935 - RNA, 32 nt, Human
cacugcuugccuggccucgugcuuggauuguc

SEQ ID NO: 348936 - RNA, 32 nt, Human
cacugcuuggauaagccaggugcaaugugcau

SEQ ID NO: 348937 - RNA, 32 nt, Human
cacugcuuggggaggaagacgaagaggcacug

SEQ ID NO: 348938 - RNA, 32 nt, Human
cacugcuuucaacacugcaugacuguaaaaac

SEQ ID NO: 348939 - RNA, 32 nt, Human
cacuggaaacacacccaccgcaaccucaagaa

SEQ ID NO: 348940 - RNA, 28 nt, Human
cacuggaaacuaggccgggaagcagcag

SEQ ID NO: 348941 - RNA, 32 nt, Human
cacuggaaagaggggcuuggagagggagacag

SEQ ID NO: 348942 - RNA, 31 nt, Human
cacuggaaccucccugggccugucucagauu

SEQ ID NO: 348943 - RNA, 32 nt, Human
cacuggaacguuucacugcaaacacaccuugg

SEQ ID NO: 348944 - RNA, 32 nt, Human
cacuggaauauaaaacagccauggucugauau

SEQ ID NO: 348945 - RNA, 32 nt, Human
cacuggacacagaaauggaaaacaggagucga

SEQ ID NO: 348946 - RNA, 32 nt, Human
cacuggacagagggccagaguggguagugggg

SEQ ID NO: 348947 - RNA, 32 nt, Human
cacuggacucaggcaugucuauggcugccugu

SEQ ID NO: 348948 - RNA, 21 nt, Human
cacuggacuccagccuggaca

SEQ ID NO: 348949 - RNA, 18 nt, Human
cacuggacucccauugaa

SEQ ID NO: 348950 - RNA, 32 nt, Human
cacuggacucuuuauccuuagaagaacccaag

SEQ ID NO: 348951 - RNA, 32 nt, Human
cacuggacugcagacccggccugguggggcca

SEQ ID NO: 348952 - RNA, 26 nt, Human
cacuggacugcauggggaggcagcag

SEQ ID NO: 348953 - RNA, 32 nt, Human
cacuggacuguccuguuugccuccaggagaac

SEQ ID NO: 348954 - RNA, 32 nt, Human
cacuggacuguggagggagccuuaaaccuuug

SEQ ID NO: 348955 - RNA, 32 nt, Human
cacuggacuucuguccagagcuccucagcuca

SEQ ID NO: 348956 - RNA, 32 nt, Human
cacuggagaagacaggaggguccuguagugua

SEQ ID NO: 348957 - RNA, 32 nt, Human
cacuggagacagugucaggccaggcauggugg

SEQ ID NO: 348958 - RNA, 32 nt, Human
cacuggagacgggguuucacuguguuagccac

SEQ ID NO: 348959 - RNA, 32 nt, Human
cacuggagagguuaagauagaggcucaagaac

SEQ ID NO: 348960 - RNA, 32 nt, Human
cacuggagcagucuguccuuaugccgaaucaa

SEQ ID NO: 348961 - RNA, 32 nt, Human
cacuggagccagccccacccuaggcaggaaga

SEQ ID NO: 348962 - RNA, 32 nt, Human
cacuggagccucugccuuccagguucaaguga

SEQ ID NO: 348963 - RNA, 32 nt, Human
cacuggagcuaccagaagcaucauggggcccu

SEQ ID NO: 348964 - RNA, 32 nt, Human
cacuggagcugaugucuggcaucuccagggcc

SEQ ID NO: 348965 - RNA, 32 nt, Human
cacuggaggcacaccugcuauaccucaugccu

SEQ ID NO: 348966 - RNA, 32 nt, Human
cacuggaggcauucuucaggcuccuuuaaggc

SEQ ID NO: 348967 - RNA, 21 nt, Human
cacuggagggagcugguuuga

SEQ ID NO: 348968 - RNA, 32 nt, Human
cacuggagggcagaggccucaguguccagcac

SEQ ID NO: 348969 - RNA, 32 nt, Human
cacuggagugguaacaagaggagcaggaagca

SEQ ID NO: 348970 - RNA, 32 nt, Human
cacuggauaauuacuuuugugauuuagauuuu

SEQ ID NO: 348971 - RNA, 32 nt, Human
cacuggaucagccuggucauucuguccguguu

SEQ ID NO: 348972 - RNA, 32 nt, Human
cacuggaucugagaaacuucccaggggaccgc

SEQ ID NO: 348973 - RNA, 32 nt, Human
cacuggaucuggagaguggaggaagcacuggg

SEQ ID NO: 348974 - RNA, 32 nt, Human
cacuggauggaaaauugugagcacauaagugu

SEQ ID NO: 348975 - RNA, 32 nt, Human
cacuggauggacuuggcuucagacucggacuu

SEQ ID NO: 348976 - RNA, 32 nt, Human
cacuggauugaccacuccauauuuugcuaccu

SEQ ID NO: 348977 - RNA, 18 nt, Human
cacuggauugggggauag

SEQ ID NO: 348978 - RNA, 32 nt, Human
cacuggcaagauuucaagaccacucucugcac

SEQ ID NO: 348979 - RNA, 32 nt, Human
cacuggcaagcccugagguagggauggcuggc

SEQ ID NO: 348980 - RNA, 32 nt, Human
cacuggcaauggacggccucagccuggagcca

SEQ ID NO: 348981 - RNA, 32 nt, Human
cacuggcacacacacauacacacauaugcaca

SEQ ID NO: 348982 - RNA, 32 nt, Human
cacuggcacacaggcuggaaaacgggcacugg

SEQ ID NO: 348983 - RNA, 32 nt, Human
cacuggcaccccggaaccucaggggcugccga

SEQ ID NO: 348984 - RNA, 32 nt, Human
cacuggcacugcacgaggggccaggagagcag

SEQ ID NO: 348985 - RNA, 32 nt, Human
cacuggcacuucagacuacacuaaaucagagu

SEQ ID NO: 348986 - RNA, 32 nt, Human
cacuggcagcauuaucucaggcucccuagaau

SEQ ID NO: 348987 - RNA, 32 nt, Human
cacuggcagccgcuggugucucuucacacaga

SEQ ID NO: 348988 - RNA, 32 nt, Human
cacuggcagcuugcacucucagccugaaaaag

SEQ ID NO: 348989 - RNA, 32 nt, Human
cacuggcaggcgagggcucucguucauauucu

SEQ ID NO: 348990 - RNA, 32 nt, Human
cacuggcaucuucuuuuaacuugggccaucug

SEQ ID NO: 348991 - RNA, 32 nt, Human
cacuggcaugggagacccuugacaacugcuga

SEQ ID NO: 348992 - RNA, 32 nt, Human
cacuggccacaauacccaccucuguggaugau

SEQ ID NO: 348993 - RNA, 32 nt, Human
cacuggccaccucuggaggcucugccuuuccc

SEQ ID NO: 348994 - RNA, 22 nt, Human
cacuggccagagccuggcccag

SEQ ID NO: 348995 - RNA, 32 nt, Human
cacuggccaguucuaccauagacuugacugca

SEQ ID NO: 348996 - RNA, 32 nt, Human
cacuggccaucagcacuuucucccucugccag

SEQ ID NO: 348997 - RNA, 32 nt, Human
cacuggccauucuggucaucucagucuggaac

SEQ ID NO: 348998 - RNA, 32 nt, Human
cacuggcccacacauuccuuucuacagagaau

SEQ ID NO: 348999 - RNA, 32 nt, Human
cacuggcccagaggaagcuucuguuguguuca

SEQ ID NO: 349000 - RNA, 32 nt, Human
cacuggcccaugagccucugccuggccccugc

SEQ ID NO: 349001 - RNA, 21 nt, Human
cacuggccccgcagcccuugg

SEQ ID NO: 349002 - RNA, 19 nt, Human
cacuggcccgugcugccug

SEQ ID NO: 349003 - RNA, 32 nt, Human
cacuggcccuugcccaaggcagggaagaagga

SEQ ID NO: 349004 - RNA, 32 nt, Human
cacuggccgaggugaugcccacccuucccugg

SEQ ID NO: 349005 - RNA, 32 nt, Human
cacuggccgccucccuccucuggccaauccuc

SEQ ID NO: 349006 - RNA, 32 nt, Human
cacuggccggggucuggcugggucuggcgcuc

SEQ ID NO: 349007 - RNA, 23 nt, Human
cacuggccguggucuacagcgug

SEQ ID NO: 349008 - RNA, 32 nt, Human
cacuggccuccaccaccugaccagaguguucu

SEQ ID NO: 349009 - RNA, 32 nt, Human
cacuggccuccauaauuccugccugcagaucu

SEQ ID NO: 349010 - RNA, 32 nt, Human
cacuggccucugccucugcccugggccaaaag

SEQ ID NO: 349011 - RNA, 32 nt, Human
cacuggccucugggcuagcccagagucccuua

SEQ ID NO: 349012 - RNA, 32 nt, Human
cacuggccugagcaugcagccuggagaguguu

SEQ ID NO: 349013 - RNA, 32 nt, Human
cacuggccuggguagagccagggcgagcacca

SEQ ID NO: 349014 - RNA, 32 nt, Human
cacuggccuucugaugaaauguuaacaaugcc

SEQ ID NO: 349015 - RNA, 32 nt, Human
cacuggccuuucuguuccuuggacaugccugg

SEQ ID NO: 349016 - RNA, 32 nt, Human
cacuggccuuucuucuacccaccucuaaagcu

SEQ ID NO: 349017 - RNA, 32 nt, Human
cacuggccuuucuuuccgucuagccuccucuu

SEQ ID NO: 349018 - RNA, 32 nt, Human
cacuggccuuugcaguccccaaaggaucaggu

SEQ ID NO: 349019 - RNA, 32 nt, Human
cacuggcucauuucucgcaaauaccucgaagg

SEQ ID NO: 349020 - RNA, 32 nt, Human
cacuggcuccaacuuccuccucauggggcauu

SEQ ID NO: 349021 - RNA, 32 nt, Human
cacuggcuccacugagggcgccuaacucuaca

SEQ ID NO: 349022 - RNA, 32 nt, Human
cacuggcuccccaguauucuggaaaaggggua

SEQ ID NO: 349023 - RNA, 32 nt, Human
cacuggcucccugauggcaccugcuggaggaa

SEQ ID NO: 349024 - RNA, 32 nt, Human
cacuggcucccuggaagagaucaagccaucgg

SEQ ID NO: 349025 - RNA, 32 nt, Human
cacuggcuccugccaucuccucugccaugaag

SEQ ID NO: 349026 - RNA, 18 nt, Human
cacuggcucggcccugcc

SEQ ID NO: 349027 - RNA, 23 nt, Human
cacuggcucugagcugacauuga

SEQ ID NO: 349028 - RNA, 32 nt, Human
cacuggcugagcggaugcaucuggggaugagg

SEQ ID NO: 349029 - RNA, 32 nt, Human
cacuggcugagcugcaagacauccuggaauug

SEQ ID NO: 349030 - RNA, 32 nt, Human
cacuggcugcaagugguuaagaauguauauca

SEQ ID NO: 349031 - RNA, 32 nt, Human
cacuggcugcagcuguuccuggagggccugcg

SEQ ID NO: 349032 - RNA, 32 nt, Human
cacuggcugcccaggcugaauggcagugccug

SEQ ID NO: 349033 - RNA, 32 nt, Human
cacuggcugugccucccccgccaccugugugu

SEQ ID NO: 349034 - RNA, 21 nt, Human
cacuggcuguguccccugcca

SEQ ID NO: 349035 - RNA, 18 nt, Human
cacuggcuuggaacaccu

SEQ ID NO: 349036 - RNA, 21 nt, Human
cacuggcuuuaggacagggag

SEQ ID NO: 349037 - RNA, 32 nt, Human
cacuggcuuucuguuuucacaagacagacguc

SEQ ID NO: 349038 - RNA, 24 nt, Human
cacuggcuuuuauaagagcagcag

SEQ ID NO: 349039 - RNA, 32 nt, Human
cacugggaaauguaaaaaucuucacucaccau

SEQ ID NO: 349040 - RNA, 32 nt, Human
cacugggaacaacagguugccuuagaagcuuu

SEQ ID NO: 349041 - RNA, 32 nt, Human
cacugggaccacgaggcagggagccaggcuug

SEQ ID NO: 349042 - RNA, 32 nt, Human
cacugggaccagcaggugaagcguugcaacau

SEQ ID NO: 349043 - RNA, 32 nt, Human
cacugggaccccaggcaugcaccaccucacca

SEQ ID NO: 349044 - RNA, 32 nt, Human
cacugggacccucaccugucucuggcuucugc

SEQ ID NO: 349045 - RNA, 32 nt, Human
cacugggagaagggaugugggucugagagcuu

SEQ ID NO: 349046 - RNA, 32 nt, Human
cacugggagaggggccagaggagcggcuaugg

SEQ ID NO: 349047 - RNA, 32 nt, Human
cacugggagccaugggucccacugccugucca

SEQ ID NO: 349048 - RNA, 32 nt, Human
cacugggagcuuccccauccucccugccuucc

SEQ ID NO: 349049 - RNA, 32 nt, Human
cacugggaggaggcggugcggcgaagcgcuca

SEQ ID NO: 349050 - RNA, 32 nt, Human
cacugggaggccucuggagccgaacugcaaac

SEQ ID NO: 349051 - RNA, 32 nt, Human
cacugggaggccugagagugggccagcucgcu

SEQ ID NO: 349052 - RNA, 32 nt, Human
cacugggagggccaacuuggaggaucagugcu

SEQ ID NO: 349053 - RNA, 32 nt, Human
cacugggaggggcugggaccuuccacaggguc

SEQ ID NO: 349054 - RNA, 32 nt, Human
cacugggagugagggucacaaaggagaccuug

SEQ ID NO: 349055 - RNA, 32 nt, Human
cacugggaucacugggacacugucuuaugaag

SEQ ID NO: 349056 - RNA, 32 nt, Human
cacugggaugccgcagccuggccggcuguggg

SEQ ID NO: 349057 - RNA, 32 nt, Human
cacugggaugcucugcuauuugcacauuuuga

SEQ ID NO: 349058 - RNA, 32 nt, Human
cacugggauuacaggcaugagccaccaugccu

SEQ ID NO: 349059 - RNA, 32 nt, Human
cacugggauuacaggcaugagccaccgcgccu

SEQ ID NO: 349060 - RNA, 32 nt, Human
cacugggauuacaggcgugagccacccggccu

SEQ ID NO: 349061 - RNA, 32 nt, Human
cacugggauuacaggugcccaccaccacacca

SEQ ID NO: 349062 - RNA, 32 nt, Human
cacugggcagaggcacgagcacguccacauag

SEQ ID NO: 349063 - RNA, 32 nt, Human
cacugggccaugugacaacugcaccugugugg

SEQ ID NO: 349064 - RNA, 32 nt, Human
cacugggcccaaagugucuccccaccagccag

SEQ ID NO: 349065 - RNA, 32 nt, Human
cacugggccccucaggggaagcugcuagggga

SEQ ID NO: 349066 - RNA, 32 nt, Human
cacugggccggcagccugguucccucuuuccu

SEQ ID NO: 349067 - RNA, 32 nt, Human
cacugggccucuuguccaucuuccugcaggac

SEQ ID NO: 349068 - RNA, 32 nt, Human
cacugggccugagaccuuuucugcuguccagg

SEQ ID NO: 349069 - RNA, 32 nt, Human
cacugggcggguuccccucugcugcuugugcg

SEQ ID NO: 349070 - RNA, 32 nt, Human
cacugggcucaagaugauucuccuuccucggc

SEQ ID NO: 349071 - RNA, 32 nt, Human
cacugggcucacugcaggcaugcugaacaagg

SEQ ID NO: 349072 - RNA, 32 nt, Human
cacugggcucucccucccccagccuggagcac

SEQ ID NO: 349073 - RNA, 32 nt, Human
cacugggcucuguuuucacuguucgucugcug

SEQ ID NO: 349074 - RNA, 32 nt, Human
cacugggcugaaaucaagguguuaacagggcu

SEQ ID NO: 349075 - RNA, 32 nt, Human
cacugggcuucugcuuucugcucuggcccaca

SEQ ID NO: 349076 - RNA, 21 nt, Human
cacuggggaaagaguuuguca

SEQ ID NO: 349077 - RNA, 32 nt, Human
cacuggggaaugcucccagcugugcuguggag

SEQ ID NO: 349078 - RNA, 22 nt, Human
cacuggggacacaaaggggaca

SEQ ID NO: 349079 - RNA, 24 nt, Human
cacuggggacacagaguucagaca

SEQ ID NO: 349080 - RNA, 32 nt, Human
cacuggggaggaauccuggaccaagcacaaaa

SEQ ID NO: 349081 - RNA, 22 nt, Human
cacuggggauuacaauuugaca

SEQ ID NO: 349082 - RNA, 32 nt, Human
cacuggggcaagggugacagacacgagaaugg

SEQ ID NO: 349083 - RNA, 32 nt, Human
cacuggggcagaggacugggaaccgcggcagc

SEQ ID NO: 349084 - RNA, 32 nt, Human
cacuggggcaggcggagggcccugcgugcucc

SEQ ID NO: 349085 - RNA, 32 nt, Human
cacuggggccaggcucacaccuguaauccuaa

SEQ ID NO: 349086 - RNA, 32 nt, Human
cacuggggcugcuacauaauauuuucauuuga

SEQ ID NO: 349087 - RNA, 32 nt, Human
cacuggggcuggcuggguuggaaagugggcug

SEQ ID NO: 349088 - RNA, 26 nt, Human
cacuggggcuucccaggaggcagcag

SEQ ID NO: 349089 - RNA, 24 nt, Human
cacuggggcuugcuauuuuaugag

SEQ ID NO: 349090 - RNA, 32 nt, Human
cacugggggagggaugguuugggcaggugcag

SEQ ID NO: 349091 - RNA, 32 nt, Human
cacugggggcaacccuuccaggaaggaguugg

SEQ ID NO: 349092 - RNA, 32 nt, Human
cacugggggcucgaagacugguuucuagcacu

SEQ ID NO: 349093 - RNA, 32 nt, Human
cacugggguauggcgucgaggcuuccaugggg

SEQ ID NO: 349094 - RNA, 32 nt, Human
cacugggguggaggcggcaggaaggggcggcc

SEQ ID NO: 349095 - RNA, 32 nt, Human
cacuggguaacaguguaguauccugugagaga

SEQ ID NO: 349096 - RNA, 32 nt, Human
cacugggucaccaucgagaucaauccuccucc

SEQ ID NO: 349097 - RNA, 19 nt, Human
cacugggucuccacagcgg

SEQ ID NO: 349098 - RNA, 32 nt, Human
cacugggucugaggcuuuugaggacagucagg

SEQ ID NO: 349099 - RNA, 32 nt, Human
cacugggugaagccagcugggcuccugagucu

SEQ ID NO: 349100 - RNA, 32 nt, Human
cacugggugaauccucccucucagaaccaaua

SEQ ID NO: 349101 - RNA, 32 nt, Human
cacuggguggcuguggagggagcucagcccuc

SEQ ID NO: 349102 - RNA, 32 nt, Human
cacuggguucaucagagcagugugugaaauuc

SEQ ID NO: 349103 - RNA, 32 nt, Human
cacuggguugggagccggguccugguuuccaa

SEQ ID NO: 349104 - RNA, 32 nt, Human
cacugguaagaaugagaaugaaauacuuaaag

SEQ ID NO: 349105 - RNA, 32 nt, Human
cacugguaaggcucagccuacagaaagauuug

SEQ ID NO: 349106 - RNA, 32 nt, Human
cacugguagaugccguuucuucccuuccccuu

SEQ ID NO: 349107 - RNA, 32 nt, Human
cacugguaugauggccccggugcauugugcca

SEQ ID NO: 349108 - RNA, 32 nt, Human
cacugguauuccugccuccauauuuucuuuaa

SEQ ID NO: 349109 - RNA, 32 nt, Human
cacugguauuuggagcaagugacaugccaucc

SEQ ID NO: 349110 - RNA, 32 nt, Human
cacuggucagagaguucgcaguggggagaagu

SEQ ID NO: 349111 - RNA, 32 nt, Human
cacugguccaggucuucaguuuccgaaucucu

SEQ ID NO: 349112 - RNA, 32 nt, Human
cacuggucuacccgccgcccuccugggaacuc

SEQ ID NO: 349113 - RNA, 21 nt, Human
cacuggucuagagagcggcag

SEQ ID NO: 349114 - RNA, 32 nt, Human
cacuggucucaaacuccugaccucaggcgauc

SEQ ID NO: 349115 - RNA, 32 nt, Human
cacuggucucaaacuccugaccucaggugauc

SEQ ID NO: 349116 - RNA, 32 nt, Human
cacuggucucagacacaggccccugguguccc

SEQ ID NO: 349117 - RNA, 32 nt, Human
cacuggucugcugggagaaucaagaacagaac

SEQ ID NO: 349118 - RNA, 23 nt, Human
cacuggucuguggacagcagcag

SEQ ID NO: 349119 - RNA, 32 nt, Human
cacuggucuuguccucuucuccagcauggugu

SEQ ID NO: 349120 - RNA, 23 nt, Human
cacuggugaacugagcugggcag

SEQ ID NO: 349121 - RNA, 32 nt, Human
cacuggugaaggagcagugaggaaccugcaga

SEQ ID NO: 349122 - RNA, 32 nt, Human
cacuggugacugggcucaugccuccaagucag

SEQ ID NO: 349123 - RNA, 32 nt, Human
cacuggugagggggcagcaugggugaagccca

SEQ ID NO: 349124 - RNA, 32 nt, Human
cacuggugcagaucggagaaucugcagaggua

SEQ ID NO: 349125 - RNA, 32 nt, Human
cacuggugcagucugaaaguuacacccaaaau

SEQ ID NO: 349126 - RNA, 32 nt, Human
cacuggugccagccuggaugcaggcuggguag

SEQ ID NO: 349127 - RNA, 32 nt, Human
cacuggugggaggcgguugggaaaguugcagg

SEQ ID NO: 349128 - RNA, 32 nt, Human
cacuggugggaggcuggcggagucagugacua

SEQ ID NO: 349129 - RNA, 32 nt, Human
cacugguggggugggaggagcaccacucacuu

SEQ ID NO: 349130 - RNA, 24 nt, Human
cacugguggguugcaggaacagca

SEQ ID NO: 349131 - RNA, 32 nt, Human
cacugguggugccggcauuugagacccugcgc

SEQ ID NO: 349132 - RNA, 20 nt, Human
cacugguguuuucccugcca

SEQ ID NO: 349133 - RNA, 32 nt, Human
cacugguuccagggauuaaggaaugaaccucu

SEQ ID NO: 349134 - RNA, 32 nt, Human
cacugguucugaggccccuacccucccaggcu

SEQ ID NO: 349135 - RNA, 32 nt, Human
cacugguucuugaagcuuuggcccagaaguaa

SEQ ID NO: 349136 - RNA, 32 nt, Human
cacugguugcagacgucuuuauaggcagucac

SEQ ID NO: 349137 - RNA, 32 nt, Human
cacugguugccugaacagucacacuugcaacc

SEQ ID NO: 349138 - RNA, 32 nt, Human
cacugguuggagcgccgcgccgcgcccgagcc

SEQ ID NO: 349139 - RNA, 32 nt, Human
cacugguuucaggauacucaucaguccugauu

SEQ ID NO: 349140 - RNA, 32 nt, Human
cacugguuuucaugcgcuguuuuuguuuuaaa

SEQ ID NO: 349141 - RNA, 32 nt, Human
cacugguuuuguugccccagggcugcuuugcu

SEQ ID NO: 349142 - RNA, 21 nt, Human
cacuguaaaacaaagaaccaa

SEQ ID NO: 349143 - RNA, 32 nt, Human
cacuguaaaacuaguuagcugaagacgacuuc

SEQ ID NO: 349144 - RNA, 32 nt, Human
cacuguaaaaugugggauuaugggucacagga

SEQ ID NO: 349145 - RNA, 32 nt, Human
cacuguaaacaugcuuuuaauaagaaggguag

SEQ ID NO: 349146 - RNA, 32 nt, Human
cacuguaaccaugugccaucaucccccaagag

SEQ ID NO: 349147 - RNA, 32 nt, Human
cacuguaaccucuggguucaagcaauucuucu

SEQ ID NO: 349148 - RNA, 32 nt, Human
cacuguaacuagcaggccacaggaagcaaagc

SEQ ID NO: 349149 - RNA, 32 nt, Human
cacuguaacugccgagcugccugcugucacgu

SEQ ID NO: 349150 - RNA, 32 nt, Human
cacuguaauacagcuuaaaauauuuuuagaau

SEQ ID NO: 349151 - RNA, 32 nt, Human
cacuguaaugcaugagugcggggauguggugu

SEQ ID NO: 349152 - RNA, 32 nt, Human
cacuguacagaagagccaccacugggaugggg

SEQ ID NO: 349153 - RNA, 32 nt, Human
cacuguacaucaccagccugggcgacagagug

SEQ ID NO: 349154 - RNA, 32 nt, Human
cacuguaccccaucaagcuuacucugaaucaa

SEQ ID NO: 349155 - RNA, 32 nt, Human
cacuguacccuccagcgagucccaggagagug

SEQ ID NO: 349156 - RNA, 32 nt, Human
cacuguaccugcccuagaaccugggccuaggc

SEQ ID NO: 349157 - RNA, 32 nt, Human
cacuguacuccagcacucuagccugggcgaca

SEQ ID NO: 349158 - RNA, 22 nt, Human
cacuguacuccagccugaagag

SEQ ID NO: 349159 - RNA, 20 nt, Human
cacuguacuccagccuggca

SEQ ID NO: 349160 - RNA, 21 nt, Human
cacuguacuccagccugggca

SEQ ID NO: 349161 - RNA, 32 nt, Human
cacuguacuccagccugggugacagggcaaga

SEQ ID NO: 349162 - RNA, 32 nt, Human
cacuguacuucuccaccgacguguacccgagg

SEQ ID NO: 349163 - RNA, 32 nt, Human
cacuguagccacaaccucucaggcucaaguga

SEQ ID NO: 349164 - RNA, 32 nt, Human
cacuguagccagacugccucucuagauuccuc

SEQ ID NO: 349165 - RNA, 32 nt, Human
cacuguagccugggugacaaagugagacccug

SEQ ID NO: 349166 - RNA, 32 nt, Human
cacuguagcucuaaucgugccugguguucuga

SEQ ID NO: 349167 - RNA, 32 nt, Human
cacuguaggaggaucaauugagccuagaaguu

SEQ ID NO: 349168 - RNA, 32 nt, Human
cacuguaggaggcagauccaagaggcuuccua

SEQ ID NO: 349169 - RNA, 31 nt, Human
cacuguaggcggccgaggugggugaaucaca

SEQ ID NO: 349170 - RNA, 22 nt, Human
cacuguagucucaaccuccugg

SEQ ID NO: 349171 - RNA, 24 nt, Human
cacuguagucucgaccucccaggc

SEQ ID NO: 349172 - RNA, 32 nt, Human
cacuguaguucucucauuuccaaaccaucagc

SEQ ID NO: 349173 - RNA, 32 nt, Human
cacuguauguuccucucuuuuggaguugugac

SEQ ID NO: 349174 - RNA, 32 nt, Human
cacuguauucucaaccuccuaggcucaaauga

SEQ ID NO: 349175 - RNA, 32 nt, Human
cacuguauuuggaauucugccugcuagugaua

SEQ ID NO: 349176 - RNA, 32 nt, Human
cacuguauuuggagaaaaugguaagaguucca

SEQ ID NO: 349177 - RNA, 32 nt, Human
cacugucaaaucuucugcccuggaccagaaac

SEQ ID NO: 349178 - RNA, 32 nt, Human
cacugucaaccaggccagagugcagugaagau

SEQ ID NO: 349179 - RNA, 32 nt, Human
cacugucacacagcuuauaacauguaugcuuu

SEQ ID NO: 349180 - RNA, 32 nt, Human
cacugucacacucaacaucaccucucaggguc

SEQ ID NO: 349181 - RNA, 19 nt, Human
cacugucaccauccugccu

SEQ ID NO: 349182 - RNA, 21 nt, Human
cacugucacccagagcagcca

SEQ ID NO: 349183 - RNA, 32 nt, Human
cacugucacccaggccggagugcaguggcaca

SEQ ID NO: 349184 - RNA, 32 nt, Human
cacugucacccaggcugaacugcaguggugug

SEQ ID NO: 349185 - RNA, 32 nt, Human
cacugucacccaggcugcuggaguacaguggc

SEQ ID NO: 349186 - RNA, 32 nt, Human
cacugucacccaggcuggagugcaguggcaug

SEQ ID NO: 349187 - RNA, 32 nt, Human
cacugucacccaggcuggagugcaguggcgcg

SEQ ID NO: 349188 - RNA, 32 nt, Human
cacugucacccaggcuggagugcaguguugca

SEQ ID NO: 349189 - RNA, 32 nt, Human
cacugucacccagucuggaguggaguggcaua

SEQ ID NO: 349190 - RNA, 32 nt, Human
cacugucacccgggcuggagugcaauggcucg

SEQ ID NO: 349191 - RNA, 32 nt, Human
cacugucaccuaggcuggagugcagugguaaa

SEQ ID NO: 349192 - RNA, 32 nt, Human
cacugucaccucucaccaacauucuaaaucau

SEQ ID NO: 349193 - RNA, 32 nt, Human
cacugucagauuuccacucuucugccuuuagg

SEQ ID NO: 349194 - RNA, 32 nt, Human
cacugucaggagaaaagaagaggauucacaua

SEQ ID NO: 349195 - RNA, 32 nt, Human
cacugucagggcuagccugccugcuuacgcgc

SEQ ID NO: 349196 - RNA, 32 nt, Human
cacugucagucuuugcaccugcuuucaguguu

SEQ ID NO: 349197 - RNA, 32 nt, Human
cacuguccacaaccacacagauauguuuccca

SEQ ID NO: 349198 - RNA, 32 nt, Human
cacuguccagaggcuuuggcugcauggucuga

SEQ ID NO: 349199 - RNA, 32 nt, Human
cacuguccaggcaaaugccaggccuugucccc

SEQ ID NO: 349200 - RNA, 32 nt, Human
cacuguccaggccucagacucuggggcagaga

SEQ ID NO: 349201 - RNA, 32 nt, Human
cacugucccacaagagcuuuccugccuaauga

SEQ ID NO: 349202 - RNA, 32 nt, Human
cacugucccagcugccaccuagacucggagcu

SEQ ID NO: 349203 - RNA, 32 nt, Human
cacugucccccaggcuggagugcaguggcaug

SEQ ID NO: 349204 - RNA, 32 nt, Human
cacugucccugccuguccccaucccacagagg

SEQ ID NO: 349205 - RNA, 31 nt, Human
cacuguccugagagaggaggaggcugggcag

SEQ ID NO: 349206 - RNA, 32 nt, Human
cacuguccugcaggaagcccucgggguagggc

SEQ ID NO: 349207 - RNA, 32 nt, Human
cacuguccugguuucuccuccuggagucuaau

SEQ ID NO: 349208 - RNA, 32 nt, Human
cacuguccuguuuuccagagcugcugcaccau

SEQ ID NO: 349209 - RNA, 32 nt, Human
cacugucgcacuccagccuggaugauagagca

SEQ ID NO: 349210 - RNA, 32 nt, Human
cacugucgcccaaucuggagugcacuggcgcu

SEQ ID NO: 349211 - RNA, 32 nt, Human
cacugucgcccaggcuggagugcaguggcgca

SEQ ID NO: 349212 - RNA, 32 nt, Human
cacugucgcccaggcuggagugcaguggcgug

SEQ ID NO: 349213 - RNA, 32 nt, Human
cacugucgcccaggcuggagugcgguggugca

SEQ ID NO: 349214 - RNA, 32 nt, Human
cacugucgccuaggcuggagugcaacagugug

SEQ ID NO: 349215 - RNA, 32 nt, Human
cacugucgcgguguaguuguccaccucgcagg

SEQ ID NO: 349216 - RNA, 32 nt, Human
cacugucguccucugcggccucugccacuggu

SEQ ID NO: 349217 - RNA, 32 nt, Human
cacugucucaggcuggaggucagcgaaccucg

SEQ ID NO: 349218 - RNA, 32 nt, Human
cacugucuccaccucaguuccucagggcuguu

SEQ ID NO: 349219 - RNA, 32 nt, Human
cacugucuccaucagugcuguugaacucaaau

SEQ ID NO: 349220 - RNA, 32 nt, Human
cacugucuccauccuccaccucugagauggac

SEQ ID NO: 349221 - RNA, 32 nt, Human
cacugucucccaggcuggaauguagggugugc

SEQ ID NO: 349222 - RNA, 32 nt, Human
cacugucuccccuguuucucagcggccuagau

SEQ ID NO: 349223 - RNA, 32 nt, Human
cacugucuccggcgggugaggcugcagcccag

SEQ ID NO: 349224 - RNA, 32 nt, Human
cacugucuccuaggcuggagugcaguggugug

SEQ ID NO: 349225 - RNA, 32 nt, Human
cacugucugaagguucuccaaauugucuguga

SEQ ID NO: 349226 - RNA, 28 nt, Human
cacugucugagaguuuaguuguagcaga

SEQ ID NO: 349227 - RNA, 24 nt, Human
cacugucugauaaggugagaucaa

SEQ ID NO: 349228 - RNA, 32 nt, Human
cacugucugguuuccaaugcuucuggagacuu

SEQ ID NO: 349229 - RNA, 32 nt, Human
cacugucuguggcccauugucauuguuuccuc

SEQ ID NO: 349230 - RNA, 32 nt, Human
cacugucuuaagccacuuugacccugggagac

SEQ ID NO: 349231 - RNA, 32 nt, Human
cacugucuuaauauuucuuuacauucuuucaa

SEQ ID NO: 349232 - RNA, 32 nt, Human
cacugucuucuuucuuauccccuuggugggcu

SEQ ID NO: 349233 - RNA, 32 nt, Human
cacugucuugcccaggcuggagugcaguggcc

SEQ ID NO: 349234 - RNA, 32 nt, Human
cacugucuuucccaucucuaucucuccucuac

SEQ ID NO: 349235 - RNA, 32 nt, Human
cacugugaaggagaaagagugagggcaaugaa

SEQ ID NO: 349236 - RNA, 32 nt, Human
cacugugaagggcagauaucuauuaccaaacc

SEQ ID NO: 349237 - RNA, 32 nt, Human
cacugugaagucagcguuaaccaugugcauac

SEQ ID NO: 349238 - RNA, 32 nt, Human
cacugugacccacaggccugggugguguaccu

SEQ ID NO: 349239 - RNA, 20 nt, Human
cacugugacggccacagggg

SEQ ID NO: 349240 - RNA, 32 nt, Human
cacugugacggggaguccaggcgcaggaggga

SEQ ID NO: 349241 - RNA, 32 nt, Human
cacugugacucaguggcacuuccacuggacac

SEQ ID NO: 349242 - RNA, 32 nt, Human
cacugugacucugccaucuuccucagacggag

SEQ ID NO: 349243 - RNA, 32 nt, Human
cacugugagaggcugaggcgggaugaucaccu

SEQ ID NO: 349244 - RNA, 32 nt, Human
cacugugagccagggauacaacaaaauacuag

SEQ ID NO: 349245 - RNA, 32 nt, Human
cacugugagccccgggcuccugcucagccuug

SEQ ID NO: 349246 - RNA, 32 nt, Human
cacugugagcucagcacagaguaggaagaaca

SEQ ID NO: 349247 - RNA, 24 nt, Human
cacugugaggccaagauccccuca

SEQ ID NO: 349248 - RNA, 32 nt, Human
cacugugaggccuacagcucugccggggagga

SEQ ID NO: 349249 - RNA, 32 nt, Human
cacugugaugacugccacaaaaagcagcauua

SEQ ID NO: 349250 - RNA, 32 nt, Human
cacugugaugcagagccccaggggucuuugcc

SEQ ID NO: 349251 - RNA, 32 nt, Human
cacugugauguggcauucuguaaauaagacua

SEQ ID NO: 349252 - RNA, 32 nt, Human
cacugugauugcacucccagcccagaucagca

SEQ ID NO: 349253 - RNA, 32 nt, Human
cacugugcaaagcaugcccuucugcacaggag

SEQ ID NO: 349254 - RNA, 32 nt, Human
cacugugcaacacaggcuucagauucauguau

SEQ ID NO: 349255 - RNA, 32 nt, Human
cacugugcaggacguggaccagcuggagcugc

SEQ ID NO: 349256 - RNA, 32 nt, Human
cacugugcaguggcaugaucuccgcucgcagc

SEQ ID NO: 349257 - RNA, 32 nt, Human
cacugugcaguguggcuggcucuccagcauca

SEQ ID NO: 349258 - RNA, 32 nt, Human
cacugugccaaagugugcaguguccuucagag

SEQ ID NO: 349259 - RNA, 32 nt, Human
cacugugccacucuacuccagccugggcaaca

SEQ ID NO: 349260 - RNA, 32 nt, Human
cacugugccacugacuugcugugugacccugg

SEQ ID NO: 349261 - RNA, 32 nt, Human
cacugugcccagacaugugugcucaggguggc

SEQ ID NO: 349262 - RNA, 32 nt, Human
cacugugcccugccguuuccugcugggccccu

SEQ ID NO: 349263 - RNA, 15 nt, Human
cacugugccuggcca

SEQ ID NO: 349264 - RNA, 32 nt, Human
cacugugccuuccgggccuccugggcuucugc

SEQ ID NO: 349265 - RNA, 32 nt, Human
cacugugcgaagagagaugggggccaggaagu

SEQ ID NO: 349266 - RNA, 32 nt, Human
cacugugcggcucuggggagcucuuuccugug

SEQ ID NO: 349267 - RNA, 32 nt, Human
cacugugcuacucuacuccagccugggcaaca

SEQ ID NO: 349268 - RNA, 32 nt, Human
cacugugcuauccuugaacuaccaauaauuuu

SEQ ID NO: 349269 - RNA, 32 nt, Human
cacugugcucucucccgucucuuccauucucu

SEQ ID NO: 349270 - RNA, 32 nt, Human
cacugugcugcgauccguguguccucaaucug

SEQ ID NO: 349271 - RNA, 32 nt, Human
cacugugcuggcgggcuccggguggggacccc

SEQ ID NO: 349272 - RNA, 32 nt, Human
cacugugcuguuguugucugacuguggcuauc

SEQ ID NO: 349273 - RNA, 32 nt, Human
cacugugcuuccacaugccuggccuaaaaugg

SEQ ID NO: 349274 - RNA, 32 nt, Human
cacuguggaaacagccuggcagucccuugaaa

SEQ ID NO: 349275 - RNA, 24 nt, Human
cacuguggaagauaaagccuacaa

SEQ ID NO: 349276 - RNA, 32 nt, Human
cacuguggacaguguacacuauggugugagug

SEQ ID NO: 349277 - RNA, 32 nt, Human
cacuguggagcaguguggcccagccuggucca

SEQ ID NO: 349278 - RNA, 32 nt, Human
cacuguggaggaugaaagcacacagaugaauu

SEQ ID NO: 349279 - RNA, 32 nt, Human
cacuguggaggcagugguuguggaggacauuu

SEQ ID NO: 349280 - RNA, 30 nt, Human
cacuguggaggccacaggagcagaaacaug

SEQ ID NO: 349281 - RNA, 32 nt, Human
cacuguggagggaagcauuggaacuggaguug

SEQ ID NO: 349282 - RNA, 32 nt, Human
cacuguggaucugccauccauucugcagucuc

SEQ ID NO: 349283 - RNA, 18 nt, Human
cacuguggcaaagccuca

SEQ ID NO: 349284 - RNA, 32 nt, Human
cacuguggcagcggccaccauggccaugccag

SEQ ID NO: 349285 - RNA, 32 nt, Human
cacuguggcauccucaggcaaagcuccugccu

SEQ ID NO: 349286 - RNA, 32 nt, Human
cacuguggcauccucaggcgaagcuccugccu

SEQ ID NO: 349287 - RNA, 32 nt, Human
cacuguggcauccucaggugaagcuccugccu

SEQ ID NO: 349288 - RNA, 32 nt, Human
cacuguggcccaggcuggacuccagcacagug

SEQ ID NO: 349289 - RNA, 32 nt, Human
cacuguggccucggucccuuagugaagccaug

SEQ ID NO: 349290 - RNA, 30 nt, Human
cacuguggccucuccaagcguccugcacgu

SEQ ID NO: 349291 - RNA, 32 nt, Human
cacuguggccugaucagcaggagccaauaucc

SEQ ID NO: 349292 - RNA, 32 nt, Human
cacuguggcuagauauauacacacacauauau

SEQ ID NO: 349293 - RNA, 32 nt, Human
cacuguggcucacgccuguaaucccagcacuu

SEQ ID NO: 349294 - RNA, 32 nt, Human
cacuguggcucacgccuguaaucucagcacuu

SEQ ID NO: 349295 - RNA, 32 nt, Human
cacuguggcucacuccuguaaucucagaacuu

SEQ ID NO: 349296 - RNA, 32 nt, Human
cacuguggcucaugccugcaaucccagcacuu

SEQ ID NO: 349297 - RNA, 32 nt, Human
cacuguggcucaugccuguaaucccagcacuu

SEQ ID NO: 349298 - RNA, 32 nt, Human
cacuguggcucaugccuuuaaucccagcacuu

SEQ ID NO: 349299 - RNA, 32 nt, Human
cacuguggcucaugcuuguaaucccagcacuu

SEQ ID NO: 349300 - RNA, 32 nt, Human
cacuguggcucccuggaggagcucccagucug

SEQ ID NO: 349301 - RNA, 32 nt, Human
cacugugggaacggcuuggcccagcggggccu

SEQ ID NO: 349302 - RNA, 32 nt, Human
cacugugggaagcugaggcgggcggaucaccu

SEQ ID NO: 349303 - RNA, 23 nt, Human
cacugugggagagaaccugucaa

SEQ ID NO: 349304 - RNA, 32 nt, Human
cacugugggaggccgaggcggauggaucaccu

SEQ ID NO: 349305 - RNA, 32 nt, Human
cacugugggaggccgaggcgggcggaucaccu

SEQ ID NO: 349306 - RNA, 32 nt, Human
cacugugggaggccgaggcgggcggaucgcuu

SEQ ID NO: 349307 - RNA, 32 nt, Human
cacugugggaggccgaggcggguggaucaccu

SEQ ID NO: 349308 - RNA, 32 nt, Human
cacugugggaggcggaggcgggaggaucauga

SEQ ID NO: 349309 - RNA, 32 nt, Human
cacugugggaggcugaggcggguggaucaucu

SEQ ID NO: 349310 - RNA, 32 nt, Human
cacugugggaggcugaggugguuguauugcuu

SEQ ID NO: 349311 - RNA, 32 nt, Human
cacugugggcaguaucaccugccucucaaaau

SEQ ID NO: 349312 - RNA, 32 nt, Human
cacugugggcuaggguggucagaggaagccag

SEQ ID NO: 349313 - RNA, 24 nt, Human
cacugugggcucgguucccugcca

SEQ ID NO: 349314 - RNA, 32 nt, Human
cacugugggcuggggacgccugcccuucuguc

SEQ ID NO: 349315 - RNA, 24 nt, Human
cacuguggucucaaucuccugacu

SEQ ID NO: 349316 - RNA, 32 nt, Human
cacuguggucucaaucuccugacuucaugguc

SEQ ID NO: 349317 - RNA, 32 nt, Human
cacuguggugcccucugcucccuggagcucuu

SEQ ID NO: 349318 - RNA, 32 nt, Human
cacugugguucaugccuauaaucccagcacuu

SEQ ID NO: 349319 - RNA, 32 nt, Human
cacugugguugcccccuuccucucuguggcac

SEQ ID NO: 349320 - RNA, 32 nt, Human
cacuguguacagcuggccacacacagggaagg

SEQ ID NO: 349321 - RNA, 32 nt, Human
cacuguguaguguauuugagggaucagucauc

SEQ ID NO: 349322 - RNA, 32 nt, Human
cacugugucacccaggcuggagugcaguggca

SEQ ID NO: 349323 - RNA, 32 nt, Human
cacugugucacccaggcuggagugcaguggcg

SEQ ID NO: 349324 - RNA, 32 nt, Human
cacugugucacccaggcuggagugcaguggug

SEQ ID NO: 349325 - RNA, 32 nt, Human
cacugugucaugcaggcuggagugcaguggca

SEQ ID NO: 349326 - RNA, 32 nt, Human
cacugugucccccaggcuggagugcaguggca

SEQ ID NO: 349327 - RNA, 32 nt, Human
cacugugucgcccaggcuggagugcaaguggc

SEQ ID NO: 349328 - RNA, 32 nt, Human
cacugugucgcccaggcuggagugcaguggcg

SEQ ID NO: 349329 - RNA, 25 nt, Human
cacugugugaagggacucuuuuaaa

SEQ ID NO: 349330 - RNA, 22 nt, Human
cacugugugcagaaggcagcag

SEQ ID NO: 349331 - RNA, 32 nt, Human
cacugugugccuggcccugugcugggcacugg

SEQ ID NO: 349332 - RNA, 32 nt, Human
cacugugugggccuguguuguguccugugcug

SEQ ID NO: 349333 - RNA, 32 nt, Human
cacuguguguuuuuaccaaaguggccauuggc

SEQ ID NO: 349334 - RNA, 32 nt, Human
cacuguguucaagcgauucuccugccucagcc

SEQ ID NO: 349335 - RNA, 32 nt, Human
cacuguguucccacgggugccaugaagugugu

SEQ ID NO: 349336 - RNA, 32 nt, Human
cacuguguuccuuccgcuuggagcuauuuucc

SEQ ID NO: 349337 - RNA, 32 nt, Human
cacuguguugcccaggcuagagugcaguggug

SEQ ID NO: 349338 - RNA, 32 nt, Human
cacuguguugcccaggcuggagugcaaauggc

SEQ ID NO: 349339 - RNA, 32 nt, Human
cacuguguugcccaggcuggagugcaguagug

SEQ ID NO: 349340 - RNA, 32 nt, Human
cacuguguugcccaggcuggucucaaaacucc

SEQ ID NO: 349341 - RNA, 32 nt, Human
cacuguguugcccaggcuggucucaaacucca

SEQ ID NO: 349342 - RNA, 32 nt, Human
cacuguguugcccaggcuggucucaaacuccu

SEQ ID NO: 349343 - RNA, 32 nt, Human
cacuguguugcccaggcuggucucgaacuccu

SEQ ID NO: 349344 - RNA, 32 nt, Human
cacuguguuggccaggcuggucucaaacuccu

SEQ ID NO: 349345 - RNA, 32 nt, Human
cacuguguuggccaggcuggucucgaacaccu

SEQ ID NO: 349346 - RNA, 32 nt, Human
cacuguguuggccaggcuggucucgaacuccu

SEQ ID NO: 349347 - RNA, 23 nt, Human
cacuguguuguucaugguggcuu

SEQ ID NO: 349348 - RNA, 32 nt, Human
cacuguuacauacauuuuccaugguagaaagg

SEQ ID NO: 349349 - RNA, 32 nt, Human
cacuguuacuuucccccuccccuagucagcag

SEQ ID NO: 349350 - RNA, 32 nt, Human
cacuguuaguaaggcaauuuauuggacacaau

SEQ ID NO: 349351 - RNA, 25 nt, Human
cacuguuauagcagagccuuucaaa

SEQ ID NO: 349352 - RNA, 32 nt, Human
cacuguuauccaggcuggagugcagaggcaca

SEQ ID NO: 349353 - RNA, 32 nt, Human
cacuguucagcuuucuuauggaaugacagaga

SEQ ID NO: 349354 - RNA, 32 nt, Human
cacuguucaggcugaggcaggagaauugcuug

SEQ ID NO: 349355 - RNA, 32 nt, Human
cacuguucagggccacggagaauucucgaagu

SEQ ID NO: 349356 - RNA, 32 nt, Human
cacuguucccuaagaaauauccuugagcaaua

SEQ ID NO: 349357 - RNA, 32 nt, Human
cacuguucggccaguggcaacaaggagcugag

SEQ ID NO: 349358 - RNA, 32 nt, Human
cacuguucucuagcgccaauauucccagguaa

SEQ ID NO: 349359 - RNA, 32 nt, Human
cacuguucucuugcaucucucuaacaacuggc

SEQ ID NO: 349360 - RNA, 32 nt, Human
cacuguucugggacuccaggucuugaggagag

SEQ ID NO: 349361 - RNA, 32 nt, Human
cacuguucuugcaccugcuccuagcccugaac

SEQ ID NO: 349362 - RNA, 32 nt, Human
cacuguugacuccuggcuuaaagggaucuccc

SEQ ID NO: 349363 - RNA, 32 nt, Human
cacuguugauggacauuuggguuguuuccagu

SEQ ID NO: 349364 - RNA, 32 nt, Human
cacuguugcccaggcuggacugcaguggcgug

SEQ ID NO: 349365 - RNA, 32 nt, Human
cacuguugcccaggcuggagagcaguggcgcg

SEQ ID NO: 349366 - RNA, 32 nt, Human
cacuguugcccaggcuggagugcagugacgcg

SEQ ID NO: 349367 - RNA, 32 nt, Human
cacuguugcccaggcuggagugcaguggcgug

SEQ ID NO: 349368 - RNA, 32 nt, Human
cacuguugcccaggcuggagugcaguggugca

SEQ ID NO: 349369 - RNA, 32 nt, Human
cacuguugcccaggcuggagugcauugaugug

SEQ ID NO: 349370 - RNA, 32 nt, Human
cacuguugcccaggcuggcgugcaguggugcg

SEQ ID NO: 349371 - RNA, 32 nt, Human
cacuguugcugaucagauuucccacuggucug

SEQ ID NO: 349372 - RNA, 32 nt, Human
cacuguugcuuugguagagaugagaggccgca

SEQ ID NO: 349373 - RNA, 32 nt, Human
cacuguuggagcugcugucuuuccaaggccuu

SEQ ID NO: 349374 - RNA, 32 nt, Human
cacuguuguccacugcccuguguggccuucug

SEQ ID NO: 349375 - RNA, 32 nt, Human
cacuguuuacacccugacugugcuuaaaaaca

SEQ ID NO: 349376 - RNA, 32 nt, Human
cacuguuuauguugcugccuccucucucaaaa

SEQ ID NO: 349377 - RNA, 32 nt, Human
cacuguuucguagacugagaacauggagggac

SEQ ID NO: 349378 - RNA, 32 nt, Human
cacuguuucugucugguuuuaaaacaaauuac

SEQ ID NO: 349379 - RNA, 32 nt, Human
cacuguuucuuuucccuucaguuccucuccug

SEQ ID NO: 349380 - RNA, 32 nt, Human
cacuguuugcccaggggaugacugcaggaggc

SEQ ID NO: 349381 - RNA, 32 nt, Human
cacuguuugccuggauauccccagcagaggcu

SEQ ID NO: 349382 - RNA, 32 nt, Human
cacuguuuucaucacaacuuguuuucccagca

SEQ ID NO: 349383 - RNA, 32 nt, Human
cacuguuuucaucuccuuuuccaucuuagucu

SEQ ID NO: 349384 - RNA, 32 nt, Human
cacuguuuucccucuguaguuucucaagugaa

SEQ ID NO: 349385 - RNA, 32 nt, Human
cacuguuuuccugcauuccuggcgcgggacuc

SEQ ID NO: 349386 - RNA, 32 nt, Human
cacuguuuucucacuuucaucccauaucuccg

SEQ ID NO: 349387 - RNA, 32 nt, Human
cacuguuuuggaaaucuuggccagucugagug

SEQ ID NO: 349388 - RNA, 32 nt, Human
cacuuaaaagaaaacaaagccccaugggcugc

SEQ ID NO: 349389 - RNA, 21 nt, Human
cacuuaaaccagggcaggaag

SEQ ID NO: 349390 - RNA, 32 nt, Human
cacuuaaaguaguuuuguguggcaucacagug

SEQ ID NO: 349391 - RNA, 32 nt, Human
cacuuaaaugauguaauauuccaggaugcugc

SEQ ID NO: 349392 - RNA, 32 nt, Human
cacuuaaccuccugccaccacugccaggcuug

SEQ ID NO: 349393 - RNA, 32 nt, Human
cacuuaagcccucgugcacacacacaaauuau

SEQ ID NO: 349394 - RNA, 32 nt, Human
cacuuaagcuacuugcagucacgucacaccuu

SEQ ID NO: 349395 - RNA, 32 nt, Human
cacuuaaggcuguugugaucugugacauaugg

SEQ ID NO: 349396 - RNA, 32 nt, Human
cacuuaagguugggugcugcuaauucuuugca

SEQ ID NO: 349397 - RNA, 32 nt, Human
cacuuaaguaacaaaguaaucacuuugucuau

SEQ ID NO: 349398 - RNA, 32 nt, Human
cacuuaauugcuuuccugccuccuugaaagaa

SEQ ID NO: 349399 - RNA, 32 nt, Human
cacuuacagcagaaacgcagccagcuuuucug

SEQ ID NO: 349400 - RNA, 32 nt, Human
cacuuacagcucuggccacaacagggcauuuu

SEQ ID NO: 349401 - RNA, 32 nt, Human
cacuuacaggguuucagcacagcuggugugug

SEQ ID NO: 349402 - RNA, 32 nt, Human
cacuuacaucauuugguacacagggucaaaua

SEQ ID NO: 349403 - RNA, 20 nt, Human
cacuuaccaaggacaggaag

SEQ ID NO: 349404 - RNA, 32 nt, Human
cacuuaccacagugccuggcggaccgcaugcc

SEQ ID NO: 349405 - RNA, 32 nt, Human
cacuuaccaccagguggguguuuaggacaggg

SEQ ID NO: 349406 - RNA, 21 nt, Human
cacuuacccaccagcugcacg

SEQ ID NO: 349407 - RNA, 32 nt, Human
cacuuacccuccacuuccuccuccuguuuggc

SEQ ID NO: 349408 - RNA, 23 nt, Human
cacuuaccuuccaacuuccuggc

SEQ ID NO: 349409 - RNA, 32 nt, Human
cacuuacgacgucucccaggcuugccuccccg

SEQ ID NO: 349410 - RNA, 32 nt, Human
cacuuacuagauuauacuaaugagcuaauggg

SEQ ID NO: 349411 - RNA, 32 nt, Human
cacuuacucaaggaggugggggcagggaggau

SEQ ID NO: 349412 - RNA, 32 nt, Human
cacuuacugagagccagauaccugccaggcac

SEQ ID NO: 349413 - RNA, 32 nt, Human
cacuuacugaguacagaugaaggaaaguggua

SEQ ID NO: 349414 - RNA, 32 nt, Human
cacuuacugccugggccccugcccagcagccu

SEQ ID NO: 349415 - RNA, 21 nt, Human
cacuuacuguccugugaagua

SEQ ID NO: 349416 - RNA, 18 nt, Human
cacuuagaugagaaagua

SEQ ID NO: 349417 - RNA, 18 nt, Human
cacuuagauugucaagug

SEQ ID NO: 349418 - RNA, 32 nt, Human
cacuuagcagaggcucagguucuugccuuggg

SEQ ID NO: 349419 - RNA, 32 nt, Human
cacuuagcaguuuggcaaagauaaaaaucugg

SEQ ID NO: 349420 - RNA, 32 nt, Human
cacuuagccacuucuccccacccuccagaagg

SEQ ID NO: 349421 - RNA, 32 nt, Human
cacuuaggaagaccgaggugggcagaucacuu

SEQ ID NO: 349422 - RNA, 20 nt, Human
cacuuaggaagacgaaagua

SEQ ID NO: 349423 - RNA, 30 nt, Human
cacuuaggaagccacgugccaauaccuggc

SEQ ID NO: 349424 - RNA, 23 nt, Human
cacuuaggauaaacagugaagua

SEQ ID NO: 349425 - RNA, 20 nt, Human
cacuuaggcagugcgaagug

SEQ ID NO: 349426 - RNA, 32 nt, Human
cacuuagggaggccaaggcgggcagaucaccu

SEQ ID NO: 349427 - RNA, 32 nt, Human
cacuuagggaggccgaggcgggcggaucaccu

SEQ ID NO: 349428 - RNA, 32 nt, Human
cacuuagggaggcugagccagguggagccacu

SEQ ID NO: 349429 - RNA, 32 nt, Human
cacuuagggaggcugaggugggcagaucaccu

SEQ ID NO: 349430 - RNA, 32 nt, Human
cacuuagggaggucaacguaggaggaucacuu

SEQ ID NO: 349431 - RNA, 32 nt, Human
cacuuagggcugggaacccgaaccuggugacu

SEQ ID NO: 349432 - RNA, 32 nt, Human
cacuuaggggcagcauguuaguuuugggaggc

SEQ ID NO: 349433 - RNA, 32 nt, Human
cacuuaguguguuccuucaggcuagugagguu

SEQ ID NO: 349434 - RNA, 22 nt, Human
cacuuauaaaggggacagggag

SEQ ID NO: 349435 - RNA, 32 nt, Human
cacuuauaaaucagugagauucucccaauuag

SEQ ID NO: 349436 - RNA, 32 nt, Human
cacuuauacuucugauugauuccuuuguguag

SEQ ID NO: 349437 - RNA, 32 nt, Human
cacuuauccuccuuccuggcgggggugggccg

SEQ ID NO: 349438 - RNA, 32 nt, Human
cacuuaugaucuggauuuauaaacauuacuug

SEQ ID NO: 349439 - RNA, 32 nt, Human
cacuuaugcagaaccaugaguggccagagagg

SEQ ID NO: 349440 - RNA, 32 nt, Human
cacuuauguggaaucugcucccaugacccaag

SEQ ID NO: 349441 - RNA, 32 nt, Human
cacuuauguguauggguccauauguacgugug

SEQ ID NO: 349442 - RNA, 32 nt, Human
cacuuauuacuuugccacguacugaugggcca

SEQ ID NO: 349443 - RNA, 32 nt, Human
cacuuauuauccagcggggaacagugguuacc

SEQ ID NO: 349444 - RNA, 32 nt, Human
cacuuauuaugcaccaccucccuucagucacc

SEQ ID NO: 349445 - RNA, 32 nt, Human
cacuuauuccuccuccccucuucccgguggca

SEQ ID NO: 349446 - RNA, 32 nt, Human
cacuuauugcacuccagcccgggcgacagagc

SEQ ID NO: 349447 - RNA, 32 nt, Human
cacuucaaccuggucaacagagcgagacuccg

SEQ ID NO: 349448 - RNA, 22 nt, Human
cacuucaagacagggcaggaag

SEQ ID NO: 349449 - RNA, 32 nt, Human
cacuucaagagaagagaaaaaugaaguuuauu

SEQ ID NO: 349450 - RNA, 32 nt, Human
cacuucaaucacaaaaugaaacagugagaaag

SEQ ID NO: 349451 - RNA, 32 nt, Human
cacuucacacacaggcaacugaggcagacagc

SEQ ID NO: 349452 - RNA, 32 nt, Human
cacuucaccuccauccucugucucuggggcuc

SEQ ID NO: 349453 - RNA, 32 nt, Human
cacuucacuaaccaaauuccuacuuuccagug

SEQ ID NO: 349454 - RNA, 21 nt, Human
cacuucacuccagccugggca

SEQ ID NO: 349455 - RNA, 32 nt, Human
cacuucacuccggcaggcagaccugcuggagc

SEQ ID NO: 349456 - RNA, 32 nt, Human
cacuucacugcacuccagucugggugacagag

SEQ ID NO: 349457 - RNA, 32 nt, Human
cacuucagaaaccucagacccuuguagguaga

SEQ ID NO: 349458 - RNA, 32 nt, Human
cacuucagacacauacaucacuuucacaccac

SEQ ID NO: 349459 - RNA, 21 nt, Human
cacuucagaccaucuuccaca

SEQ ID NO: 349460 - RNA, 29 nt, Human
cacuucagagccucugaggggccaccacu

SEQ ID NO: 349461 - RNA, 32 nt, Human
cacuucagagccucugaggggccaccacuucu

SEQ ID NO: 349462 - RNA, 32 nt, Human
cacuucagauccugucugucagucucuguuag

SEQ ID NO: 349463 - RNA, 32 nt, Human
cacuucagccuaggugacagagugagaccucg

SEQ ID NO: 349464 - RNA, 32 nt, Human
cacuucagccuccagagccuguccucacagug

SEQ ID NO: 349465 - RNA, 32 nt, Human
cacuucagccucccauugaucgcuuucugcaa

SEQ ID NO: 349466 - RNA, 32 nt, Human
cacuucagccucccgaguagcuggaaccacag

SEQ ID NO: 349467 - RNA, 32 nt, Human
cacuucagccucccgaguaucugggauuauaa

SEQ ID NO: 349468 - RNA, 32 nt, Human
cacuucagccuccugaguagcugggauuacag

SEQ ID NO: 349469 - RNA, 32 nt, Human
cacuucagccuggacaacagagugagacccug

SEQ ID NO: 349470 - RNA, 32 nt, Human
cacuucagccuggacaacagagugagacucca

SEQ ID NO: 349471 - RNA, 32 nt, Human
cacuucagccuggaugacagagcgagguccug

SEQ ID NO: 349472 - RNA, 32 nt, Human
cacuucagccuggaugacagagugagacccug

SEQ ID NO: 349473 - RNA, 32 nt, Human
cacuucagccuggcugacagagcaagacucag

SEQ ID NO: 349474 - RNA, 32 nt, Human
cacuucagccugggcaacagagcgagacucca

SEQ ID NO: 349475 - RNA, 32 nt, Human
cacuucagccugggcaacagagugagacucca

SEQ ID NO: 349476 - RNA, 32 nt, Human
cacuucagccugggcaacagagugagacuggg

SEQ ID NO: 349477 - RNA, 32 nt, Human
cacuucagccugggcaacauagcaagauuuug

SEQ ID NO: 349478 - RNA, 32 nt, Human
cacuucagccugggcgacacagcgagacccug

SEQ ID NO: 349479 - RNA, 32 nt, Human
cacuucagccugggcgacagagcgagacugcu

SEQ ID NO: 349480 - RNA, 32 nt, Human
cacuucagccugggcgacagagugacucuguc

SEQ ID NO: 349481 - RNA, 32 nt, Human
cacuucagccugggcgaccgagacuccgucuc

SEQ ID NO: 349482 - RNA, 32 nt, Human
cacuucagccugggcgauagagcaagacucug

SEQ ID NO: 349483 - RNA, 32 nt, Human
cacuucagccugggugacagaaagagaccuuc

SEQ ID NO: 349484 - RNA, 32 nt, Human
cacuucagccugggugacagaaugagacucug

SEQ ID NO: 349485 - RNA, 32 nt, Human
cacuucagccugggugacagagaaggacuccg

SEQ ID NO: 349486 - RNA, 32 nt, Human
cacuucagccugggugacagagcaagacucuu

SEQ ID NO: 349487 - RNA, 32 nt, Human
cacuucagccugggugacagagcuagacucca

SEQ ID NO: 349488 - RNA, 32 nt, Human
cacuucagccugggugacagagggagacucug

SEQ ID NO: 349489 - RNA, 32 nt, Human
cacuucagccugggugacagagugagacaguc

SEQ ID NO: 349490 - RNA, 32 nt, Human
cacuucagccugggugacagagugagacccuu

SEQ ID NO: 349491 - RNA, 32 nt, Human
cacuucagccugggugacagagugagacucca

SEQ ID NO: 349492 - RNA, 32 nt, Human
cacuucagccugggugacagagugagacucug

SEQ ID NO: 349493 - RNA, 32 nt, Human
cacuucagccuggugacagagcgagacucguc

SEQ ID NO: 349494 - RNA, 32 nt, Human
cacuucagcgaccugcaaauucuacacauuag

SEQ ID NO: 349495 - RNA, 32 nt, Human
cacuucagcucccuucccugccuggaccauuc

SEQ ID NO: 349496 - RNA, 32 nt, Human
cacuucagcuccucaaguagaugggacuacag

SEQ ID NO: 349497 - RNA, 32 nt, Human
cacuucagcugguccacuaguuuugacacagg

SEQ ID NO: 349498 - RNA, 32 nt, Human
cacuucagcuugggcgacagagcgaaacccug

SEQ ID NO: 349499 - RNA, 32 nt, Human
cacuucagcuugggugacagagccagaccuua

SEQ ID NO: 349500 - RNA, 32 nt, Human
cacuucaggaggccaaggugggaagaucauuu

SEQ ID NO: 349501 - RNA, 32 nt, Human
cacuucagggcaccugagccacccucagcagg

SEQ ID NO: 349502 - RNA, 32 nt, Human
cacuucaguccaucugcccuccagaggagggg

SEQ ID NO: 349503 - RNA, 32 nt, Human
cacuucauauucccugaacuuuucuggauguu

SEQ ID NO: 349504 - RNA, 32 nt, Human
cacuucaucacaccccugcccugggccggcag

SEQ ID NO: 349505 - RNA, 32 nt, Human
cacuucauccuaggcaacagagcgagacucug

SEQ ID NO: 349506 - RNA, 32 nt, Human
cacuucauccuccucaguuucucuccaggcca

SEQ ID NO: 349507 - RNA, 32 nt, Human
cacuucauccuuuguaccuggagaccugguua

SEQ ID NO: 349508 - RNA, 32 nt, Human
cacuucauuacccaggcuggagugcaaggcac

SEQ ID NO: 349509 - RNA, 32 nt, Human
cacuucauugacuacaaccacagacuuucccu

SEQ ID NO: 349510 - RNA, 32 nt, Human
cacuucauuuuuccuuuguccuuucucucuaa

SEQ ID NO: 349511 - RNA, 32 nt, Human
cacuuccaagggaguggcuuuucuugaaaauu

SEQ ID NO: 349512 - RNA, 32 nt, Human
cacuuccaaguggccagugauuuguuaaaaua

SEQ ID NO: 349513 - RNA, 32 nt, Human
cacuuccacaguuuggacaaggagcuucaaaa

SEQ ID NO: 349514 - RNA, 32 nt, Human
cacuuccaccucuucucucaguuuuggacaag

SEQ ID NO: 349515 - RNA, 32 nt, Human
cacuuccagcacaagcugcagccugcauccca

SEQ ID NO: 349516 - RNA, 32 nt, Human
cacuuccagcacagcugugcucuguguccugc

SEQ ID NO: 349517 - RNA, 32 nt, Human
cacuuccaggcccgagcuucucagccugccgu

SEQ ID NO: 349518 - RNA, 32 nt, Human
cacuuccagugcgccccacugucaugcccggc

SEQ ID NO: 349519 - RNA, 32 nt, Human
cacuuccagugggaagagaaggcccggaggua

SEQ ID NO: 349520 - RNA, 32 nt, Human
cacuuccauuugucugacauggagauugaggg

SEQ ID NO: 349521 - RNA, 32 nt, Human
cacuucccagaaauugaacacauugcuucaac

SEQ ID NO: 349522 - RNA, 32 nt, Human
cacuucccagccacagggugacccuggcacug

SEQ ID NO: 349523 - RNA, 32 nt, Human
cacuucccagcgauuccagccugggcuccgca

SEQ ID NO: 349524 - RNA, 32 nt, Human
cacuucccaggggacacagcugugccuggggu

SEQ ID NO: 349525 - RNA, 18 nt, Human
cacuucccagucuguugg

SEQ ID NO: 349526 - RNA, 32 nt, Human
cacuucccauuuccucugcccuuuuccaccuc

SEQ ID NO: 349527 - RNA, 32 nt, Human
cacuuccccuaccagguggaagagucugacuc

SEQ ID NO: 349528 - RNA, 32 nt, Human
cacuuccccuccucccccuuccccuggucccc

SEQ ID NO: 349529 - RNA, 32 nt, Human
cacuucccggcucccuucgccuccaggaugcg

SEQ ID NO: 349530 - RNA, 32 nt, Human
cacuucccuagccucagaugggugaguaaaca

SEQ ID NO: 349531 - RNA, 32 nt, Human
cacuucccugcaacccauccaccccugguuuc

SEQ ID NO: 349532 - RNA, 32 nt, Human
cacuucccugcucccgcccgaggacuccugcg

SEQ ID NO: 349533 - RNA, 32 nt, Human
cacuucccugcucccugcuuggggacccggca

SEQ ID NO: 349534 - RNA, 23 nt, Human
cacuucccuguccccacagggag

SEQ ID NO: 349535 - RNA, 32 nt, Human
cacuuccggacacacaugcacacacaggugca

SEQ ID NO: 349536 - RNA, 32 nt, Human
cacuuccguggacugaaggaaccguaggagcc

SEQ ID NO: 349537 - RNA, 32 nt, Human
cacuuccuacuucccacucccaacuccugaaa

SEQ ID NO: 349538 - RNA, 19 nt, Human
cacuuccucaucuaggaag

SEQ ID NO: 349539 - RNA, 32 nt, Human
cacuuccucauuucuggggaaggaaaggagac

SEQ ID NO: 349540 - RNA, 32 nt, Human
cacuuccuccaggaagucuuuccugauauauc

SEQ ID NO: 349541 - RNA, 31 nt, Human
cacuuccuccucucugugugccucagucucc

SEQ ID NO: 349542 - RNA, 32 nt, Human
cacuuccucgucuccuccuccuucccacaggc

SEQ ID NO: 349543 - RNA, 18 nt, Human
cacuuccucuccaggagg

SEQ ID NO: 349544 - RNA, 32 nt, Human
cacuuccucugccugccccuccuccuccuucc

SEQ ID NO: 349545 - RNA, 32 nt, Human
cacuuccucuuccauaccccuuccucgaggcc

SEQ ID NO: 349546 - RNA, 23 nt, Human
cacuuccucuugcccuccuggcu

SEQ ID NO: 349547 - RNA, 32 nt, Human
cacuuccugcuuaguugagauaguugaaucua

SEQ ID NO: 349548 - RNA, 20 nt, Human
cacuuccugguugcaagagg

SEQ ID NO: 349549 - RNA, 22 nt, Human
cacuuccugugaaagcaggaag

SEQ ID NO: 349550 - RNA, 22 nt, Human
cacuuccuguucccaccacugg

SEQ ID NO: 349551 - RNA, 20 nt, Human
cacuuccuuaacaaaggaag

SEQ ID NO: 349552 - RNA, 18 nt, Human
cacuuccuucagaaggaa

SEQ ID NO: 349553 - RNA, 32 nt, Human
cacuuccuucaucggccaccuuccucagcaag

SEQ ID NO: 349554 - RNA, 20 nt, Human
cacuuccuucguggaggaag

SEQ ID NO: 349555 - RNA, 31 nt, Human
cacuuccuugcuggguggccugugaucauua

SEQ ID NO: 349556 - RNA, 32 nt, Human
cacuuccuugcuucuccucccccaggaccaag

SEQ ID NO: 349557 - RNA, 32 nt, Human
cacuuccuuggaacuccugccuccacagcccc

SEQ ID NO: 349558 - RNA, 32 nt, Human
cacuuccuuggaggaggagagggauuacuccu

SEQ ID NO: 349559 - RNA, 17 nt, Human
cacuuccuuuaaggaag

SEQ ID NO: 349560 - RNA, 19 nt, Human
cacuuccuuuaggacugaa

SEQ ID NO: 349561 - RNA, 21 nt, Human
cacuuccuuucaaacaggaag

SEQ ID NO: 349562 - RNA, 23 nt, Human
cacuuccuuuccugagcaggagg

SEQ ID NO: 349563 - RNA, 32 nt, Human
cacuuccuuugagaccugcacucucaugcuug

SEQ ID NO: 349564 - RNA, 32 nt, Human
cacuuccuuugcccaagggggaagggaggaca

SEQ ID NO: 349565 - RNA, 32 nt, Human
cacuuccuuuguccuagagacauuuauucauu

SEQ ID NO: 349566 - RNA, 32 nt, Human
cacuuccuuuguucuuuuccugccacagaguc

SEQ ID NO: 349567 - RNA, 32 nt, Human
cacuuccuuuguucuuuuccugccacaggguc

SEQ ID NO: 349568 - RNA, 18 nt, Human
cacuuccuuuuacaggaa

SEQ ID NO: 349569 - RNA, 20 nt, Human
cacuuccuuuucuguaggaa

SEQ ID NO: 349570 - RNA, 21 nt, Human
cacuuccuuuucuguuaggaa

SEQ ID NO: 349571 - RNA, 32 nt, Human
cacuucgaggaggaggaggaggccggggugga

SEQ ID NO: 349572 - RNA, 32 nt, Human
cacuucgauuuucagaauuccuccugggaaug

SEQ ID NO: 349573 - RNA, 32 nt, Human
cacuucgccuuacaggucuccauuuuguggua

SEQ ID NO: 349574 - RNA, 32 nt, Human
cacuucgggaagcugaggcgggcggaucacaa

SEQ ID NO: 349575 - RNA, 32 nt, Human
cacuucgggaggccaaggugagaggauaacuu

SEQ ID NO: 349576 - RNA, 32 nt, Human
cacuucgggaggccaaggugggcaguucgcuu

SEQ ID NO: 349577 - RNA, 32 nt, Human
cacuucgggaggccgaggcagguggaacacuu

SEQ ID NO: 349578 - RNA, 32 nt, Human
cacuucgggaggccgaggcggguggaucacga

SEQ ID NO: 349579 - RNA, 32 nt, Human
cacuucgggaggcugaggcagguggaucacuu

SEQ ID NO: 349580 - RNA, 32 nt, Human
cacuucgggaggucaagguagguggaucaccu

SEQ ID NO: 349581 - RNA, 32 nt, Human
cacuucgggaggucgaggcaggaggaucacuu

SEQ ID NO: 349582 - RNA, 32 nt, Human
cacuucgucuucauggauucccagcccagcug

SEQ ID NO: 349583 - RNA, 32 nt, Human
cacuucuaaagugccuacagagacuuguaaau

SEQ ID NO: 349584 - RNA, 18 nt, Human
cacuucuaagacaggaag

SEQ ID NO: 349585 - RNA, 23 nt, Human
cacuucuacaaaucagcaagaua

SEQ ID NO: 349586 - RNA, 32 nt, Human
cacuucuacaguuuagaaaguaucuggacuca

SEQ ID NO: 349587 - RNA, 31 nt, Human
cacuucuagagagaagaaaaaggcuggguuu

SEQ ID NO: 349588 - RNA, 32 nt, Human
cacuucuagagcagggaggcuuggggagggga

SEQ ID NO: 349589 - RNA, 32 nt, Human
cacuucuagguuugggguuucucaguucccuc

SEQ ID NO: 349590 - RNA, 32 nt, Human
cacuucuauuaacugcuucucuucuauuccaa

SEQ ID NO: 349591 - RNA, 31 nt, Human
cacuucucaauaaaugugagauccuguugag

SEQ ID NO: 349592 - RNA, 32 nt, Human
cacuucucaccgcgcccuccagcuucacccgu

SEQ ID NO: 349593 - RNA, 32 nt, Human
cacuucucauuuucuuugcugacuuaccuuuu

SEQ ID NO: 349594 - RNA, 32 nt, Human
cacuucuccacugucggagcacguuccgaaaa

SEQ ID NO: 349595 - RNA, 32 nt, Human
cacuucuccagccucucagcccugugcuccug

SEQ ID NO: 349596 - RNA, 32 nt, Human
cacuucuccaggccucucuccccgaccaugag

SEQ ID NO: 349597 - RNA, 32 nt, Human
cacuucucgggaauuugaggccagccugagga

SEQ ID NO: 349598 - RNA, 32 nt, Human
cacuucucuccucuuccuccugccccugguuc

SEQ ID NO: 349599 - RNA, 32 nt, Human
cacuucucugaaggagggcuggguucugggcc

SEQ ID NO: 349600 - RNA, 32 nt, Human
cacuucucugauccucuggccaacacacaucu

SEQ ID NO: 349601 - RNA, 32 nt, Human
cacuucucuggccucugguuucucucugcugu

SEQ ID NO: 349602 - RNA, 18 nt, Human
cacuucucugugaaacac

SEQ ID NO: 349603 - RNA, 32 nt, Human
cacuucucuguucugaacagcucuuccugccc

SEQ ID NO: 349604 - RNA, 18 nt, Human
cacuucugaugcaugaaa

SEQ ID NO: 349605 - RNA, 32 nt, Human
cacuucugauuuagugaaaccaauuguaauaa

SEQ ID NO: 349606 - RNA, 32 nt, Human
cacuucugcauuuaaggaggucugggagaagg

SEQ ID NO: 349607 - RNA, 32 nt, Human
cacuucugccaagaacacagaacuacuuuggc

SEQ ID NO: 349608 - RNA, 32 nt, Human
cacuucugcccaggcagcagggugggugggua

SEQ ID NO: 349609 - RNA, 25 nt, Human
cacuucugcucccggccgcccggca

SEQ ID NO: 349610 - RNA, 32 nt, Human
cacuucugcucuccucuaccagaaucacucag

SEQ ID NO: 349611 - RNA, 32 nt, Human
cacuucugcuuaccccuccauucacagccucc

SEQ ID NO: 349612 - RNA, 32 nt, Human
cacuucugcuucuguguuuccaaacagcauug

SEQ ID NO: 349613 - RNA, 32 nt, Human
cacuucugggagacagagcuacagcugggaca

SEQ ID NO: 349614 - RNA, 32 nt, Human
cacuucuggggaaggaaaacaggcuccuggcc

SEQ ID NO: 349615 - RNA, 32 nt, Human
cacuucuggucucugucccucugccuccccgg

SEQ ID NO: 349616 - RNA, 32 nt, Human
cacuucugucgaggagcuucggggcucagaga

SEQ ID NO: 349617 - RNA, 32 nt, Human
cacuucuguggacaccccaaauaggaagaagg

SEQ ID NO: 349618 - RNA, 32 nt, Human
cacuucuguguguauguacauauucaaacaca

SEQ ID NO: 349619 - RNA, 32 nt, Human
cacuucuuaccuccucaccuaccucuccaguc

SEQ ID NO: 349620 - RNA, 32 nt, Human
cacuucuuauccacccuucccucuaccucacc

SEQ ID NO: 349621 - RNA, 32 nt, Human
cacuucuucagcuugggcaagugugugccugu

SEQ ID NO: 349622 - RNA, 32 nt, Human
cagagcuacagccagggauagagcagaugagc

SEQ ID NO: 349623 - RNA, 32 nt, Human
cagagcuacuucacuccucacuugggcaaaug

SEQ ID NO: 349624 - RNA, 32 nt, Human
cagagcuagccaccacccacacugcaagucug

SEQ ID NO: 349625 - RNA, 32 nt, Human
cagagcuagcccggaaggaggagcaagagcca

SEQ ID NO: 349626 - RNA, 21 nt, Human
cagagcuagccggacguccuc

SEQ ID NO: 349627 - RNA, 32 nt, Human
cagagcuagugucaacugugucuggguucagu

SEQ ID NO: 349628 - RNA, 32 nt, Human
cagagcucaagucugaacucuaccuccagaca

SEQ ID NO: 349629 - RNA, 16 nt, Human
cagagcucacacaggu

SEQ ID NO: 349630 - RNA, 32 nt, Human
cagagcucacugagccuccaccuggggucucu

SEQ ID NO: 349631 - RNA, 32 nt, Human
cagagcucacugcagcuucaaucuccuggcuc

SEQ ID NO: 349632 - RNA, 32 nt, Human
cagagcucagagagacagcaagucaggagaug

SEQ ID NO: 349633 - RNA, 32 nt, Human
cagagcucagaggucacacuguaucaaagauc

SEQ ID NO: 349634 - RNA, 21 nt, Human
cagagcucaugguuuauggug

SEQ ID NO: 349635 - RNA, 32 nt, Human
cagagcuccaaguaaccaaauucccccaaaga

SEQ ID NO: 349636 - RNA, 32 nt, Human
cagagcuccaggccucccuuccagucagaaca

SEQ ID NO: 349637 - RNA, 32 nt, Human
cagagcuccccacucccugauugucaagaccu

SEQ ID NO: 349638 - RNA, 32 nt, Human
cagagcucgagaccagccuggccaacauggug

SEQ ID NO: 349639 - RNA, 32 nt, Human
cagagcucgcugagacagagacugagaacgcc

SEQ ID NO: 349640 - RNA, 16 nt, Human
cagagcucuaagauga

SEQ ID NO: 349641 - RNA, 32 nt, Human
cagagcucucugagggugauggggcugagcag

SEQ ID NO: 349642 - RNA, 24 nt, Human
cagagcucugcacaaacacugcca

SEQ ID NO: 349643 - RNA, 32 nt, Human
cagagcucuggcucugaacacagacagccuug

SEQ ID NO: 349644 - RNA, 32 nt, Human
cagagcucuggguggaagagggaagagauccu

SEQ ID NO: 349645 - RNA, 32 nt, Human
cagagcucuucagaaaccaggcugcuuucagg

SEQ ID NO: 349646 - RNA, 21 nt, Human
cagagcugaaagcugguggca

SEQ ID NO: 349647 - RNA, 23 nt, Human
cagagcugaagcaggcccugggg

SEQ ID NO: 349648 - RNA, 32 nt, Human
cagagcugaaggagugaagagcccuuggccau

SEQ ID NO: 349649 - RNA, 32 nt, Human
cagagcugaagggguugggagaugucucccaa

SEQ ID NO: 349650 - RNA, 32 nt, Human
cagagcugaaguuaacaaaugcaccugguucu

SEQ ID NO: 349651 - RNA, 32 nt, Human
cagagcugacgucugggugacagugaaacggg

SEQ ID NO: 349652 - RNA, 22 nt, Human
cagagcugaggggccccuggga

SEQ ID NO: 349653 - RNA, 32 nt, Human
cagagcugagggugggcaggugcagcugggac

SEQ ID NO: 349654 - RNA, 32 nt, Human
cagagcugaucuccuccaccuuucuccaauga

SEQ ID NO: 349655 - RNA, 32 nt, Human
cagagcugaugcaggccaugcuggaaguaucu

SEQ ID NO: 349656 - RNA, 32 nt, Human
cagagcugcagcuacacagcugcccaguguca

SEQ ID NO: 349657 - RNA, 32 nt, Human
cagagcugcaucucucugggucucuggguaac

SEQ ID NO: 349658 - RNA, 18 nt, Human
cagagcugccauaaugaa

SEQ ID NO: 349659 - RNA, 32 nt, Human
cagagcugccggcugaaaauuacccaaccaag

SEQ ID NO: 349660 - RNA, 32 nt, Human
cagagcugcuacugcugugauggccgggagga

SEQ ID NO: 349661 - RNA, 32 nt, Human
cagagcugcuccacaggcaccaugaggaucau

SEQ ID NO: 349662 - RNA, 32 nt, Human
cagagcugcuuucgggcgcagcuccugcugca

SEQ ID NO: 349663 - RNA, 32 nt, Human
cagagcuggaagcagacaguaaggggaagagc

SEQ ID NO: 349664 - RNA, 32 nt, Human
cagagcuggacaaccucugccucggcccucuc

SEQ ID NO: 349665 - RNA, 32 nt, Human
cagagcuggagccccugcugcccagcucagac

SEQ ID NO: 349666 - RNA, 32 nt, Human
cagagcuggaggaggaggagggcaaacccgag

SEQ ID NO: 349667 - RNA, 22 nt, Human
cagagcuggagguucuguccuc

SEQ ID NO: 349668 - RNA, 32 nt, Human
cagagcuggcagaggccucuggcuccaggaac

SEQ ID NO: 349669 - RNA, 22 nt, Human
cagagcuggcagggacccugcc

SEQ ID NO: 349670 - RNA, 23 nt, Human
cagagcuggccaggccacugggc

SEQ ID NO: 349671 - RNA, 32 nt, Human
cagagcuggcuaccagcagucuugcccuuuac

SEQ ID NO: 349672 - RNA, 29 nt, Human
cagagcuggcugcugugcccacccucagg

SEQ ID NO: 349673 - RNA, 32 nt, Human
cagagcugggacuccagcucauggcccuagca

SEQ ID NO: 349674 - RNA, 26 nt, Human
cagagcugggaggcauggcccugggg

SEQ ID NO: 349675 - RNA, 32 nt, Human
cagagcugggaggccaaggguucacugggcuu

SEQ ID NO: 349676 - RNA, 32 nt, Human
cagagcugggcuuuuauuuaauuuuucuuaaa

SEQ ID NO: 349677 - RNA, 23 nt, Human
cagagcuggggaagaaaggagga

SEQ ID NO: 349678 - RNA, 18 nt, Human
cagagcugggggagggau

SEQ ID NO: 349679 - RNA, 21 nt, Human
cagagcugggggcagccgggg

SEQ ID NO: 349680 - RNA, 20 nt, Human
cagagcugggggcccugugg

SEQ ID NO: 349681 - RNA, 18 nt, Human
cagagcuggggguccugg

SEQ ID NO: 349682 - RNA, 32 nt, Human
cagagcugggguugaagcuggagcagcagcaa

SEQ ID NO: 349683 - RNA, 32 nt, Human
cagagcugggucccccugcuccuccucgaccc

SEQ ID NO: 349684 - RNA, 32 nt, Human
cagagcugggucucacucuguugcccaggcug

SEQ ID NO: 349685 - RNA, 32 nt, Human
cagagcugggugggcugagaccagcaucccag

SEQ ID NO: 349686 - RNA, 32 nt, Human
cagagcuggucuccucccagcagacggagcca

SEQ ID NO: 349687 - RNA, 32 nt, Human
cagagcuggucugccauggacauccugguccc

SEQ ID NO: 349688 - RNA, 17 nt, Human
cagagcugguggggcgc

SEQ ID NO: 349689 - RNA, 22 nt, Human
cagagcugguuccucccuggga

SEQ ID NO: 349690 - RNA, 32 nt, Human
cagagcuguauaccugggacaggccagggagc

SEQ ID NO: 349691 - RNA, 32 nt, Human
cagagcuguccaggauugcaguggauaggaau

SEQ ID NO: 349692 - RNA, 32 nt, Human
cagagcuuacaaggagcugcaaggguuugccg

SEQ ID NO: 349693 - RNA, 32 nt, Human
cagagcuuaccucauugccuguccccaucuca

SEQ ID NO: 349694 - RNA, 32 nt, Human
cagagcuuccauccaguucagaaacaaagcaa

SEQ ID NO: 349695 - RNA, 32 nt, Human
cagagcuucuccaagaaaaaucaagccuaaug

SEQ ID NO: 349696 - RNA, 22 nt, Human
cagagcuugcuguccccugaga

SEQ ID NO: 349697 - RNA, 32 nt, Human
cagagcuugguuugggagguugaagugcucug

SEQ ID NO: 349698 - RNA, 32 nt, Human
cagagcuuucccuugacuucugagucuagugu

SEQ ID NO: 349699 - RNA, 32 nt, Human
cagagcuuugggaagccgaggcagcaggaucc

SEQ ID NO: 349700 - RNA, 32 nt, Human
cagaggaaaaaugggagccaggaguaagacaa

SEQ ID NO: 349701 - RNA, 27 nt, Human
cagaggaaaagaagaggaggagaagga

SEQ ID NO: 349702 - RNA, 32 nt, Human
cagaggaaagaacauuuuaugaggcuuucucu

SEQ ID NO: 349703 - RNA, 32 nt, Human
cagaggaaagagugugggcuuuggagacagca

SEQ ID NO: 349704 - RNA, 32 nt, Human
cagaggaaagccaagcugcuucuguugugagc

SEQ ID NO: 349705 - RNA, 32 nt, Human
cagaggaaauaaaucacugaucgcuaccagga

SEQ ID NO: 349706 - RNA, 32 nt, Human
cagaggaaccaggagucuuggggucuucucug

SEQ ID NO: 349707 - RNA, 32 nt, Human
cagaggaacggugucagcauuuugaaaaugcu

SEQ ID NO: 349708 - RNA, 32 nt, Human
cagaggaacucagcccugauugcgcuccaggg

SEQ ID NO: 349709 - RNA, 32 nt, Human
cagaggaacucugggaaacccacuuuugugca

SEQ ID NO: 349710 - RNA, 32 nt, Human
cagaggaagaagcauacaagugggaaaaacug

SEQ ID NO: 349711 - RNA, 32 nt, Human
cagaggaagacucagaaucacaaaaaggaaaa

SEQ ID NO: 349712 - RNA, 32 nt, Human
cagaggaagaggaaagaaagaagaggagggaa

SEQ ID NO: 349713 - RNA, 23 nt, Human
cagaggaagaggaggaggcggcg

SEQ ID NO: 349714 - RNA, 23 nt, Human
cagaggaagaggcaggggcagca

SEQ ID NO: 349715 - RNA, 32 nt, Human
cagaggaagagggagcgggagcucugcgaggc

SEQ ID NO: 349716 - RNA, 32 nt, Human
cagaggaagaggggacguguguuugcagacug

SEQ ID NO: 349717 - RNA, 22 nt, Human
cagaggaagaugccugccggca

SEQ ID NO: 349718 - RNA, 20 nt, Human
cagaggaagcacgggcagca

SEQ ID NO: 349719 - RNA, 32 nt, Human
cagaggaagcgggagagcaguuuacgacagcg

SEQ ID NO: 349720 - RNA, 24 nt, Human
cagaggaaggccgggagaagggga

SEQ ID NO: 349721 - RNA, 32 nt, Human
cagaggaaggccuguccugcuggaacuggagc

SEQ ID NO: 349722 - RNA, 32 nt, Human
cagaggaagggcuggagaugaagguucucagc

SEQ ID NO: 349723 - RNA, 21 nt, Human
cagaggaagguaaagguggug

SEQ ID NO: 349724 - RNA, 22 nt, Human
cagaggaauggcagggauggca

SEQ ID NO: 349725 - RNA, 31 nt, Human
cagaggaauuguggcucuugccaaggucaca

SEQ ID NO: 349726 - RNA, 32 nt, Human
cagaggaauuugucuucucugccuucacucag

SEQ ID NO: 349727 - RNA, 21 nt, Human
cagaggacaaggaagagaagg

SEQ ID NO: 349728 - RNA, 32 nt, Human
cagaggacaaucugggaugcucaggggacaga

SEQ ID NO: 349729 - RNA, 32 nt, Human
cagaggacacaaauacguuguuccagagcuca

SEQ ID NO: 349730 - RNA, 32 nt, Human
cagaggacacagaaggacuuggcagcagggug

SEQ ID NO: 349731 - RNA, 30 nt, Human
cagaggacaggccacagguaacagucaaau

SEQ ID NO: 349732 - RNA, 32 nt, Human
cagaggaccaaccagucuucugaaggucaugc

SEQ ID NO: 349733 - RNA, 32 nt, Human
cagaggaccacccauccugcucagggagacag

SEQ ID NO: 349734 - RNA, 32 nt, Human
cagaggaccagcugggaggacugguugugcug

SEQ ID NO: 349735 - RNA, 32 nt, Human
cagaggaccugagacucacacucucugcagcc

SEQ ID NO: 349736 - RNA, 20 nt, Human
cagaggaccuggagaacagg

SEQ ID NO: 349737 - RNA, 22 nt, Human
cagaggaccugggugaggacua

SEQ ID NO: 349738 - RNA, 32 nt, Human
cagaggaccuugagaauggggaagagagcucu

SEQ ID NO: 349739 - RNA, 31 nt, Human
cagaggacgauucucccuguaaaaggaacua

SEQ ID NO: 349740 - RNA, 32 nt, Human
cagaggacggggaaagacaggaggugcagguu

SEQ ID NO: 349741 - RNA, 32 nt, Human
cagaggacucacucagcucuuugcuucaugcc

SEQ ID NO: 349742 - RNA, 32 nt, Human
cagaggacugaaaccuccacugcaggcugguu

SEQ ID NO: 349743 - RNA, 32 nt, Human
cagaggagaagcagcggcuggagcagcagcug

SEQ ID NO: 349744 - RNA, 20 nt, Human
cagaggagaagcugagcccu

SEQ ID NO: 349745 - RNA, 32 nt, Human
cagaggagaaggagggggaggagaagagagaa

SEQ ID NO: 349746 - RNA, 32 nt, Human
cagaggagaaggcaggcagggcccagugagag

SEQ ID NO: 349747 - RNA, 32 nt, Human
cagaggagaccacucugcuccuggggccagag

SEQ ID NO: 349748 - RNA, 32 nt, Human
cagaggagacccaggcagugucagcagugaag

SEQ ID NO: 349749 - RNA, 32 nt, Human
cagaggagaccggagggcagaaggcagagucc

SEQ ID NO: 349750 - RNA, 32 nt, Human
cagaggagacgcgggcacaggagagcgcagag

SEQ ID NO: 349751 - RNA, 32 nt, Human
cagaggagacucugcugcuugcucccagcccc

SEQ ID NO: 349752 - RNA, 32 nt, Human
cagaggagagauuuacuacaccugugcuguaa

SEQ ID NO: 349753 - RNA, 32 nt, Human
cagaggagagcaucgcaucucacguuuuuagg

SEQ ID NO: 349754 - RNA, 32 nt, Human
cagaggagagcugagccauggaaggaggugug

SEQ ID NO: 349755 - RNA, 32 nt, Human
cagaggagaggaacuccauuauccuuacagug

SEQ ID NO: 349756 - RNA, 32 nt, Human
cagaggagaugcuggcuaccagcuggggcgac

SEQ ID NO: 349757 - RNA, 32 nt, Human
cagaggagcaggugggaugggagcagccccug

SEQ ID NO: 349758 - RNA, 32 nt, Human
cagaggagccaagaagcugcugggaaucgaga

SEQ ID NO: 349759 - RNA, 32 nt, Human
cagaggagcccagugggcugcacgcuccccuc

SEQ ID NO: 349760 - RNA, 32 nt, Human
cagaggagccguccagccacaccagcuuuccu

SEQ ID NO: 349761 - RNA, 32 nt, Human
cagaggagcggcuauggcauugaggaggaugg

SEQ ID NO: 349762 - RNA, 32 nt, Human
cagaggagcuaaauaucuuguucaaggcuaua

SEQ ID NO: 349763 - RNA, 19 nt, Human
cagaggagcucuccagccc

SEQ ID NO: 349764 - RNA, 24 nt, Human
cagaggagcuguuguggggccagg

SEQ ID NO: 349765 - RNA, 21 nt, Human
cagaggaggaaagagcaggca

SEQ ID NO: 349766 - RNA, 32 nt, Human
cagaggaggaagacagcagccuggcagcagcc

SEQ ID NO: 349767 - RNA, 25 nt, Human
cagaggaggaagaggaagaggagga

SEQ ID NO: 349768 - RNA, 32 nt, Human
cagaggaggagaaaggccggagccagccgagc

SEQ ID NO: 349769 - RNA, 32 nt, Human
cagaggaggagaaggaagaguuaugggaagaa

SEQ ID NO: 349770 - RNA, 32 nt, Human
cagaggaggagaaugaagaaagauggagucaa

SEQ ID NO: 349771 - RNA, 32 nt, Human
cagaggaggagagagccuggcagcggaggagc

SEQ ID NO: 349772 - RNA, 32 nt, Human
cagaggaggagaggaggaaaggaugggggcug

SEQ ID NO: 349773 - RNA, 26 nt, Human
cagaggaggaggaggacagagggaga

SEQ ID NO: 349774 - RNA, 32 nt, Human
cagaggaggaggaggacagagggagagaauac

SEQ ID NO: 349775 - RNA, 27 nt, Human
cagaggaggaggggcccgccuuagcca

SEQ ID NO: 349776 - RNA, 32 nt, Human
cagaggaggcgacagagggaaaaagggccgag

SEQ ID NO: 349777 - RNA, 32 nt, Human
cagaggagggaagaaaauuugcagugacugaa

SEQ ID NO: 349778 - RNA, 32 nt, Human
cagaggagggagaagcucuggggagccagcuu

SEQ ID NO: 349779 - RNA, 32 nt, Human
cagaggagggagcaguuugcagugcccagcca

SEQ ID NO: 349780 - RNA, 24 nt, Human
cagaggagggagccagcuaagcca

SEQ ID NO: 349781 - RNA, 22 nt, Human
cagaggagggagguggugagca

SEQ ID NO: 349782 - RNA, 32 nt, Human
cagaggaguccuuccucaauguccagcaaugc

SEQ ID NO: 349783 - RNA, 32 nt, Human
cagaggagugagcugagcaccuccagugagaa

SEQ ID NO: 349784 - RNA, 32 nt, Human
cagaggagugcagaggagggucuggcaggggc

SEQ ID NO: 349785 - RNA, 32 nt, Human
cagaggagugccagccuggcccaggugaaagc

SEQ ID NO: 349786 - RNA, 22 nt, Human
cagaggaguggcaaggauggca

SEQ ID NO: 349787 - RNA, 32 nt, Human
cagaggagugugcugugcuggcaaguguaagu

SEQ ID NO: 349788 - RNA, 32 nt, Human
cagaggaguuccgagggaucacugugguggag

SEQ ID NO: 349789 - RNA, 32 nt, Human
cagaggaucccuugaggccaggagguggaguc

SEQ ID NO: 349790 - RNA, 19 nt, Human
cagaggaucucgggcuagg

SEQ ID NO: 349791 - RNA, 32 nt, Human
cagaggaucugggagguggaagccaggccaga

SEQ ID NO: 349792 - RNA, 32 nt, Human
cagaggaugacucuguucacacccaauccagc

SEQ ID NO: 349793 - RNA, 32 nt, Human
cagaggaugagcuagggugcacagggggagua

SEQ ID NO: 349794 - RNA, 21 nt, Human
cagaggaugcuuccccugagg

SEQ ID NO: 349795 - RNA, 32 nt, Human
cagaggaugggaaagcuucaccugccacaguu

SEQ ID NO: 349796 - RNA, 19 nt, Human
cagaggaugggcagccagg

SEQ ID NO: 349797 - RNA, 32 nt, Human
cagaggauggggagacaggcaggaccuugucu

SEQ ID NO: 349798 - RNA, 32 nt, Human
cagaggauguggcagugagggacgauggggug

SEQ ID NO: 349799 - RNA, 32 nt, Human
cagaggaugugguuuggggcaggcagguaugg

SEQ ID NO: 349800 - RNA, 32 nt, Human
cagaggauucccgaguguggcugucuuggggc

SEQ ID NO: 349801 - RNA, 32 nt, Human
cagaggcaagaaagauuugcaucuucuaccac

SEQ ID NO: 349802 - RNA, 32 nt, Human
cagaggcaagccccaccucugacagagccagu

SEQ ID NO: 349803 - RNA, 32 nt, Human
cagaggcaaggcagagaacaagaccugugcuu

SEQ ID NO: 349804 - RNA, 32 nt, Human
cagaggcacacagcuggcauacuccaggcuca

SEQ ID NO: 349805 - RNA, 32 nt, Human
cagaggcaccccggacagagacgugaagcacu

SEQ ID NO: 349806 - RNA, 26 nt, Human
cagaggcaccucaagaagaagagggg

SEQ ID NO: 349807 - RNA, 32 nt, Human
cagaggcaccugcagagccucaugggcuggcu

SEQ ID NO: 349808 - RNA, 32 nt, Human
cagaggcaccuguuagggaaaaucagaugucu

SEQ ID NO: 349809 - RNA, 22 nt, Human
cagaggcagaaaaaguggggga

SEQ ID NO: 349810 - RNA, 21 nt, Human
cagaggcagagauuggaguga

SEQ ID NO: 349811 - RNA, 23 nt, Human
cagaggcagagcggcgcaagggc

SEQ ID NO: 349812 - RNA, 32 nt, Human
cagaggcagagcggcgcaagggccaaggagua

SEQ ID NO: 349813 - RNA, 32 nt, Human
cagaggcagaggaggcgacagagggaaaaagg

SEQ ID NO: 349814 - RNA, 21 nt, Human
cagaggcagagguugcaauga

SEQ ID NO: 349815 - RNA, 24 nt, Human
cagaggcagagguugcaaugaagc

SEQ ID NO: 349816 - RNA, 23 nt, Human
cagaggcagagguugcaaugagc

SEQ ID NO: 349817 - RNA, 24 nt, Human
cagaggcagagguugcagugagcu

SEQ ID NO: 349818 - RNA, 21 nt, Human
cagaggcagagguugugguga

SEQ ID NO: 349819 - RNA, 20 nt, Human
cagaggcagagucuggggcu

SEQ ID NO: 349820 - RNA, 32 nt, Human
cagaggcagauguggcaugucuuuuuguaccc

SEQ ID NO: 349821 - RNA, 23 nt, Human
cagaggcagcagaugcccaggga

SEQ ID NO: 349822 - RNA, 32 nt, Human
cagaggcagcagcccuggggaaauugaugggu

SEQ ID NO: 349823 - RNA, 32 nt, Human
cagaggcagcaugguccgcagggcaccauggg

SEQ ID NO: 349824 - RNA, 32 nt, Human
cagaggcagcucagaguggaggcucuaggcag

SEQ ID NO: 349825 - RNA, 32 nt, Human
cagaggcagcuccggcggccgagaggagggag

SEQ ID NO: 349826 - RNA, 32 nt, Human
cagaggcagcuuccagccugggggcuggugac

SEQ ID NO: 349827 - RNA, 32 nt, Human
cagaggcaggaacugggaauaggcuuggaggu

SEQ ID NO: 349828 - RNA, 32 nt, Human
cagaggcaggagaccaagauggcagguggagg

SEQ ID NO: 349829 - RNA, 32 nt, Human
cagaggcaggcagaggaaauauugucagagac

SEQ ID NO: 349830 - RNA, 32 nt, Human
cagaggcaggcagaucacaaggucaggaguuc

SEQ ID NO: 349831 - RNA, 24 nt, Human
cagaggcaggcccaaagagggagg

SEQ ID NO: 349832 - RNA, 32 nt, Human
cagaggcaggguggcccaucggagagagcagu

SEQ ID NO: 349833 - RNA, 32 nt, Human
cagaggcaggguggcuggaguacagacggugg

SEQ ID NO: 349834 - RNA, 32 nt, Human
cagaggcagguggaucaccugaggucgggagu

SEQ ID NO: 349835 - RNA, 32 nt, Human
cagaggcagguggcaagguggcgggugguaag

SEQ ID NO: 349836 - RNA, 32 nt, Human
cagaggcaguuuggaauaagcugcggcaaguu

SEQ ID NO: 349837 - RNA, 32 nt, Human
cagaggcauagauguucacaaugcagaguucg

SEQ ID NO: 349838 - RNA, 32 nt, Human
cagaggcauucccagcucuggcuuacuggaug

SEQ ID NO: 349839 - RNA, 21 nt, Human
cagaggccaaauaagguggga

SEQ ID NO: 349840 - RNA, 32 nt, Human
cagaggccaacacugugggugugugacucuuu

SEQ ID NO: 349841 - RNA, 22 nt, Human
cagaggccaagagagguuaggg

SEQ ID NO: 349842 - RNA, 24 nt, Human
cagaggccaagaguuugagggaga

SEQ ID NO: 349843 - RNA, 32 nt, Human
cagaggccacagcaccagcucugacaaguccu

SEQ ID NO: 349844 - RNA, 32 nt, Human
cagaggccaccacugcuuuucaugcaggaguu

SEQ ID NO: 349845 - RNA, 32 nt, Human
cagaggccacugcaccugggcuagggguccac

SEQ ID NO: 349846 - RNA, 32 nt, Human
cagaggccagacggcauagcagaggaagaggu

SEQ ID NO: 349847 - RNA, 32 nt, Human
cagaggccagcucucccccuccaucuuggggg

SEQ ID NO: 349848 - RNA, 20 nt, Human
cagaggccaggggcccaggg

SEQ ID NO: 349849 - RNA, 20 nt, Human
cagaggcccaaauccaugga

SEQ ID NO: 349850 - RNA, 18 nt, Human
cagaggcccacaccgggc

SEQ ID NO: 349851 - RNA, 20 nt, Human
cagaggcccacccucauggg

SEQ ID NO: 349852 - RNA, 32 nt, Human
cagaggcccagccucuguggcccugugaccug

SEQ ID NO: 349853 - RNA, 32 nt, Human
cagaggcccaggaaucggagcgaagcagagag

SEQ ID NO: 349854 - RNA, 32 nt, Human
cagaggcccaggcugaggagcuuggcggcgag

SEQ ID NO: 349855 - RNA, 32 nt, Human
cagaggcccagggagagcagcaggaagauagc

SEQ ID NO: 349856 - RNA, 20 nt, Human
cagaggcccauggagaggga

SEQ ID NO: 349857 - RNA, 22 nt, Human
cagaggcccauggccccagcga

SEQ ID NO: 349858 - RNA, 20 nt, Human
cagaggccccacucaggaga

SEQ ID NO: 349859 - RNA, 32 nt, Human
cagaggcccccugcgggugcugaggggagagu

SEQ ID NO: 349860 - RNA, 19 nt, Human
cagaggccccgggcccagg

SEQ ID NO: 349861 - RNA, 24 nt, Human
cagaggcccgcacaaugaccggag

SEQ ID NO: 349862 - RNA, 21 nt, Human
cagaggcccgcuugcuggggg

SEQ ID NO: 349863 - RNA, 25 nt, Human
cagaggcccggccgcagcgcaggga

SEQ ID NO: 349864 - RNA, 23 nt, Human
cagaggcccggcgaccuccaggg

SEQ ID NO: 349865 - RNA, 32 nt, Human
cagaggcccuccagagagacugcccugcacgc

SEQ ID NO: 349866 - RNA, 32 nt, Human
cagaggcccugagauugcugcccucccauauu

SEQ ID NO: 349867 - RNA, 32 nt, Human
cagaggcccugcagagcggcaggauggagaua

SEQ ID NO: 349868 - RNA, 32 nt, Human
cagaggcccugcagagcggcaggauggagaug

SEQ ID NO: 349869 - RNA, 32 nt, Human
cagaggcccugccuuuggcugagcugagacac

SEQ ID NO: 349870 - RNA, 32 nt, Human
cagaggcccuggaauugugggugaggcugucu

SEQ ID NO: 349871 - RNA, 32 nt, Human
cagaggcccuggagggaaggacagucccugcu

SEQ ID NO: 349872 - RNA, 25 nt, Human
cagaggcccuggaggucuccagggg

SEQ ID NO: 349873 - RNA, 32 nt, Human
cagaggcccuggaggucuccaggggccugcag

SEQ ID NO: 349874 - RNA, 22 nt, Human
cagaggcccugggcacgggagg

SEQ ID NO: 349875 - RNA, 24 nt, Human
cagaggccgagcugaagagaugga

SEQ ID NO: 349876 - RNA, 32 nt, Human
cagaggccgagcugaagagauggacccggguc

SEQ ID NO: 349877 - RNA, 32 nt, Human
cagaggccgggaagagacacccccucccaaac

SEQ ID NO: 349878 - RNA, 32 nt, Human
cagaggccgggacggccucucccucucagugu

SEQ ID NO: 349879 - RNA, 32 nt, Human
cagaggccgugucaccuggccugggccgcaca

SEQ ID NO: 349880 - RNA, 28 nt, Human
cagaggccuaaggcugccucagcacccu

SEQ ID NO: 349881 - RNA, 22 nt, Human
cagaggccuacgaaccuaggga

SEQ ID NO: 349882 - RNA, 21 nt, Human
cagaggccuaggcccacgggg

SEQ ID NO: 349883 - RNA, 32 nt, Human
cagaggccuaucuccacuuuaaaucuguccug

SEQ ID NO: 349884 - RNA, 25 nt, Human
cagaggccucagagggcccuaggga

SEQ ID NO: 349885 - RNA, 21 nt, Human
cagaggccucagcccugggga

SEQ ID NO: 349886 - RNA, 32 nt, Human
cagaggccucgccuccugaaggacgcagugug

SEQ ID NO: 349887 - RNA, 23 nt, Human
cagaggccugggcccucagugga

SEQ ID NO: 349888 - RNA, 32 nt, Human
cagaggccugggucuccaggagaagcugaggg

SEQ ID NO: 349889 - RNA, 32 nt, Human
cagaggccugggugggaggggaccaagggugu

SEQ ID NO: 349890 - RNA, 32 nt, Human
cagaggccugguggcccugcugggcagcccaa

SEQ ID NO: 349891 - RNA, 32 nt, Human
cagaggccuguaaucccagcuacuugggaggc

SEQ ID NO: 349892 - RNA, 32 nt, Human
cagaggccuguaaucccaguuccuugggaggc

SEQ ID NO: 349893 - RNA, 32 nt, Human
cagaggccugucucccccuucccuccccaccg

SEQ ID NO: 349894 - RNA, 32 nt, Human
cagaggccugucucccugugaugcugugcuuc

SEQ ID NO: 349895 - RNA, 19 nt, Human
cagaggccugugcccaucg

SEQ ID NO: 349896 - RNA, 32 nt, Human
cagaggccuuaaaauauucuuucacaguagcu

SEQ ID NO: 349897 - RNA, 32 nt, Human
cagaggccuuagaccagcaggucuaggucaca

SEQ ID NO: 349898 - RNA, 32 nt, Human
cagaggccuuucagaaggagaaggcagcucug

SEQ ID NO: 349899 - RNA, 32 nt, Human
cagaggccuuucuuuucccuucccccagcucu

SEQ ID NO: 349900 - RNA, 32 nt, Human
cagaggcgaaggcagauggggcacugacccag

SEQ ID NO: 349901 - RNA, 24 nt, Human
cagaggcgccgcucccuggcucgc

SEQ ID NO: 349902 - RNA, 24 nt, Human
cagaggcgcugcgagggcagccgc

SEQ ID NO: 349903 - RNA, 25 nt, Human
cagaggcggagccgcuguggcacug

SEQ ID NO: 349904 - RNA, 21 nt, Human
cagaggcggcgauuguggcgg

SEQ ID NO: 349905 - RNA, 21 nt, Human
cagaggcgggagaugguggca

SEQ ID NO: 349906 - RNA, 32 nt, Human
cagaggcgggcagaucacuugaggucaggagu

SEQ ID NO: 349907 - RNA, 32 nt, Human
cagaggcgggcagcuccuccuccagggcccac

SEQ ID NO: 349908 - RNA, 32 nt, Human
cagaggcgggcggaucaucugaggucaggagu

SEQ ID NO: 349909 - RNA, 32 nt, Human
cagaggcgggucgggcugggccagcuggggua

SEQ ID NO: 349910 - RNA, 32 nt, Human
cagaggcgugaggagaggaaagcagggagguc

SEQ ID NO: 349911 - RNA, 24 nt, Human
cagaggcuacaucugcccuaggga

SEQ ID NO: 349912 - RNA, 32 nt, Human
cagaggcuagguuguuucugugggugccuuau

SEQ ID NO: 349913 - RNA, 23 nt, Human
cagaggcuaugggaagaggguga

SEQ ID NO: 349914 - RNA, 24 nt, Human
cagaggcucacgccuguaauccca

SEQ ID NO: 349915 - RNA, 32 nt, Human
cagaggcucagagagaauaaccuccaucuccu

SEQ ID NO: 349916 - RNA, 32 nt, Human
cagaggcucaggaaguggaaauggccucaggu

SEQ ID NO: 349917 - RNA, 24 nt, Human
cagaggcucaugccuguaauccca

SEQ ID NO: 349918 - RNA, 32 nt, Human
cagaggcuccaccuguggguccugguucaugg

SEQ ID NO: 349919 - RNA, 32 nt, Human
cagaggcuccagaaacacugggugacacccag

SEQ ID NO: 349920 - RNA, 21 nt, Human
cagaggcuccucccgcgggga

SEQ ID NO: 349921 - RNA, 32 nt, Human
cagaggcuccugggccuggcuuggcugucccc

SEQ ID NO: 349922 - RNA, 23 nt, Human
cagaggcucgaggggcucagggg

SEQ ID NO: 349923 - RNA, 32 nt, Human
cagaggcucugacacugucugguuuccaaugc

SEQ ID NO: 349924 - RNA, 32 nt, Human
cagaggcugcacucuagccugggcaacagagc

SEQ ID NO: 349925 - RNA, 32 nt, Human
cagaggcugcagccccgguccccagcggcuaa

SEQ ID NO: 349926 - RNA, 32 nt, Human
cagaggcugcauuugccuucuucugccaccua

SEQ ID NO: 349927 - RNA, 32 nt, Human
cagaggcugcccacucaggucuugccuuguug

SEQ ID NO: 349928 - RNA, 24 nt, Human
cagaggcugcugccagggcugcug

SEQ ID NO: 349929 - RNA, 19 nt, Human
cagaggcugcugcccaggg

SEQ ID NO: 349930 - RNA, 27 nt, Human
cagaggcugcugggaggaaggaggaga

SEQ ID NO: 349931 - RNA, 32 nt, Human
cagaggcuggcguaguggggcagcugcugacc

SEQ ID NO: 349932 - RNA, 32 nt, Human
cagaggcugggaagaggggguagggguuaggu

SEQ ID NO: 349933 - RNA, 32 nt, Human
cagaggcugggaaugggagcaguaagcugucg

SEQ ID NO: 349934 - RNA, 32 nt, Human
cagaggcugugaacagggagaugggggagggg

SEQ ID NO: 349935 - RNA, 32 nt, Human
cagaggcuguggcgagggagagccaagcauau

SEQ ID NO: 349936 - RNA, 24 nt, Human
cagaggcuuaauguugccugugga

SEQ ID NO: 349937 - RNA, 23 nt, Human
cagaggcuuacagguccaggugg

SEQ ID NO: 349938 - RNA, 32 nt, Human
cagaggcuuccccagcccuggggaucauuuuu

SEQ ID NO: 349939 - RNA, 32 nt, Human
cagaggcuucuccaaagggagggugacaugcu

SEQ ID NO: 349940 - RNA, 32 nt, Human
cagaggcuuguauaucaguucaaggauaugcc

SEQ ID NO: 349941 - RNA, 32 nt, Human
cagagggaaaggaggaagcugcguggcauuuc

SEQ ID NO: 349942 - RNA, 32 nt, Human
cagagggaaaggaggcuggagaggcuucugau

SEQ ID NO: 349943 - RNA, 32 nt, Human
cagagggaaagggagagccaccugguacuugu

SEQ ID NO: 349944 - RNA, 32 nt, Human
cagagggaaccagcuccggccucagccagccc

SEQ ID NO: 349945 - RNA, 32 nt, Human
cagagggaacccaggcuggaugcugcagagaa

SEQ ID NO: 349946 - RNA, 32 nt, Human
cagagggaacuaagcaaauccaauagagaugu

SEQ ID NO: 349947 - RNA, 32 nt, Human
cagagggaacuccagggcagggaugugccuga

SEQ ID NO: 349948 - RNA, 18 nt, Human
cagagggaagaagagggg

SEQ ID NO: 349949 - RNA, 32 nt, Human
cagagggaagugggucugcuucaugguuguua

SEQ ID NO: 349950 - RNA, 32 nt, Human
cagagggacacaucuccugggcacaaugugca

SEQ ID NO: 349951 - RNA, 25 nt, Human
cagagggacagcgcccagagcccag

SEQ ID NO: 349952 - RNA, 22 nt, Human
cagagggacaggugugguggca

SEQ ID NO: 349953 - RNA, 32 nt, Human
cagagggacccuuggcuccugugucuggucca

SEQ ID NO: 349954 - RNA, 32 nt, Human
cagagggaccuggcaggcagagcuccagaagg

SEQ ID NO: 349955 - RNA, 32 nt, Human
cagagggacuccucccuaucugauucuaugag

SEQ ID NO: 349956 - RNA, 32 nt, Human
cagagggagaagagccccugcccacugcacuc

SEQ ID NO: 349957 - RNA, 32 nt, Human
cagagggagaaguguuucaggauuguaggagu

SEQ ID NO: 349958 - RNA, 32 nt, Human
cagagggagaggagacaggaaggaaagaugaa

SEQ ID NO: 349959 - RNA, 32 nt, Human
cagagggagaggaggaagaagagguagaagga

SEQ ID NO: 349960 - RNA, 32 nt, Human
cagagggagaggggacccaguucagaaucuca

SEQ ID NO: 349961 - RNA, 32 nt, Human
cagagggagcagcucccccacccauggcaucu

SEQ ID NO: 349962 - RNA, 32 nt, Human
cagagggagcagucauggcggagcuggaggcu

SEQ ID NO: 349963 - RNA, 32 nt, Human
cagagggagcaguccggagaggcaagaugacc

SEQ ID NO: 349964 - RNA, 22 nt, Human
cagagggagcauggcccagggg

SEQ ID NO: 349965 - RNA, 20 nt, Human
cagagggagcccuccaggag

SEQ ID NO: 349966 - RNA, 32 nt, Human
cagagggagcgucaaggcccugugcugcuguc

SEQ ID NO: 349967 - RNA, 30 nt, Human
cagagggagcugggcagggcacagcagggc

SEQ ID NO: 349968 - RNA, 32 nt, Human
cagagggagcugucuccagacagcuccaucag

SEQ ID NO: 349969 - RNA, 32 nt, Human
cagagggaggaagaagccagacgacagucagg

SEQ ID NO: 349970 - RNA, 32 nt, Human
cagagggaggaagaagccagaugacagucagg

SEQ ID NO: 349971 - RNA, 32 nt, Human
cagagggaggaagaagcggcggcgcggcggcg

SEQ ID NO: 349972 - RNA, 32 nt, Human
cagagggaggaaggcagagcaaguggagcagg

SEQ ID NO: 349973 - RNA, 32 nt, Human
cagagggaggagcaggcaggagagagagggga

SEQ ID NO: 349974 - RNA, 32 nt, Human
cagagggaggcugaaccugagggcaagaagaa

SEQ ID NO: 349975 - RNA, 24 nt, Human
cagagggagggaaggguggucaca

SEQ ID NO: 349976 - RNA, 32 nt, Human
cagagggaggucauuguuacacacacaucccc

SEQ ID NO: 349977 - RNA, 32 nt, Human
cagagggaguugucacgcuacagugaguggcu

SEQ ID NO: 349978 - RNA, 25 nt, Human
cagagggauggcugcucagcugcug

SEQ ID NO: 349979 - RNA, 24 nt, Human
cagagggcaccaaggaggguggca

SEQ ID NO: 349980 - RNA, 21 nt, Human
cagagggcacugggcuggggc

SEQ ID NO: 349981 - RNA, 32 nt, Human
cagagggcagcccagcuccagguaggcaccag

SEQ ID NO: 349982 - RNA, 32 nt, Human
cagagggcagggcuaggcgagagccuggggug

SEQ ID NO: 349983 - RNA, 32 nt, Human
cagagggcagugcaggcuucugccugggcccc

SEQ ID NO: 349984 - RNA, 32 nt, Human
cagagggccagaagaaugagagagaggaagac

SEQ ID NO: 349985 - RNA, 20 nt, Human
cagagggccagaguggguag

SEQ ID NO: 349986 - RNA, 21 nt, Human
cagagggccagguacagggag

SEQ ID NO: 349987 - RNA, 21 nt, Human
cagagggccaucgugacguag

SEQ ID NO: 349988 - RNA, 32 nt, Human
cagagggcccaggagggucuugcagucaucua

SEQ ID NO: 349989 - RNA, 18 nt, Human
cagagggcccuccaggaa

SEQ ID NO: 349990 - RNA, 21 nt, Human
cagagggcgcugccuguccuc

SEQ ID NO: 349991 - RNA, 32 nt, Human
cagagggcucagauggacacagaauucuagcu

SEQ ID NO: 349992 - RNA, 25 nt, Human
cagagggcucuuggucgcucaggga

SEQ ID NO: 349993 - RNA, 32 nt, Human
cagagggcugcacauagacacagggaaacaca

SEQ ID NO: 349994 - RNA, 32 nt, Human
cagagggcugggcucccagacuccugggugcu

SEQ ID NO: 349995 - RNA, 32 nt, Human
cagagggcuggggaggugggaaagacgauuuu

SEQ ID NO: 349996 - RNA, 19 nt, Human
cagagggcuuugcccaggg

SEQ ID NO: 349997 - RNA, 32 nt, Human
cagaggggaaaccaguguagccuugcccggau

SEQ ID NO: 349998 - RNA, 32 nt, Human
cagaggggaaagcagcucccaggccuuacuca

SEQ ID NO: 349999 - RNA, 32 nt, Human
cagaggggaaggacguguggauuggagucaga

SEQ ID NO: 350000 - RNA, 32 nt, Human
cagaggggacacaccucagccucucacugugg

SEQ ID NO: 350001 - RNA, 22 nt, Human
cagaggggaccaaaggauggca

SEQ ID NO: 350002 - RNA, 32 nt, Human
cagaggggagagagggcaggacaggccagagu

SEQ ID NO: 350003 - RNA, 32 nt, Human
cagaggggagcccacugcccugaagggagaga

SEQ ID NO: 350004 - RNA, 32 nt, Human
cagaggggagccugugcuggucccgggcgucu

SEQ ID NO: 350005 - RNA, 32 nt, Human
cagaggggaggaacaggcacaggcuagaggca

SEQ ID NO: 350006 - RNA, 32 nt, Human
cagaggggagggaggaaggaaggagucccagc

SEQ ID NO: 350007 - RNA, 32 nt, Human
cagaggggaguguggagugggaagcaccuaac

SEQ ID NO: 350008 - RNA, 19 nt, Human
cagaggggaugugggagua

SEQ ID NO: 350009 - RNA, 32 nt, Human
cagaggggcaggggagcccacccuggauccug

SEQ ID NO: 350010 - RNA, 21 nt, Human
cagaggggccccgaagggcac

SEQ ID NO: 350011 - RNA, 32 nt, Human
cagaggggcgggguugaccuaggcugaauauc

SEQ ID NO: 350012 - RNA, 21 nt, Human
cagaggggcugcagggagcau

SEQ ID NO: 350013 - RNA, 32 nt, Human
cagaggggcuuccccaagcucuguuuugaagc

SEQ ID NO: 350014 - RNA, 23 nt, Human
cagagggggaaauaagaggagga

SEQ ID NO: 350015 - RNA, 32 nt, Human
cagagggggagggagaggccggacacaagcuc

SEQ ID NO: 350016 - RNA, 32 nt, Human
cagagggggugagaaagcaguggaugauuggg

SEQ ID NO: 350017 - RNA, 32 nt, Human
cagaggggguggaggacucuccccugccucug

SEQ ID NO: 350018 - RNA, 32 nt, Human
cagagggguugcagauacgugacuuggagcac

SEQ ID NO: 350019 - RNA, 32 nt, Human
cagaggguagguggagagugaagccaagcccc

SEQ ID NO: 350020 - RNA, 32 nt, Human
cagaggguaggugggaaagaacagacaagcca

SEQ ID NO: 350021 - RNA, 32 nt, Human
cagagggucauugugacagcuuucuguauccc

SEQ ID NO: 350022 - RNA, 32 nt, Human
cagagggucccauggaccuggccggcggccuu

SEQ ID NO: 350023 - RNA, 24 nt, Human
cagagggucgguggaggggucauu

SEQ ID NO: 350024 - RNA, 32 nt, Human
cagagggucuacacccugcaggauuugcugua

SEQ ID NO: 350025 - RNA, 32 nt, Human
cagagggugccucugccucucugugucagggg

SEQ ID NO: 350026 - RNA, 32 nt, Human
cagaggguggccguccucacaccugugcgcag

SEQ ID NO: 350027 - RNA, 22 nt, Human
cagaggguggcucugggagcag

SEQ ID NO: 350028 - RNA, 32 nt, Human
cagagguagcggccccagccccagagaguggg

SEQ ID NO: 350029 - RNA, 32 nt, Human
cagagguauccagcagaggggagaagaaagag

SEQ ID NO: 350030 - RNA, 32 nt, Human
cagagguaugaaaaggagagcucuccuaguug

SEQ ID NO: 350031 - RNA, 32 nt, Human
cagaggucaagaaaagcaguccagagauggag

SEQ ID NO: 350032 - RNA, 32 nt, Human
cagaggucaagaguuugagaccagcuugguga

SEQ ID NO: 350033 - RNA, 32 nt, Human
cagaggucacacagccugugugcaguggagcu

SEQ ID NO: 350034 - RNA, 32 nt, Human
cagaggucaccaggaaaguugaggagacggac

SEQ ID NO: 350035 - RNA, 32 nt, Human
cagaggucacccgugauucugccugcaccuua

SEQ ID NO: 350036 - RNA, 32 nt, Human
cagaggucaggaaaacacaagauggaaaauug

SEQ ID NO: 350037 - RNA, 32 nt, Human
cagaggucaggaguuccagaccagccuggcca

SEQ ID NO: 350038 - RNA, 32 nt, Human
cagaggucaggaguucgagaccagcccagcca

SEQ ID NO: 350039 - RNA, 32 nt, Human
cagaggucaggaguucgagaccagccuggcca

SEQ ID NO: 350040 - RNA, 32 nt, Human
cagaggucaggaguuggagaccagccugccca

SEQ ID NO: 350041 - RNA, 32 nt, Human
cagaggucagguguucaagaccagccugacca

SEQ ID NO: 350042 - RNA, 32 nt, Human
cagaggucaucccucuugcccucuaugacucu

SEQ ID NO: 350043 - RNA, 32 nt, Human
cagagguccaagcuauacugugcaggacaugg

SEQ ID NO: 350044 - RNA, 32 nt, Human
cagaggucccagaugccugggcugagaaccca

SEQ ID NO: 350045 - RNA, 32 nt, Human
cagaggucccgggcggaggaggaagcuguggc

SEQ ID NO: 350046 - RNA, 26 nt, Human
cagagguccuacccucugucuaggga

SEQ ID NO: 350047 - RNA, 32 nt, Human
cagaggucucagacacguuuggucaucagaca

SEQ ID NO: 350048 - RNA, 22 nt, Human
cagaggucuccaccccacggga

SEQ ID NO: 350049 - RNA, 32 nt, Human
cagaggucucugccggcucuuuccuugcucaa

SEQ ID NO: 350050 - RNA, 32 nt, Human
cagaggucucugcuagccuugguaucauuuuc

SEQ ID NO: 350051 - RNA, 23 nt, Human
cagaggucugggucccccagggg

SEQ ID NO: 350052 - RNA, 32 nt, Human
cagaggucugugagacagggaagggcaagagg

SEQ ID NO: 350053 - RNA, 32 nt, Human
cagaggugaaggagucagagaggcgacaggau

SEQ ID NO: 350054 - RNA, 32 nt, Human
cagaggugagcaauggccguggccggaggugc

SEQ ID NO: 350055 - RNA, 21 nt, Human
cagaggugagccugucguggc

SEQ ID NO: 350056 - RNA, 32 nt, Human
cagaggugagggccagggcagcucagguuccu

SEQ ID NO: 350057 - RNA, 32 nt, Human
cagaggugcaagggcuuagaaaagacccuggc

SEQ ID NO: 350058 - RNA, 32 nt, Human
cagaggugcacaggcuggaguuucaggcacug

SEQ ID NO: 350059 - RNA, 32 nt, Human
cagaggugcccgcucuucccuccugggcccac

SEQ ID NO: 350060 - RNA, 32 nt, Human
cagaggugccugagggugguuggggaggugag

SEQ ID NO: 350061 - RNA, 21 nt, Human
cagagguggaaggcgcggcgg

SEQ ID NO: 350062 - RNA, 20 nt, Human
cagagguggagaaggggaca

SEQ ID NO: 350063 - RNA, 20 nt, Human
cagagguggagccacugagg

SEQ ID NO: 350064 - RNA, 32 nt, Human
cagagguggagcgaccccauuacgcuaaagau

SEQ ID NO: 350065 - RNA, 21 nt, Human
cagagguggagguugcaguga

SEQ ID NO: 350066 - RNA, 32 nt, Human
cagagguggaugcuagcuacaccagcuaugcu

SEQ ID NO: 350067 - RNA, 19 nt, Human
cagagguggcgcccagggg

SEQ ID NO: 350068 - RNA, 32 nt, Human
cagagguggcugcugugcugugccuagaugca

SEQ ID NO: 350069 - RNA, 32 nt, Human
cagagguggcuggaggauaaugguccuacgca

SEQ ID NO: 350070 - RNA, 32 nt, Human
cagaggugggacuagguaaggccaggucucug

SEQ ID NO: 350071 - RNA, 19 nt, Human
cagaggugggagcugcggc

SEQ ID NO: 350072 - RNA, 22 nt, Human
cagaggugggcaggugguggca

SEQ ID NO: 350073 - RNA, 32 nt, Human
cagagguggucuggugccaccgucccucugca

SEQ ID NO: 350074 - RNA, 32 nt, Human
cagaggugucccaucccauugcagccuccacc

SEQ ID NO: 350075 - RNA, 32 nt, Human
cagaggugucuucucccccuaaccuacagcuu

SEQ ID NO: 350076 - RNA, 32 nt, Human
cagaggugugggaggcagaaggcuacaaccua

SEQ ID NO: 350077 - RNA, 32 nt, Human
cagagguguuacaugccaggauaucagggagu

SEQ ID NO: 350078 - RNA, 32 nt, Human
cagagguucacacaggugcagcuucgaggccc

SEQ ID NO: 350079 - RNA, 32 nt, Human
cagagguucucaucugaauuaccaucuguccc

SEQ ID NO: 350080 - RNA, 32 nt, Human
cagagguucuuccagccccacuucuaugcgau

SEQ ID NO: 350081 - RNA, 22 nt, Human
cagagguugaccguaccccgga

SEQ ID NO: 350082 - RNA, 23 nt, Human
cagagguugcagcagauggugug

SEQ ID NO: 350083 - RNA, 32 nt, Human
cagagguugcaguaagcugagaucccaccauu

SEQ ID NO: 350084 - RNA, 32 nt, Human
cagagguugcagugaaccgagguugcgccacu

SEQ ID NO: 350085 - RNA, 32 nt, Human
cagagguuuaggcuggaggcuuggugagaaua

SEQ ID NO: 350086 - RNA, 24 nt, Human
cagaguaacagggauuacaggcau

SEQ ID NO: 350087 - RNA, 32 nt, Human
cagaguaaggcucuuccuggaagggacugggg

SEQ ID NO: 350088 - RNA, 32 nt, Human
cagaguaauggaccagcaaugcugaagacgcc

SEQ ID NO: 350089 - RNA, 32 nt, Human
cagaguacagaugagaacagcuuacaugaacc

SEQ ID NO: 350090 - RNA, 32 nt, Human
cagaguacaugauagcaaaauaaagccauuug

SEQ ID NO: 350091 - RNA, 22 nt, Human
cagaguacaugucucugccucu

SEQ ID NO: 350092 - RNA, 21 nt, Human
cagaguacccaguacaaguca

SEQ ID NO: 350093 - RNA, 32 nt, Human
cagaguacgagucugaggcggagggaguaaug

SEQ ID NO: 350094 - RNA, 21 nt, Human
cagaguacugggauuacaggc

SEQ ID NO: 350095 - RNA, 32 nt, Human
cagaguagaaaagauuguggccaagaagagug

SEQ ID NO: 350096 - RNA, 32 nt, Human
cagaguagccaggguguggcccugccaucuuc

SEQ ID NO: 350097 - RNA, 23 nt, Human
cagaguagcugggacuacaggca

SEQ ID NO: 350098 - RNA, 24 nt, Human
cagaguagcugggacuacaggcau

SEQ ID NO: 350099 - RNA, 23 nt, Human
cagaguagcugggauuacaggca

SEQ ID NO: 350100 - RNA, 23 nt, Human
cagaguagcugggauuacaggcg

SEQ ID NO: 350101 - RNA, 32 nt, Human
cagaguaggccugcuucuucccaugaaagcca

SEQ ID NO: 350102 - RNA, 20 nt, Human
cagaguagucacacugaaga

SEQ ID NO: 350103 - RNA, 32 nt, Human
cagaguaguuagagaauauguaugccugcaau

SEQ ID NO: 350104 - RNA, 32 nt, Human
cagaguaguucaggcuggguggagcaguggga

SEQ ID NO: 350105 - RNA, 32 nt, Human
cagaguauacauggcccugaaauuaacugccc

SEQ ID NO: 350106 - RNA, 32 nt, Human
cagaguaucuugaaauaaugaucugaccgccu

SEQ ID NO: 350107 - RNA, 32 nt, Human
cagaguauggagcucagagagggcaggcauga

SEQ ID NO: 350108 - RNA, 32 nt, Human
cagaguaugguucucagcccaccagcuaguau

SEQ ID NO: 350109 - RNA, 32 nt, Human
cagaguauuacaucaucuuauuuugguuuuau

SEQ ID NO: 350110 - RNA, 23 nt, Human
cagaguauugcuuuucacauuua

SEQ ID NO: 350111 - RNA, 32 nt, Human
cagaguauuguugaaguaauuagaagauauau

SEQ ID NO: 350112 - RNA, 32 nt, Human
cagaguauuuggaaguuaagaauugauuagac

SEQ ID NO: 350113 - RNA, 32 nt, Human
cagagucacagcagugccgagguguccgcggc

SEQ ID NO: 350114 - RNA, 32 nt, Human
cagagucaccaaggcaaaguuggggcuggucc

SEQ ID NO: 350115 - RNA, 32 nt, Human
cagagucacccaggcuggagugcaguggugag

SEQ ID NO: 350116 - RNA, 32 nt, Human
cagagucaccugcuggcuuagaggaguggagu

SEQ ID NO: 350117 - RNA, 32 nt, Human
cagagucacugcaccaucaggcuuggcccugc

SEQ ID NO: 350118 - RNA, 19 nt, Human
cagagucacuucuccuccu

SEQ ID NO: 350119 - RNA, 32 nt, Human
cagagucaggcuguucaugagugcucaccugg

SEQ ID NO: 350120 - RNA, 32 nt, Human
cagagucagggagggcagaggguggcagcgag

SEQ ID NO: 350121 - RNA, 32 nt, Human
cagagucaggggcuggccagagggucugcucc

SEQ ID NO: 350122 - RNA, 24 nt, Human
cagagucauauuucucuucuuuca

SEQ ID NO: 350123 - RNA, 32 nt, Human
cagagucaucaugucucucgagcagaggaguc

SEQ ID NO: 350124 - RNA, 32 nt, Human
cagagucauccugagggguccccaggggaggc

SEQ ID NO: 350125 - RNA, 32 nt, Human
cagagucaugugcccugugaccacugaagggu

SEQ ID NO: 350126 - RNA, 32 nt, Human
cagaguccacaggaaagaagucacuguugcaa

SEQ ID NO: 350127 - RNA, 32 nt, Human
cagagucccagcccuggcuggggcagggcccc

SEQ ID NO: 350128 - RNA, 32 nt, Human
cagaguccccaaccccagaagggggccaugga

SEQ ID NO: 350129 - RNA, 23 nt, Human
cagaguccccaggagccgagggg

SEQ ID NO: 350130 - RNA, 32 nt, Human
cagagucccgucucaccauccugggcuuccaa

SEQ ID NO: 350131 - RNA, 32 nt, Human
cagaguccggcauccccuccccagacugccug

SEQ ID NO: 350132 - RNA, 32 nt, Human
cagaguccgggagaaugcuggcaaaggcuggc

SEQ ID NO: 350133 - RNA, 32 nt, Human
cagagucggguguagaccagcccugggauuuc

SEQ ID NO: 350134 - RNA, 32 nt, Human
cagagucguaggaaacagcagauggaaaugga

SEQ ID NO: 350135 - RNA, 32 nt, Human
cagagucuacagccugacccagcugcccgcua

SEQ ID NO: 350136 - RNA, 18 nt, Human
cagagucucacucuguca

SEQ ID NO: 350137 - RNA, 32 nt, Human
cagagucucacugucuugcccaggcuggagug

SEQ ID NO: 350138 - RNA, 18 nt, Human
cagagucucacuuuguca

SEQ ID NO: 350139 - RNA, 18 nt, Human
cagagucucauucuguca

SEQ ID NO: 350140 - RNA, 21 nt, Human
cagagucuccuccuggccagg

SEQ ID NO: 350141 - RNA, 32 nt, Human
cagagucuccuggcuggcugcugcucucugga

SEQ ID NO: 350142 - RNA, 18 nt, Human
cagagucucgcucuguca

SEQ ID NO: 350143 - RNA, 32 nt, Human
cagagucucgcucuguugcccagccuggagug

SEQ ID NO: 350144 - RNA, 32 nt, Human
cagagucucucucuguagccaggcuggagggc

SEQ ID NO: 350145 - RNA, 32 nt, Human
cagagucugggagucuucagacugguuugccu

SEQ ID NO: 350146 - RNA, 32 nt, Human
cagagucuuacaugacuuaaagccacaccccc

SEQ ID NO: 350147 - RNA, 18 nt, Human
cagagucuuacucuguca

SEQ ID NO: 350148 - RNA, 22 nt, Human
cagagucuuauuaaaagagggg

SEQ ID NO: 350149 - RNA, 32 nt, Human
cagagucuucacuggcaguagggggagauggg

SEQ ID NO: 350150 - RNA, 32 nt, Human
cagagucuucacuggggcacuguauaguggag

SEQ ID NO: 350151 - RNA, 32 nt, Human
cagagucuuccucugucuccuaagcuggagug

SEQ ID NO: 350152 - RNA, 32 nt, Human
cagagucuugcucugcuggagugcgguggugc

SEQ ID NO: 350153 - RNA, 32 nt, Human
cagagucuuguccuaugcauucccagcccagc

SEQ ID NO: 350154 - RNA, 32 nt, Human
cagagugaaacugugacccucucccuucccug

SEQ ID NO: 350155 - RNA, 32 nt, Human
cagagugaacagcaccgcgagacaggccaggc

SEQ ID NO: 350156 - RNA, 32 nt, Human
cagagugaacagcauaugcaaagguguggaaa

SEQ ID NO: 350157 - RNA, 32 nt, Human
cagagugaagaggaagccagaagaugggagag

SEQ ID NO: 350158 - RNA, 21 nt, Human
cagagugaaugaaggcaggua

SEQ ID NO: 350159 - RNA, 32 nt, Human
cagagugacaguggcccagcuggacugggaca

SEQ ID NO: 350160 - RNA, 32 nt, Human
cagagugaccuugacgucuguaugacaauuaa

SEQ ID NO: 350161 - RNA, 31 nt, Human
cagagugacucagaagaaaaagaagcugagg

SEQ ID NO: 350162 - RNA, 20 nt, Human
cagagugagaccauguuuca

SEQ ID NO: 350163 - RNA, 20 nt, Human
cagagugagacccugucuca

SEQ ID NO: 350164 - RNA, 20 nt, Human
cagagugagaccucgucuca

SEQ ID NO: 350165 - RNA, 19 nt, Human
cagagugagaccugucuca

SEQ ID NO: 350166 - RNA, 20 nt, Human
cagagugagaccuugucuca

SEQ ID NO: 350167 - RNA, 31 nt, Human
cagagugagacgcugccucacugcuccccca

SEQ ID NO: 350168 - RNA, 20 nt, Human
cagagugagacuuugucuca

SEQ ID NO: 350169 - RNA, 24 nt, Human
cagagugagcagguaagagaggga

SEQ ID NO: 350170 - RNA, 32 nt, Human
cagagugagccaaugcucaccagccccagagu

SEQ ID NO: 350171 - RNA, 22 nt, Human
cagagugagucaggcaccucca

SEQ ID NO: 350172 - RNA, 32 nt, Human
cagagugagugagugaguaugugugcacacac

SEQ ID NO: 350173 - RNA, 22 nt, Human
cagagugcaccugacacugcca

SEQ ID NO: 350174 - RNA, 17 nt, Human
cagagugcagcugcauu

SEQ ID NO: 350175 - RNA, 20 nt, Human
cagagugcaggaagaagggg

SEQ ID NO: 350176 - RNA, 32 nt, Human
cagagugcagggaagcagaugggcuaaauuuu

SEQ ID NO: 350177 - RNA, 32 nt, Human
cagagugcaggucucaggggcagaagacaugg

SEQ ID NO: 350178 - RNA, 32 nt, Human
cagagugcagguggagagaacagaaggugggc

SEQ ID NO: 350179 - RNA, 32 nt, Human
cagagugcaguggcaugauuguagcucacugc

SEQ ID NO: 350180 - RNA, 32 nt, Human
cagagugcaguggugugaucauagcucacugc

SEQ ID NO: 350181 - RNA, 32 nt, Human
cagagugccaggaacacuguggacgucuuugu

SEQ ID NO: 350182 - RNA, 32 nt, Human
cagagugcccacuccccucuacuugcugcucu

SEQ ID NO: 350183 - RNA, 24 nt, Human
cagagugcccccuccccugcaagg

SEQ ID NO: 350184 - RNA, 32 nt, Human
cagagugcccguggcucccaccccagggucug

SEQ ID NO: 350185 - RNA, 32 nt, Human
cagagugccugguggagacagagcggaacgcc

SEQ ID NO: 350186 - RNA, 32 nt, Human
cagagugccuuaaaaaugacuuuaauuaggaa

SEQ ID NO: 350187 - RNA, 21 nt, Human
cagagugcuaggauuacaggc

SEQ ID NO: 350188 - RNA, 23 nt, Human
cagagugcuaggauuacaggcau

SEQ ID NO: 350189 - RNA, 32 nt, Human
cagagugcucagaaagucaagauaggauaugc

SEQ ID NO: 350190 - RNA, 32 nt, Human
cagagugcucccuucaagccucccaggccaug

SEQ ID NO: 350191 - RNA, 23 nt, Human
cagagugcugagauuacaggcgu

SEQ ID NO: 350192 - RNA, 32 nt, Human
cagagugcugcagcuguuucugucucgaacgg

SEQ ID NO: 350193 - RNA, 23 nt, Human
cagagugcuggaauuacaagcau

SEQ ID NO: 350194 - RNA, 23 nt, Human
cagagugcuggaauuacuggcau

SEQ ID NO: 350195 - RNA, 23 nt, Human
cagagugcugggauuacaggcau

SEQ ID NO: 350196 - RNA, 23 nt, Human
cagagugcugggauuacaggcgu

SEQ ID NO: 350197 - RNA, 32 nt, Human
cagagugcugggauuacagggggagccacugu

SEQ ID NO: 350198 - RNA, 24 nt, Human
cagagugcugggauuuacaggcau

SEQ ID NO: 350199 - RNA, 32 nt, Human
cagagugcuggguugggauuacaggcgugagc

SEQ ID NO: 350200 - RNA, 32 nt, Human
cagaguggaaaaagauuccaauucugcagaga

SEQ ID NO: 350201 - RNA, 32 nt, Human
cagaguggaaggagggggaagcagcaggacac

SEQ ID NO: 350202 - RNA, 32 nt, Human
cagaguggaaggguugggggaggcgauaaaga

SEQ ID NO: 350203 - RNA, 32 nt, Human
cagaguggacccuggcccuggcccaggcugug

SEQ ID NO: 350204 - RNA, 32 nt, Human
cagaguggagccagggggacaguggagccgag

SEQ ID NO: 350205 - RNA, 32 nt, Human
cagaguggagccauggcuagaggcaggaagau

SEQ ID NO: 350206 - RNA, 32 nt, Human
cagaguggagccuccugcucuccuggaccagc

SEQ ID NO: 350207 - RNA, 15 nt, Human
cagaguggagucaag

SEQ ID NO: 350208 - RNA, 32 nt, Human
cagaguggaugaccacacuagcacagaagaga

SEQ ID NO: 350209 - RNA, 32 nt, Human
cagaguggaugcuucugccuagugacagguua

SEQ ID NO: 350210 - RNA, 32 nt, Human
cagaguggcaguacaccugugccuuguuccuc

SEQ ID NO: 350211 - RNA, 32 nt, Human
cagaguggcgaggcugagcacugucacagggg

SEQ ID NO: 350212 - RNA, 32 nt, Human
cagaguggcuagaaugaugucaccagcaccag

SEQ ID NO: 350213 - RNA, 32 nt, Human
cagaguggcuccugccacaugccagaaugucc

SEQ ID NO: 350214 - RNA, 32 nt, Human
cagaguggcugaugcugcaaguuaugucuaag

SEQ ID NO: 350215 - RNA, 32 nt, Human
cagaguggcugcaggccaggccuggagucccc

SEQ ID NO: 350216 - RNA, 32 nt, Human
cagaguggcuuacaccuauaaucccagcaauu

SEQ ID NO: 350217 - RNA, 32 nt, Human
cagaguggcuuccaucucagcacucugugggu

SEQ ID NO: 350218 - RNA, 32 nt, Human
cagagugggaagaccucagccuuggguggcuu

SEQ ID NO: 350219 - RNA, 32 nt, Human
cagagugggaagagaguaccggcaucggguuu

SEQ ID NO: 350220 - RNA, 32 nt, Human
cagagugggaggcagagaagugugcucagagg

SEQ ID NO: 350221 - RNA, 32 nt, Human
cagagugggaggucagggcaguauuuaaaaau

SEQ ID NO: 350222 - RNA, 23 nt, Human
cagagugggcucccugccccucu

SEQ ID NO: 350223 - RNA, 32 nt, Human
cagagugggcugggaccagacuuuguucucuu

SEQ ID NO: 350224 - RNA, 32 nt, Human
cagaguggggcugagugggcgcugagccaggc

SEQ ID NO: 350225 - RNA, 20 nt, Human
cagaguggggggccuuccuc

SEQ ID NO: 350226 - RNA, 23 nt, Human
cagaguggucagugcugaccccu

SEQ ID NO: 350227 - RNA, 19 nt, Human
cagaguggucccugcccuc

SEQ ID NO: 350228 - RNA, 32 nt, Human
cagaguguauuuuuguaauuccucuagcuacc

SEQ ID NO: 350229 - RNA, 32 nt, Human
cagagugucagaaagaaagaaugagaacuaac

SEQ ID NO: 350230 - RNA, 24 nt, Human
cagaguguccuuccucuguccucu

SEQ ID NO: 350231 - RNA, 32 nt, Human
cagagugucuggauggaaccugagcugggucu

SEQ ID NO: 350232 - RNA, 32 nt, Human
cagagugugaugggccugccuccugggcuggu

SEQ ID NO: 350233 - RNA, 32 nt, Human
cagagugugauggggaggagggacaggaagac

SEQ ID NO: 350234 - RNA, 32 nt, Human
cagaguguggaggucaggauggcugcgggcaa

SEQ ID NO: 350235 - RNA, 32 nt, Human
cagagugugucaugccugcaaucccagcacuu

SEQ ID NO: 350236 - RNA, 32 nt, Human
cagaguguucucucgacacugccagccccgug

SEQ ID NO: 350237 - RNA, 23 nt, Human
cagaguuaagggaaagaggagga

SEQ ID NO: 350238 - RNA, 32 nt, Human
cagaguuacagguaggucccaaaaguggccag

SEQ ID NO: 350239 - RNA, 32 nt, Human
cagaguuaguaagccucggcuugucaccugcu

SEQ ID NO: 350240 - RNA, 32 nt, Human
cagaguucaagaccagccugggcaauguagua

SEQ ID NO: 350241 - RNA, 21 nt, Human
cagaguucaagagugguggca

SEQ ID NO: 350242 - RNA, 32 nt, Human
cagaguucaagaguucaagaccagccugggca

SEQ ID NO: 350243 - RNA, 24 nt, Human
cagaguucaagcaauucuccugcc

SEQ ID NO: 350244 - RNA, 25 nt, Human
cagaguucaagcaauucuccuuccu

SEQ ID NO: 350245 - RNA, 32 nt, Human
cagaguucaagcaauucuccuuccucagccuc

SEQ ID NO: 350246 - RNA, 32 nt, Human
cagaguucaagcacauuccuaccugcagggca

SEQ ID NO: 350247 - RNA, 32 nt, Human
cagaguucacuauucuaucugccauuagaccu

SEQ ID NO: 350248 - RNA, 18 nt, Human
cagaguucacuccaggaa

SEQ ID NO: 350249 - RNA, 18 nt, Human
cagaguucacuccuuccu

SEQ ID NO: 350250 - RNA, 32 nt, Human
cagaguucaugcucccuucgacaucauuaaua

SEQ ID NO: 350251 - RNA, 32 nt, Human
cagaguuccagaccagccuggccaacauagug

SEQ ID NO: 350252 - RNA, 32 nt, Human
cagaguuccaggcaaucaaaaugagugcaggu

SEQ ID NO: 350253 - RNA, 32 nt, Human
cagaguuccagggucagagagcauggaguacu

SEQ ID NO: 350254 - RNA, 32 nt, Human
cagaguuccucuucuugcuucuugaaucacau

SEQ ID NO: 350255 - RNA, 32 nt, Human
cagaguuccuguacaagguuccuggccugugg

SEQ ID NO: 350256 - RNA, 32 nt, Human
cagaguucugguuccagcuccgaccacucauu

SEQ ID NO: 350257 - RNA, 32 nt, Human
cagaguucuuccuuccccaucugggccuucau

SEQ ID NO: 350258 - RNA, 32 nt, Human
cagaguugagauauaggguucauccauguugc

SEQ ID NO: 350259 - RNA, 32 nt, Human
cagaguugagaucaucauugcaaaguucucug

SEQ ID NO: 350260 - RNA, 32 nt, Human
cagaguugcaggucaccuccccuaccugcuuc

SEQ ID NO: 350261 - RNA, 32 nt, Human
cagaguugccucuccuccuccucuuccccaac

SEQ ID NO: 350262 - RNA, 32 nt, Human
cagaguugcugucaguucauugguagagaugc

SEQ ID NO: 350263 - RNA, 32 nt, Human
cagaguuggaaacccucaccaacuggccucuu

SEQ ID NO: 350264 - RNA, 32 nt, Human
cagaguuggaaagaucaagaaagagagaaugc

SEQ ID NO: 350265 - RNA, 32 nt, Human
cagaguugggaaaaacaacagguuugaguccu

SEQ ID NO: 350266 - RNA, 32 nt, Human
cagaguugggaggaucaccugaugucaggggu

SEQ ID NO: 350267 - RNA, 32 nt, Human
cagaguugguuuccuuccuuccuuccuuccuu

SEQ ID NO: 350268 - RNA, 32 nt, Human
cagaguugucaguaaagaaagagaaaauugca

SEQ ID NO: 350269 - RNA, 32 nt, Human
cagaguuuaaguuucaggagaaaacaggaaca

SEQ ID NO: 350270 - RNA, 32 nt, Human
cagaguuuaccugagaugugcaucuggggucc

SEQ ID NO: 350271 - RNA, 32 nt, Human
cagaguuucaccugcccacacaggguccguug

SEQ ID NO: 350272 - RNA, 18 nt, Human
cagaguuucacucuguca

SEQ ID NO: 350273 - RNA, 32 nt, Human
cagaguuuccaaguugggacccagaagguggg

SEQ ID NO: 350274 - RNA, 32 nt, Human
cagaguuuccauuucaggaggucugggaucag

SEQ ID NO: 350275 - RNA, 32 nt, Human
cagaguuucgaccuggaggaguacagccucuc

SEQ ID NO: 350276 - RNA, 32 nt, Human
cagaguuugaaaccagccuagguaacauagug

SEQ ID NO: 350277 - RNA, 32 nt, Human
cagaguuugcgcuggccagaggguuccagaaa

SEQ ID NO: 350278 - RNA, 32 nt, Human
cagaguuugugucuuucuuucuguccauaacu

SEQ ID NO: 350279 - RNA, 32 nt, Human
cagaguuuuagccaaagguguacuuacuuccu

SEQ ID NO: 350280 - RNA, 32 nt, Human
cagaguuuugcucuugccguccaggcuggagu

SEQ ID NO: 350281 - RNA, 32 nt, Human
cagaguuuugcucuuguuguccaggcuggagu

SEQ ID NO: 350282 - RNA, 32 nt, Human
cagauaaaacucagaggaaauuugcacagaug

SEQ ID NO: 350283 - RNA, 32 nt, Human
cagauaaagcacacuguggggccaggcaugac

SEQ ID NO: 350284 - RNA, 32 nt, Human
cagauaaaggaaaaaguuuucuucucacaaaa

SEQ ID NO: 350285 - RNA, 32 nt, Human
cagauaaauagaaguacagugaggucuauagc

SEQ ID NO: 350286 - RNA, 32 nt, Human
cagauaaauccuuaacauuucucuccaccuua

SEQ ID NO: 350287 - RNA, 32 nt, Human
cagauaacacaugcuguuucuacuuguaaaug

SEQ ID NO: 350288 - RNA, 32 nt, Human
cagauaacacuguaauccaccuccagguuucc

SEQ ID NO: 350289 - RNA, 32 nt, Human
cagauaacauguccacggauucuugacagaga

SEQ ID NO: 350290 - RNA, 32 nt, Human
cagauaaccaugucagccacaguuguagaugc

SEQ ID NO: 350291 - RNA, 32 nt, Human
cagauaacgggccggcccugccuccacguggc

SEQ ID NO: 350292 - RNA, 32 nt, Human
cagauaacuccuuuguggccugggcaggaugc

SEQ ID NO: 350293 - RNA, 32 nt, Human
cagauaacugaggaggggagaggugggccgua

SEQ ID NO: 350294 - RNA, 32 nt, Human
cagauaacuucugcuuccugucaacucauccc

SEQ ID NO: 350295 - RNA, 32 nt, Human
cagauaagaaaaucacagauuucacaaaaccu

SEQ ID NO: 350296 - RNA, 32 nt, Human
cagauaagaaaauuaaaguuacuuuucucaaa

SEQ ID NO: 350297 - RNA, 32 nt, Human
cagauaagaggaagugggaagagagguggucu

SEQ ID NO: 350298 - RNA, 32 nt, Human
cagauaagagguggaggaggugacagggagcu

SEQ ID NO: 350299 - RNA, 32 nt, Human
cagauaagaguguugcuguugaucaucuuugc

SEQ ID NO: 350300 - RNA, 22 nt, Human
cagauaagcaaaaaaguccuug

SEQ ID NO: 350301 - RNA, 32 nt, Human
cagauaagcagcccaggaagaaaugaaacucc

SEQ ID NO: 350302 - RNA, 32 nt, Human
cagauaagcccaaagacagcaacuucuccacu

SEQ ID NO: 350303 - RNA, 32 nt, Human
cagauaauaaccauacacugaccucauacuug

SEQ ID NO: 350304 - RNA, 32 nt, Human
cagauaaucggccagagacuguuucucuacuc

SEQ ID NO: 350305 - RNA, 32 nt, Human
cagauaaugcugccuugacacacacaugcacg

SEQ ID NO: 350306 - RNA, 32 nt, Human
cagauaaugguaguguagucagugacuaaaau

SEQ ID NO: 350307 - RNA, 32 nt, Human
cagauaauucuuuagaugaauguuucuuagga

SEQ ID NO: 350308 - RNA, 32 nt, Human
cagauaauuugucagcagcuccaagaguggga

SEQ ID NO: 350309 - RNA, 32 nt, Human
cagauacaacucagcauuaaaaagcuaucuuu

SEQ ID NO: 350310 - RNA, 32 nt, Human
cagauacagaaaccauccuauuucaggauuug

SEQ ID NO: 350311 - RNA, 18 nt, Human
cagauacagcaaguugug

SEQ ID NO: 350312 - RNA, 32 nt, Human
cagauacaguauauucucaucaacuggaaggu

SEQ ID NO: 350313 - RNA, 32 nt, Human
cagauacagugcucugcaggccugcuguggga

SEQ ID NO: 350314 - RNA, 32 nt, Human
cagauacaucacacacagacuucucaccuguu

SEQ ID NO: 350315 - RNA, 32 nt, Human
cagauacaucgaaaaguugaccaaugaaauga

SEQ ID NO: 350316 - RNA, 32 nt, Human
cagauacaugauaacacaucugaacaggguua

SEQ ID NO: 350317 - RNA, 24 nt, Human
cagauacccggguaacaguccuca

SEQ ID NO: 350318 - RNA, 32 nt, Human
cagauaccuuaaaucaucucugucaaguucaa

SEQ ID NO: 350319 - RNA, 32 nt, Human
cagauacuagccuauccucuggcugcucccag

SEQ ID NO: 350320 - RNA, 32 nt, Human
cagauacucuuuccuuuccucucuccuguuuu

SEQ ID NO: 350321 - RNA, 32 nt, Human
cagauacugagucucaauggacuucuuguuua

SEQ ID NO: 350322 - RNA, 32 nt, Human
cagauacugguccugcauucugacugagauug

SEQ ID NO: 350323 - RNA, 32 nt, Human
cagauacugugccuggcgggucuucagcgaua

SEQ ID NO: 350324 - RNA, 32 nt, Human
cagauacuguucuggacugugccuguuaaguu

SEQ ID NO: 350325 - RNA, 32 nt, Human
cagauacuuauccauuaugugucuauaguuca

SEQ ID NO: 350326 - RNA, 32 nt, Human
cagauacuucuuucuuucucucuggaagacuu

SEQ ID NO: 350327 - RNA, 32 nt, Human
cagauacuugggaggcugaggguggagaaucg

SEQ ID NO: 350328 - RNA, 32 nt, Human
cagauacuugggaggcugaggugggaggguug

SEQ ID NO: 350329 - RNA, 32 nt, Human
cagauagaacuggucagacaaggccaaugggu

SEQ ID NO: 350330 - RNA, 32 nt, Human
cagauagaagucuuucuaugcaaagauuaaag

SEQ ID NO: 350331 - RNA, 32 nt, Human
cagauagagcuggaguuggccacggccaagaa

SEQ ID NO: 350332 - RNA, 32 nt, Human
cagauagagguguggagguagagccagccccu

SEQ ID NO: 350333 - RNA, 32 nt, Human
cagauagauaccuuauuuugcauauguuugaa

SEQ ID NO: 350334 - RNA, 32 nt, Human
cagauagcacugggugugagaaugaucaagga

SEQ ID NO: 350335 - RNA, 32 nt, Human
cagauagccccacugcacuccagccuggguga

SEQ ID NO: 350336 - RNA, 32 nt, Human
cagauagcccgaggccagaggacagcggaauc

SEQ ID NO: 350337 - RNA, 32 nt, Human
cagauagccucgggugcugccuguagucaugc

SEQ ID NO: 350338 - RNA, 32 nt, Human
cagauagcucacugccagagcagccuggguuc

SEQ ID NO: 350339 - RNA, 22 nt, Human
cagauagcugggacuacaggca

SEQ ID NO: 350340 - RNA, 32 nt, Human
cagauaggccgcccaugcucucagccuuucuc

SEQ ID NO: 350341 - RNA, 21 nt, Human
cagauagggaaauagcacaga

SEQ ID NO: 350342 - RNA, 32 nt, Human
cagauagggaccggugaacaccugauuccaaa

SEQ ID NO: 350343 - RNA, 32 nt, Human
cagauagggccuuccuacagagcagcaagagu

SEQ ID NO: 350344 - RNA, 32 nt, Human
cagauaggggcugaggcucagagagggcaagu

SEQ ID NO: 350345 - RNA, 32 nt, Human
cagauaggucucaaacuccugacuucagguga

SEQ ID NO: 350346 - RNA, 32 nt, Human
cagauaggucugccucugccuuccagcuccca

SEQ ID NO: 350347 - RNA, 31 nt, Human
cagauaggugagagacaaacaguugcacucu

SEQ ID NO: 350348 - RNA, 31 nt, Human
cagauagucacagucaagguuggagagucuc

SEQ ID NO: 350349 - RNA, 32 nt, Human
cagauagucaucucaguccaaggaucccaaaa

SEQ ID NO: 350350 - RNA, 32 nt, Human
cagauagugccacugcacuccagccuggguga

SEQ ID NO: 350351 - RNA, 32 nt, Human
cagauauacacauucccaugcacugacauaag

SEQ ID NO: 350352 - RNA, 32 nt, Human
cagauauagaagcauggaaaccugauagggcu

SEQ ID NO: 350353 - RNA, 32 nt, Human
cagauauaggacuucugagcugagaggaccuc

SEQ ID NO: 350354 - RNA, 32 nt, Human
cagauaucagccacuuucacauuucauuucau

SEQ ID NO: 350355 - RNA, 32 nt, Human
cagauaucccuaucccaaccucuccuauggga

SEQ ID NO: 350356 - RNA, 32 nt, Human
cagauaugaaguauucuuggaaugcaauaagu

SEQ ID NO: 350357 - RNA, 32 nt, Human
cagauaugaauggcuaauacuccauuguucug

SEQ ID NO: 350358 - RNA, 32 nt, Human
cagauaugaugcggccaaucucugucuccaaa

SEQ ID NO: 350359 - RNA, 32 nt, Human
cagauauggucuggaguggaccuccagcaaac

SEQ ID NO: 350360 - RNA, 32 nt, Human
cagauauguuuuaaagacaaagauccauguag

SEQ ID NO: 350361 - RNA, 32 nt, Human
cagauauuauucagucuuauuuccuaagauuu

SEQ ID NO: 350362 - RNA, 32 nt, Human
cagauauucaucguaagucucccuucaccugu

SEQ ID NO: 350363 - RNA, 32 nt, Human
cagauauuccaccuguaauagcacuuuggaac

SEQ ID NO: 350364 - RNA, 32 nt, Human
cagauauuccagggucauuuguucucucccug

SEQ ID NO: 350365 - RNA, 32 nt, Human
cagauauuccccagguuggcaaugguuuccuu

SEQ ID NO: 350366 - RNA, 32 nt, Human
cagauauugucuuacucacauuuccuuugcuu

SEQ ID NO: 350367 - RNA, 32 nt, Human
cagauauuuacuugguaaagugcaguggggaa

SEQ ID NO: 350368 - RNA, 32 nt, Human
cagauauuuucuuaguagugcagaccuuuacc

SEQ ID NO: 350369 - RNA, 32 nt, Human
cagaucaaggagaacccaggaguuucaaagaa

SEQ ID NO: 350370 - RNA, 32 nt, Human
cagaucacacacaugcacacacacauaugcac

SEQ ID NO: 350371 - RNA, 32 nt, Human
cagaucacaccauugcacuccagccuaggcaa

SEQ ID NO: 350372 - RNA, 17 nt, Human
cagaucacagacauggu

SEQ ID NO: 350373 - RNA, 32 nt, Human
cagaucacaggcaaaaagcaaaacuuugaagu

SEQ ID NO: 350374 - RNA, 32 nt, Human
cagaucacaucuaacuuugucauuccaaguga

SEQ ID NO: 350375 - RNA, 32 nt, Human
cagaucaccaacaaaaaugaaggcggcagaug

SEQ ID NO: 350376 - RNA, 19 nt, Human
cagaucaccugaggucagg

SEQ ID NO: 350377 - RNA, 32 nt, Human
cagaucacgccacugcacucuagccugggcaa

SEQ ID NO: 350378 - RNA, 32 nt, Human
cagaucacgccagugcacuccagccugagaga

SEQ ID NO: 350379 - RNA, 32 nt, Human
cagaucacgggguuaggaguucaggaccagcc

SEQ ID NO: 350380 - RNA, 32 nt, Human
cagaucacgugggguccagagagcagacaucu

SEQ ID NO: 350381 - RNA, 32 nt, Human
cagaucacugcaaccuccaccucccagguuca

SEQ ID NO: 350382 - RNA, 32 nt, Human
cagaucacugcaaccuccgccuccuggguuca

SEQ ID NO: 350383 - RNA, 32 nt, Human
cagaucacugcaaccucugccucccggguuca

SEQ ID NO: 350384 - RNA, 32 nt, Human
cagaucacugcaaccucugccuccuggguuca

SEQ ID NO: 350385 - RNA, 32 nt, Human
cagaucacuugagaucaggaccagccugguca

SEQ ID NO: 350386 - RNA, 32 nt, Human
cagaucacuugaguucaagaccagccuggcca

SEQ ID NO: 350387 - RNA, 32 nt, Human
cagaucagccacuugcugacccugguucuuaa

SEQ ID NO: 350388 - RNA, 32 nt, Human
cagaucagcgugggguggaggagaaguggagu

SEQ ID NO: 350389 - RNA, 32 nt, Human
cagaucaggcaaccaaccacacaaaguuucua

SEQ ID NO: 350390 - RNA, 17 nt, Human
cagaucaggccggggca

SEQ ID NO: 350391 - RNA, 32 nt, Human
cagaucaggccuucuuugguucuugggugguu

SEQ ID NO: 350392 - RNA, 19 nt, Human
cagaucaggguacuugcug

SEQ ID NO: 350393 - RNA, 32 nt, Human
cagaucagugcagaacucauggaggaggcuuu

SEQ ID NO: 350394 - RNA, 32 nt, Human
cagaucaguguaccauuugccucccgggcuca

SEQ ID NO: 350395 - RNA, 32 nt, Human
cagaucaucauguuaugcaaagaccagugaga

SEQ ID NO: 350396 - RNA, 32 nt, Human
cagaucaugccacugcacuccagccugggcaa

SEQ ID NO: 350397 - RNA, 32 nt, Human
cagauccaaauacaaggaagucuggaaaacau

SEQ ID NO: 350398 - RNA, 32 nt, Human
cagauccaacaagauauuggauagcaggcaaa

SEQ ID NO: 350399 - RNA, 32 nt, Human
cagauccaagggaaccucagaaauccauugaa

SEQ ID NO: 350400 - RNA, 22 nt, Human
cagauccaccgacccguagcau

SEQ ID NO: 350401 - RNA, 32 nt, Human
cagauccaguuagcaaaagccuaggacuuguu

SEQ ID NO: 350402 - RNA, 32 nt, Human
cagaucccaauuggccagaauauggcacgugc

SEQ ID NO: 350403 - RNA, 32 nt, Human
cagaucccagcagccuguuggggcaggggugc

SEQ ID NO: 350404 - RNA, 32 nt, Human
cagauccccacuguccuaccaguugcccuagc

SEQ ID NO: 350405 - RNA, 32 nt, Human
cagaucccccuucccuucuuccccugccggcc

SEQ ID NO: 350406 - RNA, 32 nt, Human
cagaucccccuucucuccugcuuccuccaggg

SEQ ID NO: 350407 - RNA, 32 nt, Human
cagauccccuccuguaaguggccaggcauucu

SEQ ID NO: 350408 - RNA, 32 nt, Human
cagauccccugaacuaccaaauagcugugggc

SEQ ID NO: 350409 - RNA, 20 nt, Human
cagaucccucccagccccau

SEQ ID NO: 350410 - RNA, 19 nt, Human
cagaucccugauccuucca

SEQ ID NO: 350411 - RNA, 32 nt, Human
cagauccgcaggcuggagagcgaagcacgagg

SEQ ID NO: 350412 - RNA, 32 nt, Human
cagauccuaauuggaaauuuagcaauaaggag

SEQ ID NO: 350413 - RNA, 32 nt, Human
cagauccucaguccucccuugacuucacgacu

SEQ ID NO: 350414 - RNA, 32 nt, Human
cagauccucagugcagcucugccagcaucaag

SEQ ID NO: 350415 - RNA, 32 nt, Human
cagauccugcacaagauagcuggacuucucua

SEQ ID NO: 350416 - RNA, 23 nt, Human
cagauccugcguaauggcagcau

SEQ ID NO: 350417 - RNA, 32 nt, Human
cagauccuggagggcuuugggcuuccagguag

SEQ ID NO: 350418 - RNA, 32 nt, Human
cagauccuggggaccugcaggagcuggaucag

SEQ ID NO: 350419 - RNA, 32 nt, Human
cagauccugggugacaauggcaaagagauucg

SEQ ID NO: 350420 - RNA, 32 nt, Human
cagauccuucuaaaacaacagucacauugaug

SEQ ID NO: 350421 - RNA, 32 nt, Human
cagauccuugauaaaugccucaugaagaccaa

SEQ ID NO: 350422 - RNA, 32 nt, Human
cagaucgaaccauuguacuccagccuggguga

SEQ ID NO: 350423 - RNA, 32 nt, Human
cagaucgagauggagaaggucuagcaccuuug

SEQ ID NO: 350424 - RNA, 32 nt, Human
cagaucgagccacugcauuccagccugggcga

SEQ ID NO: 350425 - RNA, 32 nt, Human
cagaucgaggcaccuccaccaacagcccacgc

SEQ ID NO: 350426 - RNA, 32 nt, Human
cagaucgcacaagggggcugccccagagggug

SEQ ID NO: 350427 - RNA, 32 nt, Human
cagaucgcaccacugcacuccagucuggcaac

SEQ ID NO: 350428 - RNA, 32 nt, Human
cagaucgcgacacugcacuccagccugggcaa

SEQ ID NO: 350429 - RNA, 32 nt, Human
cagaucgcgccauugcacuccagccuggguaa

SEQ ID NO: 350430 - RNA, 32 nt, Human
cagaucgcgccgcugcacuccagccugggcgg

SEQ ID NO: 350431 - RNA, 32 nt, Human
cagaucggggaugugcaacaaauuccauuuca

SEQ ID NO: 350432 - RNA, 32 nt, Human
cagaucggugacuccuaaaaucugagacagga

SEQ ID NO: 350433 - RNA, 32 nt, Human
cagaucguccacaccacacccucuuucaggga

SEQ ID NO: 350434 - RNA, 32 nt, Human
cagaucgugccacugcacuccagccuggguga

SEQ ID NO: 350435 - RNA, 32 nt, Human
cagaucuaagcacacaugggcaucaaaccaga

SEQ ID NO: 350436 - RNA, 32 nt, Human
cagaucuacagcuccuggauaauugcuugauu

SEQ ID NO: 350437 - RNA, 32 nt, Human
cagaucuagaagcgggcaagucucagcugagg

SEQ ID NO: 350438 - RNA, 32 nt, Human
cagaucuagcccaucuuacuccagguuugaua

SEQ ID NO: 350439 - RNA, 32 nt, Human
cagaucuaggcaggccuaggauggugcugucu

SEQ ID NO: 350440 - RNA, 32 nt, Human
cagaucuauaaggucacaugcuuuuaaaauag

SEQ ID NO: 350441 - RNA, 32 nt, Human
cagaucucaccauugcacuccagccugggcga

SEQ ID NO: 350442 - RNA, 32 nt, Human
cagaucucacuggucauauagcucuucuaggu

SEQ ID NO: 350443 - RNA, 32 nt, Human
cagaucucagccagaugcugccgggagggagg

SEQ ID NO: 350444 - RNA, 32 nt, Human
cagaucucaguguggcucucucuggagacaaa

SEQ ID NO: 350445 - RNA, 32 nt, Human
cagaucuccacuccucuccaggagcuagccug

SEQ ID NO: 350446 - RNA, 32 nt, Human
cagaucuccagguucuggagguuggagguucc

SEQ ID NO: 350447 - RNA, 32 nt, Human
cagaucucccuuucccccucccccaucucuug

SEQ ID NO: 350448 - RNA, 19 nt, Human
cagaucuccgcacagggga

SEQ ID NO: 350449 - RNA, 32 nt, Human
cagaucuccuagcuacugguccugggccauuu

SEQ ID NO: 350450 - RNA, 32 nt, Human
cagaucuccuggcaaaggccccagcaucuccc

SEQ ID NO: 350451 - RNA, 32 nt, Human
cagaucuccuuucaaaguaguggcuuucugga

SEQ ID NO: 350452 - RNA, 32 nt, Human
cagaucucugcacuucucagucccagaucccu

SEQ ID NO: 350453 - RNA, 32 nt, Human
cagaucucuggcccaucaggcuuucuaaauuc

SEQ ID NO: 350454 - RNA, 32 nt, Human
cagaucucuugugcccaggaguuuuaagacua

SEQ ID NO: 350455 - RNA, 32 nt, Human
cagaucugagccaccgccugccagugugagag

SEQ ID NO: 350456 - RNA, 32 nt, Human
cagaucugcacuccugucucuugggaagcagu

SEQ ID NO: 350457 - RNA, 32 nt, Human
cagaucugccaagaaccuucgaauucaugaaa

SEQ ID NO: 350458 - RNA, 32 nt, Human
cagaucugccacccucuagcugggugacuuuu

SEQ ID NO: 350459 - RNA, 32 nt, Human
cagaucugcccguggaucacugaagauuccug

SEQ ID NO: 350460 - RNA, 32 nt, Human
cagaucugcccuucugagaugcugaccaucca

SEQ ID NO: 350461 - RNA, 32 nt, Human
cagaucugccuaaggacuucuuuaauuuugga

SEQ ID NO: 350462 - RNA, 32 nt, Human
cagaucugcucacugccaggcuccucuccccu

SEQ ID NO: 350463 - RNA, 22 nt, Human
cagaucugcuccccagcaucuu

SEQ ID NO: 350464 - RNA, 22 nt, Human
cagaucugcucuccagcaucuu

SEQ ID NO: 350465 - RNA, 17 nt, Human
cagaucuggacuaucca

SEQ ID NO: 350466 - RNA, 32 nt, Human
cagaucuguguguguacugucggcgcaugaag

SEQ ID NO: 350467 - RNA, 28 nt, Human
cagaucuuaaaugcugccuaucauguug

SEQ ID NO: 350468 - RNA, 16 nt, Human
cagaucuuccucuaca

SEQ ID NO: 350469 - RNA, 32 nt, Human
cagaucuuccuuguggccuuccucgcccacuc

SEQ ID NO: 350470 - RNA, 32 nt, Human
cagaucuugacagaaacauggccuguuuauuc

SEQ ID NO: 350471 - RNA, 32 nt, Human
cagaucuuuguccuaaccacaagguuccccuu

SEQ ID NO: 350472 - RNA, 32 nt, Human
cagaucuuuuggggagggugugcuuggcaggg

SEQ ID NO: 350473 - RNA, 32 nt, Human
cagaugaaacucaaggaaauucuucagagcaa

SEQ ID NO: 350474 - RNA, 22 nt, Human
cagaugaagaaaaugaggugca

SEQ ID NO: 350475 - RNA, 32 nt, Human
cagaugaagacugaaagccaaagaugugaagu

SEQ ID NO: 350476 - RNA, 28 nt, Human
cagaugaaggaagaaugggugaaauguu

SEQ ID NO: 350477 - RNA, 32 nt, Human
cagaugaaggaguuuucaggagcuuuugacac

SEQ ID NO: 350478 - RNA, 32 nt, Human
cagaugaauaguaucacaucauuaucaauuuc

SEQ ID NO: 350479 - RNA, 32 nt, Human
cagaugaaugcagccagcuauaugaagcacuu

SEQ ID NO: 350480 - RNA, 32 nt, Human
cagaugacacagacaagaguuccuggagaaug

SEQ ID NO: 350481 - RNA, 32 nt, Human
cagaugacacagauggagucuugcucugucac

SEQ ID NO: 350482 - RNA, 20 nt, Human
cagaugacagauggggugca

SEQ ID NO: 350483 - RNA, 18 nt, Human
cagaugacaucugucucc

SEQ ID NO: 350484 - RNA, 32 nt, Human
cagaugaccucaccauccacacucagacauau

SEQ ID NO: 350485 - RNA, 32 nt, Human
cagaugaccugagaccgguguuccggaaacug

SEQ ID NO: 350486 - RNA, 32 nt, Human
cagaugacgcaugaagcaaggacucuggcuac

SEQ ID NO: 350487 - RNA, 32 nt, Human
cagaugacuaggcccacugcagguccugccag

SEQ ID NO: 350488 - RNA, 32 nt, Human
cagaugacucagugaagaaacugaggcuucuc

SEQ ID NO: 350489 - RNA, 32 nt, Human
cagaugacuucucaucucuccccacaccauga

SEQ ID NO: 350490 - RNA, 32 nt, Human
cagaugagaaaagacuuggguuggagugaaau

SEQ ID NO: 350491 - RNA, 28 nt, Human
cagaugagagccaaguucagagccggag

SEQ ID NO: 350492 - RNA, 32 nt, Human
cagaugagcagauaccccuggccacccauguc

SEQ ID NO: 350493 - RNA, 24 nt, Human
cagaugagccccaucugagcacau

SEQ ID NO: 350494 - RNA, 32 nt, Human
cagaugagccuacugccucacaacagccucca

SEQ ID NO: 350495 - RNA, 32 nt, Human
cagaugagcugcagaugcuuaccuaccacggc

SEQ ID NO: 350496 - RNA, 32 nt, Human
cagaugagcuuggaagcagauccgucagcccc

SEQ ID NO: 350497 - RNA, 31 nt, Human
cagaugaggaaacugaggcucagaucuuggg

SEQ ID NO: 350498 - RNA, 22 nt, Human
cagaugaggaaacugcgccuca

SEQ ID NO: 350499 - RNA, 32 nt, Human
cagaugaggaagcugaggcccagcaaguuaag

SEQ ID NO: 350500 - RNA, 32 nt, Human
cagaugaggagagagaagaaacggaagaggaa

SEQ ID NO: 350501 - RNA, 32 nt, Human
cagaugaggagggagagaaggaggccgccaga

SEQ ID NO: 350502 - RNA, 32 nt, Human
cagaugaggcgagaggaggaggaggaggagga

SEQ ID NO: 350503 - RNA, 32 nt, Human
cagaugauauggaagaagauccuuaucacuga

SEQ ID NO: 350504 - RNA, 32 nt, Human
cagaugauauguccuugaagcuggcaggggau

SEQ ID NO: 350505 - RNA, 20 nt, Human
cagaugaucacaguccccca

SEQ ID NO: 350506 - RNA, 32 nt, Human
cagaugaucauggucugccucaacugucuggu

SEQ ID NO: 350507 - RNA, 19 nt, Human
cagaugauggggagcacuu

SEQ ID NO: 350508 - RNA, 28 nt, Human
cagaugauggucaguuguccaagcgggc

SEQ ID NO: 350509 - RNA, 32 nt, Human
cagaugauguacuggaaaaugcucagaagaug

SEQ ID NO: 350510 - RNA, 32 nt, Human
cagaugauucauuggauugggggugaguguuu

SEQ ID NO: 350511 - RNA, 32 nt, Human
cagaugcaaaacgaaauggaccuucacacagc

SEQ ID NO: 350512 - RNA, 32 nt, Human
cagaugcaaagucaugggcacaugucaagaaa

SEQ ID NO: 350513 - RNA, 32 nt, Human
cagaugcaagcuuuggcucuuucauaaaaagu

SEQ ID NO: 350514 - RNA, 32 nt, Human
cagaugcaaucacuuuuggacaugcuuuugca

SEQ ID NO: 350515 - RNA, 32 nt, Human
cagaugcacaacacuccuccagucuugugggg

SEQ ID NO: 350516 - RNA, 32 nt, Human
cagaugcacacagcccugcuuuuaugagaauu

SEQ ID NO: 350517 - RNA, 20 nt, Human
cagaugcacggcccaagggg

SEQ ID NO: 350518 - RNA, 32 nt, Human
cagaugcagaagcagaagagggaggggaaacc

SEQ ID NO: 350519 - RNA, 32 nt, Human
cagaugcagaagguuucucuggauagcacacc

SEQ ID NO: 350520 - RNA, 32 nt, Human
cagaugcagccugcagucucgccuaauggagc

SEQ ID NO: 350521 - RNA, 28 nt, Human
cagaugcaggaggcagauaucaguggcu

SEQ ID NO: 350522 - RNA, 32 nt, Human
cagaugcagguggugcccgcccggccucucac

SEQ ID NO: 350523 - RNA, 32 nt, Human
cagaugcauauagacacacauacauaauggua

SEQ ID NO: 350524 - RNA, 20 nt, Human
cagaugccaaaacaaaggaa

SEQ ID NO: 350525 - RNA, 32 nt, Human
cagaugccaaaccaaagacagauugcuuaacc

SEQ ID NO: 350526 - RNA, 32 nt, Human
cagaugccagcacugacucaggaacagcaagu

SEQ ID NO: 350527 - RNA, 32 nt, Human
cagaugcccccaaaucagagcucacagugagu

SEQ ID NO: 350528 - RNA, 32 nt, Human
cagaugcccccaaaucagagcucacagugggu

SEQ ID NO: 350529 - RNA, 32 nt, Human
cagaugccccgagaagagaugacuaggcaucu

SEQ ID NO: 350530 - RNA, 19 nt, Human
cagaugccccuucuaggaa

SEQ ID NO: 350531 - RNA, 32 nt, Human
cagaugccuccugcuuggauucugagugguca

SEQ ID NO: 350532 - RNA, 32 nt, Human
cagaugccugagccuuuguccaaagugagguc

SEQ ID NO: 350533 - RNA, 32 nt, Human
cagaugccuucucuaagacagcuccuguguac

SEQ ID NO: 350534 - RNA, 32 nt, Human
cagaugccuuucugccucugucgauuuuaggg

SEQ ID NO: 350535 - RNA, 32 nt, Human
cagaugcggcuguuuggcagaguccuguccug

SEQ ID NO: 350536 - RNA, 32 nt, Human
cagaugcgugccacuacguccgucugauguuu

SEQ ID NO: 350537 - RNA, 21 nt, Human
cagaugcuagagccucugccu

SEQ ID NO: 350538 - RNA, 32 nt, Human
cagaugcuagcacaugcccuaaugucuguauc

SEQ ID NO: 350539 - RNA, 32 nt, Human
cagaugcuagcgcugcacuccauuuugcaaug

SEQ ID NO: 350540 - RNA, 32 nt, Human
cagaugcuccuggaacacagagcugcggccuc

SEQ ID NO: 350541 - RNA, 21 nt, Human
cagaugcugaaugagucccuc

SEQ ID NO: 350542 - RNA, 32 nt, Human
cagaugcugauagucuguagagucaggaauac

SEQ ID NO: 350543 - RNA, 28 nt, Human
cagaugcugcauauugcuggcccagcuc

SEQ ID NO: 350544 - RNA, 32 nt, Human
cagaugcugcauauugcuggcccagcuccuga

SEQ ID NO: 350545 - RNA, 32 nt, Human
cagaugcugggacccagucucugcccagguca

SEQ ID NO: 350546 - RNA, 32 nt, Human
cagaugcuggugugguccgaagccacuuucuc

SEQ ID NO: 350547 - RNA, 32 nt, Human
cagaugcuuccagaguucuuaaugccucucug

SEQ ID NO: 350548 - RNA, 32 nt, Human
cagaugcuugcagcuuccugcauccaggagau

SEQ ID NO: 350549 - RNA, 32 nt, Human
cagauggaaauccuaaugacagucuccaaauu

SEQ ID NO: 350550 - RNA, 32 nt, Human
cagauggaaaugcagaaaucaccgucuucucc

SEQ ID NO: 350551 - RNA, 32 nt, Human
cagauggaagaaauagcaggagagaggaccca

SEQ ID NO: 350552 - RNA, 23 nt, Human
cagauggaagcuuacucucugcu

SEQ ID NO: 350553 - RNA, 32 nt, Human
cagauggaagggagaggguccagggcuuccua

SEQ ID NO: 350554 - RNA, 32 nt, Human
cagauggacacugccaagagccgacaaugccc

SEQ ID NO: 350555 - RNA, 32 nt, Human
cagauggagaaacaggcucugagauuucacag

SEQ ID NO: 350556 - RNA, 22 nt, Human
cagauggagaaccagccuguga

SEQ ID NO: 350557 - RNA, 20 nt, Human
cagauggagaagcugaggcu

SEQ ID NO: 350558 - RNA, 20 nt, Human
cagauggagaagcuggggcu

SEQ ID NO: 350559 - RNA, 28 nt, Human
cagauggagacccaggcugagcagcagg

SEQ ID NO: 350560 - RNA, 32 nt, Human
cagauggagcagggguugauucacacagaugg

SEQ ID NO: 350561 - RNA, 32 nt, Human
cagauggagcccauaggccacccccuauccuc

SEQ ID NO: 350562 - RNA, 32 nt, Human
cagauggagcuggaggaggaaaaggcaggcag

SEQ ID NO: 350563 - RNA, 32 nt, Human
cagauggaggcaguggcuggugggccacucuc

SEQ ID NO: 350564 - RNA, 32 nt, Human
cagauggagggccaggaggaggaagagucugc

SEQ ID NO: 350565 - RNA, 28 nt, Human
cagauggaggucggaggagacacugcug

SEQ ID NO: 350566 - RNA, 32 nt, Human
cagauggagguggaggguugauuugggaagca

SEQ ID NO: 350567 - RNA, 32 nt, Human
cagauggaguuuuguucuuguugcccaggcug

SEQ ID NO: 350568 - RNA, 21 nt, Human
cagauggaucacgaggucagg

SEQ ID NO: 350569 - RNA, 21 nt, Human
cagauggaucaugaggucagg

SEQ ID NO: 350570 - RNA, 22 nt, Human
cagauggauuaggaaacaccuc

SEQ ID NO: 350571 - RNA, 32 nt, Human
cagauggccccagugaucccuggccuccuggu

SEQ ID NO: 350572 - RNA, 19 nt, Human
cagauggccuauugagguc

SEQ ID NO: 350573 - RNA, 32 nt, Human
cagauggccuauuugaggaagagggugucugc

SEQ ID NO: 350574 - RNA, 32 nt, Human
cagauggccugaagcaagugaagaaucacaaa

SEQ ID NO: 350575 - RNA, 32 nt, Human
cagauggccugaagcaaguggagaaucacaaa

SEQ ID NO: 350576 - RNA, 32 nt, Human
cagauggccugaugggcuagugcuuggggcau

SEQ ID NO: 350577 - RNA, 22 nt, Human
cagauggccugggcgagccagg

SEQ ID NO: 350578 - RNA, 32 nt, Human
cagauggcgccacugcacuccagccugaguga

SEQ ID NO: 350579 - RNA, 32 nt, Human
cagauggcgcugcugcacucaagcuuggauga

SEQ ID NO: 350580 - RNA, 32 nt, Human
cagauggcucacuccuaacuuuggugagucau

SEQ ID NO: 350581 - RNA, 32 nt, Human
cagauggcugaaccucugcccccggagccccc

SEQ ID NO: 350582 - RNA, 32 nt, Human
cagauggcuggccaaaguugaagggucagaga

SEQ ID NO: 350583 - RNA, 32 nt, Human
cagauggcugggaucccuccccuguacccuuc

SEQ ID NO: 350584 - RNA, 32 nt, Human
cagauggcuuaguuaagucauccacagcccaa

SEQ ID NO: 350585 - RNA, 32 nt, Human
cagaugggaauugcacaguaggauguggaacc

SEQ ID NO: 350586 - RNA, 32 nt, Human
cagaugggagagagccagagagaggagugagg

SEQ ID NO: 350587 - RNA, 23 nt, Human
cagaugggcagcugcaaaugagu

SEQ ID NO: 350588 - RNA, 32 nt, Human
cagaugggccaccaggcaggagcugcugcugg

SEQ ID NO: 350589 - RNA, 32 nt, Human
cagaugggcugggcagaucaagcacaaaccug

SEQ ID NO: 350590 - RNA, 32 nt, Human
cagaugggcuuccaggacuggcccagaccagc

SEQ ID NO: 350591 - RNA, 32 nt, Human
cagaugggcuuggcuauugucaugcccaagaa

SEQ ID NO: 350592 - RNA, 20 nt, Human
cagauggggaaacugaggcu

SEQ ID NO: 350593 - RNA, 31 nt, Human
cagauggggaaacugaggcucaggugacugc

SEQ ID NO: 350594 - RNA, 32 nt, Human
cagauggggaaacugagguuugcgggagugaa

SEQ ID NO: 350595 - RNA, 32 nt, Human
cagauggggaggaucacuugacccaggaguuc

SEQ ID NO: 350596 - RNA, 24 nt, Human
cagauggggaugcaggcccuggug

SEQ ID NO: 350597 - RNA, 32 nt, Human
cagaugggggagcugguaggcagaugguuuua

SEQ ID NO: 350598 - RNA, 32 nt, Human
cagauggguaauccugugcauuuggguugggg

SEQ ID NO: 350599 - RNA, 27 nt, Human
cagauggguucuggaggccccugaaca

SEQ ID NO: 350600 - RNA, 32 nt, Human
cagaugguagggagagagagccacuggaucgg

SEQ ID NO: 350601 - RNA, 23 nt, Human
cagaugguaugcaacagguggug

SEQ ID NO: 350602 - RNA, 32 nt, Human
cagauggucuacagggcuuaguacagugccug

SEQ ID NO: 350603 - RNA, 32 nt, Human
cagauggugccacugcacuccagccuggguga

SEQ ID NO: 350604 - RNA, 22 nt, Human
cagauggugcggcggcuggcca

SEQ ID NO: 350605 - RNA, 32 nt, Human
cagauggugggcacugacuagacuggaagugc

SEQ ID NO: 350606 - RNA, 32 nt, Human
cagauggugucaggcugucacggacauaggga

SEQ ID NO: 350607 - RNA, 32 nt, Human
cagaugguuugaggccgcagagccagaccauu

SEQ ID NO: 350608 - RNA, 32 nt, Human
cagauguaaaccccaaacuuguacacaaaaga

SEQ ID NO: 350609 - RNA, 32 nt, Human
cagauguaaggccugugcuguggcucugaggc

SEQ ID NO: 350610 - RNA, 32 nt, Human
cagauguagaagagagcgaaagugauuguguu

SEQ ID NO: 350611 - RNA, 32 nt, Human
cagauguagucuccuugcuuuagugaauacac

SEQ ID NO: 350612 - RNA, 32 nt, Human
cagauguauaguguuuugagggcagaggauga

SEQ ID NO: 350613 - RNA, 32 nt, Human
cagauguaucauuuugggguccaccauucaac

SEQ ID NO: 350614 - RNA, 32 nt, Human
cagauguauggcuaccggaaacagguggguca

SEQ ID NO: 350615 - RNA, 32 nt, Human
cagaugucacccagaguaaauuauaauuagaa

SEQ ID NO: 350616 - RNA, 32 nt, Human
cagauguccccgccccacaucccuucagaucc

SEQ ID NO: 350617 - RNA, 32 nt, Human
cagauguccccuccucuccacccccgacgcug

SEQ ID NO: 350618 - RNA, 32 nt, Human
cagaugucccuugaugcacagagaagcugggg

SEQ ID NO: 350619 - RNA, 32 nt, Human
cagaugucgggaguuagaaaccagccuggcca

SEQ ID NO: 350620 - RNA, 32 nt, Human
cagaugucucucuuugccauuuuuggaggcau

SEQ ID NO: 350621 - RNA, 32 nt, Human
cagaugugaaugaaggggcagcuggaggaugu

SEQ ID NO: 350622 - RNA, 32 nt, Human
cagaugugacccaaugcacccaaccaaacuuc

SEQ ID NO: 350623 - RNA, 32 nt, Human
cagaugugagaguguggcaggccaggucucac

SEQ ID NO: 350624 - RNA, 32 nt, Human
cagaugugagccaccacacacaccaucugauu

SEQ ID NO: 350625 - RNA, 32 nt, Human
cagaugugagccaccacaccaggccggugaag

SEQ ID NO: 350626 - RNA, 32 nt, Human
cagaugugagccaccacaccuggccccaagcu

SEQ ID NO: 350627 - RNA, 32 nt, Human
cagaugugagccaccacgcccagccagaaauu

SEQ ID NO: 350628 - RNA, 32 nt, Human
cagaugugagccaccaugcccagcuuucuugc

SEQ ID NO: 350629 - RNA, 32 nt, Human
cagaugugagccaccgcacccagccugaguuu

SEQ ID NO: 350630 - RNA, 32 nt, Human
cagaugugagccaccguacccagcuaauuuuu

SEQ ID NO: 350631 - RNA, 32 nt, Human
cagaugugagccaccgugccuagccaaggaug

SEQ ID NO: 350632 - RNA, 32 nt, Human
cagaugugagccaccgugccuggccagauuuu

SEQ ID NO: 350633 - RNA, 32 nt, Human
cagaugugagccacugcaccuggccccagaaa

SEQ ID NO: 350634 - RNA, 32 nt, Human
cagaugugagccacugcguccugccuaaaaug

SEQ ID NO: 350635 - RNA, 32 nt, Human
cagaugugagccacugcguccuuccuaaaaug

SEQ ID NO: 350636 - RNA, 32 nt, Human
cagaugugagccauggugcccggcuacucuua

SEQ ID NO: 350637 - RNA, 32 nt, Human
cagaugugagccugugccuggcuggucuuucu

SEQ ID NO: 350638 - RNA, 32 nt, Human
cagaugugcaaggucuucugucuuccagcuug

SEQ ID NO: 350639 - RNA, 32 nt, Human
cagaugugcaccugagaccugaugucuaucug

SEQ ID NO: 350640 - RNA, 32 nt, Human
cagaugugcaucaccaugccuggcuaauuuuu

SEQ ID NO: 350641 - RNA, 32 nt, Human
cagauguggccaagcaucacucuucaccagga

SEQ ID NO: 350642 - RNA, 32 nt, Human
cagauguggccacaguccuuccugacucacug

SEQ ID NO: 350643 - RNA, 32 nt, Human
cagaugugggcaacauggugucagaucugcca

SEQ ID NO: 350644 - RNA, 32 nt, Human
cagaugugggcuuguuauugggaugaagacug

SEQ ID NO: 350645 - RNA, 32 nt, Human
cagaugugggguugagcggggguggggcugca

SEQ ID NO: 350646 - RNA, 32 nt, Human
cagauguggugcuucucauuuauucuuaaagc

SEQ ID NO: 350647 - RNA, 32 nt, Human
cagaugugguucuccagccucuugccuggcug

SEQ ID NO: 350648 - RNA, 32 nt, Human
cagauguguagagagagaaaggaagggaagga

SEQ ID NO: 350649 - RNA, 32 nt, Human
cagaugugucagcaggugacaagaacaagucc

SEQ ID NO: 350650 - RNA, 29 nt, Human
cagaugugucugugugugggaauugguau

SEQ ID NO: 350651 - RNA, 32 nt, Human
cagaugugugggauugggggaggaguggggac

SEQ ID NO: 350652 - RNA, 32 nt, Human
cagauguguuaaccauuuaagcagaucaucug

SEQ ID NO: 350653 - RNA, 32 nt, Human
cagauguguugacagcugcucuucugaauugc

SEQ ID NO: 350654 - RNA, 32 nt, Human
cagauguucaacaauccugcuguuccucaagg

SEQ ID NO: 350655 - RNA, 32 nt, Human
cagauguugaaguuucugaagguugacgucac

SEQ ID NO: 350656 - RNA, 32 nt, Human
cagauguuugugccuuuucuuuacuuugcuua

SEQ ID NO: 350657 - RNA, 32 nt, Human
cagauguuuucuucuuuucuuacugcgcauuu

SEQ ID NO: 350658 - RNA, 32 nt, Human
cagauuaaagccucuguuuugcaccuguaaaa

SEQ ID NO: 350659 - RNA, 32 nt, Human
cagauuaaauggacucaucaggguaagaggaa

SEQ ID NO: 350660 - RNA, 20 nt, Human
cagauuaacccuuccuggaa

SEQ ID NO: 350661 - RNA, 32 nt, Human
cagauuacacauguaaauaugaccucagacaa

SEQ ID NO: 350662 - RNA, 32 nt, Human
cagauuacguuuuugaauggugaacaggcuau

SEQ ID NO: 350663 - RNA, 32 nt, Human
cagauuagccuccuccucuugaaaauggagac

SEQ ID NO: 350664 - RNA, 31 nt, Human
cagauuagccucucuuccucugucaggcaaa

SEQ ID NO: 350665 - RNA, 32 nt, Human
cagauuagcugugguucaagacugccugugug

SEQ ID NO: 350666 - RNA, 32 nt, Human
cagauuauuuuuauagugauuuuugcagcuaa

SEQ ID NO: 350667 - RNA, 32 nt, Human
cagauucaaagcuuccagagguggugagaacu

SEQ ID NO: 350668 - RNA, 24 nt, Human
cagauucaacagauucuccugccu

SEQ ID NO: 350669 - RNA, 24 nt, Human
cagauucaagcaauucuccugccu

SEQ ID NO: 350670 - RNA, 24 nt, Human
cagauucaagcaauucuccuguuu

SEQ ID NO: 350671 - RNA, 24 nt, Human
cagauucaagcgauucuccugccu

SEQ ID NO: 350672 - RNA, 24 nt, Human
cagauucaagcgauucuccugucu

SEQ ID NO: 350673 - RNA, 32 nt, Human
cagauucaagcgauucuccugucucagccucc

SEQ ID NO: 350674 - RNA, 22 nt, Human
cagauucaagcgauuuccagcu

SEQ ID NO: 350675 - RNA, 24 nt, Human
cagauucaagugauccucccaucu

SEQ ID NO: 350676 - RNA, 24 nt, Human
cagauucacaccauucuccugccu

SEQ ID NO: 350677 - RNA, 24 nt, Human
cagauucacgccauucuccugccu

SEQ ID NO: 350678 - RNA, 32 nt, Human
cagauucacugcagcucuccucuuaauaugua

SEQ ID NO: 350679 - RNA, 32 nt, Human
cagauucagcagugacauaacaaggacauaau

SEQ ID NO: 350680 - RNA, 32 nt, Human
cagauucaucauuauuccuaaaguauugcugu

SEQ ID NO: 350681 - RNA, 28 nt, Human
cagauuccaagugcugcuacuucaagug

SEQ ID NO: 350682 - RNA, 32 nt, Human
cagauuccacaaagccucucuccccucccucg

SEQ ID NO: 350683 - RNA, 32 nt, Human
cagauuccacaguggcaagaaacaucauucua

SEQ ID NO: 350684 - RNA, 32 nt, Human
cagauuccagagagucccaggcgggcgggagu

SEQ ID NO: 350685 - RNA, 24 nt, Human
cagauuccagucauccuccugccu

SEQ ID NO: 350686 - RNA, 32 nt, Human
cagauuccaucuuuuccaacuccaaggugcca

SEQ ID NO: 350687 - RNA, 32 nt, Human
cagauuccauuuuagaauggggauucacaggu

SEQ ID NO: 350688 - RNA, 32 nt, Human
cagauucccaagcaagggugacccaugguuaa

SEQ ID NO: 350689 - RNA, 32 nt, Human
cagauucccaggcugggugcaguggcucacgc

SEQ ID NO: 350690 - RNA, 32 nt, Human
cagauuccuggaccugguguccugguuggguc

SEQ ID NO: 350691 - RNA, 19 nt, Human
cagauucggaaacugggga

SEQ ID NO: 350692 - RNA, 32 nt, Human
cagauucuacaaaaaugguguuucaaaacuga

SEQ ID NO: 350693 - RNA, 32 nt, Human
cagauucucaaacagucgcagcucuuuggagg

SEQ ID NO: 350694 - RNA, 32 nt, Human
cagauucuccacggugguccccaaaacacugu

SEQ ID NO: 350695 - RNA, 32 nt, Human
cagauucuccccugaaguuucucaggccuuuu

SEQ ID NO: 350696 - RNA, 32 nt, Human
cagauucugccucucuggaaagaggcucugga

SEQ ID NO: 350697 - RNA, 32 nt, Human
cagauucuggcuauuccauccauucugauuca

SEQ ID NO: 350698 - RNA, 32 nt, Human
cagauucuucucgaucgaucucccgacaucac

SEQ ID NO: 350699 - RNA, 32 nt, Human
cagauucuuucaucucuacuucccaagcuuuc

SEQ ID NO: 350700 - RNA, 32 nt, Human
cagauugagaaccucaaggaggaccuggucua

SEQ ID NO: 350701 - RNA, 32 nt, Human
cagauugcaacaggcugggcuucaguggcagc

SEQ ID NO: 350702 - RNA, 32 nt, Human
cagauugcaccacuacacuccagccugggcaa

SEQ ID NO: 350703 - RNA, 32 nt, Human
cagauugcaccacugcacuccagccugggcaa

SEQ ID NO: 350704 - RNA, 32 nt, Human
cagauugcaccacugcucucuagccugggcaa

SEQ ID NO: 350705 - RNA, 32 nt, Human
cagauugcaccauugcacuccagccugcgcaa

SEQ ID NO: 350706 - RNA, 32 nt, Human
cagauugcaccauugcccuccagccugagcaa

SEQ ID NO: 350707 - RNA, 32 nt, Human
cagauugcagacugcauguucacagagcuggg

SEQ ID NO: 350708 - RNA, 32 nt, Human
cagauugcagagcugaaaaagauaugugaaca

SEQ ID NO: 350709 - RNA, 31 nt, Human
cagauugcaggguucugacaaggcaggacag

SEQ ID NO: 350710 - RNA, 32 nt, Human
cagauugcagugagccaagaucacgccacugc

SEQ ID NO: 350711 - RNA, 32 nt, Human
cagauugcccacugcacuccagccugggcaac

SEQ ID NO: 350712 - RNA, 32 nt, Human
cagauugcgccauugugcuccagccuggguga

SEQ ID NO: 350713 - RNA, 32 nt, Human
cagauugcgucacugcacuccaaccuggguga

SEQ ID NO: 350714 - RNA, 32 nt, Human
cagauugcuagucugugucugucugaucagaa

SEQ ID NO: 350715 - RNA, 32 nt, Human
cagauugcugaccaggggcuugagagcugggu

SEQ ID NO: 350716 - RNA, 23 nt, Human
cagauugcuggguuuacaggcau

SEQ ID NO: 350717 - RNA, 32 nt, Human
cagauuggaaaugacauuuuaguuuaucagau

SEQ ID NO: 350718 - RNA, 24 nt, Human
cagauuggacuugcccgcguuccu

SEQ ID NO: 350719 - RNA, 32 nt, Human
cagauuggagccauggcuuuggaacagaacca

SEQ ID NO: 350720 - RNA, 32 nt, Human
cagauuggagcucugcaguaccacagaacagg

SEQ ID NO: 350721 - RNA, 32 nt, Human
cagauuggagcucugcaguaccacagggccaa

SEQ ID NO: 350722 - RNA, 23 nt, Human
cagauuggaucaccucccacccu

SEQ ID NO: 350723 - RNA, 32 nt, Human
cagauuggaucucuuuuucauauggaucuucu

SEQ ID NO: 350724 - RNA, 32 nt, Human
cagauuggcagagugcagggaggugagagagu

SEQ ID NO: 350725 - RNA, 32 nt, Human
cagauuggccuccaaucaaaccugaacaggcu

SEQ ID NO: 350726 - RNA, 32 nt, Human
cagauugggaaaaugguugaaucaaaaguuug

SEQ ID NO: 350727 - RNA, 32 nt, Human
cagauuggggagggcuugacaggcuagggggc

SEQ ID NO: 350728 - RNA, 32 nt, Human
cagauugggggaaaacaacaaaugucuugaag

SEQ ID NO: 350729 - RNA, 32 nt, Human
cagauugggugucaguucaggauaaauaccaa

SEQ ID NO: 350730 - RNA, 32 nt, Human
cagauuggucacauaaaugccacggcauuccg

SEQ ID NO: 350731 - RNA, 32 nt, Human
cagauuggucucaaacuccuggacucaaguga

SEQ ID NO: 350732 - RNA, 32 nt, Human
cagauuggucucaaacuccuggccucucacuc

SEQ ID NO: 350733 - RNA, 32 nt, Human
cagauuggugcuuucuaaauaaaaauugaaag

SEQ ID NO: 350734 - RNA, 32 nt, Human
cagauuguaaauauuucagacuguguggacca

SEQ ID NO: 350735 - RNA, 32 nt, Human
cagauuguauuuuuauuguuaaugcucuucuu

SEQ ID NO: 350736 - RNA, 32 nt, Human
cagauugugagcuccuggagggcaggagcugu

SEQ ID NO: 350737 - RNA, 32 nt, Human
cagauugugcacuccagcggggagcuguuuca

SEQ ID NO: 350738 - RNA, 32 nt, Human
cagauugugccacugcacuccagccugggcaa

SEQ ID NO: 350739 - RNA, 32 nt, Human
cagauugugccacugcacucuagccucgguga

SEQ ID NO: 350740 - RNA, 32 nt, Human
cagauugugccacugcauucuagccugggcga

SEQ ID NO: 350741 - RNA, 32 nt, Human
cagauugugccacugcccuccagccuggguga

SEQ ID NO: 350742 - RNA, 32 nt, Human
cagauugugccacugcucuccagccugggagg

SEQ ID NO: 350743 - RNA, 32 nt, Human
cagauuguggggacccagggaagggaggaauu

SEQ ID NO: 350744 - RNA, 32 nt, Human
cagauuguggggcacauuguguagccugacuu

SEQ ID NO: 350745 - RNA, 32 nt, Human
cagauuguuagugcuuucaacauuucauuuga

SEQ ID NO: 350746 - RNA, 32 nt, Human
cagauuuaaaauauuaauuugcugcuaauuaa

SEQ ID NO: 350747 - RNA, 32 nt, Human
cagauuuaaagaaaugaaaggauaccauuagu

SEQ ID NO: 350748 - RNA, 32 nt, Human
cagauuuagcaaaaccaaaacagagugcugag

SEQ ID NO: 350749 - RNA, 32 nt, Human
cagauuucaccacccacacucuuuuuaggugu

SEQ ID NO: 350750 - RNA, 32 nt, Human
cagauuucagcuuaaauuuugccuccucagag

SEQ ID NO: 350751 - RNA, 32 nt, Human
cagauuucauucucagcaccauacagauuugg

SEQ ID NO: 350752 - RNA, 32 nt, Human
cagauuucauucuuuguuagcucacuuuauaa

SEQ ID NO: 350753 - RNA, 32 nt, Human
cagauuuccagagcucugucucuguacagccc

SEQ ID NO: 350754 - RNA, 32 nt, Human
cagauuuccagccuggugaugcuguacagaac

SEQ ID NO: 350755 - RNA, 32 nt, Human
cagauuucccuaauuaguggugugugaacauc

SEQ ID NO: 350756 - RNA, 32 nt, Human
cagauuuccgggcuaacuuuccucgccgucuc

SEQ ID NO: 350757 - RNA, 32 nt, Human
cagauuuccuguucuuuaccuggcucugcuuc

SEQ ID NO: 350758 - RNA, 32 nt, Human
cagauuucgugcuugaaguggaagaaaaauga

SEQ ID NO: 350759 - RNA, 32 nt, Human
cagauuucuccaccaaauucucagccugauaa

SEQ ID NO: 350760 - RNA, 32 nt, Human
cagauuucuuuguccucuaagaguugauugcu

SEQ ID NO: 350761 - RNA, 19 nt, Human
cagauuugaaaguucaaug

SEQ ID NO: 350762 - RNA, 32 nt, Human
cagauuugagguaccagugcauagcagcugaa

SEQ ID NO: 350763 - RNA, 32 nt, Human
cagauuugccuaggaugccaauguuuuuaauu

SEQ ID NO: 350764 - RNA, 32 nt, Human
cagauuuggaaugggaccagaggcccuugaaa

SEQ ID NO: 350765 - RNA, 18 nt, Human
cagauuuggaauucaaug

SEQ ID NO: 350766 - RNA, 25 nt, Human
cagauuugggaggccccuccugccc

SEQ ID NO: 350767 - RNA, 32 nt, Human
cagauuugugguggaaaaggcggccaucaucu

SEQ ID NO: 350768 - RNA, 32 nt, Human
cagauuuguucuuccgccccugccuccgcggc

SEQ ID NO: 350769 - RNA, 32 nt, Human
cagauuuuacccacuugguugucacaacugaa

SEQ ID NO: 350770 - RNA, 32 nt, Human
cagauuuuauucuucuuaacagauuuagguua

SEQ ID NO: 350771 - RNA, 32 nt, Human
cagauuuucaucuauaaacaaaggagcauuug

SEQ ID NO: 350772 - RNA, 32 nt, Human
cagauuuuccuguuuucguuguuuucaaagac

SEQ ID NO: 350773 - RNA, 21 nt, Human
cagauuuugauucuguccucu

SEQ ID NO: 350774 - RNA, 32 nt, Human
cagauuuugcaagagccaggcucgcccaccuu

SEQ ID NO: 350775 - RNA, 32 nt, Human
cagauuuugccuccccgaucagugugugccug

SEQ ID NO: 350776 - RNA, 32 nt, Human
cagauuuugccuccuguugaccagccugguuu

SEQ ID NO: 350777 - RNA, 19 nt, Human
cagauuuuggacuuucaca

SEQ ID NO: 350778 - RNA, 32 nt, Human
cagauuuuuauguuuugaaagacagagucuuc

SEQ ID NO: 350779 - RNA, 32 nt, Human
cagauuuuugcaaccuccuccugagccgggau

SEQ ID NO: 350780 - RNA, 32 nt, Human
cagcaaaaaggaaaguugcccaaggaagggaa

SEQ ID NO: 350781 - RNA, 32 nt, Human
cagcaaaaauggagcagaaaaugcagagauuu

SEQ ID NO: 350782 - RNA, 32 nt, Human
cagcaaaacccccaccuuaaccucuuuucuuu

SEQ ID NO: 350783 - RNA, 32 nt, Human
cagcaaaagaucuacauucuugcucaaaguug

SEQ ID NO: 350784 - RNA, 32 nt, Human
cagcaaaaguucaccaccuacucuuauuuacu

SEQ ID NO: 350785 - RNA, 32 nt, Human
cagcaaaauagagcucauaaagaaauagugaa

SEQ ID NO: 350786 - RNA, 32 nt, Human
cagcaaaauagagucccucagggugacaguug

SEQ ID NO: 350787 - RNA, 32 nt, Human
cagcaaaauucuacgagagacugugugaggcu

SEQ ID NO: 350788 - RNA, 32 nt, Human
cagcaaacaaaugggaaguuauucuuguuucu

SEQ ID NO: 350789 - RNA, 32 nt, Human
cagcaaacaccacaggacagaggggagggcug

SEQ ID NO: 350790 - RNA, 32 nt, Human
cagcaaacagcacaaucucacccucacaggaa

SEQ ID NO: 350791 - RNA, 20 nt, Human
cagcaaaccaccauggugca

SEQ ID NO: 350792 - RNA, 32 nt, Human
cagcaaaccaucuagauuaaacuccuaaagcc

SEQ ID NO: 350793 - RNA, 32 nt, Human
cagcaaaccccagcugcuucagcagccaugaa

SEQ ID NO: 350794 - RNA, 32 nt, Human
cagcaaaccuccuggguuugaaaaauuccaac

SEQ ID NO: 350795 - RNA, 32 nt, Human
cagcaaaccuugacagcauuuccucuuaucca

SEQ ID NO: 350796 - RNA, 32 nt, Human
cagcaaacgcccuggcgucuguccucaccaug

SEQ ID NO: 350797 - RNA, 32 nt, Human
cagcaaagaagagauuuuuagagugggaagaa

SEQ ID NO: 350798 - RNA, 21 nt, Human
cagcaaagaccacgacuggag

SEQ ID NO: 350799 - RNA, 32 nt, Human
cagcaaagacuccgcuuauccucauuuuacca

SEQ ID NO: 350800 - RNA, 32 nt, Human
cagcaaagagaagugucagagcaugagcgcca

SEQ ID NO: 350801 - RNA, 32 nt, Human
cagcaaagagaauggggcugggcagaucugug

SEQ ID NO: 350802 - RNA, 32 nt, Human
cagcaaagauagauuucagagcacagcagcag

SEQ ID NO: 350803 - RNA, 32 nt, Human
cagcaaagauggagaggaaaaagggaguggag

SEQ ID NO: 350804 - RNA, 32 nt, Human
cagcaaagccccaggagaacaggcuggacaga

SEQ ID NO: 350805 - RNA, 32 nt, Human
cagcaaagccuugcaaucccaggcugggguca

SEQ ID NO: 350806 - RNA, 32 nt, Human
cagcaaagccuugcucucuggagcuuacuaug

SEQ ID NO: 350807 - RNA, 32 nt, Human
cagcaaaggaaaacucagauuuuagaggcuuu

SEQ ID NO: 350808 - RNA, 23 nt, Human
cagcaaaggagacgacacagaca

SEQ ID NO: 350809 - RNA, 21 nt, Human
cagcaaaggcugcugguguca

SEQ ID NO: 350810 - RNA, 32 nt, Human
cagcaaagggucagguauccacacugccucug

SEQ ID NO: 350811 - RNA, 32 nt, Human
cagcaaaggugguuugagguagucaccugcuu

SEQ ID NO: 350812 - RNA, 32 nt, Human
cagcaaagucuacaauaaaacuuuaaaacaau

SEQ ID NO: 350813 - RNA, 32 nt, Human
cagcaaauacacaaggaauucuuuuuguuugu

SEQ ID NO: 350814 - RNA, 32 nt, Human
cagcaaauauaugauucuagugucugacuuuu

SEQ ID NO: 350815 - RNA, 32 nt, Human
cagcaaauccacccucucagcucagcccagcc

SEQ ID NO: 350816 - RNA, 32 nt, Human
cagcaaaugccacucauccccacucuucauag

SEQ ID NO: 350817 - RNA, 32 nt, Human
cagcaaauggaagcaagcuuguucuuugucug

SEQ ID NO: 350818 - RNA, 32 nt, Human
cagcaaauucacugcuucaaaguggccuggcu

SEQ ID NO: 350819 - RNA, 32 nt, Human
cagcaaauuucuugauaucaaggaaagugggg

SEQ ID NO: 350820 - RNA, 32 nt, Human
cagcaaauuugacuucuuaguagccacuucac

SEQ ID NO: 350821 - RNA, 32 nt, Human
cagcaaauuuggauagucucuagggcucauca

SEQ ID NO: 350822 - RNA, 21 nt, Human
cagcaacaaacucacaaagua

SEQ ID NO: 350823 - RNA, 32 nt, Human
cagcaacaaccagcaucccuugaccaggccug

SEQ ID NO: 350824 - RNA, 32 nt, Human
cagcaacaaucagaauguccaaaugcuguccu

SEQ ID NO: 350825 - RNA, 32 nt, Human
cagcaacacagugaaaccccgucucuacuaaa

SEQ ID NO: 350826 - RNA, 32 nt, Human
cagcaacagcacagagcgcugaacacacaccc

SEQ ID NO: 350827 - RNA, 32 nt, Human
cagcaacaggcaggagaggcagcgugugacca

SEQ ID NO: 350828 - RNA, 32 nt, Human
cagcaacauaguaagaccccaucucuauaaau

SEQ ID NO: 350829 - RNA, 32 nt, Human
cagcaacaucacaucauuuuugcuuuucaaua

SEQ ID NO: 350830 - RNA, 32 nt, Human
cagcaacaucauuaccgcuagcggcaguuuug

SEQ ID NO: 350831 - RNA, 32 nt, Human
cagcaaccacugcagcgacuagggacacuugu

SEQ ID NO: 350832 - RNA, 32 nt, Human
cagcaaccaggccuggccuccuggugucugcg

SEQ ID NO: 350833 - RNA, 32 nt, Human
cagcaaccauguccaagggaccugcaguuggu

SEQ ID NO: 350834 - RNA, 32 nt, Human
cagcaaccccugugucuccuacuccugcaaag

SEQ ID NO: 350835 - RNA, 32 nt, Human
cagcaacccggccgcccugccuguggccuccg

SEQ ID NO: 350836 - RNA, 32 nt, Human
cagcaacccugggucucccucucugcugcucc

SEQ ID NO: 350837 - RNA, 32 nt, Human
cagcaaccugcacuccagccugggugacagag

SEQ ID NO: 350838 - RNA, 32 nt, Human
cagcaaccugggaagacgagacgcugcgacug

SEQ ID NO: 350839 - RNA, 32 nt, Human
cagcaaccugggaguccgaggugggaggauug

SEQ ID NO: 350840 - RNA, 32 nt, Human
cagcaaccuguaacucacauucucuucccagu

SEQ ID NO: 350841 - RNA, 32 nt, Human
cagcaaccuuucucuccugucuacccuuuuag

SEQ ID NO: 350842 - RNA, 32 nt, Human
cagcaacgcuuguagaacucacucugggcugu

SEQ ID NO: 350843 - RNA, 31 nt, Human
cagcaacgucuuucagggguuggagacagaa

SEQ ID NO: 350844 - RNA, 32 nt, Human
cagcaacucaggagacugagacaggagaaucg

SEQ ID NO: 350845 - RNA, 32 nt, Human
cagcaacuccaccaccuuaggauuucccccuc

SEQ ID NO: 350846 - RNA, 24 nt, Human
cagcaacuccaguagcagcuccag

SEQ ID NO: 350847 - RNA, 21 nt, Human
cagcaacucucuauuggauca

SEQ ID NO: 350848 - RNA, 32 nt, Human
cagcaacugcuaaggagagaucaaagguagcu

SEQ ID NO: 350849 - RNA, 32 nt, Human
cagcaacugcuuguuugugcaugaguagggcu

SEQ ID NO: 350850 - RNA, 32 nt, Human
cagcaacuggacuggcacugccaggacguggu

SEQ ID NO: 350851 - RNA, 32 nt, Human
cagcaacuuccagaacgugaagcagcuguacg

SEQ ID NO: 350852 - RNA, 32 nt, Human
cagcaacuuccuguagugagcacuuuguauga

SEQ ID NO: 350853 - RNA, 32 nt, Human
cagcaacuuguccuagcacagauggccagccc

SEQ ID NO: 350854 - RNA, 32 nt, Human
cagcaagaagaagaaaaaguaagagacacgag

SEQ ID NO: 350855 - RNA, 22 nt, Human
cagcaagaaggcacuaaagcag

SEQ ID NO: 350856 - RNA, 24 nt, Human
cagcaagaauugguugcuggaauu

SEQ ID NO: 350857 - RNA, 32 nt, Human
cagcaagagcaaggcaugggagaggggaggug

SEQ ID NO: 350858 - RNA, 23 nt, Human
cagcaagaggcccguacagaauu

SEQ ID NO: 350859 - RNA, 32 nt, Human
cagcaagagggaacaaaacuguucuuuugcau

SEQ ID NO: 350860 - RNA, 32 nt, Human
cagcaagagggggagucagaagaaaaacagau

SEQ ID NO: 350861 - RNA, 32 nt, Human
cagcaagagguggagcugccagccugaggugc

SEQ ID NO: 350862 - RNA, 32 nt, Human
cagcaagauggaaauaccaaaucccccuaccu

SEQ ID NO: 350863 - RNA, 32 nt, Human
cagcaagaugggaucagagagggccuggccua

SEQ ID NO: 350864 - RNA, 21 nt, Human
cagcaagauugaggauaagau

SEQ ID NO: 350865 - RNA, 32 nt, Human
cagcaagcaaacugagagaggugaaauccaug

SEQ ID NO: 350866 - RNA, 32 nt, Human
cagcaagcaaagcauuuauaccauuacaaucu

SEQ ID NO: 350867 - RNA, 32 nt, Human
cagcaagcagcaaccgaaggcgcaagugccag

SEQ ID NO: 350868 - RNA, 19 nt, Human
cagcaagcagcaugcagca

SEQ ID NO: 350869 - RNA, 20 nt, Human
cagcaagcaggagacuagag

SEQ ID NO: 350870 - RNA, 32 nt, Human
cagcaagccagacugcuguguucuccacagcc

SEQ ID NO: 350871 - RNA, 32 nt, Human
cagcaagccagccaccugcccagccgggccug

SEQ ID NO: 350872 - RNA, 21 nt, Human
cagcaagccaugccccugggg

SEQ ID NO: 350873 - RNA, 18 nt, Human
cagcaagccccccuccca

SEQ ID NO: 350874 - RNA, 32 nt, Human
cagcaagcccccgaauagccccggcugccacc

SEQ ID NO: 350875 - RNA, 23 nt, Human
cagcaagccuccaccagcaagcu

SEQ ID NO: 350876 - RNA, 23 nt, Human
cagcaagcgcaacucuguggaca

SEQ ID NO: 350877 - RNA, 32 nt, Human
cagcaagcguccagggcagauggcagaggauc

SEQ ID NO: 350878 - RNA, 24 nt, Human
cagcaagcuaauaaagaccuggag

SEQ ID NO: 350879 - RNA, 32 nt, Human
cagcaagcuaauugagucucuguuauauacca

SEQ ID NO: 350880 - RNA, 32 nt, Human
cagcaagcuccauuuccaggggucugcccaga

SEQ ID NO: 350881 - RNA, 20 nt, Human
cagcaagcucccugcgggca

SEQ ID NO: 350882 - RNA, 18 nt, Human
cagcaagcugcccccucc

SEQ ID NO: 350883 - RNA, 32 nt, Human
cagcaagcuggagacccaggagagcugauggu

SEQ ID NO: 350884 - RNA, 32 nt, Human
cagcaagcuguggucggaugagugccaggacc

SEQ ID NO: 350885 - RNA, 32 nt, Human
cagcaaggaacacagggcuugcaggaucacag

SEQ ID NO: 350886 - RNA, 32 nt, Human
cagcaaggagaaggaaaaacaccucagcaugg

SEQ ID NO: 350887 - RNA, 32 nt, Human
cagcaaggagacagaagagaaggaggaggggg

SEQ ID NO: 350888 - RNA, 32 nt, Human
cagcaaggauaacauucaaaggagcucacauu

SEQ ID NO: 350889 - RNA, 24 nt, Human
cagcaaggcagggcagcccagagg

SEQ ID NO: 350890 - RNA, 32 nt, Human
cagcaaggcauggacuccgggaagaaggggag

SEQ ID NO: 350891 - RNA, 32 nt, Human
cagcaaggcccaggucccgaaagaugcaguga

SEQ ID NO: 350892 - RNA, 32 nt, Human
cagcaaggcugcacccuccuugaucaucacag

SEQ ID NO: 350893 - RNA, 32 nt, Human
cagcaaggcugcucgggggccccugguucguc

SEQ ID NO: 350894 - RNA, 32 nt, Human
cagcaagggaaaggagcuggaaucacaggcag

SEQ ID NO: 350895 - RNA, 32 nt, Human
cagcaagggcagcagaguugggugcuaagauc

SEQ ID NO: 350896 - RNA, 32 nt, Human
cagcaagggcuggaggccagugcugcagggcc

SEQ ID NO: 350897 - RNA, 32 nt, Human
cagcaaggggcagacccagagauagaaccgca

SEQ ID NO: 350898 - RNA, 32 nt, Human
cagcaaggggcucugcccucccuccuuccuuc

SEQ ID NO: 350899 - RNA, 32 nt, Human
cagcaagguaauccuugauggcuggaucuuuu

SEQ ID NO: 350900 - RNA, 32 nt, Human
cagcaagguggacauggagaccccacucuuug

SEQ ID NO: 350901 - RNA, 32 nt, Human
cagcaaguaaggagcuacaggagaagcuuggc

SEQ ID NO: 350902 - RNA, 32 nt, Human
cagcaaguaaguauaacaggagagccaggauu

SEQ ID NO: 350903 - RNA, 32 nt, Human
cagcaagucugaagaguuucccagaagcccug

SEQ ID NO: 350904 - RNA, 32 nt, Human
cagcaaguggggcccauggaacugaaucuuua

SEQ ID NO: 350905 - RNA, 32 nt, Human
cagcaagugugaagcuggacgugaugcaaaau

SEQ ID NO: 350906 - RNA, 32 nt, Human
cagcaaguuaagaccccagcagguuagggagg

SEQ ID NO: 350907 - RNA, 32 nt, Human
cagcaaguucacagggauccgggaaguugugu

SEQ ID NO: 350908 - RNA, 32 nt, Human
cagcaaguugggaggcugaggcgggcagauca

SEQ ID NO: 350909 - RNA, 32 nt, Human
cagcaauagaaaacuaauaaaccucccucuuu

SEQ ID NO: 350910 - RNA, 32 nt, Human
cagcaaucaggcagcacccagcugugggggca

SEQ ID NO: 350911 - RNA, 32 nt, Human
cagcaaucauaagugcugugcauaacuauugu

SEQ ID NO: 350912 - RNA, 32 nt, Human
cagcaaucauccgugcucccacccccaccccg

SEQ ID NO: 350913 - RNA, 32 nt, Human
cagcaauccacagaacucucucuccuuccuuc

SEQ ID NO: 350914 - RNA, 32 nt, Human
cagcaaucccuuccuuucacuaccuucuuuuu

SEQ ID NO: 350915 - RNA, 32 nt, Human
cagcaaucuccaaaguccuguggugggagggc

SEQ ID NO: 350916 - RNA, 32 nt, Human
cagcaaucucugaggguaaagccggugggagg

SEQ ID NO: 350917 - RNA, 32 nt, Human
cagcaaucucugccuacaccuccugcggcgcc

SEQ ID NO: 350918 - RNA, 32 nt, Human
cagcaaucuuugcuguucugcagccucugcug

SEQ ID NO: 350919 - RNA, 32 nt, Human
cagcaaugaacuguucuagggaaaguggcuuc

SEQ ID NO: 350920 - RNA, 24 nt, Human
cagcaaugagcugucccccuccca

SEQ ID NO: 350921 - RNA, 23 nt, Human
cagcaaugcuaucuaccuucaca

SEQ ID NO: 350922 - RNA, 32 nt, Human
cagcaauggagcuaagaggaguggugaugggc

SEQ ID NO: 350923 - RNA, 30 nt, Human
cagcaauggaugcacaggaagcuuuagcua

SEQ ID NO: 350924 - RNA, 32 nt, Human
cagcaaugucauccuuuuguucuuuuagcuca

SEQ ID NO: 350925 - RNA, 32 nt, Human
cagcaauguuuccuucaacucuggcaguuccc

SEQ ID NO: 350926 - RNA, 20 nt, Human
cagcaauuaaaaauugucuu

SEQ ID NO: 350927 - RNA, 23 nt, Human
cagcaauuacccugacuaaauug

SEQ ID NO: 350928 - RNA, 32 nt, Human
cagcaauuacucacuaaagggcuucauuuuag

SEQ ID NO: 350929 - RNA, 24 nt, Human
cagcaauuacuuggcuaaauuaga

SEQ ID NO: 350930 - RNA, 22 nt, Human
cagcaauuacuuuucaaaauua

SEQ ID NO: 350931 - RNA, 21 nt, Human
cagcaauuccacaaccaccuu

SEQ ID NO: 350932 - RNA, 19 nt, Human
cagcaauuuaacagcuuga

SEQ ID NO: 350933 - RNA, 32 nt, Human
cagcaauuuacaugaauucaugcaagcuuggg

SEQ ID NO: 350934 - RNA, 32 nt, Human
cagcaauuuccagggagcgucuccccacaaca

SEQ ID NO: 350935 - RNA, 32 nt, Human
cagcaauuucuguauaguuuucaccucugaga

SEQ ID NO: 350936 - RNA, 32 nt, Human
cagcaauuugggaggccaaggugggcagauca

SEQ ID NO: 350937 - RNA, 32 nt, Human
cagcaauuugggaggcugagacaggaggauug

SEQ ID NO: 350938 - RNA, 32 nt, Human
cagcaauuugggaggcugaggcuggcggauca

SEQ ID NO: 350939 - RNA, 32 nt, Human
cagcaauuugggaggcugaggugggcagauca

SEQ ID NO: 350940 - RNA, 32 nt, Human
cagcaauuugggaggcugaggugggcggauca

SEQ ID NO: 350941 - RNA, 21 nt, Human
cagcacaaaacaccuucaaug

SEQ ID NO: 350942 - RNA, 23 nt, Human
cagcacaacccuguggccacguu

SEQ ID NO: 350943 - RNA, 21 nt, Human
cagcacaacucaccuugaaua

SEQ ID NO: 350944 - RNA, 32 nt, Human
cagcacaacuuugaccugaugaccucauccca

SEQ ID NO: 350945 - RNA, 32 nt, Human
cagcacaaggaugcaggauaccagcgucuccu

SEQ ID NO: 350946 - RNA, 31 nt, Human
cagcacacaaccuugauuaggaggggcuggg

SEQ ID NO: 350947 - RNA, 32 nt, Human
cagcacacacaguggauuccagugcaugggga

SEQ ID NO: 350948 - RNA, 32 nt, Human
cagcacacaugcucucucucugcuccagcgug

SEQ ID NO: 350949 - RNA, 22 nt, Human
cagcacaccaagguggcccgga

SEQ ID NO: 350950 - RNA, 24 nt, Human
cagcacacccagcucccauggcgu

SEQ ID NO: 350951 - RNA, 20 nt, Human
cagcacaccggugcuggcca

SEQ ID NO: 350952 - RNA, 32 nt, Human
cagcacaccucaccacaccacaccgcacugca

SEQ ID NO: 350953 - RNA, 32 nt, Human
cagcacaccugagugaugaugauuacaccuuc

SEQ ID NO: 350954 - RNA, 32 nt, Human
cagcacaccuggcuaauuuuuguauuuuuagu

SEQ ID NO: 350955 - RNA, 32 nt, Human
cagcacacucuguaucuccuguccuuaaaauc

SEQ ID NO: 350956 - RNA, 32 nt, Human
cagcacacuguuccaaccaaaauugaucuaau

SEQ ID NO: 350957 - RNA, 32 nt, Human
cagcacagaaaaagauuuccaucaccacagaa

SEQ ID NO: 350958 - RNA, 32 nt, Human
cagcacagacacagcauagcaggaguccuccc

SEQ ID NO: 350959 - RNA, 23 nt, Human
cagcacagaccagcagaccauca

SEQ ID NO: 350960 - RNA, 22 nt, Human
cagcacagacccagacgagggg

SEQ ID NO: 350961 - RNA, 32 nt, Human
cagcacagacccucuggcuggggcagcgcaga

SEQ ID NO: 350962 - RNA, 32 nt, Human
cagcacagaggaagagugaugguggcaugcug

SEQ ID NO: 350963 - RNA, 32 nt, Human
cagcacagaggcaauaaaggcaguggucccuu

SEQ ID NO: 350964 - RNA, 32 nt, Human
cagcacagcagcacccauccccugccagagcc

SEQ ID NO: 350965 - RNA, 32 nt, Human
cagcacagcauccucugcccacccuuguuucu

SEQ ID NO: 350966 - RNA, 32 nt, Human
cagcacagccagagaagccucuggaugcagcc

SEQ ID NO: 350967 - RNA, 32 nt, Human
cagcacagccaugccucacagcacacaaaugu

SEQ ID NO: 350968 - RNA, 32 nt, Human
cagcacagccuggccaagaucgagcgcaaccu

SEQ ID NO: 350969 - RNA, 32 nt, Human
cagcacagccugguuacagagugagauuccgu

SEQ ID NO: 350970 - RNA, 23 nt, Human
cagcacagcucugccugacgcuc

SEQ ID NO: 350971 - RNA, 32 nt, Human
cagcacaggcacaaaccauugcccggcacugg

SEQ ID NO: 350972 - RNA, 32 nt, Human
cagcacaggcagcccgggcugccugaauagcc

SEQ ID NO: 350973 - RNA, 32 nt, Human
cagcacaggcagcuagaagggccggugggcac

SEQ ID NO: 350974 - RNA, 32 nt, Human
cagcacaggcuggccagagagcuguucuuguu

SEQ ID NO: 350975 - RNA, 32 nt, Human
cagcacaggcuggcccccaccauguccacagu

SEQ ID NO: 350976 - RNA, 24 nt, Human
cagcacaggcuguaggcccaggag

SEQ ID NO: 350977 - RNA, 19 nt, Human
cagcacagguuccagcacu

SEQ ID NO: 350978 - RNA, 21 nt, Human
cagcacaguccuggggacagg

SEQ ID NO: 350979 - RNA, 32 nt, Human
cagcacagugccugaugccucccuaggcauua

SEQ ID NO: 350980 - RNA, 18 nt, Human
cagcacaguguggcaccc

SEQ ID NO: 350981 - RNA, 32 nt, Human
cagcacaguguguggcauuuacaugguaccca

SEQ ID NO: 350982 - RNA, 19 nt, Human
cagcacaucaaagcugcuu

SEQ ID NO: 350983 - RNA, 32 nt, Human
cagcacaucacugacguauaggacuccuuugg

SEQ ID NO: 350984 - RNA, 32 nt, Human
cagcacauccagccuggcaucccacacgcugg

SEQ ID NO: 350985 - RNA, 32 nt, Human
cagcacaucuuccuccucgcaggagggaccag

SEQ ID NO: 350986 - RNA, 32 nt, Human
cagcacaugaacacuggacccugcuuugccug

SEQ ID NO: 350987 - RNA, 32 nt, Human
cagcacauuccgggcaccucaggcucuggccu

SEQ ID NO: 350988 - RNA, 32 nt, Human
cagcacauugaauggguaagcagacaggccau

SEQ ID NO: 350989 - RNA, 32 nt, Human
cagcacauugacccauagcacacacauacaca

SEQ ID NO: 350990 - RNA, 18 nt, Human
cagcacauugacuauaga

SEQ ID NO: 350991 - RNA, 32 nt, Human
cagcacauugggaggccgaggcaggcggauca

SEQ ID NO: 350992 - RNA, 32 nt, Human
cagcacauugggaggccgaggcgggcagaugu

SEQ ID NO: 350993 - RNA, 25 nt, Human
cagcacauuuuccuguaagcacuca

SEQ ID NO: 350994 - RNA, 32 nt, Human
cagcaccaaaccuggcugugcccauuccccac

SEQ ID NO: 350995 - RNA, 32 nt, Human
cagcaccaacagcacaguucuucauauccacg

SEQ ID NO: 350996 - RNA, 32 nt, Human
cagcaccaacaucugcugcuacucaaaauguc

SEQ ID NO: 350997 - RNA, 22 nt, Human
cagcaccaacugccaacgagcu

SEQ ID NO: 350998 - RNA, 32 nt, Human
cagcaccaagagcagcugggaacugacauagg

SEQ ID NO: 350999 - RNA, 32 nt, Human
cagcaccaaguacuaaacccacaaagcgaucg

SEQ ID NO: 351000 - RNA, 32 nt, Human
cagcaccaccaccaccaccaccaccaccuacu

SEQ ID NO: 351001 - RNA, 32 nt, Human
cagcaccacccagggacgggaggcaugagccg

SEQ ID NO: 351002 - RNA, 32 nt, Human
cagcaccaccuacacaggagucuucagaccca

SEQ ID NO: 351003 - RNA, 21 nt, Human
cagcaccacggaccuuggcgc

SEQ ID NO: 351004 - RNA, 32 nt, Human
cagcaccacugcacagagcuuugggaggcugc

SEQ ID NO: 351005 - RNA, 32 nt, Human
cagcaccacugcacuccagccaggaaugaggc

SEQ ID NO: 351006 - RNA, 32 nt, Human
cagcaccacugcacuccagccugggugacaga

SEQ ID NO: 351007 - RNA, 19 nt, Human
cagcaccacugccugcucc

SEQ ID NO: 351008 - RNA, 32 nt, Human
cagcaccagcagaucugccugugcacagacuu

SEQ ID NO: 351009 - RNA, 32 nt, Human
cagcaccagcagcagaggaaacccaggaaaaa

SEQ ID NO: 351010 - RNA, 23 nt, Human
cagcaccagcagcucuugccacc

SEQ ID NO: 351011 - RNA, 32 nt, Human
cagcaccagcgccaggagggggagcugggcau

SEQ ID NO: 351012 - RNA, 32 nt, Human
cagcaccaggcagagggcaagacggagagggc

SEQ ID NO: 351013 - RNA, 32 nt, Human
cagcaccaggcagaugaugcagaggagugagc

SEQ ID NO: 351014 - RNA, 32 nt, Human
cagcaccaggcaggcaguccugucugcgugug

SEQ ID NO: 351015 - RNA, 23 nt, Human
cagcaccagugacaggcugguca

SEQ ID NO: 351016 - RNA, 32 nt, Human
cagcaccauccagcugugcccaagaagccacc

SEQ ID NO: 351017 - RNA, 32 nt, Human
cagcaccaugcuuccuauacagccugcagaac

SEQ ID NO: 351018 - RNA, 20 nt, Human
cagcaccauggaggcaggcu

SEQ ID NO: 351019 - RNA, 32 nt, Human
cagcacccaacuuuaccacccucccccaccuc

SEQ ID NO: 351020 - RNA, 32 nt, Human
cagcacccaagugcccuccccucacaguguca

SEQ ID NO: 351021 - RNA, 32 nt, Human
cagcacccacacugggucuccacagcggcaug

SEQ ID NO: 351022 - RNA, 32 nt, Human
cagcacccagacucagggaugagugcagcguc

SEQ ID NO: 351023 - RNA, 32 nt, Human
cagcacccagaggccgggucugcaccgugccc

SEQ ID NO: 351024 - RNA, 32 nt, Human
cagcacccagggaagaucuguccuccuguucu

SEQ ID NO: 351025 - RNA, 18 nt, Human
cagcacccagggcugccu

SEQ ID NO: 351026 - RNA, 32 nt, Human
cagcacccaggucuuaguuuucaccucuaguu

SEQ ID NO: 351027 - RNA, 32 nt, Human
cagcacccagguuuugcacucuuguuucuccc

SEQ ID NO: 351028 - RNA, 21 nt, Human
cagcacccaucagggaacuca

SEQ ID NO: 351029 - RNA, 32 nt, Human
cagcaccccauccuguuguucccagagcuggu

SEQ ID NO: 351030 - RNA, 21 nt, Human
cagcacccccucccagcacca

SEQ ID NO: 351031 - RNA, 32 nt, Human
cagcaccccuucugaccucugugugguggauc

SEQ ID NO: 351032 - RNA, 32 nt, Human
cagcaccccuuuccuuccucuccucccaccuc

SEQ ID NO: 351033 - RNA, 32 nt, Human
cagcacccgaugggcccaggagccagcaggag

SEQ ID NO: 351034 - RNA, 32 nt, Human
cagcacccgggcucagggaccacagcaaggca

SEQ ID NO: 351035 - RNA, 21 nt, Human
cagcacccuccaauggcauca

SEQ ID NO: 351036 - RNA, 32 nt, Human
cagcacccuccaggacaggagaucugggaugc

SEQ ID NO: 351037 - RNA, 20 nt, Human
cagcacccuccaugggcuca

SEQ ID NO: 351038 - RNA, 22 nt, Human
cagcacccuccccagggggugc

SEQ ID NO: 351039 - RNA, 32 nt, Human
cagcacccuccgggcuguggaggaccugauug

SEQ ID NO: 351040 - RNA, 32 nt, Human
cagcacccucuccaggugcucccaccacacac

SEQ ID NO: 351041 - RNA, 32 nt, Human
cagcacccucuuccucuucuaaccugcuuucu

SEQ ID NO: 351042 - RNA, 32 nt, Human
cagcacccugauuggccagcuccucaggugga

SEQ ID NO: 351043 - RNA, 32 nt, Human
cagcacccugcaagccagccuggccagcugcu

SEQ ID NO: 351044 - RNA, 32 nt, Human
cagcacccugggaggccgaggcagguggauca

SEQ ID NO: 351045 - RNA, 32 nt, Human
cagcacccugggucauucuugcaccugucacc

SEQ ID NO: 351046 - RNA, 18 nt, Human
cagcacccugugcugcug

SEQ ID NO: 351047 - RNA, 32 nt, Human
cagcaccgaccuccccugaucucccuccuccc

SEQ ID NO: 351048 - RNA, 32 nt, Human
cagcaccgaugcagucguggugaacaggaggu

SEQ ID NO: 351049 - RNA, 32 nt, Human
cagcaccgcccagcccuuccuugccuacuguc

SEQ ID NO: 351050 - RNA, 19 nt, Human
cagcaccgcgcuggcuggc

SEQ ID NO: 351051 - RNA, 32 nt, Human
cagcaccggaggaagaaagaggaggggcuggc

SEQ ID NO: 351052 - RNA, 24 nt, Human
cagcaccgggcucggagcuggcca

SEQ ID NO: 351053 - RNA, 23 nt, Human
cagcaccgugccaaccccaccca

SEQ ID NO: 351054 - RNA, 18 nt, Human
cagcaccuagaccugggg

SEQ ID NO: 351055 - RNA, 32 nt, Human
cagcaccucacugcaucugcagcucucgcucu

SEQ ID NO: 351056 - RNA, 23 nt, Human
cagcaccuccuacccugcuccgu

SEQ ID NO: 351057 - RNA, 32 nt, Human
cagcaccuccuuggccaccuugcauggaugca

SEQ ID NO: 351058 - RNA, 32 nt, Human
cagcaccucuuccagcccuuaaagcugcagaa

SEQ ID NO: 351059 - RNA, 32 nt, Human
cagcaccucuuucccguggcuccuguguucag

SEQ ID NO: 351060 - RNA, 32 nt, Human
cagcaccugcagcucccaccuugcagccgugg

SEQ ID NO: 351061 - RNA, 32 nt, Human
cagcaccugccuccucguuccuuucuccuguu

SEQ ID NO: 351062 - RNA, 32 nt, Human
cagcaccugccugagaccugccccaggcaccc

SEQ ID NO: 351063 - RNA, 20 nt, Human
cagcaccugcuuccugcucc

SEQ ID NO: 351064 - RNA, 32 nt, Human
cagcaccuggaggggcaccagguggaggguuu

SEQ ID NO: 351065 - RNA, 32 nt, Human
cagcaccuggaucuggaggagcccgcccagga

SEQ ID NO: 351066 - RNA, 19 nt, Human
cagcaccugggaggggcug

SEQ ID NO: 351067 - RNA, 32 nt, Human
cagcaccuguaaucccagcuacucaggaggcu

SEQ ID NO: 351068 - RNA, 32 nt, Human
cagcaccuguaaucccagcuacucgggagggu

SEQ ID NO: 351069 - RNA, 32 nt, Human
cagcaccuguuauguaccaggcacuuuaugua

SEQ ID NO: 351070 - RNA, 32 nt, Human
cagcaccuguucucuuggucaggagcuguaga

SEQ ID NO: 351071 - RNA, 32 nt, Human
cagcaccuucaccucuguuacuuccuucucac

SEQ ID NO: 351072 - RNA, 32 nt, Human
cagcaccuuccagagacaaggcugcaggcccu

SEQ ID NO: 351073 - RNA, 32 nt, Human
cagcaccuucccggcucaccagugccaccugc

SEQ ID NO: 351074 - RNA, 32 nt, Human
cagcaccuugggaggcccaggcaggcagauca

SEQ ID NO: 351075 - RNA, 32 nt, Human
cagcaccuugggaggccgagacggguguauaa

SEQ ID NO: 351076 - RNA, 32 nt, Human
cagcaccuugggaggccgaggcaggcagauca

SEQ ID NO: 351077 - RNA, 32 nt, Human
cagcaccuugggaggccgaggcaggcggauca

SEQ ID NO: 351078 - RNA, 32 nt, Human
cagcaccuugggaggccgaggcaggcggauua

SEQ ID NO: 351079 - RNA, 32 nt, Human
cagcaccuugggaggcuaagacaggaagauca

SEQ ID NO: 351080 - RNA, 32 nt, Human
cagcaccuugggaggcugaggcgggcagauca

SEQ ID NO: 351081 - RNA, 32 nt, Human
cagcacgagagccgggcucugcagggaggaag

SEQ ID NO: 351082 - RNA, 32 nt, Human
cagcacgaggggaaaagagcugagcggagacc

SEQ ID NO: 351083 - RNA, 32 nt, Human
cagcacgcccagcuaauuuuuguauuuuuagu

SEQ ID NO: 351084 - RNA, 32 nt, Human
cagcacgcccggcuaaguuuuguauuuuuggc

SEQ ID NO: 351085 - RNA, 32 nt, Human
cagcacgccuggcuaauuguuguauuuuaugu

SEQ ID NO: 351086 - RNA, 32 nt, Human
cagcacgcuucuugcgcauuugcacaucucca

SEQ ID NO: 351087 - RNA, 32 nt, Human
cagcacggaaggugggcugaggcccaggguga

SEQ ID NO: 351088 - RNA, 19 nt, Human
cagcacggaugauuuuuuc

SEQ ID NO: 351089 - RNA, 20 nt, Human
cagcacggcagugcugacca

SEQ ID NO: 351090 - RNA, 32 nt, Human
cagcacggccugaauauugggcaggacaccgc

SEQ ID NO: 351091 - RNA, 32 nt, Human
cagcacgggccagauggccagcugucgagagc

SEQ ID NO: 351092 - RNA, 32 nt, Human
cagcacgggcuuccggcuucucuccucagugg

SEQ ID NO: 351093 - RNA, 23 nt, Human
cagcacgguagcucacccuugua

SEQ ID NO: 351094 - RNA, 32 nt, Human
cagcacguacccagcaagacuuccuguccuga

SEQ ID NO: 351095 - RNA, 32 nt, Human
cagcacguaucagaagccagacuugcucuucg

SEQ ID NO: 351096 - RNA, 32 nt, Human
cagcacgucguguaguccuuucugccuccagg

SEQ ID NO: 351097 - RNA, 32 nt, Human
cagcacgucugccucuggcuucacccagccuc

SEQ ID NO: 351098 - RNA, 23 nt, Human
cagcacgugguuuuaugaaggua

SEQ ID NO: 351099 - RNA, 32 nt, Human
cagcacguugggaggcugaggcgggcggaucg

SEQ ID NO: 351100 - RNA, 32 nt, Human
cagcacguugggaggcugaggcgguagaauca

SEQ ID NO: 351101 - RNA, 32 nt, Human
cagcacuaacacaugcacacacaaagugcaua

SEQ ID NO: 351102 - RNA, 32 nt, Human
cagcacuaauugcaaggauuucucaggugacu

SEQ ID NO: 351103 - RNA, 20 nt, Human
cagcacuacuggugccugaa

SEQ ID NO: 351104 - RNA, 32 nt, Human
cagcacuaggacaccaggaggccagggaaagc

SEQ ID NO: 351105 - RNA, 32 nt, Human
cagcacuaggacaccaggaggccagguaacuu

SEQ ID NO: 351106 - RNA, 18 nt, Human
cagcacuaucauguguca

SEQ ID NO: 351107 - RNA, 20 nt, Human
cagcacuauccggacucuag

SEQ ID NO: 351108 - RNA, 32 nt, Human
cagcacuaugggaggccagggagggaggaucu

SEQ ID NO: 351109 - RNA, 32 nt, Human
cagcacuaugggaggcugaggcaagcagguug

SEQ ID NO: 351110 - RNA, 32 nt, Human
cagcacuaugggaggcugaggugggcagaucu

SEQ ID NO: 351111 - RNA, 20 nt, Human
cagcacuauuuauuuagccu

SEQ ID NO: 351112 - RNA, 32 nt, Human
cagcacucacggucaucaagccagccccugug

SEQ ID NO: 351113 - RNA, 32 nt, Human
cagcacucacucucccccuccucuucuggucu

SEQ ID NO: 351114 - RNA, 32 nt, Human
cagcacucagcccccuugcccaccucacuccu

SEQ ID NO: 351115 - RNA, 32 nt, Human
cagcacuccagaaaucucucugccaucauuac

SEQ ID NO: 351116 - RNA, 32 nt, Human
cagcacuccagccugggcgacagagugagacu

SEQ ID NO: 351117 - RNA, 32 nt, Human
cagcacucccaccagggaucccacccccgcag

SEQ ID NO: 351118 - RNA, 32 nt, Human
cagcacucccuccaaacagaccuugaggccca

SEQ ID NO: 351119 - RNA, 19 nt, Human
cagcacuccggaggagcag

SEQ ID NO: 351120 - RNA, 32 nt, Human
cagcacucuaauucacauccucagcaucccug

SEQ ID NO: 351121 - RNA, 32 nt, Human
cagcacucuggccuccuugcuguucuucagua

SEQ ID NO: 351122 - RNA, 32 nt, Human
cagcacucugggagaccgaggaagggggauug

SEQ ID NO: 351123 - RNA, 32 nt, Human
cagcacucugggaggcagagguggguggauca

SEQ ID NO: 351124 - RNA, 32 nt, Human
cagcacucugggaggccaaggugggcagauca

SEQ ID NO: 351125 - RNA, 32 nt, Human
cagcacucugggaggccgaggcaggcggauca

SEQ ID NO: 351126 - RNA, 32 nt, Human
cagcacucugggaggccgaggcggguggauca

SEQ ID NO: 351127 - RNA, 32 nt, Human
cagcacucugggaggccgaggugggcggauca

SEQ ID NO: 351128 - RNA, 32 nt, Human
cagcacucugggaggcggaggcgguggaucac

SEQ ID NO: 351129 - RNA, 32 nt, Human
cagcacucugggaggcugagacagguagauca

SEQ ID NO: 351130 - RNA, 32 nt, Human
cagcacucugggaggcugaggcgggcagauca

SEQ ID NO: 351131 - RNA, 32 nt, Human
cagcacucugggaggcugaggcggguggauca

SEQ ID NO: 351132 - RNA, 32 nt, Human
cagcacucugggaggcugaggugggcggauug

SEQ ID NO: 351133 - RNA, 22 nt, Human
cagcacugaaccugggaaagag

SEQ ID NO: 351134 - RNA, 32 nt, Human
cagcacugaaggagaugggaggggcugaugcc

SEQ ID NO: 351135 - RNA, 31 nt, Human
cagcacugacuucuguaucaugucagggauu

SEQ ID NO: 351136 - RNA, 32 nt, Human
cagcacugagauggaaccuggccucaguuuag

SEQ ID NO: 351137 - RNA, 32 nt, Human
cagcacugagccagcaccacacguccauccug

SEQ ID NO: 351138 - RNA, 23 nt, Human
cagcacugcaccccaggcagcca

SEQ ID NO: 351139 - RNA, 32 nt, Human
cagcacugcacugcagccugggugacaaagca

SEQ ID NO: 351140 - RNA, 32 nt, Human
cagcacugcacugcugccugggcgacagcgag

SEQ ID NO: 351141 - RNA, 23 nt, Human
cagcacugcacuguggugcggcu

SEQ ID NO: 351142 - RNA, 21 nt, Human
cagcacugcagccacaagcca

SEQ ID NO: 351143 - RNA, 32 nt, Human
cagcacugcagccucaaccuccugggcucaag

SEQ ID NO: 351144 - RNA, 32 nt, Human
cagcacugcaggacuuguggccagucacccag

SEQ ID NO: 351145 - RNA, 32 nt, Human
cagcacugcagucucccaucuccucgugggcu

SEQ ID NO: 351146 - RNA, 32 nt, Human
cagcacugcauucucuuugcacccucaaugca

SEQ ID NO: 351147 - RNA, 21 nt, Human
cagcacugcauuguccagcca

SEQ ID NO: 351148 - RNA, 32 nt, Human
cagcacugcccugggcuaugauuugcaacagc

SEQ ID NO: 351149 - RNA, 32 nt, Human
cagcacugccgcuccccaccccugagccagga

SEQ ID NO: 351150 - RNA, 32 nt, Human
cagcacugccuccuguuuucucccucucaugu

SEQ ID NO: 351151 - RNA, 19 nt, Human
cagcacugcgcggcgcggc

SEQ ID NO: 351152 - RNA, 18 nt, Human
cagcacuggaguuggcca

SEQ ID NO: 351153 - RNA, 18 nt, Human
cagcacuggcaucaggcc

SEQ ID NO: 351154 - RNA, 32 nt, Human
cagcacuggcgggggccuuuccugccgccgac

SEQ ID NO: 351155 - RNA, 23 nt, Human
cagcacuggcucucuccaggauc

SEQ ID NO: 351156 - RNA, 19 nt, Human
cagcacuggcucugggacu

SEQ ID NO: 351157 - RNA, 18 nt, Human
cagcacuggcuggagcag

SEQ ID NO: 351158 - RNA, 22 nt, Human
cagcacuggcuggagcaggcca

SEQ ID NO: 351159 - RNA, 16 nt, Human
cagcacuggcuggggc

SEQ ID NO: 351160 - RNA, 32 nt, Human
cagcacugggaaagauauaauugaaacaaaau

SEQ ID NO: 351161 - RNA, 32 nt, Human
cagcacugggagcugcuccgcccuugccuugg

SEQ ID NO: 351162 - RNA, 32 nt, Human
cagcacugggaggaggcggugcggcgaagcgc

SEQ ID NO: 351163 - RNA, 21 nt, Human
cagcacugggaggccgagggg

SEQ ID NO: 351164 - RNA, 22 nt, Human
cagcacugggauccaagcaggg

SEQ ID NO: 351165 - RNA, 32 nt, Human
cagcacugggcaggcacagagcaggggcugcc

SEQ ID NO: 351166 - RNA, 23 nt, Human
cagcacugggcuggggcagggcu

SEQ ID NO: 351167 - RNA, 18 nt, Human
cagcacuggggggaccuc

SEQ ID NO: 351168 - RNA, 32 nt, Human
cagcacugggguggaggcggcaggaaggggcg

SEQ ID NO: 351169 - RNA, 25 nt, Human
cagcacugggugcucaggcuggcca

SEQ ID NO: 351170 - RNA, 32 nt, Human
cagcacuggugucucugugcuuccuucacuuc

SEQ ID NO: 351171 - RNA, 32 nt, Human
cagcacuguaaagaacaaaggccagugcgagg

SEQ ID NO: 351172 - RNA, 32 nt, Human
cagcacuguaaugccaguggcauugaauugcu

SEQ ID NO: 351173 - RNA, 32 nt, Human
cagcacuguacuccagccugggcgauggagca

SEQ ID NO: 351174 - RNA, 32 nt, Human
cagcacuguaggcucccaacccuaggcuguuu

SEQ ID NO: 351175 - RNA, 32 nt, Human
cagcacuguccacccagggagaguccauuaag

SEQ ID NO: 351176 - RNA, 32 nt, Human
cagcacuguccagcacuugccugcuccugucu

SEQ ID NO: 351177 - RNA, 32 nt, Human
cagcacugucucggcucacugcagccuccgcc

SEQ ID NO: 351178 - RNA, 32 nt, Human
cagcacugucugcgucugcucuucugugccca

SEQ ID NO: 351179 - RNA, 32 nt, Human
cagcacugugagaggcugaggcgggaugauca

SEQ ID NO: 351180 - RNA, 20 nt, Human
cagcacugugagcaggggcu

SEQ ID NO: 351181 - RNA, 23 nt, Human
cagcacugugcaugcaacagcca

SEQ ID NO: 351182 - RNA, 32 nt, Human
cagcacugugggaggccgaggcgggcggauca

SEQ ID NO: 351183 - RNA, 32 nt, Human
cagcacugugggaggccgaggcgggcggaucg

SEQ ID NO: 351184 - RNA, 32 nt, Human
cagcacugugggaggccgaggcggguggauca

SEQ ID NO: 351185 - RNA, 32 nt, Human
cagcacugugggaggccgaggugggucgacua

SEQ ID NO: 351186 - RNA, 32 nt, Human
cagcacugugggaggcugaggcggguggauca

SEQ ID NO: 351187 - RNA, 32 nt, Human
cagcacuguguguuggccgcacccaugagagc

SEQ ID NO: 351188 - RNA, 32 nt, Human
cagcacuguguuugaacacccuggugacuagg

SEQ ID NO: 351189 - RNA, 20 nt, Human
cagcacuguucaucuggcca

SEQ ID NO: 351190 - RNA, 32 nt, Human
cagcacuucccaagccugcugaccacagucac

SEQ ID NO: 351191 - RNA, 32 nt, Human
cagcacuuccccauguccuuucaccuucaugu

SEQ ID NO: 351192 - RNA, 32 nt, Human
cagcacuuccucuugcccuccuggcuuuaugu

SEQ ID NO: 351193 - RNA, 21 nt, Human
cagcacuuccuguccgcccuu

SEQ ID NO: 351194 - RNA, 32 nt, Human
cagcacuucucccacuuugucccgagccuccu

SEQ ID NO: 351195 - RNA, 32 nt, Human
cagcacuugcaaggcuagagggaaacugguga

SEQ ID NO: 351196 - RNA, 32 nt, Human
cagcacuugcccauuccuuacaccccuucccc

SEQ ID NO: 351197 - RNA, 32 nt, Human
cagcacuuguuagcuggguguuuuuggccagg

SEQ ID NO: 351198 - RNA, 32 nt, Human
cagcacuuucaucagauccugccuccuggagu

SEQ ID NO: 351199 - RNA, 32 nt, Human
cagcacuuucggaggcagaggcaggcggauca

SEQ ID NO: 351200 - RNA, 21 nt, Human
cagcacuuucggaggccgagg

SEQ ID NO: 351201 - RNA, 32 nt, Human
cagcacuuucuccucccuugucaguuugcaaa

SEQ ID NO: 351202 - RNA, 32 nt, Human
cagcacuuugagagacugagacaggaggauca

SEQ ID NO: 351203 - RNA, 21 nt, Human
cagcacuuugagaggccgagg

SEQ ID NO: 351204 - RNA, 20 nt, Human
cagcacuuuggaggccaagg

SEQ ID NO: 351205 - RNA, 32 nt, Human
cagcacuuugggaaguggaggugggagaauca

SEQ ID NO: 351206 - RNA, 32 nt, Human
cagcacuuugggaggcaaaggcgggcagauca

SEQ ID NO: 351207 - RNA, 32 nt, Human
cagcacuuugggaggcaaaggcgggcggauca

SEQ ID NO: 351208 - RNA, 32 nt, Human
cagcacuuugggaggcaaagguggguagauca

SEQ ID NO: 351209 - RNA, 32 nt, Human
cagcacuuugggaggcagagacaggcaggucg

SEQ ID NO: 351210 - RNA, 32 nt, Human
cagcacuuugggaggcagaggagggcggauca

SEQ ID NO: 351211 - RNA, 32 nt, Human
cagcacuuugggaggcagaggcaggcagauca

SEQ ID NO: 351212 - RNA, 32 nt, Human
cagcacuuugggaggcagaggccgguggguug

SEQ ID NO: 351213 - RNA, 32 nt, Human
cagcacuuugggaggcagaggcgggcggauca

SEQ ID NO: 351214 - RNA, 32 nt, Human
cagcacuuugggaggcagaggugggaggacug

SEQ ID NO: 351215 - RNA, 32 nt, Human
cagcacuuugggaggcagaggugggaggauug

SEQ ID NO: 351216 - RNA, 32 nt, Human
cagcacuuugggaggcagaggugggcagauca

SEQ ID NO: 351217 - RNA, 32 nt, Human
cagcacuuugggaggcagaggugggcggauca

SEQ ID NO: 351218 - RNA, 32 nt, Human
cagcacuuugggaggcagaggugggcggaucg

SEQ ID NO: 351219 - RNA, 32 nt, Human
cagcacuuugggaggcagagguggguggauca

SEQ ID NO: 351220 - RNA, 32 nt, Human
cagcacuuugggaggcagaguugggaggauca

SEQ ID NO: 351221 - RNA, 32 nt, Human
cagcacuuugggaggcagcagcuggcggauca

SEQ ID NO: 351222 - RNA, 32 nt, Human
cagcacuuugggaggcaggggcggguggauca

SEQ ID NO: 351223 - RNA, 32 nt, Human
cagcacuuugggaggccaagacaggaggauca

SEQ ID NO: 351224 - RNA, 32 nt, Human
cagcacuuugggaggccaaggcaggcaaucac

SEQ ID NO: 351225 - RNA, 32 nt, Human
cagcacuuugggaggccaaggcaggcagacca

SEQ ID NO: 351226 - RNA, 32 nt, Human
cagcacuuugggaggccaaggcaggcagauaa

SEQ ID NO: 351227 - RNA, 32 nt, Human
cagcacuuugggaggccaaggcaggcagauca

SEQ ID NO: 351228 - RNA, 32 nt, Human
cagcacuuugggaggccaaggcagguagauua

SEQ ID NO: 351229 - RNA, 32 nt, Human
cagcacuuugggaggccaaggcggacagacca

SEQ ID NO: 351230 - RNA, 32 nt, Human
cagcacuuugggaggccaaggcgggcagacca

SEQ ID NO: 351231 - RNA, 32 nt, Human
cagcacuuugggaggccaaggcgggcagauca

SEQ ID NO: 351232 - RNA, 32 nt, Human
cagcacuuugggaggccaaggcggguagauca

SEQ ID NO: 351233 - RNA, 32 nt, Human
cagcacuuugggaggccaaggcguguggauca

SEQ ID NO: 351234 - RNA, 32 nt, Human
cagcacuuugggaggccaaggugcaaggcggg

SEQ ID NO: 351235 - RNA, 32 nt, Human
cagcacuuugggaggccaaggugggaggauua

SEQ ID NO: 351236 - RNA, 32 nt, Human
cagcacuuugggaggccaaggugggaggauug

SEQ ID NO: 351237 - RNA, 32 nt, Human
cagcacuuugggaggccaaggugggagggaag

SEQ ID NO: 351238 - RNA, 32 nt, Human
cagcacuuugggaggccaagguuggcagauca

SEQ ID NO: 351239 - RNA, 32 nt, Human
cagcacuuugggaggccaaugcaggaagauca

SEQ ID NO: 351240 - RNA, 32 nt, Human
cagcacuuugggaggccgaagcaggcagauca

SEQ ID NO: 351241 - RNA, 32 nt, Human
cagcacuuugggaggccgagacaggcagauca

SEQ ID NO: 351242 - RNA, 32 nt, Human
cagcacuuugggaggccgagacaggcagaucg

SEQ ID NO: 351243 - RNA, 32 nt, Human
cagcacuuugggaggccgagacgggcagauca

SEQ ID NO: 351244 - RNA, 21 nt, Human
cagcacuuugggaggccgagg

SEQ ID NO: 351245 - RNA, 32 nt, Human
cagcacuuugggaggccgaggagggcagagau

SEQ ID NO: 351246 - RNA, 32 nt, Human
cagcacuuugggaggccgaggagggcagauca

SEQ ID NO: 351247 - RNA, 32 nt, Human
cagcacuuugggaggccgaggcagcagauugc

SEQ ID NO: 351248 - RNA, 32 nt, Human
cagcacuuugggaggccgaggcaggcagauca

SEQ ID NO: 351249 - RNA, 32 nt, Human
cagcacuuugggaggccgaggcaggcgaauca

SEQ ID NO: 351250 - RNA, 32 nt, Human
cagcacuuugggaggccgaggcaggcggauca

SEQ ID NO: 351251 - RNA, 32 nt, Human
cagcacuuugggaggccgaggcaggcggcuca

SEQ ID NO: 351252 - RNA, 32 nt, Human
cagcacuuugggaggccgaggcaggcgggcca

SEQ ID NO: 351253 - RNA, 32 nt, Human
cagcacuuugggaggccgaggcauguggauca

SEQ ID NO: 351254 - RNA, 32 nt, Human
cagcacuuugggaggccgaggccggcaaauca

SEQ ID NO: 351255 - RNA, 32 nt, Human
cagcacuuugggaggccgaggccggcagauca

SEQ ID NO: 351256 - RNA, 32 nt, Human
cagcacuuugggaggccgaggccggcggauca

SEQ ID NO: 351257 - RNA, 32 nt, Human
cagcacuuugggaggccgaggccggugauuca

SEQ ID NO: 351258 - RNA, 32 nt, Human
cagcacuuugggaggccgaggcgagcagauca

SEQ ID NO: 351259 - RNA, 32 nt, Human
cagcacuuugggaggccgaggcggacagauca

SEQ ID NO: 351260 - RNA, 32 nt, Human
cagcacuuugggaggccgaggcgggcagauca

SEQ ID NO: 351261 - RNA, 32 nt, Human
cagcacuuugggaggccgaggcgggcagauga

SEQ ID NO: 351262 - RNA, 32 nt, Human
cagcacuuugggaggccgaggcgggcgaauca

SEQ ID NO: 351263 - RNA, 32 nt, Human
cagcacuuugggaggccgaggcgggcggauca

SEQ ID NO: 351264 - RNA, 32 nt, Human
cagcacuuugggaggccgaggcgggcggaucg

SEQ ID NO: 351265 - RNA, 32 nt, Human
cagcacuuugggaggccgaggcgggcggaucu

SEQ ID NO: 351266 - RNA, 32 nt, Human
cagcacuuugggaggccgaggcgggcggauga

SEQ ID NO: 351267 - RNA, 32 nt, Human
cagcacuuugggaggccgaggcgggcggcuca

SEQ ID NO: 351268 - RNA, 32 nt, Human
cagcacuuugggaggccgaggcgggcggguca

SEQ ID NO: 351269 - RNA, 32 nt, Human
cagcacuuugggaggccgaggcgggugaauca

SEQ ID NO: 351270 - RNA, 32 nt, Human
cagcacuuugggaggccgaggcgggugaucac

SEQ ID NO: 351271 - RNA, 32 nt, Human
cagcacuuugggaggccgaggcguguggauca

SEQ ID NO: 351272 - RNA, 32 nt, Human
cagcacuuugggaggccgaggcuggcggauca

SEQ ID NO: 351273 - RNA, 32 nt, Human
cagcacuuugggaggccgaggcugggggauug

SEQ ID NO: 351274 - RNA, 23 nt, Human
cagcacuuugggaggccgagggg

SEQ ID NO: 351275 - RNA, 32 nt, Human
cagcacuuugggaggccgagguaggcagauca

SEQ ID NO: 351276 - RNA, 32 nt, Human
cagcacuuugggaggccgagguaggcggauca

SEQ ID NO: 351277 - RNA, 32 nt, Human
cagcacuuugggaggccgagguaggcggaucu

SEQ ID NO: 351278 - RNA, 32 nt, Human
cagcacuuugggaggccgaggucaggaguugg

SEQ ID NO: 351279 - RNA, 32 nt, Human
cagcacuuugggaggccgaggugagcagauca

SEQ ID NO: 351280 - RNA, 32 nt, Human
cagcacuuugggaggccgaggugagcggauca

SEQ ID NO: 351281 - RNA, 32 nt, Human
cagcacuuugggaggccgaggugaguagauca

SEQ ID NO: 351282 - RNA, 32 nt, Human
cagcacuuugggaggccgaggugcauggauca

SEQ ID NO: 351283 - RNA, 32 nt, Human
cagcacuuugggaggccgaggugggaggauug

SEQ ID NO: 351284 - RNA, 32 nt, Human
cagcacuuugggaggccgaggugggcaaauca

SEQ ID NO: 351285 - RNA, 32 nt, Human
cagcacuuugggaggccgaggugggcaaauua

SEQ ID NO: 351286 - RNA, 32 nt, Human
cagcacuuugggaggccgaggugggcagauca

SEQ ID NO: 351287 - RNA, 32 nt, Human
cagcacuuugggaggccgaggugggcggauca

SEQ ID NO: 351288 - RNA, 32 nt, Human
cagcacuuugggaggccgaggugggcggaucc

SEQ ID NO: 351289 - RNA, 32 nt, Human
cagcacuuugggaggccgaggugggcggguca

SEQ ID NO: 351290 - RNA, 32 nt, Human
cagcacuuugggaggccgagguggguagauac

SEQ ID NO: 351291 - RNA, 32 nt, Human
cagcacuuugggaggccgagguuggaggauca

SEQ ID NO: 351292 - RNA, 32 nt, Human
cagcacuuugggaggccuaggcaggcagacug

SEQ ID NO: 351293 - RNA, 32 nt, Human
cagcacuuugggaggccuaggcgggcagauca

SEQ ID NO: 351294 - RNA, 32 nt, Human
cagcacuuugggaggcggaggcaggcggaucg

SEQ ID NO: 351295 - RNA, 32 nt, Human
cagcacuuugggaggcggaggcaggcggguug

SEQ ID NO: 351296 - RNA, 32 nt, Human
cagcacuuugggaggcggaggugagcagauca

SEQ ID NO: 351297 - RNA, 32 nt, Human
cagcacuuugggaggcuaaggcaggcagauca

SEQ ID NO: 351298 - RNA, 32 nt, Human
cagcacuuugggaggcugaagcaggcagauca

SEQ ID NO: 351299 - RNA, 32 nt, Human
cagcacuuugggaggcugagacaggcagauca

SEQ ID NO: 351300 - RNA, 32 nt, Human
cagcacuuugggaggcugagacgggcagauca

SEQ ID NO: 351301 - RNA, 32 nt, Human
cagcacuuugggaggcugaggaaggcaaauca

SEQ ID NO: 351302 - RNA, 32 nt, Human
cagcacuuugggaggcugaggaaggcagaucu

SEQ ID NO: 351303 - RNA, 32 nt, Human
cagcacuuugggaggcugaggagagcagauca

SEQ ID NO: 351304 - RNA, 32 nt, Human
cagcacuuugggaggcugaggagggcagauca

SEQ ID NO: 351305 - RNA, 32 nt, Human
cagcacuuugggaggcugaggcaagcggauca

SEQ ID NO: 351306 - RNA, 32 nt, Human
cagcacuuugggaggcugaggcaggcagauca

SEQ ID NO: 351307 - RNA, 32 nt, Human
cagcacuuugggaggcugaggcaggcggacac

SEQ ID NO: 351308 - RNA, 32 nt, Human
cagcacuuugggaggcugaggcaggcggauca

SEQ ID NO: 351309 - RNA, 32 nt, Human
cagcacuuugggaggcugaggcaggcggguca

SEQ ID NO: 351310 - RNA, 32 nt, Human
cagcacuuugggaggcugaggcagguagcuca

SEQ ID NO: 351311 - RNA, 32 nt, Human
cagcacuuugggaggcugaggcaggugaauca

SEQ ID NO: 351312 - RNA, 32 nt, Human
cagcacuuugggaggcugaggccggcagauca

SEQ ID NO: 351313 - RNA, 32 nt, Human
cagcacuuugggaggcugaggcgggcaaaaca

SEQ ID NO: 351314 - RNA, 32 nt, Human
cagcacuuugggaggcugaggcgggcagauca

SEQ ID NO: 351315 - RNA, 32 nt, Human
cagcacuuugggaggcugaggcgggcagauug

SEQ ID NO: 351316 - RNA, 32 nt, Human
cagcacuuugggaggcugaggcgggcgaauca

SEQ ID NO: 351317 - RNA, 32 nt, Human
cagcacuuugggaggcugaggcgggcggaaca

SEQ ID NO: 351318 - RNA, 32 nt, Human
cagcacuuugggaggcugaggcgggcggauca

SEQ ID NO: 351319 - RNA, 32 nt, Human
cagcacuuugggaggcugaggcgggugaauca

SEQ ID NO: 351320 - RNA, 32 nt, Human
cagcacuuugggaggcugaggcggucagauca

SEQ ID NO: 351321 - RNA, 32 nt, Human
cagcacuuugggaggcugaggcuggcagauca

SEQ ID NO: 351322 - RNA, 32 nt, Human
cagcacuuugggaggcugaggcuggcgaauca

SEQ ID NO: 351323 - RNA, 32 nt, Human
cagcacuuugggaggcugaggcugggggauca

SEQ ID NO: 351324 - RNA, 32 nt, Human
cagcacuuugggaggcugagguaggcagauca

SEQ ID NO: 351325 - RNA, 32 nt, Human
cagcacuuugggaggcugagguggacagauca

SEQ ID NO: 351326 - RNA, 32 nt, Human
cagcacuuugggaggcugaggugggagaauug

SEQ ID NO: 351327 - RNA, 32 nt, Human
cagcacuuugggaggcugaggugggaggguug

SEQ ID NO: 351328 - RNA, 32 nt, Human
cagcacuuugggaggcugaggugggcagauca

SEQ ID NO: 351329 - RNA, 32 nt, Human
cagcacuuugggaggcugaggugggcagaucg

SEQ ID NO: 351330 - RNA, 32 nt, Human
cagcacuuugggaggcugaggugggcagguca

SEQ ID NO: 351331 - RNA, 32 nt, Human
cagcacuuugggaggcugaggugggcgaauca

SEQ ID NO: 351332 - RNA, 32 nt, Human
cagcacuuugggaggcugaggugggcggauca

SEQ ID NO: 351333 - RNA, 32 nt, Human
cagcacuuugggaggcugaggugggcggcuca

SEQ ID NO: 351334 - RNA, 32 nt, Human
cagcacuuugggaggcugagguggguagauua

SEQ ID NO: 351335 - RNA, 32 nt, Human
cagcacuuugggaggcugagguggucagauca

SEQ ID NO: 351336 - RNA, 32 nt, Human
cagcacuuugggaggcugcggcaggcagauug

SEQ ID NO: 351337 - RNA, 32 nt, Human
cagcacuuugggaggcuggggcgagcggauca

SEQ ID NO: 351338 - RNA, 32 nt, Human
cagcacuuugggaggcuguggcaggcagauua

SEQ ID NO: 351339 - RNA, 32 nt, Human
cagcacuuugggagguggaggcggguggauca

SEQ ID NO: 351340 - RNA, 32 nt, Human
cagcacuuugggagguggaggcgugcggauca

SEQ ID NO: 351341 - RNA, 32 nt, Human
cagcacuuugggagguggaggugggcggauca

SEQ ID NO: 351342 - RNA, 32 nt, Human
cagcacuuugugggaaagacagaggugggagg

SEQ ID NO: 351343 - RNA, 32 nt, Human
cagcacuuuugguuugaguuaucugagauugu

SEQ ID NO: 351344 - RNA, 32 nt, Human
cagcagaaaaucuacucuuuagcaauauauaa

SEQ ID NO: 351345 - RNA, 19 nt, Human
cagcagaaagcccccaacc

SEQ ID NO: 351346 - RNA, 32 nt, Human
cagcagaaccauugggaccugaggcaggagug

SEQ ID NO: 351347 - RNA, 17 nt, Human
cagcagaacgcuggcau

SEQ ID NO: 351348 - RNA, 32 nt, Human
cagcagaagaaacaaacuaaaugagugagcgg

SEQ ID NO: 351349 - RNA, 32 nt, Human
cagcagaagaaagaagaagguguugggguagg

SEQ ID NO: 351350 - RNA, 32 nt, Human
cagcagaagaaggaacugagcaguugaacucu

SEQ ID NO: 351351 - RNA, 32 nt, Human
cagcagaagauuaagagcugagggccuccuuu

SEQ ID NO: 351352 - RNA, 21 nt, Human
cagcagaagcagaugcaccug

SEQ ID NO: 351353 - RNA, 32 nt, Human
cagcagaagcagcacaagacccccaagcaucg

SEQ ID NO: 351354 - RNA, 21 nt, Human
cagcagaagcagcagcagcag

SEQ ID NO: 351355 - RNA, 32 nt, Human
cagcagaagccuucauacaacaugacgaaaca

SEQ ID NO: 351356 - RNA, 32 nt, Human
cagcagaaggagcugcggaaucagggcucaac

SEQ ID NO: 351357 - RNA, 31 nt, Human
cagcagaagguuagagaaaaagagauugcau

SEQ ID NO: 351358 - RNA, 32 nt, Human
cagcagaagguuagagaaaaagagauugcaua

SEQ ID NO: 351359 - RNA, 32 nt, Human
cagcagaauuuucuccccgucuuccccuuccu

SEQ ID NO: 351360 - RNA, 32 nt, Human
cagcagacaaggagaagagcaaggguucccuc

SEQ ID NO: 351361 - RNA, 32 nt, Human
cagcagacaauccaggcugaugcuuuugcuga

SEQ ID NO: 351362 - RNA, 32 nt, Human
cagcagacaucaaggaccugggcagaugggcc

SEQ ID NO: 351363 - RNA, 32 nt, Human
cagcagacaugauggggagagccuucuaauaa

SEQ ID NO: 351364 - RNA, 32 nt, Human
cagcagaccagccuggccaaugccuaugggug

SEQ ID NO: 351365 - RNA, 32 nt, Human
cagcagaccaggagacuggucccaagguuacu

SEQ ID NO: 351366 - RNA, 21 nt, Human
cagcagacccagcagcagcag

SEQ ID NO: 351367 - RNA, 32 nt, Human
cagcagacccucagccccuccuaggcccugua

SEQ ID NO: 351368 - RNA, 32 nt, Human
cagcagacgccccuuuccuccuggugcccuga

SEQ ID NO: 351369 - RNA, 32 nt, Human
cagcagacucaggcccuccaugguccucuuug

SEQ ID NO: 351370 - RNA, 32 nt, Human
cagcagacucuccagcccucuuccuccuuccu

SEQ ID NO: 351371 - RNA, 32 nt, Human
cagcagagaagaccuccaguauaucgcaggcc

SEQ ID NO: 351372 - RNA, 32 nt, Human
cagcagagagcagagagcagaaagcaguccua

SEQ ID NO: 351373 - RNA, 32 nt, Human
cagcagagaggccagagguagcuggugauacc

SEQ ID NO: 351374 - RNA, 32 nt, Human
cagcagagcaaacugcuuuccagccugaagcc

SEQ ID NO: 351375 - RNA, 20 nt, Human
cagcagagcacucccuccca

SEQ ID NO: 351376 - RNA, 32 nt, Human
cagcagagcagaggagaauuguacauuugggg

SEQ ID NO: 351377 - RNA, 32 nt, Human
cagcagagcaugggugacagugggagcacacg

SEQ ID NO: 351378 - RNA, 32 nt, Human
cagcagagccaggagagguugggugacaccca

SEQ ID NO: 351379 - RNA, 32 nt, Human
cagcagagccgggugugguggggacccgggag

SEQ ID NO: 351380 - RNA, 32 nt, Human
cagcagaggaagcacgggcagcagcccuuacc

SEQ ID NO: 351381 - RNA, 18 nt, Human
cagcagaggauuggcaua

SEQ ID NO: 351382 - RNA, 32 nt, Human
cagcagaggccuccccugucaaggcuucccgu

SEQ ID NO: 351383 - RNA, 32 nt, Human
cagcagagggccggccacaagcgaguguccuu

SEQ ID NO: 351384 - RNA, 23 nt, Human
cagcagaguccugccuccuccca

SEQ ID NO: 351385 - RNA, 23 nt, Human
cagcagaguugaaaauugccucc

SEQ ID NO: 351386 - RNA, 32 nt, Human
cagcagaguugaguguugcaacagaaaccuau

SEQ ID NO: 351387 - RNA, 32 nt, Human
cagcagauaggagagcacugagcccggauagu

SEQ ID NO: 351388 - RNA, 32 nt, Human
cagcagaucaaaugguaaaugaggauagucag

SEQ ID NO: 351389 - RNA, 32 nt, Human
cagcagaucaacaggauggagcucuucaugac

SEQ ID NO: 351390 - RNA, 21 nt, Human
cagcagaucucagcagcccag

SEQ ID NO: 351391 - RNA, 32 nt, Human
cagcagaugaccaccaggcaggcucgggcgac

SEQ ID NO: 351392 - RNA, 23 nt, Human
cagcagaugauauugugcaguua

SEQ ID NO: 351393 - RNA, 32 nt, Human
cagcagaugcagaggacagaggccugggucuc

SEQ ID NO: 351394 - RNA, 23 nt, Human
cagcagcaaaugccacucugggc

SEQ ID NO: 351395 - RNA, 32 nt, Human
cagcagcaacacaggagaucaucuguccauuu

SEQ ID NO: 351396 - RNA, 24 nt, Human
cagcagcaacaccagcagcagcag

SEQ ID NO: 351397 - RNA, 32 nt, Human
cagcagcaacaguuuguguaccagucuaccac

SEQ ID NO: 351398 - RNA, 26 nt, Human
cagcagcaagagcccaggccccgggc

SEQ ID NO: 351399 - RNA, 22 nt, Human
cagcagcaaggacccugacgcu

SEQ ID NO: 351400 - RNA, 32 nt, Human
cagcagcaagggcagcagaguugggugcuaag

SEQ ID NO: 351401 - RNA, 24 nt, Human
cagcagcaauugcagcagcagcag

SEQ ID NO: 351402 - RNA, 32 nt, Human
cagcagcacaaccuugaccagagcuugggucc

SEQ ID NO: 351403 - RNA, 32 nt, Human
cagcagcacacagcaaccagucucucagcggg

SEQ ID NO: 351404 - RNA, 25 nt, Human
cagcagcacaugccacguucuaagc

SEQ ID NO: 351405 - RNA, 32 nt, Human
cagcagcacaugcgggucaucuucccagaagu

SEQ ID NO: 351406 - RNA, 32 nt, Human
cagcagcaccaccaccaccaccaccaccaccu

SEQ ID NO: 351407 - RNA, 22 nt, Human
cagcagcaccaguugacugcuc

SEQ ID NO: 351408 - RNA, 25 nt, Human
cagcagcacccccugcacgcugagc

SEQ ID NO: 351409 - RNA, 32 nt, Human
cagcagcacccugcaagccagccuggccagcu

SEQ ID NO: 351410 - RNA, 23 nt, Human
cagcagcacccuuccccugaggc

SEQ ID NO: 351411 - RNA, 32 nt, Human
cagcagcaccgagcuuuacaguguggaucagg

SEQ ID NO: 351412 - RNA, 21 nt, Human
cagcagcacucacaucccggc

SEQ ID NO: 351413 - RNA, 32 nt, Human
cagcagcacugagcucccacccgcagagccuc

SEQ ID NO: 351414 - RNA, 20 nt, Human
cagcagcagaaagcucaaag

SEQ ID NO: 351415 - RNA, 32 nt, Human
cagcagcagaagcagauauugggugaaagacu

SEQ ID NO: 351416 - RNA, 21 nt, Human
cagcagcagaagcagcagcag

SEQ ID NO: 351417 - RNA, 21 nt, Human
cagcagcagagcgcccugagg

SEQ ID NO: 351418 - RNA, 32 nt, Human
cagcagcagaggggcccuagagcccccacaga

SEQ ID NO: 351419 - RNA, 32 nt, Human
cagcagcagcacacaaaugacaagaagcggag

SEQ ID NO: 351420 - RNA, 32 nt, Human
cagcagcagcaccaccaccaccaccaccacca

SEQ ID NO: 351421 - RNA, 24 nt, Human
cagcagcagcaccagcagcaacag

SEQ ID NO: 351422 - RNA, 32 nt, Human
cagcagcagcagagagcagagagcagaaagca

SEQ ID NO: 351423 - RNA, 32 nt, Human
cagcagcagcagaggcagcagcgggcggcgcu

SEQ ID NO: 351424 - RNA, 32 nt, Human
cagcagcagcagcaaccacuagccuccugccc

SEQ ID NO: 351425 - RNA, 32 nt, Human
cagcagcagcagcaccaccaccaccaccacca

SEQ ID NO: 351426 - RNA, 18 nt, Human
cagcagcagcagcagcgg

SEQ ID NO: 351427 - RNA, 32 nt, Human
cagcagcagcagcaggcgaggaggaagauggc

SEQ ID NO: 351428 - RNA, 31 nt, Human
cagcagcagcagccggcgaggagggagcagc

SEQ ID NO: 351429 - RNA, 32 nt, Human
cagcagcagcaggucuggagggcugagaauga

SEQ ID NO: 351430 - RNA, 32 nt, Human
cagcagcagccacccucucucccagucaagug

SEQ ID NO: 351431 - RNA, 21 nt, Human
cagcagcagcccgaggccuga

SEQ ID NO: 351432 - RNA, 32 nt, Human
cagcagcagccgcggcugcggcugcaguggug

SEQ ID NO: 351433 - RNA, 20 nt, Human
cagcagcagccugaggcuga

SEQ ID NO: 351434 - RNA, 32 nt, Human
cagcagcagccuggcugccuugucauggccuc

SEQ ID NO: 351435 - RNA, 32 nt, Human
cagcagcagccuguguaucugcccccgggaaa

SEQ ID NO: 351436 - RNA, 20 nt, Human
cagcagcagcugacccaggc

SEQ ID NO: 351437 - RNA, 32 nt, Human
cagcagcagcuguggcagcacgcccagcgcca

SEQ ID NO: 351438 - RNA, 32 nt, Human
cagcagcaggauucugcagcuccuuuugugcc

SEQ ID NO: 351439 - RNA, 32 nt, Human
cagcagcaggcagaugaugcagaggagcgagc

SEQ ID NO: 351440 - RNA, 32 nt, Human
cagcagcaggcgcgcccuuccggccgcgagcu

SEQ ID NO: 351441 - RNA, 32 nt, Human
cagcagcagguacguacccaaccaugggcucg

SEQ ID NO: 351442 - RNA, 21 nt, Human
cagcagcaggugccugaacuc

SEQ ID NO: 351443 - RNA, 32 nt, Human
cagcagcagguuguggagguggccaugacagu

SEQ ID NO: 351444 - RNA, 32 nt, Human
cagcagcaguaucuuguucucuaauucauaga

SEQ ID NO: 351445 - RNA, 32 nt, Human
cagcagcagucacuguaacagacugccacaua

SEQ ID NO: 351446 - RNA, 24 nt, Human
cagcagcagucccagcagcagcag

SEQ ID NO: 351447 - RNA, 32 nt, Human
cagcagcaguuucaaguaagucgugcaguaaa

SEQ ID NO: 351448 - RNA, 32 nt, Human
cagcagcauaaauguaagcuuuuauaucauaa

SEQ ID NO: 351449 - RNA, 23 nt, Human
cagcagcauaauuccauccuagg

SEQ ID NO: 351450 - RNA, 32 nt, Human
cagcagcauaccaaaugcguucucuaaguucc

SEQ ID NO: 351451 - RNA, 21 nt, Human
cagcagcaucccaccccuggg

SEQ ID NO: 351452 - RNA, 23 nt, Human
cagcagcauccccuaccccaggc

SEQ ID NO: 351453 - RNA, 24 nt, Human
cagcagcauccgccaugucccagc

SEQ ID NO: 351454 - RNA, 19 nt, Human
cagcagcauccgccgccug

SEQ ID NO: 351455 - RNA, 32 nt, Human
cagcagcauccuccucucuggccuugccccag

SEQ ID NO: 351456 - RNA, 32 nt, Human
cagcagcaucucagccuccuacccacaauucc

SEQ ID NO: 351457 - RNA, 32 nt, Human
cagcagcaucuuaaagcacauccacagguuac

SEQ ID NO: 351458 - RNA, 23 nt, Human
cagcagcaugagggucccgaggc

SEQ ID NO: 351459 - RNA, 32 nt, Human
cagcagcaugcugagguguccauguugucugc

SEQ ID NO: 351460 - RNA, 32 nt, Human
cagcagcauuacaagcaugcugucaggcagag

SEQ ID NO: 351461 - RNA, 21 nt, Human
cagcagcauucaggccugggc

SEQ ID NO: 351462 - RNA, 32 nt, Human
cagcagccaaccugccaacaccuacugacacu

SEQ ID NO: 351463 - RNA, 19 nt, Human
cagcagccacagcuggggc

SEQ ID NO: 351464 - RNA, 32 nt, Human
cagcagccaccagggaagaggcagggagggag

SEQ ID NO: 351465 - RNA, 32 nt, Human
cagcagccacccugcagcaucugcccacgaac

SEQ ID NO: 351466 - RNA, 32 nt, Human
cagcagccaccgcacaacaccccugguggaag

SEQ ID NO: 351467 - RNA, 20 nt, Human
cagcagccacgacagcacca

SEQ ID NO: 351468 - RNA, 32 nt, Human
cagcagccacuaacaaacacacaacuggugug

SEQ ID NO: 351469 - RNA, 32 nt, Human
cagcagccagcaggcugggggagcagugaggg

SEQ ID NO: 351470 - RNA, 18 nt, Human
cagcagccagcccccucc

SEQ ID NO: 351471 - RNA, 32 nt, Human
cagcagccagcuaccccacuguguggcuggug

SEQ ID NO: 351472 - RNA, 32 nt, Human
cagcagccagcuaucucccacacccacggcug

SEQ ID NO: 351473 - RNA, 32 nt, Human
cagcagccaggauucuggcugaaggaaaugau

SEQ ID NO: 351474 - RNA, 21 nt, Human
cagcagccaggcuagcaccag

SEQ ID NO: 351475 - RNA, 22 nt, Human
cagcagccaugagcagcuccag

SEQ ID NO: 351476 - RNA, 32 nt, Human
cagcagccauggcgccuugugcagccuccuuu

SEQ ID NO: 351477 - RNA, 32 nt, Human
cagcagccauggguacauggguccccagcuca

SEQ ID NO: 351478 - RNA, 32 nt, Human
cagcagcccaagguggagggugcguggaaaug

SEQ ID NO: 351479 - RNA, 32 nt, Human
cagcagcccaggcuccacucacacaacacucu

SEQ ID NO: 351480 - RNA, 32 nt, Human
cagcagccccaccugcccccagccucugugac

SEQ ID NO: 351481 - RNA, 27 nt, Human
cagcagccccagcagcagcaacuccag

SEQ ID NO: 351482 - RNA, 27 nt, Human
cagcagccccagcagcagcagcuccag

SEQ ID NO: 351483 - RNA, 24 nt, Human
cagcagccccagcaguagcuccag

SEQ ID NO: 351484 - RNA, 24 nt, Human
cagcagccccagccccagccccag

SEQ ID NO: 351485 - RNA, 22 nt, Human
cagcagccccaggcaguaccag

SEQ ID NO: 351486 - RNA, 24 nt, Human
cagcagccccaguagcagcaacag

SEQ ID NO: 351487 - RNA, 24 nt, Human
cagcagccccaguagcagcagcag

SEQ ID NO: 351488 - RNA, 24 nt, Human
cagcagccccaguagcagcuccag

SEQ ID NO: 351489 - RNA, 24 nt, Human
cagcagccccaguaguagcagcag

SEQ ID NO: 351490 - RNA, 32 nt, Human
cagcagccccuccaagggccagggcaccuggg

SEQ ID NO: 351491 - RNA, 32 nt, Human
cagcagccccuccacaggcgcccccaccacag

SEQ ID NO: 351492 - RNA, 32 nt, Human
cagcagccccucccaucacaggcucagggacc

SEQ ID NO: 351493 - RNA, 22 nt, Human
cagcagccccucuuucaccuca

SEQ ID NO: 351494 - RNA, 32 nt, Human
cagcagccccugcgccaacaccaccuucugcu

SEQ ID NO: 351495 - RNA, 23 nt, Human
cagcagccccugggcagcaccag

SEQ ID NO: 351496 - RNA, 32 nt, Human
cagcagcccugcacuccacgcuggccaagaag

SEQ ID NO: 351497 - RNA, 32 nt, Human
cagcagcccugccugugaagcucuuguuucug

SEQ ID NO: 351498 - RNA, 32 nt, Human
cagcagcccuggacacuggcaauggacggccu

SEQ ID NO: 351499 - RNA, 32 nt, Human
cagcagcccuggacaguggcccccagcaguca

SEQ ID NO: 351500 - RNA, 32 nt, Human
cagcagcccuggacggcggugaguccccucag

SEQ ID NO: 351501 - RNA, 32 nt, Human
cagcagcccuggagagcagcagggggccuuca

SEQ ID NO: 351502 - RNA, 32 nt, Human
cagcagcccugggggugggugcaaugaggaug

SEQ ID NO: 351503 - RNA, 32 nt, Human
cagcagcccuugccagaugugccagggagugg

SEQ ID NO: 351504 - RNA, 32 nt, Human
cagcagccgcccggcuggcugcagaggccgag

SEQ ID NO: 351505 - RNA, 19 nt, Human
cagcagccgcucccgcucc

SEQ ID NO: 351506 - RNA, 32 nt, Human
cagcagccggguaggccucaccagaggcuccu

SEQ ID NO: 351507 - RNA, 32 nt, Human
cagcagccgguucuggguagcagaucaauuuc

SEQ ID NO: 351508 - RNA, 32 nt, Human
cagcagccgucacagccgccuccugagaugcc

SEQ ID NO: 351509 - RNA, 32 nt, Human
cagcagccuagacaggcccaggucuugccuca

SEQ ID NO: 351510 - RNA, 32 nt, Human
cagcagccucaacaggcacagcuccucccuca

SEQ ID NO: 351511 - RNA, 32 nt, Human
cagcagccucaacucuugccuccuuggaagaa

SEQ ID NO: 351512 - RNA, 32 nt, Human
cagcagccucacuagccccaccgucagucuuc

SEQ ID NO: 351513 - RNA, 32 nt, Human
cagcagccuccgcagucccuccagagacaugg

SEQ ID NO: 351514 - RNA, 32 nt, Human
cagcagccucuacacacccagcuccugccacc

SEQ ID NO: 351515 - RNA, 32 nt, Human
cagcagccucugcucuguggcuccauucaggc

SEQ ID NO: 351516 - RNA, 20 nt, Human
cagcagccugaggugguguc

SEQ ID NO: 351517 - RNA, 32 nt, Human
cagcagccugcagcccaggcaccccgcacccc

SEQ ID NO: 351518 - RNA, 32 nt, Human
cagcagccugccagcaguuacugugaauguuc

SEQ ID NO: 351519 - RNA, 32 nt, Human
cagcagccuggagaugucagcacucugagggc

SEQ ID NO: 351520 - RNA, 32 nt, Human
cagcagccuuggaagcagggugugcuccucgg

SEQ ID NO: 351521 - RNA, 22 nt, Human
cagcagccuuuaagaagugucc

SEQ ID NO: 351522 - RNA, 32 nt, Human
cagcagcgagaggcagaggcggcggcggcggg

SEQ ID NO: 351523 - RNA, 32 nt, Human
cagcagcgccucagugcccgagcugguccccu

SEQ ID NO: 351524 - RNA, 19 nt, Human
cagcagcgcgcuaugcgcu

SEQ ID NO: 351525 - RNA, 32 nt, Human
cagcagcgcugcaagcuggaggcugcgguggc

SEQ ID NO: 351526 - RNA, 24 nt, Human
cagcagcggcagaggcagcaccag

SEQ ID NO: 351527 - RNA, 21 nt, Human
cagcagcggcagcagcagcag

SEQ ID NO: 351528 - RNA, 24 nt, Human
cagcagcggcagcagcagcagcag

SEQ ID NO: 351529 - RNA, 32 nt, Human
cagcagcggccgcggccgcggugggcacgcac

SEQ ID NO: 351530 - RNA, 32 nt, Human
cagcagcggcggaguccaggaggagagcugga

SEQ ID NO: 351531 - RNA, 24 nt, Human
cagcagcggcggcagcagcagcag

SEQ ID NO: 351532 - RNA, 32 nt, Human
cagcagcggcugggaccccacaccuuucacgg

SEQ ID NO: 351533 - RNA, 19 nt, Human
cagcagcgggccgcgacgc

SEQ ID NO: 351534 - RNA, 32 nt, Human
cagcagcgggccgcgacgcccagccugccagu

SEQ ID NO: 351535 - RNA, 32 nt, Human
cagcagcgguggagacucucuccugugugugu

SEQ ID NO: 351536 - RNA, 32 nt, Human
cagcagcguccgcugcgucugcacugaugacc

SEQ ID NO: 351537 - RNA, 32 nt, Human
cagcagcgucuucccgccgcucccucuucucc

SEQ ID NO: 351538 - RNA, 32 nt, Human
cagcagcguggccugaaggccagcgagcccaa

SEQ ID NO: 351539 - RNA, 32 nt, Human
cagcagcguuuggaaagcagguucugugggac

SEQ ID NO: 351540 - RNA, 19 nt, Human
cagcagcuaagcugguuca

SEQ ID NO: 351541 - RNA, 32 nt, Human
cagcagcuacaaagacgacgccggcugcgcuc

SEQ ID NO: 351542 - RNA, 21 nt, Human
cagcagcuaccagcagcccag

SEQ ID NO: 351543 - RNA, 18 nt, Human
cagcagcuaccucaguga

SEQ ID NO: 351544 - RNA, 20 nt, Human
cagcagcuacuugguaguca

SEQ ID NO: 351545 - RNA, 32 nt, Human
cagcagcuagaaaugaaagaguagaagaagag

SEQ ID NO: 351546 - RNA, 32 nt, Human
cagcagcuagaauuuccaggggaaaguacugg

SEQ ID NO: 351547 - RNA, 32 nt, Human
cagcagcuagaugcaugccugaggcagggugg

SEQ ID NO: 351548 - RNA, 24 nt, Human
cagcagcuagugggagagcaccag

SEQ ID NO: 351549 - RNA, 18 nt, Human
cagcagcucaaggugcca

SEQ ID NO: 351550 - RNA, 32 nt, Human
cagcagcucaaggugccaucugccuggcaagc

SEQ ID NO: 351551 - RNA, 24 nt, Human
cagcagcucacgccuguaauccca

SEQ ID NO: 351552 - RNA, 24 nt, Human
cagcagcucaggccuguaaucuca

SEQ ID NO: 351553 - RNA, 20 nt, Human
cagcagcucagucacaguca

SEQ ID NO: 351554 - RNA, 32 nt, Human
cagcagcucaguugaguuagagucuggaagac

SEQ ID NO: 351555 - RNA, 21 nt, Human
cagcagcucaugccuguaauc

SEQ ID NO: 351556 - RNA, 24 nt, Human
cagcagcucaugccuguaauccua

SEQ ID NO: 351557 - RNA, 32 nt, Human
cagcagcuccacccucccaagugacaggccau

SEQ ID NO: 351558 - RNA, 21 nt, Human
cagcagcuccaccuuuaccag

SEQ ID NO: 351559 - RNA, 27 nt, Human
cagcagcuccagcaacagcagcagcag

SEQ ID NO: 351560 - RNA, 20 nt, Human
cagcagcuccagcagcagca

SEQ ID NO: 351561 - RNA, 27 nt, Human
cagcagcuccagcaguuacagcagcag

SEQ ID NO: 351562 - RNA, 32 nt, Human
cagcagcuccagccaccagugcccggucuccc

SEQ ID NO: 351563 - RNA, 32 nt, Human
cagcagcuccagcucagagcagugccagcccc

SEQ ID NO: 351564 - RNA, 19 nt, Human
cagcagcuccagggauguc

SEQ ID NO: 351565 - RNA, 18 nt, Human
cagcagcuccaguguguc

SEQ ID NO: 351566 - RNA, 20 nt, Human
cagcagcuccaucguuugca

SEQ ID NO: 351567 - RNA, 23 nt, Human
cagcagcuccaugagccacacag

SEQ ID NO: 351568 - RNA, 32 nt, Human
cagcagcucccaggaugaacugguugcagugg

SEQ ID NO: 351569 - RNA, 19 nt, Human
cagcagcuccccagcacca

SEQ ID NO: 351570 - RNA, 18 nt, Human
cagcagcucccucccguc

SEQ ID NO: 351571 - RNA, 20 nt, Human
cagcagcuccgcccgcaccg

SEQ ID NO: 351572 - RNA, 20 nt, Human
cagcagcuccgccuggcacc

SEQ ID NO: 351573 - RNA, 21 nt, Human
cagcagcuccgcgcccuccca

SEQ ID NO: 351574 - RNA, 22 nt, Human
cagcagcuccgcgcccucccag

SEQ ID NO: 351575 - RNA, 21 nt, Human
cagcagcuccgugccugcacc

SEQ ID NO: 351576 - RNA, 32 nt, Human
cagcagcuccuccagcugcaccaccuucagca

SEQ ID NO: 351577 - RNA, 21 nt, Human
cagcagcuccucucaagcuca

SEQ ID NO: 351578 - RNA, 19 nt, Human
cagcagcuccugagugcca

SEQ ID NO: 351579 - RNA, 32 nt, Human
cagcagcuccuugaagguccucugccuccagc

SEQ ID NO: 351580 - RNA, 18 nt, Human
cagcagcuccuuucugca

SEQ ID NO: 351581 - RNA, 21 nt, Human
cagcagcucuaccaugguguc

SEQ ID NO: 351582 - RNA, 32 nt, Human
cagcagcucugcaaccuccgcuccaccacuga

SEQ ID NO: 351583 - RNA, 19 nt, Human
cagcagcucugcuacguca

SEQ ID NO: 351584 - RNA, 19 nt, Human
cagcagcucuggaugcuca

SEQ ID NO: 351585 - RNA, 19 nt, Human
cagcagcucuguuggcuca

SEQ ID NO: 351586 - RNA, 31 nt, Human
cagcagcucuucuccuccaugccaagaccug

SEQ ID NO: 351587 - RNA, 32 nt, Human
cagcagcucuugggaaggacuugcugggaggc

SEQ ID NO: 351588 - RNA, 32 nt, Human
cagcagcugaaccaccugagcaccauccugac

SEQ ID NO: 351589 - RNA, 32 nt, Human
cagcagcugacuccuucuuccaccccucuucu

SEQ ID NO: 351590 - RNA, 19 nt, Human
cagcagcugaugaacguca

SEQ ID NO: 351591 - RNA, 22 nt, Human
cagcagcugcaauagcuccucu

SEQ ID NO: 351592 - RNA, 32 nt, Human
cagcagcugcagcugcuaagauggcccccaac

SEQ ID NO: 351593 - RNA, 32 nt, Human
cagcagcugcagcuguuucacaggcuguccuc

SEQ ID NO: 351594 - RNA, 32 nt, Human
cagcagcugcggacuuguccccggcuggagcc

SEQ ID NO: 351595 - RNA, 32 nt, Human
cagcagcuggacagccauuagaccucagugcc

SEQ ID NO: 351596 - RNA, 32 nt, Human
cagcagcuggaggaggaggaggaggauacgcc

SEQ ID NO: 351597 - RNA, 16 nt, Human
cagcagcuggagucua

SEQ ID NO: 351598 - RNA, 18 nt, Human
cagcagcuggcccagugu

SEQ ID NO: 351599 - RNA, 32 nt, Human
cagcagcuggcuggcuugacuuugccaacugc

SEQ ID NO: 351600 - RNA, 32 nt, Human
cagcagcugggaccccucccaaccucaaugcc

SEQ ID NO: 351601 - RNA, 32 nt, Human
cagcagcugggcagcccccagggcuccuccuc

SEQ ID NO: 351602 - RNA, 32 nt, Human
cagcagcugggcuggggugcaggucaucacag

SEQ ID NO: 351603 - RNA, 18 nt, Human
cagcagcugucggugccg

SEQ ID NO: 351604 - RNA, 32 nt, Human
cagcagcugucuggcccuugcugggugagggc

SEQ ID NO: 351605 - RNA, 32 nt, Human
cagcagcugugaagggcauccugaccugcaug

SEQ ID NO: 351606 - RNA, 32 nt, Human
cagcagcugugcgagcucugcugcgacacgga

SEQ ID NO: 351607 - RNA, 32 nt, Human
cagcagcugugcgagcucugcugugaugcaga

SEQ ID NO: 351608 - RNA, 20 nt, Human
cagcagcuuaauggauuuca

SEQ ID NO: 351609 - RNA, 20 nt, Human
cagcagcuuacaugaucuca

SEQ ID NO: 351610 - RNA, 32 nt, Human
cagcagcuuacaugaucucauugacaauucca

SEQ ID NO: 351611 - RNA, 32 nt, Human
cagcagcuucacuaaggugggauggauagcag

SEQ ID NO: 351612 - RNA, 20 nt, Human
cagcagcuucuccacuguca

SEQ ID NO: 351613 - RNA, 32 nt, Human
cagcagcuucucggaagaggaggaggacgagg

SEQ ID NO: 351614 - RNA, 32 nt, Human
cagcagcuuggccugcaccaaguccuccauca

SEQ ID NO: 351615 - RNA, 32 nt, Human
cagcagcuugggaggcugaggcuggagaaugg

SEQ ID NO: 351616 - RNA, 20 nt, Human
cagcagcuuguacugccuuu

SEQ ID NO: 351617 - RNA, 20 nt, Human
cagcagcuugucuggcguca

SEQ ID NO: 351618 - RNA, 20 nt, Human
cagcagcuuguugguuguca

SEQ ID NO: 351619 - RNA, 32 nt, Human
cagcaggaaacauagaacucagagccagaucc

SEQ ID NO: 351620 - RNA, 23 nt, Human
cagcaggaaaguacagaugcagc

SEQ ID NO: 351621 - RNA, 23 nt, Human
cagcaggaacaccaaaucccgga

SEQ ID NO: 351622 - RNA, 32 nt, Human
cagcaggaagaaaccccaggaggaagaaaccu

SEQ ID NO: 351623 - RNA, 21 nt, Human
cagcaggaagggaccccugga

SEQ ID NO: 351624 - RNA, 32 nt, Human
cagcaggaauucaaagcugcuugcuguaacug

SEQ ID NO: 351625 - RNA, 32 nt, Human
cagcaggacaaaccaacagguacuccgcaagu

SEQ ID NO: 351626 - RNA, 32 nt, Human
cagcaggacacaaauaguacaugugaaauuuc

SEQ ID NO: 351627 - RNA, 32 nt, Human
cagcaggacagaaaaaccaacgccaccauguc

SEQ ID NO: 351628 - RNA, 32 nt, Human
cagcaggacagcaacagucuuugccgcagccu

SEQ ID NO: 351629 - RNA, 32 nt, Human
cagcaggacaggggaaaggcagcuuuauuuuu

SEQ ID NO: 351630 - RNA, 32 nt, Human
cagcaggacaucugcauauaacacacagccga

SEQ ID NO: 351631 - RNA, 21 nt, Human
cagcaggacccaaaugcagcu

SEQ ID NO: 351632 - RNA, 32 nt, Human
cagcaggaccucucuguauccacuuccuaugg

SEQ ID NO: 351633 - RNA, 19 nt, Human
cagcaggacgacucuugaa

SEQ ID NO: 351634 - RNA, 32 nt, Human
cagcaggacuccagucaccucuaccccagcuc

SEQ ID NO: 351635 - RNA, 32 nt, Human
cagcaggagaagcaguggccagaggggagaua

SEQ ID NO: 351636 - RNA, 32 nt, Human
cagcaggagagaggagagggcagaacaggauc

SEQ ID NO: 351637 - RNA, 30 nt, Human
cagcaggagagccacagagagcacgggagc

SEQ ID NO: 351638 - RNA, 32 nt, Human
cagcaggagagccacagagagcacgggagcuu

SEQ ID NO: 351639 - RNA, 23 nt, Human
cagcaggagaggagagccagaga

SEQ ID NO: 351640 - RNA, 32 nt, Human
cagcaggagaggggagugggcugguucuuccc

SEQ ID NO: 351641 - RNA, 32 nt, Human
cagcaggagaguuccuggaggaaagggacugg

SEQ ID NO: 351642 - RNA, 21 nt, Human
cagcaggagcagcagcagcag

SEQ ID NO: 351643 - RNA, 32 nt, Human
cagcaggagcuuccgccuccucuccacuggag

SEQ ID NO: 351644 - RNA, 32 nt, Human
cagcaggaggagcaggaggagccggaggagga

SEQ ID NO: 351645 - RNA, 32 nt, Human
cagcaggaggcagacagguuucugggcagaag

SEQ ID NO: 351646 - RNA, 32 nt, Human
cagcaggaggccagaggacagagcagaggauc

SEQ ID NO: 351647 - RNA, 19 nt, Human
cagcaggaggccuuugccc

SEQ ID NO: 351648 - RNA, 32 nt, Human
cagcaggaggcugaaggaggggagaacaaaau

SEQ ID NO: 351649 - RNA, 19 nt, Human
cagcaggaggggcgggagg

SEQ ID NO: 351650 - RNA, 32 nt, Human
cagcaggaggggcgggaggcaccaggguucuu

SEQ ID NO: 351651 - RNA, 32 nt, Human
cagcaggaguaggaaugagaguuagcagccuu

SEQ ID NO: 351652 - RNA, 32 nt, Human
cagcaggagugaccacagggaggggacagcuc

SEQ ID NO: 351653 - RNA, 32 nt, Human
cagcaggagugagagacaaguuuaggauagga

SEQ ID NO: 351654 - RNA, 21 nt, Human
cagcaggauaaacauuccaga

SEQ ID NO: 351655 - RNA, 32 nt, Human
cagcaggauagggagagccccaggacucagga

SEQ ID NO: 351656 - RNA, 23 nt, Human
cagcaggaucugcuggcaggguu

SEQ ID NO: 351657 - RNA, 32 nt, Human
cagcaggaugaaacgaggaggaagagauagug

SEQ ID NO: 351658 - RNA, 32 nt, Human
cagcaggaugguggguguucagccugaaugcc

SEQ ID NO: 351659 - RNA, 32 nt, Human
cagcaggauguggcagaacaucacaagcagau

SEQ ID NO: 351660 - RNA, 25 nt, Human
cagcaggcacaaaccauggguccag

SEQ ID NO: 351661 - RNA, 18 nt, Human
cagcaggcagaaaugcug

SEQ ID NO: 351662 - RNA, 32 nt, Human
cagcaggcagaggcgcguccucgaccccaagg

SEQ ID NO: 351663 - RNA, 20 nt, Human
cagcaggcagaugaccagag

SEQ ID NO: 351664 - RNA, 18 nt, Human
cagcaggcagcucuggaa

SEQ ID NO: 351665 - RNA, 32 nt, Human
cagcaggcagcuucuacuccugccucaugcau

SEQ ID NO: 351666 - RNA, 32 nt, Human
cagcaggcaggcaagcaggcaucagcuccggc

SEQ ID NO: 351667 - RNA, 32 nt, Human
cagcaggcaggcuggggaggccaguguugugg

SEQ ID NO: 351668 - RNA, 22 nt, Human
cagcaggccacauggcuggcca

SEQ ID NO: 351669 - RNA, 32 nt, Human
cagcaggccagaccagucucccaggaggcuga

SEQ ID NO: 351670 - RNA, 17 nt, Human
cagcaggccauggcugg

SEQ ID NO: 351671 - RNA, 32 nt, Human
cagcaggcccagaucagcuuugcacauggugc

SEQ ID NO: 351672 - RNA, 32 nt, Human
cagcaggcccaggaggaaggauacacuacccc

SEQ ID NO: 351673 - RNA, 32 nt, Human
cagcaggcccaguucuggaaaggccaggaugu

SEQ ID NO: 351674 - RNA, 19 nt, Human
cagcaggccccgagccccu

SEQ ID NO: 351675 - RNA, 32 nt, Human
cagcaggcccucagccuggaagaggccccuug

SEQ ID NO: 351676 - RNA, 32 nt, Human
cagcaggccucugggguccagccugggagccc

SEQ ID NO: 351677 - RNA, 21 nt, Human
cagcaggccugguugcagcug

SEQ ID NO: 351678 - RNA, 32 nt, Human
cagcaggccuuaccugcacuccaggcuccuuc

SEQ ID NO: 351679 - RNA, 32 nt, Human
cagcaggcgccaagcacccaacuccagagaug

SEQ ID NO: 351680 - RNA, 32 nt, Human
cagcaggcgcccagaagcuccaccuccacccc

SEQ ID NO: 351681 - RNA, 22 nt, Human
cagcaggcggcugcagcaggug

SEQ ID NO: 351682 - RNA, 32 nt, Human
cagcaggcgucugaggccugcccacuaaggag

SEQ ID NO: 351683 - RNA, 32 nt, Human
cagcaggcucaggccggcucagggcucagagu

SEQ ID NO: 351684 - RNA, 32 nt, Human
cagcaggcuuugacugacgcuguuuagucuuu

SEQ ID NO: 351685 - RNA, 32 nt, Human
cagcagggacacugacgucaggacccgagccu

SEQ ID NO: 351686 - RNA, 32 nt, Human
cagcagggacauaguggggcugggcagggaug

SEQ ID NO: 351687 - RNA, 32 nt, Human
cagcagggagagagcaggguuuccagacaggc

SEQ ID NO: 351688 - RNA, 32 nt, Human
cagcagggagaucagcgaagaggcuggaaugg

SEQ ID NO: 351689 - RNA, 32 nt, Human
cagcagggagcuagcaggacacuaggaccagu

SEQ ID NO: 351690 - RNA, 32 nt, Human
cagcagggaggcagcucuggagggagccgcug

SEQ ID NO: 351691 - RNA, 17 nt, Human
cagcagggagucuugaa

SEQ ID NO: 351692 - RNA, 32 nt, Human
cagcagggcacgccuggcuuuccuuggauacc

SEQ ID NO: 351693 - RNA, 32 nt, Human
cagcagggcaggcagggguuggagugggcaua

SEQ ID NO: 351694 - RNA, 32 nt, Human
cagcagggcccaaacucauacucccagcccuu

SEQ ID NO: 351695 - RNA, 32 nt, Human
cagcagggccuucugcuugccugcugccauac

SEQ ID NO: 351696 - RNA, 32 nt, Human
cagcagggccuugccagcaaagcccagggccu

SEQ ID NO: 351697 - RNA, 32 nt, Human
cagcagggcgcucugcccucccuccuuccuuc

SEQ ID NO: 351698 - RNA, 32 nt, Human
cagcaggggacucugcccucccuccuuccuuu

SEQ ID NO: 351699 - RNA, 32 nt, Human
cagcaggggaggagggccugcugagagacucu

SEQ ID NO: 351700 - RNA, 32 nt, Human
cagcaggggcugggccccacgcucacacucgu

SEQ ID NO: 351701 - RNA, 32 nt, Human
cagcaggggcuggggucuucuccugaagccug

SEQ ID NO: 351702 - RNA, 32 nt, Human
cagcaggggucuggggcacggagccuugccgg

SEQ ID NO: 351703 - RNA, 32 nt, Human
cagcagggucugagagaggagccacagucccu

SEQ ID NO: 351704 - RNA, 31 nt, Human
cagcagggugacuugccucagaggcuauauc

SEQ ID NO: 351705 - RNA, 32 nt, Human
cagcaggguggcagggcagaagagucuggucc

SEQ ID NO: 351706 - RNA, 32 nt, Human
cagcagguagagcagagccggagccaggugca

SEQ ID NO: 351707 - RNA, 32 nt, Human
cagcagguagaggaaucaaagccagcagcauc

SEQ ID NO: 351708 - RNA, 19 nt, Human
cagcagguaggggcacagu

SEQ ID NO: 351709 - RNA, 24 nt, Human
cagcaggucaaaaaggccaacaca

SEQ ID NO: 351710 - RNA, 22 nt, Human
cagcaggucaaagcaggaucag

SEQ ID NO: 351711 - RNA, 21 nt, Human
cagcaggucagaagccagagc

SEQ ID NO: 351712 - RNA, 22 nt, Human
cagcaggucagagcaggcgagc

SEQ ID NO: 351713 - RNA, 22 nt, Human
cagcaggucagaguaggaacag

SEQ ID NO: 351714 - RNA, 32 nt, Human
cagcagguccucugugguucucugccucuggu

SEQ ID NO: 351715 - RNA, 32 nt, Human
cagcaggugaggcugaaaguuccaagccucaa

SEQ ID NO: 351716 - RNA, 21 nt, Human
cagcaggugcaacagcagcug

SEQ ID NO: 351717 - RNA, 23 nt, Human
cagcagguggagagcagcagcug

SEQ ID NO: 351718 - RNA, 20 nt, Human
cagcagguggagguugcagu

SEQ ID NO: 351719 - RNA, 32 nt, Human
cagcagguggaguaggcacagauggaaaacug

SEQ ID NO: 351720 - RNA, 18 nt, Human
cagcagguggcacugcag

SEQ ID NO: 351721 - RNA, 20 nt, Human
cagcagguggcacugcagcu

SEQ ID NO: 351722 - RNA, 22 nt, Human
cagcagguggcagcaguaguua

SEQ ID NO: 351723 - RNA, 20 nt, Human
cagcagguggcgcaggcggu

SEQ ID NO: 351724 - RNA, 32 nt, Human
cagcagguggcgcugccuuccacccaugguga

SEQ ID NO: 351725 - RNA, 21 nt, Human
cagcagguggcuggacugcug

SEQ ID NO: 351726 - RNA, 32 nt, Human
cagcaggugggugggacuaugccaggacggga

SEQ ID NO: 351727 - RNA, 23 nt, Human
cagcagguggguucugaaugcag

SEQ ID NO: 351728 - RNA, 20 nt, Human
cagcagguggucaccuggag

SEQ ID NO: 351729 - RNA, 32 nt, Human
cagcaggugugggugaggggaagguucugaug

SEQ ID NO: 351730 - RNA, 32 nt, Human
cagcagguugucugggguagggggaggcguuu

SEQ ID NO: 351731 - RNA, 24 nt, Human
cagcagguuuauccagaugaacug

SEQ ID NO: 351732 - RNA, 32 nt, Human
cagcaguaaaauggcucugucuucuacaggau

SEQ ID NO: 351733 - RNA, 21 nt, Human
cagcaguaacagcagcagcag

SEQ ID NO: 351734 - RNA, 20 nt, Human
cagcaguaaugcuauguacu

SEQ ID NO: 351735 - RNA, 19 nt, Human
cagcaguaauuauggugca

SEQ ID NO: 351736 - RNA, 32 nt, Human
cagcaguacacaaagcacuuaccuugacuggu

SEQ ID NO: 351737 - RNA, 32 nt, Human
cagcaguacugcugccccaacucgcugugccc

SEQ ID NO: 351738 - RNA, 32 nt, Human
cagcaguagagaaaucacuaggacuacuuuuu

SEQ ID NO: 351739 - RNA, 32 nt, Human
cagcaguaggaaaacgaggagggagggagagg

SEQ ID NO: 351740 - RNA, 32 nt, Human
cagcaguagggaggggcagggguaaggggacc

SEQ ID NO: 351741 - RNA, 32 nt, Human
cagcaguaguacuuuggcaugugucccaggug

SEQ ID NO: 351742 - RNA, 20 nt, Human
cagcaguauagcauauguca

SEQ ID NO: 351743 - RNA, 23 nt, Human
cagcaguaucccggaagcacuca

SEQ ID NO: 351744 - RNA, 18 nt, Human
cagcaguauuuccugguc

SEQ ID NO: 351745 - RNA, 32 nt, Human
cagcagucacuuccaguucauucagcuauuuu

SEQ ID NO: 351746 - RNA, 32 nt, Human
cagcagucagcugucuuugucaaccauacguu

SEQ ID NO: 351747 - RNA, 32 nt, Human
  misc_feature (13)..(13): n is a, c, g, or u
cagcagucauugncauccugugaccuuauccc

SEQ ID NO: 351748 - RNA, 32 nt, Human
cagcaguccaggcugaugcaguggcuucaaga

SEQ ID NO: 351749 - RNA, 32 nt, Human
cagcaguccagugcaacgucuccuccauagcu

SEQ ID NO: 351750 - RNA, 19 nt, Human
cagcagucgccuccuccca

SEQ ID NO: 351751 - RNA, 32 nt, Human
cagcagucgcuggccucucccugcccugacac

SEQ ID NO: 351752 - RNA, 32 nt, Human
cagcagucguguugaagaggcagugucaucca

SEQ ID NO: 351753 - RNA, 32 nt, Human
cagcagucuaguucuuuucauuuggaaugaau

SEQ ID NO: 351754 - RNA, 32 nt, Human
cagcagucucacugcgaggccucaaggccucu

SEQ ID NO: 351755 - RNA, 32 nt, Human
cagcagucucugagcaccagggagcaguugcc

SEQ ID NO: 351756 - RNA, 32 nt, Human
cagcagucugcucccaugacccucugcccacu

SEQ ID NO: 351757 - RNA, 32 nt, Human
cagcagugacaucuacaggcagcugcucuaua

SEQ ID NO: 351758 - RNA, 32 nt, Human
cagcagugagagcagaugaggugaaaaggcca

SEQ ID NO: 351759 - RNA, 32 nt, Human
cagcagugccaccgccaccacaccccagaucc

SEQ ID NO: 351760 - RNA, 32 nt, Human
cagcagugcccaggauuaggcaguaccuccug

SEQ ID NO: 351761 - RNA, 32 nt, Human
cagcagugcccgccgccgucaccagcuaugca

SEQ ID NO: 351762 - RNA, 31 nt, Human
cagcagugccucucuagcagcugugcggaau

SEQ ID NO: 351763 - RNA, 29 nt, Human
cagcagugcuugcaggugccugggcuggc

SEQ ID NO: 351764 - RNA, 32 nt, Human
cagcaguggaagccucaagcaagaccagggcc

SEQ ID NO: 351765 - RNA, 32 nt, Human
cagcaguggagcagagggcaaggguggggcau

SEQ ID NO: 351766 - RNA, 32 nt, Human
cagcaguggauaaaggagaggggacccucugg

SEQ ID NO: 351767 - RNA, 22 nt, Human
cagcaguggaucccaugccacu

SEQ ID NO: 351768 - RNA, 32 nt, Human
cagcaguggcaguggugaggccagugcugggc

SEQ ID NO: 351769 - RNA, 32 nt, Human
cagcaguggccuguuuguucucugccuguugc

SEQ ID NO: 351770 - RNA, 21 nt, Human
cagcaguggcgccugguguca

SEQ ID NO: 351771 - RNA, 32 nt, Human
cagcagugggagguggggccuuagugccucac

SEQ ID NO: 351772 - RNA, 32 nt, Human
cagcagugggccugccacccagacacacagag

SEQ ID NO: 351773 - RNA, 32 nt, Human
cagcaguggggcaggagggugccugauuucgg

SEQ ID NO: 351774 - RNA, 32 nt, Human
cagcaguggugcaagguccuucccaggggaac

SEQ ID NO: 351775 - RNA, 23 nt, Human
cagcagugguggcaacuaugccu

SEQ ID NO: 351776 - RNA, 32 nt, Human
cagcagugugcccagacuuguggaaaugaagu

SEQ ID NO: 351777 - RNA, 32 nt, Human
cagcagugugugguauccuacagaucacuauu

SEQ ID NO: 351778 - RNA, 32 nt, Human
cagcaguguuaaccagucauggugcuagauug

SEQ ID NO: 351779 - RNA, 32 nt, Human
cagcaguguugcucagcuccuaccucugugcc

SEQ ID NO: 351780 - RNA, 32 nt, Human
cagcaguuaaagaaugaagaugagacagaccg

SEQ ID NO: 351781 - RNA, 21 nt, Human
cagcaguuacagcagcagcag

SEQ ID NO: 351782 - RNA, 32 nt, Human
cagcaguuacuuuuggagacgauucacugccc

SEQ ID NO: 351783 - RNA, 32 nt, Human
cagcaguuagagagcaaggaaacucucauauu

SEQ ID NO: 351784 - RNA, 21 nt, Human
cagcaguucacgccuguaauc

SEQ ID NO: 351785 - RNA, 24 nt, Human
cagcaguucacgccuguaauccca

SEQ ID NO: 351786 - RNA, 18 nt, Human
cagcaguucagaaaccuc

SEQ ID NO: 351787 - RNA, 32 nt, Human
cagcaguuccuccucuuccuccacgucauccu

SEQ ID NO: 351788 - RNA, 32 nt, Human
cagcaguucucagcccugacagaggugcuuuu

SEQ ID NO: 351789 - RNA, 32 nt, Human
cagcaguucugaugccuugaccccugugauga

SEQ ID NO: 351790 - RNA, 32 nt, Human
cagcaguugaaggaagagagugcauggcaccu

SEQ ID NO: 351791 - RNA, 32 nt, Human
cagcaguugagaccagccugaacaacauggug

SEQ ID NO: 351792 - RNA, 32 nt, Human
cagcaguuucccuguccugugugaaaucaggc

SEQ ID NO: 351793 - RNA, 32 nt, Human
cagcaguuucuccaaaaacaaaaacaaaacac

SEQ ID NO: 351794 - RNA, 23 nt, Human
cagcaguuugggaggccgaaggg

SEQ ID NO: 351795 - RNA, 32 nt, Human
cagcaguuugggaggccgaggcaggcagauca

SEQ ID NO: 351796 - RNA, 32 nt, Human
cagcaguuugggaggccgaggcgagcagauca

SEQ ID NO: 351797 - RNA, 32 nt, Human
cagcaguuugggaggcugaggcgggcggauca

SEQ ID NO: 351798 - RNA, 23 nt, Human
cagcauaaaccugggggcccuca

SEQ ID NO: 351799 - RNA, 32 nt, Human
cagcauaagggaaaugauggagaagggagaau

SEQ ID NO: 351800 - RNA, 32 nt, Human
cagcauaaugacuguguguucugagaaaugca

SEQ ID NO: 351801 - RNA, 32 nt, Human
cagcauacaagcuucugcuccaguaugauaau

SEQ ID NO: 351802 - RNA, 32 nt, Human
cagcauacugcuguuucuucaccagcuucauu

SEQ ID NO: 351803 - RNA, 32 nt, Human
cagcauagacacacacccccugacccuuacca

SEQ ID NO: 351804 - RNA, 19 nt, Human
cagcauagauaccuucaca

SEQ ID NO: 351805 - RNA, 23 nt, Human
cagcauagccccucuaccagggg

SEQ ID NO: 351806 - RNA, 21 nt, Human
cagcauagcccuggccagugg

SEQ ID NO: 351807 - RNA, 32 nt, Human
cagcauagcugcagugucacaaagccauggca

SEQ ID NO: 351808 - RNA, 19 nt, Human
cagcauaguccuggaugca

SEQ ID NO: 351809 - RNA, 21 nt, Human
cagcauaguccugugccaggg

SEQ ID NO: 351810 - RNA, 32 nt, Human
cagcauauaggaucagucgcauugguuauaag

SEQ ID NO: 351811 - RNA, 20 nt, Human
cagcauauccccccucugcc

SEQ ID NO: 351812 - RNA, 32 nt, Human
cagcauaucugugccacacaggaauccaucau

SEQ ID NO: 351813 - RNA, 32 nt, Human
cagcauaucuugagggaagagcauuagugcaa

SEQ ID NO: 351814 - RNA, 32 nt, Human
cagcauauuaaagucauguucuaaagaaaucu

SEQ ID NO: 351815 - RNA, 32 nt, Human
cagcaucaaaggacggacuucaggggacacgu

SEQ ID NO: 351816 - RNA, 32 nt, Human
cagcaucacaggucuaaaugcaucaggaauuc

SEQ ID NO: 351817 - RNA, 18 nt, Human
cagcaucacagucagagg

SEQ ID NO: 351818 - RNA, 32 nt, Human
cagcaucacaucuucugugcucuuuauuuuug

SEQ ID NO: 351819 - RNA, 22 nt, Human
cagcaucacugaucauuagaga

SEQ ID NO: 351820 - RNA, 32 nt, Human
cagcaucacuugaacccaggaggcagagguug

SEQ ID NO: 351821 - RNA, 32 nt, Human
cagcaucagauaugaagacgacagcccuauag

SEQ ID NO: 351822 - RNA, 32 nt, Human
cagcaucagauggggaaaggcaguucuccucu

SEQ ID NO: 351823 - RNA, 32 nt, Human
cagcaucagcaacugggcacagaaaggagccg

SEQ ID NO: 351824 - RNA, 32 nt, Human
cagcaucagcacccggugaaugugguucucuu

SEQ ID NO: 351825 - RNA, 32 nt, Human
cagcaucagccccaauguccagccucuuuaac

SEQ ID NO: 351826 - RNA, 32 nt, Human
cagcaucaggcccacuggguugccccggccag

SEQ ID NO: 351827 - RNA, 19 nt, Human
cagcaucagugacgggagg

SEQ ID NO: 351828 - RNA, 32 nt, Human
cagcaucauacaaguuucacaaaaagaaauca

SEQ ID NO: 351829 - RNA, 32 nt, Human
cagcaucaucacacugacuguggcgcacuggg

SEQ ID NO: 351830 - RNA, 32 nt, Human
cagcaucauccucugcugaccuguuccuugag

SEQ ID NO: 351831 - RNA, 32 nt, Human
cagcaucauggaguccacgaugaagagaaucu

SEQ ID NO: 351832 - RNA, 32 nt, Human
cagcauccagaacgacggaggaaggggcggag

SEQ ID NO: 351833 - RNA, 32 nt, Human
cagcauccagcaugaaguuguaaaguggggau

SEQ ID NO: 351834 - RNA, 23 nt, Human
cagcauccagcuccccaccccca

SEQ ID NO: 351835 - RNA, 32 nt, Human
cagcaucccacaugcauucuuaccaugcugca

SEQ ID NO: 351836 - RNA, 32 nt, Human
cagcaucccagaggaagucgugcaguuucuag

SEQ ID NO: 351837 - RNA, 32 nt, Human
cagcaucccagccucagaagccuucuugcugc

SEQ ID NO: 351838 - RNA, 32 nt, Human
cagcaucccagccuugagaugcuucacuuucc

SEQ ID NO: 351839 - RNA, 32 nt, Human
cagcaucccaggagcccggccugaggggcugg

SEQ ID NO: 351840 - RNA, 32 nt, Human
cagcaucccaggcugguggcaggagcuggggg

SEQ ID NO: 351841 - RNA, 32 nt, Human
cagcaucccagucaccaccagguggcgcuucu

SEQ ID NO: 351842 - RNA, 32 nt, Human
cagcauccccuccacuccagaguuggguggca

SEQ ID NO: 351843 - RNA, 32 nt, Human
cagcauccccuccacuccagaguuggguggua

SEQ ID NO: 351844 - RNA, 18 nt, Human
cagcauccccuccaggga

SEQ ID NO: 351845 - RNA, 32 nt, Human
cagcaucccucgggaaccucacucugaaggga

SEQ ID NO: 351846 - RNA, 32 nt, Human
cagcaucccugccuccugcauccagggcuuag

SEQ ID NO: 351847 - RNA, 32 nt, Human
cagcauccguggggaccagauugccugggugg

SEQ ID NO: 351848 - RNA, 32 nt, Human
cagcauccuaacaaagguacagaaggaccagg

SEQ ID NO: 351849 - RNA, 32 nt, Human
cagcauccuccagcuccaaggcaggcuucccc

SEQ ID NO: 351850 - RNA, 21 nt, Human
cagcauccuccccacccacca

SEQ ID NO: 351851 - RNA, 32 nt, Human
cagcauccuccuugauaaaagcagaaaagcaa

SEQ ID NO: 351852 - RNA, 32 nt, Human
cagcauccugguagcugggacuacaaguguga

SEQ ID NO: 351853 - RNA, 32 nt, Human
cagcaucgacgagcugaagcaccaggagaacc

SEQ ID NO: 351854 - RNA, 32 nt, Human
cagcaucuaacuaaauccucaggauuuauucu

SEQ ID NO: 351855 - RNA, 32 nt, Human
cagcaucuagcagaaagccaggcauggaguag

SEQ ID NO: 351856 - RNA, 32 nt, Human
cagcaucuccacccuccgccccacuccagcca

SEQ ID NO: 351857 - RNA, 32 nt, Human
cagcaucuccaccugccaucucacccucagac

SEQ ID NO: 351858 - RNA, 32 nt, Human
cagcaucuccaccuuccccggaagccucccuu

SEQ ID NO: 351859 - RNA, 32 nt, Human
cagcaucuccaucccccauccagucucaguca

SEQ ID NO: 351860 - RNA, 32 nt, Human
cagcaucucccaucaccaccucuaggacucgg

SEQ ID NO: 351861 - RNA, 32 nt, Human
cagcaucuccuuaaaacagauugggaaagaaa

SEQ ID NO: 351862 - RNA, 32 nt, Human
cagcaucuccuugggguguugguuugcacuuc

SEQ ID NO: 351863 - RNA, 21 nt, Human
cagcaucucgcuggcuacagg

SEQ ID NO: 351864 - RNA, 32 nt, Human
cagcaucucuuaaaauucaauaugaaaagaac

SEQ ID NO: 351865 - RNA, 21 nt, Human
cagcaucugaucaggcuguga

SEQ ID NO: 351866 - RNA, 32 nt, Human
cagcaucugcuccugucccugcuuuuucaccc

SEQ ID NO: 351867 - RNA, 32 nt, Human
cagcaucugcugucagguggcucaggucuuca

SEQ ID NO: 351868 - RNA, 32 nt, Human
cagcaucugguaugcagccaccaggacaagga

SEQ ID NO: 351869 - RNA, 32 nt, Human
cagcaucuguacaaaugcauuuuauuugcuau

SEQ ID NO: 351870 - RNA, 32 nt, Human
cagcaucuguccucucuccucagggaggcaag

SEQ ID NO: 351871 - RNA, 32 nt, Human
cagcaucuucacucaacaaaggaaagaaauug

SEQ ID NO: 351872 - RNA, 25 nt, Human
cagcaucuuccggugacucuggagg

SEQ ID NO: 351873 - RNA, 32 nt, Human
cagcaucuuccucccuccuuuaauuaauggaa

SEQ ID NO: 351874 - RNA, 18 nt, Human
cagcaucuugcagcugga

SEQ ID NO: 351875 - RNA, 32 nt, Human
cagcaucuuucuuuccccaucuuucuauuuuc

SEQ ID NO: 351876 - RNA, 32 nt, Human
cagcaugaaauacauuuagucuccucaaaggg

SEQ ID NO: 351877 - RNA, 32 nt, Human
cagcaugacagaccuccagcauccacgcaucu

SEQ ID NO: 351878 - RNA, 32 nt, Human
cagcaugaccaacauggagaaaccccgucucu

SEQ ID NO: 351879 - RNA, 32 nt, Human
cagcaugaccaacauggagaaccccaucucua

SEQ ID NO: 351880 - RNA, 32 nt, Human
cagcaugaccaacauggcgaaaccccaucucu

SEQ ID NO: 351881 - RNA, 32 nt, Human
cagcaugaccaacauggugaaacccugucucu

SEQ ID NO: 351882 - RNA, 29 nt, Human
cagcaugacugagaaaauguccagcuucc

SEQ ID NO: 351883 - RNA, 32 nt, Human
cagcaugagaacaguggcacaccaccagugag

SEQ ID NO: 351884 - RNA, 32 nt, Human
cagcaugagcccuggggagcuccaaggcugca

SEQ ID NO: 351885 - RNA, 32 nt, Human
cagcaugaggaggccggguucaugcagggucc

SEQ ID NO: 351886 - RNA, 19 nt, Human
cagcaugaggcugggccgg

SEQ ID NO: 351887 - RNA, 29 nt, Human
cagcaugagggagugccuuuccauccaca

SEQ ID NO: 351888 - RNA, 32 nt, Human
cagcaugauguucuugucuuuggagcuuagcc

SEQ ID NO: 351889 - RNA, 32 nt, Human
cagcaugcaaucauuuccaucuuauggaaauc

SEQ ID NO: 351890 - RNA, 32 nt, Human
cagcaugcaauugaccagcuuaagagaaaacu

SEQ ID NO: 351891 - RNA, 32 nt, Human
cagcaugcaugcugggagcugccaagggcuua

SEQ ID NO: 351892 - RNA, 32 nt, Human
cagcaugcccagcuccucccugggugacucgg

SEQ ID NO: 351893 - RNA, 32 nt, Human
cagcaugcccuggggugcaguggucagccacc

SEQ ID NO: 351894 - RNA, 32 nt, Human
cagcaugccuggcugauuuuuguauuuuuagu

SEQ ID NO: 351895 - RNA, 32 nt, Human
cagcaugccugucuaauuuuuguauuuuagua

SEQ ID NO: 351896 - RNA, 32 nt, Human
cagcaugcuacagccuuggacuccugggcuca

SEQ ID NO: 351897 - RNA, 22 nt, Human
cagcaugcuccccgcaacauca

SEQ ID NO: 351898 - RNA, 20 nt, Human
cagcaugcugcaauaccucu

SEQ ID NO: 351899 - RNA, 29 nt, Human
cagcaugcugcacucucaggagucuggca

SEQ ID NO: 351900 - RNA, 32 nt, Human
cagcaugcugcucuccccugggcccggcuuuc

SEQ ID NO: 351901 - RNA, 22 nt, Human
cagcauggaaaucaacauccug

SEQ ID NO: 351902 - RNA, 32 nt, Human
cagcauggaagagaaguguaaccaugcaaaua

SEQ ID NO: 351903 - RNA, 32 nt, Human
cagcauggaaggcaugguggagaugacucaaa

SEQ ID NO: 351904 - RNA, 18 nt, Human
cagcauggacaaaggcuc

SEQ ID NO: 351905 - RNA, 29 nt, Human
cagcauggagccagcacgggaacaggggg

SEQ ID NO: 351906 - RNA, 32 nt, Human
cagcauggagcgagccauacccugccggaucu

SEQ ID NO: 351907 - RNA, 32 nt, Human
cagcauggaggcagauguggggcugagcuggg

SEQ ID NO: 351908 - RNA, 32 nt, Human
cagcauggcacugucuuggcuuacaaaaucug

SEQ ID NO: 351909 - RNA, 32 nt, Human
cagcauggccaacauggugaagccccaucucu

SEQ ID NO: 351910 - RNA, 20 nt, Human
cagcauggccaggcuggcca

SEQ ID NO: 351911 - RNA, 24 nt, Human
cagcauggccaguaaacugagcaa

SEQ ID NO: 351912 - RNA, 32 nt, Human
cagcauggccccagugcugaggcucccacugc

SEQ ID NO: 351913 - RNA, 29 nt, Human
cagcauggccucugcugccucugugacca

SEQ ID NO: 351914 - RNA, 19 nt, Human
cagcauggcgaaacccugu

SEQ ID NO: 351915 - RNA, 29 nt, Human
cagcauggcugcagguugcucagaggcgc

SEQ ID NO: 351916 - RNA, 32 nt, Human
cagcauggcuguuuugaaaaacaggugcaaaa

SEQ ID NO: 351917 - RNA, 32 nt, Human
cagcaugggaaaaugggacuguggaaauaaag

SEQ ID NO: 351918 - RNA, 32 nt, Human
cagcaugggaaacguggcgaaaccccaucucu

SEQ ID NO: 351919 - RNA, 29 nt, Human
cagcaugggcaacugcguggggagacagc

SEQ ID NO: 351920 - RNA, 32 nt, Human
cagcaugggcagggguucuggguaggacgguc

SEQ ID NO: 351921 - RNA, 21 nt, Human
cagcaugggcuguggcaacca

SEQ ID NO: 351922 - RNA, 32 nt, Human
cagcauggggauggcguggcccccagggcggg

SEQ ID NO: 351923 - RNA, 23 nt, Human
cagcauggggcuucagcugcugg

SEQ ID NO: 351924 - RNA, 32 nt, Human
cagcaugggguuuuuauuauguuuuaccuaaa

SEQ ID NO: 351925 - RNA, 21 nt, Human
cagcaugggugaauaagggcu

SEQ ID NO: 351926 - RNA, 16 nt, Human
cagcaugguccucaca

SEQ ID NO: 351927 - RNA, 32 nt, Human
cagcaugguucccuggggcuucccaagagccu

SEQ ID NO: 351928 - RNA, 32 nt, Human
cagcauguaaagagcugggagggcggagaauu

SEQ ID NO: 351929 - RNA, 32 nt, Human
cagcauguacaaaggcccuguggcaagaggga

SEQ ID NO: 351930 - RNA, 32 nt, Human
cagcaugucaacuccauugaaaaacccugcug

SEQ ID NO: 351931 - RNA, 32 nt, Human
cagcauguccaagaaagggaguggaggugcag

SEQ ID NO: 351932 - RNA, 29 nt, Human
cagcauguccgccucggccccugcugcgg

SEQ ID NO: 351933 - RNA, 32 nt, Human
cagcaugugacuggucacuccuggggagagac

SEQ ID NO: 351934 - RNA, 32 nt, Human
cagcaugugccuguaauuccagcuacucggga

SEQ ID NO: 351935 - RNA, 32 nt, Human
cagcaugugcugcugccuuuguaacugcaugg

SEQ ID NO: 351936 - RNA, 32 nt, Human
cagcauguguccuuuuucaucccuucaucuug

SEQ ID NO: 351937 - RNA, 32 nt, Human
cagcaugugugugucucuaucuugcaucuacc

SEQ ID NO: 351938 - RNA, 32 nt, Human
cagcauguguuacugauguguugcugaagauu

SEQ ID NO: 351939 - RNA, 32 nt, Human
cagcauguucucugucugcuccugccuccucc

SEQ ID NO: 351940 - RNA, 32 nt, Human
cagcauguuggccaggcuggucucgaacuccu

SEQ ID NO: 351941 - RNA, 32 nt, Human
cagcauuaaagaaccaauguuauucacuaaua

SEQ ID NO: 351942 - RNA, 32 nt, Human
cagcauuaaucacuaggucacuuugcuugcug

SEQ ID NO: 351943 - RNA, 32 nt, Human
cagcauuacagggagauucuuugcucagcuaa

SEQ ID NO: 351944 - RNA, 32 nt, Human
cagcauuaccugcuggacagagcagggcaggc

SEQ ID NO: 351945 - RNA, 32 nt, Human
cagcauuacuguguugucucugugccagaugu

SEQ ID NO: 351946 - RNA, 32 nt, Human
cagcauuagagauuuuucuguucuugaaaaua

SEQ ID NO: 351947 - RNA, 32 nt, Human
cagcauuaggcagagucccauggacagccuua

SEQ ID NO: 351948 - RNA, 32 nt, Human
cagcauucaagguccucuucuguuaaacccaa

SEQ ID NO: 351949 - RNA, 32 nt, Human
cagcauucaccaucacaccugggaagcaugga

SEQ ID NO: 351950 - RNA, 32 nt, Human
cagcauucacggcgacuuucaggcaagcaggc

SEQ ID NO: 351951 - RNA, 32 nt, Human
cagcauucacugggugugugaaauuccagagc

SEQ ID NO: 351952 - RNA, 32 nt, Human
cagcauucagcaggugcagaucucggcuuuac

SEQ ID NO: 351953 - RNA, 32 nt, Human
cagcauucagcaguugacacaggcuaagaaau

SEQ ID NO: 351954 - RNA, 32 nt, Human
cagcauucagcccagggaaugugguuuucacu

SEQ ID NO: 351955 - RNA, 32 nt, Human
cagcauucaggcugguagagcagaucaccccc

SEQ ID NO: 351956 - RNA, 32 nt, Human
cagcauucauuuccauucauuuccauacuggc

SEQ ID NO: 351957 - RNA, 32 nt, Human
cagcauuccaagaucuuagcccuucccagaac

SEQ ID NO: 351958 - RNA, 32 nt, Human
cagcauuccacagccuggucaggagggaagga

SEQ ID NO: 351959 - RNA, 31 nt, Human
cagcauuccagcuagaagaagcggaacaggg

SEQ ID NO: 351960 - RNA, 24 nt, Human
cagcauuccaucuucccgaucuuc

SEQ ID NO: 351961 - RNA, 32 nt, Human
cagcauucccaaugcagauguuucgggauugu

SEQ ID NO: 351962 - RNA, 32 nt, Human
cagcauuccugccuguaagucuucccaagaca

SEQ ID NO: 351963 - RNA, 25 nt, Human
cagcauuccuggccagguacagggg

SEQ ID NO: 351964 - RNA, 32 nt, Human
cagcauuccugggcuggugcucaggccggccu

SEQ ID NO: 351965 - RNA, 32 nt, Human
cagcauucuauggggaguaacaccuuacauuu

SEQ ID NO: 351966 - RNA, 32 nt, Human
cagcauucugcucuucugaugaugcgcuguga

SEQ ID NO: 351967 - RNA, 32 nt, Human
cagcauucugggaggccgaggcgggcagauca

SEQ ID NO: 351968 - RNA, 32 nt, Human
cagcauugaagcagccuuuucccauuguagaa

SEQ ID NO: 351969 - RNA, 32 nt, Human
cagcauugcacuccagccugggugacagaacg

SEQ ID NO: 351970 - RNA, 20 nt, Human
cagcauugcuugaacccagg

SEQ ID NO: 351971 - RNA, 32 nt, Human
cagcauuguuuccaaugagcagcacucagagu

SEQ ID NO: 351972 - RNA, 32 nt, Human
cagcauuuauagaacaugcugccccacauaca

SEQ ID NO: 351973 - RNA, 17 nt, Human
cagcauuucagcuguga

SEQ ID NO: 351974 - RNA, 32 nt, Human
cagcauuuccacaccaagcagcaacagcaaau

SEQ ID NO: 351975 - RNA, 20 nt, Human
cagcauuucugagcagggcu

SEQ ID NO: 351976 - RNA, 32 nt, Human
cagcauuuggucagcacaucugaaaaggaagg

SEQ ID NO: 351977 - RNA, 32 nt, Human
cagcauuuggugcaacuccacccuucugcaga

SEQ ID NO: 351978 - RNA, 23 nt, Human
cagcauuuuagcucagaaggcuc

SEQ ID NO: 351979 - RNA, 32 nt, Human
cagcauuuuccucugcuuugaaagccccagaa

SEQ ID NO: 351980 - RNA, 32 nt, Human
cagcauuuugggaggcagaggcgggcggauca

SEQ ID NO: 351981 - RNA, 32 nt, Human
cagcauuuugggaggccaaggugggaggauug

SEQ ID NO: 351982 - RNA, 32 nt, Human
cagcauuuugggaggccgaggcgggcggauca

SEQ ID NO: 351983 - RNA, 32 nt, Human
cagcauuuugggaggccgaggugggaagauug

SEQ ID NO: 351984 - RNA, 32 nt, Human
cagcauuuugggaggccgaggugggcggauca

SEQ ID NO: 351985 - RNA, 32 nt, Human
cagcauuuugggaggccgggguuggaggauca

SEQ ID NO: 351986 - RNA, 32 nt, Human
cagcauuuugggaggcugaggcaggcggauca

SEQ ID NO: 351987 - RNA, 32 nt, Human
cagcauuuugggaggcugaggcaggcggaucg

SEQ ID NO: 351988 - RNA, 32 nt, Human
cagcauuuugggaggcugaggugggcagauca

SEQ ID NO: 351989 - RNA, 32 nt, Human
cagcauuuuucuuggaaccucuacgcucuugg

SEQ ID NO: 351990 - RNA, 32 nt, Human
cagccaaaauaacuuuaaaaacuuacauuuuu

SEQ ID NO: 351991 - RNA, 32 nt, Human
cagccaaagcauauuugcuuccuuccagcaua

SEQ ID NO: 351992 - RNA, 32 nt, Human
cagccaaaggcagcuacauuuccacagaagcc

SEQ ID NO: 351993 - RNA, 32 nt, Human
cagccaaauggaggccacugagccacaggaua

SEQ ID NO: 351994 - RNA, 32 nt, Human
cagccaaauugcuucaucuguacguggugaua

SEQ ID NO: 351995 - RNA, 22 nt, Human
cagccaacaaagaggcccugga

SEQ ID NO: 351996 - RNA, 32 nt, Human
cagccaacaacaaaugccugaucuuccggaaa

SEQ ID NO: 351997 - RNA, 32 nt, Human
cagccaacacccuucucagcuucguggacccu

SEQ ID NO: 351998 - RNA, 32 nt, Human
cagccaacauacuaaaaccccgucucuacuaa

SEQ ID NO: 351999 - RNA, 32 nt, Human
cagccaacauggcaaaaccccaucucuacuaa

SEQ ID NO: 352000 - RNA, 32 nt, Human
cagccaacauggcgaaaccaugucucuacuaa

SEQ ID NO: 352001 - RNA, 32 nt, Human
cagccaacccucugcaugccaggcuggagagu

SEQ ID NO: 352002 - RNA, 32 nt, Human
cagccaaccucaccuccucgggcccagcucaa

SEQ ID NO: 352003 - RNA, 32 nt, Human
cagccaacugaggaggcgauccccgagcagga

SEQ ID NO: 352004 - RNA, 17 nt, Human
cagccaacuucguggcc

SEQ ID NO: 352005 - RNA, 32 nt, Human
cagccaagacagccagcauccccaggcgcuca

SEQ ID NO: 352006 - RNA, 32 nt, Human
cagccaagacuggagcagucucucaccuugac

SEQ ID NO: 352007 - RNA, 32 nt, Human
cagccaagagcugaggguaagggcagguaggc

SEQ ID NO: 352008 - RNA, 32 nt, Human
cagccaagagcugaguauauaaaggagaggga

SEQ ID NO: 352009 - RNA, 32 nt, Human
cagccaagaggagucagagaugaggugggaag

SEQ ID NO: 352010 - RNA, 32 nt, Human
cagccaagaguuuuccugugguuccagcccau

SEQ ID NO: 352011 - RNA, 32 nt, Human
cagccaagauagcaccacugcacuccaggcug

SEQ ID NO: 352012 - RNA, 23 nt, Human
cagccaagcaggaggccaagggg

SEQ ID NO: 352013 - RNA, 20 nt, Human
cagccaagcauuggggccgc

SEQ ID NO: 352014 - RNA, 19 nt, Human
cagccaagcccaagucucc

SEQ ID NO: 352015 - RNA, 32 nt, Human
cagccaagcccaggcucgcaguaucaauaaag

SEQ ID NO: 352016 - RNA, 26 nt, Human
cagccaagccucggcuccagcuccgc

SEQ ID NO: 352017 - RNA, 20 nt, Human
cagccaagcugccccugccc

SEQ ID NO: 352018 - RNA, 26 nt, Human
cagccaagcugcccgagcuucacuca

SEQ ID NO: 352019 - RNA, 20 nt, Human
cagccaaggaaaguggcucc

SEQ ID NO: 352020 - RNA, 21 nt, Human
cagccaaggacagacuguaga

SEQ ID NO: 352021 - RNA, 22 nt, Human
cagccaaggacgaaagccccac

SEQ ID NO: 352022 - RNA, 32 nt, Human
cagccaaggauuugaacccaggucucgucuga

SEQ ID NO: 352023 - RNA, 32 nt, Human
cagccaaggccagacuuccuaguggaagagca

SEQ ID NO: 352024 - RNA, 32 nt, Human
cagccaaggcccuguccuuucuugaauggugg

SEQ ID NO: 352025 - RNA, 32 nt, Human
cagccaaggcuggacuggguuggcugcagugu

SEQ ID NO: 352026 - RNA, 32 nt, Human
cagccaagggaaugccaccucuucucagaccc

SEQ ID NO: 352027 - RNA, 32 nt, Human
cagccaagggacagugccauccuuggggacag

SEQ ID NO: 352028 - RNA, 32 nt, Human
cagccaagggccagagaccaggaaaggaagaa

SEQ ID NO: 352029 - RNA, 20 nt, Human
cagccaagguagggucacua

SEQ ID NO: 352030 - RNA, 32 nt, Human
cagccaagguggugagggcagcuguuccuaaa

SEQ ID NO: 352031 - RNA, 20 nt, Human
cagccaagguucccuccaca

SEQ ID NO: 352032 - RNA, 31 nt, Human
cagccaaguccaauagcacucacuuaggugu

SEQ ID NO: 352033 - RNA, 32 nt, Human
cagccaagucgccacauuucucugcaaaaugu

SEQ ID NO: 352034 - RNA, 32 nt, Human
cagccaagucucccaccucucugcucgguuuc

SEQ ID NO: 352035 - RNA, 32 nt, Human
cagccaagugccuuuuccucagcacugaggga

SEQ ID NO: 352036 - RNA, 32 nt, Human
cagccaaguggagcucugagaauacaacaagu

SEQ ID NO: 352037 - RNA, 32 nt, Human
cagccaaguggugcuuucuuccaaaugccuug

SEQ ID NO: 352038 - RNA, 32 nt, Human
cagccaagugugaccccacugccaagugggga

SEQ ID NO: 352039 - RNA, 32 nt, Human
cagccaauagccauguaacugagcuuggaaga

SEQ ID NO: 352040 - RNA, 32 nt, Human
cagccaauaugcauuccucccacuggucagag

SEQ ID NO: 352041 - RNA, 32 nt, Human
cagccaauauuugccuguuucuuuggauugug

SEQ ID NO: 352042 - RNA, 21 nt, Human
cagccaaucccuccaccagca

SEQ ID NO: 352043 - RNA, 32 nt, Human
cagccaaugagggauugaaugaaugccaaugu

SEQ ID NO: 352044 - RNA, 32 nt, Human
cagccaauggauucuggucaacugguggagau

SEQ ID NO: 352045 - RNA, 32 nt, Human
cagccaaugguaccacccaguuuccugagcua

SEQ ID NO: 352046 - RNA, 32 nt, Human
cagccaauuuagugaaaccccaucucuacuaa

SEQ ID NO: 352047 - RNA, 32 nt, Human
cagccacaaggcaggaaaacuggcgcaaauuu

SEQ ID NO: 352048 - RNA, 31 nt, Human
cagccacaaguguuggagcugcagagagacc

SEQ ID NO: 352049 - RNA, 32 nt, Human
cagccacacacagccaugcacuacccaacugc

SEQ ID NO: 352050 - RNA, 32 nt, Human
cagccacacaggaguccugggcacccuggcuu

SEQ ID NO: 352051 - RNA, 32 nt, Human
cagccacacaggugugaucagagccagugguc

SEQ ID NO: 352052 - RNA, 21 nt, Human
cagccacaccacccucuccca

SEQ ID NO: 352053 - RNA, 32 nt, Human
cagccacaccacccucucccgacagcccucaa

SEQ ID NO: 352054 - RNA, 32 nt, Human
cagccacacucauucauuuauuuucugugguu

SEQ ID NO: 352055 - RNA, 32 nt, Human
cagccacacuccugcucugguccgagggagau

SEQ ID NO: 352056 - RNA, 22 nt, Human
cagccacacugaaaaugggaug

SEQ ID NO: 352057 - RNA, 32 nt, Human
cagccacacuuccuucagaaggaacuguuaua

SEQ ID NO: 352058 - RNA, 32 nt, Human
cagccacagaacuuccucccacuuaucccuua

SEQ ID NO: 352059 - RNA, 32 nt, Human
cagccacagauggccucacaccagagacagcc

SEQ ID NO: 352060 - RNA, 32 nt, Human
cagccacagcacuccagccugggugacagagc

SEQ ID NO: 352061 - RNA, 32 nt, Human
cagccacagcagagccaaucacagacccacca

SEQ ID NO: 352062 - RNA, 32 nt, Human
cagccacagccaagggcccaagcagaaguaca

SEQ ID NO: 352063 - RNA, 32 nt, Human
cagccacagccaaggguggaggcuucaggucu

SEQ ID NO: 352064 - RNA, 32 nt, Human
cagccacagccccagcccaggcagcccacagu

SEQ ID NO: 352065 - RNA, 32 nt, Human
cagccacagccuccccacccaggaugaccccu

SEQ ID NO: 352066 - RNA, 31 nt, Human
cagccacagcucauguguaccaaaguagaaa

SEQ ID NO: 352067 - RNA, 32 nt, Human
cagccacaggcagaggacgaggacgacuggga

SEQ ID NO: 352068 - RNA, 32 nt, Human
cagccacaggcagaggaggacgaggacgacug

SEQ ID NO: 352069 - RNA, 32 nt, Human
cagccacaggcagaggaggacgaggaugacug

SEQ ID NO: 352070 - RNA, 31 nt, Human
cagccacaggccuagaauaucuggcuucucu

SEQ ID NO: 352071 - RNA, 32 nt, Human
cagccacagggagagacaugggcgaaugagug

SEQ ID NO: 352072 - RNA, 32 nt, Human
cagccacagugauacuuaggaaaccagaggaa

SEQ ID NO: 352073 - RNA, 32 nt, Human
cagccacaucagugcugaugugccucaaggca

SEQ ID NO: 352074 - RNA, 32 nt, Human
cagccacauggaacucuucuuccuuuagguua

SEQ ID NO: 352075 - RNA, 32 nt, Human
cagccacaugugcacaaugagcacaugaaaug

SEQ ID NO: 352076 - RNA, 19 nt, Human
cagccacauucucauagca

SEQ ID NO: 352077 - RNA, 22 nt, Human
cagccaccaacucuggguccag

SEQ ID NO: 352078 - RNA, 32 nt, Human
cagccaccaaguccauggucugacccccagca

SEQ ID NO: 352079 - RNA, 32 nt, Human
cagccaccacagaccucagcuguguauccuau

SEQ ID NO: 352080 - RNA, 18 nt, Human
cagccaccaccaccacca

SEQ ID NO: 352081 - RNA, 32 nt, Human
cagccaccaccaggcugagcagugaggagaga

SEQ ID NO: 352082 - RNA, 32 nt, Human
cagccaccacucagugcuucucugugcaggag

SEQ ID NO: 352083 - RNA, 32 nt, Human
cagccaccagacaacauggagacccucugugc

SEQ ID NO: 352084 - RNA, 32 nt, Human
cagccaccagaggcauggaugugcagugggag

SEQ ID NO: 352085 - RNA, 32 nt, Human
cagccaccaggccagauugaagaagacagcag

SEQ ID NO: 352086 - RNA, 32 nt, Human
cagccaccaguggaagcggggucacugcccca

SEQ ID NO: 352087 - RNA, 17 nt, Human
cagccaccagugggaug

SEQ ID NO: 352088 - RNA, 32 nt, Human
cagccaccaugcuccacucccugcugcuucac

SEQ ID NO: 352089 - RNA, 32 nt, Human
cagccaccauuccucuccccugggcgauggcg

SEQ ID NO: 352090 - RNA, 32 nt, Human
cagccacccacugcugccccaagcucacucag

SEQ ID NO: 352091 - RNA, 32 nt, Human
cagccacccagccaggaggggcuguccaauca

SEQ ID NO: 352092 - RNA, 32 nt, Human
cagccacccagccucagcacucaucugcgcag

SEQ ID NO: 352093 - RNA, 32 nt, Human
cagccacccagccuuuaccagcagcguacggc

SEQ ID NO: 352094 - RNA, 32 nt, Human
cagccacccaggaggaagagcgggcugaggaa

SEQ ID NO: 352095 - RNA, 32 nt, Human
cagccacccaggcagggagcaaguggccuggu

SEQ ID NO: 352096 - RNA, 32 nt, Human
cagccacccaggcagggcaggggccaagguaa

SEQ ID NO: 352097 - RNA, 32 nt, Human
cagccacccagggggcccuccugggaggagcu

SEQ ID NO: 352098 - RNA, 32 nt, Human
cagccaccccacauccagccuacacagaacuu

SEQ ID NO: 352099 - RNA, 32 nt, Human
cagccaccccgcagucacuuucuuuguaacaa

SEQ ID NO: 352100 - RNA, 30 nt, Human
cagccaccccucuccaugccucuugucugu

SEQ ID NO: 352101 - RNA, 32 nt, Human
cagccaccccucuccaugccucuugucugucu

SEQ ID NO: 352102 - RNA, 32 nt, Human
cagccacccgggagccugaggugggaggauug

SEQ ID NO: 352103 - RNA, 25 nt, Human
cagccaccggucccagaacccgcca

SEQ ID NO: 352104 - RNA, 32 nt, Human
cagccaccuccagggcccuguuugggaccacu

SEQ ID NO: 352105 - RNA, 32 nt, Human
cagccaccucugcaaccugccaccuccugcug

SEQ ID NO: 352106 - RNA, 32 nt, Human
cagccaccugagccaccaccgagccauggcag

SEQ ID NO: 352107 - RNA, 32 nt, Human
cagccaccugcucucugugggcugaacugucu

SEQ ID NO: 352108 - RNA, 32 nt, Human
cagccaccugggagcuggcagguggcccgugg

SEQ ID NO: 352109 - RNA, 32 nt, Human
cagccaccugugucuguguucuugccacuguc

SEQ ID NO: 352110 - RNA, 32 nt, Human
cagccacgaagggauggaugugcaucugcccu

SEQ ID NO: 352111 - RNA, 32 nt, Human
cagccacggccaggccagagggagugacagag

SEQ ID NO: 352112 - RNA, 32 nt, Human
cagccacggggccugcacuuccagcuccuuug

SEQ ID NO: 352113 - RNA, 32 nt, Human
cagccacguauggucuggagugcucuguagaa

SEQ ID NO: 352114 - RNA, 32 nt, Human
cagccacgucaaacuucucucccucagggacu

SEQ ID NO: 352115 - RNA, 18 nt, Human
cagccacgugccgagcug

SEQ ID NO: 352116 - RNA, 32 nt, Human
cagccacuaacgguaugugcucuccuucagcc

SEQ ID NO: 352117 - RNA, 32 nt, Human
cagccacucaaaagugcugggauuacuggcgu

SEQ ID NO: 352118 - RNA, 32 nt, Human
cagccacucaaaggaggcagcacugaccugcu

SEQ ID NO: 352119 - RNA, 20 nt, Human
cagccacucacuggggccac

SEQ ID NO: 352120 - RNA, 23 nt, Human
cagccacucacuggggccaccaa

SEQ ID NO: 352121 - RNA, 32 nt, Human
cagccacucagaccuaggucucaggcugcagc

SEQ ID NO: 352122 - RNA, 32 nt, Human
cagccacucagcccugcucugcucagcugaag

SEQ ID NO: 352123 - RNA, 32 nt, Human
cagccacucaguucuuccuccaccuccaccca

SEQ ID NO: 352124 - RNA, 32 nt, Human
cagccacuccaacucuccaccuccagcuucua

SEQ ID NO: 352125 - RNA, 32 nt, Human
cagccacuccaggaacuccugggggugcucca

SEQ ID NO: 352126 - RNA, 25 nt, Human
cagccacuccaggaggaagucggga

SEQ ID NO: 352127 - RNA, 32 nt, Human
cagccacucccaggggccuuugcagcgucuuu

SEQ ID NO: 352128 - RNA, 21 nt, Human
cagccacuccugcagcugcca

SEQ ID NO: 352129 - RNA, 18 nt, Human
cagccacuccuggcccca

SEQ ID NO: 352130 - RNA, 22 nt, Human
cagccacuccuuguucacccca

SEQ ID NO: 352131 - RNA, 32 nt, Human
cagccacucgggaggcugagacaggagaaucg

SEQ ID NO: 352132 - RNA, 32 nt, Human
cagccacugagauccuccagccuggacaugcu

SEQ ID NO: 352133 - RNA, 32 nt, Human
cagccacugcaagcccugggccucuggcaccu

SEQ ID NO: 352134 - RNA, 32 nt, Human
cagccacugcucauguaauguacucccuuaac

SEQ ID NO: 352135 - RNA, 32 nt, Human
cagccacuggccaggccguuguauccauguca

SEQ ID NO: 352136 - RNA, 32 nt, Human
cagccacugugggcccugccucugccuguucu

SEQ ID NO: 352137 - RNA, 21 nt, Human
cagccacuucauccccuccca

SEQ ID NO: 352138 - RNA, 32 nt, Human
cagccacuugacuguccucgacggccuguucc

SEQ ID NO: 352139 - RNA, 32 nt, Human
cagccacuugcagaacaggaugggaccgagau

SEQ ID NO: 352140 - RNA, 32 nt, Human
cagccacuuguccuagccaaauguccaaaaca

SEQ ID NO: 352141 - RNA, 32 nt, Human
cagccacuuucugccagcaucugcagccacuu

SEQ ID NO: 352142 - RNA, 32 nt, Human
cagccacuuucugccagcaucugcagccagca

SEQ ID NO: 352143 - RNA, 20 nt, Human
cagccacuuucuguguggua

SEQ ID NO: 352144 - RNA, 32 nt, Human
cagccagaaaccaguaaagaaaccccauucag

SEQ ID NO: 352145 - RNA, 32 nt, Human
cagccagaacaggugacacagagcaggggcuu

SEQ ID NO: 352146 - RNA, 32 nt, Human
cagccagaagcagccucagcuuggcaaggugu

SEQ ID NO: 352147 - RNA, 32 nt, Human
cagccagaagccucugccucccuagcuuuucu

SEQ ID NO: 352148 - RNA, 23 nt, Human
cagccagaaggcggggaucacua

SEQ ID NO: 352149 - RNA, 32 nt, Human
cagccagaaguuaaacaucugggauaugacgu

SEQ ID NO: 352150 - RNA, 32 nt, Human
cagccagaaguuaaagggcugaggguugaggu

SEQ ID NO: 352151 - RNA, 20 nt, Human
cagccagacaccuuguacug

SEQ ID NO: 352152 - RNA, 32 nt, Human
cagccagaccaacaugaugaaaccccgucugu

SEQ ID NO: 352153 - RNA, 32 nt, Human
cagccagaccacauucuauaaucuuugaacau

SEQ ID NO: 352154 - RNA, 18 nt, Human
cagccagaccucuccaca

SEQ ID NO: 352155 - RNA, 32 nt, Human
cagccagacgucacccacgaccccuaugaguu

SEQ ID NO: 352156 - RNA, 32 nt, Human
cagccagacuggguuaagggagcugcucaagc

SEQ ID NO: 352157 - RNA, 32 nt, Human
cagccagagcaugcgucucagcagagcugucu

SEQ ID NO: 352158 - RNA, 17 nt, Human
cagccagagccuccaua

SEQ ID NO: 352159 - RNA, 32 nt, Human
cagccagagccugucuuucagcauucagucgc

SEQ ID NO: 352160 - RNA, 32 nt, Human
cagccagagcugggagccccuuguucaaggau

SEQ ID NO: 352161 - RNA, 21 nt, Human
cagccagagcuuccaugugcc

SEQ ID NO: 352162 - RNA, 32 nt, Human
cagccagaggagggcagagggagaauccaagg

SEQ ID NO: 352163 - RNA, 32 nt, Human
cagccagaggcugaccugagggccacuguccu

SEQ ID NO: 352164 - RNA, 32 nt, Human
cagccagagggacuggagccaggugugcaugg

SEQ ID NO: 352165 - RNA, 32 nt, Human
cagccagaggggccucaggaccagcccugucc

SEQ ID NO: 352166 - RNA, 32 nt, Human
cagccagaguccaaggcauaaggaggaaaaug

SEQ ID NO: 352167 - RNA, 22 nt, Human
cagccagagugacagagcaaga

SEQ ID NO: 352168 - RNA, 32 nt, Human
cagcuacuugggaggcugaggugggaggauaa

SEQ ID NO: 352169 - RNA, 32 nt, Human
cagcuacuugggaggcugaggugggaggaugg

SEQ ID NO: 352170 - RNA, 32 nt, Human
cagcuacuugggaggcugaggugggaggauug

SEQ ID NO: 352171 - RNA, 32 nt, Human
cagcuacuugggaggcugaguugggaggauug

SEQ ID NO: 352172 - RNA, 32 nt, Human
cagcuacuugggaggcugcagcuguggcugug

SEQ ID NO: 352173 - RNA, 32 nt, Human
cagcuacuugggagggcugaagccaggggauu

SEQ ID NO: 352174 - RNA, 32 nt, Human
cagcuacuugggagguggaggugggaggauua

SEQ ID NO: 352175 - RNA, 19 nt, Human
cagcuacuuggggggcuca

SEQ ID NO: 352176 - RNA, 32 nt, Human
cagcuacuugguuuguguucuucuucauauuc

SEQ ID NO: 352177 - RNA, 32 nt, Human
cagcuagaacaagaauuccuggagcucaaccc

SEQ ID NO: 352178 - RNA, 32 nt, Human
cagcuagaacaccuuccagacacuugcuggac

SEQ ID NO: 352179 - RNA, 32 nt, Human
cagcuagagcuuccacugucagcccucacugu

SEQ ID NO: 352180 - RNA, 18 nt, Human
cagcuagaugucuuuaca

SEQ ID NO: 352181 - RNA, 32 nt, Human
cagcuagccccagggguggaacaacuguggga

SEQ ID NO: 352182 - RNA, 32 nt, Human
cagcuagccuacucccuuuggaaugcaauaaa

SEQ ID NO: 352183 - RNA, 32 nt, Human
cagcuagcucccuggagggcacggugaagagg

SEQ ID NO: 352184 - RNA, 32 nt, Human
cagcuaggccggcucuuccacgcccagcauga

SEQ ID NO: 352185 - RNA, 32 nt, Human
cagcuaggcuuagccccucugcccucccucca

SEQ ID NO: 352186 - RNA, 32 nt, Human
cagcuaggcuuagccccucugcccucccuuca

SEQ ID NO: 352187 - RNA, 32 nt, Human
cagcuagggaaagcaguugcgggcagggggug

SEQ ID NO: 352188 - RNA, 32 nt, Human
cagcuagggaggcaaagcaggcugcagucagu

SEQ ID NO: 352189 - RNA, 32 nt, Human
cagcuagggcgaagccagcagaggugugugua

SEQ ID NO: 352190 - RNA, 32 nt, Human
cagcuaguaauagcauuuucaguacuuuucau

SEQ ID NO: 352191 - RNA, 32 nt, Human
cagcuaguagcgggugcucugggaucuggugg

SEQ ID NO: 352192 - RNA, 32 nt, Human
cagcuaguaggugacagagcccagauugaauc

SEQ ID NO: 352193 - RNA, 18 nt, Human
cagcuaguggcuuccaca

SEQ ID NO: 352194 - RNA, 32 nt, Human
cagcuauagacagaaauaauaagccacccugg

SEQ ID NO: 352195 - RNA, 32 nt, Human
cagcuauagccugucccaggggcugcugucca

SEQ ID NO: 352196 - RNA, 32 nt, Human
cagcuaucacaggugaauugcagugagcgcua

SEQ ID NO: 352197 - RNA, 32 nt, Human
cagcuaucccagaggucgaggcugcagugagc

SEQ ID NO: 352198 - RNA, 32 nt, Human
cagcuauccuugcccccagaggagcagucauu

SEQ ID NO: 352199 - RNA, 32 nt, Human
cagcuaugaauccauuguccuuguaguuucuu

SEQ ID NO: 352200 - RNA, 32 nt, Human
cagcuaugcugauuuugaaaaucagaucugag

SEQ ID NO: 352201 - RNA, 32 nt, Human
cagcuauggccugggcucuagcuuuggcucug

SEQ ID NO: 352202 - RNA, 30 nt, Human
cagcuaugggagaaccugcguucaccucuu

SEQ ID NO: 352203 - RNA, 32 nt, Human
cagcuauuauacuugggacucuaccucucacu

SEQ ID NO: 352204 - RNA, 31 nt, Human
cagcuauucaggagcuguuguaggagagauu

SEQ ID NO: 352205 - RNA, 32 nt, Human
cagcuauucuguaacaucaucaagucccagcc

SEQ ID NO: 352206 - RNA, 32 nt, Human
cagcuauugcacuucagccaaauguuuauuuc

SEQ ID NO: 352207 - RNA, 32 nt, Human
cagcuauuuaaggggagcaggagugcagaaca

SEQ ID NO: 352208 - RNA, 32 nt, Human
cagcuauuuggaagcuaccaggaaugcuuucu

SEQ ID NO: 352209 - RNA, 32 nt, Human
cagcuauuugggaggcugaggcaguagaaucg

SEQ ID NO: 352210 - RNA, 32 nt, Human
cagcuauuugggaggcugaugcaggagaauag

SEQ ID NO: 352211 - RNA, 32 nt, Human
cagcuauuuuauacucauaaggucaguguaca

SEQ ID NO: 352212 - RNA, 23 nt, Human
cagcuauuuuccuggcuguggga

SEQ ID NO: 352213 - RNA, 32 nt, Human
cagcucaacugauuucuuguccaaugauccuu

SEQ ID NO: 352214 - RNA, 32 nt, Human
cagcucaagagcaagaugauguucucauaguu

SEQ ID NO: 352215 - RNA, 24 nt, Human
cagcucaagauacaguggcaaaga

SEQ ID NO: 352216 - RNA, 32 nt, Human
cagcucaagccuugccacuucgggcuucucac

SEQ ID NO: 352217 - RNA, 23 nt, Human
cagcucaaggaaaggccugaaag

SEQ ID NO: 352218 - RNA, 20 nt, Human
cagcucaaggcuccuccaca

SEQ ID NO: 352219 - RNA, 32 nt, Human
cagcucaaugcuguuuucuugcaggugaagcu

SEQ ID NO: 352220 - RNA, 32 nt, Human
cagcucacaccacuccagaaccugacaaggca

SEQ ID NO: 352221 - RNA, 32 nt, Human
cagcucacaccuguaaucccagcacuuuggga

SEQ ID NO: 352222 - RNA, 18 nt, Human
cagcucacagacgcucuu

SEQ ID NO: 352223 - RNA, 32 nt, Human
cagcucacagcaaccuccgccucccagguuca

SEQ ID NO: 352224 - RNA, 32 nt, Human
cagcucacagcaaccuccgccucccggguuca

SEQ ID NO: 352225 - RNA, 22 nt, Human
cagcucacagcaaccucugccu

SEQ ID NO: 352226 - RNA, 32 nt, Human
cagcucacagcaaccucugccuccuggguuca

SEQ ID NO: 352227 - RNA, 32 nt, Human
cagcucacagcaggcuccaccucucaggcuca

SEQ ID NO: 352228 - RNA, 32 nt, Human
cagcucacagccgcacccagaauccuuugcag

SEQ ID NO: 352229 - RNA, 32 nt, Human
cagcucacaucugaggcccugggaggucuugu

SEQ ID NO: 352230 - RNA, 32 nt, Human
cagcucaccaagcuacuaucucuuuuaacucc

SEQ ID NO: 352231 - RNA, 32 nt, Human
cagcucaccacaaccuccaccuccuggguuua

SEQ ID NO: 352232 - RNA, 32 nt, Human
cagcucaccacaaccuccgccucccagguuca

SEQ ID NO: 352233 - RNA, 32 nt, Human
cagcucaccacaaccucugccuccccgguuca

SEQ ID NO: 352234 - RNA, 32 nt, Human
cagcucaccccuccuuagcccaaggucuuccu

SEQ ID NO: 352235 - RNA, 32 nt, Human
cagcucaccccuggcccuugcccuggcugccc

SEQ ID NO: 352236 - RNA, 32 nt, Human
cagcucacccucaucuccucugcccuagagcu

SEQ ID NO: 352237 - RNA, 32 nt, Human
cagcucaccgaaaccuccaccuacuaggcuca

SEQ ID NO: 352238 - RNA, 32 nt, Human
cagcucaccgcaaccuccaccuccaggguuga

SEQ ID NO: 352239 - RNA, 32 nt, Human
cagcucaccgcaaccuccaccuccuggguuca

SEQ ID NO: 352240 - RNA, 32 nt, Human
cagcucaccgcaaccuccacucgcagguucaa

SEQ ID NO: 352241 - RNA, 32 nt, Human
cagcucaccgcaaccuccgccucccggguuca

SEQ ID NO: 352242 - RNA, 32 nt, Human
cagcucaccgcaaccucugccucccagauuca

SEQ ID NO: 352243 - RNA, 32 nt, Human
cagcucaccgcaacgucuaccucccagguuca

SEQ ID NO: 352244 - RNA, 32 nt, Human
cagcucaccgcaaucuccgccucccagauuca

SEQ ID NO: 352245 - RNA, 32 nt, Human
cagcucaccgcauccuccaccucccagguuca

SEQ ID NO: 352246 - RNA, 32 nt, Human
cagcucaccucaaccuccgccucccggguuca

SEQ ID NO: 352247 - RNA, 32 nt, Human
cagcucaccucaggacugggcucucuggccug

SEQ ID NO: 352248 - RNA, 32 nt, Human
cagcucacgccuguaaucccagcacuuuggga

SEQ ID NO: 352249 - RNA, 32 nt, Human
cagcucacgccuguaaucccaucacuuuggga

SEQ ID NO: 352250 - RNA, 32 nt, Human
cagcucacggcaaccuccgccucccggguuca

SEQ ID NO: 352251 - RNA, 32 nt, Human
cagcucacggcagccucaaccucccuggcuca

SEQ ID NO: 352252 - RNA, 32 nt, Human
cagcucacggcuaccucugccucccggguuca

SEQ ID NO: 352253 - RNA, 19 nt, Human
cagcucacguccagguuca

SEQ ID NO: 352254 - RNA, 32 nt, Human
cagcucacuacaaccuccugcuccuggguucg

SEQ ID NO: 352255 - RNA, 32 nt, Human
cagcucacuacaaccucugccucccagguuca

SEQ ID NO: 352256 - RNA, 32 nt, Human
cagcucacuacaaccucugccuccggguucaa

SEQ ID NO: 352257 - RNA, 32 nt, Human
cagcucacuauaagcuccaccucccagguuca

SEQ ID NO: 352258 - RNA, 32 nt, Human
cagcucacugaaaccucugccucccggguuca

SEQ ID NO: 352259 - RNA, 32 nt, Human
cagcucacugaaccucugccucccaggucaag

SEQ ID NO: 352260 - RNA, 32 nt, Human
cagcucacugaagccucgaccuccagaacuca

SEQ ID NO: 352261 - RNA, 32 nt, Human
cagcucacugaagucucgaccucccaggcuca

SEQ ID NO: 352262 - RNA, 32 nt, Human
cagcucacugaucucuugccucugcugauggg

SEQ ID NO: 352263 - RNA, 32 nt, Human
cagcucacugcaaacuccaccucccagguuca

SEQ ID NO: 352264 - RNA, 32 nt, Human
cagcucacugcaaacucugccucccgaauuca

SEQ ID NO: 352265 - RNA, 32 nt, Human
cagcucacugcaacaccgccucccggguucaa

SEQ ID NO: 352266 - RNA, 32 nt, Human
cagcucacugcaacauccaccuccuggguuca

SEQ ID NO: 352267 - RNA, 32 nt, Human
cagcucacugcaacauccgccucugggguuca

SEQ ID NO: 352268 - RNA, 32 nt, Human
cagcucacugcaaccacugccucccaggcuca

SEQ ID NO: 352269 - RNA, 32 nt, Human
cagcucacugcaacccccgccuccuggguuca

SEQ ID NO: 352270 - RNA, 32 nt, Human
cagcucacugcaaccuacgccuucuggguuca

SEQ ID NO: 352271 - RNA, 32 nt, Human
cagcucacugcaaccucaaacuccugggcuca

SEQ ID NO: 352272 - RNA, 32 nt, Human
cagcucacugcaaccucaauccugggcucaag

SEQ ID NO: 352273 - RNA, 32 nt, Human
cagcucacugcaaccuccaccucccagacuca

SEQ ID NO: 352274 - RNA, 32 nt, Human
cagcucacugcaaccuccaccucccaggauca

SEQ ID NO: 352275 - RNA, 32 nt, Human
cagcucacugcaaccuccaccucccaggcuca

SEQ ID NO: 352276 - RNA, 32 nt, Human
cagcucacugcaaccuccaccucccaggugca

SEQ ID NO: 352277 - RNA, 32 nt, Human
cagcucacugcaaccuccaccucccagguuca

SEQ ID NO: 352278 - RNA, 32 nt, Human
cagcucacugcaaccuccaccucccgggucaa

SEQ ID NO: 352279 - RNA, 32 nt, Human
cagcucacugcaaccuccaccucccggguuca

SEQ ID NO: 352280 - RNA, 32 nt, Human
cagcucacugcaaccuccaccucccggguuuc

SEQ ID NO: 352281 - RNA, 32 nt, Human
cagcucacugcaaccuccaccucccugguuca

SEQ ID NO: 352282 - RNA, 32 nt, Human
cagcucacugcaaccuccaccuccggguucaa

SEQ ID NO: 352283 - RNA, 32 nt, Human
cagcucacugcaaccuccaccuccuggauucg

SEQ ID NO: 352284 - RNA, 32 nt, Human
cagcucacugcaaccuccaccuccuggguuca

SEQ ID NO: 352285 - RNA, 32 nt, Human
cagcucacugcaaccuccaccuccuggguuga

SEQ ID NO: 352286 - RNA, 32 nt, Human
cagcucacugcaaccuccaccucgcagguuca

SEQ ID NO: 352287 - RNA, 32 nt, Human
cagcucacugcaaccuccaccucucagguuca

SEQ ID NO: 352288 - RNA, 32 nt, Human
cagcucacugcaaccuccaccucuuauguuca

SEQ ID NO: 352289 - RNA, 32 nt, Human
cagcucacugcaaccuccaucuccagguuuca

SEQ ID NO: 352290 - RNA, 32 nt, Human
cagcucacugcaaccuccaucucccggauucc

SEQ ID NO: 352291 - RNA, 32 nt, Human
cagcucacugcaaccuccaucuccuggauuca

SEQ ID NO: 352292 - RNA, 32 nt, Human
cagcucacugcaaccucccccuccuggguuca

SEQ ID NO: 352293 - RNA, 32 nt, Human
cagcucacugcaaccuccgcaucccggguuca

SEQ ID NO: 352294 - RNA, 32 nt, Human
cagcucacugcaaccuccgcccccuggguuca

SEQ ID NO: 352295 - RNA, 32 nt, Human
cagcucacugcaaccuccgccucccaaguuca

SEQ ID NO: 352296 - RNA, 32 nt, Human
cagcucacugcaaccuccgccucccagguuca

SEQ ID NO: 352297 - RNA, 32 nt, Human
cagcucacugcaaccuccgccucccggguuca

SEQ ID NO: 352298 - RNA, 32 nt, Human
cagcucacugcaaccuccgccuccugagguuc

SEQ ID NO: 352299 - RNA, 32 nt, Human
cagcucacugcaaccuccgccuccugggauca

SEQ ID NO: 352300 - RNA, 32 nt, Human
cagcucacugcaaccuccgccuccuggguuca

SEQ ID NO: 352301 - RNA, 32 nt, Human
cagcucacugcaaccuccgccucuuggguuca

SEQ ID NO: 352302 - RNA, 32 nt, Human
cagcucacugcaaccuccgccugcuggguuca

SEQ ID NO: 352303 - RNA, 32 nt, Human
cagcucacugcaaccuccgccuucuggguuca

SEQ ID NO: 352304 - RNA, 32 nt, Human
cagcucacugcaaccuccgguucccgggcuca

SEQ ID NO: 352305 - RNA, 32 nt, Human
cagcucacugcaaccuccgucuccaggguuca

SEQ ID NO: 352306 - RNA, 32 nt, Human
cagcucacugcaaccuccgucucuacuaaaaa

SEQ ID NO: 352307 - RNA, 32 nt, Human
cagcucacugcaaccuccguuuccuggguucg

SEQ ID NO: 352308 - RNA, 32 nt, Human
cagcucacugcaaccuccuccucccggguuca

SEQ ID NO: 352309 - RNA, 32 nt, Human
cagcucacugcaaccuccuccuucuggguuca

SEQ ID NO: 352310 - RNA, 32 nt, Human
cagcucacugcaaccucgaccucuuggguuca

SEQ ID NO: 352311 - RNA, 32 nt, Human
cagcucacugcaaccucuaccuccuggguuca

SEQ ID NO: 352312 - RNA, 32 nt, Human
cagcucacugcaaccucuacucccaggcucaa

SEQ ID NO: 352313 - RNA, 32 nt, Human
cagcucacugcaaccucucucucccggguuca

SEQ ID NO: 352314 - RNA, 32 nt, Human
cagcucacugcaaccucugccuccagaguuca

SEQ ID NO: 352315 - RNA, 32 nt, Human
cagcucacugcaaccucugccucccagguuca

SEQ ID NO: 352316 - RNA, 32 nt, Human
cagcucacugcaaccucugccucccaguucaa

SEQ ID NO: 352317 - RNA, 32 nt, Human
cagcucacugcaaccucugccucccggauuca

SEQ ID NO: 352318 - RNA, 32 nt, Human
cagcucacugcaaccucugccucccggauuua

SEQ ID NO: 352319 - RNA, 32 nt, Human
cagcucacugcaaccucugccucccggguuca

SEQ ID NO: 352320 - RNA, 32 nt, Human
cagcucacugcaaccucugccucccugguuca

SEQ ID NO: 352321 - RNA, 32 nt, Human
cagcucacugcaaccucugccuccugaguuca

SEQ ID NO: 352322 - RNA, 32 nt, Human
cagcucacugcaaccucugccuccuggauuca

SEQ ID NO: 352323 - RNA, 32 nt, Human
cagcucacugcaaccucugccuccugggcuca

SEQ ID NO: 352324 - RNA, 32 nt, Human
cagcucacugcaaccucugccuccuggguuca

SEQ ID NO: 352325 - RNA, 32 nt, Human
cagcucacugcaaccucugccuccuggguucu

SEQ ID NO: 352326 - RNA, 32 nt, Human
cagcucacugcaaccucugccuccuggguuua

SEQ ID NO: 352327 - RNA, 32 nt, Human
cagcucacugcaaccucugccuccugguucaa

SEQ ID NO: 352328 - RNA, 32 nt, Human
cagcucacugcaaccucugccuucuggauuca

SEQ ID NO: 352329 - RNA, 32 nt, Human
cagcucacugcaaccucugcuucccggguuca

SEQ ID NO: 352330 - RNA, 32 nt, Human
cagcucacugcaaccucugucucccggguuca

SEQ ID NO: 352331 - RNA, 32 nt, Human
cagcucacugcaaccucugucuccuggguuca

SEQ ID NO: 352332 - RNA, 32 nt, Human
cagcucacugcaaccugugccucccggcuuca

SEQ ID NO: 352333 - RNA, 32 nt, Human
cagcucacugcaaccuuacuccuaggcucaag

SEQ ID NO: 352334 - RNA, 32 nt, Human
cagcucacugcaaccuucaccucccagguuca

SEQ ID NO: 352335 - RNA, 32 nt, Human
cagcucacugcaaccuucgccaccuggguucc

SEQ ID NO: 352336 - RNA, 32 nt, Human
cagcucacugcaaccuucgccucccagcuuca

SEQ ID NO: 352337 - RNA, 32 nt, Human
cagcucacugcaaccuuugucucccgggcuca

SEQ ID NO: 352338 - RNA, 32 nt, Human
cagcucacugcaacguccaccuccuggguuca

SEQ ID NO: 352339 - RNA, 32 nt, Human
cagcucacugcaacgucugccucccggguuca

SEQ ID NO: 352340 - RNA, 32 nt, Human
cagcucacugcaacuuccaccucccagguuca

SEQ ID NO: 352341 - RNA, 32 nt, Human
cagcucacugcaacuuccgcaucccagguuca

SEQ ID NO: 352342 - RNA, 32 nt, Human
cagcucacugcaacuuccgccccgccagguuc

SEQ ID NO: 352343 - RNA, 32 nt, Human
cagcucacugcaacuucugccucccagguuca

SEQ ID NO: 352344 - RNA, 32 nt, Human
cagcucacugcaacuucugccuccuggguuca

SEQ ID NO: 352345 - RNA, 32 nt, Human
cagcucacugcaacuucugccuccugguauca

SEQ ID NO: 352346 - RNA, 32 nt, Human
cagcucacugcaagcuccaacucccggguuca

SEQ ID NO: 352347 - RNA, 32 nt, Human
cagcucacugcaagcuccaccucccggguuca

SEQ ID NO: 352348 - RNA, 32 nt, Human
cagcucacugcaagcuccaccucccggguuua

SEQ ID NO: 352349 - RNA, 32 nt, Human
cagcucacugcaagcuccaccuuccggguuca

SEQ ID NO: 352350 - RNA, 32 nt, Human
cagcucacugcaagcuccgccucccagguuca

SEQ ID NO: 352351 - RNA, 32 nt, Human
cagcucacugcaagcuccgccucccggguaca

SEQ ID NO: 352352 - RNA, 32 nt, Human
cagcucacugcaagcuccgccuccucccgggu

SEQ ID NO: 352353 - RNA, 32 nt, Human
cagcucacugcaagcuccgccuccuggguuca

SEQ ID NO: 352354 - RNA, 32 nt, Human
cagcucacugcaagcucuaccucuugguucac

SEQ ID NO: 352355 - RNA, 32 nt, Human
cagcucacugcaagcucugccucccggguuca

SEQ ID NO: 352356 - RNA, 32 nt, Human
cagcucacugcaagcucugccucccguguuca

SEQ ID NO: 352357 - RNA, 32 nt, Human
cagcucacugcaagcucugccucucagguuca

SEQ ID NO: 352358 - RNA, 32 nt, Human
cagcucacugcaaucuccaccuccuggguuca

SEQ ID NO: 352359 - RNA, 32 nt, Human
cagcucacugcaaucuccgccucccggguuca

SEQ ID NO: 352360 - RNA, 32 nt, Human
cagcucacugcaaucucugccacccagauuca

SEQ ID NO: 352361 - RNA, 32 nt, Human
cagcucacugcaaucucugccuccuggguuca

SEQ ID NO: 352362 - RNA, 32 nt, Human
cagcucacugcaaucuucaccuccuaggcuca

SEQ ID NO: 352363 - RNA, 32 nt, Human
cagcucacugcagccacugccucccagguuca

SEQ ID NO: 352364 - RNA, 32 nt, Human
cagcucacugcagcccccgccucccagguucg

SEQ ID NO: 352365 - RNA, 32 nt, Human
cagcucacugcagccucaaccuggguucaagu

SEQ ID NO: 352366 - RNA, 32 nt, Human
cagcucacugcagccuccaccucccagguuca

SEQ ID NO: 352367 - RNA, 32 nt, Human
cagcucacugcagccuccaccuccugggcuca

SEQ ID NO: 352368 - RNA, 32 nt, Human
cagcucacugcagccuccaccuccuggguuca

SEQ ID NO: 352369 - RNA, 32 nt, Human
cagcucacugcagccucugccucccggguuca

SEQ ID NO: 352370 - RNA, 32 nt, Human
cagcucacugcagccucugccuccugaguuca

SEQ ID NO: 352371 - RNA, 32 nt, Human
cagcucacugcagccuuguccucccaggcuca

SEQ ID NO: 352372 - RNA, 32 nt, Human
cagcucacugcaggcucugccuccuggguucc

SEQ ID NO: 352373 - RNA, 32 nt, Human
cagcucacugcagucucugccucccggguucg

SEQ ID NO: 352374 - RNA, 20 nt, Human
cagcucacugcauccuccgc

SEQ ID NO: 352375 - RNA, 32 nt, Human
cagcucacugcauccucugccucccggguuca

SEQ ID NO: 352376 - RNA, 32 nt, Human
cagcucacugccaccucugccucccagguuca

SEQ ID NO: 352377 - RNA, 32 nt, Human
cagcucacugcgaccuccaccucccauguuca

SEQ ID NO: 352378 - RNA, 32 nt, Human
cagcucacugcgaccuccaccuccuggguuca

SEQ ID NO: 352379 - RNA, 32 nt, Human
cagcucacugcggccucuaagaaggugaagca

SEQ ID NO: 352380 - RNA, 32 nt, Human
cagcucacugguuuacaaauauagguugucuu

SEQ ID NO: 352381 - RNA, 32 nt, Human
cagcucacuguaaccuccaccucccggauuca

SEQ ID NO: 352382 - RNA, 32 nt, Human
cagcucacuguaaccucugccucccugcuuca

SEQ ID NO: 352383 - RNA, 32 nt, Human
cagcucacuguacuccagcccggguucaagca

SEQ ID NO: 352384 - RNA, 32 nt, Human
cagcucacuguagccucgaccuuccaggcuca

SEQ ID NO: 352385 - RNA, 32 nt, Human
cagcucacuguagccucuaacucccaggcuca

SEQ ID NO: 352386 - RNA, 32 nt, Human
cagcucacuguagccucuaucuccugggcuca

SEQ ID NO: 352387 - RNA, 32 nt, Human
cagcucacuguagccuugaucuccugggcuca

SEQ ID NO: 352388 - RNA, 32 nt, Human
cagcucacuguagcuuugaccucucaggcuca

SEQ ID NO: 352389 - RNA, 32 nt, Human
cagcucacuguaggcucuaccucauggguucc

SEQ ID NO: 352390 - RNA, 32 nt, Human
cagcucagaacagcuggaucuugcucagucuc

SEQ ID NO: 352391 - RNA, 32 nt, Human
cagcucagagaaugugcuugaugaggaaggcg

SEQ ID NO: 352392 - RNA, 22 nt, Human
cagcucagagcuccucccaccc

SEQ ID NO: 352393 - RNA, 32 nt, Human
cagcucagagcuggucugccauggacauccug

SEQ ID NO: 352394 - RNA, 32 nt, Human
cagcucagaggaggaggaaggugaagaugaag

SEQ ID NO: 352395 - RNA, 32 nt, Human
cagcucagaggguggucacagcauguguccuc

SEQ ID NO: 352396 - RNA, 32 nt, Human
cagcucagauugcaccacugcacuccagccug

SEQ ID NO: 352397 - RNA, 32 nt, Human
cagcucagcaacccuugcugugcucaaguucu

SEQ ID NO: 352398 - RNA, 32 nt, Human
cagcucagccaccuccuccucucaggucugcc

SEQ ID NO: 352399 - RNA, 32 nt, Human
cagcucagccccaacacagaggugagaccagg

SEQ ID NO: 352400 - RNA, 32 nt, Human
cagcucagccccggccacucccugccaacucc

SEQ ID NO: 352401 - RNA, 32 nt, Human
cagcucagccucccccugcugcucauccaggg

SEQ ID NO: 352402 - RNA, 32 nt, Human
cagcucagccuccuugauaaggguucuucuau

SEQ ID NO: 352403 - RNA, 32 nt, Human
cagcucagccugggcggcacagccagaugcga

SEQ ID NO: 352404 - RNA, 32 nt, Human
cagcucagcuaccacuuccccuucccucugca

SEQ ID NO: 352405 - RNA, 32 nt, Human
cagcucagcugauucugaccucagcgucucca

SEQ ID NO: 352406 - RNA, 32 nt, Human
cagcucagcugcaucuugcccuggauccucau

SEQ ID NO: 352407 - RNA, 32 nt, Human
cagcucagcuggccuggaaugggccaggcugg

SEQ ID NO: 352408 - RNA, 32 nt, Human
cagcucagcugucaucucagugaccaguuuuu

SEQ ID NO: 352409 - RNA, 32 nt, Human
cagcucaggaacccgcgaacccucucuugacc

SEQ ID NO: 352410 - RNA, 32 nt, Human
cagcucaggaaggaaagcccagcccuuucugg

SEQ ID NO: 352411 - RNA, 20 nt, Human
cagcucaggaugagucuucc

SEQ ID NO: 352412 - RNA, 32 nt, Human
cagcucaggcacaauugucaccaaggaguuaa

SEQ ID NO: 352413 - RNA, 32 nt, Human
cagcucaggcagcagaaguugcaggaagaaca

SEQ ID NO: 352414 - RNA, 32 nt, Human
cagcucaggcagcgcaggugugaugggcacag

SEQ ID NO: 352415 - RNA, 20 nt, Human
cagcucaggccccugggucc

SEQ ID NO: 352416 - RNA, 32 nt, Human
cagcucaggccccuuggagcaggauggcuccu

SEQ ID NO: 352417 - RNA, 32 nt, Human
cagcucaggccuguaaucucagcacuuuggga

SEQ ID NO: 352418 - RNA, 32 nt, Human
cagcucaggcugggcuguggugccagcauaga

SEQ ID NO: 352419 - RNA, 32 nt, Human
cagcucaggcuugauuccuacucucaaugugg

SEQ ID NO: 352420 - RNA, 32 nt, Human
cagcucagguacuucagaugugcuuaauaugg

SEQ ID NO: 352421 - RNA, 32 nt, Human
cagcucagguagcacauguaagagugagacug

SEQ ID NO: 352422 - RNA, 32 nt, Human
cagcucagugcaaccuccgccacccggguuca

SEQ ID NO: 352423 - RNA, 32 nt, Human
cagcucagugcaaccuccgcccccugggauca

SEQ ID NO: 352424 - RNA, 32 nt, Human
cagcucagugucauccagggccugugucccuc

SEQ ID NO: 352425 - RNA, 32 nt, Human
cagcucaguguuauggggaagggaggcccagc

SEQ ID NO: 352426 - RNA, 32 nt, Human
cagcucaguguucacagucaacacagcaggcu

SEQ ID NO: 352427 - RNA, 32 nt, Human
cagcucaguucugucauccaggacauggccgu

SEQ ID NO: 352428 - RNA, 20 nt, Human
cagcucaucagcagcagcag

SEQ ID NO: 352429 - RNA, 32 nt, Human
cagcucaucggcuguaggauuugggugagaca

SEQ ID NO: 352430 - RNA, 32 nt, Human
cagcucaucucccugguugcauggcccacuug

SEQ ID NO: 352431 - RNA, 32 nt, Human
cagcucaucucuggaagccuuugcuacucaag

SEQ ID NO: 352432 - RNA, 32 nt, Human
cagcucaugacuguaaucccagcacuuuggga

SEQ ID NO: 352433 - RNA, 32 nt, Human
cagcucaugccgagguggagguaguggaggaa

SEQ ID NO: 352434 - RNA, 32 nt, Human
cagcucaugccgguaaucucagcacuuuggga

SEQ ID NO: 352435 - RNA, 32 nt, Human
cagcucaugccuguaaucccagcacuuuggga

SEQ ID NO: 352436 - RNA, 32 nt, Human
cagcucaugccuguaauccuagcacuuuggaa

SEQ ID NO: 352437 - RNA, 32 nt, Human
cagcucaugccuguaaucuccagcacuuuggg

SEQ ID NO: 352438 - RNA, 32 nt, Human
cagcucauggcagaaggggacauacaggccca

SEQ ID NO: 352439 - RNA, 32 nt, Human
cagcucauuacagccuccaccucccaguuuca

SEQ ID NO: 352440 - RNA, 32 nt, Human
cagcucauugcaaccucugccuaacggguuca

SEQ ID NO: 352441 - RNA, 32 nt, Human
cagcucauugcaaccucugucucccagguuca

SEQ ID NO: 352442 - RNA, 32 nt, Human
cagcucauugcaacuuccaccuccuggguuga

SEQ ID NO: 352443 - RNA, 32 nt, Human
cagcucauugcagccucaaccucccaggcuca

SEQ ID NO: 352444 - RNA, 32 nt, Human
cagcucauuucugcuugaccuuuccuuguugc

SEQ ID NO: 352445 - RNA, 32 nt, Human
cagcuccaaacaggcuguaaccaaguccaccc

SEQ ID NO: 352446 - RNA, 32 nt, Human
cagcuccaaauacacauucucguucacucaac

SEQ ID NO: 352447 - RNA, 32 nt, Human
cagcuccaaaugcucaccuggcugucagggau

SEQ ID NO: 352448 - RNA, 19 nt, Human
cagcuccaaccugcaaaga

SEQ ID NO: 352449 - RNA, 18 nt, Human
cagcuccaagagguuuuu

SEQ ID NO: 352450 - RNA, 32 nt, Human
cagcuccaagagguuuuucagcucuuugacaa

SEQ ID NO: 352451 - RNA, 32 nt, Human
cagcuccaagagugggaccccaacucugucuu

SEQ ID NO: 352452 - RNA, 32 nt, Human
cagcuccaagccccagacagcaguucagaagu

SEQ ID NO: 352453 - RNA, 32 nt, Human
cagcuccaagccccagaccaugggagcugucu

SEQ ID NO: 352454 - RNA, 21 nt, Human
cagcuccaaggcccaguccag

SEQ ID NO: 352455 - RNA, 17 nt, Human
cagcuccaagggucucu

SEQ ID NO: 352456 - RNA, 21 nt, Human
cagcuccaauuugucuacaga

SEQ ID NO: 352457 - RNA, 32 nt, Human
cagcuccacaaccaccuccagccugggagaua

SEQ ID NO: 352458 - RNA, 24 nt, Human
cagcuccacaagcagcaggcccag

SEQ ID NO: 352459 - RNA, 19 nt, Human
cagcuccacacgccccggu

SEQ ID NO: 352460 - RNA, 21 nt, Human
cagcuccacagcagguggcug

SEQ ID NO: 352461 - RNA, 20 nt, Human
cagcuccacagccccuggca

SEQ ID NO: 352462 - RNA, 32 nt, Human
cagcuccacagccccuggcagaucccagaccc

SEQ ID NO: 352463 - RNA, 21 nt, Human
cagcuccacagcuuuacccag

SEQ ID NO: 352464 - RNA, 18 nt, Human
cagcuccacauccugggc

SEQ ID NO: 352465 - RNA, 21 nt, Human
cagcuccaccauccggaccag

SEQ ID NO: 352466 - RNA, 32 nt, Human
cagcuccaccauuccucccuguggcugugcca

SEQ ID NO: 352467 - RNA, 23 nt, Human
cagcuccacccuggccgagucca

SEQ ID NO: 352468 - RNA, 21 nt, Human
cagcuccacucaccuccugcc

SEQ ID NO: 352469 - RNA, 19 nt, Human
cagcuccacuccacgggug

SEQ ID NO: 352470 - RNA, 19 nt, Human
cagcuccacuccuggcugg

SEQ ID NO: 352471 - RNA, 32 nt, Human
cagcuccacuggcuggcugcgggcuccagcgg

SEQ ID NO: 352472 - RNA, 21 nt, Human
cagcuccagaaccacccgccc

SEQ ID NO: 352473 - RNA, 32 nt, Human
cagcuccagaagcuguuggaguugaggauuug

SEQ ID NO: 352474 - RNA, 32 nt, Human
cagcuccagagcagcgucugccaccgcccgcg

SEQ ID NO: 352475 - RNA, 32 nt, Human
cagcuccagagcccuggccggggccgcgggau

SEQ ID NO: 352476 - RNA, 32 nt, Human
cagcuccagcagcugcuccagcaguccccacc

SEQ ID NO: 352477 - RNA, 32 nt, Human
cagcuccagccccugaagaaacgauagaugug

SEQ ID NO: 352478 - RNA, 21 nt, Human
cagcuccagcuccagcuccag

SEQ ID NO: 352479 - RNA, 32 nt, Human
cagcuccagcucccagguauuuucuacaggac

SEQ ID NO: 352480 - RNA, 24 nt, Human
cagcuccaggacaucucagcccag

SEQ ID NO: 352481 - RNA, 21 nt, Human
cagcuccaggagggcaacaga

SEQ ID NO: 352482 - RNA, 32 nt, Human
cagcuccaggaguaggaagaagggugggcuuc

SEQ ID NO: 352483 - RNA, 32 nt, Human
cagcuccaggcugcaguaauguguugguaguu

SEQ ID NO: 352484 - RNA, 22 nt, Human
cagcuccagggacccaggccag

SEQ ID NO: 352485 - RNA, 18 nt, Human
cagcuccagggggacuca

SEQ ID NO: 352486 - RNA, 32 nt, Human
cagcuccaguguccaaaaagcgguuucuccaa

SEQ ID NO: 352487 - RNA, 32 nt, Human
cagcuccauccacucuccacaggcuggcucca

SEQ ID NO: 352488 - RNA, 32 nt, Human
cagcuccauccccuaguugcagacucaucacc

SEQ ID NO: 352489 - RNA, 32 nt, Human
cagcuccaugcaaccucugccuccuggguuca

SEQ ID NO: 352490 - RNA, 32 nt, Human
cagcuccaugccauugcaccuucuuuagucuu

SEQ ID NO: 352491 - RNA, 32 nt, Human
cagcuccauucauguuccugcaaaggacauaa

SEQ ID NO: 352492 - RNA, 32 nt, Human
cagcuccauuggaggggacacaucacuggcuu

SEQ ID NO: 352493 - RNA, 32 nt, Human
cagcucccaaaacaggaaguauacaaaauaac

SEQ ID NO: 352494 - RNA, 32 nt, Human
cagcucccaaaggucccggaggcccuuugucc

SEQ ID NO: 352495 - RNA, 32 nt, Human
cagcucccaaagugcugggauuacaggcauga

SEQ ID NO: 352496 - RNA, 32 nt, Human
cagcucccaaguagcugagauuacaggcaucc

SEQ ID NO: 352497 - RNA, 32 nt, Human
cagcucccaaguagcugggacuacaggugcac

SEQ ID NO: 352498 - RNA, 32 nt, Human
cagcucccaaguagcugggauuacaggcaugu

SEQ ID NO: 352499 - RNA, 28 nt, Human
cagcucccaagugcucccuauccagucc

SEQ ID NO: 352500 - RNA, 21 nt, Human
cagcucccaccuccuccuccc

SEQ ID NO: 352501 - RNA, 23 nt, Human
cagcucccacgccugacucaaca

SEQ ID NO: 352502 - RNA, 32 nt, Human
cagcucccagcaccccugcugugugguucauc

SEQ ID NO: 352503 - RNA, 32 nt, Human
cagcucccagcccugggcggccguaucaucag

SEQ ID NO: 352504 - RNA, 20 nt, Human
cagcucccagccuccugcuc

SEQ ID NO: 352505 - RNA, 32 nt, Human
cagcucccagccucuugcuuccugggcugagg

SEQ ID NO: 352506 - RNA, 32 nt, Human
cagcucccagcucucccccaggcugcaguauu

SEQ ID NO: 352507 - RNA, 32 nt, Human
cagcucccaggccacagcagaagcgggcuugu

SEQ ID NO: 352508 - RNA, 32 nt, Human
cagcucccaggcccuugggcaggcugggguga

SEQ ID NO: 352509 - RNA, 32 nt, Human
cagcucccaucccuccuuccucuccuucucca

SEQ ID NO: 352510 - RNA, 32 nt, Human
cagcucccaucuccuuucagaaaaauucaagg

SEQ ID NO: 352511 - RNA, 17 nt, Human
cagcucccauggcguca

SEQ ID NO: 352512 - RNA, 32 nt, Human
cagcucccauguccccaagaccucuggaguuu

SEQ ID NO: 352513 - RNA, 32 nt, Human
cagcuccccacccuccuugccuuugggugcgc

SEQ ID NO: 352514 - RNA, 32 nt, Human
cagcuccccacccucugccuccagucaccaug

SEQ ID NO: 352515 - RNA, 32 nt, Human
cagcuccccacuguccuccaucaaaguccccc

SEQ ID NO: 352516 - RNA, 21 nt, Human
cagcuccccacuucaccccaa

SEQ ID NO: 352517 - RNA, 32 nt, Human
cagcuccccacuugcugugcucucacucaaug

SEQ ID NO: 352518 - RNA, 32 nt, Human
cagcuccccagcccugcccgggggucgcgccg

SEQ ID NO: 352519 - RNA, 32 nt, Human
cagcuccccaggaggcugaggugggagguugg

SEQ ID NO: 352520 - RNA, 32 nt, Human
cagcuccccaggcaucccuccccaaauaaagg

SEQ ID NO: 352521 - RNA, 32 nt, Human
cagcuccccaguagcugggacuacaggcgccc

SEQ ID NO: 352522 - RNA, 32 nt, Human
cagcucccccuucaccccuccuugcccgccua

SEQ ID NO: 352523 - RNA, 32 nt, Human
cagcucccccuucacguugucaccaaggcccu

SEQ ID NO: 352524 - RNA, 22 nt, Human
cagcuccccgcagcuccugccc

SEQ ID NO: 352525 - RNA, 32 nt, Human
cagcuccccgccacucagaccuggguggugau

SEQ ID NO: 352526 - RNA, 32 nt, Human
cagcuccccgccugcaggggcaaagaggucga

SEQ ID NO: 352527 - RNA, 25 nt, Human
cagcuccccgcuccugcagguccag

SEQ ID NO: 352528 - RNA, 32 nt, Human
cagcuccccuccaguuucagugucacuguuaa

SEQ ID NO: 352529 - RNA, 32 nt, Human
cagcuccccuccccaucuccuugagucagcag

SEQ ID NO: 352530 - RNA, 32 nt, Human
cagcuccccugaccacagaggaagaggaucac

SEQ ID NO: 352531 - RNA, 32 nt, Human
cagcuccccugccacccagccucugaggccgg

SEQ ID NO: 352532 - RNA, 32 nt, Human
cagcuccccugccuccaggacccuguugcuau

SEQ ID NO: 352533 - RNA, 32 nt, Human
cagcuccccuguccuccuccaccuucuuccuc

SEQ ID NO: 352534 - RNA, 32 nt, Human
cagcuccccuugggucucagugccagugcugg

SEQ ID NO: 352535 - RNA, 32 nt, Human
cagcucccgggagcccuuaagccccagcuguc

SEQ ID NO: 352536 - RNA, 32 nt, Human
cagcucccgucccugggaccucagggaguagc

SEQ ID NO: 352537 - RNA, 32 nt, Human
cagcucccuagacugcaucccguaccucuucc

SEQ ID NO: 352538 - RNA, 32 nt, Human
cagcucccuagaggaauagagaugucugucac

SEQ ID NO: 352539 - RNA, 21 nt, Human
cagcucccuaggggcugagaa

SEQ ID NO: 352540 - RNA, 23 nt, Human
cagcucccuccagaaauucaaga

SEQ ID NO: 352541 - RNA, 20 nt, Human
cagcucccuccagaagcugc

SEQ ID NO: 352542 - RNA, 32 nt, Human
cagcucccuccccaucucacaucacccucagg

SEQ ID NO: 352543 - RNA, 20 nt, Human
cagcucccucuaaaauacuc

SEQ ID NO: 352544 - RNA, 32 nt, Human
cagcucccucuuugcuccucuggggcagcugc

SEQ ID NO: 352545 - RNA, 32 nt, Human
cagcucccugcaaccuccaccuccuggguuca

SEQ ID NO: 352546 - RNA, 32 nt, Human
cagcucccugcaaccuccgccucccggguuca

SEQ ID NO: 352547 - RNA, 32 nt, Human
cagcucccugcaaccuccgccuccuggguuca

SEQ ID NO: 352548 - RNA, 32 nt, Human
cagcucccugcacauccuggagagacaggugc

SEQ ID NO: 352549 - RNA, 32 nt, Human
cagcucccuggacccagagcucuuccagcucc

SEQ ID NO: 352550 - RNA, 32 nt, Human
cagcucccuguccuccccaacaccuagugaga

SEQ ID NO: 352551 - RNA, 32 nt, Human
cagcucccuugcccuuccccagccucaggcac

SEQ ID NO: 352552 - RNA, 22 nt, Human
cagcuccgaagaaucccccgcc

SEQ ID NO: 352553 - RNA, 20 nt, Human
cagcuccgaggaguccgccc

SEQ ID NO: 352554 - RNA, 21 nt, Human
cagcuccgcccggcuccgccc

SEQ ID NO: 352555 - RNA, 20 nt, Human
cagcuccgccuccccugccc

SEQ ID NO: 352556 - RNA, 20 nt, Human
cagcuccgcgcuccgcucuu

SEQ ID NO: 352557 - RNA, 23 nt, Human
cagcuccgcggcucugagaccag

SEQ ID NO: 352558 - RNA, 32 nt, Human
cagcuccgcucacagggcucucauuucgucca

SEQ ID NO: 352559 - RNA, 32 nt, Human
cagcuccgcucuuucagggaaggaugguaaca

SEQ ID NO: 352560 - RNA, 19 nt, Human
cagcuccggagcaguggcc

SEQ ID NO: 352561 - RNA, 32 nt, Human
cagcuccggcgcuggucucuggcuucgaaguc

SEQ ID NO: 352562 - RNA, 32 nt, Human
cagcuccguccccauggccauuggaucaugag

SEQ ID NO: 352563 - RNA, 23 nt, Human
cagcuccguggggcccuccgccc

SEQ ID NO: 352564 - RNA, 32 nt, Human
cagcuccuaccucuucccuccuugccagcccc

SEQ ID NO: 352565 - RNA, 32 nt, Human
cagcuccucacacuuauggcuauuucugacgu

SEQ ID NO: 352566 - RNA, 32 nt, Human
cagcuccucacucagcuccugccucccucucc

SEQ ID NO: 352567 - RNA, 32 nt, Human
cagcuccucaguaggcugagacaggagcauca

SEQ ID NO: 352568 - RNA, 22 nt, Human
cagcuccuccagucaugcucuu

SEQ ID NO: 352569 - RNA, 32 nt, Human
cagcuccucccccagcccuugggaccaucuuc

SEQ ID NO: 352570 - RNA, 32 nt, Human
cagcuccucccugccagcaucccagucaccac

SEQ ID NO: 352571 - RNA, 32 nt, Human
cagcuccucccuugcugaccugcccuuuccau

SEQ ID NO: 352572 - RNA, 22 nt, Human
cagcuccuccugcuuucuuggg

SEQ ID NO: 352573 - RNA, 32 nt, Human
cagcuccucgccucagcuccgcacggcccgug

SEQ ID NO: 352574 - RNA, 22 nt, Human
cagcuccucuccaauccugagg

SEQ ID NO: 352575 - RNA, 23 nt, Human
cagcuccucucugcaugcugagg

SEQ ID NO: 352576 - RNA, 32 nt, Human
cagcuccucucugugccgggggugggugaucc

SEQ ID NO: 352577 - RNA, 22 nt, Human
cagcuccucugcauaguuuuga

SEQ ID NO: 352578 - RNA, 32 nt, Human
cagcuccucuuaaauccuccaaucucaguacc

SEQ ID NO: 352579 - RNA, 32 nt, Human
cagcuccugaaaugcuaauuuaccccuuaccu

SEQ ID NO: 352580 - RNA, 32 nt, Human
cagcuccugagacacagcuggccggcacaaca

SEQ ID NO: 352581 - RNA, 32 nt, Human
cagcuccugaguagcuggaacuacaggcacgc

SEQ ID NO: 352582 - RNA, 32 nt, Human
cagcuccugaguagcugggauuacaggcgccc

SEQ ID NO: 352583 - RNA, 32 nt, Human
cagcuccugaguagcugggccugugcacuggg

SEQ ID NO: 352584 - RNA, 32 nt, Human
cagcuccugcagccucauccuaguuuaauaug

SEQ ID NO: 352585 - RNA, 32 nt, Human
cagcuccugcagcuccacgggaggcuugccgg

SEQ ID NO: 352586 - RNA, 32 nt, Human
cagcuccugcagucccagcuacucaggaguug

SEQ ID NO: 352587 - RNA, 32 nt, Human
cagcuccugcccaucugucccaacacaggaag

SEQ ID NO: 352588 - RNA, 32 nt, Human
cagcuccugccucacacuggccuguugaggcc

SEQ ID NO: 352589 - RNA, 32 nt, Human
cagcuccugccuggggcagugagggaauggga

SEQ ID NO: 352590 - RNA, 32 nt, Human
cagcuccugcucccccuaguucuuccgcuccu

SEQ ID NO: 352591 - RNA, 23 nt, Human
cagcuccugcugccauccccagg

SEQ ID NO: 352592 - RNA, 32 nt, Human
cagcuccuggacagccucuuggcuccagcccc

SEQ ID NO: 352593 - RNA, 32 nt, Human
cagcuccuggggagcaucagggaagagggggc

SEQ ID NO: 352594 - RNA, 32 nt, Human
cagcuccuggggauggaaauggaggaucccag

SEQ ID NO: 352595 - RNA, 22 nt, Human
cagcuccugucccuggguucag

SEQ ID NO: 352596 - RNA, 22 nt, Human
cagcuccugucuccagcagcuu

SEQ ID NO: 352597 - RNA, 24 nt, Human
cagcuccuguggccacagcagcuu

SEQ ID NO: 352598 - RNA, 32 nt, Human
cagcuccuuccuccuccuccuccuccucuggu

SEQ ID NO: 352599 - RNA, 32 nt, Human
cagcuccuuccuccucuuccuccuccuccucc

SEQ ID NO: 352600 - RNA, 32 nt, Human
cagcuccuuccuggaaagcuggaggggacuuu

SEQ ID NO: 352601 - RNA, 32 nt, Human
cagcuccuucggcauuucugcaaggaggacuu

SEQ ID NO: 352602 - RNA, 32 nt, Human
cagcuccuucuggucauuuucucagcugguua

SEQ ID NO: 352603 - RNA, 32 nt, Human
cagcuccuucuuacagugcacacacacgcucc

SEQ ID NO: 352604 - RNA, 20 nt, Human
cagcuccuugaucuucgaca

SEQ ID NO: 352605 - RNA, 32 nt, Human
cagcuccuugggaggcugagacaggaggauuc

SEQ ID NO: 352606 - RNA, 19 nt, Human
cagcuccuuggucaauaga

SEQ ID NO: 352607 - RNA, 32 nt, Human
cagcuccuuggugguuucaucuccucuguggg

SEQ ID NO: 352608 - RNA, 32 nt, Human
cagcuccuuucccuuuuccaucaucucuuuuc

SEQ ID NO: 352609 - RNA, 22 nt, Human
cagcuccuuugagagacugagg

SEQ ID NO: 352610 - RNA, 21 nt, Human
cagcuccuuugccccuggagg

SEQ ID NO: 352611 - RNA, 21 nt, Human
cagcuccuuugggucccgagg

SEQ ID NO: 352612 - RNA, 32 nt, Human
cagcuccuuuggugugugggugcucugaccuc

SEQ ID NO: 352613 - RNA, 32 nt, Human
cagcucgauuccagauaggaaaaaggaaauau

SEQ ID NO: 352614 - RNA, 19 nt, Human
cagcucgcaccccuucugu

SEQ ID NO: 352615 - RNA, 32 nt, Human
cagcucgcaugggggagucuaucccgcuggcc

SEQ ID NO: 352616 - RNA, 32 nt, Human
cagcucgccgcaaccuccgccucccagguuca

SEQ ID NO: 352617 - RNA, 24 nt, Human
cagcucgccgcucccuagcaccuu

SEQ ID NO: 352618 - RNA, 32 nt, Human
cagcucgcgagcccuggcgucgcguaggaggg

SEQ ID NO: 352619 - RNA, 18 nt, Human
cagcucgcgccccuuccc

SEQ ID NO: 352620 - RNA, 19 nt, Human
cagcucgcgccccuuccca

SEQ ID NO: 352621 - RNA, 32 nt, Human
cagcucgcuacaaccucuaccucccagccacc

SEQ ID NO: 352622 - RNA, 32 nt, Human
cagcucgcucucuccccucagcuuaacgauga

SEQ ID NO: 352623 - RNA, 32 nt, Human
cagcucgcugcaacccccaccucccagguuca

SEQ ID NO: 352624 - RNA, 32 nt, Human
cagcucgcugcaaccuccaccuccugggcuca

SEQ ID NO: 352625 - RNA, 32 nt, Human
cagcucgcugcaaccuccaccuccuggguuca

SEQ ID NO: 352626 - RNA, 32 nt, Human
cagcucgcugcaaccuccaccuuccggguuca

SEQ ID NO: 352627 - RNA, 32 nt, Human
cagcucgcugcaagcuccgccucccaaguuca

SEQ ID NO: 352628 - RNA, 32 nt, Human
cagcucgcugcagccuccaccucccggacucc

SEQ ID NO: 352629 - RNA, 19 nt, Human
cagcucggagcuugugcug

SEQ ID NO: 352630 - RNA, 32 nt, Human
cagcucggaggcggguguggcuggaggacggc

SEQ ID NO: 352631 - RNA, 32 nt, Human
cagcucggccgugccuugaggccagguucgag

SEQ ID NO: 352632 - RNA, 32 nt, Human
cagcucggccucugcugccugccggugcucuu

SEQ ID NO: 352633 - RNA, 32 nt, Human
cagcucggcuugcugcggucucagguuucuuu

SEQ ID NO: 352634 - RNA, 32 nt, Human
cagcucgggcccagccuucucucuccagcugc

SEQ ID NO: 352635 - RNA, 32 nt, Human
cagcucgggcucugcugccggcucuccggcuu

SEQ ID NO: 352636 - RNA, 23 nt, Human
cagcucgggugacaagagugaga

SEQ ID NO: 352637 - RNA, 32 nt, Human
cagcucggucaccaaagcugucuggucccagg

SEQ ID NO: 352638 - RNA, 32 nt, Human
cagcucguccacaagcucaucgauuuucuuua

SEQ ID NO: 352639 - RNA, 32 nt, Human
cagcucgugugggcgcucguccacaaacacuc

SEQ ID NO: 352640 - RNA, 32 nt, Human
cagcucuaaccagucuuucauggaugcauaca

SEQ ID NO: 352641 - RNA, 32 nt, Human
cagcucuaaucaagcaccauauaaacaagaaa

SEQ ID NO: 352642 - RNA, 32 nt, Human
cagcucuaccugcauaggcaguggcugcucaa

SEQ ID NO: 352643 - RNA, 32 nt, Human
cagcucuacuaagaauacaaaaauuagccagg

SEQ ID NO: 352644 - RNA, 32 nt, Human
cagcucuacuuaagaugcgaaaauuagccugg

SEQ ID NO: 352645 - RNA, 32 nt, Human
cagcucuagacacugccacacagggucugcaa

SEQ ID NO: 352646 - RNA, 32 nt, Human
cagcucuaggaacuuaguacuuuggagcuuuu

SEQ ID NO: 352647 - RNA, 32 nt, Human
cagcucuaggcggcucuggguaaguugucguu

SEQ ID NO: 352648 - RNA, 32 nt, Human
cagcucuaucccaaccucucccaacuauaaaa

SEQ ID NO: 352649 - RNA, 32 nt, Human
cagcucuauuccuuucuaugagcuagaagacc

SEQ ID NO: 352650 - RNA, 32 nt, Human
cagcucucagaucaggacaggcuguggaucug

SEQ ID NO: 352651 - RNA, 32 nt, Human
cagcucucagcccuauggccuuggcugagucc

SEQ ID NO: 352652 - RNA, 19 nt, Human
cagcucucagggcagggcu

SEQ ID NO: 352653 - RNA, 19 nt, Human
cagcucucauuuccuggca

SEQ ID NO: 352654 - RNA, 32 nt, Human
cagcucuccacccugaacuccccagcccccuc

SEQ ID NO: 352655 - RNA, 32 nt, Human
cagcucuccagccccaggacuucugcuggaac

SEQ ID NO: 352656 - RNA, 32 nt, Human
cagcucuccagccugggcgacagagugagacu

SEQ ID NO: 352657 - RNA, 22 nt, Human
cagcucuccagggagcuucugg

SEQ ID NO: 352658 - RNA, 22 nt, Human
cagcucuccauucuucccaaag

SEQ ID NO: 352659 - RNA, 32 nt, Human
cagcucucccagagaagauccaagggagagga

SEQ ID NO: 352660 - RNA, 23 nt, Human
cagcucuccccaaaguccacaga

SEQ ID NO: 352661 - RNA, 32 nt, Human
cagcucuccccaggaauccugcugccugcuga

SEQ ID NO: 352662 - RNA, 32 nt, Human
cagcucuccuaaaaauacaaaaauuagcugga

SEQ ID NO: 352663 - RNA, 32 nt, Human
cagcucuccuccagaagccuagguuuugccgc

SEQ ID NO: 352664 - RNA, 32 nt, Human
cagcucuccuguaacucagaggccagugugau

SEQ ID NO: 352665 - RNA, 32 nt, Human
cagcucuccuucuggcuucauccugucuucca

SEQ ID NO: 352666 - RNA, 24 nt, Human
cagcucucucgaagagaucuuaca

SEQ ID NO: 352667 - RNA, 32 nt, Human
cagcucucucuggggcccucccacucuccaca

SEQ ID NO: 352668 - RNA, 32 nt, Human
cagcucucugcaaccuccaccuccuggguuca

SEQ ID NO: 352669 - RNA, 32 nt, Human
cagcucucugcagucuccggcucucuccugca

SEQ ID NO: 352670 - RNA, 32 nt, Human
cagcucucugcgucccuccugggcccuccagc

SEQ ID NO: 352671 - RNA, 32 nt, Human
cagcucucugggaggcugaggcggguggauca

SEQ ID NO: 352672 - RNA, 32 nt, Human
cagcucucuucaaugacauagaaaguucaugg

SEQ ID NO: 352673 - RNA, 32 nt, Human
cagcucucuucgacguaccuguccucaggagc

SEQ ID NO: 352674 - RNA, 32 nt, Human
cagcucucuucucuccccaggacccaggcugu

SEQ ID NO: 352675 - RNA, 32 nt, Human
cagcucugaaaauucugccauuuccuuauuaa

SEQ ID NO: 352676 - RNA, 32 nt, Human
cagcucugaaggcugugagaccccggauuucc

SEQ ID NO: 352677 - RNA, 32 nt, Human
cagcucugaaugucuaaccugcuccccugauu

SEQ ID NO: 352678 - RNA, 17 nt, Human
cagcucugaucuccaca

SEQ ID NO: 352679 - RNA, 22 nt, Human
cagcucugaucugcaguuccca

SEQ ID NO: 352680 - RNA, 24 nt, Human
cagcucugauucuguaauacuaau

SEQ ID NO: 352681 - RNA, 32 nt, Human
cagcucugcauaccugcaccugcaccccagcc

SEQ ID NO: 352682 - RNA, 32 nt, Human
cagcucugcaucaacacagcagccugcagaua

SEQ ID NO: 352683 - RNA, 22 nt, Human
cagcucugccagugcucucugg

SEQ ID NO: 352684 - RNA, 32 nt, Human
cagcucugccccagcccugagaggggugguga

SEQ ID NO: 352685 - RNA, 22 nt, Human
cagcucugcccucgcuugcugg

SEQ ID NO: 352686 - RNA, 21 nt, Human
cagcucugcccucugggucca

SEQ ID NO: 352687 - RNA, 21 nt, Human
cagcucugccguccuuccgca

SEQ ID NO: 352688 - RNA, 32 nt, Human
cagcucugccucacagcacccuggccaaguuu

SEQ ID NO: 352689 - RNA, 32 nt, Human
cagcucugccuccgccccuccugcggcuucac

SEQ ID NO: 352690 - RNA, 20 nt, Human
cagcucugccuccuccuccc

SEQ ID NO: 352691 - RNA, 20 nt, Human
cagcucugccugcugccugg

SEQ ID NO: 352692 - RNA, 20 nt, Human
cagcucugcucuguuuucuc

SEQ ID NO: 352693 - RNA, 20 nt, Human
cagcucugcugcccccaccc

SEQ ID NO: 352694 - RNA, 32 nt, Human
cagcucugcugcuccucuacucuugggucgag

SEQ ID NO: 352695 - RNA, 32 nt, Human
cagcucuggaaacaaugagaucaaaugagaaa

SEQ ID NO: 352696 - RNA, 32 nt, Human
cagcucuggaaagaggguuuaagaugcuagga

SEQ ID NO: 352697 - RNA, 19 nt, Human
cagcucuggaaccuucaua

SEQ ID NO: 352698 - RNA, 32 nt, Human
cagcucuggacccccucccucaccgcacaacu

SEQ ID NO: 352699 - RNA, 24 nt, Human
cagcucuggcacugcccccuccca

SEQ ID NO: 352700 - RNA, 32 nt, Human
cagcucuggccugugguuccagaagcugagaa

SEQ ID NO: 352701 - RNA, 32 nt, Human
cagcucuggcuuuggagcagcuucugggacca

SEQ ID NO: 352702 - RNA, 32 nt, Human
cagcucugggacccagcucugaaagggcacga

SEQ ID NO: 352703 - RNA, 32 nt, Human
cagcucugggagagaggagugucagacagcug

SEQ ID NO: 352704 - RNA, 32 nt, Human
cagcucugggcaagauccauaaacuuuuaaag

SEQ ID NO: 352705 - RNA, 32 nt, Human
cagcucugggcacccuggccacccugguccuu

SEQ ID NO: 352706 - RNA, 32 nt, Human
cagcucugggcucugcugugagucaagcugug

SEQ ID NO: 352707 - RNA, 32 nt, Human
cagcucugggcugggcuuucugggggccacac

SEQ ID NO: 352708 - RNA, 32 nt, Human
cagcucugggggccuagcaggagcucagggac

SEQ ID NO: 352709 - RNA, 32 nt, Human
cagcucugggguccccauguaagggcaggggc

SEQ ID NO: 352710 - RNA, 21 nt, Human
cagcucugguaccuccugccc

SEQ ID NO: 352711 - RNA, 32 nt, Human
cagcucuggugagacggccugggcaggccgag

SEQ ID NO: 352712 - RNA, 32 nt, Human
cagcucugguuacccacguauuuccuuuaaug

SEQ ID NO: 352713 - RNA, 32 nt, Human
cagcucuguagggagcucugccagaggggcag

SEQ ID NO: 352714 - RNA, 32 nt, Human
cagcucuguauggcccacaccugguccacagg

SEQ ID NO: 352715 - RNA, 21 nt, Human
cagcucuguccccuccugcuc

SEQ ID NO: 352716 - RNA, 32 nt, Human
cagcucugucccugugcaggcuccaggcuccc

SEQ ID NO: 352717 - RNA, 32 nt, Human
cagcucuguccuuaacacacagcaggucuaug

SEQ ID NO: 352718 - RNA, 32 nt, Human
cagcucugugacugauucccucccgggugcug

SEQ ID NO: 352719 - RNA, 19 nt, Human
cagcucugugauccuuccg

SEQ ID NO: 352720 - RNA, 32 nt, Human
cagcucugugccccaugcuccuuggggcuugc

SEQ ID NO: 352721 - RNA, 32 nt, Human
cagcucuguggccuucauguuccgaaaguuca

SEQ ID NO: 352722 - RNA, 32 nt, Human
cagcucugugucagccacugcggccuuagaga

SEQ ID NO: 352723 - RNA, 32 nt, Human
cagcucuguguccucagagucgcugucaucaa

SEQ ID NO: 352724 - RNA, 32 nt, Human
cagcucugugugauucaaguucuggcagagcu

SEQ ID NO: 352725 - RNA, 32 nt, Human
cagcucuguguguguggguggucacaggagag

SEQ ID NO: 352726 - RNA, 32 nt, Human
cagcucuguguguguggguggucacaggaggg

SEQ ID NO: 352727 - RNA, 32 nt, Human
cagcucuguuccacaagaagcaaugggacugc

SEQ ID NO: 352728 - RNA, 32 nt, Human
cagcucuguuucugcugcuuccaucaaagcca

SEQ ID NO: 352729 - RNA, 32 nt, Human
cagcucuuaccucaccucccuccauuuacauu

SEQ ID NO: 352730 - RNA, 21 nt, Human
cagcucuuaggagcucucaca

SEQ ID NO: 352731 - RNA, 32 nt, Human
cagcucuucauuaugcagcuucccuuuuaggu

SEQ ID NO: 352732 - RNA, 21 nt, Human
cagcucuucccugaccuucac

SEQ ID NO: 352733 - RNA, 17 nt, Human
cagcucuuccgcuccuc

SEQ ID NO: 352734 - RNA, 32 nt, Human
cagcucuuccucacccacuacaucaccaaguc

SEQ ID NO: 352735 - RNA, 32 nt, Human
cagcucuuccuugagcagccauggccagcucc

SEQ ID NO: 352736 - RNA, 19 nt, Human
cagcucuucggaggcauca

SEQ ID NO: 352737 - RNA, 25 nt, Human
cagcucuucucucagaaguucagcu

SEQ ID NO: 352738 - RNA, 32 nt, Human
cagcucuucugagaacuuccaaccacccaugc

SEQ ID NO: 352739 - RNA, 32 nt, Human
cagcucuucuguccuuggccaccagagacugc

SEQ ID NO: 352740 - RNA, 32 nt, Human
cagcucuugccagcuucucugacacuuggguu

SEQ ID NO: 352741 - RNA, 32 nt, Human
cagcucuugcccagagcugugcagugcagugg

SEQ ID NO: 352742 - RNA, 32 nt, Human
cagcucuuucagcuccuucuugcucagcuugu

SEQ ID NO: 352743 - RNA, 24 nt, Human
cagcucuuucuggaccuucaggca

SEQ ID NO: 352744 - RNA, 20 nt, Human
cagcucuuugauuugccaua

SEQ ID NO: 352745 - RNA, 32 nt, Human
cagcucuuugggaggccaaggcagguagauca

SEQ ID NO: 352746 - RNA, 32 nt, Human
cagcucuuugggaggccgaggugggcagauca

SEQ ID NO: 352747 - RNA, 32 nt, Human
cagcugaacaacaaggcuuugggugugaaggg

SEQ ID NO: 352748 - RNA, 32 nt, Human
cagcugaagacucagcccugaggucuggggca

SEQ ID NO: 352749 - RNA, 32 nt, Human
cagcugaaggguaaaaucuuucuuugcagaga

SEQ ID NO: 352750 - RNA, 22 nt, Human
cagcugaaggugaggggaugga

SEQ ID NO: 352751 - RNA, 32 nt, Human
cagcugaagucugccuguggauucuccuugua

SEQ ID NO: 352752 - RNA, 32 nt, Human
cagcugaauacuaagcucaucaacuucuccuu

SEQ ID NO: 352753 - RNA, 19 nt, Human
cagcugacaauggcuuugg

SEQ ID NO: 352754 - RNA, 32 nt, Human
cagcugacacauaauuugaauggugcagaaaa

SEQ ID NO: 352755 - RNA, 19 nt, Human
cagcugacagauacauaga

SEQ ID NO: 352756 - RNA, 21 nt, Human
cagcugacagauagacucaga

SEQ ID NO: 352757 - RNA, 21 nt, Human
cagcugacagccgugcucaga

SEQ ID NO: 352758 - RNA, 20 nt, Human
cagcugacagugggaugagg

SEQ ID NO: 352759 - RNA, 20 nt, Human
cagcugacaguggucgugga

SEQ ID NO: 352760 - RNA, 20 nt, Human
cagcugaccauacuaccaga

SEQ ID NO: 352761 - RNA, 32 nt, Human
cagcugaccccaaaagugcugagcaugugcug

SEQ ID NO: 352762 - RNA, 32 nt, Human
cagcugacccuugagccauaacccauaagcuc

SEQ ID NO: 352763 - RNA, 32 nt, Human
cagcugaccucccuccccuugugcagacugga

SEQ ID NO: 352764 - RNA, 22 nt, Human
cagcugaccugcccuguccucu

SEQ ID NO: 352765 - RNA, 32 nt, Human
cagcugacgacuggcccugcuucugcuggggc

SEQ ID NO: 352766 - RNA, 32 nt, Human
cagcugacgcccucccugccucccagggcagc

SEQ ID NO: 352767 - RNA, 32 nt, Human
cagcugacgggacccagcuguagugagguugc

SEQ ID NO: 352768 - RNA, 32 nt, Human
cagcugacucacagagcugcagagccaggcug

SEQ ID NO: 352769 - RNA, 32 nt, Human
cagcugacugcacugccaggagccaaggccua

SEQ ID NO: 352770 - RNA, 32 nt, Human
cagcugacugcagccuugaccuccagggcuca

SEQ ID NO: 352771 - RNA, 32 nt, Human
cagcugacugcugcauuuaggccaggucucca

SEQ ID NO: 352772 - RNA, 32 nt, Human
cagcugagaaaagguauguucaagucauaagu

SEQ ID NO: 352773 - RNA, 32 nt, Human
cagcugagaaggcugcaagugacgagaaagau

SEQ ID NO: 352774 - RNA, 32 nt, Human
cagcugagaggcauccagaaaaguaucagggu

SEQ ID NO: 352775 - RNA, 32 nt, Human
cagcugagaucucugugacacuguggauucag

SEQ ID NO: 352776 - RNA, 32 nt, Human
cagcugagauggcagacaggagagaugggccc

SEQ ID NO: 352777 - RNA, 32 nt, Human
cagcugagauggugccacugcacuccagccug

SEQ ID NO: 352778 - RNA, 32 nt, Human
cagcugagcagggagcaguggagaagcaguaa

SEQ ID NO: 352779 - RNA, 32 nt, Human
cagcugagcaucagcucagcccugccaugucc

SEQ ID NO: 352780 - RNA, 17 nt, Human
cagcugagcaugggaug

SEQ ID NO: 352781 - RNA, 32 nt, Human
cagcugagccgguuagggcugaagaggagcgu

SEQ ID NO: 352782 - RNA, 32 nt, Human
cagcugagccuagaggugaauuucauugggga

SEQ ID NO: 352783 - RNA, 32 nt, Human
cagcugagccuagaggugaauuucguugggga

SEQ ID NO: 352784 - RNA, 32 nt, Human
cagcugagccuggaacugacccuuccuucauc

SEQ ID NO: 352785 - RNA, 32 nt, Human
cagcugaggagggagagggggagcguagccuu

SEQ ID NO: 352786 - RNA, 32 nt, Human
cagcugaggccuugccuugaaggggcagcugu

SEQ ID NO: 352787 - RNA, 18 nt, Human
cagcugaggcgucucucu

SEQ ID NO: 352788 - RNA, 32 nt, Human
cagcugagguccaauaguuaugucuguguauu

SEQ ID NO: 352789 - RNA, 17 nt, Human
cagcugagguccuccca

SEQ ID NO: 352790 - RNA, 32 nt, Human
cagcugagugagagacacagagagaaggagaa

SEQ ID NO: 352791 - RNA, 32 nt, Human
cagcugagugagugggagaguaccuguguguu

SEQ ID NO: 352792 - RNA, 20 nt, Human
cagcugagugccugcuuuuu

SEQ ID NO: 352793 - RNA, 32 nt, Human
cagcugagugguuguucucagucuuauuauua

SEQ ID NO: 352794 - RNA, 32 nt, Human
cagcugaguuuccagcuggcagccagguccuc

SEQ ID NO: 352795 - RNA, 32 nt, Human
cagcugauccagaggaacccagagccaacuua

SEQ ID NO: 352796 - RNA, 32 nt, Human
cagcugauccggacuggaugugaccuucugcc

SEQ ID NO: 352797 - RNA, 32 nt, Human
cagcugauccugcuccuguggccuccagccuc

SEQ ID NO: 352798 - RNA, 31 nt, Human
cagcugaugggccccagguggggagggacag

SEQ ID NO: 352799 - RNA, 32 nt, Human
cagcugauuagcaaccuuaguucaucugcagu

SEQ ID NO: 352800 - RNA, 32 nt, Human
cagcugauugacaccguccugccuuccuuauu

SEQ ID NO: 352801 - RNA, 32 nt, Human
cagcugcaaauggucaguuguauauuugcuaa

SEQ ID NO: 352802 - RNA, 18 nt, Human
cagcugcaaucacuagca

SEQ ID NO: 352803 - RNA, 19 nt, Human
cagcugcacagcacaggca

SEQ ID NO: 352804 - RNA, 25 nt, Human
cagcugcacagcccgcaacgccgca

SEQ ID NO: 352805 - RNA, 32 nt, Human
cagcugcaccagagcaaccucucacuccccau

SEQ ID NO: 352806 - RNA, 32 nt, Human
cagcugcacccauuuucuggagguuuugcugc

SEQ ID NO: 352807 - RNA, 32 nt, Human
cagcugcacgucccaggcucuccagcgcgcgg

SEQ ID NO: 352808 - RNA, 32 nt, Human
cagcugcacugaagacgagccugggguggaga

SEQ ID NO: 352809 - RNA, 32 nt, Human
cagcugcacugagaggggagguuuccacaccc

SEQ ID NO: 352810 - RNA, 32 nt, Human
cagcugcagagcuuguggaggccauggggcgc

SEQ ID NO: 352811 - RNA, 32 nt, Human
cagcugcagaggaggaaagggaaaggguaggc

SEQ ID NO: 352812 - RNA, 32 nt, Human
cagcugcagaggcugcagccccgguccccagc

SEQ ID NO: 352813 - RNA, 32 nt, Human
cagcugcagagugcacagggagggucagaagu

SEQ ID NO: 352814 - RNA, 32 nt, Human
cagcugcagcagcgggaagcucgguggcaagc

SEQ ID NO: 352815 - RNA, 32 nt, Human
cagcugcagcagcuggagggcgaagugaagga

SEQ ID NO: 352816 - RNA, 32 nt, Human
cagcugcagcaucaucuccacccuccagccau

SEQ ID NO: 352817 - RNA, 32 nt, Human
cagcugcagcccaggcaggagcagucgccuuu

SEQ ID NO: 352818 - RNA, 24 nt, Human
cagcugcagccuccgccuacguga

SEQ ID NO: 352819 - RNA, 23 nt, Human
cagcugcagccuccucccccuga

SEQ ID NO: 352820 - RNA, 32 nt, Human
cagcugcagccugccugugcuggcugcugggg

SEQ ID NO: 352821 - RNA, 32 nt, Human
cagcugcagccugcucugugguuuacuuugca

SEQ ID NO: 352822 - RNA, 32 nt, Human
cagcugcagccugcugccugcccuucauggcu

SEQ ID NO: 352823 - RNA, 32 nt, Human
cagcugcagcugcuggucgccaguauaaguau

SEQ ID NO: 352824 - RNA, 32 nt, Human
cagcugcaggaaggcucugacaacagcccgcc

SEQ ID NO: 352825 - RNA, 32 nt, Human
cagcugcaggaccucaagacaccugggcagac

SEQ ID NO: 352826 - RNA, 32 nt, Human
cagcugcaggagugcuugugggcugcuauggg

SEQ ID NO: 352827 - RNA, 32 nt, Human
cagcugcaggcaagcauuaugcugcuauugaa

SEQ ID NO: 352828 - RNA, 32 nt, Human
cagcugcagggagggccagggagguugggggu

SEQ ID NO: 352829 - RNA, 21 nt, Human
cagcugcaggguccuuccaca

SEQ ID NO: 352830 - RNA, 32 nt, Human
cagcugcagugguugggaggagcuugaccagu

SEQ ID NO: 352831 - RNA, 18 nt, Human
cagcugcaugagucuucc

SEQ ID NO: 352832 - RNA, 24 nt, Human
cagcugcaugcagccugcagggga

SEQ ID NO: 352833 - RNA, 32 nt, Human
cagcugcauggaagguggaggacagaagcccu

SEQ ID NO: 352834 - RNA, 32 nt, Human
cagcugccaacccuggagcccagaccgaggug

SEQ ID NO: 352835 - RNA, 32 nt, Human
cagcugccaacuucacaccagccccaacccgc

SEQ ID NO: 352836 - RNA, 28 nt, Human
cagcugccaagugcucuuuguuacuguc

SEQ ID NO: 352837 - RNA, 32 nt, Human
cagcugccacacccuuucugggagaagcaugg

SEQ ID NO: 352838 - RNA, 23 nt, Human
cagcugccaccucccucaccaca

SEQ ID NO: 352839 - RNA, 32 nt, Human
cagcugccagccuucuguccugggcaaacuac

SEQ ID NO: 352840 - RNA, 22 nt, Human
cagcugccagcuucauuuucuc

SEQ ID NO: 352841 - RNA, 32 nt, Human
cagcugccaguguggcuagaaugaagcaggca

SEQ ID NO: 352842 - RNA, 32 nt, Human
cagcugccaucgccgcuacaggcaccagugcc

SEQ ID NO: 352843 - RNA, 32 nt, Human
cagcugccaucgccuccugggugaagaggacg

SEQ ID NO: 352844 - RNA, 32 nt, Human
cagcugcccagccccaggccugcccucggccu

SEQ ID NO: 352845 - RNA, 32 nt, Human
cagcugcccagccuguucacaugcuggggacc

SEQ ID NO: 352846 - RNA, 23 nt, Human
cagcugcccagcuccugcucagu

SEQ ID NO: 352847 - RNA, 32 nt, Human
cagcugcccaggacacagugcaggccagagcg

SEQ ID NO: 352848 - RNA, 32 nt, Human
cagcugcccaggaggcugaggcaggagaaucg

SEQ ID NO: 352849 - RNA, 32 nt, Human
cagcugcccaggaggcugaggcaugagaaucg

SEQ ID NO: 352850 - RNA, 32 nt, Human
cagcugcccaggcuggagugugguggcgccau

SEQ ID NO: 352851 - RNA, 32 nt, Human
cagcugcccagugucauagaaaagcaauucac

SEQ ID NO: 352852 - RNA, 32 nt, Human
cagcugcccaguuuccugaucgggguggauuu

SEQ ID NO: 352853 - RNA, 21 nt, Human
cagcugccccccuccccuccc

SEQ ID NO: 352854 - RNA, 32 nt, Human
cagcugcccccuucguguuucccuguguuugc

SEQ ID NO: 352855 - RNA, 32 nt, Human
cagcugccccuguccccaccucuggagaaucc

SEQ ID NO: 352856 - RNA, 32 nt, Human
cagcugccccuucucagccucugaggauccag

SEQ ID NO: 352857 - RNA, 32 nt, Human
cagcugcccuagugaggccccagccuaccugc

SEQ ID NO: 352858 - RNA, 32 nt, Human
cagcugccgaagguggagcccagagccugucu

SEQ ID NO: 352859 - RNA, 32 nt, Human
cagcugccgcgccugcucacacccugaccucg

SEQ ID NO: 352860 - RNA, 32 nt, Human
cagcugccuaucuucccggugcaacaucgccu

SEQ ID NO: 352861 - RNA, 32 nt, Human
cagcugccucaaaccuuugggauuuucagaau

SEQ ID NO: 352862 - RNA, 32 nt, Human
cagcugccucaaaucuuugggaauuucagaau

SEQ ID NO: 352863 - RNA, 32 nt, Human
cagcugccucagcacuuugauuuuggacaggg

SEQ ID NO: 352864 - RNA, 32 nt, Human
cagcugccuccaccaagacuucacccaaccac

SEQ ID NO: 352865 - RNA, 32 nt, Human
cagcugccuccuccaggcaucuuccuggcucu

SEQ ID NO: 352866 - RNA, 18 nt, Human
cagcugccuccuccucca

SEQ ID NO: 352867 - RNA, 32 nt, Human
cagcugccuccuccucuucucuccccgcucuc

SEQ ID NO: 352868 - RNA, 32 nt, Human
cagcugccuccuggcaggagccugcuugugcg

SEQ ID NO: 352869 - RNA, 32 nt, Human
cagcugccugcaggaagaucuggcucagucua

SEQ ID NO: 352870 - RNA, 32 nt, Human
cagcugccugcaggugcucccagcuauaucca

SEQ ID NO: 352871 - RNA, 32 nt, Human
cagcugccugccaggggagaccugggaccugg

SEQ ID NO: 352872 - RNA, 32 nt, Human
cagcugccugcucuccagccucuggaggaacu

SEQ ID NO: 352873 - RNA, 32 nt, Human
cagcugccugcuucucgccugccugugucugc

SEQ ID NO: 352874 - RNA, 18 nt, Human
cagcugccuggcugggga

SEQ ID NO: 352875 - RNA, 32 nt, Human
cagcugccugggaagucuucacucacuuccug

SEQ ID NO: 352876 - RNA, 32 nt, Human
cagcugccugggaaucacgcuccuuccugcuc

SEQ ID NO: 352877 - RNA, 32 nt, Human
cagcugccugggacucaauuugccccauccau

SEQ ID NO: 352878 - RNA, 32 nt, Human
cagcugccugggaucccucauccucauaccca

SEQ ID NO: 352879 - RNA, 32 nt, Human
cagcugccuggggcccaaguugcagugagcag

SEQ ID NO: 352880 - RNA, 32 nt, Human
cagcugccuggugcauaccucuugccucgguc

SEQ ID NO: 352881 - RNA, 32 nt, Human
cagcugccuucaggcccugcgccgccuccgga

SEQ ID NO: 352882 - RNA, 32 nt, Human
cagcugccuuccuuuuggauucccaagcuuca

SEQ ID NO: 352883 - RNA, 32 nt, Human
cagcugccuugauuucccucucccaggggccu

SEQ ID NO: 352884 - RNA, 32 nt, Human
cagcugccuuuaaaggguacacagaccaguuc

SEQ ID NO: 352885 - RNA, 32 nt, Human
cagcugccuuucuacccccaauggcagcugcc

SEQ ID NO: 352886 - RNA, 32 nt, Human
cagcugccuuuuucacacccacuccagcccuc

SEQ ID NO: 352887 - RNA, 32 nt, Human
cagcugcgccuaggcuggagcuggaagggugg

SEQ ID NO: 352888 - RNA, 32 nt, Human
cagcugcgcggagaacuggggcucaccgucau

SEQ ID NO: 352889 - RNA, 32 nt, Human
cagcugcggacucuggagcugccuguagauua

SEQ ID NO: 352890 - RNA, 24 nt, Human
cagcugcggcagccccucccagcc

SEQ ID NO: 352891 - RNA, 32 nt, Human
cagcugcgggcuuugagaguccugagccaggc

SEQ ID NO: 352892 - RNA, 24 nt, Human
cagcugcguacaaaggccucugcc

SEQ ID NO: 352893 - RNA, 19 nt, Human
cagcugcguccggcggagg

SEQ ID NO: 352894 - RNA, 19 nt, Human
cagcugcguggucuccgca

SEQ ID NO: 352895 - RNA, 20 nt, Human
cagcugcuaacugauuuccu

SEQ ID NO: 352896 - RNA, 32 nt, Human
cagcugcuaagcucugcagcuccccaguggac

SEQ ID NO: 352897 - RNA, 18 nt, Human
cagcugcuaauccuuuuc

SEQ ID NO: 352898 - RNA, 32 nt, Human
cagcugcuagagaaagagaaguagaagaacgg

SEQ ID NO: 352899 - RNA, 32 nt, Human
cagcugcuaucagcgcagugguggugaccgag

SEQ ID NO: 352900 - RNA, 17 nt, Human
cagcugcuaucauuuuc

SEQ ID NO: 352901 - RNA, 32 nt, Human
cagcugcucagcucuggcuucuguaaaccgcc

SEQ ID NO: 352902 - RNA, 32 nt, Human
cagcugcucaggauaucaaagaaucuucaacc

SEQ ID NO: 352903 - RNA, 20 nt, Human
cagcugcucaguucccaggg

SEQ ID NO: 352904 - RNA, 32 nt, Human
cagcugcucauuucccccagccccagccccug

SEQ ID NO: 352905 - RNA, 20 nt, Human
cagcugcuccccaugguuca

SEQ ID NO: 352906 - RNA, 32 nt, Human
cagcugcuccuugggcagaguuggcaauguuu

SEQ ID NO: 352907 - RNA, 32 nt, Human
cagcugcucgggagguugagggagaagaauca

SEQ ID NO: 352908 - RNA, 32 nt, Human
cagcugcucgggagguugaugcaggagaauca

SEQ ID NO: 352909 - RNA, 32 nt, Human
cagcugcucguuucugugccucugcacucaca

SEQ ID NO: 352910 - RNA, 32 nt, Human
cagcugcucugccccuuuccccuucuucccug

SEQ ID NO: 352911 - RNA, 32 nt, Human
cagcugcucuguccucuccaugccuggccggc

SEQ ID NO: 352912 - RNA, 32 nt, Human
cagcugcugaacuccagccaucaacacggugg

SEQ ID NO: 352913 - RNA, 18 nt, Human
cagcugcugacgaagcuc

SEQ ID NO: 352914 - RNA, 32 nt, Human
cagcugcugaggaggaggaagaggacacugaa

SEQ ID NO: 352915 - RNA, 19 nt, Human
cagcugcugagggauuauc

SEQ ID NO: 352916 - RNA, 18 nt, Human
cagcugcugaguuuacuc

SEQ ID NO: 352917 - RNA, 19 nt, Human
cagcugcugaugguguuuc

SEQ ID NO: 352918 - RNA, 32 nt, Human
cagcugcugcaaccuccaccucccggguucaa

SEQ ID NO: 352919 - RNA, 32 nt, Human
cagcugcugcagcugcugugaccccugcagcc

SEQ ID NO: 352920 - RNA, 19 nt, Human
cagcugcugcauaucuucu

SEQ ID NO: 352921 - RNA, 32 nt, Human
cagcugcugccagagcccugagugcccagacu

SEQ ID NO: 352922 - RNA, 32 nt, Human
cagcugcugcucaucagcugcccgcuagcaug

SEQ ID NO: 352923 - RNA, 32 nt, Human
cagcugcugcuguggccccagcagguucucaa

SEQ ID NO: 352924 - RNA, 32 nt, Human
cagcugcugcuuguucugauguuuuaugguau

SEQ ID NO: 352925 - RNA, 18 nt, Human
cagcugcuggagguccuc

SEQ ID NO: 352926 - RNA, 21 nt, Human
cagcugcuggauugcacucuc

SEQ ID NO: 352927 - RNA, 18 nt, Human
cagcugcuggcacuucuc

SEQ ID NO: 352928 - RNA, 19 nt, Human
cagcugcuggcauuuccuu

SEQ ID NO: 352929 - RNA, 17 nt, Human
cagcugcugggccucuc

SEQ ID NO: 352930 - RNA, 17 nt, Human
cagcugcugggcgucuc

SEQ ID NO: 352931 - RNA, 32 nt, Human
cagcugcuggggaagagccagggggaccgcga

SEQ ID NO: 352932 - RNA, 20 nt, Human
cagcugcuggggauuuucuu

SEQ ID NO: 352933 - RNA, 32 nt, Human
cagcugcugggucagucacagagcugggggca

SEQ ID NO: 352934 - RNA, 18 nt, Human
cagcugcuggucuccaca

SEQ ID NO: 352935 - RNA, 18 nt, Human
cagcugcuggugauccuc

SEQ ID NO: 352936 - RNA, 18 nt, Human
cagcugcuguccucuaca

SEQ ID NO: 352937 - RNA, 19 nt, Human
cagcugcuguggaucgcuc

SEQ ID NO: 352938 - RNA, 18 nt, Human
cagcugcugugguugcuc

SEQ ID NO: 352939 - RNA, 25 nt, Human
cagcugcuguuuagaaaauuuucuc

SEQ ID NO: 352940 - RNA, 32 nt, Human
cagcugcuucaggcugaugagugauggcugcc

SEQ ID NO: 352941 - RNA, 32 nt, Human
cagcugcuucuccacaccccugcccacccccu

SEQ ID NO: 352942 - RNA, 20 nt, Human
cagcugcuugcucacagcca

SEQ ID NO: 352943 - RNA, 32 nt, Human
cagcugcuugggaggcugaggcaguagaauca

SEQ ID NO: 352944 - RNA, 32 nt, Human
cagcugcuugggaggcugagggcaggagaauu

SEQ ID NO: 352945 - RNA, 20 nt, Human
cagcugcuuuugcauuucuc

SEQ ID NO: 352946 - RNA, 23 nt, Human
cagcuggaacaagagguggugug

SEQ ID NO: 352947 - RNA, 32 nt, Human
cagcuggaacauaccacugccucuagacuaag

SEQ ID NO: 352948 - RNA, 21 nt, Human
cagcuggaagagucugggcca

SEQ ID NO: 352949 - RNA, 32 nt, Human
cagcuggaagcauuuguuuuugaaguuguaca

SEQ ID NO: 352950 - RNA, 32 nt, Human
cagcuggacaacagaagccccaugccgccugu

SEQ ID NO: 352951 - RNA, 32 nt, Human
cagcuggacagaaaaggggcagacacaccgag

SEQ ID NO: 352952 - RNA, 32 nt, Human
cagcuggacuuccgagaccuccuggggaagaa

SEQ ID NO: 352953 - RNA, 32 nt, Human
cagcuggagaaccggggagcagcuggacaccc

SEQ ID NO: 352954 - RNA, 32 nt, Human
cagcuggagaagaccaccaaugcugagaugag

SEQ ID NO: 352955 - RNA, 32 nt, Human
cagcuggagaggggcuggggcgccgguuuccc

SEQ ID NO: 352956 - RNA, 32 nt, Human
cagcuggagcacucacgguccacugagcucug

SEQ ID NO: 352957 - RNA, 20 nt, Human
cagcuggagccaguagggga

SEQ ID NO: 352958 - RNA, 32 nt, Human
cagcuggagcccagagaauuuaauuuaauguu

SEQ ID NO: 352959 - RNA, 32 nt, Human
cagcuggagccgcccgugccuccaggggccaa

SEQ ID NO: 352960 - RNA, 32 nt, Human
cagcuggagccuggggcugccugcaugcgcgc

SEQ ID NO: 352961 - RNA, 32 nt, Human
cagcuggagcugggacuguucagucacuggga

SEQ ID NO: 352962 - RNA, 32 nt, Human
cagcuggaggagcugggacggcggcaugagaa

SEQ ID NO: 352963 - RNA, 32 nt, Human
cagcuggaggaggagcagggaggcaagucaga

SEQ ID NO: 352964 - RNA, 32 nt, Human
cagcuggaggaggaggaggaggauacgccagu

SEQ ID NO: 352965 - RNA, 18 nt, Human
cagcuggaggcaguggga

SEQ ID NO: 352966 - RNA, 32 nt, Human
cagcuggaggcugggagcguuguggcuuccuc

SEQ ID NO: 352967 - RNA, 32 nt, Human
cagcuggagggagaacccaaagagacagcucu

SEQ ID NO: 352968 - RNA, 32 nt, Human
cagcuggagggcagggggcuggggaagggggu

SEQ ID NO: 352969 - RNA, 32 nt, Human
cagcuggagggcgagcgcgccgcccgcacacc

SEQ ID NO: 352970 - RNA, 32 nt, Human
cagcuggaggugaagguggccucggaacagac

SEQ ID NO: 352971 - RNA, 32 nt, Human
cagcuggaucagaagggaccagcuggagacca

SEQ ID NO: 352972 - RNA, 32 nt, Human
cagcuggaucgaagggcggguugcagucccga

SEQ ID NO: 352973 - RNA, 32 nt, Human
cagcuggaucuugcucacacucuuucaagaga

SEQ ID NO: 352974 - RNA, 23 nt, Human
cagcuggaugcuguggcuggcca

SEQ ID NO: 352975 - RNA, 32 nt, Human
cagcuggcacacuggcaccugcacuaaauuac

SEQ ID NO: 352976 - RNA, 32 nt, Human
cagcuggcacgggcacguucuugcccugcaca

SEQ ID NO: 352977 - RNA, 32 nt, Human
cagcuggcacuuccccuggccuagagaguucc

SEQ ID NO: 352978 - RNA, 17 nt, Human
cagcuggcagagcgaga

SEQ ID NO: 352979 - RNA, 32 nt, Human
cagcuggcaggagcccacccucccucugccau

SEQ ID NO: 352980 - RNA, 19 nt, Human
cagcuggcagggacccaga

SEQ ID NO: 352981 - RNA, 32 nt, Human
cagcuggcagggacccagaagagccuggagau

SEQ ID NO: 352982 - RNA, 32 nt, Human
cagcuggcagggccagggggugggugggcgug

SEQ ID NO: 352983 - RNA, 21 nt, Human
cagcuggccaagauggugaaa

SEQ ID NO: 352984 - RNA, 32 nt, Human
cagcuggccagccuccacucccacucugccag

SEQ ID NO: 352985 - RNA, 32 nt, Human
cagcuggccagccucgggcagcgcggcccccu

SEQ ID NO: 352986 - RNA, 32 nt, Human
cagcuggccagcuucagccaccuugggagacg

SEQ ID NO: 352987 - RNA, 19 nt, Human
cagcuggccccugcugcug

SEQ ID NO: 352988 - RNA, 32 nt, Human
cagcuggccucaccuccugaaggccuggguca

SEQ ID NO: 352989 - RNA, 19 nt, Human
cagcuggccugagcugcug

SEQ ID NO: 352990 - RNA, 23 nt, Human
cagcuggccuggaaugggccagg

SEQ ID NO: 352991 - RNA, 32 nt, Human
cagcuggccuugcggauuccagaacuuucuga

SEQ ID NO: 352992 - RNA, 20 nt, Human
cagcuggcgcgccccuccca

SEQ ID NO: 352993 - RNA, 32 nt, Human
cagcuggcucccuugucuccagggcuuuggag

SEQ ID NO: 352994 - RNA, 32 nt, Human
cagcuggcucugggaaggucucagcuuuaaga

SEQ ID NO: 352995 - RNA, 19 nt, Human
cagcuggcugaacuacaga

SEQ ID NO: 352996 - RNA, 32 nt, Human
cagcuggcugcagccuccaccucccuggcuca

SEQ ID NO: 352997 - RNA, 32 nt, Human
cagcuggcuguggugugggcucuccagccccg

SEQ ID NO: 352998 - RNA, 19 nt, Human
cagcuggcuguugauuuuc

SEQ ID NO: 352999 - RNA, 32 nt, Human
cagcuggcuugaauuucuccccagaaaauggg

SEQ ID NO: 353000 - RNA, 17 nt, Human
cagcugggagaaggggg

SEQ ID NO: 353001 - RNA, 18 nt, Human
cagcugggagcaguggga

SEQ ID NO: 353002 - RNA, 32 nt, Human
cagcugggaggucuccucccaccccaaccguc

SEQ ID NO: 353003 - RNA, 22 nt, Human
cagcugggaggugggcagugga

SEQ ID NO: 353004 - RNA, 32 nt, Human
cagcugggagguuucuaggcagcagcaaaacu

SEQ ID NO: 353005 - RNA, 32 nt, Human
cagcugggagugcagaagucucagggccuggc

SEQ ID NO: 353006 - RNA, 31 nt, Human
cagcugggaguguccaucaucaggggaagau

SEQ ID NO: 353007 - RNA, 21 nt, Human
cagcugggaguugccaaggga

SEQ ID NO: 353008 - RNA, 32 nt, Human
cagcugggaucucaguggcucccagcugcaug

SEQ ID NO: 353009 - RNA, 32 nt, Human
cagcugggaucugcccagagcuugguccucac

SEQ ID NO: 353010 - RNA, 32 nt, Human
cagcugggauuuacaggcgugagccaccgcgc

SEQ ID NO: 353011 - RNA, 20 nt, Human
cagcugggcaacacagcaag

SEQ ID NO: 353012 - RNA, 17 nt, Human
cagcugggcagcagggg

SEQ ID NO: 353013 - RNA, 32 nt, Human
cagcugggccaacaugguuaaacccuauuucu

SEQ ID NO: 353014 - RNA, 19 nt, Human
cagcugggccaauacagua

SEQ ID NO: 353015 - RNA, 32 nt, Human
cagcugggccacccccucccacccugggguug

SEQ ID NO: 353016 - RNA, 19 nt, Human
cagcugggccaggacucca

SEQ ID NO: 353017 - RNA, 32 nt, Human
cagcugggcccaggacugggguuggaggugaa

SEQ ID NO: 353018 - RNA, 32 nt, Human
cagcugggccuaggggugcagggucagugcug

SEQ ID NO: 353019 - RNA, 32 nt, Human
cagcugggccuccucacucaggacuucucucc

SEQ ID NO: 353020 - RNA, 22 nt, Human
cagcugggccuggagccaaggg

SEQ ID NO: 353021 - RNA, 23 nt, Human
cagcugggccuuugaagccacua

SEQ ID NO: 353022 - RNA, 32 nt, Human
cagcugggccuuugcucagggcugucugugcu

SEQ ID NO: 353023 - RNA, 32 nt, Human
cagcugggcuaggggcggggacugggggugcu

SEQ ID NO: 353024 - RNA, 32 nt, Human
cagcugggcucagacgugucucagcucuuguu

SEQ ID NO: 353025 - RNA, 32 nt, Human
cagcugggcuggaacugcccuccuggaacucc

SEQ ID NO: 353026 - RNA, 32 nt, Human
cagcuggggaaacugaggccuggaauggccca

SEQ ID NO: 353027 - RNA, 32 nt, Human
cagcuggggaaacugaggcucugggaugcuaa

SEQ ID NO: 353028 - RNA, 32 nt, Human
cagcuggggacauaauggagcucuggugcugg

SEQ ID NO: 353029 - RNA, 23 nt, Human
cagcuggggccccugggaggaga

SEQ ID NO: 353030 - RNA, 20 nt, Human
cagcuggggcugcagggaga

SEQ ID NO: 353031 - RNA, 20 nt, Human
cagcugggggcuccuugcca

SEQ ID NO: 353032 - RNA, 32 nt, Human
cagcuggggugacauccccagugguuugucgc

SEQ ID NO: 353033 - RNA, 32 nt, Human
cagcuggggugauggccagggcaggcugggag

SEQ ID NO: 353034 - RNA, 32 nt, Human
cagcuggggugauggccugugagccacaggcc

SEQ ID NO: 353035 - RNA, 32 nt, Human
cagcuggguacccccgauuugggccgacuuug

SEQ ID NO: 353036 - RNA, 17 nt, Human
cagcuggguaugaggug

SEQ ID NO: 353037 - RNA, 32 nt, Human
cagcugggucagagaaaacuucuugacuaaaa

SEQ ID NO: 353038 - RNA, 32 nt, Human
cagcuggguccaucaugcaaugcugagcacug

SEQ ID NO: 353039 - RNA, 32 nt, Human
cagcugggucguggagacccuaacccaguggc

SEQ ID NO: 353040 - RNA, 21 nt, Human
cagcugggugacagagugaga

SEQ ID NO: 353041 - RNA, 32 nt, Human
cagcuggguucagacuucacacugugaguuca

SEQ ID NO: 353042 - RNA, 32 nt, Human
cagcugguaaaggggugcuggaggccauggag

SEQ ID NO: 353043 - RNA, 32 nt, Human
cagcugguaccaggcugcagcguuucaggaau

SEQ ID NO: 353044 - RNA, 25 nt, Human
cagcugguaccauccagggcaacau

SEQ ID NO: 353045 - RNA, 32 nt, Human
cagcugguacugggugggcaccugggagccac

SEQ ID NO: 353046 - RNA, 32 nt, Human
cagcugguagcagcagcccugcagugaaguag

SEQ ID NO: 353047 - RNA, 24 nt, Human
cagcuggucaccaaaagcuugaua

SEQ ID NO: 353048 - RNA, 32 nt, Human
cagcuggucaucccucccgaaguuuugcggua

SEQ ID NO: 353049 - RNA, 32 nt, Human
cagcugguccaaguggccacagugauggguuu

SEQ ID NO: 353050 - RNA, 32 nt, Human
cagcuggucucaaacuccugaccucaggugau

SEQ ID NO: 353051 - RNA, 32 nt, Human
cagcuggucucgaacuccugaccucgugaucc

SEQ ID NO: 353052 - RNA, 32 nt, Human
cagcuggucucgagcuccuggccucaagcgau

SEQ ID NO: 353053 - RNA, 32 nt, Human
cagcuggugccuggccuucggcuccugcgucc

SEQ ID NO: 353054 - RNA, 32 nt, Human
cagcugguggauucccgcugcaucaaggccua

SEQ ID NO: 353055 - RNA, 32 nt, Human
cagcugguggccaagagauugguguggaggca

SEQ ID NO: 353056 - RNA, 32 nt, Human
cagcugguggguauggaggaaagacuagacau

SEQ ID NO: 353057 - RNA, 32 nt, Human
cagcuggugugaccccacacacccagugaggu

SEQ ID NO: 353058 - RNA, 18 nt, Human
cagcuggugugacuuaga

SEQ ID NO: 353059 - RNA, 21 nt, Human
cagcuggugugugacugcaga

SEQ ID NO: 353060 - RNA, 17 nt, Human
cagcugguuacggcugg

SEQ ID NO: 353061 - RNA, 32 nt, Human
cagcugguucugcugcuugguuucaacaccuu

SEQ ID NO: 353062 - RNA, 23 nt, Human
cagcugguuuaaaaauauccuuu

SEQ ID NO: 353063 - RNA, 32 nt, Human
cagcuguaaaggccauuaacuugcaaucugga

SEQ ID NO: 353064 - RNA, 32 nt, Human
cagcuguaaggaacucccaggucaagccagug

SEQ ID NO: 353065 - RNA, 22 nt, Human
cagcuguacaucaacucugccc

SEQ ID NO: 353066 - RNA, 31 nt, Human
cagcuguacuuuugugggccugucaucuuga

SEQ ID NO: 353067 - RNA, 32 nt, Human
cagcuguaggguggggaccggggagcaccugc

SEQ ID NO: 353068 - RNA, 32 nt, Human
cagcuguaguaagaagagauucaggaugcuag

SEQ ID NO: 353069 - RNA, 32 nt, Human
cagcuguaguacagugcugugcccucaccucc

SEQ ID NO: 353070 - RNA, 32 nt, Human
cagcuguaguuggucuacuccuuacuuagcac

SEQ ID NO: 353071 - RNA, 32 nt, Human
cagcuguauagccugugacucuccguguguca

SEQ ID NO: 353072 - RNA, 32 nt, Human
cagcuguaugccccagucacacaaaguaggag

SEQ ID NO: 353073 - RNA, 32 nt, Human
cagcuguauuuccaguaacacagcaucaucac

SEQ ID NO: 353074 - RNA, 32 nt, Human
cagcugucaauauuucuuugacuucagcauug

SEQ ID NO: 353075 - RNA, 32 nt, Human
cagcugucagagggauaccauccuagggucug

SEQ ID NO: 353076 - RNA, 32 nt, Human
cagcuguccagccaacugucucuccacccuuc

SEQ ID NO: 353077 - RNA, 32 nt, Human
cagcuguccgcccugccugccugccugugugg

SEQ ID NO: 353078 - RNA, 31 nt, Human
cagcugucgccuuucugaccagcaggccugg

SEQ ID NO: 353079 - RNA, 32 nt, Human
cagcugucucaaaccuccaaaagcccugaguu

SEQ ID NO: 353080 - RNA, 32 nt, Human
cagcugucucccacguguguauuaugguucac

SEQ ID NO: 353081 - RNA, 32 nt, Human
cagcugucuccuccaggcagugcugccagugu

SEQ ID NO: 353082 - RNA, 32 nt, Human
cagcugucuccugcuuucuugcccuuaaaauc

SEQ ID NO: 353083 - RNA, 19 nt, Human
cagcugucugaacuauagg

SEQ ID NO: 353084 - RNA, 32 nt, Human
cagcugucugggagucaaggcugcaguagcgu

SEQ ID NO: 353085 - RNA, 32 nt, Human
cagcugucugucugggacugggauuuacguua

SEQ ID NO: 353086 - RNA, 32 nt, Human
cagcugucuguguggcuaguggcacagugugc

SEQ ID NO: 353087 - RNA, 32 nt, Human
cagcugucuguguuucuccuguucucauaccg

SEQ ID NO: 353088 - RNA, 32 nt, Human
cagcugucuguucaccuucagcucagagagca

SEQ ID NO: 353089 - RNA, 32 nt, Human
cagcugugaacccaggaggucaagugggcuau

SEQ ID NO: 353090 - RNA, 32 nt, Human
cagcugugaaggagggcagggcuggauggaag

SEQ ID NO: 353091 - RNA, 18 nt, Human
cagcugugacaugaagug

SEQ ID NO: 353092 - RNA, 31 nt, Human
cagcugugacccauuugaccuguguccccag

SEQ ID NO: 353093 - RNA, 19 nt, Human
cagcugugacuccuccaca

SEQ ID NO: 353094 - RNA, 32 nt, Human
cagcugugacuccuccacagcccccggaggug

SEQ ID NO: 353095 - RNA, 31 nt, Human
cagcugugacuuccuccuaacugucagggug

SEQ ID NO: 353096 - RNA, 32 nt, Human
cagcugugagccaccgugccuggccuuuuauu

SEQ ID NO: 353097 - RNA, 32 nt, Human
cagcugugagccacugcacccggccgggaauu

SEQ ID NO: 353098 - RNA, 32 nt, Human
cagcugugagccaugccucccugggccaccuc

SEQ ID NO: 353099 - RNA, 32 nt, Human
cagcugugagccauggcaccuggccacacacg

SEQ ID NO: 353100 - RNA, 32 nt, Human
cagcugugauaccucaguuggaaagggaauuc

SEQ ID NO: 353101 - RNA, 16 nt, Human
cagcugugaugaguug

SEQ ID NO: 353102 - RNA, 32 nt, Human
cagcugugaugcauuauugagcacuuuagcug

SEQ ID NO: 353103 - RNA, 31 nt, Human
cagcugugccucucgggcaggguccucgggc

SEQ ID NO: 353104 - RNA, 31 nt, Human
cagcugugccucucugccuguugguugugau

SEQ ID NO: 353105 - RNA, 17 nt, Human
cagcugugcggguggua

SEQ ID NO: 353106 - RNA, 32 nt, Human
cagcugugcucaagacuggaucucaguucuuc

SEQ ID NO: 353107 - RNA, 32 nt, Human
cagcugugcucacuuuuccugcuuugugccuu

SEQ ID NO: 353108 - RNA, 18 nt, Human
cagcugugcugagggagg

SEQ ID NO: 353109 - RNA, 32 nt, Human
cagcugugcuuccagcagugagguaacuaugc

SEQ ID NO: 353110 - RNA, 21 nt, Human
cagcugugcuuucauggcugg

SEQ ID NO: 353111 - RNA, 32 nt, Human
cagcuguggaacaggcuuuuuacaccccaagu

SEQ ID NO: 353112 - RNA, 21 nt, Human
cagcuguggaucccgcccacu

SEQ ID NO: 353113 - RNA, 24 nt, Human
cagcuguggcagccccucccagcc

SEQ ID NO: 353114 - RNA, 20 nt, Human
cagcuguggccagcggcugg

SEQ ID NO: 353115 - RNA, 32 nt, Human
cagcugugggaaugcggacaggaagcagggga

SEQ ID NO: 353116 - RNA, 32 nt, Human
cagcugugggagggcagcauggagaggaggaa

SEQ ID NO: 353117 - RNA, 31 nt, Human
cagcuguggguggaggaugacccaggugccc

SEQ ID NO: 353118 - RNA, 32 nt, Human
cagcugugguacacaggccugaccaacucgga

SEQ ID NO: 353119 - RNA, 18 nt, Human
cagcugugugcagggagg

SEQ ID NO: 353120 - RNA, 32 nt, Human
cagcuguuaacguguugauuccuuccacuucc

SEQ ID NO: 353121 - RNA, 32 nt, Human
cagcuguuacccacucugggaccagcagucuu

SEQ ID NO: 353122 - RNA, 32 nt, Human
cagcuguuaguuucccgggcagucuccggguu

SEQ ID NO: 353123 - RNA, 32 nt, Human
cagcuguucaacaggaaugagagguuauggaa

SEQ ID NO: 353124 - RNA, 32 nt, Human
cagcuguucccccuggcauacaagcuuaugga

SEQ ID NO: 353125 - RNA, 32 nt, Human
cagcuguucuucuguucugcagacacgccuuc

SEQ ID NO: 353126 - RNA, 32 nt, Human
cagcuguugacuccugagucugggugaauuug

SEQ ID NO: 353127 - RNA, 32 nt, Human
cagcuguugauuggcugugacacugcuuugug

SEQ ID NO: 353128 - RNA, 32 nt, Human
cagcuguugcugcugccaacuacuucuuugca

SEQ ID NO: 353129 - RNA, 32 nt, Human
cagcuguugcuuuauuuuccaucaaagcccuc

SEQ ID NO: 353130 - RNA, 19 nt, Human
cagcuguugggccuugaga

SEQ ID NO: 353131 - RNA, 32 nt, Human
cagcuguuuagcccguggggcaguccuuugag

SEQ ID NO: 353132 - RNA, 19 nt, Human
cagcuguuuaggcuauaga

SEQ ID NO: 353133 - RNA, 32 nt, Human
cagcuguuuccuggcccuggcgagugucuguc

SEQ ID NO: 353134 - RNA, 19 nt, Human
cagcuguuuccugugugga

SEQ ID NO: 353135 - RNA, 32 nt, Human
cagcuguuuucagaggcuggagggcgggcgga

SEQ ID NO: 353136 - RNA, 32 nt, Human
cagcuguuuuccuccccucuguguacucccuu

SEQ ID NO: 353137 - RNA, 32 nt, Human
cagcuuaaaacacacaucguacagcuguacaa

SEQ ID NO: 353138 - RNA, 32 nt, Human
cagcuuaacauccaccacagagggugagcccu

SEQ ID NO: 353139 - RNA, 32 nt, Human
cagcuuaacaugaauaacaaagacuggcucag

SEQ ID NO: 353140 - RNA, 32 nt, Human
cagcuuaagguccugcauucagcucuuuucac

SEQ ID NO: 353141 - RNA, 32 nt, Human
cagcuuaaugcaaccucuaccucccagguuca

SEQ ID NO: 353142 - RNA, 32 nt, Human
cagcuuaccaucuccucacaccccagagugga

SEQ ID NO: 353143 - RNA, 21 nt, Human
cagcuuacgcagccucaggau

SEQ ID NO: 353144 - RNA, 32 nt, Human
cagcuuacucaaccucugccucuuggguuuca

SEQ ID NO: 353145 - RNA, 32 nt, Human
cagcuuacugcaaccucugccucccggguuca

SEQ ID NO: 353146 - RNA, 32 nt, Human
cagcuuacugcaaccucugucucccggguuca

SEQ ID NO: 353147 - RNA, 32 nt, Human
cagcuuacugcacccucugccucccgguuuca

SEQ ID NO: 353148 - RNA, 32 nt, Human
cagcuuacugcagccucaaccuccugggcuca

SEQ ID NO: 353149 - RNA, 32 nt, Human
cagcuuacugcagccuugaccucccaggcuca

SEQ ID NO: 353150 - RNA, 32 nt, Human
cagcuuacuguaaccucugccuccuggauuca

SEQ ID NO: 353151 - RNA, 32 nt, Human
cagcuuagacacaucaaggauugucuggggaa

SEQ ID NO: 353152 - RNA, 32 nt, Human
cagcuuagacccaagcccugaaggccugaggc

SEQ ID NO: 353153 - RNA, 18 nt, Human
cagcuuagacuccuccac

SEQ ID NO: 353154 - RNA, 19 nt, Human
cagcuuagacuccuccaca

SEQ ID NO: 353155 - RNA, 24 nt, Human
cagcuuagcauucguugcagcuga

SEQ ID NO: 353156 - RNA, 32 nt, Human
cagcuuagccucuucucccaggggagcuacuc

SEQ ID NO: 353157 - RNA, 32 nt, Human
cagcuuagcuggggcugugcagccaggggcuu

SEQ ID NO: 353158 - RNA, 32 nt, Human
cagcuuaggcaacacggugaaaccccaucucu

SEQ ID NO: 353159 - RNA, 20 nt, Human
cagcuuaggccuccuccaua

SEQ ID NO: 353160 - RNA, 22 nt, Human
cagcuuaggugacagagugaga

SEQ ID NO: 353161 - RNA, 22 nt, Human
cagcuuagguggcaaagugaga

SEQ ID NO: 353162 - RNA, 19 nt, Human
cagcuuauaccauggaaug

SEQ ID NO: 353163 - RNA, 32 nt, Human
cagcuuauccugggugcucugugaucagaagg

SEQ ID NO: 353164 - RNA, 32 nt, Human
cagcuuaugucuguaaucccagcacuuuugag

SEQ ID NO: 353165 - RNA, 32 nt, Human
cagcuuauuacaaccucugccuccugggcuca

SEQ ID NO: 353166 - RNA, 32 nt, Human
cagcuuauuauuugcugugugcauggggcaau

SEQ ID NO: 353167 - RNA, 32 nt, Human
cagcuucaaaugcagcccaguauccugcccua

SEQ ID NO: 353168 - RNA, 32 nt, Human
cagcuucaaggagaaagaguucagaggcccug

SEQ ID NO: 353169 - RNA, 32 nt, Human
cagcuucacaaaccuuaucuaagguuuuccag

SEQ ID NO: 353170 - RNA, 23 nt, Human
cagcuucacaagccaacccagga

SEQ ID NO: 353171 - RNA, 25 nt, Human
cagcuucacucaacucuggggaaug

SEQ ID NO: 353172 - RNA, 32 nt, Human
cagcuucacuccucaggaaguaccauggacag

SEQ ID NO: 353173 - RNA, 32 nt, Human
cagcuucagaacccucagucccucucucaccu

SEQ ID NO: 353174 - RNA, 32 nt, Human
cagcuucagaauugggcugaacuucagugccc

SEQ ID NO: 353175 - RNA, 32 nt, Human
cagcuucagacagggagccaggaugggaacca

SEQ ID NO: 353176 - RNA, 32 nt, Human
cagcuucagagauacugcuucucagcgucucu

SEQ ID NO: 353177 - RNA, 32 nt, Human
cagcuucagcaguguugaacuguguguuuaaa

SEQ ID NO: 353178 - RNA, 32 nt, Human
cagcuucaggcagaggagacaacauggaagaa

SEQ ID NO: 353179 - RNA, 32 nt, Human
cagcuucaggucgcuaccaucuggaccucucg

SEQ ID NO: 353180 - RNA, 32 nt, Human
cagcuucauaagacacugagguuuagaauugu

SEQ ID NO: 353181 - RNA, 32 nt, Human
cagcuucauccacuccaggacagcugagcguc

SEQ ID NO: 353182 - RNA, 21 nt, Human
cagcuucaugccucuuccaca

SEQ ID NO: 353183 - RNA, 32 nt, Human
cagcuucaugugaagcucugcacagacaagac

SEQ ID NO: 353184 - RNA, 32 nt, Human
cagcuucauuuuggguuuuugccuccucccac

SEQ ID NO: 353185 - RNA, 32 nt, Human
cagcuuccacugcuccccuuguucccggccgg

SEQ ID NO: 353186 - RNA, 19 nt, Human
cagcuuccagacagaaaac

SEQ ID NO: 353187 - RNA, 32 nt, Human
cagcuuccagaguucaagcgagucuccugcuu

SEQ ID NO: 353188 - RNA, 32 nt, Human
cagcuuccagcaccuucuucaguguuaccauc

SEQ ID NO: 353189 - RNA, 21 nt, Human
cagcuuccaggcgcuaagaaa

SEQ ID NO: 353190 - RNA, 32 nt, Human
cagcuuccaggggacugucacuguggacgcca

SEQ ID NO: 353191 - RNA, 32 nt, Human
cagcuuccaggguccugggccugcugugaccc

SEQ ID NO: 353192 - RNA, 24 nt, Human
cagcuuccagugcagagcuccaca

SEQ ID NO: 353193 - RNA, 32 nt, Human
cagcuucccacugcagcagcaccagucugggg

SEQ ID NO: 353194 - RNA, 32 nt, Human
cagcuucccagccaugcccaggacguccuauc

SEQ ID NO: 353195 - RNA, 32 nt, Human
cagcuucccagcugcccuggcuuagccuuccc

SEQ ID NO: 353196 - RNA, 32 nt, Human
cagcuucccaggaaguucagcuucggguuagu

SEQ ID NO: 353197 - RNA, 32 nt, Human
cagcuucccaggagagaccaaaggcuucugag

SEQ ID NO: 353198 - RNA, 32 nt, Human
cagcuucccccagccccugccaccccagaggg

SEQ ID NO: 353199 - RNA, 32 nt, Human
cagcuucccgggcucuguccuccauaucgaau

SEQ ID NO: 353200 - RNA, 32 nt, Human
cagcuucccuccagccucuccuccauucccua

SEQ ID NO: 353201 - RNA, 32 nt, Human
cagcuucccugacagggcaggggcucacucuu

SEQ ID NO: 353202 - RNA, 32 nt, Human
cagcuucccugcuguguugcugcccagccgcu

SEQ ID NO: 353203 - RNA, 32 nt, Human
cagcuucccugucucuuccugccuguguaccu

SEQ ID NO: 353204 - RNA, 32 nt, Human
cagcuuccgccucccccauccugggcgccccu

SEQ ID NO: 353205 - RNA, 32 nt, Human
cagcuuccuaaccuugaggggccagagaacaa

SEQ ID NO: 353206 - RNA, 32 nt, Human
cagcuuccuaagggaugcaggaaggggccggg

SEQ ID NO: 353207 - RNA, 32 nt, Human
cagcuuccuaguagcugggauugcaggcacuc

SEQ ID NO: 353208 - RNA, 32 nt, Human
cagcuuccuccccuugcuacagccucugcccu

SEQ ID NO: 353209 - RNA, 32 nt, Human
cagcuuccuccuucugucacuuguguaaguug

SEQ ID NO: 353210 - RNA, 32 nt, Human
cagcuuccugggagcaggaggaggcaggauuc

SEQ ID NO: 353211 - RNA, 32 nt, Human
cagcuuccugugggccaggagcucagccgugc

SEQ ID NO: 353212 - RNA, 32 nt, Human
cagcuuccuucaaaaugucuacuguucacgaa

SEQ ID NO: 353213 - RNA, 32 nt, Human
cagcuuccuuucuccucacgacggccuccaca

SEQ ID NO: 353214 - RNA, 32 nt, Human
cagcuucgaaccuacaccugagggcuaccagc

SEQ ID NO: 353215 - RNA, 21 nt, Human
cagcuucggucccccuucugu

SEQ ID NO: 353216 - RNA, 32 nt, Human
cagcuucuaaucccagcacuuugguaggcaaa

SEQ ID NO: 353217 - RNA, 32 nt, Human
cagcuucuacuugagcccucucucucugccac

SEQ ID NO: 353218 - RNA, 32 nt, Human
cagcuucucaaucagugacugugugcuaaauu

SEQ ID NO: 353219 - RNA, 32 nt, Human
cagcuucucagcagcaagcaccagccuuccac

SEQ ID NO: 353220 - RNA, 32 nt, Human
cagcuucucaggaggcugagacaggagaaucg

SEQ ID NO: 353221 - RNA, 32 nt, Human
cagcuucucauggguggucuuaccagcuacug

SEQ ID NO: 353222 - RNA, 32 nt, Human
cagcuucuccacugucaucaaacuggccaugu

SEQ ID NO: 353223 - RNA, 32 nt, Human
cagcuucucccuccaucucccuccccuuuccc

SEQ ID NO: 353224 - RNA, 32 nt, Human
cagcuucuccucugccccgauggaugcuuuau

SEQ ID NO: 353225 - RNA, 19 nt, Human
cagcuucuccugaguccuc

SEQ ID NO: 353226 - RNA, 32 nt, Human
cagcuucuccugccucuucuucugcaauccuc

SEQ ID NO: 353227 - RNA, 32 nt, Human
cagcuucucugccucucuucugauacaaggac

SEQ ID NO: 353228 - RNA, 32 nt, Human
cagcuucugccucccuccucaucacuuccucu

SEQ ID NO: 353229 - RNA, 32 nt, Human
cagcuucugccuccugucuccugggacccucg

SEQ ID NO: 353230 - RNA, 32 nt, Human
cagcuucuggguauccagagagcacugcacuu

SEQ ID NO: 353231 - RNA, 32 nt, Human
cagcuucugguccucuucuuccaccucuuaga

SEQ ID NO: 353232 - RNA, 32 nt, Human
cagcuucugucucugcugucccaguuuugagg

SEQ ID NO: 353233 - RNA, 32 nt, Human
cagcuucugucugucucacugucuucccuccc

SEQ ID NO: 353234 - RNA, 32 nt, Human
cagcuucuguuuaccuuuuuggcaucaaauaa

SEQ ID NO: 353235 - RNA, 32 nt, Human
cagcuucuucauuccugcacugguugccacca

SEQ ID NO: 353236 - RNA, 32 nt, Human
cagcuucuuccucugcccaguccugcccucac

SEQ ID NO: 353237 - RNA, 32 nt, Human
cagcuucuucuccacgaguuuuaacaagcaug

SEQ ID NO: 353238 - RNA, 32 nt, Human
cagcuucuuggcaugagguuuacccugguaac

SEQ ID NO: 353239 - RNA, 32 nt, Human
cagcuucuugggaggcugagaugggaaucacu

SEQ ID NO: 353240 - RNA, 32 nt, Human
cagcuucuugggaggcugaggugggaggauug

SEQ ID NO: 353241 - RNA, 32 nt, Human
cagcuucuuuggugauuacaucuuuccauauc

SEQ ID NO: 353242 - RNA, 32 nt, Human
cagcuugaccaacauggagaaaccucguuucu

SEQ ID NO: 353243 - RNA, 32 nt, Human
cagcuugaccaacauggugaaaccccaucucu

SEQ ID NO: 353244 - RNA, 23 nt, Human
cagcuugagcuaaugaguccucc

SEQ ID NO: 353245 - RNA, 32 nt, Human
cagcuugagcuccacgaugcucugcuugauga

SEQ ID NO: 353246 - RNA, 25 nt, Human
cagcuugaucaauucugcagucaua

SEQ ID NO: 353247 - RNA, 24 nt, Human
cagcuugauccacuguugcucuua

SEQ ID NO: 353248 - RNA, 32 nt, Human
cagcuugauuggcuuccccgagggccagcagg

SEQ ID NO: 353249 - RNA, 20 nt, Human
cagcuugcaacuauuuucuc

SEQ ID NO: 353250 - RNA, 32 nt, Human
cagcuugcagggguuggggagggagacaucca

SEQ ID NO: 353251 - RNA, 32 nt, Human
cagcuugcagugagcgaagaucgcaccacugc

SEQ ID NO: 353252 - RNA, 20 nt, Human
cagcuugcaguggacauaga

SEQ ID NO: 353253 - RNA, 32 nt, Human
cagcuugcaucugccaucauuugaugcccacu

SEQ ID NO: 353254 - RNA, 21 nt, Human
cagcuugcccaaugcuucugg

SEQ ID NO: 353255 - RNA, 32 nt, Human
cagcuugccccagggaaaggacaaggcugaga

SEQ ID NO: 353256 - RNA, 32 nt, Human
cagcuugccccgcuccuccaccaucuaggccc

SEQ ID NO: 353257 - RNA, 32 nt, Human
cagcuugcucaggccccaggguggcugccucg

SEQ ID NO: 353258 - RNA, 32 nt, Human
cagcuugcucccugccccagaccuguuucuuc

SEQ ID NO: 353259 - RNA, 32 nt, Human
cagcuugcugaaugucagcugccugagagagc

SEQ ID NO: 353260 - RNA, 32 nt, Human
cagcuugcugcaaacuccgccucccagguuca

SEQ ID NO: 353261 - RNA, 32 nt, Human
cagcuugcugggagagcgggacgguccggagc

SEQ ID NO: 353262 - RNA, 32 nt, Human
cagcuugcuguucauguccaaggucaaaaacu

SEQ ID NO: 353263 - RNA, 32 nt, Human
cagcuugcuuaaccauuccucuaccucuugca

SEQ ID NO: 353264 - RNA, 19 nt, Human
cagcuugcuucucucuaca

SEQ ID NO: 353265 - RNA, 32 nt, Human
cagcuuggacacagcccacugcagagaugaaa

SEQ ID NO: 353266 - RNA, 32 nt, Human
cagcuuggacaucaugacgaaaccccaucucc

SEQ ID NO: 353267 - RNA, 31 nt, Human
cagcuuggagacuucucagccaaugcucuga

SEQ ID NO: 353268 - RNA, 32 nt, Human
cagcuuggagccagcugagcaggcuuugcuuu

SEQ ID NO: 353269 - RNA, 20 nt, Human
cagcuuggcaacagagcgag

SEQ ID NO: 353270 - RNA, 32 nt, Human
cagcuuggcacucaggugcugaaggguaauau

SEQ ID NO: 353271 - RNA, 17 nt, Human
cagcuuggcaugguugg

SEQ ID NO: 353272 - RNA, 32 nt, Human
cagcuuggccaacauggagaaaccccaucucu

SEQ ID NO: 353273 - RNA, 32 nt, Human
cagcuuggccaacauggcgaaaccccaucucu

SEQ ID NO: 353274 - RNA, 32 nt, Human
cagcuuggccaacauggugaaaccccaucucc

SEQ ID NO: 353275 - RNA, 32 nt, Human
cagcuuggccaacauggugaaaccccaucucu

SEQ ID NO: 353276 - RNA, 32 nt, Human
cagcuuggccaacauggugaaaccucaucucu

SEQ ID NO: 353277 - RNA, 32 nt, Human
cagcuuggccaacauggugaaauccugucugu

SEQ ID NO: 353278 - RNA, 32 nt, Human
cagcuuggccaacauggugaagcucugucucu

SEQ ID NO: 353279 - RNA, 32 nt, Human
cagcuuggccaacauggugagcccccgucucu

SEQ ID NO: 353280 - RNA, 32 nt, Human
cagcuuggccaacaugucgaaacuucaucucu

SEQ ID NO: 353281 - RNA, 32 nt, Human
cagcuuggccaagauggugaaaccccaucucu

SEQ ID NO: 353282 - RNA, 19 nt, Human
cagcuuggcccuuuucaca

SEQ ID NO: 353283 - RNA, 32 nt, Human
cagcuuggccgacaugguaaaaccccacgucu

SEQ ID NO: 353284 - RNA, 32 nt, Human
cagcuuggcugugaggaucagcuuguuagccu

SEQ ID NO: 353285 - RNA, 22 nt, Human
cagcuuggcuuggcuuuggcug

SEQ ID NO: 353286 - RNA, 32 nt, Human
cagcuugggaaugauggcugccaacucccaau

SEQ ID NO: 353287 - RNA, 31 nt, Human
cagcuugggaggccaaggugggugaauugcu

SEQ ID NO: 353288 - RNA, 32 nt, Human
cagcuugggaggccaaggugggugaauugcuu

SEQ ID NO: 353289 - RNA, 22 nt, Human
cagcuugggcaacaaagugaga

SEQ ID NO: 353290 - RNA, 21 nt, Human
cagcuugggcaacagagcaag

SEQ ID NO: 353291 - RNA, 18 nt, Human
cagcuugggcaacagagu

SEQ ID NO: 353292 - RNA, 21 nt, Human
cagcuugggcaacagaguaag

SEQ ID NO: 353293 - RNA, 22 nt, Human
cagcuugggcaacagaguaaga

SEQ ID NO: 353294 - RNA, 22 nt, Human
cagcuugggcaacagagugaga

SEQ ID NO: 353295 - RNA, 32 nt, Human
cagcuugggcaacauggagaaaccccaucuuu

SEQ ID NO: 353296 - RNA, 32 nt, Human
cagcuugggcaacauggcaaagccccaucucu

SEQ ID NO: 353297 - RNA, 32 nt, Human
cagcuugggcaacauggcgaaaccccgucucu

SEQ ID NO: 353298 - RNA, 19 nt, Human
cagcuugggcaacgagcaa

SEQ ID NO: 353299 - RNA, 32 nt, Human
cagcuugggcaauaagaaugaaacucugucuc

SEQ ID NO: 353300 - RNA, 21 nt, Human
cagcuugggcaccagagcaag

SEQ ID NO: 353301 - RNA, 32 nt, Human
cagcuugggcagguggccuggaggcacaaagg

SEQ ID NO: 353302 - RNA, 32 nt, Human
cagcuugggcccugcaaacacaaccaucuaca

SEQ ID NO: 353303 - RNA, 32 nt, Human
cagcuugggccugaacuacuggaaaaggucug

SEQ ID NO: 353304 - RNA, 21 nt, Human
cagcuugggcgacagagcaag

SEQ ID NO: 353305 - RNA, 22 nt, Human
cagcuugggcgacagagcaaga

SEQ ID NO: 353306 - RNA, 22 nt, Human
cagcuugggcgacagagcgaga

SEQ ID NO: 353307 - RNA, 22 nt, Human
cagcuugggcgacggagugaga

SEQ ID NO: 353308 - RNA, 22 nt, Human
cagcuugggugacaaaguaaga

SEQ ID NO: 353309 - RNA, 22 nt, Human
cagcuugggugacacagugaga

SEQ ID NO: 353310 - RNA, 22 nt, Human
cagcuugggugacagagcaaga

SEQ ID NO: 353311 - RNA, 22 nt, Human
cagcuugggugacagagcgaga

SEQ ID NO: 353312 - RNA, 21 nt, Human
cagcuugggugacagagugag

SEQ ID NO: 353313 - RNA, 22 nt, Human
cagcuugggugacagagugaga

SEQ ID NO: 353314 - RNA, 32 nt, Human
cagcuugguccucuuguccugcagaggcaggc

SEQ ID NO: 353315 - RNA, 18 nt, Human
cagcuugguguuuucaca

SEQ ID NO: 353316 - RNA, 32 nt, Human
cagcuugucccagccacucuagcugcuggaug

SEQ ID NO: 353317 - RNA, 22 nt, Human
cagcuugucuaggaaggggaug

SEQ ID NO: 353318 - RNA, 32 nt, Human
cagcuugucucuuccggccaggucaagguauc

SEQ ID NO: 353319 - RNA, 32 nt, Human
cagcuugucugucucuggguccugggccagcc

SEQ ID NO: 353320 - RNA, 32 nt, Human
cagcuugucuucaaauacggccaagcagaaaa

SEQ ID NO: 353321 - RNA, 32 nt, Human
cagcuugugaauguuuagugugcugcuguucu

SEQ ID NO: 353322 - RNA, 32 nt, Human
cagcuuguggcaguggaaauauggcugaauga

SEQ ID NO: 353323 - RNA, 32 nt, Human
cagcuuguguguggcuguccuugaguagugau

SEQ ID NO: 353324 - RNA, 32 nt, Human
cagcuuguucaggagggcuugauguccucacc

SEQ ID NO: 353325 - RNA, 32 nt, Human
cagcuuguucuuucuuucucuucaguccucug

SEQ ID NO: 353326 - RNA, 21 nt, Human
cagcuuguugaugccuccaua

SEQ ID NO: 353327 - RNA, 18 nt, Human
cagcuuguugggagucua

SEQ ID NO: 353328 - RNA, 32 nt, Human
cagcuuguuuuccaggcaucgaauaacuguug

SEQ ID NO: 353329 - RNA, 32 nt, Human
cagcuuuacaguccacacagucucaagaagaa

SEQ ID NO: 353330 - RNA, 21 nt, Human
cagcuuuacucuucuuccaca

SEQ ID NO: 353331 - RNA, 32 nt, Human
cagcuuuaggugaccugguucuugucucaacu

SEQ ID NO: 353332 - RNA, 21 nt, Human
cagcuuuaguccgucuucaca

SEQ ID NO: 353333 - RNA, 21 nt, Human
cagcuuuauuugccuucuaca

SEQ ID NO: 353334 - RNA, 32 nt, Human
cagcuuucaagcagugcuuguugugagguccc

SEQ ID NO: 353335 - RNA, 32 nt, Human
cagcuuucaagugccuuucugcaguuuuucag

SEQ ID NO: 353336 - RNA, 21 nt, Human
cagcuuucagauuccuccaua

SEQ ID NO: 353337 - RNA, 32 nt, Human
cagcuuucagcccucuacaggaauuacccucc

SEQ ID NO: 353338 - RNA, 32 nt, Human
cagcuuucaggaaggaucucacaaacacccac

SEQ ID NO: 353339 - RNA, 32 nt, Human
cagcuuucaggaggacaguggaaagagugcag

SEQ ID NO: 353340 - RNA, 24 nt, Human
cagcuuucaguuccugacucccca

SEQ ID NO: 353341 - RNA, 32 nt, Human
cagcuuuccaccgugccaaggcuccuuacacg

SEQ ID NO: 353342 - RNA, 32 nt, Human
cagcuuuccagcuuuccucuggauuccggccu

SEQ ID NO: 353343 - RNA, 21 nt, Human
cagcuuucccuacuccugccc

SEQ ID NO: 353344 - RNA, 32 nt, Human
cagcuuuccucaagacaggccaugccaggcga

SEQ ID NO: 353345 - RNA, 23 nt, Human
cagcuuuccucccgcuccugccc

SEQ ID NO: 353346 - RNA, 32 nt, Human
cagcuuuccucuuccucuccaaaccaccucga

SEQ ID NO: 353347 - RNA, 32 nt, Human
cagcuuucggcgccaaccacacagccagcaac

SEQ ID NO: 353348 - RNA, 30 nt, Human
cagcuuucucagaaaggccucuguaagccu

SEQ ID NO: 353349 - RNA, 21 nt, Human
cagcuuucuccggccucaggg

SEQ ID NO: 353350 - RNA, 19 nt, Human
cagcuuucuucuuuccaca

SEQ ID NO: 353351 - RNA, 32 nt, Human
cagcuuucuuuggggcuucagugagaacucuc

SEQ ID NO: 353352 - RNA, 18 nt, Human
cagcuuugacauuuucuc

SEQ ID NO: 353353 - RNA, 32 nt, Human
cagcuuugaccuuuauucaagagaccagaugg

SEQ ID NO: 353354 - RNA, 17 nt, Human
cagcuuugagcucuacg

SEQ ID NO: 353355 - RNA, 32 nt, Human
cagcuuugagcucuggcaggugcaaugugccc

SEQ ID NO: 353356 - RNA, 22 nt, Human
cagcuuugagcuguggcugcca

SEQ ID NO: 353357 - RNA, 18 nt, Human
cagcuuugaucugaccgc

SEQ ID NO: 353358 - RNA, 18 nt, Human
cagcuuugcaccuacaua

SEQ ID NO: 353359 - RNA, 20 nt, Human
cagcuuugcagucccuucgc

SEQ ID NO: 353360 - RNA, 17 nt, Human
cagcuuugcuuuucaca

SEQ ID NO: 353361 - RNA, 32 nt, Human
cagcuuuggaaauggcuguugagccaggaacu

SEQ ID NO: 353362 - RNA, 32 nt, Human
cagcuuuggagucaagaaugaaguucuaggag

SEQ ID NO: 353363 - RNA, 19 nt, Human
cagcuuuggccccuccaca

SEQ ID NO: 353364 - RNA, 32 nt, Human
cagcuuuggccgagguucgggcucgaacuugg

SEQ ID NO: 353365 - RNA, 32 nt, Human
cagcuuuggccgucaggagagccuucugggca

SEQ ID NO: 353366 - RNA, 32 nt, Human
cagcuuugggacucagacuggcuuccuugcuc

SEQ ID NO: 353367 - RNA, 32 nt, Human
cagcuuugggcaacacagugagaccucaucuc

SEQ ID NO: 353368 - RNA, 32 nt, Human
cagcuuuggggacuuccgcucccuggauaugu

SEQ ID NO: 353369 - RNA, 32 nt, Human
cagcuuuggggguuugcugcuggcucugacuc

SEQ ID NO: 353370 - RNA, 32 nt, Human
cagcuuuggguuugcagagauuacacaggaau

SEQ ID NO: 353371 - RNA, 32 nt, Human
cagcuuuggugagaaaacuaaucuugaacuau

SEQ ID NO: 353372 - RNA, 20 nt, Human
cagcuuuggugcucuccaca

SEQ ID NO: 353373 - RNA, 21 nt, Human
cagcuuuguaaauucuuaaca

SEQ ID NO: 353374 - RNA, 32 nt, Human
cagcuuugucaaucacccaagcacuuuaugca

SEQ ID NO: 353375 - RNA, 32 nt, Human
cagcuuugucagcucaggucugucuacaccca

SEQ ID NO: 353376 - RNA, 32 nt, Human
cagcuuugugagcuggugcugccccuggggca

SEQ ID NO: 353377 - RNA, 32 nt, Human
cagcuuuguuagguggguagggggagaccaag

SEQ ID NO: 353378 - RNA, 18 nt, Human
cagcuuuguucuucuuca

SEQ ID NO: 353379 - RNA, 18 nt, Human
cagcuuuuaucuugcaca

SEQ ID NO: 353380 - RNA, 32 nt, Human
cagcuuuucuaagccugaaccugugcuaaauc

SEQ ID NO: 353381 - RNA, 32 nt, Human
cagcuuuucucaauuaacauuuugguaguaua

SEQ ID NO: 353382 - RNA, 19 nt, Human
cagcuuuucugccuccgca

SEQ ID NO: 353383 - RNA, 32 nt, Human
cagcuuuugccuugguucuuccuagugccuac

SEQ ID NO: 353384 - RNA, 32 nt, Human
cagcuuuuggaaaggacucaggaagcuuuuac

SEQ ID NO: 353385 - RNA, 32 nt, Human
cagcuuuuggggcucagaggccagucuggggg

SEQ ID NO: 353386 - RNA, 32 nt, Human
cagcuuuuguuauugguccucauaaagggaaa

SEQ ID NO: 353387 - RNA, 18 nt, Human
cagcuuuuuccucucaua

SEQ ID NO: 353388 - RNA, 32 nt, Human
cagcuuuuucucgauaggcuucauccuuguuu

SEQ ID NO: 353389 - RNA, 32 nt, Human
cagcuuuuugcacuaaagccaaaccacaccgc

SEQ ID NO: 353390 - RNA, 32 nt, Human
cagcuuuuugccugaugccauuuuauugacag

SEQ ID NO: 353391 - RNA, 32 nt, Human
cagcuuuuugggaaaagaacgugcucgucugu

SEQ ID NO: 353392 - RNA, 22 nt, Human
cagcuuuuuuccucaaaaguaa

SEQ ID NO: 353393 - RNA, 21 nt, Human
cagcuuuuuugaacuuccaca

SEQ ID NO: 353394 - RNA, 32 nt, Human
caggaaaaagagagcugugggcuuccagggcg

SEQ ID NO: 353395 - RNA, 22 nt, Human
caggaaaaagguuggagcagug

SEQ ID NO: 353396 - RNA, 19 nt, Human
caggaaaacuagcaugaaa

SEQ ID NO: 353397 - RNA, 32 nt, Human
caggaaaagaagcagagcccagaagcagggcc

SEQ ID NO: 353398 - RNA, 32 nt, Human
caggaaaagacuguuaacauuacauuuaugca

SEQ ID NO: 353399 - RNA, 32 nt, Human
caggaaaagaggaagaagaaguagaggagcug

SEQ ID NO: 353400 - RNA, 18 nt, Human
caggaaaagcugaugcua

SEQ ID NO: 353401 - RNA, 32 nt, Human
caggaaaaggaaaaagaaugaggacucugaac

SEQ ID NO: 353402 - RNA, 32 nt, Human
caggaaaaugucaccaagcacccuccucccca

SEQ ID NO: 353403 - RNA, 21 nt, Human
caggaaaauugcuugaaccca

SEQ ID NO: 353404 - RNA, 21 nt, Human
caggaaaauugcuugaacuca

SEQ ID NO: 353405 - RNA, 21 nt, Human
caggaaaauuguuugaaccca

SEQ ID NO: 353406 - RNA, 19 nt, Human
caggaaacaacagaugcug

SEQ ID NO: 353407 - RNA, 32 nt, Human
caggaaacacaaaauaaguaugcauaaauaaa

SEQ ID NO: 353408 - RNA, 32 nt, Human
caggaaacaugauguuuuaagcugcuaagaug

SEQ ID NO: 353409 - RNA, 32 nt, Human
caggaaaccccgagaaggaauggugcuuggca

SEQ ID NO: 353410 - RNA, 32 nt, Human
caggaaaccggagaaaacggggcaaagaaaaa

SEQ ID NO: 353411 - RNA, 24 nt, Human
caggaaaccuacacauucucugcu

SEQ ID NO: 353412 - RNA, 32 nt, Human
caggaaacgaaucccuuccuccucuccccuuu

SEQ ID NO: 353413 - RNA, 32 nt, Human
caggaaacucucccucuccaucgccauccugc

SEQ ID NO: 353414 - RNA, 32 nt, Human
caggaaacugcuagacagccugguccgaaagc

SEQ ID NO: 353415 - RNA, 32 nt, Human
caggaaacugcucucccucagcugggcugggg

SEQ ID NO: 353416 - RNA, 32 nt, Human
caggaaagaacaguggucccuuuguugggccu

SEQ ID NO: 353417 - RNA, 32 nt, Human
caggaaagaagucacuguugcaauaaaagcac

SEQ ID NO: 353418 - RNA, 32 nt, Human
caggaaagacagaggaaggaaggagggagaag

SEQ ID NO: 353419 - RNA, 32 nt, Human
caggaaagaccagccucacuccugggaacugu

SEQ ID NO: 353420 - RNA, 24 nt, Human
caggaaagacgggcauuacaggga

SEQ ID NO: 353421 - RNA, 23 nt, Human
caggaaagacuaucucucugacu

SEQ ID NO: 353422 - RNA, 32 nt, Human
caggaaagacuggccacggccccgcagaagcu

SEQ ID NO: 353423 - RNA, 32 nt, Human
caggaaagagagaagcggagggcgggcugggu

SEQ ID NO: 353424 - RNA, 32 nt, Human
caggaaagagagaccuuucuuguuucuggacu

SEQ ID NO: 353425 - RNA, 32 nt, Human
caggaaagaggagagaaagaaagaaagggcac

SEQ ID NO: 353426 - RNA, 25 nt, Human
caggaaagaggcccccauccagccc

SEQ ID NO: 353427 - RNA, 32 nt, Human
caggaaagauguccacugaaaauguggaaggg

SEQ ID NO: 353428 - RNA, 22 nt, Human
caggaaagaugucccacaggga

SEQ ID NO: 353429 - RNA, 32 nt, Human
caggaaagcagagacagacaaagcguuaggag

SEQ ID NO: 353430 - RNA, 32 nt, Human
caggaaagccaagguggaggcugagguggcug

SEQ ID NO: 353431 - RNA, 22 nt, Human
caggaaagccagauuccagccu

SEQ ID NO: 353432 - RNA, 32 nt, Human
caggaaagccagccaaagcguguucaggaagu

SEQ ID NO: 353433 - RNA, 32 nt, Human
caggaaagcguggcuggccucuugcacugcuu

SEQ ID NO: 353434 - RNA, 32 nt, Human
caggaaagcugaagcaggagguggcauuugaa

SEQ ID NO: 353435 - RNA, 32 nt, Human
caggaaagcugauggugcaagguccaguccaa

SEQ ID NO: 353436 - RNA, 22 nt, Human
caggaaaggaagcauucaggga

SEQ ID NO: 353437 - RNA, 21 nt, Human
caggaaaggagguuccagccc

SEQ ID NO: 353438 - RNA, 18 nt, Human
caggaaaggauugaugcc

SEQ ID NO: 353439 - RNA, 32 nt, Human
caggaaaggcucaagugauccuccuguaucac

SEQ ID NO: 353440 - RNA, 22 nt, Human
caggaaagggaacauucucggc

SEQ ID NO: 353441 - RNA, 32 nt, Human
caggaaagggcugaggcaggugguagggcugg

SEQ ID NO: 353442 - RNA, 21 nt, Human
caggaaaguggucuccagccc

SEQ ID NO: 353443 - RNA, 32 nt, Human
caggaaaguuccaggcuucagcucccagaaac

SEQ ID NO: 353444 - RNA, 32 nt, Human
caggaaaguugacugcugacugauugggaaag

SEQ ID NO: 353445 - RNA, 32 nt, Human
caggaaauagccaaagcuuuaaucuagccuaa

SEQ ID NO: 353446 - RNA, 32 nt, Human
caggaaauagcgcaggacaucacaaggaccaa

SEQ ID NO: 353447 - RNA, 32 nt, Human
caggaaauauccauccaugaauuaugccagca

SEQ ID NO: 353448 - RNA, 32 nt, Human
caggaaaucaagaugaaaaaucccagaaaaua

SEQ ID NO: 353449 - RNA, 32 nt, Human
caggaaaucuggguugguuccagugggaaaua

SEQ ID NO: 353450 - RNA, 22 nt, Human
caggaaaugcugcauuucuggc

SEQ ID NO: 353451 - RNA, 19 nt, Human
caggaaauggcagagccag

SEQ ID NO: 353452 - RNA, 22 nt, Human
caggaaauuagcuuuccagccc

SEQ ID NO: 353453 - RNA, 32 nt, Human
caggaacaccugcuacugcacacuccaaacca

SEQ ID NO: 353454 - RNA, 32 nt, Human
caggaacacgggagcuucugaagagcugaaca

SEQ ID NO: 353455 - RNA, 32 nt, Human
caggaacagacacacuccauguuugucccaca

SEQ ID NO: 353456 - RNA, 32 nt, Human
caggaacagcagagguggaggcaagcagugac

SEQ ID NO: 353457 - RNA, 32 nt, Human
caggaacagcauggaggaaaccgcccccauga

SEQ ID NO: 353458 - RNA, 32 nt, Human
caggaacagccccuuuccugugccccacuucu

SEQ ID NO: 353459 - RNA, 32 nt, Human
caggaacagccccuuuccugugccccacuugu

SEQ ID NO: 353460 - RNA, 32 nt, Human
caggaacaggcaguggcugugaaugguuucau

SEQ ID NO: 353461 - RNA, 32 nt, Human
caggaacaggguucugcccucccagagccucc

SEQ ID NO: 353462 - RNA, 32 nt, Human
caggaacaggucucaggauggagagaagcaua

SEQ ID NO: 353463 - RNA, 19 nt, Human
caggaacaucccugagaaa

SEQ ID NO: 353464 - RNA, 21 nt, Human
caggaaccacccccaccccca

SEQ ID NO: 353465 - RNA, 32 nt, Human
caggaaccaccugagcccacagauccuguggg

SEQ ID NO: 353466 - RNA, 20 nt, Human
caggaaccaggcuuagagga

SEQ ID NO: 353467 - RNA, 32 nt, Human
caggaaccaggcuuugcugggugcugcccaac

SEQ ID NO: 353468 - RNA, 32 nt, Human
caggaacccacccucuccacacccagccuguc

SEQ ID NO: 353469 - RNA, 32 nt, Human
caggaacccacugaaagccauaucccauuaaa

SEQ ID NO: 353470 - RNA, 32 nt, Human
caggaacccagaaacauauauuucauuuccac

SEQ ID NO: 353471 - RNA, 21 nt, Human
caggaacccaguggccaggga

SEQ ID NO: 353472 - RNA, 19 nt, Human
caggaaccccacccccagg

SEQ ID NO: 353473 - RNA, 21 nt, Human
caggaaccccagacccagggg

SEQ ID NO: 353474 - RNA, 32 nt, Human
caggaacccgaggggacaccagcucugcacaa

SEQ ID NO: 353475 - RNA, 22 nt, Human
caggaacccuccucgccugggg

SEQ ID NO: 353476 - RNA, 32 nt, Human
caggaacccuggagguugagguugcagugagc

SEQ ID NO: 353477 - RNA, 32 nt, Human
caggaacccuggucaggugagguaagagacug

SEQ ID NO: 353478 - RNA, 21 nt, Human
caggaacccuguacuccgggg

SEQ ID NO: 353479 - RNA, 24 nt, Human
caggaaccgcagggcgcucgggga

SEQ ID NO: 353480 - RNA, 19 nt, Human
caggaaccggggagccagg

SEQ ID NO: 353481 - RNA, 20 nt, Human
caggaaccucaugucgggga

SEQ ID NO: 353482 - RNA, 24 nt, Human
caggaaccucgugggcuccaggga

SEQ ID NO: 353483 - RNA, 20 nt, Human
caggaaccugcuccaggugg

SEQ ID NO: 353484 - RNA, 32 nt, Human
caggaaccuguggacuaggggugcagggacuu

SEQ ID NO: 353485 - RNA, 21 nt, Human
caggaaccuucgcagcccagg

SEQ ID NO: 353486 - RNA, 32 nt, Human
caggaacgagauggcgguucuccggaggcuga

SEQ ID NO: 353487 - RNA, 32 nt, Human
caggaacgagguggagagcaagacugacagag

SEQ ID NO: 353488 - RNA, 32 nt, Human
caggaacgccucaucucagcagccugggcucg

SEQ ID NO: 353489 - RNA, 32 nt, Human
caggaacggcugggacaguguccuaguggugg

SEQ ID NO: 353490 - RNA, 32 nt, Human
caggaacgugggcucuagacugugcauucagg

SEQ ID NO: 353491 - RNA, 32 nt, Human
caggaacuaucuaugguuaagacaagguggug

SEQ ID NO: 353492 - RNA, 21 nt, Human
caggaacucaggauccggggg

SEQ ID NO: 353493 - RNA, 22 nt, Human
caggaacucaggcuucagguga

SEQ ID NO: 353494 - RNA, 22 nt, Human
caggaacuccccaccccaggga

SEQ ID NO: 353495 - RNA, 22 nt, Human
caggaacuccucgguccagaga

SEQ ID NO: 353496 - RNA, 22 nt, Human
caggaacucgcggucggccggg

SEQ ID NO: 353497 - RNA, 32 nt, Human
caggaacucucaggacugcuccugagaaugcc

SEQ ID NO: 353498 - RNA, 32 nt, Human
caggaacugcauaaagguucuugaauucugca

SEQ ID NO: 353499 - RNA, 32 nt, Human
caggaacugcaugugucuucaugaccacuuuc

SEQ ID NO: 353500 - RNA, 32 nt, Human
caggaacugccuugguuuccccuuuuauuuuc

SEQ ID NO: 353501 - RNA, 32 nt, Human
caggaacugcugccacaaccucaggcugggca

SEQ ID NO: 353502 - RNA, 18 nt, Human
caggaacugcugccugag

SEQ ID NO: 353503 - RNA, 32 nt, Human
caggaacuggcuaugagcagaagguucgggcc

SEQ ID NO: 353504 - RNA, 32 nt, Human
caggaacuugagugacauugaccucauggcac

SEQ ID NO: 353505 - RNA, 32 nt, Human
caggaacuugcauaucuagagacagagacuga

SEQ ID NO: 353506 - RNA, 32 nt, Human
caggaacuuucgucucugccucucguggacug

SEQ ID NO: 353507 - RNA, 32 nt, Human
caggaagaaauguucaaacuuagacaaggaca

SEQ ID NO: 353508 - RNA, 21 nt, Human
caggaagaagcugaaucccug

SEQ ID NO: 353509 - RNA, 32 nt, Human
caggaagaaggaagcggcgccgccaucgccuc

SEQ ID NO: 353510 - RNA, 32 nt, Human
caggaagaaguacacauuuccacgaaugguuu

SEQ ID NO: 353511 - RNA, 18 nt, Human
caggaagaauugcuugaa

SEQ ID NO: 353512 - RNA, 32 nt, Human
caggaagacaagcuaugucugcuccaggcauc

SEQ ID NO: 353513 - RNA, 19 nt, Human
caggaagacaccccggccc

SEQ ID NO: 353514 - RNA, 22 nt, Human
caggaagacagucuuagcacug

SEQ ID NO: 353515 - RNA, 32 nt, Human
caggaagaccaagaagaaaaaccaccaucgug

SEQ ID NO: 353516 - RNA, 32 nt, Human
caggaagacugugaaaucuucaugcccaagga

SEQ ID NO: 353517 - RNA, 23 nt, Human
caggaagacuuggccaggccgug

SEQ ID NO: 353518 - RNA, 32 nt, Human
caggaagagaaaaugggcuaguggaagcccag

SEQ ID NO: 353519 - RNA, 32 nt, Human
caggaagagaagucugguuuguucaggaacau

SEQ ID NO: 353520 - RNA, 32 nt, Human
caggaagagaugaaaccaggaggcaggagaau

SEQ ID NO: 353521 - RNA, 32 nt, Human
caggaagagccagcaagagcaaggcaugggag

SEQ ID NO: 353522 - RNA, 32 nt, Human
caggaagagccccagccauggaacaccagcuc

SEQ ID NO: 353523 - RNA, 21 nt, Human
caggaagagcccucggcccug

SEQ ID NO: 353524 - RNA, 32 nt, Human
caggaagagcuuccccacucccaucccccaaa

SEQ ID NO: 353525 - RNA, 32 nt, Human
caggaagaggagaacugaagaguagaaguucc

SEQ ID NO: 353526 - RNA, 21 nt, Human
caggaagaggagccaggcccu

SEQ ID NO: 353527 - RNA, 32 nt, Human
caggaagauaaguguucguucuuuucugaaaa

SEQ ID NO: 353528 - RNA, 23 nt, Human
caggaagauacaucuugaugcca

SEQ ID NO: 353529 - RNA, 20 nt, Human
caggaagaucaccugagccc

SEQ ID NO: 353530 - RNA, 23 nt, Human
caggaagaucaccugagcccagg

SEQ ID NO: 353531 - RNA, 32 nt, Human
caggaagaucccuggagcucaggaguucaaga

SEQ ID NO: 353532 - RNA, 23 nt, Human
caggaagaucuacaagagcaagc

SEQ ID NO: 353533 - RNA, 32 nt, Human
caggaagauggcacacagccacaggugaaugg

SEQ ID NO: 353534 - RNA, 22 nt, Human
caggaagauggcuugaacccug

SEQ ID NO: 353535 - RNA, 32 nt, Human
caggaagaugugaaaauccccagcacucaucc

SEQ ID NO: 353536 - RNA, 32 nt, Human
caggaagauuccagagcacgcuguggcugaca

SEQ ID NO: 353537 - RNA, 19 nt, Human
caggaagauugcuucagcc

SEQ ID NO: 353538 - RNA, 21 nt, Human
caggaagauugcuugaacuca

SEQ ID NO: 353539 - RNA, 20 nt, Human
caggaagauugcuugaggcu

SEQ ID NO: 353540 - RNA, 32 nt, Human
caggaagcaagcggagguugcagugaguugag

SEQ ID NO: 353541 - RNA, 32 nt, Human
caggaagcaagugcuuuuccugccggucugca

SEQ ID NO: 353542 - RNA, 32 nt, Human
caggaagcagcacagacacagcauagcaggag

SEQ ID NO: 353543 - RNA, 32 nt, Human
caggaagcaggcucacaagagccagacaggcu

SEQ ID NO: 353544 - RNA, 32 nt, Human
caggaagcauggcaacaucaguuucuggggag

SEQ ID NO: 353545 - RNA, 32 nt, Human
caggaagccagcccgcaccccaacccccacca

SEQ ID NO: 353546 - RNA, 32 nt, Human
caggaagccaggcuggaggaagaggcgacaaa

SEQ ID NO: 353547 - RNA, 32 nt, Human
caggaagcccaggagccucacuggggcagaca

SEQ ID NO: 353548 - RNA, 32 nt, Human
caggaagcccugcugggcuagccugaggccua

SEQ ID NO: 353549 - RNA, 32 nt, Human
caggaagccggucaucacccagccucugagag

SEQ ID NO: 353550 - RNA, 20 nt, Human
caggaagccucguccaguga

SEQ ID NO: 353551 - RNA, 32 nt, Human
caggaagccugaggccacagcccagagcagcc

SEQ ID NO: 353552 - RNA, 23 nt, Human
caggaagccugcggaucugggaa

SEQ ID NO: 353553 - RNA, 32 nt, Human
caggaagcggggcagggaaggcuuccugaagc

SEQ ID NO: 353554 - RNA, 32 nt, Human
caggaagcgguggcucaugccuguaaucccag

SEQ ID NO: 353555 - RNA, 32 nt, Human
caggaagcuaugagggacccugugaguagcca

SEQ ID NO: 353556 - RNA, 32 nt, Human
caggaagcuauuggcuuccccuugucuguggu

SEQ ID NO: 353557 - RNA, 32 nt, Human
caggaagcucaucagaacaccucuugucccuu

SEQ ID NO: 353558 - RNA, 32 nt, Human
caggaagcuccagggcuggagcaccucugaga

SEQ ID NO: 353559 - RNA, 20 nt, Human
caggaagcugccaucaggga

SEQ ID NO: 353560 - RNA, 32 nt, Human
caggaagcugccgcaacguccagaccuggguc

SEQ ID NO: 353561 - RNA, 32 nt, Human
caggaagcuguggcaggagcaucuacacagcu

SEQ ID NO: 353562 - RNA, 32 nt, Human
caggaagcuuggagaggugugagagagacagg

SEQ ID NO: 353563 - RNA, 32 nt, Human
caggaagcuugguuccuguuguuccuggcaac

SEQ ID NO: 353564 - RNA, 32 nt, Human
caggaagcuugucacuggaagaucuuaaggua

SEQ ID NO: 353565 - RNA, 32 nt, Human
caggaaggaacacagggcuugcaagaucacgg

SEQ ID NO: 353566 - RNA, 32 nt, Human
caggaaggaagcuguugcuuucuuugagguga

SEQ ID NO: 353567 - RNA, 32 nt, Human
caggaaggaaguggggcccaagcaggcaauga

SEQ ID NO: 353568 - RNA, 32 nt, Human
caggaaggagagaagcagaaacaggaggacau

SEQ ID NO: 353569 - RNA, 32 nt, Human
caggaaggagagaggaagaggagcagaagggg

SEQ ID NO: 353570 - RNA, 32 nt, Human
caggaaggagcgaguaggagagagggagcgag

SEQ ID NO: 353571 - RNA, 19 nt, Human
caggaaggagcugccugga

SEQ ID NO: 353572 - RNA, 22 nt, Human
caggaaggagcugccuggaccc

SEQ ID NO: 353573 - RNA, 32 nt, Human
caggaaggaggaggggaagcaguggaugugga

SEQ ID NO: 353574 - RNA, 32 nt, Human
caggaaggaggcagagcuguccgugggaggug

SEQ ID NO: 353575 - RNA, 32 nt, Human
caggaaggaggggccccaggaggaugaaggga

SEQ ID NO: 353576 - RNA, 32 nt, Human
caggaaggaggucauggguucauuucauuuuu

SEQ ID NO: 353577 - RNA, 32 nt, Human
caggaaggagugggggacagggcuagaagcug

SEQ ID NO: 353578 - RNA, 32 nt, Human
caggaaggauccugccuugauuuuacuucaga

SEQ ID NO: 353579 - RNA, 32 nt, Human
caggaaggauggggugugccucaguuguuucc

SEQ ID NO: 353580 - RNA, 21 nt, Human
caggaaggcagcccaaucccu

SEQ ID NO: 353581 - RNA, 32 nt, Human
caggaaggcaggagacaggagacgggaccucu

SEQ ID NO: 353582 - RNA, 32 nt, Human
caggaaggcccaggcugggcaggcaauaccug

SEQ ID NO: 353583 - RNA, 32 nt, Human
caggaaggcggaggacgcaggagccaagagca

SEQ ID NO: 353584 - RNA, 32 nt, Human
caggaaggcugagaggagagagacuccagcug

SEQ ID NO: 353585 - RNA, 32 nt, Human
caggaaggcugaggcaggagaaucgcuugaac

SEQ ID NO: 353586 - RNA, 32 nt, Human
caggaaggcugaggcggcagaaucacuugaac

SEQ ID NO: 353587 - RNA, 32 nt, Human
caggaaggcugcagaaaguccuaggcucagau

SEQ ID NO: 353588 - RNA, 32 nt, Human
caggaagggcaggaaggagagccugcugcaug

SEQ ID NO: 353589 - RNA, 19 nt, Human
caggaagggcccugaggaa

SEQ ID NO: 353590 - RNA, 32 nt, Human
caggaagggcccuggccucuaaacuggcucga

SEQ ID NO: 353591 - RNA, 32 nt, Human
caggaagggcuggcaucggguuccuggcacag

SEQ ID NO: 353592 - RNA, 32 nt, Human
caggaaggggagugagaaagaggcugaaauua

SEQ ID NO: 353593 - RNA, 32 nt, Human
caggaaggggaguucuggguggaggaggagga

SEQ ID NO: 353594 - RNA, 32 nt, Human
caggaaggggcucccaagagcuccugguggug

SEQ ID NO: 353595 - RNA, 32 nt, Human
caggaagggggaaggaaggagggaauuucaca

SEQ ID NO: 353596 - RNA, 32 nt, Human
caggaagggggccuggaagaccaccugccccg

SEQ ID NO: 353597 - RNA, 32 nt, Human
caggaagggguuuuaaaauacuuccucugggc

SEQ ID NO: 353598 - RNA, 19 nt, Human
caggaaggguguuugcgca

SEQ ID NO: 353599 - RNA, 32 nt, Human
caggaagguagagagagaaaaagggagggaag

SEQ ID NO: 353600 - RNA, 30 nt, Human
caggaagguaguaacuuagaaagacuuacc

SEQ ID NO: 353601 - RNA, 32 nt, Human
caggaaggucucaaucuccugaccucgugaau

SEQ ID NO: 353602 - RNA, 24 nt, Human
caggaaggucugauuugcaggauu

SEQ ID NO: 353603 - RNA, 32 nt, Human
caggaagguggcccugaagaugcaccgaagac

SEQ ID NO: 353604 - RNA, 22 nt, Human
caggaagguggggaugggccgg

SEQ ID NO: 353605 - RNA, 32 nt, Human
caggaagguggugcugcaaaaccagauggccu

SEQ ID NO: 353606 - RNA, 32 nt, Human
caggaaguaaaguaggaacuguugugugagcg

SEQ ID NO: 353607 - RNA, 32 nt, Human
caggaagucaagaagcaguagagcccuauuua

SEQ ID NO: 353608 - RNA, 26 nt, Human
caggaagucacaguggugcccaggga

SEQ ID NO: 353609 - RNA, 24 nt, Human
caggaagucaccugccugaugcca

SEQ ID NO: 353610 - RNA, 32 nt, Human
caggaagucaccuguaccuggaugccaguacu

SEQ ID NO: 353611 - RNA, 32 nt, Human
caggaagucauggacacaguuauauugaaaga

SEQ ID NO: 353612 - RNA, 32 nt, Human
caggaagucauugucauucaggacacgggcuu

SEQ ID NO: 353613 - RNA, 20 nt, Human
caggaaguccccaugauguc

SEQ ID NO: 353614 - RNA, 25 nt, Human
caggaagugauuuucugccugagcu

SEQ ID NO: 353615 - RNA, 20 nt, Human
caggaagugcauucucuggu

SEQ ID NO: 353616 - RNA, 32 nt, Human
caggaagugcuagaaaaucacuuuaaggagga

SEQ ID NO: 353617 - RNA, 24 nt, Human
caggaaguggaggagccagaggug

SEQ ID NO: 353618 - RNA, 32 nt, Human
caggaaguggcagcauucugggccaagagaca

SEQ ID NO: 353619 - RNA, 21 nt, Human
caggaaguggucuuggugcca

SEQ ID NO: 353620 - RNA, 32 nt, Human
caggaaguggugguagagauggccucagaguc

SEQ ID NO: 353621 - RNA, 32 nt, Human
caggaagugucaggaagacgccuugcagaacu

SEQ ID NO: 353622 - RNA, 32 nt, Human
caggaaguucugccuuuucuuuucuuucggug

SEQ ID NO: 353623 - RNA, 32 nt, Human
caggaaguuuagggcaaggauuuguccuggag

SEQ ID NO: 353624 - RNA, 32 nt, Human
caggaaguuucuaggucuuucuagaacagcua

SEQ ID NO: 353625 - RNA, 32 nt, Human
caggaaguuugaaauagugacauaucauccac

SEQ ID NO: 353626 - RNA, 32 nt, Human
caggaauaaagaggaaguaacagugaaugcaa

SEQ ID NO: 353627 - RNA, 32 nt, Human
caggaauaaagugaauuggaagacagaaauaa

SEQ ID NO: 353628 - RNA, 32 nt, Human
caggaauaaccaggaaguuugcacauguucag

SEQ ID NO: 353629 - RNA, 32 nt, Human
caggaauagcuaaugacacagaaguagaucaa

SEQ ID NO: 353630 - RNA, 32 nt, Human
caggaauccagggauggagaacuggggagccu

SEQ ID NO: 353631 - RNA, 32 nt, Human
caggaauccagguaguggaggaugaucucaga

SEQ ID NO: 353632 - RNA, 32 nt, Human
caggaauccgggcauauuuugaggucauucca

SEQ ID NO: 353633 - RNA, 32 nt, Human
caggaaucucaggaugaaucagucuagaucga

SEQ ID NO: 353634 - RNA, 32 nt, Human
caggaaucugcacugggucucagugaugaacg

SEQ ID NO: 353635 - RNA, 32 nt, Human
caggaaucuuugucucuaucugugacacgcuc

SEQ ID NO: 353636 - RNA, 32 nt, Human
caggaaugaaucugcuacaauuccaccucauu

SEQ ID NO: 353637 - RNA, 32 nt, Human
caggaaugaguaucuaauagcuuuuguagaac

SEQ ID NO: 353638 - RNA, 20 nt, Human
caggaaugagucccuagggg

SEQ ID NO: 353639 - RNA, 20 nt, Human
caggaaugccacuccagggg

SEQ ID NO: 353640 - RNA, 30 nt, Human
caggaaugcccgagaucuggcaccugagca

SEQ ID NO: 353641 - RNA, 32 nt, Human
caggaaugccugagaugucuggcuauuccucg

SEQ ID NO: 353642 - RNA, 25 nt, Human
caggaaugcugccuuccuucagccc

SEQ ID NO: 353643 - RNA, 32 nt, Human
caggaaugcugugugcuuguuccaaaugagca

SEQ ID NO: 353644 - RNA, 30 nt, Human
caggaauggccgcagagguggcccugagug

SEQ ID NO: 353645 - RNA, 32 nt, Human
caggaauggggaaaugugacaccaccauccug

SEQ ID NO: 353646 - RNA, 32 nt, Human
caggaauggugagaugaacaugcaaguggaag

SEQ ID NO: 353647 - RNA, 23 nt, Human
caggaaugguuuaucugaugcca

SEQ ID NO: 353648 - RNA, 32 nt, Human
caggaaugugcuggcacugaugacacaguaau

SEQ ID NO: 353649 - RNA, 21 nt, Human
caggaauuaaauaguuuggaa

SEQ ID NO: 353650 - RNA, 31 nt, Human
caggaauuagucaauacauguugaaauguuu

SEQ ID NO: 353651 - RNA, 20 nt, Human
caggaauucaacaccagccu

SEQ ID NO: 353652 - RNA, 32 nt, Human
caggaauucacaacuagccugggaaacccagg

SEQ ID NO: 353653 - RNA, 30 nt, Human
caggaauucagcaauaaaugaaacaagacc

SEQ ID NO: 353654 - RNA, 32 nt, Human
caggaauucuauuuucgggagaugucuauugc

SEQ ID NO: 353655 - RNA, 32 nt, Human
caggaauucuggagaccuguguaaaagcagac

SEQ ID NO: 353656 - RNA, 32 nt, Human
caggaauuucuucagccucuguaaguggccuu

SEQ ID NO: 353657 - RNA, 32 nt, Human
caggaauuugagaguucacagaaggaucgugu

SEQ ID NO: 353658 - RNA, 32 nt, Human
caggacaaaccuggaugccaccuggagcugcu

SEQ ID NO: 353659 - RNA, 32 nt, Human
caggacaaacuagacggccguagaaaagauuu

SEQ ID NO: 353660 - RNA, 21 nt, Human
caggacaaagagaaaccugag

SEQ ID NO: 353661 - RNA, 32 nt, Human
caggacaaagggagggagcaagcccuacucgg

SEQ ID NO: 353662 - RNA, 21 nt, Human
caggacaacacuucuacugaa

SEQ ID NO: 353663 - RNA, 22 nt, Human
caggacaacuggccugccugag

SEQ ID NO: 353664 - RNA, 17 nt, Human
caggacaagccaccuga

SEQ ID NO: 353665 - RNA, 18 nt, Human
caggacaagcugacugaa

SEQ ID NO: 353666 - RNA, 24 nt, Human
caggacaaggaggccucccuggga

SEQ ID NO: 353667 - RNA, 32 nt, Human
caggacaauuucucccccuccaggggcuccag

SEQ ID NO: 353668 - RNA, 32 nt, Human
caggacacaagucuccaaagugccugugaggg

SEQ ID NO: 353669 - RNA, 32 nt, Human
caggacacagagugggagggagacugaugcag

SEQ ID NO: 353670 - RNA, 32 nt, Human
caggacacagcaggcuggaguugguguuagau

SEQ ID NO: 353671 - RNA, 24 nt, Human
caggacacagucuagagucuagua

SEQ ID NO: 353672 - RNA, 32 nt, Human
caggacacauccucaaauccugccagcauuug

SEQ ID NO: 353673 - RNA, 32 nt, Human
caggacaccagccuggugcccauccucccgac

SEQ ID NO: 353674 - RNA, 32 nt, Human
caggacacucaagcucuggcagaggaaggcca

SEQ ID NO: 353675 - RNA, 32 nt, Human
caggacacugaggagcucugaacccagcccac

SEQ ID NO: 353676 - RNA, 26 nt, Human
caggacacugccuuggguggaccagg

SEQ ID NO: 353677 - RNA, 22 nt, Human
caggacacugccuuugcugccu

SEQ ID NO: 353678 - RNA, 32 nt, Human
caggacacuuccugugugccugcaguugucag

SEQ ID NO: 353679 - RNA, 32 nt, Human
caggacacuuccuguuuacaggagacuauaaa

SEQ ID NO: 353680 - RNA, 25 nt, Human
caggacacuugaucccaaaaccccu

SEQ ID NO: 353681 - RNA, 32 nt, Human
caggacagaacaguguuuaauguaaaguuugu

SEQ ID NO: 353682 - RNA, 32 nt, Human
caggacagaagcaacaaggacaguaacacaca

SEQ ID NO: 353683 - RNA, 32 nt, Human
caggacagacggcguggggagcacagaggagg

SEQ ID NO: 353684 - RNA, 32 nt, Human
caggacagagagugcacaaacuacccagcaca

SEQ ID NO: 353685 - RNA, 32 nt, Human
caggacagagcagccaaugaaaacggccgccu

SEQ ID NO: 353686 - RNA, 32 nt, Human
caggacagaggcaggucaggaggcagacacgc

SEQ ID NO: 353687 - RNA, 32 nt, Human
caggacagagguggggaaguuguccugaggaa

SEQ ID NO: 353688 - RNA, 24 nt, Human
caggacagaucacuugaggucagg

SEQ ID NO: 353689 - RNA, 32 nt, Human
caggacagaugaggcuuuguguccuuaugaga

SEQ ID NO: 353690 - RNA, 32 nt, Human
caggacagccuggcacagaggcagagucuaga

SEQ ID NO: 353691 - RNA, 21 nt, Human
caggacagccuuccuccugaa

SEQ ID NO: 353692 - RNA, 17 nt, Human
caggacagcuuccagcc

SEQ ID NO: 353693 - RNA, 32 nt, Human
caggacagcuucgggaguugagugucaagccc

SEQ ID NO: 353694 - RNA, 32 nt, Human
caggacaggagagaacuguucagugugauaca

SEQ ID NO: 353695 - RNA, 32 nt, Human
caggacaggcucuggagggaaaagccagagag

SEQ ID NO: 353696 - RNA, 19 nt, Human
caggacaggcuggcaaggg

SEQ ID NO: 353697 - RNA, 32 nt, Human
caggacagggaagggagcaggagccugcaguc

SEQ ID NO: 353698 - RNA, 32 nt, Human
caggacagggccugggaagugagugaugcaau

SEQ ID NO: 353699 - RNA, 32 nt, Human
caggacagggcuagcagaugaagagaggagga

SEQ ID NO: 353700 - RNA, 32 nt, Human
caggacaggguagcuguuuggcccagcccaga

SEQ ID NO: 353701 - RNA, 32 nt, Human
caggacaguaaaggagaugcugugcugccuac

SEQ ID NO: 353702 - RNA, 32 nt, Human
caggacaguccacccgcccuguuggcacacuc

SEQ ID NO: 353703 - RNA, 32 nt, Human
caggacaguggcagaggcugauggaggaggga

SEQ ID NO: 353704 - RNA, 32 nt, Human
caggacaguggugguuucagacuccucuaggu

SEQ ID NO: 353705 - RNA, 23 nt, Human
caggacaguguccccccgaguga

SEQ ID NO: 353706 - RNA, 31 nt, Human
caggacauauuuucuuuacuguaaaugacca

SEQ ID NO: 353707 - RNA, 20 nt, Human
caggacauccacccugagaa

SEQ ID NO: 353708 - RNA, 32 nt, Human
caggacaugauggcucacaccuguaaucccag

SEQ ID NO: 353709 - RNA, 32 nt, Human
caggacaugccguggcccacacaugcccuucu

SEQ ID NO: 353710 - RNA, 32 nt, Human
caggacauggcaggcacaggcgcugcuuuguc

SEQ ID NO: 353711 - RNA, 32 nt, Human
caggacaugguggcucauguacgccuguaguc

SEQ ID NO: 353712 - RNA, 32 nt, Human
caggacauuguaucugcucuucccucuguaag

SEQ ID NO: 353713 - RNA, 21 nt, Human
caggaccaaagggugcaguga

SEQ ID NO: 353714 - RNA, 32 nt, Human
caggaccaaguccccagaauucucuuguuuuu

SEQ ID NO: 353715 - RNA, 32 nt, Human
caggaccaaugccugcaaaccuaggagagagg

SEQ ID NO: 353716 - RNA, 32 nt, Human
caggaccacagccuggugaguccccgggcagc

SEQ ID NO: 353717 - RNA, 32 nt, Human
caggaccacugcauuuaccagccugauacugc

SEQ ID NO: 353718 - RNA, 32 nt, Human
caggaccacuggcugccaacuccugccgcccu

SEQ ID NO: 353719 - RNA, 32 nt, Human
caggaccagacaccuucauccuguccuugaag

SEQ ID NO: 353720 - RNA, 32 nt, Human
caggaccagaugauaccaugaagagaaguuua

SEQ ID NO: 353721 - RNA, 32 nt, Human
caggaccagcaguucugcaggggcgugcuggg

SEQ ID NO: 353722 - RNA, 32 nt, Human
caggaccagccagaccagcagagcagggagcc

SEQ ID NO: 353723 - RNA, 32 nt, Human
caggaccagccuggccagcauggugaaacccc

SEQ ID NO: 353724 - RNA, 32 nt, Human
caggaccaggauucagcagaguccuccuauuu

SEQ ID NO: 353725 - RNA, 20 nt, Human
caggaccaggccuccucuuc

SEQ ID NO: 353726 - RNA, 19 nt, Human
caggaccagggcgcaccgg

SEQ ID NO: 353727 - RNA, 32 nt, Human
caggaccagggucguugacagcagguucugca

SEQ ID NO: 353728 - RNA, 32 nt, Human
caggaccaguggaugaaaggcaagguaaagag

SEQ ID NO: 353729 - RNA, 32 nt, Human
caggaccaugggccugugcuguuuacagaacc

SEQ ID NO: 353730 - RNA, 32 nt, Human
caggaccauucaggcuguugacaagucaacuc

SEQ ID NO: 353731 - RNA, 32 nt, Human
caggaccauugacaccagaaauggaggcacgg

SEQ ID NO: 353732 - RNA, 32 nt, Human
caggaccauugucccaaagucuagagucuuua

SEQ ID NO: 353733 - RNA, 32 nt, Human
caggacccaagcccuggcuggacucagcacag

SEQ ID NO: 353734 - RNA, 32 nt, Human
caggacccaagugugaacaacacucagcccgc

SEQ ID NO: 353735 - RNA, 32 nt, Human
caggacccaccacuggaagcaggauggagcug

SEQ ID NO: 353736 - RNA, 32 nt, Human
caggacccaccgcagcccccugggcagucucc

SEQ ID NO: 353737 - RNA, 32 nt, Human
caggacccacgcagccacccagccucagcacu

SEQ ID NO: 353738 - RNA, 32 nt, Human
caggacccagaacauucauccguaaauggaau

SEQ ID NO: 353739 - RNA, 32 nt, Human
caggacccagagcuguuccugcuuugaguuuc

SEQ ID NO: 353740 - RNA, 32 nt, Human
caggacccaggccgcagagggagcaggaagag

SEQ ID NO: 353741 - RNA, 20 nt, Human
caggacccauccucuugggu

SEQ ID NO: 353742 - RNA, 32 nt, Human
caggaccccaccacugcacuccagccuggaug

SEQ ID NO: 353743 - RNA, 32 nt, Human
caggaccccaccugacaggcucugguccaaga

SEQ ID NO: 353744 - RNA, 32 nt, Human
caggacccccuuccccuacccccuccucucug

SEQ ID NO: 353745 - RNA, 32 nt, Human
caggaccccggagaguccuggcaugguaucuc

SEQ ID NO: 353746 - RNA, 18 nt, Human
caggaccccuuccugcca

SEQ ID NO: 353747 - RNA, 21 nt, Human
caggacccgagccuccagccu

SEQ ID NO: 353748 - RNA, 21 nt, Human
caggacccggccgccagccuc

SEQ ID NO: 353749 - RNA, 32 nt, Human
caggacccugcagccacccgacaucuauagca

SEQ ID NO: 353750 - RNA, 32 nt, Human
caggacccuggaccagggcggugcagggcgca

SEQ ID NO: 353751 - RNA, 32 nt, Human
caggaccgaccucccuugccaugauaaccacc

SEQ ID NO: 353752 - RNA, 32 nt, Human
caggaccgagcggggagggaaagggaaaacgg

SEQ ID NO: 353753 - RNA, 32 nt, Human
caggaccuacaaccacacugaaggcuccagug

SEQ ID NO: 353754 - RNA, 32 nt, Human
caggaccuagagaugugccuggaaccacuccu

SEQ ID NO: 353755 - RNA, 32 nt, Human
caggaccucacagaaacaagggcuggguugag

SEQ ID NO: 353756 - RNA, 32 nt, Human
caggaccucacuuccuccucugccccugcccc

SEQ ID NO: 353757 - RNA, 32 nt, Human
caggaccuccauucugucaugacugacaccau

SEQ ID NO: 353758 - RNA, 22 nt, Human
caggaccucccagccacugccu

SEQ ID NO: 353759 - RNA, 32 nt, Human
caggaccuccucucuggcaguaucauggccac

SEQ ID NO: 353760 - RNA, 32 nt, Human
caggaccuccuggacguaagggugugaaagga

SEQ ID NO: 353761 - RNA, 32 nt, Human
caggaccucuccuugcuacucuucccaaaguc

SEQ ID NO: 353762 - RNA, 20 nt, Human
caggaccugauggcuauaga

SEQ ID NO: 353763 - RNA, 32 nt, Human
caggaccugcagcccucacgggggcuggggau

SEQ ID NO: 353764 - RNA, 32 nt, Human
caggaccugccugaccugccagugaugccaag

SEQ ID NO: 353765 - RNA, 32 nt, Human
caggaccugccuggagguucucccugggggug

SEQ ID NO: 353766 - RNA, 32 nt, Human
caggaccugccuguagcccacucugcucgccu

SEQ ID NO: 353767 - RNA, 23 nt, Human
caggaccugccuuaacugcuccu

SEQ ID NO: 353768 - RNA, 21 nt, Human
caggaccugcuccugccugaa

SEQ ID NO: 353769 - RNA, 19 nt, Human
caggaccugcuucgcugcc

SEQ ID NO: 353770 - RNA, 18 nt, Human
caggaccuggaguuauca

SEQ ID NO: 353771 - RNA, 24 nt, Human
caggaccuggaugacacccgccuc

SEQ ID NO: 353772 - RNA, 21 nt, Human
caggaccuggcccuucugccu

SEQ ID NO: 353773 - RNA, 32 nt, Human
caggaccugggcaaagugcagccgugcacccu

SEQ ID NO: 353774 - RNA, 32 nt, Human
caggaccugggcccgguucagcuccccacaag

SEQ ID NO: 353775 - RNA, 32 nt, Human
caggaccugggcuggccucuccaccuccccua

SEQ ID NO: 353776 - RNA, 32 nt, Human
caggaccuggggacagaaguagagaaaacacu

SEQ ID NO: 353777 - RNA, 32 nt, Human
caggaccuugccucgaauugucuuccaguauu

SEQ ID NO: 353778 - RNA, 32 nt, Human
caggacgaacaauauccagauccagagccggg

SEQ ID NO: 353779 - RNA, 32 nt, Human
caggacgaccugggaaggucacccccaucgcc

SEQ ID NO: 353780 - RNA, 32 nt, Human
caggacgagcuacugcuuuggagcgaggguuu

SEQ ID NO: 353781 - RNA, 32 nt, Human
caggacgaugcaagauuucaucacacuacuca

SEQ ID NO: 353782 - RNA, 19 nt, Human
caggacgcccgccggaccc

SEQ ID NO: 353783 - RNA, 32 nt, Human
caggacgccuggucugccuuguggguccugga

SEQ ID NO: 353784 - RNA, 32 nt, Human
caggacgcgucugggcuccccuaggcaaaggu

SEQ ID NO: 353785 - RNA, 18 nt, Human
caggacggaucuccugca

SEQ ID NO: 353786 - RNA, 32 nt, Human
caggacggcaggggcacugugaggcuuuucuu

SEQ ID NO: 353787 - RNA, 32 nt, Human
caggacgggacagcccgacuccauccucccac

SEQ ID NO: 353788 - RNA, 32 nt, Human
caggacgggcagggcuuccaggagagcucaag

SEQ ID NO: 353789 - RNA, 32 nt, Human
caggacgguagaaauuuucugcaagaaagaau

SEQ ID NO: 353790 - RNA, 32 nt, Human
caggacgugaucugaaaacauguagagaagau

SEQ ID NO: 353791 - RNA, 32 nt, Human
caggacguggcagcugguuggacgaggggagc

SEQ ID NO: 353792 - RNA, 32 nt, Human
caggacguuuacugcugcuuggggccagggca

SEQ ID NO: 353793 - RNA, 32 nt, Human
caggacuaccauugaccucagagcuguacccc

SEQ ID NO: 353794 - RNA, 32 nt, Human
caggacuagagagcgagccgcaaggaagucgg

SEQ ID NO: 353795 - RNA, 32 nt, Human
caggacuaucuauaauucacauaggagagaca

SEQ ID NO: 353796 - RNA, 32 nt, Human
caggacuauucuguaagaguccagagcccacc

SEQ ID NO: 353797 - RNA, 32 nt, Human
caggacucaccaucucugccucccaugaggcu

SEQ ID NO: 353798 - RNA, 32 nt, Human
caggacucacuggauagauguuauucaacucc

SEQ ID NO: 353799 - RNA, 32 nt, Human
caggacucacuggauagauguuauucgacuac

SEQ ID NO: 353800 - RNA, 32 nt, Human
caggacucagggacucaggccagucacccugu

SEQ ID NO: 353801 - RNA, 19 nt, Human
caggacucauccuaagaag

SEQ ID NO: 353802 - RNA, 32 nt, Human
caggacucaucucccuuccuucucaggggguc

SEQ ID NO: 353803 - RNA, 21 nt, Human
caggacuccacugaugagaga

SEQ ID NO: 353804 - RNA, 21 nt, Human
caggacuccagaggcuggaaa

SEQ ID NO: 353805 - RNA, 18 nt, Human
caggacuccagaugagga

SEQ ID NO: 353806 - RNA, 32 nt, Human
caggacuccagccuaugcagagcccagagugg

SEQ ID NO: 353807 - RNA, 32 nt, Human
caggacuccagccuggccgccggcgcccgcag

SEQ ID NO: 353808 - RNA, 32 nt, Human
caggacuccagcgucaggauguugccacuugg

SEQ ID NO: 353809 - RNA, 21 nt, Human
caggacuccaggcgagggaag

SEQ ID NO: 353810 - RNA, 22 nt, Human
caggacuccaguggaagugaaa

SEQ ID NO: 353811 - RNA, 32 nt, Human
caggacucccacuauugccucugugauuggcc

SEQ ID NO: 353812 - RNA, 19 nt, Human
caggacucccaggcagaaa

SEQ ID NO: 353813 - RNA, 32 nt, Human
caggacucccauccucacccugacuuagacug

SEQ ID NO: 353814 - RNA, 32 nt, Human
caggacuccugggacaucccaugugugacccc

SEQ ID NO: 353815 - RNA, 21 nt, Human
caggacuccugggccuaagaa

SEQ ID NO: 353816 - RNA, 24 nt, Human
caggacuccugggucccugggaaa

SEQ ID NO: 353817 - RNA, 25 nt, Human
caggacucgagcgauccucccgccu

SEQ ID NO: 353818 - RNA, 32 nt, Human
caggacucgagcgauccucccgccucagccuc

SEQ ID NO: 353819 - RNA, 32 nt, Human
caggacucgauuuuagcuaaugcgcuguguca

SEQ ID NO: 353820 - RNA, 32 nt, Human
caggacucgcugccuuucuuucccgucagaaa

SEQ ID NO: 353821 - RNA, 32 nt, Human
caggacucggccaccugcccuuccugcaccga

SEQ ID NO: 353822 - RNA, 23 nt, Human
caggacucguucuacugccugga

SEQ ID NO: 353823 - RNA, 23 nt, Human
caggacucucccuacugccugag

SEQ ID NO: 353824 - RNA, 32 nt, Human
caggacucucuggccuucuguggccugcaaug

SEQ ID NO: 353825 - RNA, 32 nt, Human
caggacucugagccauucucuccccuccucug

SEQ ID NO: 353826 - RNA, 32 nt, Human
caggacucugcucuccugcggccaugggccag

SEQ ID NO: 353827 - RNA, 32 nt, Human
caggacucuggcuucucuccucagacuucuau

SEQ ID NO: 353828 - RNA, 32 nt, Human
caggacucuuccccaucaucccuuccauugcc

SEQ ID NO: 353829 - RNA, 32 nt, Human
caggacugaauggcagagcuagcuuugcagga

SEQ ID NO: 353830 - RNA, 19 nt, Human
caggacugaccauggcucc

SEQ ID NO: 353831 - RNA, 32 nt, Human
caggacugacucuccaccauaaaacuggaagc

SEQ ID NO: 353832 - RNA, 32 nt, Human
caggacugagccagccucaggccagggcggga

SEQ ID NO: 353833 - RNA, 32 nt, Human
caggacugagccuggagagagaaguugcuuga

SEQ ID NO: 353834 - RNA, 23 nt, Human
caggacugaggccagcccugggg

SEQ ID NO: 353835 - RNA, 32 nt, Human
caggacugaucugccauuuucaccucuaaauc

SEQ ID NO: 353836 - RNA, 32 nt, Human
caggacugcaccuuagggcaguguccgucagu

SEQ ID NO: 353837 - RNA, 32 nt, Human
caggacugcacgguuuaacacagcagaguaca

SEQ ID NO: 353838 - RNA, 32 nt, Human
caggacugcacucucuucucggcugcacuaaa

SEQ ID NO: 353839 - RNA, 20 nt, Human
caggacugcagagucugauc

SEQ ID NO: 353840 - RNA, 32 nt, Human
caggacugcagcuccagccucuucaggcccag

SEQ ID NO: 353841 - RNA, 32 nt, Human
caggacugccugggcccugcuaggccugcuca

SEQ ID NO: 353842 - RNA, 18 nt, Human
caggacugcuccugagaa

SEQ ID NO: 353843 - RNA, 32 nt, Human
caggacugcugaccccaggccuggugauucug

SEQ ID NO: 353844 - RNA, 32 nt, Human
caggacugcuucugaaugcugcuacuugauuu

SEQ ID NO: 353845 - RNA, 32 nt, Human
caggacuggaagggaccugcagccugcagacc

SEQ ID NO: 353846 - RNA, 32 nt, Human
caggacuggagaggaggaggggguccccuaug

SEQ ID NO: 353847 - RNA, 24 nt, Human
caggacuggaucccauugccugga

SEQ ID NO: 353848 - RNA, 32 nt, Human
caggacuggcucccccaucugcuccaagggag

SEQ ID NO: 353849 - RNA, 32 nt, Human
caggacugggaaacuguguugaagcuccugac

SEQ ID NO: 353850 - RNA, 32 nt, Human
caggacugggcccugauugauaacaccucagc

SEQ ID NO: 353851 - RNA, 32 nt, Human
caggacugggucagugauggcaacaggauggc

SEQ ID NO: 353852 - RNA, 32 nt, Human
caggacugucacacaaggcuugagaagccccc

SEQ ID NO: 353853 - RNA, 32 nt, Human
caggacugugaagaaagucauaguagcagguu

SEQ ID NO: 353854 - RNA, 32 nt, Human
caggacugugacacugcacuccagccugggca

SEQ ID NO: 353855 - RNA, 32 nt, Human
caggacugugcuugguacuugaucucaugcga

SEQ ID NO: 353856 - RNA, 32 nt, Human
caggacugugugugaauguguauguauacuua

SEQ ID NO: 353857 - RNA, 32 nt, Human
caggacuguugaugaaagggacagauugagga

SEQ ID NO: 353858 - RNA, 32 nt, Human
caggacuguuguacuagauguucuuaggaaau

SEQ ID NO: 353859 - RNA, 32 nt, Human
caggacuuaaaaccagagccugcccacauccc

SEQ ID NO: 353860 - RNA, 32 nt, Human
caggacuucaagaccagccuaggcaacauggu

SEQ ID NO: 353861 - RNA, 32 nt, Human
caggacuucccaggaccccuuuugucucuggg

SEQ ID NO: 353862 - RNA, 32 nt, Human
caggacuuccucccugccucccugcaccucug

SEQ ID NO: 353863 - RNA, 32 nt, Human
caggacuucgaaccucgcccccugcacgaccc

SEQ ID NO: 353864 - RNA, 32 nt, Human
caggacuucuaagaaaggccuggugcaggcgg

SEQ ID NO: 353865 - RNA, 21 nt, Human
caggacuucucuccugaagaa

SEQ ID NO: 353866 - RNA, 32 nt, Human
caggacuucugggcauggcagucucaaaaaug

SEQ ID NO: 353867 - RNA, 24 nt, Human
caggacuugagaacaccugugccu

SEQ ID NO: 353868 - RNA, 32 nt, Human
caggacuugcacacagggaggcuguagccagg

SEQ ID NO: 353869 - RNA, 32 nt, Human
caggacuuggccucacccucuggcugaggagc

SEQ ID NO: 353870 - RNA, 32 nt, Human
caggacuugggaaacagucacugugaaaugcg

SEQ ID NO: 353871 - RNA, 32 nt, Human
caggacuugggaagcagucacugugaaaugcg

SEQ ID NO: 353872 - RNA, 32 nt, Human
caggacuuguauuagcagguucuggcuagaga

SEQ ID NO: 353873 - RNA, 32 nt, Human
caggacuuugcaagagauggagacagguuagg

SEQ ID NO: 353874 - RNA, 32 nt, Human
caggacuuugggaggccaaggcgggcagauca

SEQ ID NO: 353875 - RNA, 32 nt, Human
caggacuuugggaggccaaggucagcagauca

SEQ ID NO: 353876 - RNA, 32 nt, Human
caggacuuugggaggcugaggaaagcagauca

SEQ ID NO: 353877 - RNA, 32 nt, Human
caggagaaaaaccauaugaauguaaugaacgu

SEQ ID NO: 353878 - RNA, 32 nt, Human
caggagaaaaaccuuaugaauguaaugaaugu

SEQ ID NO: 353879 - RNA, 32 nt, Human
caggagaaaaccuggagcuacaguguccccca

SEQ ID NO: 353880 - RNA, 32 nt, Human
caggagaaaccagcuaagaccugcaggcugca

SEQ ID NO: 353881 - RNA, 19 nt, Human
caggagaaacugggccagg

SEQ ID NO: 353882 - RNA, 32 nt, Human
caggagaaaggccuuauggugcagugaauaug

SEQ ID NO: 353883 - RNA, 32 nt, Human
caggagaaauuguagugaugaaaugugcaguc

SEQ ID NO: 353884 - RNA, 32 nt, Human
caggagaaccggggcuggaggagcggcaagag

SEQ ID NO: 353885 - RNA, 32 nt, Human
caggagaaccuacagauuggaagcagcccaca

SEQ ID NO: 353886 - RNA, 21 nt, Human
caggagaacugaggcaugaaa

SEQ ID NO: 353887 - RNA, 32 nt, Human
caggagaacugauucuguggauggaugugauu

SEQ ID NO: 353888 - RNA, 32 nt, Human
caggagaacuggggcuggucucuugucagaua

SEQ ID NO: 353889 - RNA, 32 nt, Human
caggagaagacugugaggccaccauuugggcc

SEQ ID NO: 353890 - RNA, 22 nt, Human
caggagaagcacccccagggca

SEQ ID NO: 353891 - RNA, 32 nt, Human
caggagaagcagaggaagaggcuuccaucccu

SEQ ID NO: 353892 - RNA, 19 nt, Human
caggagaagcaggcgccag

SEQ ID NO: 353893 - RNA, 19 nt, Human
caggagaagcugggccagg

SEQ ID NO: 353894 - RNA, 32 nt, Human
caggagaagggcccagacacucccuccaguga

SEQ ID NO: 353895 - RNA, 32 nt, Human
caggagaagggggcaucacagagcugaugguc

SEQ ID NO: 353896 - RNA, 32 nt, Human
caggagaagggugggaacccgggaggcagagc

SEQ ID NO: 353897 - RNA, 32 nt, Human
caggagaagguaacauuggaguccugguuuga

SEQ ID NO: 353898 - RNA, 32 nt, Human
caggagaagguggaagagaaagggugggcgug

SEQ ID NO: 353899 - RNA, 32 nt, Human
caggagaagugaagauguaacauguuaucugu

SEQ ID NO: 353900 - RNA, 32 nt, Human
caggagaaguugaggggagcaugcuucccugc

SEQ ID NO: 353901 - RNA, 32 nt, Human
caggagaaucacaucaaccugggaggcggagg

SEQ ID NO: 353902 - RNA, 32 nt, Human
caggagaaucacuugaaccugggagacagagg

SEQ ID NO: 353903 - RNA, 32 nt, Human
caggagaaucacuugaccucaggaggcggagg

SEQ ID NO: 353904 - RNA, 32 nt, Human
caggagaaucacuuggaccugggaggcagagg

SEQ ID NO: 353905 - RNA, 32 nt, Human
caggagaaucacuuguaccugggaagcgcagg

SEQ ID NO: 353906 - RNA, 24 nt, Human
caggagaaucagagguugcaguga

SEQ ID NO: 353907 - RNA, 18 nt, Human
caggagaaucgcuugaac

SEQ ID NO: 353908 - RNA, 32 nt, Human
caggagaaucgcuugaaccugggaagccgaag

SEQ ID NO: 353909 - RNA, 32 nt, Human
caggagaaucgcuugaacugaggcagaggcua

SEQ ID NO: 353910 - RNA, 23 nt, Human
caggagaaugagacuccagcaca

SEQ ID NO: 353911 - RNA, 32 nt, Human
caggagaauggugcggagcuugcagugagccg

SEQ ID NO: 353912 - RNA, 21 nt, Human
caggagaauuaggagagagug

SEQ ID NO: 353913 - RNA, 20 nt, Human
caggagaauugcuugaaacc

SEQ ID NO: 353914 - RNA, 21 nt, Human
caggagaauugcuugaacaca

SEQ ID NO: 353915 - RNA, 19 nt, Human
caggagaauugcuugaacc

SEQ ID NO: 353916 - RNA, 20 nt, Human
caggagaauugcuugaacca

SEQ ID NO: 353917 - RNA, 20 nt, Human
caggagaauugcuugaaccc

SEQ ID NO: 353918 - RNA, 21 nt, Human
caggagaauugcuugaaccca

SEQ ID NO: 353919 - RNA, 20 nt, Human
caggagaauugcuugaaccg

SEQ ID NO: 353920 - RNA, 21 nt, Human
caggagaauugcuugaacuca

SEQ ID NO: 353921 - RNA, 20 nt, Human
caggagaauugcuugaaucc

SEQ ID NO: 353922 - RNA, 21 nt, Human
caggagaauugcuugaaucca

SEQ ID NO: 353923 - RNA, 20 nt, Human
caggagaauugcuugaccca

SEQ ID NO: 353924 - RNA, 19 nt, Human
caggagaauugcuugagcc

SEQ ID NO: 353925 - RNA, 21 nt, Human
caggagaauugcuugagucca

SEQ ID NO: 353926 - RNA, 32 nt, Human
caggagaauugggugacugcaguuuauggugc

SEQ ID NO: 353927 - RNA, 20 nt, Human
caggagacaaaagagcagug

SEQ ID NO: 353928 - RNA, 32 nt, Human
caggagaccagccugggcaacauagcaaaacc

SEQ ID NO: 353929 - RNA, 32 nt, Human
caggagaccagcugccuuugagcagggagucu

SEQ ID NO: 353930 - RNA, 32 nt, Human
caggagaccagcugcucuagaagagccuggac

SEQ ID NO: 353931 - RNA, 32 nt, Human
caggagaccauagacagacugaccucacagcu

SEQ ID NO: 353932 - RNA, 32 nt, Human
caggagacccagaccuagaacuacccagagca

SEQ ID NO: 353933 - RNA, 32 nt, Human
caggagaccgaugccauuucuuuuccucauaa

SEQ ID NO: 353934 - RNA, 32 nt, Human
caggagaccgugcaggcucugaagggagcucc

SEQ ID NO: 353935 - RNA, 20 nt, Human
caggagaccuggagcugagg

SEQ ID NO: 353936 - RNA, 32 nt, Human
caggagacgcagugucagagcguguggguggc

SEQ ID NO: 353937 - RNA, 22 nt, Human
caggagacggagguuacaguga

SEQ ID NO: 353938 - RNA, 22 nt, Human
caggagacggagguugcuguga

SEQ ID NO: 353939 - RNA, 32 nt, Human
caggagacgggacacgccacacccagcaggca

SEQ ID NO: 353940 - RNA, 21 nt, Human
caggagacggggccccugccu

SEQ ID NO: 353941 - RNA, 32 nt, Human
caggagacguggcuguccucagccuggcagug

SEQ ID NO: 353942 - RNA, 32 nt, Human
caggagacguuggcuugggccugcuguguugc

SEQ ID NO: 353943 - RNA, 32 nt, Human
caggagagaaaccauaugaauguaaugaaugu

SEQ ID NO: 353944 - RNA, 32 nt, Human
caggagagaagaaaggaaggaagaaaaggaua

SEQ ID NO: 353945 - RNA, 32 nt, Human
caggagagaggacccauuagcuggcagaccca

SEQ ID NO: 353946 - RNA, 23 nt, Human
caggagagaggcugcccaacgca

SEQ ID NO: 353947 - RNA, 32 nt, Human
caggagagauggcugaaaaggugaucaucuug

SEQ ID NO: 353948 - RNA, 32 nt, Human
caggagagauucaacagcauuaccucagcuua

SEQ ID NO: 353949 - RNA, 32 nt, Human
caggagagccagccauugucuccaguacuugc

SEQ ID NO: 353950 - RNA, 32 nt, Human
caggagagccaggggaaaagugccucauaguu

SEQ ID NO: 353951 - RNA, 21 nt, Human
caggagagccagggguccagu

SEQ ID NO: 353952 - RNA, 32 nt, Human
caggagagccugagggcugaggcccagcguga

SEQ ID NO: 353953 - RNA, 18 nt, Human
caggagagccugggccag

SEQ ID NO: 353954 - RNA, 32 nt, Human
caggagagcguccggauucccugcucuagguc

SEQ ID NO: 353955 - RNA, 32 nt, Human
caggagaggaagagauggugccuacaaccuga

SEQ ID NO: 353956 - RNA, 32 nt, Human
caggagaggaagcaccauuagaacaacuccau

SEQ ID NO: 353957 - RNA, 32 nt, Human
caggagaggaaggagcggcgggcagguggccc

SEQ ID NO: 353958 - RNA, 32 nt, Human
caggagaggagaaauaucucauacaagugaaa

SEQ ID NO: 353959 - RNA, 22 nt, Human
caggagaggauaucccagcaaa

SEQ ID NO: 353960 - RNA, 32 nt, Human
caggagaggcagcagaggggucaggggagguc

SEQ ID NO: 353961 - RNA, 32 nt, Human
caggagaggcggcccugguggggaagaggcca

SEQ ID NO: 353962 - RNA, 32 nt, Human
caggagaggcugcuggagagggagaggcugcu

SEQ ID NO: 353963 - RNA, 32 nt, Human
caggagagggacaauggaagcugccccgucca

SEQ ID NO: 353964 - RNA, 32 nt, Human
caggagagggaggcuuccugacugacacaggc

SEQ ID NO: 353965 - RNA, 32 nt, Human
caggagagggauauggagagcaggugguggaa

SEQ ID NO: 353966 - RNA, 32 nt, Human
caggagagggcaaaaagccaagaguaacccca

SEQ ID NO: 353967 - RNA, 23 nt, Human
caggagagggcuggguggggcag

SEQ ID NO: 353968 - RNA, 32 nt, Human
caggagaggggcauuuggaggcucccucccug

SEQ ID NO: 353969 - RNA, 22 nt, Human
caggagaggguuccuucagccc

SEQ ID NO: 353970 - RNA, 29 nt, Human
caggagaguaugugugugcgugcuggggg

SEQ ID NO: 353971 - RNA, 32 nt, Human
caggagagucacuugaaccugggaagcagaag

SEQ ID NO: 353972 - RNA, 32 nt, Human
caggagagugaagaaauuggccacagaagagc

SEQ ID NO: 353973 - RNA, 32 nt, Human
caggagaguggaggcugcaggaagaggcgggu

SEQ ID NO: 353974 - RNA, 32 nt, Human
caggagaguuggguuuucagggcagagauggg

SEQ ID NO: 353975 - RNA, 32 nt, Human
caggagaguuuucaaccuuggaaauguaagug

SEQ ID NO: 353976 - RNA, 32 nt, Human
caggagauaaagccuaggcaaagcuuuaaacc

SEQ ID NO: 353977 - RNA, 32 nt, Human
caggagauagugagcagcucccagggagcuag

SEQ ID NO: 353978 - RNA, 32 nt, Human
caggagaucaugagauuucaucacucaggaug

SEQ ID NO: 353979 - RNA, 32 nt, Human
caggagauccuaauaugaaagaaaaauggauc

SEQ ID NO: 353980 - RNA, 22 nt, Human
caggagauggagguuucaguga

SEQ ID NO: 353981 - RNA, 32 nt, Human
caggagaugggacuucagggagaccuggcuug

SEQ ID NO: 353982 - RNA, 32 nt, Human
caggagaugggaggggagagaccagcucucca

SEQ ID NO: 353983 - RNA, 32 nt, Human
caggagaugggggcgggggcagcugugucauc

SEQ ID NO: 353984 - RNA, 32 nt, Human
caggagaugguccaugagagaggcagaaggau

SEQ ID NO: 353985 - RNA, 32 nt, Human
caggagauugagaccuuccuggcuaacauggu

SEQ ID NO: 353986 - RNA, 32 nt, Human
caggagauugagaucaugaggucaggagauug

SEQ ID NO: 353987 - RNA, 32 nt, Human
caggagauuuugaggcccugagguuuuaggug

SEQ ID NO: 353988 - RNA, 19 nt, Human
caggagcaaaacuauguca

SEQ ID NO: 353989 - RNA, 21 nt, Human
caggagcaaagcugccaggcu

SEQ ID NO: 353990 - RNA, 21 nt, Human
caggagcaagggaaggcgggc

SEQ ID NO: 353991 - RNA, 32 nt, Human
caggagcaauccagggccauacagcuaugaag

SEQ ID NO: 353992 - RNA, 32 nt, Human
caggagcacaucagggagcugggaaacacagu

SEQ ID NO: 353993 - RNA, 32 nt, Human
caggagcacccaggcuugggcagcaaucucug

SEQ ID NO: 353994 - RNA, 21 nt, Human
caggagcaccggcagcaccag

SEQ ID NO: 353995 - RNA, 32 nt, Human
caggagcaccggcugccccucuggguggcacu

SEQ ID NO: 353996 - RNA, 32 nt, Human
caggagcacggcucuguccccagccugggaaa

SEQ ID NO: 353997 - RNA, 32 nt, Human
caggagcacugaaccugcccucccaggugcaa

SEQ ID NO: 353998 - RNA, 22 nt, Human
caggagcacugcacagcaguug

SEQ ID NO: 353999 - RNA, 32 nt, Human
caggagcagaaacaggucuguuguuucugaag

SEQ ID NO: 354000 - RNA, 24 nt, Human
caggagcagaagacuggauggcug

SEQ ID NO: 354001 - RNA, 32 nt, Human
caggagcagaggugccccagagugcuucacag

SEQ ID NO: 354002 - RNA, 32 nt, Human
caggagcagaguuaaagguaauaaaagcaaca

SEQ ID NO: 354003 - RNA, 32 nt, Human
caggagcagcaacccugagucaauaaggagca

SEQ ID NO: 354004 - RNA, 22 nt, Human
caggagcagcaccccccgggga

SEQ ID NO: 354005 - RNA, 32 nt, Human
caggagcagccagcagugcauucaccccacuu

SEQ ID NO: 354006 - RNA, 32 nt, Human
caggagcagccuguuuacaucugccgcggcca

SEQ ID NO: 354007 - RNA, 32 nt, Human
caggagcagcgugcaggagcaaggcugcccug

SEQ ID NO: 354008 - RNA, 32 nt, Human
caggagcagcuauuuucacucaguaucaaaga

SEQ ID NO: 354009 - RNA, 20 nt, Human
caggagcaggaagggccagg

SEQ ID NO: 354010 - RNA, 21 nt, Human
caggagcaggaugagaggcug

SEQ ID NO: 354011 - RNA, 20 nt, Human
caggagcagggaagagcagu

SEQ ID NO: 354012 - RNA, 21 nt, Human
caggagcagggcagcuggcug

SEQ ID NO: 354013 - RNA, 22 nt, Human
caggagcagggcgagggcgccu

SEQ ID NO: 354014 - RNA, 20 nt, Human
caggagcagggcugggguca

SEQ ID NO: 354015 - RNA, 23 nt, Human
caggagcagggcugugcugccug

SEQ ID NO: 354016 - RNA, 22 nt, Human
caggagcagggcuugcccaggc

SEQ ID NO: 354017 - RNA, 32 nt, Human
caggagcaggggagacagggcuccagggauga

SEQ ID NO: 354018 - RNA, 32 nt, Human
caggagcagggugguggcuggggcgauggugg

SEQ ID NO: 354019 - RNA, 20 nt, Human
caggagcagguuugaggggc

SEQ ID NO: 354020 - RNA, 32 nt, Human
caggagcagucgccuuucccacccacagcgcu

SEQ ID NO: 354021 - RNA, 32 nt, Human
caggagcaguggugcugucagcgcggccgucg

SEQ ID NO: 354022 - RNA, 32 nt, Human
caggagcaucaggcugaagugaagggcaugug

SEQ ID NO: 354023 - RNA, 32 nt, Human
caggagcaucuucuuggcagccaggcugggcc

SEQ ID NO: 354024 - RNA, 32 nt, Human
caggagcaugaagaggaugguucagagacaga

SEQ ID NO: 354025 - RNA, 32 nt, Human
caggagcauggacugaaggcgcccucgcccca

SEQ ID NO: 354026 - RNA, 32 nt, Human
caggagcaugggcaucagcuaccucacgggaa

SEQ ID NO: 354027 - RNA, 32 nt, Human
caggagccaagaggaacaggaaaacaaauggc

SEQ ID NO: 354028 - RNA, 32 nt, Human
caggagccaaggaagguggguggcuuuuggaa

SEQ ID NO: 354029 - RNA, 32 nt, Human
caggagccaagugcuuuuggauggugagggug

SEQ ID NO: 354030 - RNA, 23 nt, Human
caggagccaauggggucacggug

SEQ ID NO: 354031 - RNA, 32 nt, Human
caggagccaccagagccuuccucucuuuguac

SEQ ID NO: 354032 - RNA, 32 nt, Human
caggagccaccagcaaagcgcagaaaggguuc

SEQ ID NO: 354033 - RNA, 32 nt, Human
caggagccaccugcuccacucauccacaaagg

SEQ ID NO: 354034 - RNA, 23 nt, Human
caggagccacggguggggccagg

SEQ ID NO: 354035 - RNA, 32 nt, Human
caggagccacugcacuccagccugggugacag

SEQ ID NO: 354036 - RNA, 22 nt, Human
caggagccagagacugcaguga

SEQ ID NO: 354037 - RNA, 32 nt, Human
caggagccagcagaggaagaacgagauggcag

SEQ ID NO: 354038 - RNA, 24 nt, Human
caggagccagcagggcgggccagg

SEQ ID NO: 354039 - RNA, 32 nt, Human
caggagccagccacuggcuggacagggaagaa

SEQ ID NO: 354040 - RNA, 22 nt, Human
caggagccagccccggacccug

SEQ ID NO: 354041 - RNA, 32 nt, Human
caggagccaggaacaagcaggagcggugcuca

SEQ ID NO: 354042 - RNA, 32 nt, Human
caggagccaggcuuccccucagcugggugaag

SEQ ID NO: 354043 - RNA, 31 nt, Human
caggagccaggucuggagcaucagugugagg

SEQ ID NO: 354044 - RNA, 32 nt, Human
caggagccagugacacaguggugcagagaaua

SEQ ID NO: 354045 - RNA, 24 nt, Human
caggagccaguuuguugcucaggg

SEQ ID NO: 354046 - RNA, 32 nt, Human
caggagcccaaguuguucuggccacaccuucu

SEQ ID NO: 354047 - RNA, 32 nt, Human
caggagcccacaggaccuggagcucuggaagc

SEQ ID NO: 354048 - RNA, 18 nt, Human
caggagcccacggugggg

SEQ ID NO: 354049 - RNA, 20 nt, Human
caggagcccagaccguggga

SEQ ID NO: 354050 - RNA, 32 nt, Human
caggagcccagccagcugcgccugcgcugcag

SEQ ID NO: 354051 - RNA, 32 nt, Human
caggagcccagccugugggggcaguucacauc

SEQ ID NO: 354052 - RNA, 20 nt, Human
caggagcccagcgcgucagg

SEQ ID NO: 354053 - RNA, 32 nt, Human
caggagcccaggaguuugagguuggccuggac

SEQ ID NO: 354054 - RNA, 23 nt, Human
caggagcccagggcgcccuggga

SEQ ID NO: 354055 - RNA, 21 nt, Human
caggagcccaggggaugggaa

SEQ ID NO: 354056 - RNA, 32 nt, Human
caggagcccaugcccacggcugugcuggaaaa

SEQ ID NO: 354057 - RNA, 32 nt, Human
caggagccccacugcuuccagccucuggugcc

SEQ ID NO: 354058 - RNA, 32 nt, Human
caggagccccagccagcccuucccaggccagc

SEQ ID NO: 354059 - RNA, 32 nt, Human
caggagccccaucaaggaaggacggggauaga

SEQ ID NO: 354060 - RNA, 32 nt, Human
caggagcccccaaggaguuggaagagacggag

SEQ ID NO: 354061 - RNA, 24 nt, Human
caggagccccgagaccugcaggga

SEQ ID NO: 354062 - RNA, 21 nt, Human
caggagccccggaggcccagg

SEQ ID NO: 354063 - RNA, 23 nt, Human
caggagccccugagcaguggcug

SEQ ID NO: 354064 - RNA, 32 nt, Human
caggagccccugugaggcccaggaugaaggaa

SEQ ID NO: 354065 - RNA, 32 nt, Human
caggagcccgcuuuguauuagcagguuugcau

SEQ ID NO: 354066 - RNA, 32 nt, Human
caggagcccgggaggcggaggcgggaggcggc

SEQ ID NO: 354067 - RNA, 32 nt, Human
caggagcccgggagggaggggugugcaggagc

SEQ ID NO: 354068 - RNA, 21 nt, Human
caggagcccggugcuagggga

SEQ ID NO: 354069 - RNA, 22 nt, Human
caggagcccguccagccagggg

SEQ ID NO: 354070 - RNA, 24 nt, Human
caggagcccugagaccugcagggg

SEQ ID NO: 354071 - RNA, 32 nt, Human
caggagcccugagugcucacagccgccucuga

SEQ ID NO: 354072 - RNA, 20 nt, Human
caggagcccugauccggggg

SEQ ID NO: 354073 - RNA, 22 nt, Human
caggagcccugcugcccagggg

SEQ ID NO: 354074 - RNA, 32 nt, Human
caggagcccuuagcccugagguuuccauuccc

SEQ ID NO: 354075 - RNA, 32 nt, Human
caggagccgaaagauagucuugaagucauuca

SEQ ID NO: 354076 - RNA, 20 nt, Human
caggagccgaagcccagggg

SEQ ID NO: 354077 - RNA, 24 nt, Human
caggagccgagcccagcccggggg

SEQ ID NO: 354078 - RNA, 21 nt, Human
caggagccgcacggccaggga

SEQ ID NO: 354079 - RNA, 24 nt, Human
caggagccgccgccggcucgggga

SEQ ID NO: 354080 - RNA, 21 nt, Human
caggagccgggcauucagaga

SEQ ID NO: 354081 - RNA, 19 nt, Human
caggagccggggcagcggc

SEQ ID NO: 354082 - RNA, 32 nt, Human
caggagccuagaggaggaaaaaggcuggugga

SEQ ID NO: 354083 - RNA, 19 nt, Human
caggagccuaggcuagggg

SEQ ID NO: 354084 - RNA, 32 nt, Human
caggagccuauccugaauuuuguaaaauaucc

SEQ ID NO: 354085 - RNA, 32 nt, Human
caggagccucauccucccucacccucaccugg

SEQ ID NO: 354086 - RNA, 32 nt, Human
caggagccuggacccagcugugcagcuccuug

SEQ ID NO: 354087 - RNA, 20 nt, Human
caggagccuggccgcgggga

SEQ ID NO: 354088 - RNA, 19 nt, Human
caggagccuggccugggga

SEQ ID NO: 354089 - RNA, 32 nt, Human
caggagccugggaaagaggcccucgccaggug

SEQ ID NO: 354090 - RNA, 18 nt, Human
caggagccuggggcaggg

SEQ ID NO: 354091 - RNA, 21 nt, Human
caggagccuggggccugugga

SEQ ID NO: 354092 - RNA, 32 nt, Human
caggagccuguaauccuagcuacucaggaggc

SEQ ID NO: 354093 - RNA, 32 nt, Human
caggagccuguuucuaaagaaacccaugcugu

SEQ ID NO: 354094 - RNA, 17 nt, Human
caggagccuuccucucc

SEQ ID NO: 354095 - RNA, 32 nt, Human
caggagccuuuguucuuugauccugccgugag

SEQ ID NO: 354096 - RNA, 32 nt, Human
caggagcgaacaggaacaggaaaacaaauggc

SEQ ID NO: 354097 - RNA, 24 nt, Human
caggagcgcaagauagauuuggaa

SEQ ID NO: 354098 - RNA, 21 nt, Human
caggagcgcucgugcuuggaa

SEQ ID NO: 354099 - RNA, 20 nt, Human
caggagcgcugccccaggga

SEQ ID NO: 354100 - RNA, 21 nt, Human
caggagcggcagcagagacug

SEQ ID NO: 354101 - RNA, 24 nt, Human
caggagcggcggcagcagcgacug

SEQ ID NO: 354102 - RNA, 32 nt, Human
caggagcggcggcagcagcgacugggggcggc

SEQ ID NO: 354103 - RNA, 25 nt, Human
caggagcggcugcggaaggcggccg

SEQ ID NO: 354104 - RNA, 32 nt, Human
caggagcgggcagaagggagagagggaggggc

SEQ ID NO: 354105 - RNA, 20 nt, Human
caggagcggggcacacgggg

SEQ ID NO: 354106 - RNA, 21 nt, Human
caggagcgggggcggcggggg

SEQ ID NO: 354107 - RNA, 22 nt, Human
caggagcgggggcggcgggggg

SEQ ID NO: 354108 - RNA, 32 nt, Human
caggagcgugaaagcaucuuugcucaacuccu

SEQ ID NO: 354109 - RNA, 32 nt, Human
caggagcgugagccacuucugcaguccaagcu

SEQ ID NO: 354110 - RNA, 32 nt, Human
caggagcuaacaggaaaaagaaaaucaauggc

SEQ ID NO: 354111 - RNA, 32 nt, Human
caggagcuaguuuuaccagcauccugcuccac

SEQ ID NO: 354112 - RNA, 32 nt, Human
caggagcuaugggagcaaggagagggagcucu

SEQ ID NO: 354113 - RNA, 32 nt, Human
caggagcucaagucccaccugggcaacauagu

SEQ ID NO: 354114 - RNA, 21 nt, Human
caggagcucagcagaccagug

SEQ ID NO: 354115 - RNA, 32 nt, Human
caggagcucagcguucacgggcaucuugccau

SEQ ID NO: 354116 - RNA, 32 nt, Human
caggagcucgagccagccuggccaacauggca

SEQ ID NO: 354117 - RNA, 32 nt, Human
caggagcucgcuuugaccccuuuggacccauu

SEQ ID NO: 354118 - RNA, 32 nt, Human
caggagcucugacuaagguugacauaauaguc

SEQ ID NO: 354119 - RNA, 21 nt, Human
caggagcugagcagcggggga

SEQ ID NO: 354120 - RNA, 32 nt, Human
caggagcugaggcagaagaaccccuugaaccc

SEQ ID NO: 354121 - RNA, 19 nt, Human
caggagcugaggccggaga

SEQ ID NO: 354122 - RNA, 32 nt, Human
caggagcugaugcuguaguuugcagauagaau

SEQ ID NO: 354123 - RNA, 23 nt, Human
caggagcugauguugccaaggga

SEQ ID NO: 354124 - RNA, 28 nt, Human
caggagcugauucgagcuggcagagcug

SEQ ID NO: 354125 - RNA, 32 nt, Human
caggagcugccuggugucugcuguaaauguuu

SEQ ID NO: 354126 - RNA, 32 nt, Human
caggagcugcugcugcaguugcagaaggauaa

SEQ ID NO: 354127 - RNA, 32 nt, Human
caggagcugcuugcugagguguaaagggucuu

SEQ ID NO: 354128 - RNA, 32 nt, Human
caggagcugcuuggagaugcugcuguggccac

SEQ ID NO: 354129 - RNA, 19 nt, Human
caggagcuggcugauguca

SEQ ID NO: 354130 - RNA, 32 nt, Human
caggagcugggaagaaaggaagaggaggaagg

SEQ ID NO: 354131 - RNA, 19 nt, Human
caggagcugggaguugaga

SEQ ID NO: 354132 - RNA, 32 nt, Human
caggagcugggcccccucacgccugccuuccu

SEQ ID NO: 354133 - RNA, 32 nt, Human
caggagcugggggagagcuggagggcccuggg

SEQ ID NO: 354134 - RNA, 32 nt, Human
caggagcugggggagaggacucuccccuguga

SEQ ID NO: 354135 - RNA, 19 nt, Human
caggagcugggggucagag

SEQ ID NO: 354136 - RNA, 22 nt, Human
caggagcugguaugugaugcca

SEQ ID NO: 354137 - RNA, 32 nt, Human
caggagcugucaccaaggaaacgcuaccucuc

SEQ ID NO: 354138 - RNA, 19 nt, Human
caggagcuguggcagcggc

SEQ ID NO: 354139 - RNA, 21 nt, Human
caggagcuucugaacaugaag

SEQ ID NO: 354140 - RNA, 32 nt, Human
caggagcuuucuggauagaggcagcagcgugu

SEQ ID NO: 354141 - RNA, 32 nt, Human
caggaggaaacaccuccagcccgcgaccuccu

SEQ ID NO: 354142 - RNA, 32 nt, Human
caggaggaaaugcaaccagucagggcccagaa

SEQ ID NO: 354143 - RNA, 32 nt, Human
caggaggaacaaaaacaggcacugaguuaaaa

SEQ ID NO: 354144 - RNA, 19 nt, Human
caggaggaacagcaugcca

SEQ ID NO: 354145 - RNA, 32 nt, Human
caggaggaacagcugggcaaugcgggaggcag

SEQ ID NO: 354146 - RNA, 27 nt, Human
caggaggaagacagccaccagcggcug

SEQ ID NO: 354147 - RNA, 18 nt, Human
caggaggaagagaugcca

SEQ ID NO: 354148 - RNA, 32 nt, Human
caggaggaaggauggggcaagagcagacaaac

SEQ ID NO: 354149 - RNA, 32 nt, Human
caggaggaaggcagcuggugucucagcagaug

SEQ ID NO: 354150 - RNA, 20 nt, Human
caggaggaaggugugaugcc

SEQ ID NO: 354151 - RNA, 32 nt, Human
caggaggaaguggcuucugaagagcacauuug

SEQ ID NO: 354152 - RNA, 20 nt, Human
caggaggaaugucugauacc

SEQ ID NO: 354153 - RNA, 32 nt, Human
caggaggacaccagauacagacuucagccccu

SEQ ID NO: 354154 - RNA, 32 nt, Human
caggaggacagaggggcuggucucaggugugg

SEQ ID NO: 354155 - RNA, 20 nt, Human
caggaggacaggaugagcca

SEQ ID NO: 354156 - RNA, 24 nt, Human
caggaggacagucgggugauggug

SEQ ID NO: 354157 - RNA, 32 nt, Human
caggaggacaugcagguggaauuugugcaagc

SEQ ID NO: 354158 - RNA, 19 nt, Human
caggaggacaugggccugg

SEQ ID NO: 354159 - RNA, 22 nt, Human
caggaggacccucaguucagug

SEQ ID NO: 354160 - RNA, 18 nt, Human
caggaggacccucugcua

SEQ ID NO: 354161 - RNA, 19 nt, Human
caggaggaccgcuugagcc

SEQ ID NO: 354162 - RNA, 21 nt, Human
caggaggaccgcuugagucca

SEQ ID NO: 354163 - RNA, 17 nt, Human
caggaggaccugaccca

SEQ ID NO: 354164 - RNA, 32 nt, Human
caggaggacuaggaggaggaggaggagccguc

SEQ ID NO: 354165 - RNA, 19 nt, Human
caggaggacugcuugagcc

SEQ ID NO: 354166 - RNA, 19 nt, Human
caggaggacugcuugagcu

SEQ ID NO: 354167 - RNA, 18 nt, Human
caggaggacuuaaugcua

SEQ ID NO: 354168 - RNA, 18 nt, Human
caggaggacuuaauggca

SEQ ID NO: 354169 - RNA, 32 nt, Human
caggaggacuuccugcguccauggaagggauc

SEQ ID NO: 354170 - RNA, 21 nt, Human
caggaggacuuggcgcugcca

SEQ ID NO: 354171 - RNA, 32 nt, Human
caggaggagaaggaggaggagcaggaggugga

SEQ ID NO: 354172 - RNA, 32 nt, Human
caggaggagacaaauugcucacggucaugcca

SEQ ID NO: 354173 - RNA, 32 nt, Human
caggaggagacccugaaggaugcaguugagaa

SEQ ID NO: 354174 - RNA, 32 nt, Human
caggaggagagaagaauuccagugagcagcag

SEQ ID NO: 354175 - RNA, 32 nt, Human
caggaggagagaaggaaggagaggugaucucc

SEQ ID NO: 354176 - RNA, 32 nt, Human
caggaggagagggaaguaguggcagcagccca

SEQ ID NO: 354177 - RNA, 32 nt, Human
caggaggagcaccgggcuugggcuuccucuga

SEQ ID NO: 354178 - RNA, 25 nt, Human
caggaggagcagcacccgagcccug

SEQ ID NO: 354179 - RNA, 18 nt, Human
caggaggagccucuggga

SEQ ID NO: 354180 - RNA, 20 nt, Human
caggaggagcugcagcgcca

SEQ ID NO: 354181 - RNA, 20 nt, Human
caggaggagcugcggcgcca

SEQ ID NO: 354182 - RNA, 32 nt, Human
caggaggaggagauaccaggaggcagggaugc

SEQ ID NO: 354183 - RNA, 19 nt, Human
caggaggaggagauggcca

SEQ ID NO: 354184 - RNA, 32 nt, Human
caggaggaggaggaggaggaggaggagagcgc

SEQ ID NO: 354185 - RNA, 21 nt, Human
caggaggaggaggucgcagug

SEQ ID NO: 354186 - RNA, 18 nt, Human
caggaggaggaugagcca

SEQ ID NO: 354187 - RNA, 18 nt, Human
caggaggaggcauugcca

SEQ ID NO: 354188 - RNA, 32 nt, Human
caggaggagguagagagagggcagccggagca

SEQ ID NO: 354189 - RNA, 32 nt, Human
caggaggagguggaacugauguaggggguggc

SEQ ID NO: 354190 - RNA, 32 nt, Human
caggaggagguggagaucgcagugagcugaga

SEQ ID NO: 354191 - RNA, 32 nt, Human
caggaggagguuugagcugagcucaggcacag

SEQ ID NO: 354192 - RNA, 23 nt, Human
caggaggagugggacagacagca

SEQ ID NO: 354193 - RNA, 32 nt, Human
caggaggaguggucuggggcccagggauacug

SEQ ID NO: 354194 - RNA, 23 nt, Human
caggaggaguugggucaccagua

SEQ ID NO: 354195 - RNA, 32 nt, Human
caggaggauaccgcaucaccaccagcagcucu

SEQ ID NO: 354196 - RNA, 21 nt, Human
caggaggauagcuugaggcca

SEQ ID NO: 354197 - RNA, 32 nt, Human
caggaggaucaauuaaggccaggaguucaacc

SEQ ID NO: 354198 - RNA, 21 nt, Human
caggaggaucaccugagguca

SEQ ID NO: 354199 - RNA, 19 nt, Human
caggaggaucacgugagcc

SEQ ID NO: 354200 - RNA, 21 nt, Human
caggaggaucacucaaggcca

SEQ ID NO: 354201 - RNA, 21 nt, Human
caggaggaucacuggaggcca

SEQ ID NO: 354202 - RNA, 21 nt, Human
caggaggaucacuuaaggcca

SEQ ID NO: 354203 - RNA, 21 nt, Human
caggaggaucacuucaggcca

SEQ ID NO: 354204 - RNA, 19 nt, Human
caggaggaucacuugaacc

SEQ ID NO: 354205 - RNA, 21 nt, Human
caggaggaucacuugaaccca

SEQ ID NO: 354206 - RNA, 21 nt, Human
caggaggaucacuugagacca

SEQ ID NO: 354207 - RNA, 19 nt, Human
caggaggaucacuugagcc

SEQ ID NO: 354208 - RNA, 20 nt, Human
caggaggaucacuugagcca

SEQ ID NO: 354209 - RNA, 19 nt, Human
caggaggaucacuugagcu

SEQ ID NO: 354210 - RNA, 21 nt, Human
caggaggaucacuugaggcca

SEQ ID NO: 354211 - RNA, 23 nt, Human
caggaggaucacuugaggccagg

SEQ ID NO: 354212 - RNA, 32 nt, Human
caggaggaucacuugaggccagugagcuguga

SEQ ID NO: 354213 - RNA, 21 nt, Human
caggaggaucacuugaggcua

SEQ ID NO: 354214 - RNA, 21 nt, Human
caggaggaucacuugagguca

SEQ ID NO: 354215 - RNA, 19 nt, Human
caggaggaucacuugaguc

SEQ ID NO: 354216 - RNA, 21 nt, Human
caggaggaucacuugagucca

SEQ ID NO: 354217 - RNA, 32 nt, Human
caggaggaucacuugaguccaggaguuugaaa

SEQ ID NO: 354218 - RNA, 21 nt, Human
caggaggaucacuuggagcca

SEQ ID NO: 354219 - RNA, 19 nt, Human
caggaggaucacuugggcc

SEQ ID NO: 354220 - RNA, 32 nt, Human
caggaggaucacuuuaguucaggaguuugaaa

SEQ ID NO: 354221 - RNA, 19 nt, Human
caggaggaucgccugagcc

SEQ ID NO: 354222 - RNA, 19 nt, Human
caggaggaucgcuggagcc

SEQ ID NO: 354223 - RNA, 18 nt, Human
caggaggaucgcuugaac

SEQ ID NO: 354224 - RNA, 19 nt, Human
caggaggaucgcuugaacc

SEQ ID NO: 354225 - RNA, 20 nt, Human
caggaggaucgcuugaaccc

SEQ ID NO: 354226 - RNA, 21 nt, Human
caggaggaucgcuugaaccca

SEQ ID NO: 354227 - RNA, 21 nt, Human
caggaggaucgcuugagacca

SEQ ID NO: 354228 - RNA, 19 nt, Human
caggaggaucgcuugagcc

SEQ ID NO: 354229 - RNA, 21 nt, Human
caggaggaucgcuugaggcca

SEQ ID NO: 354230 - RNA, 20 nt, Human
caggaggaucgcuugagugu

SEQ ID NO: 354231 - RNA, 19 nt, Human
caggaggaucgcuugugcc

SEQ ID NO: 354232 - RNA, 21 nt, Human
caggaggaucguuugaggcca

SEQ ID NO: 354233 - RNA, 32 nt, Human
caggaggaucucuugagcccaggauuuugaau

SEQ ID NO: 354234 - RNA, 32 nt, Human
caggaggaugcaauuguugaaagcuuugaaau

SEQ ID NO: 354235 - RNA, 32 nt, Human
caggaggaugcaccaaguugcucacaguggau

SEQ ID NO: 354236 - RNA, 32 nt, Human
caggaggaugcuccagcuccuggugcugaaga

SEQ ID NO: 354237 - RNA, 24 nt, Human
caggaggaugcuggcggcacagug

SEQ ID NO: 354238 - RNA, 32 nt, Human
caggaggaugcuggcggcacagugagugaggc

SEQ ID NO: 354239 - RNA, 19 nt, Human
caggaggauggcaguacca

SEQ ID NO: 354240 - RNA, 32 nt, Human
caggaggaugggcucugggaagaaggagugaa

SEQ ID NO: 354241 - RNA, 21 nt, Human
caggaggauuacuugaggcca

SEQ ID NO: 354242 - RNA, 19 nt, Human
caggaggauugccugagcc

SEQ ID NO: 354243 - RNA, 21 nt, Human
caggaggauugccugaggcca

SEQ ID NO: 354244 - RNA, 19 nt, Human
caggaggauugcucgaacc

SEQ ID NO: 354245 - RNA, 19 nt, Human
caggaggauugcuggagcc

SEQ ID NO: 354246 - RNA, 20 nt, Human
caggaggauugcugucagcc

SEQ ID NO: 354247 - RNA, 19 nt, Human
caggaggauugcuuaagcc

SEQ ID NO: 354248 - RNA, 21 nt, Human
caggaggauugcuugaauuca

SEQ ID NO: 354249 - RNA, 20 nt, Human
caggaggauugcuugagacc

SEQ ID NO: 354250 - RNA, 18 nt, Human
caggaggauugcuugagc

SEQ ID NO: 354251 - RNA, 19 nt, Human
caggaggauugcuugagcc

SEQ ID NO: 354252 - RNA, 19 nt, Human
caggaggauugcuugagcu

SEQ ID NO: 354253 - RNA, 19 nt, Human
caggaggauugcuugaggc

SEQ ID NO: 354254 - RNA, 20 nt, Human
caggaggauugcuugaggcc

SEQ ID NO: 354255 - RNA, 21 nt, Human
caggaggauugcuugaggcca

SEQ ID NO: 354256 - RNA, 21 nt, Human
caggaggauugcuugagguca

SEQ ID NO: 354257 - RNA, 20 nt, Human
caggaggauugcuugagguu

SEQ ID NO: 354258 - RNA, 19 nt, Human
caggaggauugcuugaguc

SEQ ID NO: 354259 - RNA, 21 nt, Human
caggaggauugcuugagucca

SEQ ID NO: 354260 - RNA, 17 nt, Human
caggaggauugggagcc

SEQ ID NO: 354261 - RNA, 21 nt, Human
caggaggauuguuugaggcca

SEQ ID NO: 354262 - RNA, 23 nt, Human
caggaggauuugaaggcacaaug

SEQ ID NO: 354263 - RNA, 22 nt, Human
caggaggcacgcacccagagaa

SEQ ID NO: 354264 - RNA, 32 nt, Human
caggaggcacuuggcccagucugaccuggugu

SEQ ID NO: 354265 - RNA, 23 nt, Human
caggaggcagaaacaccagccuc

SEQ ID NO: 354266 - RNA, 31 nt, Human
caggaggcagacacugcccagaugcucggug

SEQ ID NO: 354267 - RNA, 32 nt, Human
caggaggcagacuugcagagcuuguuuuguuu

SEQ ID NO: 354268 - RNA, 32 nt, Human
caggaggcagagaagagggcgcuggguuggac

SEQ ID NO: 354269 - RNA, 20 nt, Human
caggaggcagagauugcggu

SEQ ID NO: 354270 - RNA, 26 nt, Human
caggaggcagagccggcucaccuccu

SEQ ID NO: 354271 - RNA, 32 nt, Human
caggaggcagaggcccuccccauccgcauuau

SEQ ID NO: 354272 - RNA, 21 nt, Human
caggaggcagaggucgcagug

SEQ ID NO: 354273 - RNA, 21 nt, Human
caggaggcagagguuacagua

SEQ ID NO: 354274 - RNA, 21 nt, Human
caggaggcagagguuacagug

SEQ ID NO: 354275 - RNA, 22 nt, Human
caggaggcagagguugcaauga

SEQ ID NO: 354276 - RNA, 22 nt, Human
caggaggcagagguugcagcga

SEQ ID NO: 354277 - RNA, 22 nt, Human
caggaggcagagguugcaguga

SEQ ID NO: 354278 - RNA, 23 nt, Human
caggaggcagagguugcagugag

SEQ ID NO: 354279 - RNA, 20 nt, Human
caggaggcagagguuggggu

SEQ ID NO: 354280 - RNA, 32 nt, Human
caggaggcagcccaggcggagcgggaggagcu

SEQ ID NO: 354281 - RNA, 20 nt, Human
caggaggcagccuugagaaa

SEQ ID NO: 354282 - RNA, 28 nt, Human
caggaggcaggugcugcccgucugcaac

SEQ ID NO: 354283 - RNA, 32 nt, Human
caggaggcaugugaguuuggauggggaggcaa

SEQ ID NO: 354284 - RNA, 32 nt, Human
caggaggccaagcagaggcuccccucaugaag

SEQ ID NO: 354285 - RNA, 20 nt, Human
caggaggccaccccugagaa

SEQ ID NO: 354286 - RNA, 21 nt, Human
caggaggccaccccugagaaa

SEQ ID NO: 354287 - RNA, 21 nt, Human
caggaggccagagcgguuuga

SEQ ID NO: 354288 - RNA, 32 nt, Human
caggaggccagagugagggguccguucugucc

SEQ ID NO: 354289 - RNA, 24 nt, Human
caggaggccaggggaaaaaccccu

SEQ ID NO: 354290 - RNA, 32 nt, Human
caggaggccccaggcugagagccagaugccuc

SEQ ID NO: 354291 - RNA, 32 nt, Human
caggaggccccagggaacggacagcccgaccu

SEQ ID NO: 354292 - RNA, 32 nt, Human
caggaggccccauuuccuacugcagcggggca

SEQ ID NO: 354293 - RNA, 32 nt, Human
caggaggccccugcugcucucaugcccgaaua

SEQ ID NO: 354294 - RNA, 21 nt, Human
caggaggcccguccucggggg

SEQ ID NO: 354295 - RNA, 18 nt, Human
caggaggcccugguguca

SEQ ID NO: 354296 - RNA, 23 nt, Human
caggaggccggauauucugagaa

SEQ ID NO: 354297 - RNA, 32 nt, Human
caggaggccgggagacagggacuggugagaau

SEQ ID NO: 354298 - RNA, 32 nt, Human
caggaggccucaccauacucccuuucagggcc

SEQ ID NO: 354299 - RNA, 22 nt, Human
caggaggcggaaguugcgguga

SEQ ID NO: 354300 - RNA, 32 nt, Human
caggaggcggagcuggcagugagcugagauca

SEQ ID NO: 354301 - RNA, 32 nt, Human
caggaggcggaggcagaggcugcagugaccca

SEQ ID NO: 354302 - RNA, 22 nt, Human
caggaggcggagguugcagcga

SEQ ID NO: 354303 - RNA, 22 nt, Human
caggaggcggagguugcaguga

SEQ ID NO: 354304 - RNA, 22 nt, Human
caggaggcggaguuugcaguga

SEQ ID NO: 354305 - RNA, 32 nt, Human
caggaggcggccgccuccgcccucucugcugc

SEQ ID NO: 354306 - RNA, 32 nt, Human
caggaggcgguuguguucgaggauguggcugu

SEQ ID NO: 354307 - RNA, 32 nt, Human
caggaggcucccucugcugacccccugcagcc

SEQ ID NO: 354308 - RNA, 32 nt, Human
caggaggcucugguccugcaggccuggucuug

SEQ ID NO: 354309 - RNA, 32 nt, Human
caggaggcugaaggaggggagaacaaaauugu

SEQ ID NO: 354310 - RNA, 32 nt, Human
caggaggcugagaaggaggaggggcucccuga

SEQ ID NO: 354311 - RNA, 32 nt, Human
caggaggcugaggcacgagaauuccaugaacc

SEQ ID NO: 354312 - RNA, 32 nt, Human
caggaggcugaggcaggagaagggugggaacc

SEQ ID NO: 354313 - RNA, 32 nt, Human
caggaggcugaggcaggagaauuacuuuaacc

SEQ ID NO: 354314 - RNA, 32 nt, Human
caggaggcugaggcaggagaauucuuuuaacc

SEQ ID NO: 354315 - RNA, 32 nt, Human
caggaggcugaggcaggagaauuguuugaacc

SEQ ID NO: 354316 - RNA, 22 nt, Human
caggaggcugaggcugcaguga

SEQ ID NO: 354317 - RNA, 32 nt, Human
caggaggcugaggcuggugugagggaaagggg

SEQ ID NO: 354318 - RNA, 32 nt, Human
caggaggcuggggagccccaggaagccaggga

SEQ ID NO: 354319 - RNA, 32 nt, Human
caggaggcuguggugggaggauugcuuaagcc

SEQ ID NO: 354320 - RNA, 32 nt, Human
caggaggcuguuccaggaguccugcccagcag

SEQ ID NO: 354321 - RNA, 32 nt, Human
caggagggaagaucaguggagccuucuuucug

SEQ ID NO: 354322 - RNA, 32 nt, Human
caggagggaaggcaggaagugggaccacgagg

SEQ ID NO: 354323 - RNA, 20 nt, Human
caggagggaagggugggcca

SEQ ID NO: 354324 - RNA, 24 nt, Human
caggagggaaugggccuggugcca

SEQ ID NO: 354325 - RNA, 32 nt, Human
caggagggacagugccuggagccugggccagg

SEQ ID NO: 354326 - RNA, 20 nt, Human
caggagggacccuugauaca

SEQ ID NO: 354327 - RNA, 32 nt, Human
caggagggagagaagaaaacuuccaguacccg

SEQ ID NO: 354328 - RNA, 32 nt, Human
caggagggagagaagagacgcagaaggagagc

SEQ ID NO: 354329 - RNA, 22 nt, Human
caggagggagagagaggcagug

SEQ ID NO: 354330 - RNA, 32 nt, Human
caggagggagagagguggacaggcagagucug

SEQ ID NO: 354331 - RNA, 19 nt, Human
caggagggagagauugagg

SEQ ID NO: 354332 - RNA, 32 nt, Human
caggagggagcuaggacauagcucgacuggcu

SEQ ID NO: 354333 - RNA, 32 nt, Human
caggagggagcuugaggacacuguggugagug

SEQ ID NO: 354334 - RNA, 32 nt, Human
caggagggaggcugcuguguggggaagcacag

SEQ ID NO: 354335 - RNA, 32 nt, Human
caggagggauaguggccugggagccagcucug

SEQ ID NO: 354336 - RNA, 32 nt, Human
caggagggcacggugggugagccauucucgcc

SEQ ID NO: 354337 - RNA, 32 nt, Human
caggagggcagcaccugcuggggacgguggcc

SEQ ID NO: 354338 - RNA, 32 nt, Human
caggagggcagccuccagcccugagugaccau

SEQ ID NO: 354339 - RNA, 32 nt, Human
caggagggcaggcugagguggggaaggaggga

SEQ ID NO: 354340 - RNA, 22 nt, Human
caggagggcauuggcagcagcu

SEQ ID NO: 354341 - RNA, 23 nt, Human
caggagggccgaggcgggccugg

SEQ ID NO: 354342 - RNA, 31 nt, Human
caggagggccuagaagggaaagacugugcgu

SEQ ID NO: 354343 - RNA, 32 nt, Human
caggagggccuccccuuccccucucccucaga

SEQ ID NO: 354344 - RNA, 18 nt, Human
caggagggccugauccca

SEQ ID NO: 354345 - RNA, 32 nt, Human
caggagggccugaucccaggagacaccagggc

SEQ ID NO: 354346 - RNA, 32 nt, Human
caggagggcuccaaggaguuugcaaaccuaga

SEQ ID NO: 354347 - RNA, 32 nt, Human
caggagggcugaaggcaggggccacucacagg

SEQ ID NO: 354348 - RNA, 18 nt, Human
caggagggcuggaugcca

SEQ ID NO: 354349 - RNA, 32 nt, Human
caggaggggagaagagaguaggaaaaaggagg

SEQ ID NO: 354350 - RNA, 32 nt, Human
caggaggggagcgggcccaggagccaggcuca

SEQ ID NO: 354351 - RNA, 23 nt, Human
caggaggggaugaggucagggua

SEQ ID NO: 354352 - RNA, 32 nt, Human
caggaggggccaggccucuaggaggacuggca

SEQ ID NO: 354353 - RNA, 32 nt, Human
caggaggggcccugcccaugcccacacuacag

SEQ ID NO: 354354 - RNA, 32 nt, Human
caggaggggccucuuguuucucagcccccgca

SEQ ID NO: 354355 - RNA, 18 nt, Human
caggaggggcucgaccca

SEQ ID NO: 354356 - RNA, 32 nt, Human
caggaggggcuguccaaucacauucaggcaug

SEQ ID NO: 354357 - RNA, 32 nt, Human
caggagggguccccagaccacccuggggcuga

SEQ ID NO: 354358 - RNA, 32 nt, Human
caggagggguggaggggccacccugggcuuug

SEQ ID NO: 354359 - RNA, 21 nt, Human
caggagggguggcugaaacca

SEQ ID NO: 354360 - RNA, 32 nt, Human
caggagggguggcugaaaccaccauccugggc

SEQ ID NO: 354361 - RNA, 20 nt, Human
caggagggucacuugaugcc

SEQ ID NO: 354362 - RNA, 21 nt, Human
caggaggguccugcugagccc

SEQ ID NO: 354363 - RNA, 24 nt, Human
caggaggguccuggggugggccag

SEQ ID NO: 354364 - RNA, 23 nt, Human
caggagggucucuccuccagccc

SEQ ID NO: 354365 - RNA, 32 nt, Human
caggagggugaugggagcucuccaauuuaguu

SEQ ID NO: 354366 - RNA, 19 nt, Human
caggagggugcuggcgcca

SEQ ID NO: 354367 - RNA, 32 nt, Human
caggagggugggaccaagggugcugcuggacc

SEQ ID NO: 354368 - RNA, 22 nt, Human
caggagguagagauugcaauga

SEQ ID NO: 354369 - RNA, 32 nt, Human
caggaggucagccuggccaauauggugaaacc

SEQ ID NO: 354370 - RNA, 32 nt, Human
caggaggucaggucaaggcugcagugagccau

SEQ ID NO: 354371 - RNA, 32 nt, Human
caggagguccuccucaaucucccaagcccaca

SEQ ID NO: 354372 - RNA, 24 nt, Human
caggaggucgaccccaaagccccu

SEQ ID NO: 354373 - RNA, 32 nt, Human
caggaggucgggaaaggcaguccugguagagg

SEQ ID NO: 354374 - RNA, 32 nt, Human
caggaggucuugagccacagagcuggcuccag

SEQ ID NO: 354375 - RNA, 20 nt, Human
caggaggucuugcccaggga

SEQ ID NO: 354376 - RNA, 32 nt, Human
caggaggucuuucugcuccaucguccccaagg

SEQ ID NO: 354377 - RNA, 22 nt, Human
caggaggugacugggaaggaga

SEQ ID NO: 354378 - RNA, 32 nt, Human
caggaggugaggagguuucgacauggcggugc

SEQ ID NO: 354379 - RNA, 21 nt, Human
caggagguggacacccagcca

SEQ ID NO: 354380 - RNA, 21 nt, Human
caggagguggagguuacagug

SEQ ID NO: 354381 - RNA, 22 nt, Human
caggagguggagguugcaguga

SEQ ID NO: 354382 - RNA, 32 nt, Human
caggaggugggcucagggcucuccagagcacu

SEQ ID NO: 354383 - RNA, 31 nt, Human
caggaggugguggaaacggggugaacuccgu

SEQ ID NO: 354384 - RNA, 32 nt, Human
caggagguggugucaagagaggccauggccug

SEQ ID NO: 354385 - RNA, 22 nt, Human
caggagguugaggcugcaguga

SEQ ID NO: 354386 - RNA, 32 nt, Human
caggaguaauuaaguauuacugcccagaagag

SEQ ID NO: 354387 - RNA, 32 nt, Human
caggaguacugcagggacagccccagagaggc

SEQ ID NO: 354388 - RNA, 32 nt, Human
caggaguagcuguauuugagguuuccuucacu

SEQ ID NO: 354389 - RNA, 32 nt, Human
caggaguagggaggacaucgacgaugugcccg

SEQ ID NO: 354390 - RNA, 32 nt, Human
caggagucagaggcuggagugcaauggcguga

SEQ ID NO: 354391 - RNA, 32 nt, Human
caggagucagccaccaagugucuccacaucgg

SEQ ID NO: 354392 - RNA, 32 nt, Human
caggaguccaaccugggcaacauggugaaacc

SEQ ID NO: 354393 - RNA, 32 nt, Human
caggaguccagcccagcacccaucugagucca

SEQ ID NO: 354394 - RNA, 32 nt, Human
caggaguccagccguccagccucgggguguag

SEQ ID NO: 354395 - RNA, 32 nt, Human
caggaguccagccugggcaaaauagcgagaga

SEQ ID NO: 354396 - RNA, 32 nt, Human
caggaguccagcggagaagggaagaggaggug

SEQ ID NO: 354397 - RNA, 21 nt, Human
caggagucccaucaccaggga

SEQ ID NO: 354398 - RNA, 32 nt, Human
caggaguccgagcccugcuccuugugggcgcu

SEQ ID NO: 354399 - RNA, 32 nt, Human
caggagucuacacugcagccucaggcacugug

SEQ ID NO: 354400 - RNA, 23 nt, Human
caggagucuccuccucacccgca

SEQ ID NO: 354401 - RNA, 32 nt, Human
caggagucugagacaagccuaggcaacaaaac

SEQ ID NO: 354402 - RNA, 32 nt, Human
caggagucugcacucuucagucuuugcaggca

SEQ ID NO: 354403 - RNA, 32 nt, Human
caggagucugccaggagccaggagcgccuaca

SEQ ID NO: 354404 - RNA, 25 nt, Human
caggagucugggaccccuccuggga

SEQ ID NO: 354405 - RNA, 32 nt, Human
caggagucuugagaccagccugggcaacaggc

SEQ ID NO: 354406 - RNA, 32 nt, Human
caggagucuugccauguugcccaggcugaucu

SEQ ID NO: 354407 - RNA, 32 nt, Human
caggagucuuugucccugcucagcccggaggc

SEQ ID NO: 354408 - RNA, 32 nt, Human
caggagugaacaggaacaggaaaacaaauggc

SEQ ID NO: 354409 - RNA, 32 nt, Human
caggagugaacccagaggcacguaugaaugaa

SEQ ID NO: 354410 - RNA, 32 nt, Human
caggagugaccaggacacuaccuccuagaagu

SEQ ID NO: 354411 - RNA, 32 nt, Human
caggagugagccaccacaccuggccacucgca

SEQ ID NO: 354412 - RNA, 32 nt, Human
caggagugagccaccgugcccggccuaaguag

SEQ ID NO: 354413 - RNA, 32 nt, Human
caggagugagccacugcgcccugccuggaacu

SEQ ID NO: 354414 - RNA, 19 nt, Human
caggagugagggcugggga

SEQ ID NO: 354415 - RNA, 32 nt, Human
caggagugcaagaccauccagggcaacauaac

SEQ ID NO: 354416 - RNA, 32 nt, Human
caggagugcuacucugugauaggcugcacuca

SEQ ID NO: 354417 - RNA, 18 nt, Human
caggagugggaguuggag

SEQ ID NO: 354418 - RNA, 32 nt, Human
caggagugggucuggucucaucagggagggca

SEQ ID NO: 354419 - RNA, 32 nt, Human
caggagugggugaggauggcagagggacacag

SEQ ID NO: 354420 - RNA, 31 nt, Human
caggaguggguggagaguggagugugcuggg

SEQ ID NO: 354421 - RNA, 32 nt, Human
caggagugggugggacacagagacccccgugc

SEQ ID NO: 354422 - RNA, 31 nt, Human
caggaguggguggggagugggggugggggua

SEQ ID NO: 354423 - RNA, 32 nt, Human
caggaguggucagaccuagaacaagagcccuu

SEQ ID NO: 354424 - RNA, 29 nt, Human
caggagugguggugugugccugugguccc

SEQ ID NO: 354425 - RNA, 32 nt, Human
caggaguuaagaccagccugggcaacauggca

SEQ ID NO: 354426 - RNA, 32 nt, Human
caggaguuaagggcuugggucugggguuuaag

SEQ ID NO: 354427 - RNA, 31 nt, Human
caggaguuauaucagcacccucaguccuauc

SEQ ID NO: 354428 - RNA, 32 nt, Human
caggaguucaaaaccaaccuggucuacauggu

SEQ ID NO: 354429 - RNA, 20 nt, Human
caggaguucaacaccagccu

SEQ ID NO: 354430 - RNA, 32 nt, Human
caggaguucaacuggccaacacagugaggcuu

SEQ ID NO: 354431 - RNA, 32 nt, Human
caggaguucaagaccagcugaccaacacggug

SEQ ID NO: 354432 - RNA, 22 nt, Human
caggaguucaaggcugcagaga

SEQ ID NO: 354433 - RNA, 22 nt, Human
caggaguucaaggcuucaguga

SEQ ID NO: 354434 - RNA, 31 nt, Human
caggaguucaauaaaugucuguugaugacug

SEQ ID NO: 354435 - RNA, 22 nt, Human
caggaguucccaccucaugggg

SEQ ID NO: 354436 - RNA, 32 nt, Human
caggaguucgaaccagccuggccaacauggug

SEQ ID NO: 354437 - RNA, 32 nt, Human
caggaguucgagaccaaccgaccaacauggug

SEQ ID NO: 354438 - RNA, 32 nt, Human
caggaguucgagccagccugaccaacaugaug

SEQ ID NO: 354439 - RNA, 32 nt, Human
caggaguugagaccagccuggccaacauggug

SEQ ID NO: 354440 - RNA, 32 nt, Human
caggaguugcguguguuuuucuuaauugaaag

SEQ ID NO: 354441 - RNA, 22 nt, Human
caggaguuggaggauacaguga

SEQ ID NO: 354442 - RNA, 20 nt, Human
caggaguuggaggcugcagu

SEQ ID NO: 354443 - RNA, 32 nt, Human
caggaguuggaggcugcaguaagccaugauua

SEQ ID NO: 354444 - RNA, 32 nt, Human
caggaguuggcuuugugaaacugaggcaggau

SEQ ID NO: 354445 - RNA, 32 nt, Human
caggaguugugagcccucuagggcaggguggg

SEQ ID NO: 354446 - RNA, 32 nt, Human
caggaguuugagaccagccuagacaacauggu

SEQ ID NO: 354447 - RNA, 32 nt, Human
caggaguuugagaccagccuagccaacaugcu

SEQ ID NO: 354448 - RNA, 32 nt, Human
caggaguuugagaccagccuagccaacauggu

SEQ ID NO: 354449 - RNA, 32 nt, Human
caggaguuugagaccagccuaggcaacacagu

SEQ ID NO: 354450 - RNA, 32 nt, Human
caggaguuugagaccagccuaggcaacauagc

SEQ ID NO: 354451 - RNA, 32 nt, Human
caggaguuugagaccagccuagucaacaugag

SEQ ID NO: 354452 - RNA, 32 nt, Human
caggaguuugagaccaggcuaggcaacauggc

SEQ ID NO: 354453 - RNA, 32 nt, Human
caggaguuugagacuagccuaggcaacacagu

SEQ ID NO: 354454 - RNA, 32 nt, Human
caggaguuugagccagccuggccaacauggug

SEQ ID NO: 354455 - RNA, 32 nt, Human
caggaguuugaggaugcagugagcuaugguca

SEQ ID NO: 354456 - RNA, 32 nt, Human
caggaguuugaggccagcuagagugacauagc

SEQ ID NO: 354457 - RNA, 32 nt, Human
caggaguuugcaggccagacugcaguggccug

SEQ ID NO: 354458 - RNA, 32 nt, Human
caggaguuuggaccagccugggcaacauaaga

SEQ ID NO: 354459 - RNA, 32 nt, Human
caggaguuuggaccagccugggcaacauggug

SEQ ID NO: 354460 - RNA, 32 nt, Human
caggaguuuuauguguuuaauagaugaauuua

SEQ ID NO: 354461 - RNA, 32 nt, Human
caggaguuuugagaccagccugggcaacauca

SEQ ID NO: 354462 - RNA, 32 nt, Human
caggauaaaucagccuuugugauguacugugu

SEQ ID NO: 354463 - RNA, 32 nt, Human
caggauaacaucacgagugcccggcugcugca

SEQ ID NO: 354464 - RNA, 32 nt, Human
caggauaagauguucaucaccgggaaccaaau

SEQ ID NO: 354465 - RNA, 32 nt, Human
caggauaagccucaggcccugggaaaccuccc

SEQ ID NO: 354466 - RNA, 32 nt, Human
caggauaaguagaagagugucugagcugugag

SEQ ID NO: 354467 - RNA, 22 nt, Human
caggauaaucuauucucuagcu

SEQ ID NO: 354468 - RNA, 32 nt, Human
caggauacaugcuggcgcugaagugcaggcag

SEQ ID NO: 354469 - RNA, 32 nt, Human
caggauaccacucugucacugugugacccuca

SEQ ID NO: 354470 - RNA, 32 nt, Human
caggauacuuuguggaaaguguuaaauaaagu

SEQ ID NO: 354471 - RNA, 32 nt, Human
caggauagaaggagguuucugaggcugacaga

SEQ ID NO: 354472 - RNA, 32 nt, Human
caggauagaauauucuggacuuaaacauuacu

SEQ ID NO: 354473 - RNA, 32 nt, Human
caggauagacucguuuaaaaacaaguauauua

SEQ ID NO: 354474 - RNA, 32 nt, Human
caggauagauguagccuauagaugugucauuu

SEQ ID NO: 354475 - RNA, 32 nt, Human
caggauagcccuuccuccucugggggccuggg

SEQ ID NO: 354476 - RNA, 32 nt, Human
caggauaggaauaggccaagugcugagaagau

SEQ ID NO: 354477 - RNA, 32 nt, Human
caggauaguugcacugagcacugugaggcccc

SEQ ID NO: 354478 - RNA, 32 nt, Human
caggauaucacagagaaggcaaguuugaauuc

SEQ ID NO: 354479 - RNA, 32 nt, Human
caggauauuguugaagccuccuggaauguuug

SEQ ID NO: 354480 - RNA, 28 nt, Human
caggaucaauguggugccucauccaggg

SEQ ID NO: 354481 - RNA, 32 nt, Human
caggaucacaccaggccgcgccuggccugcuu

SEQ ID NO: 354482 - RNA, 32 nt, Human
caggaucacaccauugcuguccagccugggug

SEQ ID NO: 354483 - RNA, 31 nt, Human
caggaucacagcuuacugcagccuugaccuc

SEQ ID NO: 354484 - RNA, 19 nt, Human
caggaucacauugcaaagc

SEQ ID NO: 354485 - RNA, 32 nt, Human
caggaucaccccaggucugucucauugcauau

SEQ ID NO: 354486 - RNA, 32 nt, Human
caggaucagaaaacaggaagguccaugcccag

SEQ ID NO: 354487 - RNA, 32 nt, Human
caggaucagaaagaagaaggagucaaagagug

SEQ ID NO: 354488 - RNA, 32 nt, Human
caggaucagacccagaggcagcugguuggggu

SEQ ID NO: 354489 - RNA, 32 nt, Human
caggaucagcagagcaggcaggcagaguggag

SEQ ID NO: 354490 - RNA, 32 nt, Human
caggaucaucaaaaugucauuaggcaguauaa

SEQ ID NO: 354491 - RNA, 32 nt, Human
caggaucaugccacugcacuccagcuugggcg

SEQ ID NO: 354492 - RNA, 32 nt, Human
caggaucauuucucuuucuucagggccagaca

SEQ ID NO: 354493 - RNA, 32 nt, Human
caggauccaaguuuaaaaagaaaugguguaaa

SEQ ID NO: 354494 - RNA, 32 nt, Human
caggauccaugggagcauucucaaaggcuuua

SEQ ID NO: 354495 - RNA, 32 nt, Human
caggauccugaagcccaugcaggcucugaacc

SEQ ID NO: 354496 - RNA, 32 nt, Human
caggauccuguuucuaaagaaacccaugcugu

SEQ ID NO: 354497 - RNA, 32 nt, Human
caggauccuuuggauuaauccucugccaccuc

SEQ ID NO: 354498 - RNA, 32 nt, Human
caggauccuuuucuaaauugaauguacuuuug

SEQ ID NO: 354499 - RNA, 32 nt, Human
caggaucgcgccauugcacuccagccugggca

SEQ ID NO: 354500 - RNA, 32 nt, Human
caggaucgcuugagcccaggaggucagggcug

SEQ ID NO: 354501 - RNA, 32 nt, Human
caggaucuaguuucuuucucucuacucuggcu

SEQ ID NO: 354502 - RNA, 32 nt, Human
caggaucucagcauugcacaaugccucaugga

SEQ ID NO: 354503 - RNA, 32 nt, Human
caggaucucaggcuggagugcaguggcacaau

SEQ ID NO: 354504 - RNA, 25 nt, Human
caggaucuccacagaccucggccuc

SEQ ID NO: 354505 - RNA, 32 nt, Human
caggaucuccccaagguggcagaaggaggccu

SEQ ID NO: 354506 - RNA, 32 nt, Human
caggaucucccccuucccagucgugacaacca

SEQ ID NO: 354507 - RNA, 18 nt, Human
caggaucucgcucuguca

SEQ ID NO: 354508 - RNA, 32 nt, Human
caggaucugacccgggaggaggccgcacccgc

SEQ ID NO: 354509 - RNA, 32 nt, Human
caggaucugcuucccuucucuccaggaccugc

SEQ ID NO: 354510 - RNA, 32 nt, Human
caggaucuggaaaaccucugcagccaccaaca

SEQ ID NO: 354511 - RNA, 32 nt, Human
caggaucugugucaaaagagcuucucuccaga

SEQ ID NO: 354512 - RNA, 32 nt, Human
caggaucuuccagcaccccaugccuggcccug

SEQ ID NO: 354513 - RNA, 32 nt, Human
caggaucuucugccuccgccagccugugagcu

SEQ ID NO: 354514 - RNA, 32 nt, Human
caggaucuugcucucuugcccagacuggaaua

SEQ ID NO: 354515 - RNA, 32 nt, Human
caggaugaaaauaaggaggaguugucagacaa

SEQ ID NO: 354516 - RNA, 32 nt, Human
caggaugaaagcccaagucaucaggguggcac

SEQ ID NO: 354517 - RNA, 32 nt, Human
caggaugaaaugaaguuugaggugagaagcau

SEQ ID NO: 354518 - RNA, 29 nt, Human
caggaugaacccuccuucggggccaagag

SEQ ID NO: 354519 - RNA, 27 nt, Human
caggaugaagaacaggcauugcaagga

SEQ ID NO: 354520 - RNA, 32 nt, Human
caggaugaagacaugagagaaaguuucaagau

SEQ ID NO: 354521 - RNA, 32 nt, Human
caggaugaagcgugagaucaccacgcugguga

SEQ ID NO: 354522 - RNA, 32 nt, Human
caggaugaaggagccagucgaagauccuguuc

SEQ ID NO: 354523 - RNA, 29 nt, Human
caggaugaccaccacccucgugucugcca

SEQ ID NO: 354524 - RNA, 32 nt, Human
caggaugacggucccugagcugcggaaauccc

SEQ ID NO: 354525 - RNA, 32 nt, Human
caggaugagagaaggggaaccagaagcuccgg

SEQ ID NO: 354526 - RNA, 32 nt, Human
caggaugagcacugcagugucgugacccuugg

SEQ ID NO: 354527 - RNA, 19 nt, Human
caggaugagccuccagcuc

SEQ ID NO: 354528 - RNA, 32 nt, Human
caggaugaggaagagaagaaaugaggagccug

SEQ ID NO: 354529 - RNA, 32 nt, Human
caggaugaggauguuguguggauagauuacua

SEQ ID NO: 354530 - RNA, 29 nt, Human
caggaugaggcgugcaggccugggugaag

SEQ ID NO: 354531 - RNA, 29 nt, Human
caggaugaggcugcuguguggccuguggc

SEQ ID NO: 354532 - RNA, 31 nt, Human
caggaugagggaaaagaaaaagauugagaga

SEQ ID NO: 354533 - RNA, 32 nt, Human
caggaugaggggcagaggaaacacuuuccacc

SEQ ID NO: 354534 - RNA, 32 nt, Human
caggaugaugauaaagccagaggcucuucaga

SEQ ID NO: 354535 - RNA, 21 nt, Human
caggaugauggcacugagaaa

SEQ ID NO: 354536 - RNA, 18 nt, Human
caggaugaugggcugcca

SEQ ID NO: 354537 - RNA, 22 nt, Human
caggaugauuacaugggccagg

SEQ ID NO: 354538 - RNA, 29 nt, Human
caggaugccaucaacuaacagagcaggca

SEQ ID NO: 354539 - RNA, 32 nt, Human
caggaugccguugguggcauuuacgugcuuua

SEQ ID NO: 354540 - RNA, 31 nt, Human
caggaugccuccugcugcccuguguccaucc

SEQ ID NO: 354541 - RNA, 32 nt, Human
caggaugccucucucacacuuguauucucgac

SEQ ID NO: 354542 - RNA, 32 nt, Human
caggaugccugggucucuucccguaacugucu

SEQ ID NO: 354543 - RNA, 32 nt, Human
caggaugcugggacugugcaaggagguaggac

SEQ ID NO: 354544 - RNA, 32 nt, Human
caggaugcuguugcuguaggacgccugcugcc

SEQ ID NO: 354545 - RNA, 29 nt, Human
caggaugcuuguucucuuucuccugggca

SEQ ID NO: 354546 - RNA, 32 nt, Human
caggauggaaacagucaggcacugacuggggu

SEQ ID NO: 354547 - RNA, 32 nt, Human
caggauggagaugagagagggugagagaugga

SEQ ID NO: 354548 - RNA, 29 nt, Human
caggauggagcggggcgcaggagccaagc

SEQ ID NO: 354549 - RNA, 22 nt, Human
caggauggagggaccacaggga

SEQ ID NO: 354550 - RNA, 32 nt, Human
caggauggagggcugcagaacuggcucaggaa

SEQ ID NO: 354551 - RNA, 32 nt, Human
caggauggagugaagaccuggagaggaggggc

SEQ ID NO: 354552 - RNA, 32 nt, Human
caggauggaguuucgcucugucgccaggcugg

SEQ ID NO: 354553 - RNA, 32 nt, Human
caggauggcagagagccagggcagagagagac

SEQ ID NO: 354554 - RNA, 32 nt, Human
caggauggcaggccgggcugggcucagccaag

SEQ ID NO: 354555 - RNA, 32 nt, Human
caggauggcaggggccucaucuguccuguucc

SEQ ID NO: 354556 - RNA, 32 nt, Human
caggauggcaggggccucaucugucuuguucc

SEQ ID NO: 354557 - RNA, 32 nt, Human
caggauggcccagucccuggcuccacugauca

SEQ ID NO: 354558 - RNA, 32 nt, Human
caggauggccucaagugcccagcccuccugga

SEQ ID NO: 354559 - RNA, 32 nt, Human
caggauggccuccaccuccugacuucaugauc

SEQ ID NO: 354560 - RNA, 32 nt, Human
caggauggcugcagugccagccuggggcagca

SEQ ID NO: 354561 - RNA, 19 nt, Human
caggaugggagcugcugaa

SEQ ID NO: 354562 - RNA, 32 nt, Human
caggaugggagcuuccugcugaucaucgagug

SEQ ID NO: 354563 - RNA, 32 nt, Human
caggaugggcaggagagcagagccgcggaguc

SEQ ID NO: 354564 - RNA, 32 nt, Human
caggaugggcagugauggagaaucacuguuga

SEQ ID NO: 354565 - RNA, 32 nt, Human
caggaugggcugcagguugcagucagggcuug

SEQ ID NO: 354566 - RNA, 32 nt, Human
caggauggggaugggaaagaaggugugcguuc

SEQ ID NO: 354567 - RNA, 25 nt, Human
caggauggggccguggugggccagg

SEQ ID NO: 354568 - RNA, 32 nt, Human
caggaugggguaggccuugugcucugagcaac

SEQ ID NO: 354569 - RNA, 29 nt, Human
caggaugggguuuguuaaaguuguuaaga

SEQ ID NO: 354570 - RNA, 32 nt, Human
caggauggguguguucauggguaaccaccccc

SEQ ID NO: 354571 - RNA, 32 nt, Human
caggauggucucaaacuccugaccucgugauc

SEQ ID NO: 354572 - RNA, 32 nt, Human
caggauggucucaaacuuguaaccucaaguga

SEQ ID NO: 354573 - RNA, 32 nt, Human
caggauggucucaauauccugaguucaugauc

SEQ ID NO: 354574 - RNA, 32 nt, Human
caggauggucucaaucuccuaaccuugagauc

SEQ ID NO: 354575 - RNA, 32 nt, Human
caggauggucucaaucuccugaccucauauuc

SEQ ID NO: 354576 - RNA, 32 nt, Human
caggauggucucaaucuccugaccucaugauc

SEQ ID NO: 354577 - RNA, 32 nt, Human
caggauggucucaaucuccugaccucgugauc

SEQ ID NO: 354578 - RNA, 32 nt, Human
caggauggucucaaucuccugacuucaugauc

SEQ ID NO: 354579 - RNA, 32 nt, Human
caggauggucucaaucucuugaccucauuauc

SEQ ID NO: 354580 - RNA, 32 nt, Human
caggauggucuugaucuccugaucucaugauc

SEQ ID NO: 354581 - RNA, 32 nt, Human
caggauggugucugugcacgugacuauuagag

SEQ ID NO: 354582 - RNA, 32 nt, Human
caggauggugugguagagggucccaggagggc

SEQ ID NO: 354583 - RNA, 32 nt, Human
caggaugguuccuucuggaaugucuauucccc

SEQ ID NO: 354584 - RNA, 32 nt, Human
caggaugucacuucuaaguuuaggcuauaaac

SEQ ID NO: 354585 - RNA, 32 nt, Human
caggaugucauuuucaaaaugcgggaugguac

SEQ ID NO: 354586 - RNA, 32 nt, Human
caggauguccccaaauuaagauacuacagauu

SEQ ID NO: 354587 - RNA, 32 nt, Human
caggauguccugcugcuggggucugggcagcg

SEQ ID NO: 354588 - RNA, 29 nt, Human
caggaugucgaugacagacuugcugaacg

SEQ ID NO: 354589 - RNA, 32 nt, Human
caggaugucuucacgcugagccccagccccca

SEQ ID NO: 354590 - RNA, 32 nt, Human
caggaugugagggcccgcaggagccgagucag

SEQ ID NO: 354591 - RNA, 32 nt, Human
caggauguggcacaugacagugccugaagggc

SEQ ID NO: 354592 - RNA, 32 nt, Human
caggauguguucagcauaucugugccacacag

SEQ ID NO: 354593 - RNA, 32 nt, Human
caggauguuccuucguuguuuccaugaguauu

SEQ ID NO: 354594 - RNA, 22 nt, Human
caggauguugcugccugcagaa

SEQ ID NO: 354595 - RNA, 20 nt, Human
caggauguuuguugccagaa

SEQ ID NO: 354596 - RNA, 31 nt, Human
caggauuacaaaggaaucaggauuuagccuc

SEQ ID NO: 354597 - RNA, 32 nt, Human
caggauuagacagucaaggaguggcuuacuac

SEQ ID NO: 354598 - RNA, 32 nt, Human
caggauuauaguuaacacugaaugaaggccuu

SEQ ID NO: 354599 - RNA, 32 nt, Human
caggauucaaaaccagccuggccaacauagug

SEQ ID NO: 354600 - RNA, 32 nt, Human
caggauucaagcaguucuccugccucagucuc

SEQ ID NO: 354601 - RNA, 25 nt, Human
caggauucaagcgauuccccugccu

SEQ ID NO: 354602 - RNA, 32 nt, Human
caggauucacauagaagaaaguuacauuacac

SEQ ID NO: 354603 - RNA, 32 nt, Human
caggauuccaauaauuaagaauacuucauaca

SEQ ID NO: 354604 - RNA, 32 nt, Human
caggauuccacagcccaaauggcgggacaguc

SEQ ID NO: 354605 - RNA, 32 nt, Human
caggauuccacagcccaaauggcgggacaguu

SEQ ID NO: 354606 - RNA, 19 nt, Human
caggauuccuuacuauuga

SEQ ID NO: 354607 - RNA, 32 nt, Human
caggauuccuuuccucaccauucuccuaugug

SEQ ID NO: 354608 - RNA, 32 nt, Human
caggauucuagguggagguugugcauguuguc

SEQ ID NO: 354609 - RNA, 32 nt, Human
caggauucugcagcuccuuuugugccaagccc

SEQ ID NO: 354610 - RNA, 32 nt, Human
caggauucuggcccagggcgccuccucccgac

SEQ ID NO: 354611 - RNA, 32 nt, Human
caggauucugggaggcuucaguuaccgcuggc

SEQ ID NO: 354612 - RNA, 32 nt, Human
caggauucuggguuuggaacucuagaaucaau

SEQ ID NO: 354613 - RNA, 32 nt, Human
caggauucuuucuccccacccguggcucugca

SEQ ID NO: 354614 - RNA, 32 nt, Human
caggauugagcugcgggguagcucccacagaa

SEQ ID NO: 354615 - RNA, 32 nt, Human
caggauugccacuccuguuucagaggaagcag

SEQ ID NO: 354616 - RNA, 32 nt, Human
caggauugcgccaccacacuccagccugggca

SEQ ID NO: 354617 - RNA, 32 nt, Human
caggauugcgccacugcaccccagcccgggug

SEQ ID NO: 354618 - RNA, 32 nt, Human
caggauugcuugagcccaggaguuugagccuu

SEQ ID NO: 354619 - RNA, 32 nt, Human
caggauuguaaguuuccugaggccuccccagu

SEQ ID NO: 354620 - RNA, 32 nt, Human
caggauugugccacuacacuccagccuggccg

SEQ ID NO: 354621 - RNA, 32 nt, Human
caggauugugccacugcacucaagccugggug

SEQ ID NO: 354622 - RNA, 32 nt, Human
caggauugugccauugcacuccagccugggca

SEQ ID NO: 354623 - RNA, 32 nt, Human
caggauuuacaaaggaucugggagcuguccag

SEQ ID NO: 354624 - RNA, 32 nt, Human
caggauuuauaaagcaaauuacuccaagguuu

SEQ ID NO: 354625 - RNA, 32 nt, Human
caggauuucauuuugcccugucuucacauuuc

SEQ ID NO: 354626 - RNA, 32 nt, Human
caggauuucugguggaagagacaggaaggccu

SEQ ID NO: 354627 - RNA, 24 nt, Human
caggauuugacucugggcaugaaa

SEQ ID NO: 354628 - RNA, 32 nt, Human
caggauuugaggaggagaagggaggagguggg

SEQ ID NO: 354629 - RNA, 32 nt, Human
caggauuuggagaaguggagagaaggucugau

SEQ ID NO: 354630 - RNA, 32 nt, Human
caggcaaaaagcaggcuaggugaccuugggac

SEQ ID NO: 354631 - RNA, 32 nt, Human
caggcaaagaggagaaaggagcauguaaggug

SEQ ID NO: 354632 - RNA, 32 nt, Human
caggcaaaggaggaggcacagauggaggugga

SEQ ID NO: 354633 - RNA, 32 nt, Human
caggcaaauguucauuucuccugguaccugua

SEQ ID NO: 354634 - RNA, 19 nt, Human
caggcaaauucagaugcug

SEQ ID NO: 354635 - RNA, 32 nt, Human
caggcaaauuugaaaauauacacauugagaau

SEQ ID NO: 354636 - RNA, 32 nt, Human
caggcaacacagcaagaccccaucucuauaaa

SEQ ID NO: 354637 - RNA, 32 nt, Human
caggcaacagggugaccagcuguccugguuuc

SEQ ID NO: 354638 - RNA, 32 nt, Human
caggcaacauagccuggaaaccugacuuuuaa

SEQ ID NO: 354639 - RNA, 32 nt, Human
caggcaacauggcaaaaccccgucucuacaaa

SEQ ID NO: 354640 - RNA, 32 nt, Human
caggcaacauggugaaaccccaucucuacaaa

SEQ ID NO: 354641 - RNA, 32 nt, Human
caggcaacucacugucuggcagucccagccuc

SEQ ID NO: 354642 - RNA, 27 nt, Human
caggcaacuucugcuagaacucuagcu

SEQ ID NO: 354643 - RNA, 32 nt, Human
caggcaagacauggucucuucucaggugaaug

SEQ ID NO: 354644 - RNA, 17 nt, Human
caggcaagaccaaucaa

SEQ ID NO: 354645 - RNA, 32 nt, Human
caggcaagacuugcuucagccccagguguggu

SEQ ID NO: 354646 - RNA, 24 nt, Human
caggcaagcaaaagauuguccccu

SEQ ID NO: 354647 - RNA, 21 nt, Human
caggcaagcagacagcucccc

SEQ ID NO: 354648 - RNA, 18 nt, Human
caggcaagcagcaccucc

SEQ ID NO: 354649 - RNA, 32 nt, Human
caggcaagcagccugcaccacccugccacugg

SEQ ID NO: 354650 - RNA, 32 nt, Human
caggcaagcccuucuuccuccagccugaguuc

SEQ ID NO: 354651 - RNA, 32 nt, Human
caggcaagcugcacacaucaagcgaaacgccu

SEQ ID NO: 354652 - RNA, 32 nt, Human
caggcaaggaagcacaagcugaucaagaugug

SEQ ID NO: 354653 - RNA, 32 nt, Human
caggcaaggagagcaggagccagcgugagacu

SEQ ID NO: 354654 - RNA, 32 nt, Human
caggcaaggaggaggagucagaugaggcccug

SEQ ID NO: 354655 - RNA, 32 nt, Human
caggcaaggauuccggagagaggaucaggugu

SEQ ID NO: 354656 - RNA, 32 nt, Human
caggcaaggcagcaggcaaggagcagagaugg

SEQ ID NO: 354657 - RNA, 32 nt, Human
caggcaaggcccugaaggcugaaggagaaaug

SEQ ID NO: 354658 - RNA, 32 nt, Human
caggcaaucaaagguaacaaacguucauugca

SEQ ID NO: 354659 - RNA, 32 nt, Human
caggcaaucuucagcggugauccagaggagau

SEQ ID NO: 354660 - RNA, 32 nt, Human
caggcaauggguggaaaucaggggaacguuuc

SEQ ID NO: 354661 - RNA, 32 nt, Human
caggcaauucuccugccccagccuccugauua

SEQ ID NO: 354662 - RNA, 32 nt, Human
caggcaauuucaccaccaaaugccaagaaaag

SEQ ID NO: 354663 - RNA, 32 nt, Human
caggcacaaccuaggauccuuugcuaccaguu

SEQ ID NO: 354664 - RNA, 32 nt, Human
caggcacaagccaccaugccuggcuaaaauuc

SEQ ID NO: 354665 - RNA, 32 nt, Human
caggcacacacauguaugcacacacacaugca

SEQ ID NO: 354666 - RNA, 32 nt, Human
caggcacacacauuuuucuacccuucuucuga

SEQ ID NO: 354667 - RNA, 32 nt, Human
caggcacacagcaaagggacugaacugacccc

SEQ ID NO: 354668 - RNA, 32 nt, Human
caggcacacaugcaugcacacauacacaugca

SEQ ID NO: 354669 - RNA, 21 nt, Human
caggcacacgcaccugcucuc

SEQ ID NO: 354670 - RNA, 32 nt, Human
caggcacacgccaccacacccaacuaauuuuu

SEQ ID NO: 354671 - RNA, 32 nt, Human
caggcacacuccucaucaauucucaggcugca

SEQ ID NO: 354672 - RNA, 32 nt, Human
caggcacacuucugagguacgguaucucucuc

SEQ ID NO: 354673 - RNA, 32 nt, Human
caggcacacuuggggccuugagcuccagggag

SEQ ID NO: 354674 - RNA, 21 nt, Human
caggcacagaccagggcucca

SEQ ID NO: 354675 - RNA, 32 nt, Human
caggcacagacccugauaguggguuuggguca

SEQ ID NO: 354676 - RNA, 32 nt, Human
caggcacagagcaaagggcugagagaagggag

SEQ ID NO: 354677 - RNA, 32 nt, Human
caggcacagaugagagacagaggcagagaagu

SEQ ID NO: 354678 - RNA, 32 nt, Human
caggcacagauggggccuugaaacgcuuuguc

SEQ ID NO: 354679 - RNA, 32 nt, Human
caggcacagauuuggagcuggugacaguucug

SEQ ID NO: 354680 - RNA, 32 nt, Human
caggcacagcaccuccagaacagugccccgga

SEQ ID NO: 354681 - RNA, 32 nt, Human
caggcacagcagaggugagagugggaggaggg

SEQ ID NO: 354682 - RNA, 32 nt, Human
caggcacaggcagaagagacauuagagcuuug

SEQ ID NO: 354683 - RNA, 32 nt, Human
caggcacaggcagugaggccgaggccaauagc

SEQ ID NO: 354684 - RNA, 21 nt, Human
caggcacagguccccagauga

SEQ ID NO: 354685 - RNA, 21 nt, Human
caggcacagucgcaaccuggc

SEQ ID NO: 354686 - RNA, 32 nt, Human
caggcacagugacugcagcucacguccagcca

SEQ ID NO: 354687 - RNA, 32 nt, Human
caggcacaguggggguggugaggaccugauag

SEQ ID NO: 354688 - RNA, 32 nt, Human
caggcacaucuguccuacagcuggcagagaca

SEQ ID NO: 354689 - RNA, 32 nt, Human
caggcacaucuugcuccagacucuccagcacc

SEQ ID NO: 354690 - RNA, 32 nt, Human
caggcacaugccaccauacgcagcuaauuugu

SEQ ID NO: 354691 - RNA, 32 nt, Human
caggcacaugccacuacacccagcuaacuuuu

SEQ ID NO: 354692 - RNA, 32 nt, Human
caggcacauguagcuacucaggaggcugagac

SEQ ID NO: 354693 - RNA, 32 nt, Human
caggcaccaacagugagcccacgaggaugguc

SEQ ID NO: 354694 - RNA, 32 nt, Human
caggcaccaagaggcggggguggagcagggag

SEQ ID NO: 354695 - RNA, 32 nt, Human
caggcaccaccacaccuggcuuuagaguucac

SEQ ID NO: 354696 - RNA, 32 nt, Human
caggcaccagccaccaugccuggcuaauuuuu

SEQ ID NO: 354697 - RNA, 32 nt, Human
caggcaccaggacuagggcuggagugaggggg

SEQ ID NO: 354698 - RNA, 32 nt, Human
caggcaccagugccaccuaccaagcugugaaa

SEQ ID NO: 354699 - RNA, 32 nt, Human
caggcaccagugccgcugcgcgggagcuaggg

SEQ ID NO: 354700 - RNA, 18 nt, Human
caggcacccaccaccacg

SEQ ID NO: 354701 - RNA, 32 nt, Human
caggcacccacgcccucuccacccucugauuc

SEQ ID NO: 354702 - RNA, 32 nt, Human
caggcacccacugacuccagccucauggaacc

SEQ ID NO: 354703 - RNA, 32 nt, Human
caggcacccagcuuugucuguggguuaguauu

SEQ ID NO: 354704 - RNA, 32 nt, Human
caggcacccggcagguaaaucacaaagcaaac

SEQ ID NO: 354705 - RNA, 32 nt, Human
caggcacccggccuuucuuucucccucuugca

SEQ ID NO: 354706 - RNA, 32 nt, Human
caggcacccugaccagcagagauugcugcaga

SEQ ID NO: 354707 - RNA, 32 nt, Human
caggcacccuggcagguucucagagccugccu

SEQ ID NO: 354708 - RNA, 32 nt, Human
caggcaccucgagggcuauucuccuggguucc

SEQ ID NO: 354709 - RNA, 32 nt, Human
caggcaccugggagccgaggcccugugaccag

SEQ ID NO: 354710 - RNA, 32 nt, Human
caggcaccuguaaucccagccaccugggaggc

SEQ ID NO: 354711 - RNA, 32 nt, Human
caggcaccuguaaucccagcuacucaggaagc

SEQ ID NO: 354712 - RNA, 32 nt, Human
caggcaccuguaaucccagcuacucaggaggc

SEQ ID NO: 354713 - RNA, 32 nt, Human
caggcaccuguaaucccagcuacucgggaggc

SEQ ID NO: 354714 - RNA, 32 nt, Human
caggcaccuguaaucccagcuacuugggagac

SEQ ID NO: 354715 - RNA, 32 nt, Human
caggcaccuguaaucccagcuacuugggaggc

SEQ ID NO: 354716 - RNA, 32 nt, Human
caggcaccuguaaucccaguuacuugggaggc

SEQ ID NO: 354717 - RNA, 32 nt, Human
caggcacgagccaccacacccagcuaauuuuu

SEQ ID NO: 354718 - RNA, 32 nt, Human
caggcacgagccaccaugcccagcuaauuuuc

SEQ ID NO: 354719 - RNA, 32 nt, Human
caggcacgagccacugugccuggccucaacug

SEQ ID NO: 354720 - RNA, 32 nt, Human
caggcacgcacaugugugcacgcacacauaca

SEQ ID NO: 354721 - RNA, 32 nt, Human
caggcacgccuguaaucccagcacuuugggag

SEQ ID NO: 354722 - RNA, 18 nt, Human
caggcacgcgccaccacg

SEQ ID NO: 354723 - RNA, 32 nt, Human
caggcacggauaacagcaaauggaauucugua

SEQ ID NO: 354724 - RNA, 32 nt, Human
caggcacggcugguggugugcagugaacagca

SEQ ID NO: 354725 - RNA, 32 nt, Human
caggcacgggccaccagcccagcuaauuuuug

SEQ ID NO: 354726 - RNA, 32 nt, Human
caggcacggugcugucugcauauugccaggug

SEQ ID NO: 354727 - RNA, 32 nt, Human
caggcacgugggaccucagcguguggagccac

SEQ ID NO: 354728 - RNA, 18 nt, Human
caggcacuauugccugga

SEQ ID NO: 354729 - RNA, 32 nt, Human
caggcacuccacugcuuggcaggaauucugca

SEQ ID NO: 354730 - RNA, 32 nt, Human
caggcacucccagagcagccauggaaggagcu

SEQ ID NO: 354731 - RNA, 32 nt, Human
caggcacugagccucucaggacaaugaccugg

SEQ ID NO: 354732 - RNA, 32 nt, Human
caggcacugaugcuagagggugaugacccugc

SEQ ID NO: 354733 - RNA, 32 nt, Human
caggcacugccaggaagccccagcugccccug

SEQ ID NO: 354734 - RNA, 32 nt, Human
caggcacugcccugggcuccagggacacauca

SEQ ID NO: 354735 - RNA, 32 nt, Human
caggcacugcccuguggucuuccccagguuga

SEQ ID NO: 354736 - RNA, 32 nt, Human
caggcacugcugcuucccagcuguguggccuc

SEQ ID NO: 354737 - RNA, 32 nt, Human
caggcacuggcagugggaagaggcagacgacu

SEQ ID NO: 354738 - RNA, 22 nt, Human
caggcacuggcauagcacggua

SEQ ID NO: 354739 - RNA, 32 nt, Human
caggcacugggagcuagaggagucucaagcuc

SEQ ID NO: 354740 - RNA, 32 nt, Human
caggcacugucuaaagccccaggcuggguuag

SEQ ID NO: 354741 - RNA, 32 nt, Human
caggcacuucaagccucaauaggaccaaggug

SEQ ID NO: 354742 - RNA, 32 nt, Human
caggcacuucagaaaggggagagaaagaaguc

SEQ ID NO: 354743 - RNA, 32 nt, Human
cagggucucaacucuguuacccaggcuggagu

SEQ ID NO: 354744 - RNA, 18 nt, Human
cagggucucacacuguca

SEQ ID NO: 354745 - RNA, 32 nt, Human
cagggucucaccauguugcccagccuggucuc

SEQ ID NO: 354746 - RNA, 32 nt, Human
cagggucucaccauguuguccagccuggucuc

SEQ ID NO: 354747 - RNA, 18 nt, Human
cagggucucacuauguca

SEQ ID NO: 354748 - RNA, 18 nt, Human
cagggucucacucuguca

SEQ ID NO: 354749 - RNA, 18 nt, Human
cagggucucacucuguua

SEQ ID NO: 354750 - RNA, 32 nt, Human
cagggucuccuuucuuucucacuucugucuug

SEQ ID NO: 354751 - RNA, 18 nt, Human
cagggucucgcucuguca

SEQ ID NO: 354752 - RNA, 32 nt, Human
cagggucucuucggagacccaggauuuagggu

SEQ ID NO: 354753 - RNA, 32 nt, Human
cagggucugaacugccuccauccuagggcaac

SEQ ID NO: 354754 - RNA, 32 nt, Human
cagggucugaggcugcagccccaguucgccau

SEQ ID NO: 354755 - RNA, 32 nt, Human
cagggucugagugcaaguucauguguggaaau

SEQ ID NO: 354756 - RNA, 32 nt, Human
cagggucugaguucuguggacccacuuguggg

SEQ ID NO: 354757 - RNA, 32 nt, Human
cagggucugcacucuaacccuaggcaucacau

SEQ ID NO: 354758 - RNA, 32 nt, Human
cagggucugccccucccaccccucucugcccu

SEQ ID NO: 354759 - RNA, 32 nt, Human
cagggucugcucuccucugaugguccaggcgg

SEQ ID NO: 354760 - RNA, 32 nt, Human
cagggucuggagaacccagaggcagcuccucc

SEQ ID NO: 354761 - RNA, 32 nt, Human
cagggucuggauguauuuacccaacucugauc

SEQ ID NO: 354762 - RNA, 32 nt, Human
cagggucuguuucuccccugcugugcggcuug

SEQ ID NO: 354763 - RNA, 32 nt, Human
cagggucuuugccucuaucugugguuuggcau

SEQ ID NO: 354764 - RNA, 24 nt, Human
cagggugaaaccccaucucuacua

SEQ ID NO: 354765 - RNA, 24 nt, Human
cagggugaaaccccgucucuacua

SEQ ID NO: 354766 - RNA, 32 nt, Human
cagggugaacaugccagcuaaugggacaucac

SEQ ID NO: 354767 - RNA, 32 nt, Human
cagggugaagaaaaagaagaagaugaagaaga

SEQ ID NO: 354768 - RNA, 32 nt, Human
cagggugacuggggucccaugacagcugcugu

SEQ ID NO: 354769 - RNA, 32 nt, Human
cagggugagacaaaugcucuguugaagccaug

SEQ ID NO: 354770 - RNA, 22 nt, Human
cagggugagacugcucccagug

SEQ ID NO: 354771 - RNA, 32 nt, Human
cagggugagcaucuccucuccacaccugccug

SEQ ID NO: 354772 - RNA, 32 nt, Human
cagggugagccccaaaauugggguucagcgug

SEQ ID NO: 354773 - RNA, 21 nt, Human
cagggugagcuggagcggcug

SEQ ID NO: 354774 - RNA, 32 nt, Human
cagggugaggcccaagccuggagcuuacccag

SEQ ID NO: 354775 - RNA, 32 nt, Human
cagggugagggaggggccccaggagaggccca

SEQ ID NO: 354776 - RNA, 32 nt, Human
cagggugagggcagaguguggugacagccgaa

SEQ ID NO: 354777 - RNA, 32 nt, Human
cagggugagggccaccuccacacccacccccu

SEQ ID NO: 354778 - RNA, 21 nt, Human
cagggugagggcccugaggaa

SEQ ID NO: 354779 - RNA, 32 nt, Human
cagggugagucuccuuccagugccccaguuuc

SEQ ID NO: 354780 - RNA, 32 nt, Human
cagggugauaaugucaauuggcagccaguugu

SEQ ID NO: 354781 - RNA, 32 nt, Human
cagggugcaauggcucaugccuauaaucccag

SEQ ID NO: 354782 - RNA, 32 nt, Human
cagggugcacacaagcaggugcagugcuguca

SEQ ID NO: 354783 - RNA, 32 nt, Human
cagggugcacaugcugcgaggucuccauccuc

SEQ ID NO: 354784 - RNA, 17 nt, Human
cagggugcagggcucag

SEQ ID NO: 354785 - RNA, 32 nt, Human
cagggugcagugaacucaguucuuggcccuug

SEQ ID NO: 354786 - RNA, 32 nt, Human
cagggugccacuaacccagcagguguggcagg

SEQ ID NO: 354787 - RNA, 21 nt, Human
cagggugccccuguccagccc

SEQ ID NO: 354788 - RNA, 32 nt, Human
cagggugcgguggcucacgccuguaaucccag

SEQ ID NO: 354789 - RNA, 32 nt, Human
cagggugcgguggcucaugccuauaauccuaa

SEQ ID NO: 354790 - RNA, 32 nt, Human
cagggugcuauugugaggccaucucugagcag

SEQ ID NO: 354791 - RNA, 32 nt, Human
cagggugcucacuggcaccccaucuuccugug

SEQ ID NO: 354792 - RNA, 32 nt, Human
cagggugcugacugucaagcauccccuguccc

SEQ ID NO: 354793 - RNA, 32 nt, Human
cagggugcugggauggcuauauuaggcauguu

SEQ ID NO: 354794 - RNA, 23 nt, Human
cagggugcugggauuacaggcau

SEQ ID NO: 354795 - RNA, 32 nt, Human
cagggugcugguucacucugcccagcccugaa

SEQ ID NO: 354796 - RNA, 32 nt, Human
caggguggagagaagcagggaccauugucuuc

SEQ ID NO: 354797 - RNA, 32 nt, Human
caggguggaggacagguuuggcccagaaagac

SEQ ID NO: 354798 - RNA, 32 nt, Human
caggguggagugagcccauggugggcaguggg

SEQ ID NO: 354799 - RNA, 32 nt, Human
caggguggcacgugccuguaauuccagcuacu

SEQ ID NO: 354800 - RNA, 32 nt, Human
caggguggcagccccggagccggggaauguga

SEQ ID NO: 354801 - RNA, 32 nt, Human
caggguggcaggacugggagaaucucugaggc

SEQ ID NO: 354802 - RNA, 21 nt, Human
caggguggccagcaguggcug

SEQ ID NO: 354803 - RNA, 32 nt, Human
caggguggcccacaccuguuccuagcagggcg

SEQ ID NO: 354804 - RNA, 32 nt, Human
caggguggccugcagcccagagccccaguccc

SEQ ID NO: 354805 - RNA, 19 nt, Human
caggguggccugugaccug

SEQ ID NO: 354806 - RNA, 32 nt, Human
caggguggcgacauggagagagggaagcucaa

SEQ ID NO: 354807 - RNA, 32 nt, Human
caggguggcgcacuacuauaaucccagcugcu

SEQ ID NO: 354808 - RNA, 32 nt, Human
caggguggcucacaccuguaaucccugcacuu

SEQ ID NO: 354809 - RNA, 32 nt, Human
cagggugggagcagggaaagaaaaggaaaaua

SEQ ID NO: 354810 - RNA, 32 nt, Human
cagggugggaggaucguuugagcccaggaguu

SEQ ID NO: 354811 - RNA, 32 nt, Human
cagggugggaggauggguggucagguaagaca

SEQ ID NO: 354812 - RNA, 32 nt, Human
caggguggggaacaagaucgccucccagggcc

SEQ ID NO: 354813 - RNA, 23 nt, Human
caggguggggagagcgggccagg

SEQ ID NO: 354814 - RNA, 32 nt, Human
caggguggggagguggcagcugccugcccugc

SEQ ID NO: 354815 - RNA, 32 nt, Human
caggguggggcugaggaacugacguggagcgg

SEQ ID NO: 354816 - RNA, 21 nt, Human
cagggugggggaagggccagg

SEQ ID NO: 354817 - RNA, 32 nt, Human
cagggugggggucauucagccuccacuguguc

SEQ ID NO: 354818 - RNA, 32 nt, Human
caggguggggucaggaaucugcauuuuaacua

SEQ ID NO: 354819 - RNA, 32 nt, Human
cagggugggugagcucucaggccgagagccuu

SEQ ID NO: 354820 - RNA, 32 nt, Human
cagggugggugaggaagugcacagggguccag

SEQ ID NO: 354821 - RNA, 32 nt, Human
cagggugggugaggugcagaugaccaggagug

SEQ ID NO: 354822 - RNA, 32 nt, Human
caggguggguuuucucacugaagagagaaagc

SEQ ID NO: 354823 - RNA, 32 nt, Human
cagggugguccagccuaggugacagggugguc

SEQ ID NO: 354824 - RNA, 32 nt, Human
caggguggucucaaacuccugaccugaggcga

SEQ ID NO: 354825 - RNA, 32 nt, Human
caggguggucucaaacuccugggcucaagcga

SEQ ID NO: 354826 - RNA, 32 nt, Human
caggguggucucaaacuccugggcucaaguga

SEQ ID NO: 354827 - RNA, 32 nt, Human
caggguggucucaaacuccugugcucaaguga

SEQ ID NO: 354828 - RNA, 32 nt, Human
cagggugguggggacuccugagcccagccugg

SEQ ID NO: 354829 - RNA, 32 nt, Human
caggguguacacacaagaaggugggcugggca

SEQ ID NO: 354830 - RNA, 32 nt, Human
caggguguaguggcucaugacuguaaucccag

SEQ ID NO: 354831 - RNA, 32 nt, Human
caggguguccccagccaucaggagacuugagu

SEQ ID NO: 354832 - RNA, 32 nt, Human
cagggugucuggggcaggaggaggccaacuca

SEQ ID NO: 354833 - RNA, 32 nt, Human
cagggugucugucagugggccucaugguaaga

SEQ ID NO: 354834 - RNA, 32 nt, Human
cagggugucuguguccgagccacagccagagu

SEQ ID NO: 354835 - RNA, 21 nt, Human
cagggugucuuccuucagccc

SEQ ID NO: 354836 - RNA, 32 nt, Human
cagggugugcaggaguggcaggaugguugcau

SEQ ID NO: 354837 - RNA, 32 nt, Human
cagggugugcaggggcagagaaggaagggacc

SEQ ID NO: 354838 - RNA, 32 nt, Human
cagggugugccgggccaagauacucacaggcu

SEQ ID NO: 354839 - RNA, 32 nt, Human
cagggugugcucggugggcagugugggacugg

SEQ ID NO: 354840 - RNA, 32 nt, Human
cagggugugguagcucaagccuguaaucccag

SEQ ID NO: 354841 - RNA, 32 nt, Human
cagggugugguggcuuaugccuguaauccuag

SEQ ID NO: 354842 - RNA, 32 nt, Human
cagggugugguggugcaugccuguaaucccag

SEQ ID NO: 354843 - RNA, 32 nt, Human
caggguguguuggcacacgccuguaauaccag

SEQ ID NO: 354844 - RNA, 32 nt, Human
caggguguugagccacucugacucagccaaua

SEQ ID NO: 354845 - RNA, 32 nt, Human
caggguuaaguucaguaagaaaugcuguagcu

SEQ ID NO: 354846 - RNA, 32 nt, Human
caggguuaugucgaggaagggaagaaagaaac

SEQ ID NO: 354847 - RNA, 32 nt, Human
caggguucaagcaauucuccugccucagccuu

SEQ ID NO: 354848 - RNA, 32 nt, Human
caggguucaagcaauucuccugccucagucuc

SEQ ID NO: 354849 - RNA, 32 nt, Human
caggguucaagcgaugcuccuaccucagccuc

SEQ ID NO: 354850 - RNA, 32 nt, Human
caggguucaagugauucucccaccucagccuc

SEQ ID NO: 354851 - RNA, 32 nt, Human
caggguucaaucgauucuccugccucacccuc

SEQ ID NO: 354852 - RNA, 32 nt, Human
caggguucaccaggaugagagaggagagagga

SEQ ID NO: 354853 - RNA, 32 nt, Human
caggguucaccaggauguaagaggagagagga

SEQ ID NO: 354854 - RNA, 32 nt, Human
caggguucaguccacguuguguuuucacaccu

SEQ ID NO: 354855 - RNA, 20 nt, Human
caggguuccccacaguuuca

SEQ ID NO: 354856 - RNA, 32 nt, Human
caggguucccgguggugugcugugaagauguc

SEQ ID NO: 354857 - RNA, 32 nt, Human
caggguucgggcaauucuccugccuuagccuc

SEQ ID NO: 354858 - RNA, 32 nt, Human
caggguucuccccucuggagucugaccaauua

SEQ ID NO: 354859 - RNA, 32 nt, Human
caggguucuccucuucucucacaggcggcucg

SEQ ID NO: 354860 - RNA, 32 nt, Human
caggguugagaggagccacuagcaccauccca

SEQ ID NO: 354861 - RNA, 32 nt, Human
caggguugcagugacaguaagcugaauagcuc

SEQ ID NO: 354862 - RNA, 32 nt, Human
caggguugcccaggguggagugcaguggcagg

SEQ ID NO: 354863 - RNA, 32 nt, Human
caggguugccuagcccuguacaauguaauuua

SEQ ID NO: 354864 - RNA, 32 nt, Human
caggguugcuaaucagauaccugcugucacca

SEQ ID NO: 354865 - RNA, 32 nt, Human
caggguugcuggguacagaagccagacuucuu

SEQ ID NO: 354866 - RNA, 20 nt, Human
caggguugcugugcuggcca

SEQ ID NO: 354867 - RNA, 32 nt, Human
caggguuggacccccugagauccagcccuacu

SEQ ID NO: 354868 - RNA, 32 nt, Human
caggguuggggaggggcacagggagguggugg

SEQ ID NO: 354869 - RNA, 32 nt, Human
caggguuggggauaaggucacagaucaacagg

SEQ ID NO: 354870 - RNA, 32 nt, Human
caggguugugcugacacgccugccuguccacc

SEQ ID NO: 354871 - RNA, 32 nt, Human
caggguuguugagugaggggagcgugggaugg

SEQ ID NO: 354872 - RNA, 24 nt, Human
caggguuucaccauuuuggccagg

SEQ ID NO: 354873 - RNA, 16 nt, Human
caggguuuccguggcc

SEQ ID NO: 354874 - RNA, 23 nt, Human
caggguuucuccauuuuggccag

SEQ ID NO: 354875 - RNA, 25 nt, Human
caggguuugaagaaaaggaggggga

SEQ ID NO: 354876 - RNA, 32 nt, Human
caggguuugagaccagccuggccaacauggcg

SEQ ID NO: 354877 - RNA, 32 nt, Human
caggguuugccaggcuaagcagcaaugccagg

SEQ ID NO: 354878 - RNA, 32 nt, Human
caggguuuuugaaggaguggauuuucuuuguu

SEQ ID NO: 354879 - RNA, 32 nt, Human
cagguaaaccaggagacacagaagacguacca

SEQ ID NO: 354880 - RNA, 21 nt, Human
cagguaaaugugaguuaaaua

SEQ ID NO: 354881 - RNA, 32 nt, Human
cagguaaauucucucacuugugaaugggagaa

SEQ ID NO: 354882 - RNA, 32 nt, Human
cagguaacaugagaagggcugaucaggagaug

SEQ ID NO: 354883 - RNA, 32 nt, Human
cagguaaccaacaagaaaugcaagccgucgac

SEQ ID NO: 354884 - RNA, 32 nt, Human
cagguaaccaggauggcuaacaggcuuugaua

SEQ ID NO: 354885 - RNA, 32 nt, Human
cagguaaccuggacaaaccaggaagcaccaaa

SEQ ID NO: 354886 - RNA, 32 nt, Human
cagguaagcaaacucagcauuaaggauguagu

SEQ ID NO: 354887 - RNA, 32 nt, Human
cagguaagccauuccuggauaccugacccuug

SEQ ID NO: 354888 - RNA, 31 nt, Human
cagguaaggguggaacaggagggguggggag

SEQ ID NO: 354889 - RNA, 32 nt, Human
cagguaaggguggaacaggagggguggggagg

SEQ ID NO: 354890 - RNA, 32 nt, Human
cagguaauccugcuguucgaugaagcaguucc

SEQ ID NO: 354891 - RNA, 32 nt, Human
cagguacaaauguacacaucaaaaugcccaua

SEQ ID NO: 354892 - RNA, 19 nt, Human
cagguacacauuguuccug

SEQ ID NO: 354893 - RNA, 32 nt, Human
cagguacaggacuggucuaagcugcucaagau

SEQ ID NO: 354894 - RNA, 32 nt, Human
cagguacauaucacgcgcacagccuggcagcc

SEQ ID NO: 354895 - RNA, 32 nt, Human
cagguaccaugcggacgcgcgagcccggcgag

SEQ ID NO: 354896 - RNA, 32 nt, Human
cagguacccacugucugucuaccuucccacug

SEQ ID NO: 354897 - RNA, 32 nt, Human
cagguacccagguaugccgcagagccaggcac

SEQ ID NO: 354898 - RNA, 32 nt, Human
cagguacccugccuccauuuugguuaccaucc

SEQ ID NO: 354899 - RNA, 32 nt, Human
cagguaccuauuauuguucccuggugaaacug

SEQ ID NO: 354900 - RNA, 32 nt, Human
cagguaccuccaggaacauuuugguuuuggcc

SEQ ID NO: 354901 - RNA, 32 nt, Human
cagguacguguagucccugcuacucaggaggc

SEQ ID NO: 354902 - RNA, 32 nt, Human
cagguacuacaucaaccaaaagaggaaauacu

SEQ ID NO: 354903 - RNA, 32 nt, Human
cagguacugccugggccucugaggcaguccca

SEQ ID NO: 354904 - RNA, 32 nt, Human
cagguacuggaggaagagagaagaggcaugac

SEQ ID NO: 354905 - RNA, 32 nt, Human
cagguacugugguaugcuuagcauuuucuaag

SEQ ID NO: 354906 - RNA, 32 nt, Human
cagguacuucucucuccuuccuccuucuccuc

SEQ ID NO: 354907 - RNA, 32 nt, Human
cagguacuugggaggcugaggugggaggauua

SEQ ID NO: 354908 - RNA, 32 nt, Human
cagguacuuuaucccagaacauccaagcugga

SEQ ID NO: 354909 - RNA, 32 nt, Human
cagguagaaaaauguaauguagcuuuuuccac

SEQ ID NO: 354910 - RNA, 32 nt, Human
cagguagaauauguggcacuagcaccgacaaa

SEQ ID NO: 354911 - RNA, 32 nt, Human
cagguagacaagcuccagcagagaguggccag

SEQ ID NO: 354912 - RNA, 32 nt, Human
cagguagagacaacauccugugacugccaggc

SEQ ID NO: 354913 - RNA, 32 nt, Human
cagguagagcaguucugaccgagaggauagac

SEQ ID NO: 354914 - RNA, 30 nt, Human
cagguagagcaucaccagcuccuguggccu

SEQ ID NO: 354915 - RNA, 21 nt, Human
cagguagaucacaaggucagg

SEQ ID NO: 354916 - RNA, 21 nt, Human
cagguagaucacgaggucagg

SEQ ID NO: 354917 - RNA, 32 nt, Human
cagguagaucacugcauccgguuccuccucuu

SEQ ID NO: 354918 - RNA, 23 nt, Human
cagguagaucacuugagaucagg

SEQ ID NO: 354919 - RNA, 32 nt, Human
cagguagauggaagcugcaucugcccacgaug

SEQ ID NO: 354920 - RNA, 19 nt, Human
cagguagauucugccugaa

SEQ ID NO: 354921 - RNA, 32 nt, Human
cagguagauuguagcccaggaguuugagaaca

SEQ ID NO: 354922 - RNA, 32 nt, Human
cagguagcaaagugacgccgagggccugagug

SEQ ID NO: 354923 - RNA, 32 nt, Human
cagguagcacgccugcuggcagagguaccugg

SEQ ID NO: 354924 - RNA, 20 nt, Human
cagguagcagccgcaagggg

SEQ ID NO: 354925 - RNA, 32 nt, Human
cagguagcccaggguguuguggguggcagcac

SEQ ID NO: 354926 - RNA, 32 nt, Human
cagguagcuagaaaccaucugggcuugacaaa

SEQ ID NO: 354927 - RNA, 32 nt, Human
cagguagcucaaaccucucuguccucaguuuc

SEQ ID NO: 354928 - RNA, 22 nt, Human
cagguagcugggauuacaggca

SEQ ID NO: 354929 - RNA, 23 nt, Human
cagguagcugggauuacaggcau

SEQ ID NO: 354930 - RNA, 32 nt, Human
cagguagcuugcgugggccaggagaaggugau

SEQ ID NO: 354931 - RNA, 32 nt, Human
cagguaggaaacacuuguaguugggggugggg

SEQ ID NO: 354932 - RNA, 32 nt, Human
cagguaggaaaucaccuuugacuuagcuucca

SEQ ID NO: 354933 - RNA, 32 nt, Human
cagguaggagaaggagacgaagaugcuuuagg

SEQ ID NO: 354934 - RNA, 32 nt, Human
cagguaggcuuggaggaccaagcccuggauga

SEQ ID NO: 354935 - RNA, 32 nt, Human
cagguagggaaaaaguuggucuaauugaagau

SEQ ID NO: 354936 - RNA, 32 nt, Human
cagguagggaaaggggacuugugguaguggac

SEQ ID NO: 354937 - RNA, 32 nt, Human
cagguagggggagaggaggaguuaagggcucc

SEQ ID NO: 354938 - RNA, 32 nt, Human
cagguaguaagaagauuucaaauucacauuag

SEQ ID NO: 354939 - RNA, 32 nt, Human
cagguagucuggguuggaggaggcagagccau

SEQ ID NO: 354940 - RNA, 32 nt, Human
cagguagugaguagcugguacuacaggugugu

SEQ ID NO: 354941 - RNA, 32 nt, Human
cagguauaaagaaauggaauguagacaauaug

SEQ ID NO: 354942 - RNA, 32 nt, Human
cagguauagcugacaucuccucuaucacauua

SEQ ID NO: 354943 - RNA, 32 nt, Human
cagguaucuccugacagagguacuuaacaaug

SEQ ID NO: 354944 - RNA, 32 nt, Human
cagguaucugcuggccgcugacugaccagguc

SEQ ID NO: 354945 - RNA, 32 nt, Human
cagguaucuugcucucuaggccugugugugug

SEQ ID NO: 354946 - RNA, 32 nt, Human
cagguaugagccacaacgcccagccaucauuu

SEQ ID NO: 354947 - RNA, 32 nt, Human
cagguaugagccaccacacccagcccaacuca

SEQ ID NO: 354948 - RNA, 32 nt, Human
cagguaugagccaccacgcccggucagaagcu

SEQ ID NO: 354949 - RNA, 32 nt, Human
cagguaugagccaccaugccuggccccagccc

SEQ ID NO: 354950 - RNA, 32 nt, Human
cagguaugagccaccgcaccuggcccuugggc

SEQ ID NO: 354951 - RNA, 32 nt, Human
cagguaugagccacugcgcccggccaguuacu

SEQ ID NO: 354952 - RNA, 32 nt, Human
cagguaugaguggcagagggagcagucccauc

SEQ ID NO: 354953 - RNA, 32 nt, Human
cagguaugcaccacagcuccaggccaaccuuu

SEQ ID NO: 354954 - RNA, 32 nt, Human
cagguaugcaccaccacaccuggcuaauuuug

SEQ ID NO: 354955 - RNA, 32 nt, Human
cagguaugcaccaccacgcccggcuaauuuug

SEQ ID NO: 354956 - RNA, 32 nt, Human
cagguaugcaccaccauaccuggcugauuuuu

SEQ ID NO: 354957 - RNA, 32 nt, Human
cagguaugcaccaccaugccuggcuaauuuuu

SEQ ID NO: 354958 - RNA, 24 nt, Human
cagguaugccucaccaauuugccc

SEQ ID NO: 354959 - RNA, 32 nt, Human
cagguauucauuuugccuaauuucaccucaag

SEQ ID NO: 354960 - RNA, 32 nt, Human
cagguauucuauguggcaacccuagguagggg

SEQ ID NO: 354961 - RNA, 32 nt, Human
cagguauucuggacuguguuuuagaucaccug

SEQ ID NO: 354962 - RNA, 32 nt, Human
cagguauugggagacccacagcuaagacaccg

SEQ ID NO: 354963 - RNA, 32 nt, Human
cagguauuguacucgggaggcugaggugggag

SEQ ID NO: 354964 - RNA, 32 nt, Human
cagguauuuugcaaaaacacugccucauagcu

SEQ ID NO: 354965 - RNA, 32 nt, Human
caggucaaagaauucgccuuugccgcuaccgc

SEQ ID NO: 354966 - RNA, 20 nt, Human
caggucaacacugcacucca

SEQ ID NO: 354967 - RNA, 32 nt, Human
caggucaacacugcacuccagccugggcgaca

SEQ ID NO: 354968 - RNA, 32 nt, Human
caggucaacaucagcacccaagagcuuuggga

SEQ ID NO: 354969 - RNA, 32 nt, Human
caggucaacgugaccaaccuuccuugcuuaca

SEQ ID NO: 354970 - RNA, 23 nt, Human
caggucaacuggagucccuggug

SEQ ID NO: 354971 - RNA, 32 nt, Human
caggucaaggaaggcauccuguggaaguaaca

SEQ ID NO: 354972 - RNA, 32 nt, Human
caggucaaggaccuggcuucugggacccaggg

SEQ ID NO: 354973 - RNA, 19 nt, Human
caggucaaggcugcagcga

SEQ ID NO: 354974 - RNA, 32 nt, Human
caggucaaucagcaaggacccaucucugcccu

SEQ ID NO: 354975 - RNA, 32 nt, Human
caggucaaugcacagacccaggaagagacuga

SEQ ID NO: 354976 - RNA, 32 nt, Human
caggucacaaacuccaaucuuuguuuggguag

SEQ ID NO: 354977 - RNA, 32 nt, Human
caggucacaccaguccuucuguccucacacug

SEQ ID NO: 354978 - RNA, 22 nt, Human
caggucacagauccccuuuccc

SEQ ID NO: 354979 - RNA, 32 nt, Human
caggucacagcucauuguccaucaggaaauuc

SEQ ID NO: 354980 - RNA, 32 nt, Human
caggucaccgagguaggacagcaaauuaaaac

SEQ ID NO: 354981 - RNA, 32 nt, Human
caggucacuaucugccucccacccugggggca

SEQ ID NO: 354982 - RNA, 32 nt, Human
caggucacugcaaccucugccucccagguuca

SEQ ID NO: 354983 - RNA, 32 nt, Human
caggucacugcaaccucugccuccuggguuca

SEQ ID NO: 354984 - RNA, 32 nt, Human
caggucacuguuccacccaccugggcacagca

SEQ ID NO: 354985 - RNA, 32 nt, Human
caggucacuuccuccaugaagagaccaguuuc

SEQ ID NO: 354986 - RNA, 32 nt, Human
caggucacuuccuuuucacucaguuuaaauug

SEQ ID NO: 354987 - RNA, 32 nt, Human
caggucacuuuauucuguaacucuccauucac

SEQ ID NO: 354988 - RNA, 32 nt, Human
caggucagaaaaacccuacaaauguaaggaau

SEQ ID NO: 354989 - RNA, 32 nt, Human
caggucagaagcgaauacucugccauuaucuc

SEQ ID NO: 354990 - RNA, 19 nt, Human
caggucagacccaguccug

SEQ ID NO: 354991 - RNA, 32 nt, Human
caggucagaggcagcuuccagccugggggcug

SEQ ID NO: 354992 - RNA, 18 nt, Human
caggucagcccugugucu

SEQ ID NO: 354993 - RNA, 32 nt, Human
caggucagccucccgccucuccuccugcugaa

SEQ ID NO: 354994 - RNA, 32 nt, Human
caggucagccuccuccgggccucuccccacuc

SEQ ID NO: 354995 - RNA, 32 nt, Human
caggucagcucaggcuggagcaggcauaugag

SEQ ID NO: 354996 - RNA, 32 nt, Human
caggucagcucaggcuggagcagguauaugag

SEQ ID NO: 354997 - RNA, 32 nt, Human
caggucagcucugcaaggggcuugucucugug

SEQ ID NO: 354998 - RNA, 32 nt, Human
caggucaggaaccugggugcagcuucaugggg

SEQ ID NO: 354999 - RNA, 32 nt, Human
caggucaggaccaggacccagggagaggcugu

SEQ ID NO: 355000 - RNA, 32 nt, Human
caggucaggaggugccguccaggugugcggcg

SEQ ID NO: 355001 - RNA, 32 nt, Human
caggucaggaguuugagaccagccuggccaac

SEQ ID NO: 355002 - RNA, 32 nt, Human
caggucaggugcuuguucuguccucuugccuu

SEQ ID NO: 355003 - RNA, 31 nt, Human
caggucagugucucugggcuuugugcaagcu

SEQ ID NO: 355004 - RNA, 32 nt, Human
caggucaguuuaugaaacagaaaaguaggaau

SEQ ID NO: 355005 - RNA, 32 nt, Human
caggucaguuucuucuuuuaauucaucauuga

SEQ ID NO: 355006 - RNA, 32 nt, Human
caggucaucccucccuucuucucucuccuuug

SEQ ID NO: 355007 - RNA, 24 nt, Human
caggucaucugcugggaucuaguu

SEQ ID NO: 355008 - RNA, 32 nt, Human
caggucaugcaaauuuaagaaaaggcuaaaag

SEQ ID NO: 355009 - RNA, 32 nt, Human
caggucauggcacguuuaacaaaaagacgaca

SEQ ID NO: 355010 - RNA, 32 nt, Human
caggucauuaggauuugggaggcuguauuucu

SEQ ID NO: 355011 - RNA, 22 nt, Human
caggucauucuuuuacuaggcu

SEQ ID NO: 355012 - RNA, 32 nt, Human
caggucauugcacucaagccugggcaauaaga

SEQ ID NO: 355013 - RNA, 32 nt, Human
caggucauuucuccucucucagacucagugga

SEQ ID NO: 355014 - RNA, 32 nt, Human
cagguccaaaggcucuuuccagauggagaaga

SEQ ID NO: 355015 - RNA, 32 nt, Human
cagguccaaauacugaaugucuccuuuacuuu

SEQ ID NO: 355016 - RNA, 32 nt, Human
cagguccaacuuggcccugacuccugcggggg

SEQ ID NO: 355017 - RNA, 24 nt, Human
cagguccaagcgauucucuugccu

SEQ ID NO: 355018 - RNA, 32 nt, Human
cagguccacagaacuacugcagcccagaggac

SEQ ID NO: 355019 - RNA, 32 nt, Human
cagguccacagagagggagagcagagaaagaa

SEQ ID NO: 355020 - RNA, 32 nt, Human
cagguccacugggugaggagagaugugugggc

SEQ ID NO: 355021 - RNA, 32 nt, Human
cagguccagauuccacgagagccuucugggcu

SEQ ID NO: 355022 - RNA, 32 nt, Human
cagguccagcacuugggagcugacugugcugg

SEQ ID NO: 355023 - RNA, 32 nt, Human
cagguccagccuugccagucucagccuccggu

SEQ ID NO: 355024 - RNA, 20 nt, Human
cagguccagcuccucccuca

SEQ ID NO: 355025 - RNA, 20 nt, Human
cagguccaggggaguccagu

SEQ ID NO: 355026 - RNA, 32 nt, Human
cagguccagugcuugguccugcucuggucacu

SEQ ID NO: 355027 - RNA, 32 nt, Human
caggucccaacacuuugggcugggguuggcca

SEQ ID NO: 355028 - RNA, 23 nt, Human
caggucccacgccaggccagcag

SEQ ID NO: 355029 - RNA, 32 nt, Human
caggucccaggggagagguuggggcuggcagg

SEQ ID NO: 355030 - RNA, 32 nt, Human
caggucccauugagugguuuuccucuuggcag

SEQ ID NO: 355031 - RNA, 32 nt, Human
cagguccccaaagcccuucuuuucccaucacu

SEQ ID NO: 355032 - RNA, 32 nt, Human
cagguccccaagucccuucacaggguccccac

SEQ ID NO: 355033 - RNA, 32 nt, Human
cagguccccacucuccccugugaagccaaccc

SEQ ID NO: 355034 - RNA, 25 nt, Human
cagguccccagaugagaagucugcu

SEQ ID NO: 355035 - RNA, 32 nt, Human
cagguccccugccucugggcacccuuugggcc

SEQ ID NO: 355036 - RNA, 32 nt, Human
caggucccgaguaagucagguuuucuucaccc

SEQ ID NO: 355037 - RNA, 32 nt, Human
caggucccggaggucucagacccgcaggccug

SEQ ID NO: 355038 - RNA, 32 nt, Human
caggucccggcccugggugcucagccagcucg

SEQ ID NO: 355039 - RNA, 23 nt, Human
caggucccucaguucucacgccu

SEQ ID NO: 355040 - RNA, 32 nt, Human
caggucccuccacccccauucugagucucugu

SEQ ID NO: 355041 - RNA, 21 nt, Human
caggucccucuuagaccagcu

SEQ ID NO: 355042 - RNA, 19 nt, Human
caggucccugccacucagu

SEQ ID NO: 355043 - RNA, 22 nt, Human
caggucccugccuccuaccacu

SEQ ID NO: 355044 - RNA, 22 nt, Human
caggucccugcuggaagcggcu

SEQ ID NO: 355045 - RNA, 23 nt, Human
caggucccugcuggaagcggcug

SEQ ID NO: 355046 - RNA, 32 nt, Human
caggucccuggagcgggugacacaccugagau

SEQ ID NO: 355047 - RNA, 32 nt, Human
caggucccugugcgcaugcacauggagggguc

SEQ ID NO: 355048 - RNA, 21 nt, Human
caggucccuucaucuuccaua

SEQ ID NO: 355049 - RNA, 32 nt, Human
cagguccuaagcugcugcuugugcgcgacugc

SEQ ID NO: 355050 - RNA, 28 nt, Human
cagguccucaauaaauacucgcuggauc

SEQ ID NO: 355051 - RNA, 23 nt, Human
cagguccucagucggucccaguu

SEQ ID NO: 355052 - RNA, 32 nt, Human
cagguccucaugucucaaccacaucuacucug

SEQ ID NO: 355053 - RNA, 32 nt, Human
cagguccuccgugaucaggucucugcucuucu

SEQ ID NO: 355054 - RNA, 32 nt, Human
cagguccuccuccucacucagcccugccgcug

SEQ ID NO: 355055 - RNA, 32 nt, Human
cagguccuccuccuccuccuucuccucuucuu

SEQ ID NO: 355056 - RNA, 32 nt, Human
cagguccuccuuggugccucgcaggcagauga

SEQ ID NO: 355057 - RNA, 32 nt, Human
cagguccucuccccucauuuccaucucccagc

SEQ ID NO: 355058 - RNA, 32 nt, Human
cagguccugaaaucagccuuguggagccugug

SEQ ID NO: 355059 - RNA, 32 nt, Human
cagguccugacucugcagagggaagaggcaga

SEQ ID NO: 355060 - RNA, 32 nt, Human
cagguccugaggcacgugaauggccaggauca

SEQ ID NO: 355061 - RNA, 32 nt, Human
cagguccugcagcugcuuguuagcuuuuugag

SEQ ID NO: 355062 - RNA, 32 nt, Human
cagguccugcagcuugugcucugcccagcagu

SEQ ID NO: 355063 - RNA, 32 nt, Human
cagguccugcugccucccuuucauacaauggc

SEQ ID NO: 355064 - RNA, 32 nt, Human
cagguccuggcugagcgggcucugaguucugu

SEQ ID NO: 355065 - RNA, 32 nt, Human
cagguccugggagaggacagaaaacaacugga

SEQ ID NO: 355066 - RNA, 32 nt, Human
cagguccugggccugcuucccugcggguucug

SEQ ID NO: 355067 - RNA, 32 nt, Human
cagguccugggugagggugggagauuuagaca

SEQ ID NO: 355068 - RNA, 32 nt, Human
cagguccugugagcccugccuucauguuuggc

SEQ ID NO: 355069 - RNA, 32 nt, Human
cagguccuucagagcaauucagugccagacau

SEQ ID NO: 355070 - RNA, 32 nt, Human
cagguccuucagucuccgcucgucucaccgua

SEQ ID NO: 355071 - RNA, 32 nt, Human
cagguccuuuagucuguuguucuugaaaacua

SEQ ID NO: 355072 - RNA, 18 nt, Human
cagguccuuugcuuacca

SEQ ID NO: 355073 - RNA, 32 nt, Human
caggucgcuggugacagggccaggguuaugca

SEQ ID NO: 355074 - RNA, 32 nt, Human
caggucggaagaggcaggggaaggcuccaggc

SEQ ID NO: 355075 - RNA, 32 nt, Human
caggucggaaguagugugaggcucgugggcgg

SEQ ID NO: 355076 - RNA, 23 nt, Human
caggucggagcugggugggccgg

SEQ ID NO: 355077 - RNA, 32 nt, Human
caggucggcauaggugcccacagagcagacug

SEQ ID NO: 355078 - RNA, 21 nt, Human
caggucggcggacgggccagg

SEQ ID NO: 355079 - RNA, 22 nt, Human
caggucgggggagcacaggcca

SEQ ID NO: 355080 - RNA, 18 nt, Human
caggucggugagaggaca

SEQ ID NO: 355081 - RNA, 32 nt, Human
caggucgucugacuucucgugccauuuucaau

SEQ ID NO: 355082 - RNA, 32 nt, Human
caggucgugauggcucacgccuguaaucccag

SEQ ID NO: 355083 - RNA, 32 nt, Human
caggucguggcagagaaaaccagcugagacag

SEQ ID NO: 355084 - RNA, 21 nt, Human
caggucguuggagacugaaga

SEQ ID NO: 355085 - RNA, 32 nt, Human
caggucuaagaggagaggcagagccagugugc

SEQ ID NO: 355086 - RNA, 32 nt, Human
caggucuaccagccacagucucugcacguuuc

SEQ ID NO: 355087 - RNA, 19 nt, Human
caggucuagggguugggga

SEQ ID NO: 355088 - RNA, 19 nt, Human
caggucuauucucaucuua

SEQ ID NO: 355089 - RNA, 20 nt, Human
caggucucagcauuucaucu

SEQ ID NO: 355090 - RNA, 32 nt, Human
caggucucagcccugguccaguguguccaugg

SEQ ID NO: 355091 - RNA, 24 nt, Human
caggucucaggcuagaauccagcu

SEQ ID NO: 355092 - RNA, 31 nt, Human
caggucucaggcuagaauccagcucacuguc

SEQ ID NO: 355093 - RNA, 32 nt, Human
caggucucaggguccagugucauuugaggaug

SEQ ID NO: 355094 - RNA, 19 nt, Human
caggucucauacucacuua

SEQ ID NO: 355095 - RNA, 24 nt, Human
caggucuccaaggcaagcccagcu

SEQ ID NO: 355096 - RNA, 32 nt, Human
caggucuccagaggcuuguggaagagaagcag

SEQ ID NO: 355097 - RNA, 20 nt, Human
caggucuccagucaguccag

SEQ ID NO: 355098 - RNA, 32 nt, Human
caggucucccacccauuccuggcucccaccag

SEQ ID NO: 355099 - RNA, 32 nt, Human
caggucuccccugacgcccacacccaccacca

SEQ ID NO: 355100 - RNA, 32 nt, Human
caggucucccggaaguggccgguccagagcug

SEQ ID NO: 355101 - RNA, 32 nt, Human
caggucucccugggacaaaaucaaggcgcuug

SEQ ID NO: 355102 - RNA, 32 nt, Human
caggucucccugucccaggaggcuugugccaa

SEQ ID NO: 355103 - RNA, 32 nt, Human
caggucucccuuucauugaacauguuagaguu

SEQ ID NO: 355104 - RNA, 21 nt, Human
caggucuccgccuccucugcu

SEQ ID NO: 355105 - RNA, 32 nt, Human
caggucucgggccucaggucucgggccucaga

SEQ ID NO: 355106 - RNA, 21 nt, Human
caggucucuacaaacauuuua

SEQ ID NO: 355107 - RNA, 22 nt, Human
caggucucuacugccucacuug

SEQ ID NO: 355108 - RNA, 18 nt, Human
caggucucuagcaccgcu

SEQ ID NO: 355109 - RNA, 32 nt, Human
caggucucuaggggugagauacguacauuacc

SEQ ID NO: 355110 - RNA, 32 nt, Human
caggucucucaccucucugaccucagcuuccu

SEQ ID NO: 355111 - RNA, 24 nt, Human
caggucucucccagggcucguuuu

SEQ ID NO: 355112 - RNA, 21 nt, Human
caggucucuccgcuccucuug

SEQ ID NO: 355113 - RNA, 32 nt, Human
caggucucugagcggccccugauguuccuguu

SEQ ID NO: 355114 - RNA, 22 nt, Human
caggucucugagcucagucuua

SEQ ID NO: 355115 - RNA, 21 nt, Human
caggucucugggguugucuua

SEQ ID NO: 355116 - RNA, 22 nt, Human
caggucucuguacaggccaguu

SEQ ID NO: 355117 - RNA, 32 nt, Human
caggucucuucuccagccuccaccugccuguc

SEQ ID NO: 355118 - RNA, 32 nt, Human
caggucugcagaaccauagcuuccacgcaccu

SEQ ID NO: 355119 - RNA, 32 nt, Human
caggucugcagagcaaaggcaggucuggaggg

SEQ ID NO: 355120 - RNA, 32 nt, Human
caggucugcaguccuggugaggggacaucacg

SEQ ID NO: 355121 - RNA, 20 nt, Human
caggucugcccuuuaucuug

SEQ ID NO: 355122 - RNA, 32 nt, Human
caggucugcggggacugaggcauggcagggaa

SEQ ID NO: 355123 - RNA, 32 nt, Human
caggucuggcuuggucaguuucuuagguaugg

SEQ ID NO: 355124 - RNA, 32 nt, Human
caggucugggccacuuucauccccauuucaag

SEQ ID NO: 355125 - RNA, 32 nt, Human
caggucugggccagaugcugggcaggaaaccc

SEQ ID NO: 355126 - RNA, 23 nt, Human
caggucuggugggcggggccagg

SEQ ID NO: 355127 - RNA, 32 nt, Human
caggucugucccggcuggagaacagcguccac

SEQ ID NO: 355128 - RNA, 32 nt, Human
caggucugucggcaguuccucagucuguaaaa

SEQ ID NO: 355129 - RNA, 32 nt, Human
caggucuguggggcaagaggcugcaauauucc

SEQ ID NO: 355130 - RNA, 32 nt, Human
caggucugugggguccagccuggcaaaagcaa

SEQ ID NO: 355131 - RNA, 32 nt, Human
caggucuguguggacguggaggaagcaggcau

SEQ ID NO: 355132 - RNA, 23 nt, Human
caggucuuaccgagaauucagcu

SEQ ID NO: 355133 - RNA, 32 nt, Human
caggucuucccaaggauuuuaguauuugcauu

SEQ ID NO: 355134 - RNA, 32 nt, Human
caggucuucccucaaucuaccucuuuccacau

SEQ ID NO: 355135 - RNA, 32 nt, Human
caggucuucuggggaccccagaggugucugug

SEQ ID NO: 355136 - RNA, 20 nt, Human
caggucuugagagguccagc

SEQ ID NO: 355137 - RNA, 32 nt, Human
caggucuuggagcugagccucucaccuguacu

SEQ ID NO: 355138 - RNA, 32 nt, Human
caggucuuguguuacuccuccuccuuucuaag

SEQ ID NO: 355139 - RNA, 22 nt, Human
caggucuuuagccuccaccuug

SEQ ID NO: 355140 - RNA, 22 nt, Human
caggucuuugaagaagccaguu

SEQ ID NO: 355141 - RNA, 21 nt, Human
caggucuuugcauuccuuuua

SEQ ID NO: 355142 - RNA, 32 nt, Human
caggugaacuugagggcgaggagcagcgcgca

SEQ ID NO: 355143 - RNA, 32 nt, Human
caggugaagaccacucugauagaggcuccagg

SEQ ID NO: 355144 - RNA, 32 nt, Human
caggugaagagcaaccacaaguuuaaugaaga

SEQ ID NO: 355145 - RNA, 32 nt, Human
caggugaaggugucugcagcacacacagugag

SEQ ID NO: 355146 - RNA, 32 nt, Human
caggugaauccagcagcuccagagagacagcg

SEQ ID NO: 355147 - RNA, 32 nt, Human
caggugacacuggaggaaugaagaauaggcac

SEQ ID NO: 355148 - RNA, 32 nt, Human
caggugacagugcccaccacaggccaaauaac

SEQ ID NO: 355149 - RNA, 32 nt, Human
caggugaccagaaugaggcacaugacaguggu

SEQ ID NO: 355150 - RNA, 32 nt, Human
caggugacccacccgccucggccucucaaaau

SEQ ID NO: 355151 - RNA, 31 nt, Human
caggugacgggagaggagguuggagguguag

SEQ ID NO: 355152 - RNA, 32 nt, Human
caggugacuuccaaagaaugagucagguggca

SEQ ID NO: 355153 - RNA, 32 nt, Human
caggugagaaaacaggcuaauaacuuccauga

SEQ ID NO: 355154 - RNA, 32 nt, Human
caggugagagugaccugcagucucacucaucc

SEQ ID NO: 355155 - RNA, 21 nt, Human
caggugagauaaugggccagg

SEQ ID NO: 355156 - RNA, 32 nt, Human
caggugagcaccacuguaccuggcuagcuacu

SEQ ID NO: 355157 - RNA, 32 nt, Human
caggugagccugggagccugacagggccagug

SEQ ID NO: 355158 - RNA, 32 nt, Human
caggugagcugcugugaaggacucauucuugg

SEQ ID NO: 355159 - RNA, 32 nt, Human
caggugagcuggggaaggaagugagcauggcc

SEQ ID NO: 355160 - RNA, 32 nt, Human
caggugagcuguggaggugggguccuuggaag

SEQ ID NO: 355161 - RNA, 32 nt, Human
caggugaggaaggguuuaaccucacuggaagg

SEQ ID NO: 355162 - RNA, 32 nt, Human
caggugagggcaagaugaaggcuuccaggcag

SEQ ID NO: 355163 - RNA, 32 nt, Human
caggugagggcaggggacaaggugcagcugag

SEQ ID NO: 355164 - RNA, 32 nt, Human
caggugagggucugagacuagagcauccaggg

SEQ ID NO: 355165 - RNA, 24 nt, Human
caggugagguggcucaccccugua

SEQ ID NO: 355166 - RNA, 32 nt, Human
caggugaguaacaccaguaccaccugccgggu

SEQ ID NO: 355167 - RNA, 25 nt, Human
caggugaguccuagagcuacagggg

SEQ ID NO: 355168 - RNA, 32 nt, Human
caggugaguggaggcaggagccacgggugggg

SEQ ID NO: 355169 - RNA, 32 nt, Human
caggugauacuauuucaugaaggugguaccaa

SEQ ID NO: 355170 - RNA, 32 nt, Human
caggugauccacccaccucagccuccaaaagu

SEQ ID NO: 355171 - RNA, 32 nt, Human
caggugauccacccaccucagccuccgaaagu

SEQ ID NO: 355172 - RNA, 32 nt, Human
caggugauccacccaccucugccuccaaagug

SEQ ID NO: 355173 - RNA, 32 nt, Human
caggugauccacccgccucggccuccgaaagu

SEQ ID NO: 355174 - RNA, 32 nt, Human
caggugaucccaagaccugcagcuucagcauc

SEQ ID NO: 355175 - RNA, 32 nt, Human
caggugaugccauuacagaaccaaaucauggc

SEQ ID NO: 355176 - RNA, 32 nt, Human
caggugaugccauuacagaaccaaaucguggc

SEQ ID NO: 355177 - RNA, 32 nt, Human
caggugauguccuaggugcugcagugaacaga

SEQ ID NO: 355178 - RNA, 32 nt, Human
caggugaugugcugggagugugggcggccucc

SEQ ID NO: 355179 - RNA, 32 nt, Human
caggugauguuaagucacaaggugcugcuuuu

SEQ ID NO: 355180 - RNA, 32 nt, Human
caggugauucagauuuggacagccugagccag

SEQ ID NO: 355181 - RNA, 32 nt, Human
caggugcaacacucaagucuauugaauaaugu

SEQ ID NO: 355182 - RNA, 32 nt, Human
caggugcaauucuucuuggucucagcuccaau

SEQ ID NO: 355183 - RNA, 32 nt, Human
caggugcacaugcuuccagaugccacauguga

SEQ ID NO: 355184 - RNA, 32 nt, Human
caggugcaccacugccgucauuucagcuucug

SEQ ID NO: 355185 - RNA, 18 nt, Human
caggugcacgccaccacg

SEQ ID NO: 355186 - RNA, 32 nt, Human
caggugcacuccucagaccugugcacaggaag

SEQ ID NO: 355187 - RNA, 32 nt, Human
caggugcagagccucaacuaccccagauggua

SEQ ID NO: 355188 - RNA, 32 nt, Human
caggugcagccuggcuucugucuguaucucag

SEQ ID NO: 355189 - RNA, 32 nt, Human
caggugcagccuguccucuccuuccccugacc

SEQ ID NO: 355190 - RNA, 32 nt, Human
caggugcaggggaccccuggaaagugggggcu

SEQ ID NO: 355191 - RNA, 32 nt, Human
caggugcaggucuuugccgguuaaguaaggga

SEQ ID NO: 355192 - RNA, 32 nt, Human
caggugcagguguuagugcaggaccggaaggg

SEQ ID NO: 355193 - RNA, 32 nt, Human
caggugcagguucuuagcaccuccgcagccgc

SEQ ID NO: 355194 - RNA, 32 nt, Human
caggugcagguuucccagcagcucaggcaaga

SEQ ID NO: 355195 - RNA, 32 nt, Human
caggugcaugcacuaccaugcccagcuuucuc

SEQ ID NO: 355196 - RNA, 32 nt, Human
caggugcaugccaccacgccugacuaauuuuu

SEQ ID NO: 355197 - RNA, 32 nt, Human
caggugcaugccaccacugccuggcuaauuuu

SEQ ID NO: 355198 - RNA, 32 nt, Human
caggugcaugguuacagccacagggaggcaug

SEQ ID NO: 355199 - RNA, 32 nt, Human
caggugccaccagggagggguggaggggcuuu

SEQ ID NO: 355200 - RNA, 32 nt, Human
caggugccagcacaugcugggcuucguucgcu

SEQ ID NO: 355201 - RNA, 32 nt, Human
caggugccagccaccaugcccagcuaauuugu

SEQ ID NO: 355202 - RNA, 18 nt, Human
caggugcccaccaccacg

SEQ ID NO: 355203 - RNA, 32 nt, Human
caggugcccaccggccucggccuggaugggca

SEQ ID NO: 355204 - RNA, 32 nt, Human
caggugcccagaggaagcuuggaggcugcuac

SEQ ID NO: 355205 - RNA, 32 nt, Human
caggugcccagcuauaccugugccucggcuuu

SEQ ID NO: 355206 - RNA, 32 nt, Human
caggugccccagcugcuucgggcugccgagga

SEQ ID NO: 355207 - RNA, 32 nt, Human
caggugcccgccaccacacccaacuaauuuuu

SEQ ID NO: 355208 - RNA, 32 nt, Human
caggugcccucacuuacugccugggccccugc

SEQ ID NO: 355209 - RNA, 32 nt, Human
caggugcccucaucguggucugugccaugucc

SEQ ID NO: 355210 - RNA, 32 nt, Human
caggugcccuggagggaaggggaagccugugg

SEQ ID NO: 355211 - RNA, 32 nt, Human
caggugccuaaccugggaccuguggucaugug

SEQ ID NO: 355212 - RNA, 32 nt, Human
caggugccucaagagaaggcaaccuugacucu

SEQ ID NO: 355213 - RNA, 32 nt, Human
caggugccucuguggucucuucucauccucac

SEQ ID NO: 355214 - RNA, 32 nt, Human
caggugccugcauuuccagccucguggcucac

SEQ ID NO: 355215 - RNA, 32 nt, Human
caggugccugggagggcugcugcagugggguc

SEQ ID NO: 355216 - RNA, 32 nt, Human
caggugccuguaaucccagcacuuugggaagc

SEQ ID NO: 355217 - RNA, 32 nt, Human
caggugccuguaaucccagcuacuggggaaag

SEQ ID NO: 355218 - RNA, 32 nt, Human
caggugccuguaaucccagcuacuugggaggc

SEQ ID NO: 355219 - RNA, 32 nt, Human
caggugccuguaauccuagcuacuuggcaggc

SEQ ID NO: 355220 - RNA, 21 nt, Human
caggugccugugcugaugcca

SEQ ID NO: 355221 - RNA, 29 nt, Human
caggugccuguggcugugccugggagugg

SEQ ID NO: 355222 - RNA, 32 nt, Human
caggugccuuaaaaaguauuccaaguuuacuc

SEQ ID NO: 355223 - RNA, 32 nt, Human
caggugccuucccagacacuggcguuacugcu

SEQ ID NO: 355224 - RNA, 32 nt, Human
caggugccuugaacgcagcccaucuucauguc

SEQ ID NO: 355225 - RNA, 18 nt, Human
caggugcgcgccaccacg

SEQ ID NO: 355226 - RNA, 23 nt, Human
caggugcgggcaggugggccugg

SEQ ID NO: 355227 - RNA, 32 nt, Human
caggugcgggggcagagggugacuuaccaaga

SEQ ID NO: 355228 - RNA, 32 nt, Human
caggugcggugacucaugccuguaaucccugc

SEQ ID NO: 355229 - RNA, 32 nt, Human
caggugcuaagauguugagugguggggcugga

SEQ ID NO: 355230 - RNA, 32 nt, Human
caggugcuagaaacuuuaugucaaaguggcca

SEQ ID NO: 355231 - RNA, 32 nt, Human
caggugcuaggugccaggguugcaguucacgu

SEQ ID NO: 355232 - RNA, 31 nt, Human
caggugcucaauaaacacuuguagagcagau

SEQ ID NO: 355233 - RNA, 32 nt, Human
caggugcucaccagcuccugugcucucgaccu

SEQ ID NO: 355234 - RNA, 32 nt, Human
caggugcucagcucugcagggugggggcaauu

SEQ ID NO: 355235 - RNA, 32 nt, Human
caggugcuccaaccaccuuauuuccuuguuuu

SEQ ID NO: 355236 - RNA, 16 nt, Human
caggugcuccaccacg

SEQ ID NO: 355237 - RNA, 32 nt, Human
caggugcuccaggcugugaucugcacccucug

SEQ ID NO: 355238 - RNA, 32 nt, Human
caggugcucggguguggagcuggagccaugug

SEQ ID NO: 355239 - RNA, 32 nt, Human
caggugcucugugagaagugcaagagcacgcu

SEQ ID NO: 355240 - RNA, 32 nt, Human
caggugcugaaccaacaucaucaguuucuauu

SEQ ID NO: 355241 - RNA, 32 nt, Human
caggugcugaagauaaggaaacccgggaccuc

SEQ ID NO: 355242 - RNA, 32 nt, Human
caggugcugacucccgcacucccuggcauuuu

SEQ ID NO: 355243 - RNA, 32 nt, Human
caggugcugcagcuccaccucagagggcacug

SEQ ID NO: 355244 - RNA, 32 nt, Human
caggugcugcugagagccaacagccauucagc

SEQ ID NO: 355245 - RNA, 32 nt, Human
caggugcuggagcacugggcucccgggcccca

SEQ ID NO: 355246 - RNA, 32 nt, Human
caggugcuggaggccguggcagcggagggugg

SEQ ID NO: 355247 - RNA, 32 nt, Human
caggugcugucacggcuuccugccuucguaua

SEQ ID NO: 355248 - RNA, 32 nt, Human
caggugcuuaaagggacauuguaggagguacu

SEQ ID NO: 355249 - RNA, 18 nt, Human
caggugcuucaccgcaga

SEQ ID NO: 355250 - RNA, 32 nt, Human
caggugcuuguaaucccagcuacuugggaggc

SEQ ID NO: 355251 - RNA, 32 nt, Human
cagguggaaauaaacaacaacuuuauuaaaac

SEQ ID NO: 355252 - RNA, 31 nt, Human
cagguggaaguggaaagaagccuguggagcu

SEQ ID NO: 355253 - RNA, 32 nt, Human
cagguggaaugucagaagacugagaacauugu

SEQ ID NO: 355254 - RNA, 32 nt, Human
cagguggacaaggaugucagugugaagaugga

SEQ ID NO: 355255 - RNA, 19 nt, Human
cagguggacagggcuucuu

SEQ ID NO: 355256 - RNA, 32 nt, Human
cagguggacgaggaugucagugugaagaugga

SEQ ID NO: 355257 - RNA, 32 nt, Human
cagguggacuccagggcaccggcuuuauuucu

SEQ ID NO: 355258 - RNA, 32 nt, Human
cagguggagacccugagaaggacccugggagc

SEQ ID NO: 355259 - RNA, 32 nt, Human
cagguggagagggcgggcaggggagagaccca

SEQ ID NO: 355260 - RNA, 32 nt, Human
cagguggagauccaaguggaggugggagcgga

SEQ ID NO: 355261 - RNA, 32 nt, Human
cagguggagauggaaggagaaacagcauccgg

SEQ ID NO: 355262 - RNA, 24 nt, Human
cagguggagccaggugucugaaaa

SEQ ID NO: 355263 - RNA, 32 nt, Human
cagguggagccccggcuccugagcaagcagau

SEQ ID NO: 355264 - RNA, 32 nt, Human
cagguggaggcagagauuagagaggggcuguc

SEQ ID NO: 355265 - RNA, 32 nt, Human
cagguggaggcggcggcggcagaggaguggga

SEQ ID NO: 355266 - RNA, 32 nt, Human
cagguggaggugcggcuucagugcgccuuggc

SEQ ID NO: 355267 - RNA, 32 nt, Human
cagguggaggugguugugggugcaggugugug

SEQ ID NO: 355268 - RNA, 21 nt, Human
cagguggagugggugggcagg

SEQ ID NO: 355269 - RNA, 21 nt, Human
cagguggaucacaaggucagg

SEQ ID NO: 355270 - RNA, 20 nt, Human
cagguggaucaccugagguc

SEQ ID NO: 355271 - RNA, 23 nt, Human
cagguggaucaccugaggucagg

SEQ ID NO: 355272 - RNA, 23 nt, Human
cagguggaucaccugagguuagg

SEQ ID NO: 355273 - RNA, 21 nt, Human
cagguggaucacgaggccagg

SEQ ID NO: 355274 - RNA, 32 nt, Human
cagguggaucacgaggccaggagaucgagacc

SEQ ID NO: 355275 - RNA, 21 nt, Human
cagguggaucacgaggucagg

SEQ ID NO: 355276 - RNA, 32 nt, Human
cagguggaucacgaggucaggagacagagacc

SEQ ID NO: 355277 - RNA, 32 nt, Human
cagguggaucacuggagugcaggaguucaaga

SEQ ID NO: 355278 - RNA, 32 nt, Human
cagguggaugagcucaguccugggcuuucggu

SEQ ID NO: 355279 - RNA, 32 nt, Human
cagguggaugaggaugucagugugaagaugga

SEQ ID NO: 355280 - RNA, 32 nt, Human
cagguggauugaugagacuccuccaguggacc

SEQ ID NO: 355281 - RNA, 20 nt, Human
cagguggauugcuugagcca

SEQ ID NO: 355282 - RNA, 32 nt, Human
cagguggcaccacugccgucauuucagcuucu

SEQ ID NO: 355283 - RNA, 32 nt, Human
cagguggcaccacugccuucauuucagcuucc

SEQ ID NO: 355284 - RNA, 22 nt, Human
cagguggcaccugcagcggcug

SEQ ID NO: 355285 - RNA, 20 nt, Human
cagguggcagcaggcagcag

SEQ ID NO: 355286 - RNA, 32 nt, Human
cagguggcaggcaggggugaccugcuggcccu

SEQ ID NO: 355287 - RNA, 32 nt, Human
cagguggccuccaggaggcagcugggaaaagg

SEQ ID NO: 355288 - RNA, 32 nt, Human
cagguggccugggagguggcccccucgaggau

SEQ ID NO: 355289 - RNA, 23 nt, Human
cagguggcggagguugcagugag

SEQ ID NO: 355290 - RNA, 32 nt, Human
cagguggcgggagccgccacacccagccuggu

SEQ ID NO: 355291 - RNA, 18 nt, Human
cagguggcguuccagccc

SEQ ID NO: 355292 - RNA, 32 nt, Human
cagguggcuccggucggagguggagaacuugg

SEQ ID NO: 355293 - RNA, 32 nt, Human
cagguggcugccugagccccagaggcacccug

SEQ ID NO: 355294 - RNA, 32 nt, Human
cagguggcuggacugagugucccccaggccca

SEQ ID NO: 355295 - RNA, 18 nt, Human
cagguggcuggagcugaa

SEQ ID NO: 355296 - RNA, 32 nt, Human
caggugggaagugggagccggagcggcagcug

SEQ ID NO: 355297 - RNA, 32 nt, Human
caggugggaauugagggugagggguuugggga

SEQ ID NO: 355298 - RNA, 32 nt, Human
caggugggagccaccgcacccagccugcaggu

SEQ ID NO: 355299 - RNA, 32 nt, Human
caggugggagccacugcacccggccugaauga

SEQ ID NO: 355300 - RNA, 32 nt, Human
caggugggaggcacagauuguccgugggaggg

SEQ ID NO: 355301 - RNA, 32 nt, Human
caggugggaggugugguugcaggugcgggcug

SEQ ID NO: 355302 - RNA, 32 nt, Human
caggugggcacuggagcaugcagaggagguga

SEQ ID NO: 355303 - RNA, 25 nt, Human
caggugggcagaucacgaggucagg

SEQ ID NO: 355304 - RNA, 32 nt, Human
caggugggcaggagacaggggcuuggaggagg

SEQ ID NO: 355305 - RNA, 31 nt, Human
caggugggccucucuaggaucagugucccac

SEQ ID NO: 355306 - RNA, 32 nt, Human
caggugggcugaggggcagggagccggcugug

SEQ ID NO: 355307 - RNA, 32 nt, Human
caggugggcuggaggggacaagcccuaucccu

SEQ ID NO: 355308 - RNA, 32 nt, Human
cagguggggaccccgcuccccaacaccugucu

SEQ ID NO: 355309 - RNA, 23 nt, Human
cagguggggcagccugaacccug

SEQ ID NO: 355310 - RNA, 32 nt, Human
cagguggggcaggaaugguauggggaaguaga

SEQ ID NO: 355311 - RNA, 32 nt, Human
cagguggggcuggccucagggccacggcaucu

SEQ ID NO: 355312 - RNA, 32 nt, Human
caggugggguacucgggaagcuggagcgggcc

SEQ ID NO: 355313 - RNA, 32 nt, Human
cagguggguggaggggagacgcucaggaggug

SEQ ID NO: 355314 - RNA, 32 nt, Human
cagguggguggggcacaugggacagggcuacc

SEQ ID NO: 355315 - RNA, 18 nt, Human
caggugguacagagccag

SEQ ID NO: 355316 - RNA, 32 nt, Human
caggugguacagccgugcacaccagugucgug

SEQ ID NO: 355317 - RNA, 32 nt, Human
cagguggucccuccagcccugguuaggcacug

SEQ ID NO: 355318 - RNA, 19 nt, Human
cagguggugaccaugggaa

SEQ ID NO: 355319 - RNA, 32 nt, Human
cagguggugagcugcuggugggugaggguguc

SEQ ID NO: 355320 - RNA, 32 nt, Human
cagguggugagcugguggcucucuggugagcu

SEQ ID NO: 355321 - RNA, 32 nt, Human
cagguggugagguugagguuuggggcuuggua

SEQ ID NO: 355322 - RNA, 32 nt, Human
cagguggugcucuucauagugaugucauuaga

SEQ ID NO: 355323 - RNA, 32 nt, Human
cagguggugcuuggaagagaugaaagaucuuc

SEQ ID NO: 355324 - RNA, 32 nt, Human
cagguggugggaccgcuaguuuugaagaagcc

SEQ ID NO: 355325 - RNA, 19 nt, Human
caggugguugcccccuccc

SEQ ID NO: 355326 - RNA, 32 nt, Human
caggugguugugguguagacugugucaggccu

SEQ ID NO: 355327 - RNA, 22 nt, Human
cagguguacagcugcugucccu

SEQ ID NO: 355328 - RNA, 32 nt, Human
cagguguagcauguccugcuuccguuuuucau

SEQ ID NO: 355329 - RNA, 32 nt, Human
cagguguagggaccccuugaggggccaagcug

SEQ ID NO: 355330 - RNA, 32 nt, Human
cagguguagggagugaagaagcaaaaagagga

SEQ ID NO: 355331 - RNA, 32 nt, Human
cagguguauaaauaucuaaaauacauauugaa

SEQ ID NO: 355332 - RNA, 32 nt, Human
cagguguaucagaagauucuggguuugcaguc

SEQ ID NO: 355333 - RNA, 32 nt, Human
cagguguauuccccucuacuugcccaugugcu

SEQ ID NO: 355334 - RNA, 32 nt, Human
caggugucacugaugcuacagaacagcucugc

SEQ ID NO: 355335 - RNA, 32 nt, Human
caggugucauuuaucuaugaccaauaggaaga

SEQ ID NO: 355336 - RNA, 19 nt, Human
caggugucccacagcaaca

SEQ ID NO: 355337 - RNA, 32 nt, Human
cagguguccugaggcucccugcacugccacag

SEQ ID NO: 355338 - RNA, 32 nt, Human
caggugucucacuguguuguccaggcuggucu

SEQ ID NO: 355339 - RNA, 32 nt, Human
caggugucucuaaggccagggcucaggggaaa

SEQ ID NO: 355340 - RNA, 32 nt, Human
caggugucucuagcacaggacuuggcaccaag

SEQ ID NO: 355341 - RNA, 32 nt, Human
caggugucugcuggcuuccugcucucccugcu

SEQ ID NO: 355342 - RNA, 32 nt, Human
caggugugaacaagcaugucucuacgaaugaa

SEQ ID NO: 355343 - RNA, 32 nt, Human
caggugugacaccuucagcaggucucagggaa

SEQ ID NO: 355344 - RNA, 32 nt, Human
caggugugagccacagcaccuggccaaccaac

SEQ ID NO: 355345 - RNA, 32 nt, Human
caggugugagccacagcgccuggcccagugua

SEQ ID NO: 355346 - RNA, 32 nt, Human
caggugugagccacagugccuggcccauucuu

SEQ ID NO: 355347 - RNA, 32 nt, Human
caggugugagccaccacaccaggccagagcua

SEQ ID NO: 355348 - RNA, 32 nt, Human
caggugugagccaccacacccagccaacauuu

SEQ ID NO: 355349 - RNA, 32 nt, Human
caggugugagccaccacacccagccaauuagg

SEQ ID NO: 355350 - RNA, 32 nt, Human
caggugugagccaccacacccagccaugaauc

SEQ ID NO: 355351 - RNA, 32 nt, Human
caggugugagccaccacacccagcccaggcuc

SEQ ID NO: 355352 - RNA, 32 nt, Human
caggugugagccaccacacccagccucuguag

SEQ ID NO: 355353 - RNA, 32 nt, Human
caggugugagccaccacacccggccaaccaaa

SEQ ID NO: 355354 - RNA, 32 nt, Human
caggugugagccaccacaccugcccccgcccc

SEQ ID NO: 355355 - RNA, 32 nt, Human
caggugugagccaccacaccuggccaagaaua

SEQ ID NO: 355356 - RNA, 32 nt, Human
caggugugagccaccacaccuggcccauaguu

SEQ ID NO: 355357 - RNA, 32 nt, Human
caggugugagccaccacaccuggccccaaaua

SEQ ID NO: 355358 - RNA, 32 nt, Human
caggugugagccaccacaccuggcuaauuuuu

SEQ ID NO: 355359 - RNA, 32 nt, Human
caggugugagccaccacacugggccaaugcuu

SEQ ID NO: 355360 - RNA, 32 nt, Human
caggugugagccaccacacuuggccaguauau

SEQ ID NO: 355361 - RNA, 32 nt, Human
caggugugagccaccacagccagccaguauga

SEQ ID NO: 355362 - RNA, 32 nt, Human
caggugugagccaccacagccagccuaaaaau

SEQ ID NO: 355363 - RNA, 32 nt, Human
caggugugagccaccacauccagccuaacuua

SEQ ID NO: 355364 - RNA, 32 nt, Human
caggugugagccaccacgaucagccucuagug

SEQ ID NO: 355365 - RNA, 32 nt, Human
caggugugagccaccacgccagccugacgaug

SEQ ID NO: 355366 - RNA, 32 nt, Human
caggugugagccaccacgcccagccaugaaga

SEQ ID NO: 355367 - RNA, 32 nt, Human
caggugugagccaccacgcccagccuagaaau

SEQ ID NO: 355368 - RNA, 32 nt, Human
caggugugagccaccacgcccagccuguggcc

SEQ ID NO: 355369 - RNA, 32 nt, Human
caggugugagccaccacgcccggccaaggcag

SEQ ID NO: 355370 - RNA, 32 nt, Human
caggugugagccaccacgcccggccgauuugg

SEQ ID NO: 355371 - RNA, 32 nt, Human
caggugugagccaccacgccuggacuauaaaa

SEQ ID NO: 355372 - RNA, 32 nt, Human
caggugugagccaccacgccuggcuaauuuug

SEQ ID NO: 355373 - RNA, 32 nt, Human
caggugugagccaccacgccugggcccaugaa

SEQ ID NO: 355374 - RNA, 32 nt, Human
caggugugagccaccacguccggccaauuuuu

SEQ ID NO: 355375 - RNA, 32 nt, Human
caggugugagccaccacucccagccugauuua

SEQ ID NO: 355376 - RNA, 32 nt, Human
caggugugagccaccaggcccagccuauaucu

SEQ ID NO: 355377 - RNA, 32 nt, Human
caggugugagccaccaggcucagcccccuaag

SEQ ID NO: 355378 - RNA, 32 nt, Human
caggugugagccaccauaccuggccaauuuuu

SEQ ID NO: 355379 - RNA, 32 nt, Human
caggugugagccaccaugccaggcccucuuaa

SEQ ID NO: 355380 - RNA, 32 nt, Human
caggugugagccaccaugcccaacacccacug

SEQ ID NO: 355381 - RNA, 32 nt, Human
caggugugagccaccaugcccagcccaaaaau

SEQ ID NO: 355382 - RNA, 32 nt, Human
caggugugagccaccaugcccagccucuucaa

SEQ ID NO: 355383 - RNA, 32 nt, Human
caggugugagccaccaugcccagccugaauga

SEQ ID NO: 355384 - RNA, 32 nt, Human
caggugugagccaccaugcccagccuguuccu

SEQ ID NO: 355385 - RNA, 32 nt, Human
caggugugagccaccaugcccggccuucuccu

SEQ ID NO: 355386 - RNA, 32 nt, Human
caggugugagccaccaugcccggccuuguuau

SEQ ID NO: 355387 - RNA, 32 nt, Human
caggugugagccaccaugcccggcuaauuuuu

SEQ ID NO: 355388 - RNA, 32 nt, Human
caggugugagccaccaugccuggccccaugaa

SEQ ID NO: 355389 - RNA, 32 nt, Human
caggugugagccaccaugccuggccgugguuu

SEQ ID NO: 355390 - RNA, 32 nt, Human
caggugugagccaccaugccuggccuaaacua

SEQ ID NO: 355391 - RNA, 32 nt, Human
caggugugagccaccaugccuggccugcuuug

SEQ ID NO: 355392 - RNA, 32 nt, Human
caggugugagccaccaugccuggcucuggaaa

SEQ ID NO: 355393 - RNA, 32 nt, Human
caggugugagccaccaugccugggcuaaacuc

SEQ ID NO: 355394 - RNA, 32 nt, Human
caggugugagccaccaugccuggucacccugc

SEQ ID NO: 355395 - RNA, 32 nt, Human
caggugugagccaccaugcucugccaauuauu

SEQ ID NO: 355396 - RNA, 32 nt, Human
caggugugagccaccaugucuggccuugauuc

SEQ ID NO: 355397 - RNA, 32 nt, Human
caggugugagccacccugcccagccgucaaaa

SEQ ID NO: 355398 - RNA, 32 nt, Human
caggugugagccaccgcacccagccuauguuc

SEQ ID NO: 355399 - RNA, 32 nt, Human
caggugugagccaccgcacccagccucaauuu

SEQ ID NO: 355400 - RNA, 32 nt, Human
caggugugagccaccgcacccggccaacuuuc

SEQ ID NO: 355401 - RNA, 32 nt, Human
caggugugagccaccgcacccggcuggccaau

SEQ ID NO: 355402 - RNA, 32 nt, Human
caggugugagccaccgcacccugccaaguuau

SEQ ID NO: 355403 - RNA, 32 nt, Human
caggugugagccaccgcaccuggccagaagcc

SEQ ID NO: 355404 - RNA, 32 nt, Human
caggugugagccaccgcaccuggccagaccgc

SEQ ID NO: 355405 - RNA, 32 nt, Human
caggugugagccaccgcaccuggccugcuuuu

SEQ ID NO: 355406 - RNA, 32 nt, Human
caggugugagccaccgcgcccagccaagaaua

SEQ ID NO: 355407 - RNA, 32 nt, Human
caggugugagccaccgcgcccagccaccuuuc

SEQ ID NO: 355408 - RNA, 32 nt, Human
caggugugagccaccgcgcccggccgagaaug

SEQ ID NO: 355409 - RNA, 32 nt, Human
caggugugagccaccgcgccugaccaacuuua

SEQ ID NO: 355410 - RNA, 32 nt, Human
caggugugagccaccgcgccuggcccucaaga

SEQ ID NO: 355411 - RNA, 32 nt, Human
caggugugagccaccgcgccuggcccuguauu

SEQ ID NO: 355412 - RNA, 32 nt, Human
caggugugagccaccgcgccuggccuauuauu

SEQ ID NO: 355413 - RNA, 32 nt, Human
caggugugagccaccgcgccuggccugggcug

SEQ ID NO: 355414 - RNA, 32 nt, Human
caggugugagccaccgcgcucggccagagcuc

SEQ ID NO: 355415 - RNA, 32 nt, Human
caggugugagccaccgcguccagccagcuuua

SEQ ID NO: 355416 - RNA, 32 nt, Human
caggugugagccaccgugaccagccaaugugc

SEQ ID NO: 355417 - RNA, 32 nt, Human
caggugugagccaccgugcacggccggccuga

SEQ ID NO: 355418 - RNA, 32 nt, Human
caggugugagccaccgugcccagccuauacuu

SEQ ID NO: 355419 - RNA, 32 nt, Human
caggugugagccaccgugcccaggcccucagu

SEQ ID NO: 355420 - RNA, 32 nt, Human
caggugugagccaccgugcccggccaaguaaa

SEQ ID NO: 355421 - RNA, 32 nt, Human
caggugugagccaccgugcccggccaccagaa

SEQ ID NO: 355422 - RNA, 32 nt, Human
caggugugagccaccgugcccggcccagauag

SEQ ID NO: 355423 - RNA, 32 nt, Human
caggugugagccaccgugcccggcccauucua

SEQ ID NO: 355424 - RNA, 32 nt, Human
caggugugagccaccgugcccggccucuuuuu

SEQ ID NO: 355425 - RNA, 32 nt, Human
caggugugagccaccgugccuggccaauucca

SEQ ID NO: 355426 - RNA, 32 nt, Human
caggugugagccaccgugccuggccagugugu

SEQ ID NO: 355427 - RNA, 32 nt, Human
caggugugagccaccgugccuggccgaggcuc

SEQ ID NO: 355428 - RNA, 32 nt, Human
caggugugagccacggcacccugccgaaucuu

SEQ ID NO: 355429 - RNA, 32 nt, Human
caggugugagccacggcaccuggccagaacuc

SEQ ID NO: 355430 - RNA, 32 nt, Human
caggugugagccacuauacccgaccagaucaa

SEQ ID NO: 355431 - RNA, 32 nt, Human
caggugugagccacuaugccuggccuucccua

SEQ ID NO: 355432 - RNA, 32 nt, Human
caggugugagccacucugccuggccuaccacu

SEQ ID NO: 355433 - RNA, 32 nt, Human
caggugugagccacugagcccagccauuuagg

SEQ ID NO: 355434 - RNA, 32 nt, Human
caggugugagccacugagcccggccacagugc

SEQ ID NO: 355435 - RNA, 32 nt, Human
caggugugagccacugcaacuggcuauauuaa

SEQ ID NO: 355436 - RNA, 32 nt, Human
caggugugagccacugcacccacccaagacaa

SEQ ID NO: 355437 - RNA, 32 nt, Human
caggugugagccacugcacccagccuaccuug

SEQ ID NO: 355438 - RNA, 32 nt, Human
caggugugagccacugcacccagccugugaug

SEQ ID NO: 355439 - RNA, 32 nt, Human
caggugugagccacugcacccagcugagagug

SEQ ID NO: 355440 - RNA, 32 nt, Human
caggugugagccacugcacccggccaacuauc

SEQ ID NO: 355441 - RNA, 32 nt, Human
caggugugagccacugcacccggccacaagau

SEQ ID NO: 355442 - RNA, 32 nt, Human
caggugugagccacugcacccggccugaaauu

SEQ ID NO: 355443 - RNA, 32 nt, Human
caggugugagccacugcaccucgccagauguc

SEQ ID NO: 355444 - RNA, 32 nt, Human
caggugugagccacugcaccuggccaugguua

SEQ ID NO: 355445 - RNA, 32 nt, Human
caggugugagccacugcaccuggccuccuuaa

SEQ ID NO: 355446 - RNA, 32 nt, Human
caggugugagccacugcaccuggcucuaauag

SEQ ID NO: 355447 - RNA, 32 nt, Human
caggugugagccacugcacguggccuaaaagu

SEQ ID NO: 355448 - RNA, 32 nt, Human
caggugugagccacugcgcccagccagcacau

SEQ ID NO: 355449 - RNA, 32 nt, Human
caggugugagccacugcgcccagccuauacau

SEQ ID NO: 355450 - RNA, 32 nt, Human
caggugugagccacugcgcccagccugaauca

SEQ ID NO: 355451 - RNA, 32 nt, Human
caggugugagccacugcgcccagucaugccca

SEQ ID NO: 355452 - RNA, 32 nt, Human
caggugugagccacugcgcccggccaugccug

SEQ ID NO: 355453 - RNA, 32 nt, Human
caggugugagccacugcgccuggccuaaacaa

SEQ ID NO: 355454 - RNA, 32 nt, Human
caggugugagccacugcgccuggccuguugcu

SEQ ID NO: 355455 - RNA, 32 nt, Human
caggugugagccacugugcccagccuaauugc

SEQ ID NO: 355456 - RNA, 32 nt, Human
caggugugagccacugugcccagccucuucuc

SEQ ID NO: 355457 - RNA, 32 nt, Human
caggugugagccacugugcccagccucuuuug

SEQ ID NO: 355458 - RNA, 32 nt, Human
caggugugagccacugugcccggccaaaagaa

SEQ ID NO: 355459 - RNA, 32 nt, Human
caggugugagccacugugccuaccagcuuuua

SEQ ID NO: 355460 - RNA, 32 nt, Human
caggugugagccacugugccuagccuauaaug

SEQ ID NO: 355461 - RNA, 32 nt, Human
caggugugagccacugugccuggccuccggug

SEQ ID NO: 355462 - RNA, 32 nt, Human
caggugugagccacugugccuggccugauuac

SEQ ID NO: 355463 - RNA, 32 nt, Human
caggugugagccacugugccuggccuucuagu

SEQ ID NO: 355464 - RNA, 32 nt, Human
caggugugagccacugugccuggcuggcagag

SEQ ID NO: 355465 - RNA, 32 nt, Human
caggugugagccacugugcucggccuaccuuu

SEQ ID NO: 355466 - RNA, 32 nt, Human
caggugugagccacuguguccagccuguaacu

SEQ ID NO: 355467 - RNA, 32 nt, Human
caggugugagccacugugucuagccaaguuuc

SEQ ID NO: 355468 - RNA, 32 nt, Human
caggugugagccacuucacccagccacauuua

SEQ ID NO: 355469 - RNA, 32 nt, Human
caggugugagccaucacacucggccaaagcua

SEQ ID NO: 355470 - RNA, 32 nt, Human
caggugugagccaucacgcucggccaagaguu

SEQ ID NO: 355471 - RNA, 32 nt, Human
caggugugagccaucgcgcccggccaacuuuu

SEQ ID NO: 355472 - RNA, 32 nt, Human
caggugugagccaucgcgccuggccaggaccu

SEQ ID NO: 355473 - RNA, 32 nt, Human
caggugugagccauugugccuggccaaguuua

SEQ ID NO: 355474 - RNA, 32 nt, Human
caggugugaggacaagaaugcaaauggcucuu

SEQ ID NO: 355475 - RNA, 32 nt, Human
caggugugaguccucuguuugcacuggacaua

SEQ ID NO: 355476 - RNA, 32 nt, Human
caggugugaugggcacaguacgcagagcaagc

SEQ ID NO: 355477 - RNA, 32 nt, Human
caggugugcaccaccacaccaggcuaauuuuu

SEQ ID NO: 355478 - RNA, 32 nt, Human
caggugugcaccaccacacccggcuaauuuuu

SEQ ID NO: 355479 - RNA, 32 nt, Human
caggugugcaccaccacaccuggcuaauucuu

SEQ ID NO: 355480 - RNA, 18 nt, Human
caggugugcaccaccacg

SEQ ID NO: 355481 - RNA, 32 nt, Human
caggugugcaccaccacgcccggcuaacuuuu

SEQ ID NO: 355482 - RNA, 32 nt, Human
caggugugcaccaccacgcccggcuaauuuuu

SEQ ID NO: 355483 - RNA, 32 nt, Human
caggugugcaccaccacgccuggcuaaauuuu

SEQ ID NO: 355484 - RNA, 18 nt, Human
caggugugcaccaccaug

SEQ ID NO: 355485 - RNA, 32 nt, Human
caggugugcaccaccauuccuggcuaauuuuu

SEQ ID NO: 355486 - RNA, 18 nt, Human
caggugugcaccaccgcg

SEQ ID NO: 355487 - RNA, 32 nt, Human
caggugugcaccaccgcgccuggcuaauuuug

SEQ ID NO: 355488 - RNA, 32 nt, Human
caggugugcaccacuaugccuggcuaauuuug

SEQ ID NO: 355489 - RNA, 32 nt, Human
caggugugcaccacugcgucuggcuagcuaau

SEQ ID NO: 355490 - RNA, 32 nt, Human
caggugugcagaccgcucucucugccuuccuu

SEQ ID NO: 355491 - RNA, 32 nt, Human
caggugugccugacauuugcaaaagauauucc

SEQ ID NO: 355492 - RNA, 32 nt, Human
caggugugccuguugcuuucuuccugcauagu

SEQ ID NO: 355493 - RNA, 18 nt, Human
caggugugcgccaccacg

SEQ ID NO: 355494 - RNA, 32 nt, Human
caggugugcuguuugcccagaagccugugguc

SEQ ID NO: 355495 - RNA, 32 nt, Human
cagguguggaugugggguuauguggucaugcu

SEQ ID NO: 355496 - RNA, 32 nt, Human
caggugugggagccaccaugccugacccacac

SEQ ID NO: 355497 - RNA, 32 nt, Human
caggugugggaggcugcccgcuguagugcuca

SEQ ID NO: 355498 - RNA, 19 nt, Human
cagguguggugacgggggg

SEQ ID NO: 355499 - RNA, 29 nt, Human
caggugugguggcgugugccugugguccc

SEQ ID NO: 355500 - RNA, 24 nt, Human
caggugugguggcuuaccccugua

SEQ ID NO: 355501 - RNA, 32 nt, Human
caggugugugcccccaccacagcucuaugacu

SEQ ID NO: 355502 - RNA, 32 nt, Human
cagguguguggaggggaugggaguguuagcuc

SEQ ID NO: 355503 - RNA, 32 nt, Human
caggugugugggcuccuuuaggcagguuacag

SEQ ID NO: 355504 - RNA, 32 nt, Human
cagguguuagccacugcgccugccugauguug

SEQ ID NO: 355505 - RNA, 32 nt, Human
cagguguuauagaagccagaagagaaacugug

SEQ ID NO: 355506 - RNA, 31 nt, Human
cagguguucaauaaauaauuuuugaauaaau

SEQ ID NO: 355507 - RNA, 32 nt, Human
cagguguuccgacgcgaggacucucucccacc

SEQ ID NO: 355508 - RNA, 22 nt, Human
cagguguucuacacucaucuua

SEQ ID NO: 355509 - RNA, 32 nt, Human
cagguguucuuagaacucuguaaagagcaggc

SEQ ID NO: 355510 - RNA, 32 nt, Human
cagguguugaaggagcuuagguuuuagaggca

SEQ ID NO: 355511 - RNA, 32 nt, Human
cagguguugacuccagcuccagcuucagcucc

SEQ ID NO: 355512 - RNA, 32 nt, Human
cagguguuuccguaccacagcaggagcagggc

SEQ ID NO: 355513 - RNA, 22 nt, Human
cagguuaaaaauucuccugccu

SEQ ID NO: 355514 - RNA, 32 nt, Human
cagguuaacaagaggcauuugugcacacacac

SEQ ID NO: 355515 - RNA, 32 nt, Human
cagguuacagugagcaaagauugugccacuac

SEQ ID NO: 355516 - RNA, 32 nt, Human
cagguuacagugagccaagaucgugccacugc

SEQ ID NO: 355517 - RNA, 32 nt, Human
cagguuaccaggaagcagcuugcuguucaugu

SEQ ID NO: 355518 - RNA, 32 nt, Human
cagguuacccagcaaaugaauacgcuuauagg

SEQ ID NO: 355519 - RNA, 32 nt, Human
cagguuaccuccgaaacugagaucuccuagcc

SEQ ID NO: 355520 - RNA, 32 nt, Human
cagguuaccugggccccaccaggucaucagga

SEQ ID NO: 355521 - RNA, 21 nt, Human
cagguuagacccugggcccug

SEQ ID NO: 355522 - RNA, 32 nt, Human
cagguuagggagcagugaaagugaggagggaa

SEQ ID NO: 355523 - RNA, 32 nt, Human
cagguuagggcgagcgcuaccucuccagccuc

SEQ ID NO: 355524 - RNA, 22 nt, Human
cagguuaucugcuucugucccu

SEQ ID NO: 355525 - RNA, 24 nt, Human
cagguucaaacgauucucuugccu

SEQ ID NO: 355526 - RNA, 32 nt, Human
cagguucaagagauccucccaccucagcuucc

SEQ ID NO: 355527 - RNA, 24 nt, Human
cagguucaagagauucuccugccu

SEQ ID NO: 355528 - RNA, 24 nt, Human
cagguucaagagauucuccugucu

SEQ ID NO: 355529 - RNA, 24 nt, Human
cagguucaagagauucuucugccu

SEQ ID NO: 355530 - RNA, 24 nt, Human
cagguucaagagauuuuccugccu

SEQ ID NO: 355531 - RNA, 24 nt, Human
cagguucaagcaauuauccugccu

SEQ ID NO: 355532 - RNA, 23 nt, Human
cagguucaagcaauuaucugccu

SEQ ID NO: 355533 - RNA, 24 nt, Human
cagguucaagcaauucucccaccu

SEQ ID NO: 355534 - RNA, 32 nt, Human
cagguucaagcaauucucccaccucagccucc

SEQ ID NO: 355535 - RNA, 24 nt, Human
cagguucaagcaauucuccugccu

SEQ ID NO: 355536 - RNA, 24 nt, Human
cagguucaagcaauucuccugucu

SEQ ID NO: 355537 - RNA, 24 nt, Human
cagguucaagcaauucuccuguuu

SEQ ID NO: 355538 - RNA, 24 nt, Human
cagguucaagcaauucucguuguc

SEQ ID NO: 355539 - RNA, 23 nt, Human
cagguucaagcaauucucugucu

SEQ ID NO: 355540 - RNA, 24 nt, Human
cagguucaagcaauucucuugccu

SEQ ID NO: 355541 - RNA, 24 nt, Human
cagguucaagcaauucuucugccu

SEQ ID NO: 355542 - RNA, 24 nt, Human
cagguucaagcaauuguccugccu

SEQ ID NO: 355543 - RNA, 24 nt, Human
cagguucaagcaauuuuccugcuu

SEQ ID NO: 355544 - RNA, 24 nt, Human
cagguucaagcaauuuucgugccu

SEQ ID NO: 355545 - RNA, 24 nt, Human
cagguucaagcacuucucguaccu

SEQ ID NO: 355546 - RNA, 31 nt, Human
cagguucaagcaguucuccuaccucagccuc

SEQ ID NO: 355547 - RNA, 24 nt, Human
cagguucaagcaguucuccugccu

SEQ ID NO: 355548 - RNA, 24 nt, Human
cagguucaagcaguucuccugucu

SEQ ID NO: 355549 - RNA, 24 nt, Human
cagguucaagcauuucuccugccu

SEQ ID NO: 355550 - RNA, 24 nt, Human
cagguucaagccauucucaugccu

SEQ ID NO: 355551 - RNA, 24 nt, Human
cagguucaagcgacucuccugccu

SEQ ID NO: 355552 - RNA, 24 nt, Human
cagguucaagcgagucuccugccu

SEQ ID NO: 355553 - RNA, 23 nt, Human
cagguucaagcgaucaugugccu

SEQ ID NO: 355554 - RNA, 24 nt, Human
cagguucaagcgauuccccugccu

SEQ ID NO: 355555 - RNA, 19 nt, Human
cagguucaagcgauuccuu

SEQ ID NO: 355556 - RNA, 24 nt, Human
cagguucaagcgauucucaugccu

SEQ ID NO: 355557 - RNA, 24 nt, Human
cagguucaagcgauucucccgccu

SEQ ID NO: 355558 - RNA, 24 nt, Human
cagguucaagcgauucuccugacu

SEQ ID NO: 355559 - RNA, 32 nt, Human
cagguucaagcgauucuccugcagccucccga

SEQ ID NO: 355560 - RNA, 24 nt, Human
cagguucaagcgauucuccugccu

SEQ ID NO: 355561 - RNA, 24 nt, Human
cagguucaagcgauucuccugcuu

SEQ ID NO: 355562 - RNA, 22 nt, Human
cagguucaagcgauucuccugu

SEQ ID NO: 355563 - RNA, 24 nt, Human
cagguucaagcgauucucgugccu

SEQ ID NO: 355564 - RNA, 24 nt, Human
cagguucaagcgauucucguggcu

SEQ ID NO: 355565 - RNA, 24 nt, Human
cagguucaagcgauucucucacuu

SEQ ID NO: 355566 - RNA, 24 nt, Human
cagguucaagcgauucucuugccu

SEQ ID NO: 355567 - RNA, 24 nt, Human
cagguucaagcgauucuuaugccu

SEQ ID NO: 355568 - RNA, 24 nt, Human
cagguucaagcgauucuucugccu

SEQ ID NO: 355569 - RNA, 24 nt, Human
cagguucaagcgauuuuccugccu

SEQ ID NO: 355570 - RNA, 24 nt, Human
cagguucaagcuauucuacugccu

SEQ ID NO: 355571 - RNA, 24 nt, Human
cagguucaagcuauucucaugccu

SEQ ID NO: 355572 - RNA, 24 nt, Human
cagguucaagcuauucuccugccu

SEQ ID NO: 355573 - RNA, 23 nt, Human
cagguucaaggauucuccugccu

SEQ ID NO: 355574 - RNA, 24 nt, Human
cagguucaaguaauucuccugccu

SEQ ID NO: 355575 - RNA, 24 nt, Human
cagguucaaguaguucuccugccu

SEQ ID NO: 355576 - RNA, 24 nt, Human
cagguucaagugagucucaugccu

SEQ ID NO: 355577 - RNA, 24 nt, Human
cagguucaagugagucucgugccu

SEQ ID NO: 355578 - RNA, 24 nt, Human
cagguucaagugauccuccugccu

SEQ ID NO: 355579 - RNA, 24 nt, Human
cagguucaagugauucucaugccu

SEQ ID NO: 355580 - RNA, 24 nt, Human
cagguucaagugauucucccaccu

SEQ ID NO: 355581 - RNA, 24 nt, Human
cagguucaagugauucuccucccu

SEQ ID NO: 355582 - RNA, 24 nt, Human
cagguucaagugauucuccugccu

SEQ ID NO: 355583 - RNA, 24 nt, Human
cagguucaagugauucuccugcuu

SEQ ID NO: 355584 - RNA, 24 nt, Human
cagguucaagugauucuccugucu

SEQ ID NO: 355585 - RNA, 24 nt, Human
cagguucaagugauucucguaccu

SEQ ID NO: 355586 - RNA, 24 nt, Human
cagguucaagugauucucuugccu

SEQ ID NO: 355587 - RNA, 24 nt, Human
cagguucaagugauucuucugccu

SEQ ID NO: 355588 - RNA, 24 nt, Human
cagguucaagugcuucuccagccu

SEQ ID NO: 355589 - RNA, 24 nt, Human
cagguucaagugcuucuccugccu

SEQ ID NO: 355590 - RNA, 24 nt, Human
cagguucaagugguucuccuuccu

SEQ ID NO: 355591 - RNA, 24 nt, Human
cagguucaaucgguuuuccugccu

SEQ ID NO: 355592 - RNA, 24 nt, Human
cagguucaauugauucuccugccu

SEQ ID NO: 355593 - RNA, 24 nt, Human
cagguucacaccauucucccgccu

SEQ ID NO: 355594 - RNA, 32 nt, Human
cagguucacaccauucucccgccucagccuuc

SEQ ID NO: 355595 - RNA, 24 nt, Human
cagguucacaccauucuccugccu

SEQ ID NO: 355596 - RNA, 32 nt, Human
cagguucacaccauucuccugccucaaccucc

SEQ ID NO: 355597 - RNA, 32 nt, Human
cagguucacaccauucuccugccucagccucc

SEQ ID NO: 355598 - RNA, 32 nt, Human
cagguucacaccauucuccugccucagcuucc

SEQ ID NO: 355599 - RNA, 32 nt, Human
cagguucacaccauucucuugccucagccuuc

SEQ ID NO: 355600 - RNA, 22 nt, Human
cagguucaccuggccacaggug

SEQ ID NO: 355601 - RNA, 24 nt, Human
cagguucacgccauccuccugccu

SEQ ID NO: 355602 - RNA, 24 nt, Human
cagguucacgccauucucccgccu

SEQ ID NO: 355603 - RNA, 24 nt, Human
cagguucacgccauucuccugccu

SEQ ID NO: 355604 - RNA, 24 nt, Human
cagguucacgccauucuccuggcu

SEQ ID NO: 355605 - RNA, 24 nt, Human
cagguucacgccauuguccugccu

SEQ ID NO: 355606 - RNA, 32 nt, Human
cagguucagaacuuggcugguggacagcggcc

SEQ ID NO: 355607 - RNA, 24 nt, Human
cagguucaggcgauucccgugccu

SEQ ID NO: 355608 - RNA, 24 nt, Human
cagguucaggcgauucuccugccu

SEQ ID NO: 355609 - RNA, 23 nt, Human
cagguucaggcuauucuccugcu

SEQ ID NO: 355610 - RNA, 24 nt, Human
cagguucaggugauucuccugccu

SEQ ID NO: 355611 - RNA, 32 nt, Human
cagguucauagagaugaauuuucugagaaaca

SEQ ID NO: 355612 - RNA, 32 nt, Human
cagguucaucacaaaccugguaccuguugcuu

SEQ ID NO: 355613 - RNA, 32 nt, Human
cagguucaucagaagaaagaaaggacaaaaug

SEQ ID NO: 355614 - RNA, 23 nt, Human
cagguucaugccauucuccugcc

SEQ ID NO: 355615 - RNA, 32 nt, Human
cagguucaugccauucuccugccccagcuucc

SEQ ID NO: 355616 - RNA, 24 nt, Human
cagguucaugccauucuccugccu

SEQ ID NO: 355617 - RNA, 32 nt, Human
cagguucaugccauucuccugccucagccucc

SEQ ID NO: 355618 - RNA, 24 nt, Human
cagguucaugccauucuccugcuu

SEQ ID NO: 355619 - RNA, 32 nt, Human
cagguucaugccauucuccugcuucagccucc

SEQ ID NO: 355620 - RNA, 24 nt, Human
cagguucaugcgauucuccugccu

SEQ ID NO: 355621 - RNA, 24 nt, Human
cagguucaugucauucuccugccu

SEQ ID NO: 355622 - RNA, 32 nt, Human
cagguuccaagaaacacauacgcagccaugca

SEQ ID NO: 355623 - RNA, 24 nt, Human
cagguuccagcaauucuccugccu

SEQ ID NO: 355624 - RNA, 32 nt, Human
cagguuccagcggcuccauugaagagccacag

SEQ ID NO: 355625 - RNA, 32 nt, Human
cagguuccaguaguucauucuaaugccuagau

SEQ ID NO: 355626 - RNA, 32 nt, Human
cagguucccaagacuucaguccuggucugcuc

SEQ ID NO: 355627 - RNA, 21 nt, Human
cagguuccccaugggccagcu

SEQ ID NO: 355628 - RNA, 32 nt, Human
cagguucccccacuaccucucccucagaucca

SEQ ID NO: 355629 - RNA, 32 nt, Human
cagguuccccuucacugugcucucugcuaucu

SEQ ID NO: 355630 - RNA, 32 nt, Human
cagguucccgagagcucaggaacauggagcug

SEQ ID NO: 355631 - RNA, 32 nt, Human
cagguuccuccccucaccccauauuccaucac

SEQ ID NO: 355632 - RNA, 32 nt, Human
cagguuccucggccugccccaggagggcccug

SEQ ID NO: 355633 - RNA, 32 nt, Human
cagguuccugcucugccuucagacuucggcuu

SEQ ID NO: 355634 - RNA, 32 nt, Human
cagguuccuggaccagcccagcugcccccaaa

SEQ ID NO: 355635 - RNA, 23 nt, Human
cagguuccuguaacucccugccu

SEQ ID NO: 355636 - RNA, 32 nt, Human
cagguuccuugcauuugcugccuggaugugca

SEQ ID NO: 355637 - RNA, 24 nt, Human
cagguucgggcgagucuccugccu

SEQ ID NO: 355638 - RNA, 32 nt, Human
cagguucuccacugacucauucauuccuucac

SEQ ID NO: 355639 - RNA, 32 nt, Human
cagguucuccccuugagcuccugcucccccau

SEQ ID NO: 355640 - RNA, 22 nt, Human
cagguucuggcuccuuccagcc

SEQ ID NO: 355641 - RNA, 32 nt, Human
cagguucuuagcacauccucuguucucuaccu

SEQ ID NO: 355642 - RNA, 32 nt, Human
cagguucuuccuagcucggggcuuuuaaauuu

SEQ ID NO: 355643 - RNA, 32 nt, Human
cagguucuugcucucccaggcuggagugcagu

SEQ ID NO: 355644 - RNA, 32 nt, Human
cagguucuuggggguagccaaaaugagguucu

SEQ ID NO: 355645 - RNA, 32 nt, Human
cagguugaagaccuaaccagggccagaaguag

SEQ ID NO: 355646 - RNA, 24 nt, Human
cagguugaagcgauucuccugccu

SEQ ID NO: 355647 - RNA, 32 nt, Human
cagguugaaucuuccaauuugagaacccaugu

SEQ ID NO: 355648 - RNA, 24 nt, Human
cagguugacaccauucuccugccu

SEQ ID NO: 355649 - RNA, 32 nt, Human
cagguugacaccauucuccugccucacccucc

SEQ ID NO: 355650 - RNA, 32 nt, Human
cagguugacgagacgaggcucuucugaccguc

SEQ ID NO: 355651 - RNA, 19 nt, Human
cagguugaggcugcaguga

SEQ ID NO: 355652 - RNA, 32 nt, Human
cagguugaggggauuacuugagcccagaaguu

SEQ ID NO: 355653 - RNA, 32 nt, Human
cagguugaggucugguaacagaaugccaggaa

SEQ ID NO: 355654 - RNA, 32 nt, Human
cagguugcagggaggcggagguugcagugagc

SEQ ID NO: 355655 - RNA, 32 nt, Human
cagguugcagugagccaagaucgugccauugc

SEQ ID NO: 355656 - RNA, 32 nt, Human
cagguugcagugagccaagauuguaccacugc

SEQ ID NO: 355657 - RNA, 32 nt, Human
cagguugcagugagccaagauugugccacugu

SEQ ID NO: 355658 - RNA, 32 nt, Human
cagguugcagugagccaagauugugccccugc

SEQ ID NO: 355659 - RNA, 32 nt, Human
cagguugcagugagccaggauugugccacuac

SEQ ID NO: 355660 - RNA, 32 nt, Human
cagguugcagugagccgagaucaugccacugc

SEQ ID NO: 355661 - RNA, 32 nt, Human
cagguugcagugagccgagauugcgccacugc

SEQ ID NO: 355662 - RNA, 32 nt, Human
cagguugcagugagcugagaucaugccauugc

SEQ ID NO: 355663 - RNA, 32 nt, Human
cagguugcagugagcugagaucgugccacugc

SEQ ID NO: 355664 - RNA, 32 nt, Human
cagguugccaggaggaggcgggagcggggagg

SEQ ID NO: 355665 - RNA, 22 nt, Human
cagguugcccgaugcccuguug

SEQ ID NO: 355666 - RNA, 21 nt, Human
cagguugccugggccacggug

SEQ ID NO: 355667 - RNA, 22 nt, Human
cagguugcuacaaacccuugug

SEQ ID NO: 355668 - RNA, 32 nt, Human
cagguugcuaggacaguaacccugccacacac

SEQ ID NO: 355669 - RNA, 32 nt, Human
cagguugcugcagcucugccuucuccaugggg

SEQ ID NO: 355670 - RNA, 22 nt, Human
cagguugcugggcuggccuugg

SEQ ID NO: 355671 - RNA, 32 nt, Human
cagguuggaaagacuuccugaagaaaucagug

SEQ ID NO: 355672 - RNA, 32 nt, Human
cagguuggacggaguuucaccauguuggccag

SEQ ID NO: 355673 - RNA, 32 nt, Human
cagguuggaggcacaggcagcagcaagaaugg

SEQ ID NO: 355674 - RNA, 32 nt, Human
cagguuggaggcagaggagccgauggcuggag

SEQ ID NO: 355675 - RNA, 32 nt, Human
cagguuggagugacuggugggccuagaucacu

SEQ ID NO: 355676 - RNA, 32 nt, Human
cagguuggccaacauggugagaccccaucucu

SEQ ID NO: 355677 - RNA, 32 nt, Human
cagguuggccaagagcagcuuagaggaucucc

SEQ ID NO: 355678 - RNA, 32 nt, Human
cagguuggcgcuuagagaagccuuggaaucag

SEQ ID NO: 355679 - RNA, 32 nt, Human
cagguuggcgggggccuguaauccuagcuacu

SEQ ID NO: 355680 - RNA, 32 nt, Human
cagguugggacauuuagacaagagugaaucac

SEQ ID NO: 355681 - RNA, 32 nt, Human
cagguugggaggacucacucugugcuccccga

SEQ ID NO: 355682 - RNA, 32 nt, Human
cagguugggaggccaaggugggaggauugcuu

SEQ ID NO: 355683 - RNA, 21 nt, Human
cagguugggcaacagagcaag

SEQ ID NO: 355684 - RNA, 21 nt, Human
cagguugggcaucugggcccu

SEQ ID NO: 355685 - RNA, 22 nt, Human
cagguugggcuacagagugaga

SEQ ID NO: 355686 - RNA, 32 nt, Human
cagguuggggauggggacauggagaggaaggg

SEQ ID NO: 355687 - RNA, 32 nt, Human
cagguuggggauucuuucucucuucucccaac

SEQ ID NO: 355688 - RNA, 20 nt, Human
cagguugggggaggcccugg

SEQ ID NO: 355689 - RNA, 32 nt, Human
cagguuggguaacccucccuguucaucccaug

SEQ ID NO: 355690 - RNA, 32 nt, Human
cagguuggguuugccaaacgccuaauuaccag

SEQ ID NO: 355691 - RNA, 32 nt, Human
cagguuggucucaaacuccugagcucaagcaa

SEQ ID NO: 355692 - RNA, 32 nt, Human
cagguuggucucaaacuccugagcucaagcag

SEQ ID NO: 355693 - RNA, 32 nt, Human
cagguuggucucaaacuccuggacucaaguga

SEQ ID NO: 355694 - RNA, 32 nt, Human
cagguuggucucaaacuccuggguucaagcag

SEQ ID NO: 355695 - RNA, 32 nt, Human
cagguuggucucaaacugcugccucagccucc

SEQ ID NO: 355696 - RNA, 32 nt, Human
cagguuggucucaagcuccugaccucagauga

SEQ ID NO: 355697 - RNA, 32 nt, Human
cagguuggucucgaacuccugaucucaugauc

SEQ ID NO: 355698 - RNA, 32 nt, Human
cagguuggugugagccugggcccggcccacuc

SEQ ID NO: 355699 - RNA, 32 nt, Human
cagguuguagcaaccucuucauuccagagcua

SEQ ID NO: 355700 - RNA, 32 nt, Human
cagguugucauuugcucaaaucacacagcaaa

SEQ ID NO: 355701 - RNA, 32 nt, Human
cagguugucucgaacuccuggucucaagcgau

SEQ ID NO: 355702 - RNA, 32 nt, Human
cagguugucugcuccccugauucauugaggau

SEQ ID NO: 355703 - RNA, 32 nt, Human
cagguugugagccaguggcuugagugaauguu

SEQ ID NO: 355704 - RNA, 32 nt, Human
cagguuguggagguggccaugacagugguggc

SEQ ID NO: 355705 - RNA, 32 nt, Human
cagguuguucacuugcugaggugcaaaaauuc

SEQ ID NO: 355706 - RNA, 32 nt, Human
cagguuguuucccaggcuggggugggggccug

SEQ ID NO: 355707 - RNA, 32 nt, Human
cagguuuaagcaauccucccaccucagccccc

SEQ ID NO: 355708 - RNA, 24 nt, Human
cagguuuaagcaauucuccugcuu

SEQ ID NO: 355709 - RNA, 24 nt, Human
cagguuuaagcgauucucaugccu

SEQ ID NO: 355710 - RNA, 24 nt, Human
cagguuuaagcgauucucuugccu

SEQ ID NO: 355711 - RNA, 24 nt, Human
cagguuuaagcgauucuucugccu

SEQ ID NO: 355712 - RNA, 24 nt, Human
cagguuuaagcuauucuccugccu

SEQ ID NO: 355713 - RNA, 32 nt, Human
cagguuuacaccacugcacuccagucuggaug

SEQ ID NO: 355714 - RNA, 32 nt, Human
cagguuucaagcccaccuccccaaaaccguuu

SEQ ID NO: 355715 - RNA, 32 nt, Human
cagguuucaagugauucuccugccucagccuc

SEQ ID NO: 355716 - RNA, 32 nt, Human
cagguuucacagugucaugggguuugggcauu

SEQ ID NO: 355717 - RNA, 32 nt, Human
cagguuuccagccuggaaccuuuggcucaggc

SEQ ID NO: 355718 - RNA, 32 nt, Human
cagguuuccaggagaugguagacauugggacc

SEQ ID NO: 355719 - RNA, 19 nt, Human
cagguuuccccacucaucu

SEQ ID NO: 355720 - RNA, 32 nt, Human
cagguuuccuggugaguuccaagccuuuggaa

SEQ ID NO: 355721 - RNA, 32 nt, Human
cagguuucucuuuagcccucuuccugcacuug

SEQ ID NO: 355722 - RNA, 32 nt, Human
cagguuugagccaccgugccuggccuaaguuu

SEQ ID NO: 355723 - RNA, 32 nt, Human
cagguuugaggaugcuggggagagggggaggg

SEQ ID NO: 355724 - RNA, 32 nt, Human
cagguuugcaccaccaugcccggcuaauuuuu

SEQ ID NO: 355725 - RNA, 32 nt, Human
cagguuugcauucaugaagcuuucauucauuc

SEQ ID NO: 355726 - RNA, 32 nt, Human
cagguuugcucccccucuacccuuucccccac

SEQ ID NO: 355727 - RNA, 32 nt, Human
cagguuuggggguggguaggaggcaggacugc

SEQ ID NO: 355728 - RNA, 32 nt, Human
cagguuuguauauaaaaugaaaagcuauacua

SEQ ID NO: 355729 - RNA, 20 nt, Human
cagguuuuaaaggaagccaa

SEQ ID NO: 355730 - RNA, 32 nt, Human
cagguuuucaaaccagcccugguguagcagac

SEQ ID NO: 355731 - RNA, 26 nt, Human
cagguuuucaagcaauucuccugccu

SEQ ID NO: 355732 - RNA, 32 nt, Human
cagguuuucauuaucaggucacugugaaaucu

SEQ ID NO: 355733 - RNA, 32 nt, Human
cagguuuuguuuuccuccuuuaccucauguuu

SEQ ID NO: 355734 - RNA, 20 nt, Human
cagguuuuuaguauuuacuu

SEQ ID NO: 355735 - RNA, 24 nt, Human
cagguuuuugcccaagucucagcu

SEQ ID NO: 355736 - RNA, 32 nt, Human
cagguuuuuggugccauuuacccuucauagga

SEQ ID NO: 355737 - RNA, 32 nt, Human
caguaaaaauaggccuuuccacaaucuucuac

SEQ ID NO: 355738 - RNA, 32 nt, Human
caguaaaagugggacuguuucacuggagucag

SEQ ID NO: 355739 - RNA, 32 nt, Human
caguaaaauacaugauacaaggaacucaaaag

SEQ ID NO: 355740 - RNA, 32 nt, Human
caguaaaaucuuaaaugauuuuugccacuggu

SEQ ID NO: 355741 - RNA, 32 nt, Human
caguaaaaugccuggggucccugcugccucuc

SEQ ID NO: 355742 - RNA, 19 nt, Human
caguaaaauuuaaauggug

SEQ ID NO: 355743 - RNA, 22 nt, Human
caguaaacaaaaccaaaccuca

SEQ ID NO: 355744 - RNA, 32 nt, Human
caguaaacaaauaaguuccugucccaugacca

SEQ ID NO: 355745 - RNA, 32 nt, Human
caguaaacaaauucuuucacaagguacaaaau

SEQ ID NO: 355746 - RNA, 21 nt, Human
caguaaacaagcaauacauca

SEQ ID NO: 355747 - RNA, 24 nt, Human
caguaaacaagguuaccuaccuca

SEQ ID NO: 355748 - RNA, 32 nt, Human
caguaaacacaaauauuucuucaaggggugau

SEQ ID NO: 355749 - RNA, 18 nt, Human
caguaaacagacuguaga

SEQ ID NO: 355750 - RNA, 32 nt, Human
caguaaaccugacagaguucaacacugcccac

SEQ ID NO: 355751 - RNA, 24 nt, Human
caguaaacucuguguguuuaggga

SEQ ID NO: 355752 - RNA, 32 nt, Human
caguaaacugaagacaagaacucuucccccaa

SEQ ID NO: 355753 - RNA, 32 nt, Human
caguaaacugauuucccauguccuacuaagcu

SEQ ID NO: 355754 - RNA, 32 nt, Human
caguaaagaacaguuuuuauuguuuuguaagu

SEQ ID NO: 355755 - RNA, 32 nt, Human
caguaaagacauuugaagagcugcggcuaaag

SEQ ID NO: 355756 - RNA, 32 nt, Human
caguaaagaccauuuaguccucaccuucuguu

SEQ ID NO: 355757 - RNA, 32 nt, Human
caguaaagagcgugccuggacccugggaggug

SEQ ID NO: 355758 - RNA, 32 nt, Human
caguaaagcggaggcagcgggggaagauggcg

SEQ ID NO: 355759 - RNA, 31 nt, Human
caguaaaggggccagucuucacuggcagugg

SEQ ID NO: 355760 - RNA, 32 nt, Human
caguaaagguguuccuuccuggcagcguaugc

SEQ ID NO: 355761 - RNA, 24 nt, Human
caguaaauaaaacauuucgcaaaa

SEQ ID NO: 355762 - RNA, 23 nt, Human
caguaaauacaugcuuaacaaaa

SEQ ID NO: 355763 - RNA, 32 nt, Human
caguaaauaucuuucuuacaguccaguagcuu

SEQ ID NO: 355764 - RNA, 31 nt, Human
caguaacaaguguucacaaggauauggagaa

SEQ ID NO: 355765 - RNA, 31 nt, Human
caguaacaaguguuggcauuaucaguugaac

SEQ ID NO: 355766 - RNA, 21 nt, Human
caguaacacucacuucucuca

SEQ ID NO: 355767 - RNA, 32 nt, Human
caguaacacugcacuccucaaaaaguggcggu

SEQ ID NO: 355768 - RNA, 32 nt, Human
caguaacaggggaaaaguucaagaauacagac

SEQ ID NO: 355769 - RNA, 32 nt, Human
caguaacauaacaacaagcauaggucuuauca

SEQ ID NO: 355770 - RNA, 32 nt, Human
caguaacaucaucugaaucaucaguauugucu

SEQ ID NO: 355771 - RNA, 32 nt, Human
caguaacccugccccuuucuuaccucacaggg

SEQ ID NO: 355772 - RNA, 32 nt, Human
caguaaccuagaguuacagcacuugcuccuua

SEQ ID NO: 355773 - RNA, 32 nt, Human
caguaacgcgggccacggaaagguaugauaua

SEQ ID NO: 355774 - RNA, 32 nt, Human
caguaacgcuacaaccauugcaaaucauugga

SEQ ID NO: 355775 - RNA, 32 nt, Human
caguaacucaaauggccucugugucauauguc

SEQ ID NO: 355776 - RNA, 24 nt, Human
caguaacucacgccuguaauccca

SEQ ID NO: 355777 - RNA, 32 nt, Human
caguaacuccuguguguuuugauuagugagau

SEQ ID NO: 355778 - RNA, 32 nt, Human
caguaacucucugaagcauuuugagguaaggg

SEQ ID NO: 355779 - RNA, 32 nt, Human
caguaacugggcucaggagcucugagguggca

SEQ ID NO: 355780 - RNA, 17 nt, Human
caguaacuucauggcug

SEQ ID NO: 355781 - RNA, 32 nt, Human
caguaacuucauggcugaggugaggacaugcu

SEQ ID NO: 355782 - RNA, 32 nt, Human
caguaacuugaaaauucaaaagggacauuugg

SEQ ID NO: 355783 - RNA, 32 nt, Human
caguaacuugauauucacaugaccuacaggau

SEQ ID NO: 355784 - RNA, 32 nt, Human
caguaagaagagcuuggaaaaugcagaaaguu

SEQ ID NO: 355785 - RNA, 22 nt, Human
caguaagacuuucaggcacuuc

SEQ ID NO: 355786 - RNA, 32 nt, Human
caguaagagaaaaggguccccaagaugggaag

SEQ ID NO: 355787 - RNA, 32 nt, Human
caguaagagcaccccaucaucucuccauuucu

SEQ ID NO: 355788 - RNA, 32 nt, Human
caguaagagggaggggaggaggcaggagggcg

SEQ ID NO: 355789 - RNA, 20 nt, Human
caguaagaucuuuugcaaaa

SEQ ID NO: 355790 - RNA, 22 nt, Human
caguaagcaccaccuacucuca

SEQ ID NO: 355791 - RNA, 32 nt, Human
caguaagcagaggucgugccacugcaugccag

SEQ ID NO: 355792 - RNA, 32 nt, Human
caguaagcauccauuccauugauauucgcuaa

SEQ ID NO: 355793 - RNA, 32 nt, Human
caguaagcccagggauguggcagcugcagcgg

SEQ ID NO: 355794 - RNA, 32 nt, Human
caguaagcccugcccuugccccugugcucaag

SEQ ID NO: 355795 - RNA, 32 nt, Human
caguaagccuugcagcuugagcugaaagaugc

SEQ ID NO: 355796 - RNA, 32 nt, Human
caguaagcgccaugaguauucuucccauaacu

SEQ ID NO: 355797 - RNA, 32 nt, Human
caguaagggcaggguguuccuuccagggaacu

SEQ ID NO: 355798 - RNA, 23 nt, Human
caguaagguguaauuacagaauu

SEQ ID NO: 355799 - RNA, 21 nt, Human
caguaaguaccaacuaccuca

SEQ ID NO: 355800 - RNA, 32 nt, Human
caguaaguaucuggaggaagaaaacaggugaa

SEQ ID NO: 355801 - RNA, 32 nt, Human
caguaagucaaagacuggaauuugaaccccaa

SEQ ID NO: 355802 - RNA, 32 nt, Human
caguaaguccugggccggggccgcaucugccu

SEQ ID NO: 355803 - RNA, 32 nt, Human
caguaagucugugucuuccucacugaacccug

SEQ ID NO: 355804 - RNA, 32 nt, Human
caguaaguuguuccaaaugauccugaagaaau

SEQ ID NO: 355805 - RNA, 32 nt, Human
caguaaugaaaccagggucccaaccaagaaau

SEQ ID NO: 355806 - RNA, 32 nt, Human
caguaaugacucucugacccucuggaaauaug

SEQ ID NO: 355807 - RNA, 32 nt, Human
caguaaugagccuggaagguagagauggagag

SEQ ID NO: 355808 - RNA, 32 nt, Human
caguaaugaugcauaauuagaaaaugagguau

SEQ ID NO: 355809 - RNA, 32 nt, Human
caguaauggauccccggccucagucccuacuc

SEQ ID NO: 355810 - RNA, 32 nt, Human
caguaaugucccugccucuucucccaaucaag

SEQ ID NO: 355811 - RNA, 32 nt, Human
caguaauuagggaaaucccacagaugaaaaau

SEQ ID NO: 355812 - RNA, 32 nt, Human
caguaauuauucugcauucacaauuagugacu

SEQ ID NO: 355813 - RNA, 32 nt, Human
caguaauugcaacugcucacaugagucaaaau

SEQ ID NO: 355814 - RNA, 32 nt, Human
caguaauugcagccucccuuaggaggcugagg

SEQ ID NO: 355815 - RNA, 32 nt, Human
caguaauuuaacaucacuacaaaaagaaggag

SEQ ID NO: 355816 - RNA, 32 nt, Human
caguaauuuggguuagccuaccuucauuaauu

SEQ ID NO: 355817 - RNA, 32 nt, Human
caguacaaaaacacuggcacuugaauguugaa

SEQ ID NO: 355818 - RNA, 19 nt, Human
caguacaaaauaggcacuc

SEQ ID NO: 355819 - RNA, 32 nt, Human
caguacaaagaaaaggggguggagacccugca

SEQ ID NO: 355820 - RNA, 32 nt, Human
caguacaaaguggcagaaccacauuuuguucc

SEQ ID NO: 355821 - RNA, 32 nt, Human
caguacaaucagucguucacauaccacuaacu

SEQ ID NO: 355822 - RNA, 32 nt, Human
caguacaauuucagcauaucucuggcucaggg

SEQ ID NO: 355823 - RNA, 32 nt, Human
caguacacagaauuaaagugggggagauggca

SEQ ID NO: 355824 - RNA, 32 nt, Human
caguacacagccccaaaacagccuaagaaagg

SEQ ID NO: 355825 - RNA, 32 nt, Human
caguacaccagcagaggaaacuuauaaccucg

SEQ ID NO: 355826 - RNA, 32 nt, Human
caguacagaucguuucucaucucuagugccuc

SEQ ID NO: 355827 - RNA, 32 nt, Human
caguacagaugggguuucaccauauugggcag

SEQ ID NO: 355828 - RNA, 32 nt, Human
caguacagccuccuuggcaccugcugccaccu

SEQ ID NO: 355829 - RNA, 32 nt, Human
caguacaguauuuacugucaaugcaaaagaau

SEQ ID NO: 355830 - RNA, 32 nt, Human
caguacaucaaaaucauugcagaguauuagaa

SEQ ID NO: 355831 - RNA, 32 nt, Human
caguacaucaaaggaauggaugguggacccua

SEQ ID NO: 355832 - RNA, 18 nt, Human
caguacaugaacuauaga

SEQ ID NO: 355833 - RNA, 32 nt, Human
caguacauggaaauauagaagaugcugugacu

SEQ ID NO: 355834 - RNA, 32 nt, Human
caguacaugggaaaggaggcaugccucugaua

SEQ ID NO: 355835 - RNA, 32 nt, Human
caguacaugggugagagagguuaagcugaugg

SEQ ID NO: 355836 - RNA, 32 nt, Human
caguacauuaccagcugugauucuccacugaa

SEQ ID NO: 355837 - RNA, 32 nt, Human
caguacauucagagaacuagauaaaagauaua

SEQ ID NO: 355838 - RNA, 32 nt, Human
caguacauugcauguaguuaagccacauuuua

SEQ ID NO: 355839 - RNA, 32 nt, Human
caguacauuugcaccguguccuagagagccuc

SEQ ID NO: 355840 - RNA, 21 nt, Human
caguaccaccaaaagaugaag

SEQ ID NO: 355841 - RNA, 32 nt, Human
caguaccacugccaccaugcugcucacuuaug

SEQ ID NO: 355842 - RNA, 32 nt, Human
caguaccauggagcaacugacaacccucccac

SEQ ID NO: 355843 - RNA, 32 nt, Human
caguacccagaacagccaguuuuacugugauu

SEQ ID NO: 355844 - RNA, 32 nt, Human
caguacccagggccucuucagcucuuuguagg

SEQ ID NO: 355845 - RNA, 32 nt, Human
caguacccccuccagccccacaccugggccuc

SEQ ID NO: 355846 - RNA, 32 nt, Human
caguacccugcucccccuuucccauaauucau

SEQ ID NO: 355847 - RNA, 32 nt, Human
caguaccggcgggacacagcaggcuggaagau

SEQ ID NO: 355848 - RNA, 32 nt, Human
caguaccucccgcucuccaccgccugcagcag

SEQ ID NO: 355849 - RNA, 32 nt, Human
caguaccucccuaaagcauuuugagguagggg

SEQ ID NO: 355850 - RNA, 32 nt, Human
caguaccucuuccugaaucugguacccaucug

SEQ ID NO: 355851 - RNA, 32 nt, Human
caguaccugagcacugcugcuacuucuucccc

SEQ ID NO: 355852 - RNA, 32 nt, Human
caguaccugucuguuuccuguccuccuuccag

SEQ ID NO: 355853 - RNA, 32 nt, Human
caguaccuugggaggccaaggugggcagaucg

SEQ ID NO: 355854 - RNA, 32 nt, Human
caguacgcccggcgccuggccuccaggcccgu

SEQ ID NO: 355855 - RNA, 32 nt, Human
caguacuaccaccaccaccaacaacaucaaca

SEQ ID NO: 355856 - RNA, 32 nt, Human
caguacuaggagcauugguugcaguggaggag

SEQ ID NO: 355857 - RNA, 32 nt, Human
caguacucaacuggacaucacagcagaaugaa

SEQ ID NO: 355858 - RNA, 32 nt, Human
caguacucacccagggacuccaguucacaggc

SEQ ID NO: 355859 - RNA, 32 nt, Human
caguacucgggaagccaugcaggaugaagaug

SEQ ID NO: 355860 - RNA, 32 nt, Human
caguacucucagucccuccggggcagcucuuc

SEQ ID NO: 355861 - RNA, 32 nt, Human
caguacucuccucugaguucaaucaucuugca

SEQ ID NO: 355862 - RNA, 32 nt, Human
caguacucuguggcuuucugcaaucacgugcg

SEQ ID NO: 355863 - RNA, 32 nt, Human
caguacugaaucaggaccucacucagaaagac

SEQ ID NO: 355864 - RNA, 32 nt, Human
caguacuggccgcggcgcgguggcggcggcug

SEQ ID NO: 355865 - RNA, 32 nt, Human
caguacuggcucugggacaggugagcaguggg

SEQ ID NO: 355866 - RNA, 32 nt, Human
caguacugucauggagcagagcaggcaguggg

SEQ ID NO: 355867 - RNA, 32 nt, Human
caguacugucuaggcuguugcaauauauucuc

SEQ ID NO: 355868 - RNA, 32 nt, Human
caguacugucuaggcuguugcaauauguucuc

SEQ ID NO: 355869 - RNA, 32 nt, Human
caguacuguguucuucagcuagaggcagcuuu

SEQ ID NO: 355870 - RNA, 32 nt, Human
caguacuuaccuccuuagagucauugugaagg

SEQ ID NO: 355871 - RNA, 32 nt, Human
caguacuucgccugacaguuguccugggacug

SEQ ID NO: 355872 - RNA, 32 nt, Human
caguacuuugggaggccaaggcaagcagauca

SEQ ID NO: 355873 - RNA, 32 nt, Human
caguacuuugggaggccaaggcgggcagauca

SEQ ID NO: 355874 - RNA, 32 nt, Human
caguacuuugggaggccgaggugggcggauca

SEQ ID NO: 355875 - RNA, 32 nt, Human
caguacuuugggaggcugaggugggcaaauca

SEQ ID NO: 355876 - RNA, 32 nt, Human
caguagaaacgggauuucaccacguuggccag

SEQ ID NO: 355877 - RNA, 32 nt, Human
caguagaaacgggguuucaccauguuggccag

SEQ ID NO: 355878 - RNA, 32 nt, Human
caguagaaaggcucaaguugcaccaggcagac

SEQ ID NO: 355879 - RNA, 32 nt, Human
caguagaaagugucacagcuagguccauucau

SEQ ID NO: 355880 - RNA, 32 nt, Human
caguagaauaaaaucuuaaagcacucauaaua

SEQ ID NO: 355881 - RNA, 32 nt, Human
caguagaaucuucuaccucauaacuuccuucc

SEQ ID NO: 355882 - RNA, 32 nt, Human
caguagaauggacccuuccuccaccucaguuc

SEQ ID NO: 355883 - RNA, 23 nt, Human
caguagacuguauggucuuucaa

SEQ ID NO: 355884 - RNA, 32 nt, Human
caguagagacaagguuucaccauguuagccag

SEQ ID NO: 355885 - RNA, 32 nt, Human
caguagagacagggucucaccauguuagccag

SEQ ID NO: 355886 - RNA, 32 nt, Human
caguagagacaggguuucaccaucuuggccug

SEQ ID NO: 355887 - RNA, 32 nt, Human
caguagagacaggguuucaccauguuggccag

SEQ ID NO: 355888 - RNA, 32 nt, Human
caguagagacaggguuucgccauguugcccag

SEQ ID NO: 355889 - RNA, 32 nt, Human
caguagagaccggguuuugccauguuggccag

SEQ ID NO: 355890 - RNA, 32 nt, Human
caguagagacgagguuuugccauguuggccag

SEQ ID NO: 355891 - RNA, 32 nt, Human
caguagagacgggguuucaccauguucgccag

SEQ ID NO: 355892 - RNA, 32 nt, Human
caguagagacgggguuucaccauguuggccag

SEQ ID NO: 355893 - RNA, 32 nt, Human
caguagagacgggguuucaccguguuagccag

SEQ ID NO: 355894 - RNA, 32 nt, Human
caguagagacgggguuucacuauguuggccag

SEQ ID NO: 355895 - RNA, 32 nt, Human
caguagagacgggguuucacuguguuagccag

SEQ ID NO: 355896 - RNA, 32 nt, Human
caguagagacgggguuuccccauguugguuag

SEQ ID NO: 355897 - RNA, 32 nt, Human
caguagagacgggguuucgccacauuggccgu

SEQ ID NO: 355898 - RNA, 32 nt, Human
caguagagacgggguuucgccauguuggcuag

SEQ ID NO: 355899 - RNA, 32 nt, Human
caguagagaugggauuucacuguguuggccaa

SEQ ID NO: 355900 - RNA, 32 nt, Human
caguagagauggggucucacuauguugcccag

SEQ ID NO: 355901 - RNA, 32 nt, Human
caguagagaugggguuucaccauguuagccag

SEQ ID NO: 355902 - RNA, 32 nt, Human
caguagagaugggguuuccccauguuggccag

SEQ ID NO: 355903 - RNA, 32 nt, Human
caguagagaugggguuugaccauguuggccag

SEQ ID NO: 355904 - RNA, 32 nt, Human
caguagagauggguuucaccauguuggccaau

SEQ ID NO: 355905 - RNA, 32 nt, Human
caguagagauggguuucaccauguuggccagg

SEQ ID NO: 355906 - RNA, 32 nt, Human
caguagagcacaugaucagccacagcugugca

SEQ ID NO: 355907 - RNA, 18 nt, Human
caguagagcagcagcaca

SEQ ID NO: 355908 - RNA, 32 nt, Human
caguagagcgaaaugcuagacauggagaaucu

SEQ ID NO: 355909 - RNA, 32 nt, Human
caguagaggaaccauccauaugcugagcuucu

SEQ ID NO: 355910 - RNA, 32 nt, Human
caguagcaaaacacagaggucuggcaugaagg

SEQ ID NO: 355911 - RNA, 32 nt, Human
caguagcaaauucacuaaacuuuuguguucag

SEQ ID NO: 355912 - RNA, 32 nt, Human
caguagcaacagcagcaaguugccaccaguuu

SEQ ID NO: 355913 - RNA, 32 nt, Human
caguagcacaaaagagaugacauuuaccuagc

SEQ ID NO: 355914 - RNA, 32 nt, Human
caguagcaccugcuggacagggcugggcggca

SEQ ID NO: 355915 - RNA, 32 nt, Human
caguagcagaaucaucuuccacaacaaggaau

SEQ ID NO: 355916 - RNA, 32 nt, Human
caguagcagcagcaugcaccaaaagagaaugg

SEQ ID NO: 355917 - RNA, 24 nt, Human
caguagcaguugccuguaaucuca

SEQ ID NO: 355918 - RNA, 32 nt, Human
caguagccaagaagauggcauagcauaagaau

SEQ ID NO: 355919 - RNA, 32 nt, Human
caguagccaccaggggucucuguuuccauuac

SEQ ID NO: 355920 - RNA, 32 nt, Human
caguagccacuugucaucuauuuucugauuau

SEQ ID NO: 355921 - RNA, 32 nt, Human
caguagcccacucugaccaccaccuccuagcu

SEQ ID NO: 355922 - RNA, 32 nt, Human
caguagccccgauggaagcagugagaaugaac

SEQ ID NO: 355923 - RNA, 32 nt, Human
caguagcccuccacuucuccagccucucagcc

SEQ ID NO: 355924 - RNA, 32 nt, Human
caguagccgguuaucuagaccaguaaguggag

SEQ ID NO: 355925 - RNA, 32 nt, Human
caguagccuuuacugaaugugugucuugagag

SEQ ID NO: 355926 - RNA, 32 nt, Human
caguagcgugaucauagcuuacugcagccucg

SEQ ID NO: 355927 - RNA, 32 nt, Human
caguagcuaaaauguugagauuagagguacuu

SEQ ID NO: 355928 - RNA, 32 nt, Human
caguagcuacgguucccugccuaggagcuggg

SEQ ID NO: 355929 - RNA, 25 nt, Human
caguagcucacacccuguaauccca

SEQ ID NO: 355930 - RNA, 24 nt, Human
caguagcucacaccuauaauccua

SEQ ID NO: 355931 - RNA, 24 nt, Human
caguagcucacaccuguaauccua

SEQ ID NO: 355932 - RNA, 23 nt, Human
caguagcucacaccuguaguccc

SEQ ID NO: 355933 - RNA, 24 nt, Human
caguagcucacgccuguaauccca

SEQ ID NO: 355934 - RNA, 24 nt, Human
caguagcucaugccuauaauaccc

SEQ ID NO: 355935 - RNA, 21 nt, Human
caguagcucaugccuguaauc

SEQ ID NO: 355936 - RNA, 23 nt, Human
caguagcucaugccuguaauccc

SEQ ID NO: 355937 - RNA, 24 nt, Human
caguagcucaugccuguaauccca

SEQ ID NO: 355938 - RNA, 20 nt, Human
caguagcuccagcagcagca

SEQ ID NO: 355939 - RNA, 32 nt, Human
caguagcucugaacaagaguccagccaacccu

SEQ ID NO: 355940 - RNA, 32 nt, Human
caguagcugagauugcaggcacaugccaccac

SEQ ID NO: 355941 - RNA, 32 nt, Human
caguagcugcuuucugagcuacucaacaagga

SEQ ID NO: 355942 - RNA, 32 nt, Human
caguagcugggggagcagcugagggaaaggga

SEQ ID NO: 355943 - RNA, 32 nt, Human
caguagcuggucagggcugaguacaguccugg

SEQ ID NO: 355944 - RNA, 24 nt, Human
caguagcuuauaccuguaauccua

SEQ ID NO: 355945 - RNA, 32 nt, Human
caguaggaaauguucaucuguuacauggaaaa

SEQ ID NO: 355946 - RNA, 32 nt, Human
caguaggaacaagcuggcuucugugauuaggu

SEQ ID NO: 355947 - RNA, 32 nt, Human
caguaggaagaaaccaggacagcaguggaaga

SEQ ID NO: 355948 - RNA, 32 nt, Human
caguaggaaugugaagccagagguuucggauu

SEQ ID NO: 355949 - RNA, 32 nt, Human
caguaggagagugaguuuuggggccagacacg

SEQ ID NO: 355950 - RNA, 32 nt, Human
caguaggagcagaaaaguuacuggggaguaca

SEQ ID NO: 355951 - RNA, 32 nt, Human
caguaggagcagcagguguuggcagcagagaa

SEQ ID NO: 355952 - RNA, 32 nt, Human
caguaggaggggcaggaggccgacacaccuga

SEQ ID NO: 355953 - RNA, 18 nt, Human
caguaggaucacggcuca

SEQ ID NO: 355954 - RNA, 18 nt, Human
caguaggcacuugguggc

SEQ ID NO: 355955 - RNA, 32 nt, Human
caguaggcagcucccaagaugggugaaaggaa

SEQ ID NO: 355956 - RNA, 32 nt, Human
caguaggccagccuguucucugccauucccua

SEQ ID NO: 355957 - RNA, 32 nt, Human
caguaggccauagaauuggcuacugccauaca

SEQ ID NO: 355958 - RNA, 32 nt, Human
caguaggcccagcgcugcugugucucgucaga

SEQ ID NO: 355959 - RNA, 32 nt, Human
caguaggccuggggaccaggcuugggucugga

SEQ ID NO: 355960 - RNA, 32 nt, Human
caguaggcggcgcgggaggaaaagaggauuga

SEQ ID NO: 355961 - RNA, 31 nt, Human
caguaggcuccugaagagugaucucaacuuu

SEQ ID NO: 355962 - RNA, 32 nt, Human
caguaggcuggagcugauuguuaaauucucag

SEQ ID NO: 355963 - RNA, 32 nt, Human
caguagggacagucaguacaguacaggaaggg

SEQ ID NO: 355964 - RNA, 32 nt, Human
caguagggacgggguuacaccauguuggccag

SEQ ID NO: 355965 - RNA, 32 nt, Human
caguagggacgggguuucaccguguuagccag

SEQ ID NO: 355966 - RNA, 32 nt, Human
caguagggaggcagaguaucuugguggggagg

SEQ ID NO: 355967 - RNA, 21 nt, Human
caguagggcagaaacuugaaa

SEQ ID NO: 355968 - RNA, 32 nt, Human
caguaggggaagcaaggugaccgcaagggggu

SEQ ID NO: 355969 - RNA, 32 nt, Human
caguaggguaguuucagguggggaggaugaca

SEQ ID NO: 355970 - RNA, 32 nt, Human
caguagguaaaggggccaaggagagacugcua

SEQ ID NO: 355971 - RNA, 32 nt, Human
caguaggugcuggacaucgacagcugccugga

SEQ ID NO: 355972 - RNA, 22 nt, Human
caguaggugucccccaccccca

SEQ ID NO: 355973 - RNA, 32 nt, Human
caguagguuacaaaugaagaguccaccaguau

SEQ ID NO: 355974 - RNA, 24 nt, Human
caguaguauccgccuguaguccca

SEQ ID NO: 355975 - RNA, 32 nt, Human
caguagucagcguuaagccugucuggaucaau

SEQ ID NO: 355976 - RNA, 32 nt, Human
caguagugugagccaagcgcagccugccaggc

SEQ ID NO: 355977 - RNA, 32 nt, Human
caguaguuaaugaauuguggcaggacugaguc

SEQ ID NO: 355978 - RNA, 32 nt, Human
caguaguuagcccagguguggggaacgagagu

SEQ ID NO: 355979 - RNA, 19 nt, Human
caguaguucagugagaaug

SEQ ID NO: 355980 - RNA, 20 nt, Human
caguaguucucaaacacucc

SEQ ID NO: 355981 - RNA, 32 nt, Human
caguaguucuccuugcugaauaguauuccauu

SEQ ID NO: 355982 - RNA, 24 nt, Human
caguaguuuacgccuguaauccca

SEQ ID NO: 355983 - RNA, 32 nt, Human
caguaguuuauuuggcguuuggcuccaggaug

SEQ ID NO: 355984 - RNA, 32 nt, Human
caguaguuucacccauuugcauggaaaaauuu

SEQ ID NO: 355985 - RNA, 32 nt, Human
caguauaaaaacacuggcacuugaauguugaa

SEQ ID NO: 355986 - RNA, 32 nt, Human
caguauaacuaaacaugauauaugagcuuuug

SEQ ID NO: 355987 - RNA, 32 nt, Human
caguauacaagcuuuuguguauaaauguuuua

SEQ ID NO: 355988 - RNA, 32 nt, Human
caguauagaguccauauacaaagaaguuacag

SEQ ID NO: 355989 - RNA, 30 nt, Human
caguauagcuugcaauuaagaccuagauca

SEQ ID NO: 355990 - RNA, 32 nt, Human
caguauaggagagagagcaaggauugagucug

SEQ ID NO: 355991 - RNA, 32 nt, Human
caguauaguguaugaauugcugugcugcaaag

SEQ ID NO: 355992 - RNA, 32 nt, Human
caguauauacaucaccucucacccucaccugc

SEQ ID NO: 355993 - RNA, 32 nt, Human
caguauauagaccuaccauuaguagaaaugau

SEQ ID NO: 355994 - RNA, 32 nt, Human
caguauauuuuaaauuaagaaaagugaacuau

SEQ ID NO: 355995 - RNA, 32 nt, Human
caguaucaaggcugacuuguguucauguggag

SEQ ID NO: 355996 - RNA, 32 nt, Human
caguaucacacguggaaccgcagacagggccc

SEQ ID NO: 355997 - RNA, 32 nt, Human
caguaucaccugcugggcauuaaggcaagugg

SEQ ID NO: 355998 - RNA, 22 nt, Human
caguaucacuaaucaucaggga

SEQ ID NO: 355999 - RNA, 32 nt, Human
caguaucacugccugucucugccaccaaacua

SEQ ID NO: 356000 - RNA, 32 nt, Human
caguaucagcaucaucugggaacuugucacag

SEQ ID NO: 356001 - RNA, 32 nt, Human
caguaucagcaugagcccuggggagcuccaag

SEQ ID NO: 356002 - RNA, 32 nt, Human
caguaucaggaauugggaucgcuagaguguuu

SEQ ID NO: 356003 - RNA, 32 nt, Human
caguaucauccagcaaagaaguucaagauuca

SEQ ID NO: 356004 - RNA, 32 nt, Human
caguaucauucauucucucuccccucacuggu

SEQ ID NO: 356005 - RNA, 32 nt, Human
caguauccagaccaaauguuggaaagucuuau

SEQ ID NO: 356006 - RNA, 32 nt, Human
caguauccauuacuuguguuugcucacaacag

SEQ ID NO: 356007 - RNA, 32 nt, Human
caguaucccacacacacuggugcccagagccg

SEQ ID NO: 356008 - RNA, 32 nt, Human
caguauccuauucucccuuucuccccucacaa

SEQ ID NO: 356009 - RNA, 32 nt, Human
caguauccuuggaguguugcugaagauggagu

SEQ ID NO: 356010 - RNA, 32 nt, Human
caguaucggcaaccuccugggcuuccuagagg

SEQ ID NO: 356011 - RNA, 31 nt, Human
caguaucuagucaggggaaaagacugcauuu

SEQ ID NO: 356012 - RNA, 32 nt, Human
caguaucuccccagacuuccuggucauuuucu

SEQ ID NO: 356013 - RNA, 32 nt, Human
caguaucucugccuucucuccauuguuagccu

SEQ ID NO: 356014 - RNA, 32 nt, Human
caguaucuuuaagauugcuagggaaaagggcc

SEQ ID NO: 356015 - RNA, 32 nt, Human
caguaugaauggaaagaauccaaguugaaguu

SEQ ID NO: 356016 - RNA, 32 nt, Human
caguaugagcugggugucacuuggcucugaac

SEQ ID NO: 356017 - RNA, 32 nt, Human
caguaugaggugaacccacggaccacagagau

SEQ ID NO: 356018 - RNA, 32 nt, Human
caguaugaggugagucacaaagugcccaacau

SEQ ID NO: 356019 - RNA, 32 nt, Human
caguaugcaaagcaaucuuuuauacaauaauu

SEQ ID NO: 356020 - RNA, 29 nt, Human
caguaugcaaauuagguuuuucugccaag

SEQ ID NO: 356021 - RNA, 32 nt, Human
caguaugcaaguuauucuugcaccacaugcuc

SEQ ID NO: 356022 - RNA, 32 nt, Human
caguaugcagguaggccuaaugggggaagaug

SEQ ID NO: 356023 - RNA, 32 nt, Human
caguaugccaaguggauuccagccucauggcc

SEQ ID NO: 356024 - RNA, 32 nt, Human
caguaugcuagaauuuugaggcucccuucuga

SEQ ID NO: 356025 - RNA, 32 nt, Human
caguauggccaacaugguaagacccugucucu

SEQ ID NO: 356026 - RNA, 32 nt, Human
caguauggcuaaauccauuuauuccaaaauca

SEQ ID NO: 356027 - RNA, 22 nt, Human
caguaugggugacagagugaga

SEQ ID NO: 356028 - RNA, 22 nt, Human
caguaugucacucccacuccca

SEQ ID NO: 356029 - RNA, 32 nt, Human
caguauguccuaugcaaugucauucacacaca

SEQ ID NO: 356030 - RNA, 32 nt, Human
caguaugugaccauuugauaccuacuguuuuc

SEQ ID NO: 356031 - RNA, 32 nt, Human
caguauguugggcauuaagaauccaaagauua

SEQ ID NO: 356032 - RNA, 32 nt, Human
caguauuaucauuuugaagucuguaaauugug

SEQ ID NO: 356033 - RNA, 32 nt, Human
caguauuaucucugcuuucagaaguagacaua

SEQ ID NO: 356034 - RNA, 32 nt, Human
caguauucaagugccuugaacaguguccccuc

SEQ ID NO: 356035 - RNA, 32 nt, Human
caguauucacaucugcuaagugaucauuuucu

SEQ ID NO: 356036 - RNA, 19 nt, Human
caguauucguuacauagua

SEQ ID NO: 356037 - RNA, 32 nt, Human
caguauucucagagccugagaguuguuacagu

SEQ ID NO: 356038 - RNA, 32 nt, Human
caguauugagaaacgcagccugccagggaauc

SEQ ID NO: 356039 - RNA, 32 nt, Human
caguauugcucacccagugcccucuccccuca

SEQ ID NO: 356040 - RNA, 32 nt, Human
caguauuggagguggagccuagugggagguga

SEQ ID NO: 356041 - RNA, 32 nt, Human
caguauuggaguuuuguucuuuauugcucccu

SEQ ID NO: 356042 - RNA, 32 nt, Human
caguauuguccucaccaaccccagcuguggcc

SEQ ID NO: 356043 - RNA, 27 nt, Human
caguauuguggaggaaaugcugugaaa

SEQ ID NO: 356044 - RNA, 32 nt, Human
caguauuguguaguuuagacagaucaccugag

SEQ ID NO: 356045 - RNA, 32 nt, Human
caguauuguuuucuuauaugugcaaugaagug

SEQ ID NO: 356046 - RNA, 32 nt, Human
caguauuuaagugcccauaaggcagcaugaaa

SEQ ID NO: 356047 - RNA, 32 nt, Human
caguauuuagagcugcuguagcuguuccuuca

SEQ ID NO: 356048 - RNA, 19 nt, Human
caguauuucucagcuguga

SEQ ID NO: 356049 - RNA, 31 nt, Human
caguauuucuuuguuauacauuuaaagauuu

SEQ ID NO: 356050 - RNA, 32 nt, Human
caguauuugaagugugagggcuuuguguauag

SEQ ID NO: 356051 - RNA, 32 nt, Human
caguauuugcagaagggcaaagcugcuuaaga

SEQ ID NO: 356052 - RNA, 32 nt, Human
caguauuugggcagaugcuauggguuacaguu

SEQ ID NO: 356053 - RNA, 32 nt, Human
caguauuuguaagcauuucagcagaacaauaa

SEQ ID NO: 356054 - RNA, 32 nt, Human
caguauuuuaaaagcucaaaguagaagaggag

SEQ ID NO: 356055 - RNA, 32 nt, Human
caguauuuucacaagcuacaaaaacauccaaa

SEQ ID NO: 356056 - RNA, 23 nt, Human
caguauuuucucuacuucucuca

SEQ ID NO: 356057 - RNA, 32 nt, Human
caguauuuugcacuugauuacauauccuucac

SEQ ID NO: 356058 - RNA, 32 nt, Human
cagucaaccagcuguggcuuccugugccuaga

SEQ ID NO: 356059 - RNA, 32 nt, Human
cagucaacccccauaaccuggggauugggcag

SEQ ID NO: 356060 - RNA, 32 nt, Human
cagucaagaaaaugagauguuuuccaucagag

SEQ ID NO: 356061 - RNA, 32 nt, Human
cagucaagaugggcggaaacuccacaucggca

SEQ ID NO: 356062 - RNA, 32 nt, Human
cagucaaggacaaaccucccaccucacagaca

SEQ ID NO: 356063 - RNA, 32 nt, Human
cagucaaggcuucucaauuuguacuuuccagg

SEQ ID NO: 356064 - RNA, 32 nt, Human
cagucaaggugacgcauccuugccgggccagc

SEQ ID NO: 356065 - RNA, 32 nt, Human
cagucaagguggggucccaggagcagcuguga

SEQ ID NO: 356066 - RNA, 32 nt, Human
cagucaauaaugccacuuuagacaaaaaucag

SEQ ID NO: 356067 - RNA, 32 nt, Human
cagucaaugccacucuccacaacaacaaugaa

SEQ ID NO: 356068 - RNA, 32 nt, Human
cagucacaaguguggcuggugucauucugggu

SEQ ID NO: 356069 - RNA, 16 nt, Human
cagucacaaugagaug

SEQ ID NO: 356070 - RNA, 32 nt, Human
cagucacacaaagcuacccaucugccagauca

SEQ ID NO: 356071 - RNA, 32 nt, Human
cagucacacagcccugcuuggccagcacugcc

SEQ ID NO: 356072 - RNA, 31 nt, Human
cagucacacagcuaauauaugccagagccca

SEQ ID NO: 356073 - RNA, 32 nt, Human
cagucacacagcuuccaggcacugggaguggu

SEQ ID NO: 356074 - RNA, 32 nt, Human
cagucacaccccugcacuccagccugggugac

SEQ ID NO: 356075 - RNA, 32 nt, Human
cagucacaggcagaagaaggaaacuggacucu

SEQ ID NO: 356076 - RNA, 32 nt, Human
cagucacaggcaggggccuugaggaugauuuc

SEQ ID NO: 356077 - RNA, 32 nt, Human
cagucacagucacacacacauauguauuacuu

SEQ ID NO: 356078 - RNA, 32 nt, Human
cagucacaucacugcacccguccuguguccuc

SEQ ID NO: 356079 - RNA, 32 nt, Human
cagucacauuucagccacugcucugagaauuu

SEQ ID NO: 356080 - RNA, 32 nt, Human
cagucaccaaccuccucugcccucggggcagc

SEQ ID NO: 356081 - RNA, 32 nt, Human
cagucaccacauccuucugccuggguggccuc

SEQ ID NO: 356082 - RNA, 32 nt, Human
cagucaccauagcaacacucugagauggcagg

SEQ ID NO: 356083 - RNA, 32 nt, Human
cagucacccaaccagagccucugaggauggcc

SEQ ID NO: 356084 - RNA, 32 nt, Human
cagucacccacugucagcccccaucugacaag

SEQ ID NO: 356085 - RNA, 32 nt, Human
cagucacccugccucaguuaucaacacacacc

SEQ ID NO: 356086 - RNA, 32 nt, Human
cagucacccuugcuaaaaaccuggcaaugcaa

SEQ ID NO: 356087 - RNA, 18 nt, Human
cagucaccucuucugcca

SEQ ID NO: 356088 - RNA, 32 nt, Human
cagucaccugaacaaggaaacuugucacaagu

SEQ ID NO: 356089 - RNA, 32 nt, Human
cagucaccuguaaucccagcuacuugggaggc

SEQ ID NO: 356090 - RNA, 32 nt, Human
cagucaccuguggcagaggugugcagaggcag

SEQ ID NO: 356091 - RNA, 18 nt, Human
cagucaccuuuggccuca

SEQ ID NO: 356092 - RNA, 32 nt, Human
cagucacgccacugcauucuauccugggcaac

SEQ ID NO: 356093 - RNA, 32 nt, Human
cagucacugcaaucucuuuaccaccuccccac

SEQ ID NO: 356094 - RNA, 32 nt, Human
cagucacugcauucuuagguauuccaaaccaa

SEQ ID NO: 356095 - RNA, 32 nt, Human
cagucacugccugggccgugcgcugcagcucg

SEQ ID NO: 356096 - RNA, 32 nt, Human
cagucacugccugggcugugugguucugggcc

SEQ ID NO: 356097 - RNA, 32 nt, Human
cagucacugggcagccacauagcagcugcagg

SEQ ID NO: 356098 - RNA, 32 nt, Human
cagucacugugcaauaugcccccuggguccca

SEQ ID NO: 356099 - RNA, 32 nt, Human
cagucagaacagcagccucuacacauguuguc

SEQ ID NO: 356100 - RNA, 32 nt, Human
cagucagacgcugcaggcaccacuaucaccag

SEQ ID NO: 356101 - RNA, 32 nt, Human
cagucagagagggaguggcagaugacacugcu

SEQ ID NO: 356102 - RNA, 32 nt, Human
cagucagagggcccucagucaccccgccccau

SEQ ID NO: 356103 - RNA, 32 nt, Human
cagucagauguucuucuccuucagcuucggcu

SEQ ID NO: 356104 - RNA, 32 nt, Human
cagucagauuauccucaguuucagauacuuca

SEQ ID NO: 356105 - RNA, 32 nt, Human
cagucagauuccaggcuggagugugauucugu

SEQ ID NO: 356106 - RNA, 32 nt, Human
cagucagcaaggaagccgggugucgcucacac

SEQ ID NO: 356107 - RNA, 32 nt, Human
cagucagcaauauguauccuuucucucaagcu

SEQ ID NO: 356108 - RNA, 32 nt, Human
cagucagcacuuccuguccccugcagaggcuc

SEQ ID NO: 356109 - RNA, 23 nt, Human
cagucagcagccucaucugcaga

SEQ ID NO: 356110 - RNA, 32 nt, Human
cagucagcaguuucugggcacuucucucagua

SEQ ID NO: 356111 - RNA, 32 nt, Human
cagucagcaugaauccaguccagauauuucac

SEQ ID NO: 356112 - RNA, 32 nt, Human
cagucagcauugcaccugcuauggagaagggu

SEQ ID NO: 356113 - RNA, 32 nt, Human
cagucagccgacugcccugucuugccucaaau

SEQ ID NO: 356114 - RNA, 32 nt, Human
cagucagccuugcuuggaauucuggcagguuc

SEQ ID NO: 356115 - RNA, 32 nt, Human
cagucagcucuauccugaaagcauugucccaa

SEQ ID NO: 356116 - RNA, 32 nt, Human
cagucagcuucauggcagaauguggccauuug

SEQ ID NO: 356117 - RNA, 32 nt, Human
cagucagcuugggucccuaucucuggccagag

SEQ ID NO: 356118 - RNA, 32 nt, Human
cagucaggacucaguaagugucgggagaacac

SEQ ID NO: 356119 - RNA, 32 nt, Human
cagucaggaggcacucuauuaagcugagggca

SEQ ID NO: 356120 - RNA, 32 nt, Human
cagucaggauaucaguccgugccaccaggccc

SEQ ID NO: 356121 - RNA, 32 nt, Human
cagucaggcagggagcccuucuccccacagag

SEQ ID NO: 356122 - RNA, 32 nt, Human
cagucaggccccagagagggcaggacaagccu

SEQ ID NO: 356123 - RNA, 32 nt, Human
cagucaggccugaggacaaggugagcucgcug

SEQ ID NO: 356124 - RNA, 32 nt, Human
cagucaggcgggcuugccauguucugugaauc

SEQ ID NO: 356125 - RNA, 21 nt, Human
cagucagggacacucagaaga

SEQ ID NO: 356126 - RNA, 17 nt, Human
cagucagggacuggaga

SEQ ID NO: 356127 - RNA, 20 nt, Human
cagucagggcauccuccgca

SEQ ID NO: 356128 - RNA, 23 nt, Human
cagucagggccaagagagcagug

SEQ ID NO: 356129 - RNA, 32 nt, Human
cagucagggccaggaggaacacgugaaggaga

SEQ ID NO: 356130 - RNA, 32 nt, Human
cagucagggccuaggaugggccugugucacca

SEQ ID NO: 356131 - RNA, 32 nt, Human
cagucaguauuacccugugaagccccuucccu

SEQ ID NO: 356132 - RNA, 32 nt, Human
cagucagucaguccccagcaauggcggacgga

SEQ ID NO: 356133 - RNA, 32 nt, Human
cagucagucucucccuggcucucccuccaucc

SEQ ID NO: 356134 - RNA, 32 nt, Human
cagucagugaugacucaucuuagaaguauuuu

SEQ ID NO: 356135 - RNA, 32 nt, Human
cagucagugcaagagaaaagaaagcacagaaa

SEQ ID NO: 356136 - RNA, 32 nt, Human
cagucagugcuggagaaaucuugaauagcuua

SEQ ID NO: 356137 - RNA, 32 nt, Human
cagucaguuguguuuggacaagugcaacaguc

SEQ ID NO: 356138 - RNA, 32 nt, Human
cagucauaaaguugacuuucagcacaaaagau

SEQ ID NO: 356139 - RNA, 32 nt, Human
cagucauauaaaugcuuacagacugaaaaaug

SEQ ID NO: 356140 - RNA, 32 nt, Human
cagucaucacauaagaacagcuaccuucucca

SEQ ID NO: 356141 - RNA, 32 nt, Human
cagucaucauggguguuuuugucaacugcuug

SEQ ID NO: 356142 - RNA, 32 nt, Human
cagucaucccaggcgcaggucucaaggcggcu

SEQ ID NO: 356143 - RNA, 32 nt, Human
cagucaucccuuaagacacacuggaaaucaca

SEQ ID NO: 356144 - RNA, 32 nt, Human
cagucaucucaaauggcaaaggcuggagagcu

SEQ ID NO: 356145 - RNA, 32 nt, Human
cagucaucucuagcccccaaaucaucucuuca

SEQ ID NO: 356146 - RNA, 32 nt, Human
cagucaucugacccagcuccacccucggcacc

SEQ ID NO: 356147 - RNA, 18 nt, Human
cagucaucuucugcucca

SEQ ID NO: 356148 - RNA, 32 nt, Human
cagucaugacuuagugucauugccugccuauu

SEQ ID NO: 356149 - RNA, 32 nt, Human
cagucaugagccaccaugcccagccuaccaua

SEQ ID NO: 356150 - RNA, 32 nt, Human
cagucaugagccaccaugcccagccuauuuau

SEQ ID NO: 356151 - RNA, 32 nt, Human
cagucaugagccaccgugcccagccuaauucc

SEQ ID NO: 356152 - RNA, 32 nt, Human
cagucaugaucgggugggggacaugugggcug

SEQ ID NO: 356153 - RNA, 32 nt, Human
cagucaugcagucugggaguggggaagugauc

SEQ ID NO: 356154 - RNA, 30 nt, Human
cagucauggcggagcuggaggcuguggccg

SEQ ID NO: 356155 - RNA, 32 nt, Human
cagucauuacaaaggccaccaucacaggaucg

SEQ ID NO: 356156 - RNA, 32 nt, Human
cagucauuacagaaaaagcaaauauucccuca

SEQ ID NO: 356157 - RNA, 31 nt, Human
cagucauucaauaaacacuguuugagcaccu

SEQ ID NO: 356158 - RNA, 19 nt, Human
cagucauucuggcaugaaa

SEQ ID NO: 356159 - RNA, 32 nt, Human
cagucauugcauuuuucccugccuauaccugu

SEQ ID NO: 356160 - RNA, 32 nt, Human
cagucauuuaguagaauagaaaagcaacauag

SEQ ID NO: 356161 - RNA, 32 nt, Human
cagucauuucugaaucuuuccacauuauauua

SEQ ID NO: 356162 - RNA, 31 nt, Human
cagucauuuggguuggagaugccuaaaaccc

SEQ ID NO: 356163 - RNA, 32 nt, Human
cagucauuuucuuuauuggugacuccucuccc

SEQ ID NO: 356164 - RNA, 32 nt, Human
cagucauuuuuguuucuaccucccagaucgga

SEQ ID NO: 356165 - RNA, 23 nt, Human
caguccaaaacaaguuacagcug

SEQ ID NO: 356166 - RNA, 32 nt, Human
caguccaaaccugcaccauccaucauuaugua

SEQ ID NO: 356167 - RNA, 32 nt, Human
caguccaaacuguucugagaaggugaacuguu

SEQ ID NO: 356168 - RNA, 32 nt, Human
caguccaaaugacuguauaggaggcccuuauu

SEQ ID NO: 356169 - RNA, 32 nt, Human
caguccaacauccuuuucuccaucagcaacua

SEQ ID NO: 356170 - RNA, 19 nt, Human
caguccaagccugcugcug

SEQ ID NO: 356171 - RNA, 32 nt, Human
caguccaagucuucucaagauccgagucuacc

SEQ ID NO: 356172 - RNA, 32 nt, Human
caguccacaaagugcugggauuacagguguga

SEQ ID NO: 356173 - RNA, 32 nt, Human
caguccacaacaaaggcacuggauucugaaug

SEQ ID NO: 356174 - RNA, 32 nt, Human
caguccacaggcauggaagcugugaggggaca

SEQ ID NO: 356175 - RNA, 32 nt, Human
caguccacccacccucucucugaucucccccu

SEQ ID NO: 356176 - RNA, 32 nt, Human
caguccacccccuccgccuccuggccuccacc

SEQ ID NO: 356177 - RNA, 32 nt, Human
caguccacuagaacauucugaaagugauacuc

SEQ ID NO: 356178 - RNA, 32 nt, Human
caguccacugcaaccucugcccucccggguuu

SEQ ID NO: 356179 - RNA, 32 nt, Human
caguccagaaggcaauuggccacuccuaaugu

SEQ ID NO: 356180 - RNA, 32 nt, Human
caguccagaguugggcaccacaccggccagca

SEQ ID NO: 356181 - RNA, 32 nt, Human
caguccagccaccagcuccacgcacagcgagg

SEQ ID NO: 356182 - RNA, 32 nt, Human
caguccagccuccgucuucugguccacucugc

SEQ ID NO: 356183 - RNA, 32 nt, Human
caguccagccuggaugacagagugagacucca

SEQ ID NO: 356184 - RNA, 19 nt, Human
caguccagccugggcaaca

SEQ ID NO: 356185 - RNA, 32 nt, Human
caguccagccugggcaacaagagcgaaacuca

SEQ ID NO: 356186 - RNA, 32 nt, Human
caguccagccugggcgacagagcgagacuccg

SEQ ID NO: 356187 - RNA, 32 nt, Human
caguccagccugggcgacagagcgagacucug

SEQ ID NO: 356188 - RNA, 32 nt, Human
caguccagccugggcgacagagugagacccca

SEQ ID NO: 356189 - RNA, 32 nt, Human
caguccagccugggcgacagagugagacuccu

SEQ ID NO: 356190 - RNA, 32 nt, Human
caguccagccugggcuacagagugagacugca

SEQ ID NO: 356191 - RNA, 32 nt, Human
caguccagccugggugacagagcaagaccugu

SEQ ID NO: 356192 - RNA, 32 nt, Human
caguccagccugggugacagagccagacacug

SEQ ID NO: 356193 - RNA, 32 nt, Human
caguccagcuauuguccccacacugcaaaauc

SEQ ID NO: 356194 - RNA, 21 nt, Human
caguccaggcuggaguucagu

SEQ ID NO: 356195 - RNA, 22 nt, Human
caguccaggcuggaguucagug

SEQ ID NO: 356196 - RNA, 32 nt, Human
caguccaggcugguccuuugagcgcagcucaa

SEQ ID NO: 356197 - RNA, 32 nt, Human
caguccaggggcuccaagaccaacaggagcau

SEQ ID NO: 356198 - RNA, 32 nt, Human
caguccagugaugugggaaguuaccuuuuaua

SEQ ID NO: 356199 - RNA, 32 nt, Human
caguccaucagggacuuccugcagagcgacga

SEQ ID NO: 356200 - RNA, 32 nt, Human
caguccaucucgagagaaagggagugguugaa

SEQ ID NO: 356201 - RNA, 32 nt, Human
caguccaugcagcuguucuugccaucaaugaa

SEQ ID NO: 356202 - RNA, 30 nt, Human
caguccauuuugaaucaagaaagacucauu

SEQ ID NO: 356203 - RNA, 32 nt, Human
cagucccaaacacgccagagugcaaugcccuc

SEQ ID NO: 356204 - RNA, 31 nt, Human
cagucccaaagagucaguauugggugguaac

SEQ ID NO: 356205 - RNA, 32 nt, Human
cagucccaaauccaguccucuggcccuugccu

SEQ ID NO: 356206 - RNA, 32 nt, Human
cagucccaacgucugccucacagcagauucuu

SEQ ID NO: 356207 - RNA, 32 nt, Human
cagucccaagcccuagcccuaggggguucucc

SEQ ID NO: 356208 - RNA, 32 nt, Human
cagucccacuuccuggauaauucucuacccuc

SEQ ID NO: 356209 - RNA, 21 nt, Human
cagucccagaggcaguggggg

SEQ ID NO: 356210 - RNA, 32 nt, Human
cagucccagcaacaugggaggcugaacaggag

SEQ ID NO: 356211 - RNA, 32 nt, Human
cagucccagcaagcaacauucaucgggcacag

SEQ ID NO: 356212 - RNA, 32 nt, Human
cagucccagcacagugggacaaaaagaauuua

SEQ ID NO: 356213 - RNA, 32 nt, Human
cagucccagcccuucuuugcagcugggccucu

SEQ ID NO: 356214 - RNA, 32 nt, Human
cagucccagcuaccugggaggcugagucagga

SEQ ID NO: 356215 - RNA, 32 nt, Human
cagucccagcuacucaggaggcugaggcagga

SEQ ID NO: 356216 - RNA, 32 nt, Human
cagucccagcuacucgggaggcugaggcagga

SEQ ID NO: 356217 - RNA, 32 nt, Human
cagucccagcuacuugggaggcugaggcagga

SEQ ID NO: 356218 - RNA, 32 nt, Human
cagucccagcuauucaggaggcugaggcaaca

SEQ ID NO: 356219 - RNA, 32 nt, Human
cagucccaggagcuggaagcgaaccacagugu

SEQ ID NO: 356220 - RNA, 32 nt, Human
cagucccaggauuaggguuuucuguuccccuu

SEQ ID NO: 356221 - RNA, 19 nt, Human
cagucccagggcacugggg

SEQ ID NO: 356222 - RNA, 20 nt, Human
cagucccagggcacugggga

SEQ ID NO: 356223 - RNA, 32 nt, Human
cagucccaggggacaggagagaaaucuguaaa

SEQ ID NO: 356224 - RNA, 16 nt, Human
cagucccagugagaug

SEQ ID NO: 356225 - RNA, 32 nt, Human
cagucccaguuaccugggaggcugaggcagga

SEQ ID NO: 356226 - RNA, 32 nt, Human
cagucccaguuacuugggaggcugaggcagga

SEQ ID NO: 356227 - RNA, 32 nt, Human
caguccccacucccagugguuuuccucacuca

SEQ ID NO: 356228 - RNA, 32 nt, Human
caguccccacugcacccccuccagaggcgacu

SEQ ID NO: 356229 - RNA, 32 nt, Human
caguccccagcaagugcccagcagguaccugu

SEQ ID NO: 356230 - RNA, 32 nt, Human
caguccccagcaauggcggacggaggugagcg

SEQ ID NO: 356231 - RNA, 32 nt, Human
caguccccagcaccugccuuucucacuacuuc

SEQ ID NO: 356232 - RNA, 32 nt, Human
caguccccagcccucuggguuggccugcuguc

SEQ ID NO: 356233 - RNA, 32 nt, Human
caguccccaggacagggucaccaccuuucucu

SEQ ID NO: 356234 - RNA, 32 nt, Human
caguccccagggccuuuggagggaaggguugg

SEQ ID NO: 356235 - RNA, 32 nt, Human
cagucccccaaagucuuaacucuuuucagcau

SEQ ID NO: 356236 - RNA, 32 nt, Human
cagucccccaugggaacccugccaggucccuc

SEQ ID NO: 356237 - RNA, 32 nt, Human
cagucccccucacaaaccaccccacagaucca

SEQ ID NO: 356238 - RNA, 32 nt, Human
cagucccccuccacauguauccacaucugagc

SEQ ID NO: 356239 - RNA, 32 nt, Human
cagucccccugccccagggcucccggcuaugg

SEQ ID NO: 356240 - RNA, 32 nt, Human
cagucccccugcgacucccuguuuccugggcu

SEQ ID NO: 356241 - RNA, 32 nt, Human
caguccccuccugugcuggcagcuuugcccac

SEQ ID NO: 356242 - RNA, 32 nt, Human
caguccccugcaccccuuccugggacacuaug

SEQ ID NO: 356243 - RNA, 32 nt, Human
caguccccugcagcgucccgucuggcuguuga

SEQ ID NO: 356244 - RNA, 32 nt, Human
caguccccugcagguggcagcccucuuuucug

SEQ ID NO: 356245 - RNA, 32 nt, Human
caguccccuugaacuucugcccucuguucagg

SEQ ID NO: 356246 - RNA, 32 nt, Human
cagucccgcccugucaaggaaauuuaaaagaa

SEQ ID NO: 356247 - RNA, 32 nt, Human
cagucccuaagaggaaugccugcuggcuauug

SEQ ID NO: 356248 - RNA, 32 nt, Human
cagucccuauuaugcaaaaugugaauuuaauu

SEQ ID NO: 356249 - RNA, 20 nt, Human
cagucccucagcuucaccca

SEQ ID NO: 356250 - RNA, 32 nt, Human
cagucccuccacugugaacaagcuuuugcagc

SEQ ID NO: 356251 - RNA, 32 nt, Human
cagucccucccaggaaccuguuggagaggcag

SEQ ID NO: 356252 - RNA, 32 nt, Human
cagucccucccauggaugacucaggccuccca

SEQ ID NO: 356253 - RNA, 32 nt, Human
cagucccuccccagcccagcagucccuccagg

SEQ ID NO: 356254 - RNA, 21 nt, Human
cagucccucccucaagacuaa

SEQ ID NO: 356255 - RNA, 32 nt, Human
cagucccucuucuccccaggaccccagggcca

SEQ ID NO: 356256 - RNA, 32 nt, Human
cagucccugcagcuccacaaacugacccaucc

SEQ ID NO: 356257 - RNA, 32 nt, Human
cagucccugcaggucccucacccuccgggcug

SEQ ID NO: 356258 - RNA, 32 nt, Human
cagucccugccuggccgaccacuguggccugc

SEQ ID NO: 356259 - RNA, 32 nt, Human
cagucccugccugucugccagccugcagcucu

SEQ ID NO: 356260 - RNA, 32 nt, Human
cagucccugcugggcugccucagucuucagug

SEQ ID NO: 356261 - RNA, 27 nt, Human
cagucccuggccguccuccagcaccuu

SEQ ID NO: 356262 - RNA, 32 nt, Human
cagucccugggucgggcggauccucccagagg

SEQ ID NO: 356263 - RNA, 21 nt, Human
cagucccuuucugucccagcu

SEQ ID NO: 356264 - RNA, 32 nt, Human
caguccgcugcucgcccgcccugggugcgaga

SEQ ID NO: 356265 - RNA, 32 nt, Human
caguccggaguuuuggcuccucuccuuuccuc

SEQ ID NO: 356266 - RNA, 32 nt, Human
caguccggccugggcgacagagcgagacuccg

SEQ ID NO: 356267 - RNA, 32 nt, Human
caguccggccugggugaaagagcgagacuccg

SEQ ID NO: 356268 - RNA, 32 nt, Human
caguccggucaacguggugaaaccccaucucu

SEQ ID NO: 356269 - RNA, 32 nt, Human
caguccguccaugcucuguggcauuuugcuag

SEQ ID NO: 356270 - RNA, 32 nt, Human
caguccuaacagggugagaaagcacaagaggg

SEQ ID NO: 356271 - RNA, 32 nt, Human
caguccuaacccuacccagccugcugccucag

SEQ ID NO: 356272 - RNA, 32 nt, Human
caguccuacauuucugaauugacuucuagcac

SEQ ID NO: 356273 - RNA, 32 nt, Human
caguccuagggcucggacuccccagccuuucc

SEQ ID NO: 356274 - RNA, 32 nt, Human
caguccucaaagcuuuuugaaaaccaacacca

SEQ ID NO: 356275 - RNA, 32 nt, Human
caguccucaaauaaauaaugucuugauuuuau

SEQ ID NO: 356276 - RNA, 19 nt, Human
caguccucaccacagucca

SEQ ID NO: 356277 - RNA, 32 nt, Human
caguccucacgugggacccucccaccauggca

SEQ ID NO: 356278 - RNA, 32 nt, Human
caguccucagccaccuucuccacggcagcgac

SEQ ID NO: 356279 - RNA, 32 nt, Human
caguccucaggcccuucucuggcugcagagcc

SEQ ID NO: 356280 - RNA, 32 nt, Human
caguccucaggguuugugccucucgcucggac

SEQ ID NO: 356281 - RNA, 32 nt, Human
caguccucauuugccuucccuaccucuuccuc

SEQ ID NO: 356282 - RNA, 32 nt, Human
caguccuccacacccaaacuguuucugauugg

SEQ ID NO: 356283 - RNA, 32 nt, Human
caguccuccaguguuuuagacgcccagcugca

SEQ ID NO: 356284 - RNA, 32 nt, Human
caguccucccaccucagccuccuggguagcug

SEQ ID NO: 356285 - RNA, 32 nt, Human
caguccucccugucccaugccugcuggcucug

SEQ ID NO: 356286 - RNA, 32 nt, Human
caguccuccgaggacaucugggcugcgugcug

SEQ ID NO: 356287 - RNA, 32 nt, Human
caguccuccugccucagccuccuaaagugccg

SEQ ID NO: 356288 - RNA, 32 nt, Human
caguccucuccugcugucacagcugccaucca

SEQ ID NO: 356289 - RNA, 32 nt, Human
caguccucucugccuccuccuggcugaagcug

SEQ ID NO: 356290 - RNA, 32 nt, Human
caguccucuugaggcacucaagccugagagga

SEQ ID NO: 356291 - RNA, 32 nt, Human
caguccucuugcagccugguguucuuacauuu

SEQ ID NO: 356292 - RNA, 32 nt, Human
caguccucuuugcguggaaucagaccucuuuu

SEQ ID NO: 356293 - RNA, 32 nt, Human
caguccugaguaggaguccaggacucccacug

SEQ ID NO: 356294 - RNA, 32 nt, Human
caguccugauuucuagauuucaccuccccucc

SEQ ID NO: 356295 - RNA, 32 nt, Human
caguccugcccucccuccuuccuugguucacc

SEQ ID NO: 356296 - RNA, 32 nt, Human
caguccugcuauuuuccuccucuuguuacaag

SEQ ID NO: 356297 - RNA, 32 nt, Human
caguccugcugagccaaaggcuuugucauucc

SEQ ID NO: 356298 - RNA, 32 nt, Human
caguccugcuucuuccagagaaauaaaguuag

SEQ ID NO: 356299 - RNA, 32 nt, Human
caguccuggcugcuuuggcuccaccuucuucc

SEQ ID NO: 356300 - RNA, 32 nt, Human
caguccugggagacccauguaaauaccagacu

SEQ ID NO: 356301 - RNA, 32 nt, Human
caguccugggcccugggccuuggcugcuguca

SEQ ID NO: 356302 - RNA, 21 nt, Human
caguccugggcucgcggcugg

SEQ ID NO: 356303 - RNA, 32 nt, Human
caguccugucucaaacuccagaccucggguga

SEQ ID NO: 356304 - RNA, 32 nt, Human
caguccugucuggguuagggucuuccacauuu

SEQ ID NO: 356305 - RNA, 19 nt, Human
caguccuguggucuccgca

SEQ ID NO: 356306 - RNA, 32 nt, Human
caguccuguguaggagaggaaagggaaucaaa

SEQ ID NO: 356307 - RNA, 22 nt, Human
caguccuuaaugucaccaugcu

SEQ ID NO: 356308 - RNA, 32 nt, Human
caguccuuauuaucccagcuugcugaggggca

SEQ ID NO: 356309 - RNA, 31 nt, Human
caguccuucaauaaaaagcugcuuauugaaa

SEQ ID NO: 356310 - RNA, 32 nt, Human
caguccuucccaaggucuccuaucauaaauag

SEQ ID NO: 356311 - RNA, 32 nt, Human
caguccuuccucguugaguggccagugcccug

SEQ ID NO: 356312 - RNA, 32 nt, Human
caguccuuccuuuugacccaccccaggaagau

SEQ ID NO: 356313 - RNA, 32 nt, Human
caguccuugaaggugaaguuguguguuacuag

SEQ ID NO: 356314 - RNA, 32 nt, Human
caguccuugcaguauuaaaaacuggcaacaau

SEQ ID NO: 356315 - RNA, 32 nt, Human
caguccuuguaucugcucaccuauuccaaacu

SEQ ID NO: 356316 - RNA, 32 nt, Human
caguccuugugcagcaccaggaagaaaccgac

SEQ ID NO: 356317 - RNA, 32 nt, Human
caguccuuucuuagggaaaugacagggcaaag

SEQ ID NO: 356318 - RNA, 32 nt, Human
cagucgacuucaugagcuucauuuggauuucu

SEQ ID NO: 356319 - RNA, 32 nt, Human
cagucgagacgggguuuccccauguuggucag

SEQ ID NO: 356320 - RNA, 32 nt, Human
cagucgagccugggcgacacaaagagaccacc

SEQ ID NO: 356321 - RNA, 32 nt, Human
cagucgaggauuccucaaguaccauuugcuag

SEQ ID NO: 356322 - RNA, 32 nt, Human
cagucgaggcccugcuccgggagcucaucuug

SEQ ID NO: 356323 - RNA, 32 nt, Human
cagucgaguccauauguccacccauugauuuu

SEQ ID NO: 356324 - RNA, 19 nt, Human
cagucgcaaccuggcccgg

SEQ ID NO: 356325 - RNA, 32 nt, Human
cagucgcaccagccuccaggagcacugggcca

SEQ ID NO: 356326 - RNA, 32 nt, Human
cagucgcccaggcuggagugcagcagcacagu

SEQ ID NO: 356327 - RNA, 32 nt, Human
cagucgcccaggcuggagugcaguggcaugau

SEQ ID NO: 356328 - RNA, 32 nt, Human
cagucgcccugcagccucacacagauccugca

SEQ ID NO: 356329 - RNA, 32 nt, Human
cagucgccucaguacuuuuucuuucuggauuu

SEQ ID NO: 356330 - RNA, 32 nt, Human
cagucgccugggaagcuccaguuuccccaugg

SEQ ID NO: 356331 - RNA, 32 nt, Human
cagucgcguuggcugcugcgaucggccggcgg

SEQ ID NO: 356332 - RNA, 24 nt, Human
cagucgcucacaccuguaaucuca

SEQ ID NO: 356333 - RNA, 32 nt, Human
cagucgcucaggcuggagugcaaugguggggu

SEQ ID NO: 356334 - RNA, 32 nt, Human
cagucgcucaggcuggagugcaguggcgcgau

SEQ ID NO: 356335 - RNA, 32 nt, Human
cagucgcuccagccggggcugcagguggcccg

SEQ ID NO: 356336 - RNA, 32 nt, Human
cagucgcuccaggcccccucacccucaaagug

SEQ ID NO: 356337 - RNA, 32 nt, Human
cagucggaccccuuccucacacuggccccuau

SEQ ID NO: 356338 - RNA, 32 nt, Human
cagucggcaggcagcauggggaagggagggaa

SEQ ID NO: 356339 - RNA, 18 nt, Human
cagucggcauugccugaa

SEQ ID NO: 356340 - RNA, 32 nt, Human
cagucggccugggaaguucacugccccaacuc

SEQ ID NO: 356341 - RNA, 32 nt, Human
cagucgggagaagggagggagagaauuuuauu

SEQ ID NO: 356342 - RNA, 32 nt, Human
cagucgggaggcgaaggcaggagauggcuuga

SEQ ID NO: 356343 - RNA, 32 nt, Human
cagucgggagggagggagcgagcaggcgaagc

SEQ ID NO: 356344 - RNA, 32 nt, Human
cagucgggcgagucgacgcgugaacagauaga

SEQ ID NO: 356345 - RNA, 32 nt, Human
cagucgggcuccaggcuccuccugggucugag

SEQ ID NO: 356346 - RNA, 32 nt, Human
cagucggggcaggccaggggaggggugaagug

SEQ ID NO: 356347 - RNA, 32 nt, Human
cagucggggguauuuaaaaaggacugaacaga

SEQ ID NO: 356348 - RNA, 32 nt, Human
cagucgguagagagcaucaacauauauugugg

SEQ ID NO: 356349 - RNA, 32 nt, Human
cagucgguccacccuugacugcucuuggcuug

SEQ ID NO: 356350 - RNA, 21 nt, Human
cagucggucuuccuccggccc

SEQ ID NO: 356351 - RNA, 23 nt, Human
cagucgucaagccuguaauccca

SEQ ID NO: 356352 - RNA, 23 nt, Human
cagucgucacgccuguaauccca

SEQ ID NO: 356353 - RNA, 23 nt, Human
cagucguccagcaugcucugccc

SEQ ID NO: 356354 - RNA, 32 nt, Human
cagucgucucccuauuacugucaggagugggg

SEQ ID NO: 356355 - RNA, 32 nt, Human
cagucgugagccacuguaccccgccuaaaacu

SEQ ID NO: 356356 - RNA, 32 nt, Human
cagucguggcccggggaucauuccaagucuau

SEQ ID NO: 356357 - RNA, 20 nt, Human
cagucguguccauccuccau

SEQ ID NO: 356358 - RNA, 32 nt, Human
cagucgugugcuggagugagugcugcagaacc

SEQ ID NO: 356359 - RNA, 32 nt, Human
cagucuaacagcuuaccaguugagaacgauau

SEQ ID NO: 356360 - RNA, 32 nt, Human
cagucuaaggaagaagggcaagcccugggacc

SEQ ID NO: 356361 - RNA, 32 nt, Human
cagucuaagugggaaugggaaagaccaccuug

SEQ ID NO: 356362 - RNA, 32 nt, Human
cagucuaauuugaggcugggugcaguggcuca

SEQ ID NO: 356363 - RNA, 32 nt, Human
cagucuaccuccuauucgucugaucuugcuua

SEQ ID NO: 356364 - RNA, 32 nt, Human
cagucuaccugcacucggagccccggcccaau

SEQ ID NO: 356365 - RNA, 22 nt, Human
cagucuaccugcucuguccucu

SEQ ID NO: 356366 - RNA, 32 nt, Human
cagucuagaaacucuucagucacucauaaaau

SEQ ID NO: 356367 - RNA, 32 nt, Human
cagucuagaauccauaaugcucccuacaucuc

SEQ ID NO: 356368 - RNA, 32 nt, Human
cagucuagccugggcaacagagcgagacucug

SEQ ID NO: 356369 - RNA, 32 nt, Human
cagucuagcucugacuuaggucaggggccugu

SEQ ID NO: 356370 - RNA, 32 nt, Human
cagucuaggaggaggaggagguagggugugaa

SEQ ID NO: 356371 - RNA, 32 nt, Human
cagucuaggcugacacauccuacccgaggaca

SEQ ID NO: 356372 - RNA, 32 nt, Human
cagucucaaaauuuccuacaccugccaguucu

SEQ ID NO: 356373 - RNA, 32 nt, Human
cagucucacagaggaagggcagguguccuacg

SEQ ID NO: 356374 - RNA, 32 nt, Human
cagucucaccaacauggagaaaccccgucucc

SEQ ID NO: 356375 - RNA, 32 nt, Human
cagucucaccuucuccccacccuaccucaccu

SEQ ID NO: 356376 - RNA, 23 nt, Human
cagucucacucugucaccaggcu

SEQ ID NO: 356377 - RNA, 32 nt, Human
cagucucacugcacaccacugccucaugcuuc

SEQ ID NO: 356378 - RNA, 32 nt, Human
cagucucacugcagucuuauuuccaaguaaga

SEQ ID NO: 356379 - RNA, 19 nt, Human
cagucucagacugcagcug

SEQ ID NO: 356380 - RNA, 32 nt, Human
cagucucagcaugguuuggagcugaagcuuug

SEQ ID NO: 356381 - RNA, 32 nt, Human
cagucucagcuacucgggaggcugaggcagga

SEQ ID NO: 356382 - RNA, 32 nt, Human
cagucucauauguaucccagcacauguaauuu

SEQ ID NO: 356383 - RNA, 32 nt, Human
cagucucauccagcagguuggguucuagggcu

SEQ ID NO: 356384 - RNA, 20 nt, Human
cagucucauccaucucuaua

SEQ ID NO: 356385 - RNA, 32 nt, Human
cagucucaucuaugucauauuuugccacugcc

SEQ ID NO: 356386 - RNA, 32 nt, Human
cagucuccacaccucuaaucaugugcuccucu

SEQ ID NO: 356387 - RNA, 32 nt, Human
cagucuccaccaggaaccucuucagaaagugu

SEQ ID NO: 356388 - RNA, 20 nt, Human
cagucuccaggaccuccaca

SEQ ID NO: 356389 - RNA, 32 nt, Human
cagucuccaggcgagagagggggccagagugc

SEQ ID NO: 356390 - RNA, 32 nt, Human
cagucuccaguucuccaguguucacaggugag

SEQ ID NO: 356391 - RNA, 32 nt, Human
cagucucccaccccggccccaggcuggaagcc

SEQ ID NO: 356392 - RNA, 32 nt, Human
cagucucccccugcagccuccuguacccgccu

SEQ ID NO: 356393 - RNA, 25 nt, Human
cagucucccgacuucucgucaggcu

SEQ ID NO: 356394 - RNA, 32 nt, Human
cagucuccuaguuuuauuauucucaccuuccg

SEQ ID NO: 356395 - RNA, 32 nt, Human
cagucuccuccaccacucucuaaccugagagc

SEQ ID NO: 356396 - RNA, 32 nt, Human
cagucuccuccccuuaagucauuuccaccauc

SEQ ID NO: 356397 - RNA, 32 nt, Human
cagucuccucggagggagucugaagaugcuua

SEQ ID NO: 356398 - RNA, 22 nt, Human
cagucuccucuguugccaggcu

SEQ ID NO: 356399 - RNA, 32 nt, Human
cagucuccugaaagcugggaugacaggcacau

SEQ ID NO: 356400 - RNA, 32 nt, Human
cagucuccugcagguuucugugccccuguggu

SEQ ID NO: 356401 - RNA, 32 nt, Human
cagucuccugccgccccucccccaggcauggc

SEQ ID NO: 356402 - RNA, 32 nt, Human
cagucuccuggcuuccagcccaggacucugca

SEQ ID NO: 356403 - RNA, 32 nt, Human
cagucuccugguagcugggauuacaggcaugc

SEQ ID NO: 356404 - RNA, 32 nt, Human
cagucucgccccucaggugcugaucccagugg

SEQ ID NO: 356405 - RNA, 32 nt, Human
cagucucgcuuggcucucaugacugugguggu

SEQ ID NO: 356406 - RNA, 30 nt, Human
cagucucgggaucucagggcacaauggcug

SEQ ID NO: 356407 - RNA, 20 nt, Human
cagucucguuccuuuucaca

SEQ ID NO: 356408 - RNA, 32 nt, Human
cagucucuaauucccuucccuucucguuaaga

SEQ ID NO: 356409 - RNA, 32 nt, Human
cagucucucucccagguauuccucucacuagg

SEQ ID NO: 356410 - RNA, 32 nt, Human
cagucucucugccucugccugccuccuggucc

SEQ ID NO: 356411 - RNA, 32 nt, Human
cagucucugcagaguuaccaggaaucuuuccu

SEQ ID NO: 356412 - RNA, 20 nt, Human
cagucucugccaucuuccau

SEQ ID NO: 356413 - RNA, 32 nt, Human
cagucucugcuucuaaaaacuucuaugucuag

SEQ ID NO: 356414 - RNA, 32 nt, Human
cagucucuggaagggcugguucaaggcuguuu

SEQ ID NO: 356415 - RNA, 32 nt, Human
cagucucuuacccaggcuagggugcaguggug

SEQ ID NO: 356416 - RNA, 32 nt, Human
cagucucuucuccuuccccugccugcaacagg

SEQ ID NO: 356417 - RNA, 32 nt, Human
cagucucuucucucccacacccugcccuccuu

SEQ ID NO: 356418 - RNA, 32 nt, Human
cagucucuuguccuggacccuguagggugcca

SEQ ID NO: 356419 - RNA, 17 nt, Human
cagucucuuucucuaua

SEQ ID NO: 356420 - RNA, 32 nt, Human
cagucucuuuggucaguaacaagugcaaugga

SEQ ID NO: 356421 - RNA, 21 nt, Human
cagucugaaaacucuuccaca

SEQ ID NO: 356422 - RNA, 32 nt, Human
cagucugaaaucuacaagaacagagaauucuu

SEQ ID NO: 356423 - RNA, 32 nt, Human
cagucugaacaguggcagcagagagcagucag

SEQ ID NO: 356424 - RNA, 32 nt, Human
cagucugaauccaggucgugggggcugucaua

SEQ ID NO: 356425 - RNA, 32 nt, Human
cagucugaccaacacggagaaaccccaucucu

SEQ ID NO: 356426 - RNA, 32 nt, Human
cagucugaccaacauggagaaaccccaucucu

SEQ ID NO: 356427 - RNA, 32 nt, Human
cagucugaccaacauggagaaacccugucucu

SEQ ID NO: 356428 - RNA, 32 nt, Human
cagucugaccaacguggagaaaccccgucuuu

SEQ ID NO: 356429 - RNA, 32 nt, Human
cagucugacuuccccgcauuccaggcuccucc

SEQ ID NO: 356430 - RNA, 21 nt, Human
cagucugagcaacagaacgag

SEQ ID NO: 356431 - RNA, 32 nt, Human
cagucugagcaacauggugagagcucaucucu

SEQ ID NO: 356432 - RNA, 20 nt, Human
cagucugagcagacacaggc

SEQ ID NO: 356433 - RNA, 32 nt, Human
cagucugagcaggccaggggcugacagcuaau

SEQ ID NO: 356434 - RNA, 32 nt, Human
cagucugagcuucuaccgagucuucccccacc

SEQ ID NO: 356435 - RNA, 32 nt, Human
cagucugcaagccugcucacccacugcuucug

SEQ ID NO: 356436 - RNA, 32 nt, Human
cagucugcaauaaaagcacuuccuaacucugg

SEQ ID NO: 356437 - RNA, 32 nt, Human
cagucugcacccaagagguggaagaggacggg

SEQ ID NO: 356438 - RNA, 32 nt, Human
cagucugcagcuuccugaguccuguucugaaa

SEQ ID NO: 356439 - RNA, 23 nt, Human
cagucugcccuugucacuggucu

SEQ ID NO: 356440 - RNA, 21 nt, Human
cagucugccuggaggccaggg

SEQ ID NO: 356441 - RNA, 32 nt, Human
cagucugcgauuggaaauuuccagccacuuua

SEQ ID NO: 356442 - RNA, 24 nt, Human
cagucugcggugacgaggacucca

SEQ ID NO: 356443 - RNA, 21 nt, Human
cagucugcguuucaucgggcu

SEQ ID NO: 356444 - RNA, 32 nt, Human
cagucugcucaaggucacgcagcuggugacug

SEQ ID NO: 356445 - RNA, 32 nt, Human
cagucugcucaagugucaccuuauuugcaagg

SEQ ID NO: 356446 - RNA, 20 nt, Human
cagucugcugcaucuucuac

SEQ ID NO: 356447 - RNA, 32 nt, Human
cagucugcugggacaugcacauaucagggguu

SEQ ID NO: 356448 - RNA, 32 nt, Human
cagucuggacaacauggggagaccccaucucu

SEQ ID NO: 356449 - RNA, 22 nt, Human
cagucuggaccacagagugaga

SEQ ID NO: 356450 - RNA, 22 nt, Human
cagucuggacgacagagugaga

SEQ ID NO: 356451 - RNA, 32 nt, Human
cagucuggacuuauacagggaggccagaaggg

SEQ ID NO: 356452 - RNA, 32 nt, Human
cagucuggagccagacggggaagggagcaaau

SEQ ID NO: 356453 - RNA, 32 nt, Human
cagucuggagguccccaaggacaucggcaugu

SEQ ID NO: 356454 - RNA, 18 nt, Human
cagucuggauccuuccau

SEQ ID NO: 356455 - RNA, 22 nt, Human
cagucuggaugacagagagaga

SEQ ID NO: 356456 - RNA, 19 nt, Human
cagucuggaugcaguggug

SEQ ID NO: 356457 - RNA, 20 nt, Human
cagucuggcaacagagcaag

SEQ ID NO: 356458 - RNA, 32 nt, Human
cagucuggcagcccggagccuuccgcgguccc

SEQ ID NO: 356459 - RNA, 32 nt, Human
cagucuggccaacaugacgaaaccccgucucu

SEQ ID NO: 356460 - RNA, 32 nt, Human
cagucuggccaacauggcgaaaccccgucucu

SEQ ID NO: 356461 - RNA, 32 nt, Human
cagucuggccaacauggcgaaaccucaucucu

SEQ ID NO: 356462 - RNA, 32 nt, Human
cagucuggccaacauggcgaaaccucauuucu

SEQ ID NO: 356463 - RNA, 32 nt, Human
cagucuggccaacauggggaaaccccgucucu

SEQ ID NO: 356464 - RNA, 32 nt, Human
cagucuggccaacauggugaaaccccaucucu

SEQ ID NO: 356465 - RNA, 32 nt, Human
cagucuggccaacauggugaaaugccgucucu

SEQ ID NO: 356466 - RNA, 32 nt, Human
cagucuggccaaccuggugaaaccccaucucu

SEQ ID NO: 356467 - RNA, 32 nt, Human
cagucuggccaauauggagaaaccuugucucu

SEQ ID NO: 356468 - RNA, 32 nt, Human
cagucuggccaauauggugaaaccccgucucu

SEQ ID NO: 356469 - RNA, 32 nt, Human
cagucuggccaaugugaugaaaccccgucucu

SEQ ID NO: 356470 - RNA, 32 nt, Human
cagucuggccacugucaaggcagggaaggggc

SEQ ID NO: 356471 - RNA, 32 nt, Human
cagucuggccagcuccagggacagaguggccc

SEQ ID NO: 356472 - RNA, 32 nt, Human
cagucuggccugggcgacagagcgagacuccg

SEQ ID NO: 356473 - RNA, 32 nt, Human
cagucuggccugggcgacagagcgagacucug

SEQ ID NO: 356474 - RNA, 32 nt, Human
cagucuggcgggaguccaggaggcagcagcuc

SEQ ID NO: 356475 - RNA, 22 nt, Human
cagucugggacaacagagcaag

SEQ ID NO: 356476 - RNA, 32 nt, Human
cagucugggacaggcacagugggagcugccac

SEQ ID NO: 356477 - RNA, 32 nt, Human
cagucugggauccugaguguccuguggguuca

SEQ ID NO: 356478 - RNA, 32 nt, Human
cagucugggcaacaaaaaugaaacuccgucuc

SEQ ID NO: 356479 - RNA, 32 nt, Human
cagucugggcaacacgaugaaaccccaucucu

SEQ ID NO: 356480 - RNA, 21 nt, Human
cagucugggcaacagagcaag

SEQ ID NO: 356481 - RNA, 21 nt, Human
cagucugggcaacagagcgag

SEQ ID NO: 356482 - RNA, 22 nt, Human
cagucugggcaacagagcgaga

SEQ ID NO: 356483 - RNA, 22 nt, Human
cagucugggcaacagagugaga

SEQ ID NO: 356484 - RNA, 21 nt, Human
cagucugggcaacagugcaag

SEQ ID NO: 356485 - RNA, 32 nt, Human
cagucugggcaacauggugaaaccccaucucu

SEQ ID NO: 356486 - RNA, 32 nt, Human
cagucugggcaacauggugagaccccaucucu

SEQ ID NO: 356487 - RNA, 32 nt, Human
cagucugggcaaccccagcaaugaaaaggggu

SEQ ID NO: 356488 - RNA, 21 nt, Human
cagucugggcgacagagcaag

SEQ ID NO: 356489 - RNA, 22 nt, Human
cagucugggcgacagagcaaga

SEQ ID NO: 356490 - RNA, 22 nt, Human
cagucugggcgacagagcgaga

SEQ ID NO: 356491 - RNA, 22 nt, Human
cagucugggcgacagagugaga

SEQ ID NO: 356492 - RNA, 32 nt, Human
cagucugggcugggagcccacaccccacucac

SEQ ID NO: 356493 - RNA, 32 nt, Human
cagucuggggagagcauggggaucauuucuau

SEQ ID NO: 356494 - RNA, 22 nt, Human
cagucuggguaacagagcgaga

SEQ ID NO: 356495 - RNA, 22 nt, Human
cagucugggugaaagagcgaga

SEQ ID NO: 356496 - RNA, 22 nt, Human
cagucugggugacagagagaga

SEQ ID NO: 356497 - RNA, 22 nt, Human
cagucugggugacagagugaga

SEQ ID NO: 356498 - RNA, 22 nt, Human
cagucugggugacagcgugaga

SEQ ID NO: 356499 - RNA, 32 nt, Human
cagucuggguggauggaaguggcuguccccuu

SEQ ID NO: 356500 - RNA, 22 nt, Human
cagucugggugucagaaugaga

SEQ ID NO: 356501 - RNA, 32 nt, Human
cagucuggucucaaacucccaaccucagguga

SEQ ID NO: 356502 - RNA, 32 nt, Human
cagucuggucucaaacucccgaccucagguga

SEQ ID NO: 356503 - RNA, 32 nt, Human
cagucuggucucaaacuccugaccucaaggau

SEQ ID NO: 356504 - RNA, 32 nt, Human
cagucugguguguguggugggcacacauagaa

SEQ ID NO: 356505 - RNA, 22 nt, Human
cagucugguugacagagugaga

SEQ ID NO: 356506 - RNA, 19 nt, Human
cagucugguuuuggucugg

SEQ ID NO: 356507 - RNA, 32 nt, Human
cagucuguaaaacccgagccugggagaggggc

SEQ ID NO: 356508 - RNA, 32 nt, Human
cagucuguaacuuuccacucuuccuguagucc

SEQ ID NO: 356509 - RNA, 32 nt, Human
cagucugucaccaggcuggagugcaguggcau

SEQ ID NO: 356510 - RNA, 32 nt, Human
cagucugucacccaggcuggagugcaguggcg

SEQ ID NO: 356511 - RNA, 32 nt, Human
cagucugucacccagguuggagugcaguggcg

SEQ ID NO: 356512 - RNA, 32 nt, Human
cagucugucauugucagggaccagggcaaaac

SEQ ID NO: 356513 - RNA, 32 nt, Human
cagucuguccugcuguugguaccuggccuagc

SEQ ID NO: 356514 - RNA, 32 nt, Human
cagucugucuccgggccagggucagggacccu

SEQ ID NO: 356515 - RNA, 32 nt, Human
cagucugucuccucgcugccucccgaggccug

SEQ ID NO: 356516 - RNA, 32 nt, Human
cagucugugaaacccuuagagaugggcugaaa

SEQ ID NO: 356517 - RNA, 25 nt, Human
cagucugugcuccugggcuacaagg

SEQ ID NO: 356518 - RNA, 29 nt, Human
cagucugugcugugugucugggccugucu

SEQ ID NO: 356519 - RNA, 32 nt, Human
cagucuguguuucagcccuggaauugccacau

SEQ ID NO: 356520 - RNA, 22 nt, Human
cagucuguguuugaccuucaca

SEQ ID NO: 356521 - RNA, 32 nt, Human
cagucuguguuuucucuaaaauaaucugaguu

SEQ ID NO: 356522 - RNA, 32 nt, Human
cagucuguuacagguugacacauugcuugacc

SEQ ID NO: 356523 - RNA, 32 nt, Human
cagucuguucacuccauuuucauuugaccagu

SEQ ID NO: 356524 - RNA, 32 nt, Human
cagucuguugcccaggcuggagugcaguggcg

SEQ ID NO: 356525 - RNA, 32 nt, Human
cagucuguuggcagacuggagugcaaucaugg

SEQ ID NO: 356526 - RNA, 32 nt, Human
cagucuguuucccaggcuggaguguagugaua

SEQ ID NO: 356527 - RNA, 32 nt, Human
cagucuuaaagaagaagaaaaugguaccgccg

SEQ ID NO: 356528 - RNA, 32 nt, Human
cagucuuacagaggcuggagcggugagaauga

SEQ ID NO: 356529 - RNA, 32 nt, Human
cagucuucaaagaaaacaaggugaagaccuau

SEQ ID NO: 356530 - RNA, 32 nt, Human
cagucuucagcccccuggaaggaggccauagu

SEQ ID NO: 356531 - RNA, 32 nt, Human
cagucuucauuuuacauacacacacauauuuu

SEQ ID NO: 356532 - RNA, 32 nt, Human
cagucuucauuuugcagaggugagguaagacu

SEQ ID NO: 356533 - RNA, 32 nt, Human
cagucuucccaggaaggugaccugccugacca

SEQ ID NO: 356534 - RNA, 32 nt, Human
cagucuuccuaccugagggguucagaggcugc

SEQ ID NO: 356535 - RNA, 32 nt, Human
cagucuuccugccucgggcucccaacaugcug

SEQ ID NO: 356536 - RNA, 32 nt, Human
cagucuucucaaggagcaauaaucuuggcuca

SEQ ID NO: 356537 - RNA, 32 nt, Human
cagucuucucauucuccuuuacucaggugggg

SEQ ID NO: 356538 - RNA, 32 nt, Human
cagucuucuccagguguccccucccacgagcg

SEQ ID NO: 356539 - RNA, 32 nt, Human
cagucuucuccuuuaugauauccuggcaugca

SEQ ID NO: 356540 - RNA, 32 nt, Human
cagucuugcaaauggagaaccugcucucuggg

SEQ ID NO: 356541 - RNA, 23 nt, Human
cagucuugcucugucaucaggcu

SEQ ID NO: 356542 - RNA, 32 nt, Human
cagucuugcuuauucuucuccugggcuucuug

SEQ ID NO: 356543 - RNA, 32 nt, Human
cagucuuggagcuccuagcuggugauacggag

SEQ ID NO: 356544 - RNA, 29 nt, Human
cagucuuggcugcugcuuaccccuagccu

SEQ ID NO: 356545 - RNA, 30 nt, Human
cagucuugggaucucagggcacaauggcug

SEQ ID NO: 356546 - RNA, 32 nt, Human
cagucuugggcaacugagaaauccuuauuuca

SEQ ID NO: 356547 - RNA, 32 nt, Human
cagucuugucauugccagcuguguugguagug

SEQ ID NO: 356548 - RNA, 32 nt, Human
cagucuugucucaaacuccugggcucaagcga

SEQ ID NO: 356549 - RNA, 32 nt, Human
cagucuuguuacuauccuauugcacauuagag

SEQ ID NO: 356550 - RNA, 32 nt, Human
cagucuuuacuuuuccagccaaauccaguagc

SEQ ID NO: 356551 - RNA, 32 nt, Human
cagucuuucaugguggaagugacacaucuggu

SEQ ID NO: 356552 - RNA, 32 nt, Human
cagucuuuggcagaggauacauugggcuguau

SEQ ID NO: 356553 - RNA, 32 nt, Human
cagucuuugugaaaugaaauaacaugcuucau

SEQ ID NO: 356554 - RNA, 32 nt, Human
cagucuuuguuaauguugaaucaggauuugag

SEQ ID NO: 356555 - RNA, 19 nt, Human
cagucuuuuauucuuuaua

SEQ ID NO: 356556 - RNA, 32 nt, Human
cagugaaaaugguucaucugcacugggguccu

SEQ ID NO: 356557 - RNA, 32 nt, Human
cagugaaagagaagcacacaggcuccaugagc

SEQ ID NO: 356558 - RNA, 32 nt, Human
cagugaaagagcaaaucauuauguuguucuug

SEQ ID NO: 356559 - RNA, 32 nt, Human
cagugaaagcagcuugggauguuggagcuaau

SEQ ID NO: 356560 - RNA, 32 nt, Human
cagugaaaugagaaagaauucacugggaguuu

SEQ ID NO: 356561 - RNA, 32 nt, Human
cagugaacacugucugaauuaaacaaaaagcu

SEQ ID NO: 356562 - RNA, 32 nt, Human
cagugaacagaagagacaaaauauccuuguuc

SEQ ID NO: 356563 - RNA, 32 nt, Human
cagugaaccaugauagcaccacugcaguccag

SEQ ID NO: 356564 - RNA, 32 nt, Human
cagugaaccuuaauucuuucuggcuucacagu

SEQ ID NO: 356565 - RNA, 32 nt, Human
cagugaagaaguuucagugacuuucaaaacca

SEQ ID NO: 356566 - RNA, 18 nt, Human
cagugaagacaggugcuc

SEQ ID NO: 356567 - RNA, 32 nt, Human
cagugaagacaguaacuuggaacugaccacgg

SEQ ID NO: 356568 - RNA, 32 nt, Human
cagugaagcacuacaggaggcaacuguggcau

SEQ ID NO: 356569 - RNA, 32 nt, Human
cagugaagcuguugguugaaucauaauuaaug

SEQ ID NO: 356570 - RNA, 32 nt, Human
cagugaaggaagagaaggccagcagaucagug

SEQ ID NO: 356571 - RNA, 32 nt, Human
cagugaaggcacaaccaacagcugcuccccgg

SEQ ID NO: 356572 - RNA, 32 nt, Human
cagugaaggcauaaugggcuguggagaccuuc

SEQ ID NO: 356573 - RNA, 32 nt, Human
cagugaaggccgugccuggaagugggcccugc

SEQ ID NO: 356574 - RNA, 32 nt, Human
cagugaaggcucggggcugcaggcuggagugc

SEQ ID NO: 356575 - RNA, 32 nt, Human
cagugaagguaccuagggcucuugggagcucu

SEQ ID NO: 356576 - RNA, 32 nt, Human
cagugaaggucaggccagggucucagccuccc

SEQ ID NO: 356577 - RNA, 32 nt, Human
cagugaagguuuguauuauagagcagaccaug

SEQ ID NO: 356578 - RNA, 32 nt, Human
cagugaaguauaaucagcacuuugccaugcuc

SEQ ID NO: 356579 - RNA, 32 nt, Human
cagugaagucaauuuucuuguuguggucuaua

SEQ ID NO: 356580 - RNA, 32 nt, Human
cagugaagucguccuccucccuucccuggaua

SEQ ID NO: 356581 - RNA, 32 nt, Human
cagugaaguguguugcuucugucacuuuauau

SEQ ID NO: 356582 - RNA, 32 nt, Human
cagugaauaggaccaccucugccugcagauuu

SEQ ID NO: 356583 - RNA, 32 nt, Human
cagugaauaugugguuucucuuacgucaucca

SEQ ID NO: 356584 - RNA, 32 nt, Human
cagugaaucaccaaggaaacaugaggccuauu

SEQ ID NO: 356585 - RNA, 32 nt, Human
cagugaaucccaaagcccugcagguucuguug

SEQ ID NO: 356586 - RNA, 32 nt, Human
cagugaaucuccaccugucuucuccagggagc

SEQ ID NO: 356587 - RNA, 32 nt, Human
cagugaaucugucuucugucucugucccuuuc

SEQ ID NO: 356588 - RNA, 32 nt, Human
cagugaaugcuccuuccauuccuguacucggg

SEQ ID NO: 356589 - RNA, 32 nt, Human
cagugaauguucuggcuuacucugccucacuu

SEQ ID NO: 356590 - RNA, 32 nt, Human
cagugaauuuggaauggaaggccagguuucua

SEQ ID NO: 356591 - RNA, 31 nt, Human
cagugacaaguguucggagggcagcagagag

SEQ ID NO: 356592 - RNA, 32 nt, Human
cagugacacacguguuagauuuugcuauaguc

SEQ ID NO: 356593 - RNA, 32 nt, Human
cagugacaccacuguccucaucuggagccuga

SEQ ID NO: 356594 - RNA, 32 nt, Human
cagugacagcacaaagagucccccacaggaag

SEQ ID NO: 356595 - RNA, 32 nt, Human
cagugacaggcagcagccaccaggacugugau

SEQ ID NO: 356596 - RNA, 32 nt, Human
cagugacauuccaugagacaagcaguccugug

SEQ ID NO: 356597 - RNA, 22 nt, Human
cagugacauuucuguaguccca

SEQ ID NO: 356598 - RNA, 32 nt, Human
cagugaccacuuccuguaaguaaagaaaauau

SEQ ID NO: 356599 - RNA, 32 nt, Human
cagugaccagccaccaggugugccaucgugga

SEQ ID NO: 356600 - RNA, 32 nt, Human
cagugacccaggagucugggccagcccaccgc

SEQ ID NO: 356601 - RNA, 32 nt, Human
cagugaccccagagacagagccaggacaggag

SEQ ID NO: 356602 - RNA, 32 nt, Human
cagugacccugccugcgcuccacacucgcucc

SEQ ID NO: 356603 - RNA, 32 nt, Human
cagugaccuccaccaccuuggggugggaagag

SEQ ID NO: 356604 - RNA, 32 nt, Human
cagugaccucuccaggcacagcuccuguccca

SEQ ID NO: 356605 - RNA, 32 nt, Human
cagugaccugccucugcacacagccagaaugu

SEQ ID NO: 356606 - RNA, 32 nt, Human
cagugaccuggaguugaggcucagggagagau

SEQ ID NO: 356607 - RNA, 32 nt, Human
cagugaccugggaugcagcccucaggcugggc

SEQ ID NO: 356608 - RNA, 32 nt, Human
cagugacgacaucacagcucacugcagccuca

SEQ ID NO: 356609 - RNA, 32 nt, Human
cagugacgcaccugcuacuucccuucacagac

SEQ ID NO: 356610 - RNA, 32 nt, Human
cagugacgcccacacacgugcuggugucccgg

SEQ ID NO: 356611 - RNA, 32 nt, Human
cagugacgcguucuagcagacacugacugcgc

SEQ ID NO: 356612 - RNA, 32 nt, Human
cagugacgcuguuccggccucagucacacuga

SEQ ID NO: 356613 - RNA, 32 nt, Human
cagugacuauuuuucucuguagagagccuccc

SEQ ID NO: 356614 - RNA, 21 nt, Human
cagugacucacaccuguaauc

SEQ ID NO: 356615 - RNA, 24 nt, Human
cagugacucacaccuguaaucuca

SEQ ID NO: 356616 - RNA, 22 nt, Human
cagugacucacaucuguaaucc

SEQ ID NO: 356617 - RNA, 24 nt, Human
cagugacucacgccuguaacccca

SEQ ID NO: 356618 - RNA, 21 nt, Human
cagugacucacgccuguaauc

SEQ ID NO: 356619 - RNA, 24 nt, Human
cagugacucacgccuguaauccca

SEQ ID NO: 356620 - RNA, 32 nt, Human
cagugacucagaacuucugccucuaagcugcu

SEQ ID NO: 356621 - RNA, 24 nt, Human
cagugacucaugccuacaauccca

SEQ ID NO: 356622 - RNA, 21 nt, Human
cagugacucaugccuguaauc

SEQ ID NO: 356623 - RNA, 24 nt, Human
cagugacucaugccuguaauccca

SEQ ID NO: 356624 - RNA, 32 nt, Human
cagugacucuuuuucuacaacugccuugucag

SEQ ID NO: 356625 - RNA, 32 nt, Human
cagugacugauaaacaaaaaugaagcuaaaau

SEQ ID NO: 356626 - RNA, 32 nt, Human
cagugacugcaaccaguaccuaugggucacag

SEQ ID NO: 356627 - RNA, 32 nt, Human
cagugacugcuggucuauccucuaggggguga

SEQ ID NO: 356628 - RNA, 24 nt, Human
cagugacuuacgccuguaaucuca

SEQ ID NO: 356629 - RNA, 32 nt, Human
cagugacuucccauuauaguuuuuggaucuuu

SEQ ID NO: 356630 - RNA, 32 nt, Human
cagugacuugggaggcugggaugggaggaucu

SEQ ID NO: 356631 - RNA, 32 nt, Human
cagugagaacucuguauccaucagagaauaug

SEQ ID NO: 356632 - RNA, 32 nt, Human
cagugagaaggcaaagagagaggcagaagaga

SEQ ID NO: 356633 - RNA, 32 nt, Human
cagugagacauuuuugaauuguauuuauuugg

SEQ ID NO: 356634 - RNA, 25 nt, Human
cagugagaccugucuaccucccaca

SEQ ID NO: 356635 - RNA, 20 nt, Human
cagugagacuggggccacua

SEQ ID NO: 356636 - RNA, 32 nt, Human
cagugagagaaaagggggagaaggauuggagc

SEQ ID NO: 356637 - RNA, 22 nt, Human
cagugagagaaaugccuaugaa

SEQ ID NO: 356638 - RNA, 32 nt, Human
cagugagagaucacaaagcggccaggcaggug

SEQ ID NO: 356639 - RNA, 21 nt, Human
cagugagauguagccuggccc

SEQ ID NO: 356640 - RNA, 32 nt, Human
cagugagcaagaaaguuguucgaguggaugaa

SEQ ID NO: 356641 - RNA, 32 nt, Human
cagugagcacaccuaccagacacucuucuucu

SEQ ID NO: 356642 - RNA, 32 nt, Human
cagugagcaccgcccucugccgccagucgugg

SEQ ID NO: 356643 - RNA, 31 nt, Human
cagugagcagaguaaagaaaagacuuccugc

SEQ ID NO: 356644 - RNA, 32 nt, Human
cagugagcagccccagccagcucuucaaggcc

SEQ ID NO: 356645 - RNA, 32 nt, Human
cagugagccacggcacuccacccugggcaaca

SEQ ID NO: 356646 - RNA, 32 nt, Human
cagugagccacugcacuccagccugaugacag

SEQ ID NO: 356647 - RNA, 32 nt, Human
cagugagccagcccccaccuuccaggcgccuu

SEQ ID NO: 356648 - RNA, 32 nt, Human
cagugagcccccuccccuccggcuacccccag

SEQ ID NO: 356649 - RNA, 32 nt, Human
cagugagcccugauugugccagugcacuccag

SEQ ID NO: 356650 - RNA, 32 nt, Human
cagugagccgagauagugccacugugcuccag

SEQ ID NO: 356651 - RNA, 32 nt, Human
cagugagccgaguucguggucacugcacucca

SEQ ID NO: 356652 - RNA, 32 nt, Human
cagugagccuagauagcgccacugcacugcac

SEQ ID NO: 356653 - RNA, 32 nt, Human
cagugagcuaugaacaccacugcacuccaccu

SEQ ID NO: 356654 - RNA, 32 nt, Human
cagugagcuaugaccauaccagugcauuccag

SEQ ID NO: 356655 - RNA, 32 nt, Human
cagugagcucacugugacccauccuuacucua

SEQ ID NO: 356656 - RNA, 21 nt, Human
cagugagcucaggugucucaa

SEQ ID NO: 356657 - RNA, 32 nt, Human
cagugagcucugauuaugccagugcauuccag

SEQ ID NO: 356658 - RNA, 32 nt, Human
cagugaggaagggagaggccagcugcacuccu

SEQ ID NO: 356659 - RNA, 32 nt, Human
cagugaggacccuucugcaucuucccaugaca

SEQ ID NO: 356660 - RNA, 32 nt, Human
cagugaggacggggcccaggaggucaggagag

SEQ ID NO: 356661 - RNA, 32 nt, Human
cagugaggacugcgagggucuccuggggacag

SEQ ID NO: 356662 - RNA, 32 nt, Human
cagugaggagcagaagcagcugaugcuguacu

SEQ ID NO: 356663 - RNA, 32 nt, Human
cagugaggagcagcagagucugauacuagguc

SEQ ID NO: 356664 - RNA, 32 nt, Human
cagugaggagcaggccagagcugccuuggcau

SEQ ID NO: 356665 - RNA, 32 nt, Human
cagugaggagccgaggaaggaggcucugggag

SEQ ID NO: 356666 - RNA, 32 nt, Human
cagugaggaggcggacagcaucaccuugggcc

SEQ ID NO: 356667 - RNA, 32 nt, Human
cagugaggagggcuggacaagaauccauuccu

SEQ ID NO: 356668 - RNA, 32 nt, Human
cagugaggcaacacccaggcgggcagagaagg

SEQ ID NO: 356669 - RNA, 32 nt, Human
cagugagggaaaugggaacauaccaggccgag

SEQ ID NO: 356670 - RNA, 32 nt, Human
cagugagggaagcacugaagagcgccagucga

SEQ ID NO: 356671 - RNA, 32 nt, Human
cagugagggagacagccccaacccuuuucucc

SEQ ID NO: 356672 - RNA, 32 nt, Human
cagugagggagauagagaggguuggcggccaa

SEQ ID NO: 356673 - RNA, 32 nt, Human
cagugagggagcaagggagagcaggggaggug

SEQ ID NO: 356674 - RNA, 32 nt, Human
cagugagggaggcgucaagucuucucaagucu

SEQ ID NO: 356675 - RNA, 32 nt, Human
cagugagggagguggacggugccagcugaggc

SEQ ID NO: 356676 - RNA, 32 nt, Human
cagugagggcugggcccacagagaugcaugcg

SEQ ID NO: 356677 - RNA, 32 nt, Human
cagugagggcugguaccacccacuccuggguc

SEQ ID NO: 356678 - RNA, 32 nt, Human
cagugagggugaggagaggggaucuggggacu

SEQ ID NO: 356679 - RNA, 32 nt, Human
cagugagggugucaucagggaggaccugaugu

SEQ ID NO: 356680 - RNA, 32 nt, Human
cagugagguccaggcugcacuaagccaagauc

SEQ ID NO: 356681 - RNA, 32 nt, Human
cagugaggugaaugaagagaguggggaucucc

SEQ ID NO: 356682 - RNA, 32 nt, Human
cagugaggugccccugccuggagcacaggguc

SEQ ID NO: 356683 - RNA, 32 nt, Human
cagugaguaucugccagcaucuaccaagaaga

SEQ ID NO: 356684 - RNA, 25 nt, Human
cagugagucccuggagggaacauuc

SEQ ID NO: 356685 - RNA, 32 nt, Human
cagugagucucugacuucccaccaacagcuaa

SEQ ID NO: 356686 - RNA, 32 nt, Human
cagugagucugucagcgcagguuuaguuuacu

SEQ ID NO: 356687 - RNA, 20 nt, Human
cagugaguggcagagcaaga

SEQ ID NO: 356688 - RNA, 32 nt, Human
cagugaguggcaggggcaggagaggggagaac

SEQ ID NO: 356689 - RNA, 32 nt, Human
cagugauaaaaugaucagccaugugaagauuc

SEQ ID NO: 356690 - RNA, 32 nt, Human
cagugauagggggcuggcugggucaggaaugg

SEQ ID NO: 356691 - RNA, 31 nt, Human
cagugauauggagaauuggccaacaccaagu

SEQ ID NO: 356692 - RNA, 32 nt, Human
cagugaucaaggcuaauuggaaaagaguuauc

SEQ ID NO: 356693 - RNA, 32 nt, Human
cagugaucacauaacgaugacagcuauggggc

SEQ ID NO: 356694 - RNA, 32 nt, Human
cagugaucagcugugccucucugccuguuggu

SEQ ID NO: 356695 - RNA, 32 nt, Human
cagugaucagugauaucaaacaucaggaauca

SEQ ID NO: 356696 - RNA, 32 nt, Human
cagugaucccaaucugucuguggcugaaaaag

SEQ ID NO: 356697 - RNA, 32 nt, Human
cagugauccucugcaucucugccuacaagggc

SEQ ID NO: 356698 - RNA, 32 nt, Human
cagugauccuggagaggaaacuggggaggggg

SEQ ID NO: 356699 - RNA, 32 nt, Human
cagugaucuggaccaggaagacggauugcugc

SEQ ID NO: 356700 - RNA, 32 nt, Human
cagugaucuuaccagccagcuguccucagcgc

SEQ ID NO: 356701 - RNA, 23 nt, Human
cagugaugaggaaagcugugaaa

SEQ ID NO: 356702 - RNA, 32 nt, Human
cagugaugccaccuccaagcuuguccuaggug

SEQ ID NO: 356703 - RNA, 18 nt, Human
cagugaugcugcacagua

SEQ ID NO: 356704 - RNA, 32 nt, Human
cagugauggaauaucaugaaugugagucauua

SEQ ID NO: 356705 - RNA, 32 nt, Human
cagugauggacucugugacauggucagguuga

SEQ ID NO: 356706 - RNA, 32 nt, Human
cagugauggagaagccaccagaggcuccuugc

SEQ ID NO: 356707 - RNA, 32 nt, Human
cagugauggcagacaagauggcugucugguuu

SEQ ID NO: 356708 - RNA, 32 nt, Human
cagugaugucaguucggcccagcuggagguac

SEQ ID NO: 356709 - RNA, 32 nt, Human
cagugaugucaguucggcccagcuggagguau

SEQ ID NO: 356710 - RNA, 32 nt, Human
cagugauguuaacugaccuggcacuuccucaa

SEQ ID NO: 356711 - RNA, 23 nt, Human
cagugauguuuuucaggcccucc

SEQ ID NO: 356712 - RNA, 32 nt, Human
cagugauucaauaucacaaaaggcauugacgu

SEQ ID NO: 356713 - RNA, 32 nt, Human
cagugauuccaaacucucacugugccuucaca

SEQ ID NO: 356714 - RNA, 32 nt, Human
cagugauucucgugccucagccuccugaguag

SEQ ID NO: 356715 - RNA, 32 nt, Human
cagugauucugcagagccugagcugcugcugu

SEQ ID NO: 356716 - RNA, 32 nt, Human
cagugauugaaggguccuaaaagggaaaauau

SEQ ID NO: 356717 - RNA, 18 nt, Human
cagugauuuaaaccagua

SEQ ID NO: 356718 - RNA, 32 nt, Human
cagugauuucccuccuguaucuguagccucug

SEQ ID NO: 356719 - RNA, 32 nt, Human
cagugauuucucaaacuacagcucacaccaag

SEQ ID NO: 356720 - RNA, 32 nt, Human
cagugcaaaagagggccuucaccagaacccaa

SEQ ID NO: 356721 - RNA, 32 nt, Human
cagugcaaagccgcccccagagcccagguguc

SEQ ID NO: 356722 - RNA, 20 nt, Human
cagugcaaauccuccugccc

SEQ ID NO: 356723 - RNA, 32 nt, Human
cagugcaagaucugggcucuagugggaaaccu

SEQ ID NO: 356724 - RNA, 32 nt, Human
cagugcaagccccagagacuguuguagguugc

SEQ ID NO: 356725 - RNA, 32 nt, Human
cagugcaauuaggccagaaaggaucuuguucg

SEQ ID NO: 356726 - RNA, 21 nt, Human
cagugcacaccuguaauccca

SEQ ID NO: 356727 - RNA, 32 nt, Human
cagugcacaggacggccccacagcagaccagc

SEQ ID NO: 356728 - RNA, 21 nt, Human
cagugcacaggcuagccugga

SEQ ID NO: 356729 - RNA, 32 nt, Human
cagugcacaggcuggucuucuaucaguaccug

SEQ ID NO: 356730 - RNA, 32 nt, Human
cagugcacauaaggagcaccaacggaccuauc

SEQ ID NO: 356731 - RNA, 17 nt, Human
cagugcaccaugggaug

SEQ ID NO: 356732 - RNA, 32 nt, Human
cagugcacccuuguuacuugggagagguggua

SEQ ID NO: 356733 - RNA, 20 nt, Human
cagugcacgccuguaauccc

SEQ ID NO: 356734 - RNA, 32 nt, Human
cagugcacucagaacuucacuguaccugggau

SEQ ID NO: 356735 - RNA, 21 nt, Human
cagugcacuccagccugggca

SEQ ID NO: 356736 - RNA, 32 nt, Human
cagugcagaccggaaagugaagagucagaacu

SEQ ID NO: 356737 - RNA, 32 nt, Human
cagugcagagacugcuagccugggcacacaca

SEQ ID NO: 356738 - RNA, 21 nt, Human
cagugcagagagagcccagga

SEQ ID NO: 356739 - RNA, 32 nt, Human
cagugcagagcccacugcaacugcuaggacug

SEQ ID NO: 356740 - RNA, 32 nt, Human
cagugcagaucuggagaggagcuggcccggaa

SEQ ID NO: 356741 - RNA, 32 nt, Human
cagugcagccccggcgcggagcagggagccuc

SEQ ID NO: 356742 - RNA, 32 nt, Human
cagugcagccuccauaaccaugacauucccgc

SEQ ID NO: 356743 - RNA, 32 nt, Human
cagugcagccucgacuuccugggauccagcga

SEQ ID NO: 356744 - RNA, 32 nt, Human
cagugcagcugcagaagagaaaugggauuggc

SEQ ID NO: 356745 - RNA, 32 nt, Human
cagugcaggcagaucccugaaggucagcacuc

SEQ ID NO: 356746 - RNA, 32 nt, Human
cagugcaggccugcuggucgugcuguguggcc

SEQ ID NO: 356747 - RNA, 18 nt, Human
cagugcaggcgcgacggg

SEQ ID NO: 356748 - RNA, 32 nt, Human
cagugcaggggauggcccugcugcugcuuccg

SEQ ID NO: 356749 - RNA, 32 nt, Human
cagugcaguagcugcuggaggcuggggaggcc

SEQ ID NO: 356750 - RNA, 32 nt, Human
cagugcagucaaggccaaccuaggcagcagcc

SEQ ID NO: 356751 - RNA, 32 nt, Human
cagugcagugacacagaugagaagcugugagu

SEQ ID NO: 356752 - RNA, 32 nt, Human
cagugcaguggugccaucucagcucacugcaa

SEQ ID NO: 356753 - RNA, 32 nt, Human
cagugcauaaaguccaagggggccaagggcca

SEQ ID NO: 356754 - RNA, 32 nt, Human
cagugcauccccaaucccaccaucuuaccugg

SEQ ID NO: 356755 - RNA, 32 nt, Human
cagugcauccccacgaccccugccucgagggc

SEQ ID NO: 356756 - RNA, 32 nt, Human
cagugcaucuccucuggcuuucuuugacugaa

SEQ ID NO: 356757 - RNA, 32 nt, Human
cagugcaugcacuccagccugggcaacagaca

SEQ ID NO: 356758 - RNA, 32 nt, Human
cagugcauggccaaggaacaagcacaguccac

SEQ ID NO: 356759 - RNA, 31 nt, Human
cagugcauguggagcacagagaucagagcuu

SEQ ID NO: 356760 - RNA, 32 nt, Human
cagugcauuauguacacaggucaaccauggua

SEQ ID NO: 356761 - RNA, 32 nt, Human
cagugccaacacucaagacugugaguagagca

SEQ ID NO: 356762 - RNA, 32 nt, Human
cagugccaagaugaccuguugugucauauaau

SEQ ID NO: 356763 - RNA, 32 nt, Human
cagugccaauuaggagagugggaagaaaggag

SEQ ID NO: 356764 - RNA, 32 nt, Human
cagugccacauuugaccaugagcaccacacca

SEQ ID NO: 356765 - RNA, 32 nt, Human
cagugccaccgccaccacaccccagaucccac

SEQ ID NO: 356766 - RNA, 32 nt, Human
cagugccaccguacucuagccugggcgacaga

SEQ ID NO: 356767 - RNA, 32 nt, Human
cagugccacugcaauccagccugggcaacaga

SEQ ID NO: 356768 - RNA, 18 nt, Human
cagugccagaucguggua

SEQ ID NO: 356769 - RNA, 32 nt, Human
cagugccaggaggaagaaggaaggagucccuu

SEQ ID NO: 356770 - RNA, 32 nt, Human
cagugccaggcuccaggcgucgccaaggcagg

SEQ ID NO: 356771 - RNA, 32 nt, Human
cagugccaggcuggaggcggcagcgguuggag

SEQ ID NO: 356772 - RNA, 32 nt, Human
cagugccagggcacucuuccuccagcugggau

SEQ ID NO: 356773 - RNA, 32 nt, Human
cagugccaguagggcaggcaggaaugcagcag

SEQ ID NO: 356774 - RNA, 32 nt, Human
cagugccauagccuuaccgcagccugcgcggg

SEQ ID NO: 356775 - RNA, 32 nt, Human
cagugccauaguugacuuuuacauuccauagg

SEQ ID NO: 356776 - RNA, 32 nt, Human
cagugccaucacccucacccaagugauguggu

SEQ ID NO: 356777 - RNA, 32 nt, Human
cagugccauguugaugugccucucaguuuuau

SEQ ID NO: 356778 - RNA, 32 nt, Human
cagugccauugcacuccagccugcacaacaag

SEQ ID NO: 356779 - RNA, 32 nt, Human
cagugcccaaauucuggagggggccgaggugg

SEQ ID NO: 356780 - RNA, 32 nt, Human
cagugcccagagcaugcagggaacccucgugc

SEQ ID NO: 356781 - RNA, 32 nt, Human
cagugcccagcacauaggagaugcucaguaaa

SEQ ID NO: 356782 - RNA, 32 nt, Human
cagugcccagcacuuuguagucucaucccaga

SEQ ID NO: 356783 - RNA, 32 nt, Human
cagugcccaucuuccaggacuaccuuauuuuc

SEQ ID NO: 356784 - RNA, 32 nt, Human
cagugcccaucuucguucgucuccuugccugu

SEQ ID NO: 356785 - RNA, 32 nt, Human
cagugcccaucuugccagcagugcccgccccc

SEQ ID NO: 356786 - RNA, 32 nt, Human
cagugcccauuuuucauccagggagaaccucg

SEQ ID NO: 356787 - RNA, 32 nt, Human
cagugccccacaccuggaacagccuggaggag

SEQ ID NO: 356788 - RNA, 32 nt, Human
cagugccccaggaagaggaaguggcagggucu

SEQ ID NO: 356789 - RNA, 32 nt, Human
cagugccccaucuaaauaaaauacugcuuuug

SEQ ID NO: 356790 - RNA, 32 nt, Human
cagugcccccuccaaggcugugcagugucuug

SEQ ID NO: 356791 - RNA, 32 nt, Human
cagugccccucaggucaaaccaagccaagagc

SEQ ID NO: 356792 - RNA, 32 nt, Human
cagugccccuccaguucaguugucuauguauu

SEQ ID NO: 356793 - RNA, 32 nt, Human
cagugcccgaggccaggaaggccgggccgugg

SEQ ID NO: 356794 - RNA, 32 nt, Human
cagugcccgcugggcccagccuggggacaggg

SEQ ID NO: 356795 - RNA, 32 nt, Human
cagugcccggcgcugauuggaaaacggguggc

SEQ ID NO: 356796 - RNA, 32 nt, Human
cagugcccuccccacagcacuaccucaccccg

SEQ ID NO: 356797 - RNA, 32 nt, Human
cagugcccuccuucccugucucugccucuccc

SEQ ID NO: 356798 - RNA, 32 nt, Human
cagugcccucuucccuuccugcacugaggaga

SEQ ID NO: 356799 - RNA, 32 nt, Human
cagugcccugcucucccguucgccucuuucug

SEQ ID NO: 356800 - RNA, 32 nt, Human
cagugcccuggaguccuaucugaucuccgggu

SEQ ID NO: 356801 - RNA, 32 nt, Human
cagugcccuuccuccuccuccuccucugccgc

SEQ ID NO: 356802 - RNA, 32 nt, Human
cagugccgaccuguuaaggccgucgagagcau

SEQ ID NO: 356803 - RNA, 32 nt, Human
cagugccgaguccuugucccuaccuccagcuu

SEQ ID NO: 356804 - RNA, 21 nt, Human
cagugccgccggccucaagau

SEQ ID NO: 356805 - RNA, 32 nt, Human
cagugccggcaggugggagggcugagguggca

SEQ ID NO: 356806 - RNA, 32 nt, Human
cagugccggguccucccucccuuccuggcuug

SEQ ID NO: 356807 - RNA, 32 nt, Human
cagugccguugccuuuucuucauuagagacac

SEQ ID NO: 356808 - RNA, 22 nt, Human
cagugccuagaauauuauauga

SEQ ID NO: 356809 - RNA, 22 nt, Human
cagugccuagaauuucuacgga

SEQ ID NO: 356810 - RNA, 32 nt, Human
cagugccuagugcugcucauuauguguucauu

SEQ ID NO: 356811 - RNA, 32 nt, Human
cagugccucacaccaugccuggcccuuaagaa

SEQ ID NO: 356812 - RNA, 32 nt, Human
cagugccucaguuuccccaucuguaaaaugag

SEQ ID NO: 356813 - RNA, 21 nt, Human
cagugccucaugccuauaauc

SEQ ID NO: 356814 - RNA, 24 nt, Human
cagugccucaugccuauaauccca

SEQ ID NO: 356815 - RNA, 32 nt, Human
cagugccuccagccacacccccugccuucccc

SEQ ID NO: 356816 - RNA, 32 nt, Human
cagugccuccccucaacuuuccugugggugcc

SEQ ID NO: 356817 - RNA, 23 nt, Human
cagugccugagaaagaacauuga

SEQ ID NO: 356818 - RNA, 32 nt, Human
cagugccugcagcuuuccaccgugccuggagc

SEQ ID NO: 356819 - RNA, 22 nt, Human
cagugccugccuucucuagcgg

SEQ ID NO: 356820 - RNA, 32 nt, Human
cagugccugcugugugcugauacuguucugug

SEQ ID NO: 356821 - RNA, 32 nt, Human
cagugccuggaaggcaggugugcccgucagcg

SEQ ID NO: 356822 - RNA, 21 nt, Human
cagugccuggauagacacuga

SEQ ID NO: 356823 - RNA, 32 nt, Human
cagugccuguaaucccagcuauuugggaggcu

SEQ ID NO: 356824 - RNA, 32 nt, Human
cagugccuguagucccagcugcucgggaggcu

SEQ ID NO: 356825 - RNA, 18 nt, Human
cagugccugucaccucuu

SEQ ID NO: 356826 - RNA, 32 nt, Human
cagugccugugguuguuucuccagagucaaaa

SEQ ID NO: 356827 - RNA, 32 nt, Human
cagugccuucuuucagcucacaggauaucggc

SEQ ID NO: 356828 - RNA, 32 nt, Human
cagugccuuuuguucuggaggagaggaccccc

SEQ ID NO: 356829 - RNA, 32 nt, Human
cagugcgaaccuuugggcucuccagguccgag

SEQ ID NO: 356830 - RNA, 32 nt, Human
cagugcgagugguuggccuugcucugguccgg

SEQ ID NO: 356831 - RNA, 32 nt, Human
cagugcgcugcucuccagcccgcuugaacgcu

SEQ ID NO: 356832 - RNA, 32 nt, Human
cagugcggacggggacccucugggauucugcu

SEQ ID NO: 356833 - RNA, 32 nt, Human
cagugcggucacauacuuccagaagagcggac

SEQ ID NO: 356834 - RNA, 32 nt, Human
cagugcgugccggggugucaggcugcagguau

SEQ ID NO: 356835 - RNA, 32 nt, Human
cagugcuaacacagcucagcccugcucagugc

SEQ ID NO: 356836 - RNA, 32 nt, Human
cagugcuaacugacugccucuccagguucgga

SEQ ID NO: 356837 - RNA, 31 nt, Human
cagugcuacagcuagaaugaagcacaucaac

SEQ ID NO: 356838 - RNA, 32 nt, Human
cagugcuaggguauugagucaggcagcuggag

SEQ ID NO: 356839 - RNA, 32 nt, Human
cagugcuaguucugacccaaccacagaggaug

SEQ ID NO: 356840 - RNA, 32 nt, Human
cagugcuaucccggcauccugauggcuccgac

SEQ ID NO: 356841 - RNA, 32 nt, Human
cagugcuauccucuuggacuucccagccuuca

SEQ ID NO: 356842 - RNA, 31 nt, Human
cagugcucaauaaaugcuucgaggcugauga

SEQ ID NO: 356843 - RNA, 23 nt, Human
cagugcucacgccuguaauacca

SEQ ID NO: 356844 - RNA, 31 nt, Human
cagugcucacucaauguguuuaggcagauuc

SEQ ID NO: 356845 - RNA, 32 nt, Human
cagugcucagagaagcaaaccucuguacucuc

SEQ ID NO: 356846 - RNA, 32 nt, Human
cagugcucagguuugcaucauaagugagcuau

SEQ ID NO: 356847 - RNA, 32 nt, Human
cagugcuccaggcacccagcuuugucuguggg

SEQ ID NO: 356848 - RNA, 32 nt, Human
cagugcuccagugccaucuggugcuucguggc

SEQ ID NO: 356849 - RNA, 32 nt, Human
cagugcuccagugguacagaagugagacauaa

SEQ ID NO: 356850 - RNA, 32 nt, Human
cagugcucccuuccucuccucuccuucuagug

SEQ ID NO: 356851 - RNA, 32 nt, Human
cagugcuccugacuccucacagcucuguuccu

SEQ ID NO: 356852 - RNA, 32 nt, Human
cagugcucgguuguuuacaaucaguggggaaa

SEQ ID NO: 356853 - RNA, 32 nt, Human
cagugcucucagggagggugcaccaggccugc

SEQ ID NO: 356854 - RNA, 32 nt, Human
cagugcucuccaggcuuccucucuuugugauu

SEQ ID NO: 356855 - RNA, 32 nt, Human
cagugcucucgaggagggugcaccagggcugc

SEQ ID NO: 356856 - RNA, 32 nt, Human
cagugcucucggggagggugcaccaggcccac

SEQ ID NO: 356857 - RNA, 32 nt, Human
cagugcucucggggagggugcaccaggcccgc

SEQ ID NO: 356858 - RNA, 32 nt, Human
cagugcucugcagaagccucucccccucacag

SEQ ID NO: 356859 - RNA, 32 nt, Human
cagugcucugcucucacccugcccaagacuca

SEQ ID NO: 356860 - RNA, 32 nt, Human
cagugcucuggcuggcugucucucccuuucuc

SEQ ID NO: 356861 - RNA, 32 nt, Human
cagugcucugggggagggugcaccaggccugc

SEQ ID NO: 356862 - RNA, 32 nt, Human
cagugcucuguaaauaguuguuuuaauuuagc

SEQ ID NO: 356863 - RNA, 32 nt, Human
cagugcucuguggggccucgcuggcccauguc

SEQ ID NO: 356864 - RNA, 32 nt, Human
cagugcugacaugccagcccccugccaccuca

SEQ ID NO: 356865 - RNA, 32 nt, Human
cagugcugacaugccagcccccugccaccucg

SEQ ID NO: 356866 - RNA, 32 nt, Human
cagugcugagauuacaggugggagccacugca

SEQ ID NO: 356867 - RNA, 32 nt, Human
cagugcugagggcugggaugcucugugacccc

SEQ ID NO: 356868 - RNA, 22 nt, Human
cagugcugcacuccuccugccc

SEQ ID NO: 356869 - RNA, 32 nt, Human
cagugcugcagaacggacuugggagcccuccu

SEQ ID NO: 356870 - RNA, 32 nt, Human
cagugcugcagccggcucaccucucuccgcuu

SEQ ID NO: 356871 - RNA, 32 nt, Human
cagugcugcccaggaccuggaccgaauggggg

SEQ ID NO: 356872 - RNA, 32 nt, Human
cagugcugcuuugggacauauacuugaccuag

SEQ ID NO: 356873 - RNA, 32 nt, Human
cagugcugggagagaggggagaugugggcagg

SEQ ID NO: 356874 - RNA, 32 nt, Human
cagugcugggauuacaggagugagccaccaug

SEQ ID NO: 356875 - RNA, 32 nt, Human
cagugcugggauuacaggcaugagccaccgcg

SEQ ID NO: 356876 - RNA, 32 nt, Human
cagugcugggauuacaggcaugggccaccacg

SEQ ID NO: 356877 - RNA, 32 nt, Human
cagugcugggauuacaggccugagccaccgug

SEQ ID NO: 356878 - RNA, 32 nt, Human
cagugcugggauuacaggcgugagccaccaug

SEQ ID NO: 356879 - RNA, 32 nt, Human
cagugcugggauuacaggcgugagccaccgca

SEQ ID NO: 356880 - RNA, 32 nt, Human
cagugcugggauuacaggcgugagccaccgcg

SEQ ID NO: 356881 - RNA, 32 nt, Human
cagugcugggcaguacuccccuaggcagaucc

SEQ ID NO: 356882 - RNA, 32 nt, Human
cagugcugggcugugggccggggaggaaggcg

SEQ ID NO: 356883 - RNA, 31 nt, Human
cagugcuggguggagagagccagaaaacaga

SEQ ID NO: 356884 - RNA, 32 nt, Human
cagugcugucccacuccucaagucuggaagcg

SEQ ID NO: 356885 - RNA, 32 nt, Human
cagugcuguucugagagcuuggaggaggcacc

SEQ ID NO: 356886 - RNA, 32 nt, Human
cagugcuguuguccuuggccugcagcaggagg

SEQ ID NO: 356887 - RNA, 32 nt, Human
cagugcuuauuucucagcuuuuucuuucuuaa

SEQ ID NO: 356888 - RNA, 20 nt, Human
cagugcuucccuugguguca

SEQ ID NO: 356889 - RNA, 32 nt, Human
cagugcuuuccguggcacugcauacaaucuga

SEQ ID NO: 356890 - RNA, 32 nt, Human
cagugcuuuggauucuuccucccaggccuacc

SEQ ID NO: 356891 - RNA, 32 nt, Human
cagugcuuugggaggcugaggugggaggauug

SEQ ID NO: 356892 - RNA, 32 nt, Human
cagugcuuugguaugggagguguuagaaaacu

SEQ ID NO: 356893 - RNA, 23 nt, Human
cagugcuuuuaaaaaguguuuaa

SEQ ID NO: 356894 - RNA, 32 nt, Human
cagugcuuuuggggagggugcaccagggccac

SEQ ID NO: 356895 - RNA, 32 nt, Human
caguggaacaaagauugagaaccacaauagca

SEQ ID NO: 356896 - RNA, 32 nt, Human
caguggaacagucuucccauuuacaggucuuc

SEQ ID NO: 356897 - RNA, 32 nt, Human
caguggaagaacugggaaggaggaagccccuc

SEQ ID NO: 356898 - RNA, 32 nt, Human
caguggaagaugaccucuaguuucuuggcuca

SEQ ID NO: 356899 - RNA, 32 nt, Human
caguggaagcaagagguuggggugauguggcc

SEQ ID NO: 356900 - RNA, 32 nt, Human
caguggaagcauuuucaaaagcaaagauaauu

SEQ ID NO: 356901 - RNA, 32 nt, Human
caguggaaguucuucaagaggaaaggcgcccc

SEQ ID NO: 356902 - RNA, 32 nt, Human
caguggaauguguaagcuagcuaauucuuguu

SEQ ID NO: 356903 - RNA, 32 nt, Human
caguggacagaagggauuauccucagccaguc

SEQ ID NO: 356904 - RNA, 32 nt, Human
caguggacauagaagagaagggugugaggcug

SEQ ID NO: 356905 - RNA, 32 nt, Human
caguggagaggaagagggagugaggcccugug

SEQ ID NO: 356906 - RNA, 32 nt, Human
caguggagaggcaggaggacaggcugggggcc

SEQ ID NO: 356907 - RNA, 31 nt, Human
caguggagauugagagaaaagguugaaaaug

SEQ ID NO: 356908 - RNA, 32 nt, Human
caguggagcagaaccucuccugccucgggagu

SEQ ID NO: 356909 - RNA, 32 nt, Human
caguggagcgcuggucugugcuaacaucuuca

SEQ ID NO: 356910 - RNA, 32 nt, Human
caguggaggaaagagcuagaugaacagguugc

SEQ ID NO: 356911 - RNA, 32 nt, Human
caguggaggaaggcagggaucccacuacgagc

SEQ ID NO: 356912 - RNA, 32 nt, Human
caguggaggagagagccagaguggauacuauu

SEQ ID NO: 356913 - RNA, 32 nt, Human
caguggaggccucccuuccuucucacagcauc

SEQ ID NO: 356914 - RNA, 32 nt, Human
caguggagggguggaguugaugaaaggagagg

SEQ ID NO: 356915 - RNA, 32 nt, Human
caguggaggucugagagcagagccacagcauc

SEQ ID NO: 356916 - RNA, 32 nt, Human
caguggagguucugagacuggauucagucuug

SEQ ID NO: 356917 - RNA, 32 nt, Human
caguggaguaccauggaggucacugcaauggu

SEQ ID NO: 356918 - RNA, 32 nt, Human
caguggagugauauuuauguauuauuuuuacu

SEQ ID NO: 356919 - RNA, 32 nt, Human
caguggaguucccaggccuuguuugcaggaag

SEQ ID NO: 356920 - RNA, 32 nt, Human
caguggaguuugaggacaugcaauaguaauuu

SEQ ID NO: 356921 - RNA, 32 nt, Human
caguggauaaagcucaaagcaaacaacaguaa

SEQ ID NO: 356922 - RNA, 24 nt, Human
caguggaucacgccuguaauccca

SEQ ID NO: 356923 - RNA, 24 nt, Human
caguggaucgcaccuguaauccca

SEQ ID NO: 356924 - RNA, 32 nt, Human
caguggaucuaaacauuacggcaauuuuagga

SEQ ID NO: 356925 - RNA, 32 nt, Human
caguggaugcugcugggccucugccuuguccu

SEQ ID NO: 356926 - RNA, 32 nt, Human
caguggaugugagcuucugaaggcaggaauug

SEQ ID NO: 356927 - RNA, 24 nt, Human
caguggcacacaccuguaguccca

SEQ ID NO: 356928 - RNA, 32 nt, Human
caguggcacaccaccagugaggcacauguugc

SEQ ID NO: 356929 - RNA, 24 nt, Human
caguggcacacgccuguaauccca

SEQ ID NO: 356930 - RNA, 24 nt, Human
caguggcacacggcuguaauccca

SEQ ID NO: 356931 - RNA, 32 nt, Human
caguggcacagagcuaauccugccuggggguu

SEQ ID NO: 356932 - RNA, 21 nt, Human
caguggcacaugccuguaauc

SEQ ID NO: 356933 - RNA, 24 nt, Human
caguggcacaugccuguaauccca

SEQ ID NO: 356934 - RNA, 24 nt, Human
caguggcacgcgccuguaauccca

SEQ ID NO: 356935 - RNA, 32 nt, Human
caguggcagagcuggucugugaugaaccaagc

SEQ ID NO: 356936 - RNA, 32 nt, Human
caguggcagaggagauggagacaggaaacggg

SEQ ID NO: 356937 - RNA, 18 nt, Human
caguggcagcagguggug

SEQ ID NO: 356938 - RNA, 32 nt, Human
caguggcagcccacccaccucugcucucuggc

SEQ ID NO: 356939 - RNA, 32 nt, Human
caguggcagccugccuaagacugucuuaccuu

SEQ ID NO: 356940 - RNA, 32 nt, Human
caguggcagcuggugacacuaacgauugcuac

SEQ ID NO: 356941 - RNA, 32 nt, Human
caguggcaggagccuuacuuuugucacagccu

SEQ ID NO: 356942 - RNA, 32 nt, Human
caguggcaggugugacgggcggccagguuacu

SEQ ID NO: 356943 - RNA, 32 nt, Human
caguggcaugaacaggcccagcuuugacuuga

SEQ ID NO: 356944 - RNA, 32 nt, Human
caguggcaugaucucagcucacugaagccucg

SEQ ID NO: 356945 - RNA, 32 nt, Human
caguggcaugaucuuggcucacugaaaccucu

SEQ ID NO: 356946 - RNA, 24 nt, Human
caguggcaugcgccugugauccca

SEQ ID NO: 356947 - RNA, 32 nt, Human
caguggcauggagcuuugaaagacgaguaggu

SEQ ID NO: 356948 - RNA, 24 nt, Human
caguggcaugugcuuguaauccca

SEQ ID NO: 356949 - RNA, 32 nt, Human
caguggccaaacaaccgugcucagccuguuuc

SEQ ID NO: 356950 - RNA, 19 nt, Human
caguggccacaacagcaca

SEQ ID NO: 356951 - RNA, 31 nt, Human
caguggccacaucaggagguugcagguuaac

SEQ ID NO: 356952 - RNA, 32 nt, Human
caguggccacaucaggagguugcagguuaacc

SEQ ID NO: 356953 - RNA, 31 nt, Human
caguggccacaucaggagguugcagguugac

SEQ ID NO: 356954 - RNA, 32 nt, Human
caguggccacaucaggagguugcagguugacc

SEQ ID NO: 356955 - RNA, 31 nt, Human
caguggccacgucaggagguugcagguugac

SEQ ID NO: 356956 - RNA, 32 nt, Human
caguggccacgucaggagguugcagguugacc

SEQ ID NO: 356957 - RNA, 22 nt, Human
caguggccacuguggcuggcca

SEQ ID NO: 356958 - RNA, 32 nt, Human
caguggccagaaacccuucacacucacacauc

SEQ ID NO: 356959 - RNA, 32 nt, Human
caguggccagagguauuggagacacaaacccu

SEQ ID NO: 356960 - RNA, 32 nt, Human
caguggccagugccacacagcuccuccaugcc

SEQ ID NO: 356961 - RNA, 32 nt, Human
caguggccauggaccugcagggcacagagcac

SEQ ID NO: 356962 - RNA, 24 nt, Human
caguggcccacagcuguaauccca

SEQ ID NO: 356963 - RNA, 24 nt, Human
caguggcccacgccuguaauccca

SEQ ID NO: 356964 - RNA, 32 nt, Human
caguggcccacugugccuggcccaaauaagca

SEQ ID NO: 356965 - RNA, 32 nt, Human
caguggcccaggaagugugcugggcagccugu

SEQ ID NO: 356966 - RNA, 32 nt, Human
caguggcccaggggagguugagugggcaucuu

SEQ ID NO: 356967 - RNA, 24 nt, Human
caguggcccaugccuauaauccca

SEQ ID NO: 356968 - RNA, 21 nt, Human
caguggcccaugccuguaauc

SEQ ID NO: 356969 - RNA, 24 nt, Human
caguggcccaugccuguaauccca

SEQ ID NO: 356970 - RNA, 32 nt, Human
caguggcccaugugacuguggcauuuucggca

SEQ ID NO: 356971 - RNA, 32 nt, Human
caguggccccaggaguguggagaguuccauga

SEQ ID NO: 356972 - RNA, 32 nt, Human
caguggccccggaaggugaauggccugcucuc

SEQ ID NO: 356973 - RNA, 32 nt, Human
caguggcccgggccaguucaggccgccucccc

SEQ ID NO: 356974 - RNA, 32 nt, Human
caguggcccuacccagccuggccagcagacac

SEQ ID NO: 356975 - RNA, 32 nt, Human
caguggcccuccagucagguucuguggguuug

SEQ ID NO: 356976 - RNA, 32 nt, Human
caguggcccugagacccuagcucugcucucgg

SEQ ID NO: 356977 - RNA, 32 nt, Human
caguggcccugcacucaagcuccgcaauaauc

SEQ ID NO: 356978 - RNA, 32 nt, Human
caguggccgaggcuggagcggcaggcggaucg

SEQ ID NO: 356979 - RNA, 24 nt, Human
caguggccgcagcagcgcgccggg

SEQ ID NO: 356980 - RNA, 23 nt, Human
caguggccggacacccccuggga

SEQ ID NO: 356981 - RNA, 25 nt, Human
caguggccucacgccuguaauccca

SEQ ID NO: 356982 - RNA, 25 nt, Human
caguggccucaugccuauaauccca

SEQ ID NO: 356983 - RNA, 32 nt, Human
caguggccuccaggggacuuggcggguccccu

SEQ ID NO: 356984 - RNA, 19 nt, Human
caguggccucuuucagccc

SEQ ID NO: 356985 - RNA, 32 nt, Human
caguggccugaugacacuccugucuuucuggg

SEQ ID NO: 356986 - RNA, 32 nt, Human
caguggccuuccucccuuccuuucacagccgg

SEQ ID NO: 356987 - RNA, 24 nt, Human
caguggccuugguccuuaauccca

SEQ ID NO: 356988 - RNA, 21 nt, Human
caguggccuugucaccaagcu

SEQ ID NO: 356989 - RNA, 32 nt, Human
caguggccuuucucugcucccucucaggguac

SEQ ID NO: 356990 - RNA, 32 nt, Human
caguggccuuucugcuuagcugggccagcucc

SEQ ID NO: 356991 - RNA, 32 nt, Human
caguggccuuuucucccccucaccuucuaagg

SEQ ID NO: 356992 - RNA, 21 nt, Human
caguggcgcacaccuguaauc

SEQ ID NO: 356993 - RNA, 24 nt, Human
caguggcgcacaccuguaauccca

SEQ ID NO: 356994 - RNA, 21 nt, Human
caguggcgcaugccuguaauc

SEQ ID NO: 356995 - RNA, 24 nt, Human
caguggcgcaugccuguaauccca

SEQ ID NO: 356996 - RNA, 32 nt, Human
caguggcggcgucagcgaacacuggacaguaa

SEQ ID NO: 356997 - RNA, 24 nt, Human
caguggcgggcgccuguaguccca

SEQ ID NO: 356998 - RNA, 32 nt, Human
caguggcgugaucccagcuauauuggaaaaga

SEQ ID NO: 356999 - RNA, 24 nt, Human
caguggcgugcgccuguaguccca

SEQ ID NO: 357000 - RNA, 24 nt, Human
caguggcuaaagccuguaauccca

SEQ ID NO: 357001 - RNA, 32 nt, Human
caguggcuaaggaggaaaggggagggcagagg

SEQ ID NO: 357002 - RNA, 32 nt, Human
caguggcuacagugucacaggugguggggacc

SEQ ID NO: 357003 - RNA, 16 nt, Human
caguggcuaugagaug

SEQ ID NO: 357004 - RNA, 24 nt, Human
caguggcucaagccuguaauccca

SEQ ID NO: 357005 - RNA, 24 nt, Human
caguggcucaagccugucauccca

SEQ ID NO: 357006 - RNA, 24 nt, Human
caguggcucacacauguaauccca

SEQ ID NO: 357007 - RNA, 24 nt, Human
caguggcucacacccauaauccca

SEQ ID NO: 357008 - RNA, 24 nt, Human
caguggcucacaccgguaauccca

SEQ ID NO: 357009 - RNA, 22 nt, Human
caguggcucacaccuaauccca

SEQ ID NO: 357010 - RNA, 24 nt, Human
caguggcucacaccuauaauccca

SEQ ID NO: 357011 - RNA, 32 nt, Human
caguggcucacaccuauaaucccaacacuuug

SEQ ID NO: 357012 - RNA, 32 nt, Human
caguggcucacaccuauaaucccagccaagau

SEQ ID NO: 357013 - RNA, 24 nt, Human
caguggcucacaccuauaguccca

SEQ ID NO: 357014 - RNA, 24 nt, Human
caguggcucacaccucuaauccca

SEQ ID NO: 357015 - RNA, 21 nt, Human
caguggcucacaccugcaauc

SEQ ID NO: 357016 - RNA, 24 nt, Human
caguggcucacaccugcaauccca

SEQ ID NO: 357017 - RNA, 24 nt, Human
caguggcucacaccuggaauccca

SEQ ID NO: 357018 - RNA, 22 nt, Human
caguggcucacaccuguaaccc

SEQ ID NO: 357019 - RNA, 24 nt, Human
caguggcucacaccuguaauacca

SEQ ID NO: 357020 - RNA, 21 nt, Human
caguggcucacaccuguaauc

SEQ ID NO: 357021 - RNA, 24 nt, Human
caguggcucacaccuguaauccca

SEQ ID NO: 357022 - RNA, 24 nt, Human
caguggcucacaccuguaauccua

SEQ ID NO: 357023 - RNA, 32 nt, Human
caguggcucacaccuguaauccugcacuuugg

SEQ ID NO: 357024 - RNA, 24 nt, Human
caguggcucacaccuguaaucuca

SEQ ID NO: 357025 - RNA, 32 nt, Human
caguggcucacaccuguaaucugagcauucug

SEQ ID NO: 357026 - RNA, 24 nt, Human
caguggcucacaccuguaguccca

SEQ ID NO: 357027 - RNA, 24 nt, Human
caguggcucacaccuguauuccca

SEQ ID NO: 357028 - RNA, 32 nt, Human
caguggcucacaccuguauucccaacacuuuu

SEQ ID NO: 357029 - RNA, 23 nt, Human
caguggcucacaccugugauccc

SEQ ID NO: 357030 - RNA, 24 nt, Human
caguggcucacaccugugauccca

SEQ ID NO: 357031 - RNA, 24 nt, Human
caguggcucacaccuguggaaucc

SEQ ID NO: 357032 - RNA, 32 nt, Human
caguggcucacaccuguggaaucccagcacuu

SEQ ID NO: 357033 - RNA, 25 nt, Human
caguggcucacaccuuguaauccca

SEQ ID NO: 357034 - RNA, 24 nt, Human
caguggcucacaccuuuaauccca

SEQ ID NO: 357035 - RNA, 24 nt, Human
caguggcucacaccuuuaauccua

SEQ ID NO: 357036 - RNA, 23 nt, Human
caguggcucacacuguaaugcca

SEQ ID NO: 357037 - RNA, 21 nt, Human
caguggcucacacuuauccua

SEQ ID NO: 357038 - RNA, 21 nt, Human
caguggcucacacuuguaacc

SEQ ID NO: 357039 - RNA, 24 nt, Human
caguggcucacacuuguaauccca

SEQ ID NO: 357040 - RNA, 24 nt, Human
caguggcucacaucuguaacccca

SEQ ID NO: 357041 - RNA, 24 nt, Human
caguggcucacaucuguaaucuca

SEQ ID NO: 357042 - RNA, 24 nt, Human
caguggcucacauucguaauccca

SEQ ID NO: 357043 - RNA, 24 nt, Human
caguggcucaccccuguaauccca

SEQ ID NO: 357044 - RNA, 24 nt, Human
caguggcucaccccuguaaucuca

SEQ ID NO: 357045 - RNA, 24 nt, Human
caguggcucaccucuguaauccca

SEQ ID NO: 357046 - RNA, 22 nt, Human
caguggcucaccuguaauccca

SEQ ID NO: 357047 - RNA, 21 nt, Human
caguggcucacgacuguaauu

SEQ ID NO: 357048 - RNA, 24 nt, Human
caguggcucacgacuguaauucca

SEQ ID NO: 357049 - RNA, 24 nt, Human
caguggcucacgccacuaauccca

SEQ ID NO: 357050 - RNA, 21 nt, Human
caguggcucacgccaguaauc

SEQ ID NO: 357051 - RNA, 24 nt, Human
caguggcucacgccaguaauccca

SEQ ID NO: 357052 - RNA, 21 nt, Human
caguggcucacgccuauaauc

SEQ ID NO: 357053 - RNA, 24 nt, Human
caguggcucacgccuauaauccca

SEQ ID NO: 357054 - RNA, 24 nt, Human
caguggcucacgccuauaaucuca

SEQ ID NO: 357055 - RNA, 24 nt, Human
caguggcucacgccuaugauccca

SEQ ID NO: 357056 - RNA, 24 nt, Human
caguggcucacgccuguaacccca

SEQ ID NO: 357057 - RNA, 20 nt, Human
caguggcucacgccuguaau

SEQ ID NO: 357058 - RNA, 24 nt, Human
caguggcucacgccuguaauacca

SEQ ID NO: 357059 - RNA, 21 nt, Human
caguggcucacgccuguaauc

SEQ ID NO: 357060 - RNA, 22 nt, Human
caguggcucacgccuguaaucc

SEQ ID NO: 357061 - RNA, 23 nt, Human
caguggcucacgccuguaauccc

SEQ ID NO: 357062 - RNA, 24 nt, Human
caguggcucacgccuguaauccca

SEQ ID NO: 357063 - RNA, 24 nt, Human
caguggcucacgccuguaauccua

SEQ ID NO: 357064 - RNA, 24 nt, Human
caguggcucacgccuguaauucca

SEQ ID NO: 357065 - RNA, 21 nt, Human
caguggcucacgccuguaguc

SEQ ID NO: 357066 - RNA, 24 nt, Human
caguggcucacgccuguaguccca

SEQ ID NO: 357067 - RNA, 24 nt, Human
caguggcucacgccuguuauccca

SEQ ID NO: 357068 - RNA, 24 nt, Human
caguggcucacgcuuacaguccca

SEQ ID NO: 357069 - RNA, 24 nt, Human
caguggcucacgcuuauaauccca

SEQ ID NO: 357070 - RNA, 21 nt, Human
caguggcucacgcuuguaauc

SEQ ID NO: 357071 - RNA, 24 nt, Human
caguggcucacgcuuguaauccca

SEQ ID NO: 357072 - RNA, 24 nt, Human
caguggcucacgcuuguaaucgca

SEQ ID NO: 357073 - RNA, 24 nt, Human
caguggcucacguauguaauccca

SEQ ID NO: 357074 - RNA, 24 nt, Human
caguggcucacgucuguaauccca

SEQ ID NO: 357075 - RNA, 24 nt, Human
caguggcucacuacucuaauucca

SEQ ID NO: 357076 - RNA, 22 nt, Human
caguggcucacuccuguaaucc

SEQ ID NO: 357077 - RNA, 24 nt, Human
caguggcucacuccuguaauccca

SEQ ID NO: 357078 - RNA, 24 nt, Human
caguggcucacuccuguaauccua

SEQ ID NO: 357079 - RNA, 24 nt, Human
caguggcucacuccuguaguccca

SEQ ID NO: 357080 - RNA, 24 nt, Human
caguggcucaggccuguaauccca

SEQ ID NO: 357081 - RNA, 20 nt, Human
caguggcucauaccuguaau

SEQ ID NO: 357082 - RNA, 21 nt, Human
caguggcucauaccuguaauc

SEQ ID NO: 357083 - RNA, 24 nt, Human
caguggcucauaccuguaauccca

SEQ ID NO: 357084 - RNA, 32 nt, Human
caguggcucauaccuguaaucccagcacuuug

SEQ ID NO: 357085 - RNA, 24 nt, Human
caguggcucauaccuguaaugcca

SEQ ID NO: 357086 - RNA, 32 nt, Human
caguggcucauaccuguaaugccagcacuuug

SEQ ID NO: 357087 - RNA, 24 nt, Human
caguggcucauaccuuuaauccca

SEQ ID NO: 357088 - RNA, 21 nt, Human
caguggcucaucccuguaauu

SEQ ID NO: 357089 - RNA, 24 nt, Human
caguggcucaucccuguaauucca

SEQ ID NO: 357090 - RNA, 24 nt, Human
caguggcucaugccagcaauccua

SEQ ID NO: 357091 - RNA, 24 nt, Human
caguggcucaugccaguuauccca

SEQ ID NO: 357092 - RNA, 24 nt, Human
caguggcucaugcccauaauccca

SEQ ID NO: 357093 - RNA, 24 nt, Human
caguggcucaugcccguaauccca

SEQ ID NO: 357094 - RNA, 21 nt, Human
caguggcucaugcccguaauu

SEQ ID NO: 357095 - RNA, 23 nt, Human
caguggcucaugcccguaauucu

SEQ ID NO: 357096 - RNA, 23 nt, Human
caguggcucaugcccguaauuuc

SEQ ID NO: 357097 - RNA, 21 nt, Human
caguggcucaugccgauaauc

SEQ ID NO: 357098 - RNA, 24 nt, Human
caguggcucaugccgauaauccca

SEQ ID NO: 357099 - RNA, 21 nt, Human
caguggcucaugccuauaauc

SEQ ID NO: 357100 - RNA, 23 nt, Human
caguggcucaugccuauaauccc

SEQ ID NO: 357101 - RNA, 24 nt, Human
caguggcucaugccuauaauccca

SEQ ID NO: 357102 - RNA, 24 nt, Human
caguggcucaugccuauaauccua

SEQ ID NO: 357103 - RNA, 24 nt, Human
caguggcucaugccuauaaucuca

SEQ ID NO: 357104 - RNA, 24 nt, Human
caguggcucaugccuauaaucuua

SEQ ID NO: 357105 - RNA, 21 nt, Human
caguggcucaugccuauaauu

SEQ ID NO: 357106 - RNA, 28 nt, Human
caguggcucaugccuauaauuaauccca

SEQ ID NO: 357107 - RNA, 24 nt, Human
caguggcucaugccuauaauucca

SEQ ID NO: 357108 - RNA, 23 nt, Human
caguggcucaugccuauauuccc

SEQ ID NO: 357109 - RNA, 21 nt, Human
caguggcucaugccugaaauc

SEQ ID NO: 357110 - RNA, 24 nt, Human
caguggcucaugccugaaauccua

SEQ ID NO: 357111 - RNA, 24 nt, Human
caguggcucaugccuggaauccca

SEQ ID NO: 357112 - RNA, 24 nt, Human
caguggcucaugccuguaacccca

SEQ ID NO: 357113 - RNA, 24 nt, Human
caguggcucaugccuguaagccca

SEQ ID NO: 357114 - RNA, 21 nt, Human
caguggcucaugccuguaauc

SEQ ID NO: 357115 - RNA, 22 nt, Human
caguggcucaugccuguaaucc

SEQ ID NO: 357116 - RNA, 24 nt, Human
caguggcucaugccuguaauccca

SEQ ID NO: 357117 - RNA, 24 nt, Human
caguggcucaugccuguaauccua

SEQ ID NO: 357118 - RNA, 24 nt, Human
caguggcucaugccuguaaucgua

SEQ ID NO: 357119 - RNA, 24 nt, Human
caguggcucaugccuguaaucuca

SEQ ID NO: 357120 - RNA, 24 nt, Human
caguggcucaugccuguaaucuua

SEQ ID NO: 357121 - RNA, 21 nt, Human
caguggcucaugccuguaauu

SEQ ID NO: 357122 - RNA, 23 nt, Human
caguggcucaugccuguaauucc

SEQ ID NO: 357123 - RNA, 24 nt, Human
caguggcucaugccuguaauucca

SEQ ID NO: 357124 - RNA, 32 nt, Human
caguggcucaugccuguaauuccaaugugaua

SEQ ID NO: 357125 - RNA, 21 nt, Human
caguggcucaugccuguaguc

SEQ ID NO: 357126 - RNA, 24 nt, Human
caguggcucaugccuguaguccca

SEQ ID NO: 357127 - RNA, 24 nt, Human
caguggcucaugccuguauuccca

SEQ ID NO: 357128 - RNA, 24 nt, Human
caguggcucaugccuguauucuca

SEQ ID NO: 357129 - RNA, 21 nt, Human
caguggcucaugccugugguc

SEQ ID NO: 357130 - RNA, 24 nt, Human
caguggcucaugccugugguccca

SEQ ID NO: 357131 - RNA, 24 nt, Human
caguggcucaugcuuguaauccca

SEQ ID NO: 357132 - RNA, 24 nt, Human
caguggcucaugcuuguaauccua

SEQ ID NO: 357133 - RNA, 21 nt, Human
caguggcucaugucugcaauc

SEQ ID NO: 357134 - RNA, 24 nt, Human
caguggcucaugucugcaauccca

SEQ ID NO: 357135 - RNA, 24 nt, Human
caguggcucauguguguaauccca

SEQ ID NO: 357136 - RNA, 24 nt, Human
caguggcucauuccuguaauccca

SEQ ID NO: 357137 - RNA, 24 nt, Human
caguggcucccaccuauaauccua

SEQ ID NO: 357138 - RNA, 24 nt, Human
caguggcucccaccuguaaucuca

SEQ ID NO: 357139 - RNA, 21 nt, Human
caguggcucccgccuguaauc

SEQ ID NO: 357140 - RNA, 24 nt, Human
caguggcucccgccuguaauccca

SEQ ID NO: 357141 - RNA, 32 nt, Human
caguggcuccgccgcauccucacacugacggg

SEQ ID NO: 357142 - RNA, 20 nt, Human
caguggcuccuauaauccca

SEQ ID NO: 357143 - RNA, 22 nt, Human
caguggcuccucaagccugccu

SEQ ID NO: 357144 - RNA, 22 nt, Human
caguggcucgccuguaauccca

SEQ ID NO: 357145 - RNA, 24 nt, Human
caguggcucgcgccuguaauccca

SEQ ID NO: 357146 - RNA, 24 nt, Human
caguggcucuugccuguaauccca

SEQ ID NO: 357147 - RNA, 21 nt, Human
caguggcucuugucuguaauc

SEQ ID NO: 357148 - RNA, 24 nt, Human
caguggcucuugucuguaauccca

SEQ ID NO: 357149 - RNA, 32 nt, Human
caguggcugaaauccagcauuuuuacauagga

SEQ ID NO: 357150 - RNA, 32 nt, Human
caguggcugaagagccagccucgguggcccag

SEQ ID NO: 357151 - RNA, 32 nt, Human
caguggcugagaauuggauaaagucuugggaa

SEQ ID NO: 357152 - RNA, 32 nt, Human
caguggcugagcucugagaaggcuccaucucc

SEQ ID NO: 357153 - RNA, 24 nt, Human
caguggcugaugccuguaauccca

SEQ ID NO: 357154 - RNA, 32 nt, Human
caguggcugcagcucugaccgucccgccagca

SEQ ID NO: 357155 - RNA, 32 nt, Human
caguggcugcaggcugcccccugccggccaca

SEQ ID NO: 357156 - RNA, 32 nt, Human
caguggcuggagagaagcagaucugugcaacg

SEQ ID NO: 357157 - RNA, 32 nt, Human
caguggcuggggcuggaacagagcagccggcc

SEQ ID NO: 357158 - RNA, 20 nt, Human
caguggcuggggguuaggga

SEQ ID NO: 357159 - RNA, 32 nt, Human
caguggcuguaaucccagcacuuugggaggcc

SEQ ID NO: 357160 - RNA, 24 nt, Human
caguggcuuacaccuguaacccca

SEQ ID NO: 357161 - RNA, 21 nt, Human
caguggcuuacaccuguaauc

SEQ ID NO: 357162 - RNA, 24 nt, Human
caguggcuuacaccuguaauccca

SEQ ID NO: 357163 - RNA, 21 nt, Human
caguggcuuacgccuguaauc

SEQ ID NO: 357164 - RNA, 24 nt, Human
caguggcuuacgccuguaauccca

SEQ ID NO: 357165 - RNA, 24 nt, Human
caguggcuuaugcuuguaauccca

SEQ ID NO: 357166 - RNA, 21 nt, Human
caguggcuuauuccuguaauc

SEQ ID NO: 357167 - RNA, 24 nt, Human
caguggcuuauuccuguaauccca

SEQ ID NO: 357168 - RNA, 32 nt, Human
caguggcuuccagcagaguugccugggauuuc

SEQ ID NO: 357169 - RNA, 32 nt, Human
caguggcuuccucuggggugucaccaagcaag

SEQ ID NO: 357170 - RNA, 21 nt, Human
caguggcuugcaccuguaauc

SEQ ID NO: 357171 - RNA, 24 nt, Human
caguggcuugcaccuguaauccca

SEQ ID NO: 357172 - RNA, 32 nt, Human
caguggcuuggcugacauugccucuuuguccu

SEQ ID NO: 357173 - RNA, 32 nt, Human
caguggcuugggcuggagucacgggggcgguc

SEQ ID NO: 357174 - RNA, 21 nt, Human
caguggcuugugccuguaauc

SEQ ID NO: 357175 - RNA, 24 nt, Human
caguggcuugugccuguaauccca

SEQ ID NO: 357176 - RNA, 24 nt, Human
caguggcuuguuccuguaguccca

SEQ ID NO: 357177 - RNA, 31 nt, Human
caguggcuuuucuugacuugccaaaucagug

SEQ ID NO: 357178 - RNA, 21 nt, Human
caguggcuuuugccuguaauc

SEQ ID NO: 357179 - RNA, 24 nt, Human
caguggcuuuugccuguaauccca

SEQ ID NO: 357180 - RNA, 32 nt, Human
cagugggaaauugcagucucagaggaaggccc

SEQ ID NO: 357181 - RNA, 32 nt, Human
cagugggaacaaggucaagguccuuuugaaac

SEQ ID NO: 357182 - RNA, 32 nt, Human
cagugggacaaacuccagcacagaagccugcg

SEQ ID NO: 357183 - RNA, 32 nt, Human
cagugggacccauucagaguuuacagaugcuu

SEQ ID NO: 357184 - RNA, 32 nt, Human
cagugggacugcuuccuugacgccuuagcuug

SEQ ID NO: 357185 - RNA, 32 nt, Human
cagugggagaccgaggugggcagaucacuuga

SEQ ID NO: 357186 - RNA, 21 nt, Human
cagugggagagaugguggaag

SEQ ID NO: 357187 - RNA, 32 nt, Human
cagugggagaggggacacgcagggccuggcug

SEQ ID NO: 357188 - RNA, 32 nt, Human
cagugggagcacggcccagcuggauuuuggac

SEQ ID NO: 357189 - RNA, 32 nt, Human
cagugggagccaccuccagcugaaugcccagg

SEQ ID NO: 357190 - RNA, 32 nt, Human
cagugggaggggcaggcugacaucuguguuuc

SEQ ID NO: 357191 - RNA, 32 nt, Human
cagugggaggguaccagcagaaagguuaguau

SEQ ID NO: 357192 - RNA, 32 nt, Human
cagugggagucagcacgaucgccacgcccuca

SEQ ID NO: 357193 - RNA, 22 nt, Human
cagugggaguuccuuccagccc

SEQ ID NO: 357194 - RNA, 32 nt, Human
cagugggcaaaucuauugucuuuauuucucau

SEQ ID NO: 357195 - RNA, 32 nt, Human
cagugggcacaucgagagcaaacacaucggag

SEQ ID NO: 357196 - RNA, 32 nt, Human
cagugggcaccaggaccacggagcucagggug

SEQ ID NO: 357197 - RNA, 32 nt, Human
cagugggcagccuaggagugccaagccaugac

SEQ ID NO: 357198 - RNA, 32 nt, Human
cagugggcaggaagaaagagugaggcaaagug

SEQ ID NO: 357199 - RNA, 32 nt, Human
cagugggcagggaagacauaacagauggaagc

SEQ ID NO: 357200 - RNA, 32 nt, Human
cagugggcagggaauccuggagcacuuguucc

SEQ ID NO: 357201 - RNA, 19 nt, Human
cagugggcaggggaccagg

SEQ ID NO: 357202 - RNA, 32 nt, Human
cagugggcaggguauguagcugcuccaagaug

SEQ ID NO: 357203 - RNA, 32 nt, Human
cagugggccccgcugcagcuguguguccuucu

SEQ ID NO: 357204 - RNA, 32 nt, Human
cagugggccugggacaguggcugcucuugacu

SEQ ID NO: 357205 - RNA, 21 nt, Human
cagugggcgccuguaauccca

SEQ ID NO: 357206 - RNA, 32 nt, Human
cagugggcucaauccuccacuacaggucccgg

SEQ ID NO: 357207 - RNA, 19 nt, Human
cagugggcuccuuccagcc

SEQ ID NO: 357208 - RNA, 32 nt, Human
cagugggcuuauuccuccagcuggcuucccac

SEQ ID NO: 357209 - RNA, 32 nt, Human
cagugggcuuguuugcagacugggugaggugg

SEQ ID NO: 357210 - RNA, 32 nt, Human
caguggggaaggcagaggaguaacugugggga

SEQ ID NO: 357211 - RNA, 32 nt, Human
caguggggacacuccucccuccccagugagca

SEQ ID NO: 357212 - RNA, 32 nt, Human
caguggggagaggcccagggacuggggcugga

SEQ ID NO: 357213 - RNA, 32 nt, Human
caguggggagccugggcucugagauucccucc

SEQ ID NO: 357214 - RNA, 32 nt, Human
caguggggcaaggagaaaggagaggugacugc

SEQ ID NO: 357215 - RNA, 32 nt, Human
caguggggcagaggcaguaccugggcaagcug

SEQ ID NO: 357216 - RNA, 32 nt, Human
caguggggcagccccguaccacagccugcccu

SEQ ID NO: 357217 - RNA, 32 nt, Human
caguggggccagacuggcuccuggagcugaca

SEQ ID NO: 357218 - RNA, 32 nt, Human
caguggggcugcagaggcuggggugagccaca

SEQ ID NO: 357219 - RNA, 32 nt, Human
cagugggggaccccucuucuccaaccacucag

SEQ ID NO: 357220 - RNA, 32 nt, Human
cagugggggucagccaggagcccagggaguca

SEQ ID NO: 357221 - RNA, 32 nt, Human
cagugggggugagcgggcacaggcugagaacu

SEQ ID NO: 357222 - RNA, 32 nt, Human
cagugggggugucuguggagugcaugacucag

SEQ ID NO: 357223 - RNA, 32 nt, Human
cagugggguggagggggcagggcguggugagg

SEQ ID NO: 357224 - RNA, 32 nt, Human
cagugggucauggguaguaccagccucaaauu

SEQ ID NO: 357225 - RNA, 32 nt, Human
cagugggucuccugcccccgacuccaacuccc

SEQ ID NO: 357226 - RNA, 32 nt, Human
cagugggucugacuugaggucugugaugugac

SEQ ID NO: 357227 - RNA, 32 nt, Human
cagugggucugucacccucucuccuugaagca

SEQ ID NO: 357228 - RNA, 32 nt, Human
cagugggugaaacugacuuucuuuugguuggg

SEQ ID NO: 357229 - RNA, 32 nt, Human
cagugggugagcugggcugggcuggcuggcau

SEQ ID NO: 357230 - RNA, 32 nt, Human
cagugggugcagacagcccugccuugaggaug

SEQ ID NO: 357231 - RNA, 32 nt, Human
caguggguggagugccagggaggaggaggcac

SEQ ID NO: 357232 - RNA, 32 nt, Human
cagugggugggcagagguuuagaaaggugguu

SEQ ID NO: 357233 - RNA, 32 nt, Human
caguggguggguggggugggguggggcaagug

SEQ ID NO: 357234 - RNA, 32 nt, Human
caguggguggucaggggccugacugaugccca

SEQ ID NO: 357235 - RNA, 32 nt, Human
caguggguuaacaucaguuuuguuuacucauc

SEQ ID NO: 357236 - RNA, 32 nt, Human
caguggguuauaugucucagcccaaguccuug

SEQ ID NO: 357237 - RNA, 32 nt, Human
cagugguaagggagaggggacaccuggccagg

SEQ ID NO: 357238 - RNA, 24 nt, Human
cagugguacaugccuauaguccca

SEQ ID NO: 357239 - RNA, 21 nt, Human
cagugguacaugccuguaauc

SEQ ID NO: 357240 - RNA, 24 nt, Human
cagugguacaugccuguaauccca

SEQ ID NO: 357241 - RNA, 18 nt, Human
cagugguaccaugagaug

SEQ ID NO: 357242 - RNA, 32 nt, Human
cagugguagggagacagccaggagcgguuuuc

SEQ ID NO: 357243 - RNA, 23 nt, Human
cagugguagguugggaaggagau

SEQ ID NO: 357244 - RNA, 32 nt, Human
cagugguagucaggccagugauagugagggac

SEQ ID NO: 357245 - RNA, 32 nt, Human
cagugguauacugaacaccugccccacaaaga

SEQ ID NO: 357246 - RNA, 24 nt, Human
cagugguauauaccuguaguccca

SEQ ID NO: 357247 - RNA, 32 nt, Human
cagugguaugaucaugagcucacugcagccuu

SEQ ID NO: 357248 - RNA, 32 nt, Human
cagugguaugaucucaccuuacugcaaccacc

SEQ ID NO: 357249 - RNA, 32 nt, Human
cagugguaugaucucagcuuacugcaaccucu

SEQ ID NO: 357250 - RNA, 32 nt, Human
caguggucacuguggcacccaggugugggccu

SEQ ID NO: 357251 - RNA, 32 nt, Human
caguggucaugggaaggagcgaaggaaccauc

SEQ ID NO: 357252 - RNA, 32 nt, Human
caguggucauucuuuggccucuccuuggcuuu

SEQ ID NO: 357253 - RNA, 32 nt, Human
caguggucuaauucaacucugugucccagcac

SEQ ID NO: 357254 - RNA, 32 nt, Human
caguggucuuagagagaaggggagacuagaga

SEQ ID NO: 357255 - RNA, 32 nt, Human
caguggugacagcugaggccaugugaguagga

SEQ ID NO: 357256 - RNA, 32 nt, Human
caguggugacauccuucagucccucacaucuc

SEQ ID NO: 357257 - RNA, 32 nt, Human
caguggugagagcucaccacugagcuuccugg

SEQ ID NO: 357258 - RNA, 32 nt, Human
caguggugcaaacacagcucucuccacaaccu

SEQ ID NO: 357259 - RNA, 32 nt, Human
caguggugcaaucacagcucacugcagccucg

SEQ ID NO: 357260 - RNA, 32 nt, Human
caguggugcaaucacagcucacugcagccuug

SEQ ID NO: 357261 - RNA, 32 nt, Human
caguggugcaauccucaacucacugcaaccuc

SEQ ID NO: 357262 - RNA, 24 nt, Human
caguggugcaugccuguaguccca

SEQ ID NO: 357263 - RNA, 32 nt, Human
caguggugcccagggaugugucagcccccagc

SEQ ID NO: 357264 - RNA, 32 nt, Human
caguggugccuguaaucccagcaguuugggag

SEQ ID NO: 357265 - RNA, 26 nt, Human
caguggugcgcaugccuguaguccca

SEQ ID NO: 357266 - RNA, 32 nt, Human
cagugguggaaggcacaccauggcuuccucug

SEQ ID NO: 357267 - RNA, 32 nt, Human
cagugguggcaacuaugccuugccuucuggag

SEQ ID NO: 357268 - RNA, 32 nt, Human
cagugguggccuuccaagaggccaggcaugga

SEQ ID NO: 357269 - RNA, 32 nt, Human
caguggugggaagcuucccaggagaguccuca

SEQ ID NO: 357270 - RNA, 32 nt, Human
caguggugggcccugagcccucagguccccag

SEQ ID NO: 357271 - RNA, 19 nt, Human
cagugguggguggggcagg

SEQ ID NO: 357272 - RNA, 32 nt, Human
caguggugguauccaccacugaggugugcaaa

SEQ ID NO: 357273 - RNA, 32 nt, Human
cagugguguaugauugaaaauuucauucucug

SEQ ID NO: 357274 - RNA, 32 nt, Human
caguggugugaucacagcucacugcagccuca

SEQ ID NO: 357275 - RNA, 32 nt, Human
caguggugugaucacagcucacugcagccucg

SEQ ID NO: 357276 - RNA, 32 nt, Human
caguggugugcugguaaaauguuuaacaacca

SEQ ID NO: 357277 - RNA, 32 nt, Human
caguggugugguuccucgugcaacaaauauga

SEQ ID NO: 357278 - RNA, 32 nt, Human
cagugguguugcagcccccagauguguggcca

SEQ ID NO: 357279 - RNA, 32 nt, Human
cagugguuaccagugaggcaauacuuauuauc

SEQ ID NO: 357280 - RNA, 32 nt, Human
cagugguuacccacgaagcaguacuuauuauc

SEQ ID NO: 357281 - RNA, 32 nt, Human
cagugguuacccacgaggcaguacuuauccau

SEQ ID NO: 357282 - RNA, 32 nt, Human
cauccugcacacggggccgcugggcaggugcc

SEQ ID NO: 357283 - RNA, 19 nt, Human
cauccugcaccugccacua

SEQ ID NO: 357284 - RNA, 32 nt, Human
cauccugcaccuguccaccccaccccaacacc

SEQ ID NO: 357285 - RNA, 22 nt, Human
cauccugcagcuuauuggcuua

SEQ ID NO: 357286 - RNA, 32 nt, Human
cauccugcaguugggccagcugucgcaucuca

SEQ ID NO: 357287 - RNA, 32 nt, Human
cauccugccaccccuagccuugcuggggacgu

SEQ ID NO: 357288 - RNA, 32 nt, Human
cauccugccagcccuggacacaacacccaaca

SEQ ID NO: 357289 - RNA, 32 nt, Human
cauccugcccaacauggugaaaccccguuucu

SEQ ID NO: 357290 - RNA, 19 nt, Human
cauccugcccaggaucucc

SEQ ID NO: 357291 - RNA, 32 nt, Human
cauccugccccuggcugugcucuacaccuuag

SEQ ID NO: 357292 - RNA, 32 nt, Human
cauccugcccucuggcugccucccagcugggc

SEQ ID NO: 357293 - RNA, 32 nt, Human
cauccugcccuugccauccucccaucgaugug

SEQ ID NO: 357294 - RNA, 32 nt, Human
cauccugcggagugaccaggaggaggcugagg

SEQ ID NO: 357295 - RNA, 32 nt, Human
cauccugcugagugcccuguguguaaguccua

SEQ ID NO: 357296 - RNA, 31 nt, Human
cauccugcugcaggugggccugagucgcaga

SEQ ID NO: 357297 - RNA, 32 nt, Human
cauccugcugggagcacgauuccggguguuuc

SEQ ID NO: 357298 - RNA, 32 nt, Human
cauccugcuugcucccugacucccagggcccc

SEQ ID NO: 357299 - RNA, 19 nt, Human
cauccuggaaauuaccuga

SEQ ID NO: 357300 - RNA, 23 nt, Human
cauccuggaaucaaucacacuga

SEQ ID NO: 357301 - RNA, 32 nt, Human
cauccuggacaacaggagugaaacuccgucuc

SEQ ID NO: 357302 - RNA, 32 nt, Human
cauccuggacugggagguggaggcagagcccc

SEQ ID NO: 357303 - RNA, 32 nt, Human
cauccuggagacaagguuggggagacaaacag

SEQ ID NO: 357304 - RNA, 32 nt, Human
cauccuggagcagcaccucacccucacuugcc

SEQ ID NO: 357305 - RNA, 32 nt, Human
cauccuggagcagcacugcacccucacuagcc

SEQ ID NO: 357306 - RNA, 32 nt, Human
cauccuggaggugaagguugcagugagccaag

SEQ ID NO: 357307 - RNA, 32 nt, Human
cauccuggauaacacggagaaaccccggcgga

SEQ ID NO: 357308 - RNA, 32 nt, Human
cauccuggcaaacauggugaaaccccaucucu

SEQ ID NO: 357309 - RNA, 32 nt, Human
cauccuggcaugaccugcaacuccagguggug

SEQ ID NO: 357310 - RNA, 32 nt, Human
cauccuggccaacacagugaaaccccaucugu

SEQ ID NO: 357311 - RNA, 32 nt, Human
cauccuggccaacacagugaaaccccaugucu

SEQ ID NO: 357312 - RNA, 32 nt, Human
cauccuggccaacacggugaaaccccaucucu

SEQ ID NO: 357313 - RNA, 32 nt, Human
cauccuggccaacacggugaaaccccgucucu

SEQ ID NO: 357314 - RNA, 32 nt, Human
cauccuggccaacauagugaaaccccgucuga

SEQ ID NO: 357315 - RNA, 32 nt, Human
cauccuggccaacaucgugaaaccccaucucu

SEQ ID NO: 357316 - RNA, 32 nt, Human
cauccuggccaacaugaugaaaccccgucucu

SEQ ID NO: 357317 - RNA, 32 nt, Human
cauccuggccaacaugaugaaacccuaucucu

SEQ ID NO: 357318 - RNA, 32 nt, Human
cauccuggccaacauggcaaaacccccaucuc

SEQ ID NO: 357319 - RNA, 32 nt, Human
cauccuggccaacauggcgaaaccccgucucu

SEQ ID NO: 357320 - RNA, 32 nt, Human
cauccuggccaacauggggaaacuccgucucu

SEQ ID NO: 357321 - RNA, 32 nt, Human
cauccuggccaacauggugaaaccacauuucu

SEQ ID NO: 357322 - RNA, 32 nt, Human
cauccuggccaacauggugaaacccagucucu

SEQ ID NO: 357323 - RNA, 32 nt, Human
cauccuggccaacauggugaaaccccacgucu

SEQ ID NO: 357324 - RNA, 32 nt, Human
cauccuggccaacauggugaaaccccaucucu

SEQ ID NO: 357325 - RNA, 32 nt, Human
cauccuggccaacauggugaaaccccaucugu

SEQ ID NO: 357326 - RNA, 32 nt, Human
cauccuggccaacauggugaaaccccaugucu

SEQ ID NO: 357327 - RNA, 32 nt, Human
cauccuggccaacauggugaaaccccauuucu

SEQ ID NO: 357328 - RNA, 32 nt, Human
cauccuggccaacauggugaaaccccgucucc

SEQ ID NO: 357329 - RNA, 32 nt, Human
cauccuggccaacauggugaaaccccgucucu

SEQ ID NO: 357330 - RNA, 32 nt, Human
cauccuggccaacauggugaaaccccgucugu

SEQ ID NO: 357331 - RNA, 32 nt, Human
cauccuggccaacauggugaaacccugucucu

SEQ ID NO: 357332 - RNA, 32 nt, Human
cauccuggccaacauggugaaacccugucugu

SEQ ID NO: 357333 - RNA, 32 nt, Human
cauccuggccaacauggugaaaccucaucucu

SEQ ID NO: 357334 - RNA, 32 nt, Human
cauccuggccaacauggugaaaccucgucucu

SEQ ID NO: 357335 - RNA, 32 nt, Human
cauccuggccaacauggugaaaccugucucua

SEQ ID NO: 357336 - RNA, 32 nt, Human
cauccuggccaacauggugaaaccuugucuac

SEQ ID NO: 357337 - RNA, 32 nt, Human
cauccuggccaacauggugaaacgccaucucu

SEQ ID NO: 357338 - RNA, 32 nt, Human
cauccuggccaacauggugaacaccguccccc

SEQ ID NO: 357339 - RNA, 32 nt, Human
cauccuggccaacauggugacaccccgucucu

SEQ ID NO: 357340 - RNA, 32 nt, Human
cauccuggccaacauuguaaaaccccaucucu

SEQ ID NO: 357341 - RNA, 32 nt, Human
cauccuggccaacguggugaaaccccaucucu

SEQ ID NO: 357342 - RNA, 32 nt, Human
cauccuggccaacguggugaaaccccgucucu

SEQ ID NO: 357343 - RNA, 32 nt, Human
cauccuggccgugcucagucaucugccagcug

SEQ ID NO: 357344 - RNA, 32 nt, Human
cauccuggcgaacauggugaaaccccaucucu

SEQ ID NO: 357345 - RNA, 32 nt, Human
cauccuggcgcccauuuugcaggucaguugcu

SEQ ID NO: 357346 - RNA, 32 nt, Human
cauccuggcuaacaaggugaaaccccgucucu

SEQ ID NO: 357347 - RNA, 32 nt, Human
cauccuggcuaacacagugaaaccccaucucu

SEQ ID NO: 357348 - RNA, 32 nt, Human
cauccuggcuaacacgaugaaaccccgucucu

SEQ ID NO: 357349 - RNA, 32 nt, Human
cauccuggcuaacacggcgaaaccccgucucu

SEQ ID NO: 357350 - RNA, 32 nt, Human
cauccuggcuaacacgguaaaaccccaucucu

SEQ ID NO: 357351 - RNA, 22 nt, Human
cauccuggcuaacacggugaaa

SEQ ID NO: 357352 - RNA, 32 nt, Human
cauccuggcuaacacggugaaaccccaccucu

SEQ ID NO: 357353 - RNA, 32 nt, Human
cauccuggcuaacacggugaaaccccaucucc

SEQ ID NO: 357354 - RNA, 32 nt, Human
cauccuggcuaacacggugaaaccccaucucu

SEQ ID NO: 357355 - RNA, 32 nt, Human
cauccuggcuaacacggugaaaccccauuucc

SEQ ID NO: 357356 - RNA, 32 nt, Human
cauccuggcuaacacggugaaaccccgucucu

SEQ ID NO: 357357 - RNA, 32 nt, Human
cauccuggcuaacacggugaaaccccgucuuu

SEQ ID NO: 357358 - RNA, 32 nt, Human
cauccuggcuaacacggugaaaccccuuaucu

SEQ ID NO: 357359 - RNA, 32 nt, Human
cauccuggcuaacagggugaaaccccaucgcu

SEQ ID NO: 357360 - RNA, 32 nt, Human
cauccuggcuaacauggugaaaccccaucucc

SEQ ID NO: 357361 - RNA, 32 nt, Human
cauccuggcuaacauggugaaaccccaucucu

SEQ ID NO: 357362 - RNA, 32 nt, Human
cauccuggcuaacauggugaaaccccaugucu

SEQ ID NO: 357363 - RNA, 32 nt, Human
cauccuggcuaacauggugaaacccccgucuc

SEQ ID NO: 357364 - RNA, 32 nt, Human
cauccuggcuaacauggugaaacccccguuuc

SEQ ID NO: 357365 - RNA, 32 nt, Human
cauccuggcuaacauggugaaaccccgccucu

SEQ ID NO: 357366 - RNA, 32 nt, Human
cauccuggcuaacauggugaaaccccgucucu

SEQ ID NO: 357367 - RNA, 32 nt, Human
cauccuggcuaacauggugaaaccccgucugu

SEQ ID NO: 357368 - RNA, 32 nt, Human
cauccuggcuaacguggugaaaccccaucucu

SEQ ID NO: 357369 - RNA, 32 nt, Human
cauccuggcuaacguggugaaaccccgucccu

SEQ ID NO: 357370 - RNA, 32 nt, Human
cauccuggcuaacuuggugaaaccccgucucu

SEQ ID NO: 357371 - RNA, 32 nt, Human
cauccuggcuaauacagugaaaccccaugucu

SEQ ID NO: 357372 - RNA, 32 nt, Human
cauccuggcuaauguggugaaaccccgucucu

SEQ ID NO: 357373 - RNA, 32 nt, Human
cauccuggcuaccagauggaaccuucucuucu

SEQ ID NO: 357374 - RNA, 32 nt, Human
cauccuggcuagcauggugaaaccccgucucu

SEQ ID NO: 357375 - RNA, 32 nt, Human
cauccuggcucauacggugaaaccccaucucc

SEQ ID NO: 357376 - RNA, 32 nt, Human
cauccuggcucugucauuuacuuacagaaaug

SEQ ID NO: 357377 - RNA, 32 nt, Human
cauccugggaaacuggguaguucaucugacca

SEQ ID NO: 357378 - RNA, 32 nt, Human
cauccugggcaacauggcgaaacccuaucucu

SEQ ID NO: 357379 - RNA, 32 nt, Human
cauccugggcaauauggcaaaaccccaucuuu

SEQ ID NO: 357380 - RNA, 32 nt, Human
cauccugggcugggcugccuucuucuacaguu

SEQ ID NO: 357381 - RNA, 32 nt, Human
cauccugggcugugcugaggcagugcugucuc

SEQ ID NO: 357382 - RNA, 32 nt, Human
cauccugggcuuuuccuacugugucuuguuac

SEQ ID NO: 357383 - RNA, 31 nt, Human
cauccuggggucgcugggccugcuugugucc

SEQ ID NO: 357384 - RNA, 32 nt, Human
cauccugggugcccagggcagagcaggcuuug

SEQ ID NO: 357385 - RNA, 32 nt, Human
cauccugggugggacagagcaggacaaugcaa

SEQ ID NO: 357386 - RNA, 32 nt, Human
cauccuggguuauuuuacaaacucauggauag

SEQ ID NO: 357387 - RNA, 32 nt, Human
cauccuggucccacuccugcagcugcuggugc

SEQ ID NO: 357388 - RNA, 20 nt, Human
cauccugguggccagcccac

SEQ ID NO: 357389 - RNA, 32 nt, Human
cauccugguguuacugaaaaacaggugugauc

SEQ ID NO: 357390 - RNA, 32 nt, Human
cauccugguuaacacggugaaaccccgacucu

SEQ ID NO: 357391 - RNA, 32 nt, Human
cauccugguuccacucuggccugggccugagg

SEQ ID NO: 357392 - RNA, 32 nt, Human
cauccuguaggacccaguggaaccugacagag

SEQ ID NO: 357393 - RNA, 32 nt, Human
cauccugucagcacagucuucucugaagugcu

SEQ ID NO: 357394 - RNA, 26 nt, Human
cauccugucccacccugcccacuuca

SEQ ID NO: 357395 - RNA, 18 nt, Human
cauccugucccucccuca

SEQ ID NO: 357396 - RNA, 32 nt, Human
cauccugucuaacacggugaaaccccaucucu

SEQ ID NO: 357397 - RNA, 32 nt, Human
cauccugucuucuucugugcugccugguuuga

SEQ ID NO: 357398 - RNA, 32 nt, Human
cauccugugcagcugacacacagcuaaggagc

SEQ ID NO: 357399 - RNA, 32 nt, Human
cauccugugcaguuuacaacaaaaggaagcga

SEQ ID NO: 357400 - RNA, 32 nt, Human
cauccugugccucaccacagcuugcuuagagc

SEQ ID NO: 357401 - RNA, 32 nt, Human
cauccuguggagcccacuccuggcagacgccg

SEQ ID NO: 357402 - RNA, 32 nt, Human
cauccuguggaggccaggcucagagccacccc

SEQ ID NO: 357403 - RNA, 32 nt, Human
cauccuguggugagcuagcggauucccugcuu

SEQ ID NO: 357404 - RNA, 21 nt, Human
cauccuguguacccuugucaa

SEQ ID NO: 357405 - RNA, 23 nt, Human
cauccuguguccugggacugagg

SEQ ID NO: 357406 - RNA, 32 nt, Human
cauccuguuccuuggauuggacuucacuaagc

SEQ ID NO: 357407 - RNA, 32 nt, Human
cauccuuacaaaccacagcaugcccggcuccu

SEQ ID NO: 357408 - RNA, 32 nt, Human
cauccuuaccaccacaccacacgcacacucca

SEQ ID NO: 357409 - RNA, 32 nt, Human
cauccuuacuaaaaauacaaaaauuagccagg

SEQ ID NO: 357410 - RNA, 32 nt, Human
cauccuuagacaccugcucuguaacugucuuu

SEQ ID NO: 357411 - RNA, 32 nt, Human
cauccuuaggauaaauccuacuuuuuaaugug

SEQ ID NO: 357412 - RNA, 19 nt, Human
cauccuuauuucccugcca

SEQ ID NO: 357413 - RNA, 32 nt, Human
cauccuucaauccagucaagcugacacucagc

SEQ ID NO: 357414 - RNA, 32 nt, Human
cauccuucccacucugucgagccugggggcug

SEQ ID NO: 357415 - RNA, 18 nt, Human
cauccuuccccagcacca

SEQ ID NO: 357416 - RNA, 32 nt, Human
cauccuuccugaccaccugacugcggaaacau

SEQ ID NO: 357417 - RNA, 32 nt, Human
cauccuuccugccuccugccccaaaccccggg

SEQ ID NO: 357418 - RNA, 32 nt, Human
cauccuucucauuuucuuuugcugcugccaug

SEQ ID NO: 357419 - RNA, 32 nt, Human
cauccuucugggcccagcuaggagaaugaagu

SEQ ID NO: 357420 - RNA, 32 nt, Human
cauccuugaaauauaaaugaaaggaagggaag

SEQ ID NO: 357421 - RNA, 32 nt, Human
cauccuugccaagccuccaccacuaggucagu

SEQ ID NO: 357422 - RNA, 32 nt, Human
cauccuugcccagccgguguggugcuugugug

SEQ ID NO: 357423 - RNA, 32 nt, Human
cauccuugccuguagcccguagucacuugugc

SEQ ID NO: 357424 - RNA, 18 nt, Human
cauccuuggaccuucaca

SEQ ID NO: 357425 - RNA, 18 nt, Human
cauccuuggagucuccuc

SEQ ID NO: 357426 - RNA, 32 nt, Human
cauccuuggcugcuugcagggccacuguccag

SEQ ID NO: 357427 - RNA, 32 nt, Human
cauccuuguuuucccuccauccuucuuuccuu

SEQ ID NO: 357428 - RNA, 18 nt, Human
cauccuuuauucucuaua

SEQ ID NO: 357429 - RNA, 32 nt, Human
cauccuuuccccaucccugccuccugccccug

SEQ ID NO: 357430 - RNA, 32 nt, Human
cauccuuucccccuaaugaccgaggccagcaa

SEQ ID NO: 357431 - RNA, 32 nt, Human
cauccuuucuacugcuuuugaggcccucccuc

SEQ ID NO: 357432 - RNA, 32 nt, Human
cauccuuucucucgccccuccuacccgcagcu

SEQ ID NO: 357433 - RNA, 32 nt, Human
cauccuuucugccucgccaaggucucuuauac

SEQ ID NO: 357434 - RNA, 32 nt, Human
cauccuuucugucagcauggaucaagccccua

SEQ ID NO: 357435 - RNA, 32 nt, Human
cauccuuucuucucagucccuaccuacuguuu

SEQ ID NO: 357436 - RNA, 32 nt, Human
cauccuuugcuuccuuccuuccuuccuucuuc

SEQ ID NO: 357437 - RNA, 32 nt, Human
cauccuuugguccaaagcaucuggaagaggaa

SEQ ID NO: 357438 - RNA, 32 nt, Human
caucgaacaucaaccaaugucauggcacagca

SEQ ID NO: 357439 - RNA, 32 nt, Human
caucgaagccccguggggccuccagagaccac

SEQ ID NO: 357440 - RNA, 32 nt, Human
caucgaagccucagagagugggagacuguccc

SEQ ID NO: 357441 - RNA, 32 nt, Human
caucgaauacuaccuuugugugccucagggcc

SEQ ID NO: 357442 - RNA, 32 nt, Human
caucgacagcacaccgugccgacagugguaag

SEQ ID NO: 357443 - RNA, 32 nt, Human
caucgacauaccaacuacaggccagguggacc

SEQ ID NO: 357444 - RNA, 32 nt, Human
caucgaccacauccccagcccuggggacuuau

SEQ ID NO: 357445 - RNA, 32 nt, Human
caucgaccaccagacacuaacaacccucuccc

SEQ ID NO: 357446 - RNA, 32 nt, Human
caucgagaaucugguugcuuucuuggagacca

SEQ ID NO: 357447 - RNA, 32 nt, Human
caucgagcugcuggaucccacagccagccggc

SEQ ID NO: 357448 - RNA, 32 nt, Human
caucgaggagggagggcagacggaggcccgag

SEQ ID NO: 357449 - RNA, 32 nt, Human
caucgaggccacacucagcacuccaggauccc

SEQ ID NO: 357450 - RNA, 32 nt, Human
caucgaggugaccugggcugagucccgggagu

SEQ ID NO: 357451 - RNA, 32 nt, Human
caucgagugacacugggccauccaggcggcuc

SEQ ID NO: 357452 - RNA, 32 nt, Human
caucgauauacauuuauuuacacucuugauuc

SEQ ID NO: 357453 - RNA, 32 nt, Human
caucgaugcugccccgggcuaccuggcugcuc

SEQ ID NO: 357454 - RNA, 32 nt, Human
caucgauucagaaaucauauaauagcuggugg

SEQ ID NO: 357455 - RNA, 32 nt, Human
caucgauuucaccaagcgugggcugcucuucu

SEQ ID NO: 357456 - RNA, 32 nt, Human
caucgcaccaauauugcagacuuggaaggaag

SEQ ID NO: 357457 - RNA, 32 nt, Human
caucgcaccugagguggucaugugggggcgca

SEQ ID NO: 357458 - RNA, 32 nt, Human
caucgcacuccagacuacagccugggugacag

SEQ ID NO: 357459 - RNA, 21 nt, Human
caucgcacuccagccugggca

SEQ ID NO: 357460 - RNA, 28 nt, Human
caucgccaaaggauggaaguaauuugaa

SEQ ID NO: 357461 - RNA, 32 nt, Human
caucgccaaccugggugucauuucucagaacu

SEQ ID NO: 357462 - RNA, 32 nt, Human
caucgccaagcccccacccuaggaaauggguc

SEQ ID NO: 357463 - RNA, 15 nt, Human
caucgccacccagaa

SEQ ID NO: 357464 - RNA, 32 nt, Human
caucgccauccagccucgaagccaacaggacu

SEQ ID NO: 357465 - RNA, 32 nt, Human
caucgccgcacacccacccuccugcucauggg

SEQ ID NO: 357466 - RNA, 32 nt, Human
caucgccgcggggcggaggcgacagugucuag

SEQ ID NO: 357467 - RNA, 32 nt, Human
caucgccugcucccuccacacggcccuugggg

SEQ ID NO: 357468 - RNA, 32 nt, Human
caucgccuucccugccucuccaggacagagca

SEQ ID NO: 357469 - RNA, 32 nt, Human
caucgccuucugguuguugaagacagcacaga

SEQ ID NO: 357470 - RNA, 32 nt, Human
caucgccuuugagcuccugggcaagaacaccu

SEQ ID NO: 357471 - RNA, 32 nt, Human
caucgcgcacacuguauguacauacuggcaac

SEQ ID NO: 357472 - RNA, 32 nt, Human
caucgcgccacugcacuccagccugggcgaca

SEQ ID NO: 357473 - RNA, 32 nt, Human
caucgcgccacugcacucuagccugggugaca

SEQ ID NO: 357474 - RNA, 32 nt, Human
caucgcgccacugcacuucagccuggacaaca

SEQ ID NO: 357475 - RNA, 32 nt, Human
caucgcgccauugcacuccagccugggugacg

SEQ ID NO: 357476 - RNA, 19 nt, Human
caucgcggccuggccgggg

SEQ ID NO: 357477 - RNA, 32 nt, Human
caucgcuacuaaaaaugcaaaaauuagcuggg

SEQ ID NO: 357478 - RNA, 32 nt, Human
caucgcugagagcccccgccuccugagacugg

SEQ ID NO: 357479 - RNA, 32 nt, Human
caucgcugcaaaggaaagaacaaccuuaaaac

SEQ ID NO: 357480 - RNA, 32 nt, Human
caucgcugccuucugcaccuuccucgugcugg

SEQ ID NO: 357481 - RNA, 18 nt, Human
caucgcugcggcuggcca

SEQ ID NO: 357482 - RNA, 32 nt, Human
caucgcuggcuuuuccccuuguguucugagaa

SEQ ID NO: 357483 - RNA, 32 nt, Human
caucgcugggaugggccuggccuaaggcaucc

SEQ ID NO: 357484 - RNA, 32 nt, Human
caucgcuuaccuuggaaaggugggaagcuggc

SEQ ID NO: 357485 - RNA, 32 nt, Human
caucgcuucccaggaagacuuguugcagguag

SEQ ID NO: 357486 - RNA, 32 nt, Human
caucggaaaggaugccugguuugcuuuuaugu

SEQ ID NO: 357487 - RNA, 32 nt, Human
caucggaaauacugcuucucccaccccauccc

SEQ ID NO: 357488 - RNA, 32 nt, Human
caucggaaucacccgaucacagacgaguggcc

SEQ ID NO: 357489 - RNA, 32 nt, Human
caucggacccaggaggggacugguugguguau

SEQ ID NO: 357490 - RNA, 32 nt, Human
caucggaggugccgcagaggaggcaggaaaga

SEQ ID NO: 357491 - RNA, 32 nt, Human
caucggaggugggcgggguugcagugacuggu

SEQ ID NO: 357492 - RNA, 32 nt, Human
caucggcagagccuugagaaguuucauuccuu

SEQ ID NO: 357493 - RNA, 32 nt, Human
caucggcaucccggggagggcccgggagccuc

SEQ ID NO: 357494 - RNA, 32 nt, Human
caucggcgcgcugcccacaccuccaggcgacc

SEQ ID NO: 357495 - RNA, 32 nt, Human
caucggcuacagaaacagccuaaguuuacagg

SEQ ID NO: 357496 - RNA, 32 nt, Human
caucggcuugcccaggcuccagccucuccaag

SEQ ID NO: 357497 - RNA, 32 nt, Human
caucgggaugguggaggcugugaaggccguga

SEQ ID NO: 357498 - RNA, 32 nt, Human
caucggggaggggugcuccugaggccaggcau

SEQ ID NO: 357499 - RNA, 32 nt, Human
caucggggcugugcuggggcuuggggagggga

SEQ ID NO: 357500 - RNA, 32 nt, Human
caucggucauggucucgucccauuccacacca

SEQ ID NO: 357501 - RNA, 32 nt, Human
caucggucauuuugaaguagguguuugaugcc

SEQ ID NO: 357502 - RNA, 32 nt, Human
caucggugccuccccgaccuugcugacuaggc

SEQ ID NO: 357503 - RNA, 32 nt, Human
caucgguugcccaaggcuguaaguagugaugg

SEQ ID NO: 357504 - RNA, 18 nt, Human
caucguacaccagcacca

SEQ ID NO: 357505 - RNA, 32 nt, Human
caucguaccacugcacuccagccuggaugaca

SEQ ID NO: 357506 - RNA, 32 nt, Human
caucguacuccaggauaagaaacaguaacaug

SEQ ID NO: 357507 - RNA, 32 nt, Human
caucguagacuucauaguggagagaacccuua

SEQ ID NO: 357508 - RNA, 31 nt, Human
caucgucacagcugagaacgaggugggcucc

SEQ ID NO: 357509 - RNA, 31 nt, Human
caucgucacagcuggaacgaggugggcuccg

SEQ ID NO: 357510 - RNA, 32 nt, Human
caucgucauccuggagcuucaauggggccuug

SEQ ID NO: 357511 - RNA, 32 nt, Human
caucgucaugugaucaucaccuaagaacuaga

SEQ ID NO: 357512 - RNA, 32 nt, Human
caucguccaguucugaccauggacucgcagcc

SEQ ID NO: 357513 - RNA, 32 nt, Human
caucguccgccucagccagaaccuucuggucc

SEQ ID NO: 357514 - RNA, 25 nt, Human
caucguccgugaguuuuccaagcug

SEQ ID NO: 357515 - RNA, 32 nt, Human
caucgucuccauuucagaagaagaaccaaaac

SEQ ID NO: 357516 - RNA, 32 nt, Human
caucgucucugccacuccugacccagcccuga

SEQ ID NO: 357517 - RNA, 32 nt, Human
caucgucugcuauucauguguugaguuuuaua

SEQ ID NO: 357518 - RNA, 24 nt, Human
caucgugaaaccccaucucuacua

SEQ ID NO: 357519 - RNA, 32 nt, Human
caucgugcaucacucucccuucugccuccuuc

SEQ ID NO: 357520 - RNA, 21 nt, Human
caucgugccagagccuggggc

SEQ ID NO: 357521 - RNA, 32 nt, Human
caucgugcccagcuaauuuuuauauuuuuagu

SEQ ID NO: 357522 - RNA, 32 nt, Human
caucgugccuggcuaguuuuuguguuuuuagu

SEQ ID NO: 357523 - RNA, 32 nt, Human
caucgugcucaucgacagcacaccgugccgac

SEQ ID NO: 357524 - RNA, 32 nt, Human
caucguggagcugugguggggccugcagucau

SEQ ID NO: 357525 - RNA, 32 nt, Human
caucguggcugcagagugccaggaccaccggc

SEQ ID NO: 357526 - RNA, 32 nt, Human
caucgugggaaaggugguaaaggaggaugaug

SEQ ID NO: 357527 - RNA, 32 nt, Human
caucgugggcuggaaagggccccugguggucu

SEQ ID NO: 357528 - RNA, 32 nt, Human
caucguggugggugccuguaaucccagcuauu

SEQ ID NO: 357529 - RNA, 32 nt, Human
caucgugucucaucuugcuguuaucucuagcu

SEQ ID NO: 357530 - RNA, 32 nt, Human
caucgugugcagggcuuccggcggcguggggg

SEQ ID NO: 357531 - RNA, 32 nt, Human
caucgugugccaccccugccccuccccgaucc

SEQ ID NO: 357532 - RNA, 32 nt, Human
caucguguuccucacaaacuggagucuccacc

SEQ ID NO: 357533 - RNA, 32 nt, Human
caucguuaugaaaauauugcuaugagauaaua

SEQ ID NO: 357534 - RNA, 32 nt, Human
caucguucacagacuucuaggucuguaagcuc

SEQ ID NO: 357535 - RNA, 32 nt, Human
caucguucauaccuugcaguucaucagugaac

SEQ ID NO: 357536 - RNA, 32 nt, Human
caucguucggggcgcaguccucuccccggcug

SEQ ID NO: 357537 - RNA, 32 nt, Human
caucguugcuaucaccaguaccucucagcuua

SEQ ID NO: 357538 - RNA, 32 nt, Human
caucguuuacucugugauguaugagcacucua

SEQ ID NO: 357539 - RNA, 32 nt, Human
caucguuucucaggaaguucaccagaagcuau

SEQ ID NO: 357540 - RNA, 32 nt, Human
caucguuugcauccugcacaggcacaagcggc

SEQ ID NO: 357541 - RNA, 32 nt, Human
caucguuuuccugccuugaccccaccaucauc

SEQ ID NO: 357542 - RNA, 32 nt, Human
caucuaaaaagcaauacucugauaauuuggau

SEQ ID NO: 357543 - RNA, 32 nt, Human
caucuaaagagcccucugggccuguguugcug

SEQ ID NO: 357544 - RNA, 32 nt, Human
caucuaaagcaugaaaccuagcuccucuacac

SEQ ID NO: 357545 - RNA, 22 nt, Human
caucuaaaggcuuagagaguua

SEQ ID NO: 357546 - RNA, 32 nt, Human
caucuaagaaaauuuacuguaacuucuuaauc

SEQ ID NO: 357547 - RNA, 24 nt, Human
caucuaagcauuccacacugcagg

SEQ ID NO: 357548 - RNA, 32 nt, Human
caucuaagcccugacccuagccagggacuccc

SEQ ID NO: 357549 - RNA, 32 nt, Human
caucuaaggcaaaacuggcacauuuguucugc

SEQ ID NO: 357550 - RNA, 32 nt, Human
caucuaaguguguacacacaugguguacaccc

SEQ ID NO: 357551 - RNA, 32 nt, Human
caucuaaucgagaccuuuaauuuuucggggag

SEQ ID NO: 357552 - RNA, 32 nt, Human
caucuacacccccaagcacacacacauggucc

SEQ ID NO: 357553 - RNA, 32 nt, Human
caucuacacuaaaaauacaaaaaguuagacag

SEQ ID NO: 357554 - RNA, 32 nt, Human
caucuacagccaccugccugcuccuaugugcc

SEQ ID NO: 357555 - RNA, 32 nt, Human
caucuacagccuuuggaaacauggacaaauuu

SEQ ID NO: 357556 - RNA, 32 nt, Human
caucuacagugugccaagcacaugguucaucu

SEQ ID NO: 357557 - RNA, 32 nt, Human
caucuacaguugugccauuccccagccacugc

SEQ ID NO: 357558 - RNA, 32 nt, Human
caucuacaucucuauacuguacacucacccau

SEQ ID NO: 357559 - RNA, 32 nt, Human
caucuacaucuggcaaaagccaaagguuugga

SEQ ID NO: 357560 - RNA, 24 nt, Human
caucuacauuuuugggacucggga

SEQ ID NO: 357561 - RNA, 32 nt, Human
caucuaccaggguauucucucccaccucuuuc

SEQ ID NO: 357562 - RNA, 32 nt, Human
caucuacccaggcuggggcuucugggacaggc

SEQ ID NO: 357563 - RNA, 32 nt, Human
caucuaccgagccaggacacccccuauuauca

SEQ ID NO: 357564 - RNA, 24 nt, Human
caucuacuaagaaauucagcaccu

SEQ ID NO: 357565 - RNA, 32 nt, Human
caucuacuccacuguucagacaccuccuaacc

SEQ ID NO: 357566 - RNA, 32 nt, Human
caucuacugcgugcccuugccaaacagcugug

SEQ ID NO: 357567 - RNA, 32 nt, Human
caucuagaaacauuacaccacacacaccguca

SEQ ID NO: 357568 - RNA, 32 nt, Human
caucuagaaacucaagucugggcugcuuaucu

SEQ ID NO: 357569 - RNA, 32 nt, Human
caucuagaauaaaccaggccucuggcuaccac

SEQ ID NO: 357570 - RNA, 32 nt, Human
caucuagaucgucguggcgaagccgacucucc

SEQ ID NO: 357571 - RNA, 32 nt, Human
caucuagauggaagcuggggcuuccuuccuuu

SEQ ID NO: 357572 - RNA, 32 nt, Human
caucuagcaccuucucuaccucccagggucuu

SEQ ID NO: 357573 - RNA, 32 nt, Human
caucuagcaggaaaggagagggagcuuucccc

SEQ ID NO: 357574 - RNA, 32 nt, Human
caucuagccaccccagccuggccacgcagcca

SEQ ID NO: 357575 - RNA, 28 nt, Human
caucuagcgggugcugccugcaucucuu

SEQ ID NO: 357576 - RNA, 32 nt, Human
caucuagcuagcaauugcgaccuuaauuuaac

SEQ ID NO: 357577 - RNA, 32 nt, Human
caucuaggagaggggagggcagagggggugag

SEQ ID NO: 357578 - RNA, 32 nt, Human
caucuaggccaacguggugaaaccccgucacu

SEQ ID NO: 357579 - RNA, 32 nt, Human
caucuaggcccagcugaacccagguuaggggc

SEQ ID NO: 357580 - RNA, 20 nt, Human
caucuaggcuaggugcagug

SEQ ID NO: 357581 - RNA, 21 nt, Human
caucuaggcuggagugcaaug

SEQ ID NO: 357582 - RNA, 21 nt, Human
caucuaggcuggagugcagug

SEQ ID NO: 357583 - RNA, 32 nt, Human
caucuaguugcaggaaaacaagcugagugagg

SEQ ID NO: 357584 - RNA, 32 nt, Human
caucuauaaagugacaguaaccccuaccucac

SEQ ID NO: 357585 - RNA, 23 nt, Human
caucuauacacccuguaugucca

SEQ ID NO: 357586 - RNA, 32 nt, Human
caucuauacagaaaauacaaaaauuagccagg

SEQ ID NO: 357587 - RNA, 32 nt, Human
caucuauacccaaggaguccugugauuugagc

SEQ ID NO: 357588 - RNA, 32 nt, Human
caucuauagagaucuacuuuucuccuaugucu

SEQ ID NO: 357589 - RNA, 21 nt, Human
caucuauaggcaagaaguguu

SEQ ID NO: 357590 - RNA, 32 nt, Human
caucuauagggagggcugggggcgggaaaaga

SEQ ID NO: 357591 - RNA, 32 nt, Human
caucuauauuaaaaauaacaaaaauuagccag

SEQ ID NO: 357592 - RNA, 32 nt, Human
caucuauauuagcaacagauucucagaguaaa

SEQ ID NO: 357593 - RNA, 32 nt, Human
caucuaucaagcaacacagccccuuaucccag

SEQ ID NO: 357594 - RNA, 32 nt, Human
caucuaucacuauccugguggaacugguggga

SEQ ID NO: 357595 - RNA, 32 nt, Human
caucuaugcucuugguuggugcuggcugggau

SEQ ID NO: 357596 - RNA, 32 nt, Human
caucuauggagagaggagagaugcuacccgga

SEQ ID NO: 357597 - RNA, 32 nt, Human
caucuauguacagagccuugcagagaaacaca

SEQ ID NO: 357598 - RNA, 32 nt, Human
caucuauuguaacauuuaccugagaugaucau

SEQ ID NO: 357599 - RNA, 32 nt, Human
caucuauugucaaguaagaggguggguuccaa

SEQ ID NO: 357600 - RNA, 32 nt, Human
caucuauuguuuuguuugccagaaagugcacc

SEQ ID NO: 357601 - RNA, 32 nt, Human
caucucaaaggcagagcccugccugaaggagg

SEQ ID NO: 357602 - RNA, 32 nt, Human
caucucaacacacauccccacccuguguacac

SEQ ID NO: 357603 - RNA, 32 nt, Human
caucucaacuaaaaauacaaaaauuagccagg

SEQ ID NO: 357604 - RNA, 32 nt, Human
caucucaacuaaaaauauaaaaauuagccagg

SEQ ID NO: 357605 - RNA, 31 nt, Human
caucucaaggaauucagcuguugaaaucauu

SEQ ID NO: 357606 - RNA, 32 nt, Human
caucucaagggaaaauggaggcuccagcagca

SEQ ID NO: 357607 - RNA, 32 nt, Human
caucucaauaaaagccaggaacagagaagaga

SEQ ID NO: 357608 - RNA, 32 nt, Human
caucucaauuggcuuugaagugcaaugggaga

SEQ ID NO: 357609 - RNA, 32 nt, Human
caucucacaguaccucacaggucucuuccccc

SEQ ID NO: 357610 - RNA, 32 nt, Human
caucucaccauccuguauucuucaaccaguga

SEQ ID NO: 357611 - RNA, 32 nt, Human
caucucacccccagcacacgcagggacuacua

SEQ ID NO: 357612 - RNA, 32 nt, Human
caucucacuacuguucuucuacacauuacugu

SEQ ID NO: 357613 - RNA, 32 nt, Human
caucucacucacacacacaggcauccauacac

SEQ ID NO: 357614 - RNA, 32 nt, Human
caucucacugcaaccuccaccucccagguuca

SEQ ID NO: 357615 - RNA, 32 nt, Human
caucucacugggucuagucucaucucagacaa

SEQ ID NO: 357616 - RNA, 32 nt, Human
caucucagccuccagguccucuccuuuggggc

SEQ ID NO: 357617 - RNA, 32 nt, Human
caucucagccuccugaguagcugggaugacag

SEQ ID NO: 357618 - RNA, 32 nt, Human
caucucagccuccugaguagcugggauuacag

SEQ ID NO: 357619 - RNA, 32 nt, Human
caucucagccuccugaguagcuuggauuacag

SEQ ID NO: 357620 - RNA, 32 nt, Human
caucucagccuguaagcaaagcaggaaaccuu

SEQ ID NO: 357621 - RNA, 32 nt, Human
caucucagcuacucaggaggcugaggcaggag

SEQ ID NO: 357622 - RNA, 32 nt, Human
caucucagcuccugaaaaaugccucauuaccu

SEQ ID NO: 357623 - RNA, 32 nt, Human
caucucagcuuccugaggagcugggauuauag

SEQ ID NO: 357624 - RNA, 32 nt, Human
caucucaggaagcacuggacacagugauucug

SEQ ID NO: 357625 - RNA, 32 nt, Human
caucucaggccucccucaaccccaccacuucu

SEQ ID NO: 357626 - RNA, 32 nt, Human
caucucaggccuggcuggcucuucugugcuuu

SEQ ID NO: 357627 - RNA, 25 nt, Human
caucucagguaauuuaugaaaucua

SEQ ID NO: 357628 - RNA, 32 nt, Human
caucucaguauauguagggaccccaaaugacc

SEQ ID NO: 357629 - RNA, 32 nt, Human
caucucagucccccucccaacccuccauaugg

SEQ ID NO: 357630 - RNA, 32 nt, Human
caucucagucucugaguuucaucaugaagaca

SEQ ID NO: 357631 - RNA, 32 nt, Human
caucucaguuaggagauagaagaagauugggc

SEQ ID NO: 357632 - RNA, 32 nt, Human
caucucauaaacaaaaaggaagaggaaagaau

SEQ ID NO: 357633 - RNA, 32 nt, Human
caucucaucacuggaagaaaggagacuucagc

SEQ ID NO: 357634 - RNA, 32 nt, Human
caucucauccagagauauaguauucacauuuu

SEQ ID NO: 357635 - RNA, 21 nt, Human
caucucaugccccuggcuggg

SEQ ID NO: 357636 - RNA, 22 nt, Human
caucucaugcucuguggcucca

SEQ ID NO: 357637 - RNA, 32 nt, Human
caucucauuauugccagcauuauuagauguua

SEQ ID NO: 357638 - RNA, 32 nt, Human
caucucauuguagcuucaaccuccugagcuca

SEQ ID NO: 357639 - RNA, 32 nt, Human
caucuccaagccucugcuccccuucccaccac

SEQ ID NO: 357640 - RNA, 32 nt, Human
caucuccaaggccugcgggaaaaacuugccuu

SEQ ID NO: 357641 - RNA, 32 nt, Human
caucuccaaucagcugcuuugaccuccagggu

SEQ ID NO: 357642 - RNA, 18 nt, Human
caucuccaccugccacca

SEQ ID NO: 357643 - RNA, 32 nt, Human
caucuccacgcccccggaugugcucaguguag

SEQ ID NO: 357644 - RNA, 32 nt, Human
caucuccacuaaaaauacaaaaauuaguuggg

SEQ ID NO: 357645 - RNA, 32 nt, Human
caucuccacuaaaaauagaaaaauuagccggg

SEQ ID NO: 357646 - RNA, 32 nt, Human
caucuccacuaaaaauauaaaaauuagccagg

SEQ ID NO: 357647 - RNA, 32 nt, Human
caucuccacuaaaaguacaaaaauuagcuggg

SEQ ID NO: 357648 - RNA, 23 nt, Human
caucuccacucuccuucuccaga

SEQ ID NO: 357649 - RNA, 32 nt, Human
caucuccagaaguuuuccaucuucccaaauuc

SEQ ID NO: 357650 - RNA, 32 nt, Human
caucuccagcacugaggcaccucugacucaca

SEQ ID NO: 357651 - RNA, 32 nt, Human
caucuccagcuccagccugcuggggccugugc

SEQ ID NO: 357652 - RNA, 32 nt, Human
caucuccaggacagcaagagugaucccugccu

SEQ ID NO: 357653 - RNA, 32 nt, Human
caucuccaggaggcagguagagcaguucugac

SEQ ID NO: 357654 - RNA, 32 nt, Human
caucuccaggcacccccaaaaacagcaaauua

SEQ ID NO: 357655 - RNA, 32 nt, Human
caucuccaggccccaaauggucuccggucggu

SEQ ID NO: 357656 - RNA, 32 nt, Human
caucuccagggcuggaugccaugguaaggauc

SEQ ID NO: 357657 - RNA, 32 nt, Human
caucuccaggguggaaaacuuggagggccccu

SEQ ID NO: 357658 - RNA, 32 nt, Human
caucuccauaaggagccaucaggcugucauua

SEQ ID NO: 357659 - RNA, 32 nt, Human
caucuccaucauuacuggcuuaguuuugcuuu

SEQ ID NO: 357660 - RNA, 32 nt, Human
caucuccauccuccucaagcugccugugcacc

SEQ ID NO: 357661 - RNA, 32 nt, Human
caucuccauggagcuccugcuggagggcccug

SEQ ID NO: 357662 - RNA, 32 nt, Human
caucuccauuagggcugaaaagaaugaccuac

SEQ ID NO: 357663 - RNA, 32 nt, Human
caucuccauuuucugaccucuggacuaacugg

SEQ ID NO: 357664 - RNA, 32 nt, Human
caucucccaaagugcugggaugacaggcguga

SEQ ID NO: 357665 - RNA, 32 nt, Human
caucucccaaagugcugggauuacaggcguga

SEQ ID NO: 357666 - RNA, 32 nt, Human
caucucccaaguggccacauacagcaacccac

SEQ ID NO: 357667 - RNA, 32 nt, Human
caucucccaaguuggauggcagcacgaucugg

SEQ ID NO: 357668 - RNA, 32 nt, Human
caucucccaauggaggggagguugcaggggag

SEQ ID NO: 357669 - RNA, 22 nt, Human
caucucccagcccaccagcccu

SEQ ID NO: 357670 - RNA, 32 nt, Human
caucucccaggaaauguccuucucuggcgucu

SEQ ID NO: 357671 - RNA, 32 nt, Human
caucucccaggccccaggggagaaagaggagu

SEQ ID NO: 357672 - RNA, 32 nt, Human
caucucccaucaccaccucuaggacucggggg

SEQ ID NO: 357673 - RNA, 32 nt, Human
caucuccccuuuccucuccacgucccgccccc

SEQ ID NO: 357674 - RNA, 32 nt, Human
caucucccgcuucccuuccauuuccuuucuag

SEQ ID NO: 357675 - RNA, 26 nt, Human
caucucccucuccuugcuggcuccau

SEQ ID NO: 357676 - RNA, 32 nt, Human
caucucccucuucuccccuccuuucacaccga

SEQ ID NO: 357677 - RNA, 32 nt, Human
caucucccugcaaccuccgccuccuggguuga

SEQ ID NO: 357678 - RNA, 32 nt, Human
caucucccugcucgucugccuuugaucugcau

SEQ ID NO: 357679 - RNA, 21 nt, Human
caucucccuguggacuuggga

SEQ ID NO: 357680 - RNA, 32 nt, Human
caucucccuugacugcagagcagguuccucca

SEQ ID NO: 357681 - RNA, 32 nt, Human
caucuccgcgagacagagggauaaagugaaga

SEQ ID NO: 357682 - RNA, 32 nt, Human
caucuccgcuaaaaaugcaaaaauuagccagg

SEQ ID NO: 357683 - RNA, 32 nt, Human
caucuccguguuucucuuuguggggcucaaaa

SEQ ID NO: 357684 - RNA, 32 nt, Human
caucuccuacagcccccugccugauccccugc

SEQ ID NO: 357685 - RNA, 32 nt, Human
caucuccuagauggacuuccugguuuucucuu

SEQ ID NO: 357686 - RNA, 32 nt, Human
caucuccuagcuauuucuuuugcccagcaggg

SEQ ID NO: 357687 - RNA, 32 nt, Human
caucuccucacuuuucagacugaggccuuuuu

SEQ ID NO: 357688 - RNA, 21 nt, Human
caucuccuccaaccagcaucu

SEQ ID NO: 357689 - RNA, 32 nt, Human
caucuccuccacuuggaugaugcucuagccuc

SEQ ID NO: 357690 - RNA, 32 nt, Human
caucuccuccuccuucuucugcucccgauucu

SEQ ID NO: 357691 - RNA, 23 nt, Human
caucuccuccugagucccagggc

SEQ ID NO: 357692 - RNA, 32 nt, Human
caucuccucgccugcucccugccuccuuuuca

SEQ ID NO: 357693 - RNA, 32 nt, Human
caucuccucgucuugacuguuuucccuacuug

SEQ ID NO: 357694 - RNA, 20 nt, Human
caucuccugagggaucccag

SEQ ID NO: 357695 - RNA, 32 nt, Human
caucuccugaugcugauuuuugaucuuuuguu

SEQ ID NO: 357696 - RNA, 32 nt, Human
caucuccugcauggcauggcuuagcacaccug

SEQ ID NO: 357697 - RNA, 23 nt, Human
caucuccugccuuccuccugggc

SEQ ID NO: 357698 - RNA, 32 nt, Human
caucuccuggaagggaugcuuuuuagcugagc

SEQ ID NO: 357699 - RNA, 22 nt, Human
caucuccuggacccuccagggc

SEQ ID NO: 357700 - RNA, 32 nt, Human
caucuccuugacuuuccagucaugccuccuaa

SEQ ID NO: 357701 - RNA, 21 nt, Human
caucuccuugcagcuguugga

SEQ ID NO: 357702 - RNA, 19 nt, Human
caucuccuuuuccaucuua

SEQ ID NO: 357703 - RNA, 32 nt, Human
caucucgaaaucugaacccaugguugugaucc

SEQ ID NO: 357704 - RNA, 25 nt, Human
caucucgaguagcugggauuacagg

SEQ ID NO: 357705 - RNA, 32 nt, Human
caucucgaguagcugggauuacaggcaugcac

SEQ ID NO: 357706 - RNA, 32 nt, Human
caucucgcccacccuggagagugcagagcuau

SEQ ID NO: 357707 - RNA, 32 nt, Human
caucucgcccaggagccggagcagcggcacug

SEQ ID NO: 357708 - RNA, 32 nt, Human
caucucgcggauggggucugcagccgccaauc

SEQ ID NO: 357709 - RNA, 32 nt, Human
caucucggagcaucccggaggaaaucugcaga

SEQ ID NO: 357710 - RNA, 32 nt, Human
caucucggcagagcugaacuguggcagaggug

SEQ ID NO: 357711 - RNA, 21 nt, Human
caucucggcaggaucuccugg

SEQ ID NO: 357712 - RNA, 32 nt, Human
caucucggcucacugcaaccuccgccucccag

SEQ ID NO: 357713 - RNA, 32 nt, Human
caucucggcucauuguaaccuccgucucccag

SEQ ID NO: 357714 - RNA, 32 nt, Human
caucucgggguguguuuuggaggcaggcggga

SEQ ID NO: 357715 - RNA, 21 nt, Human
caucucggucuccugaguagc

SEQ ID NO: 357716 - RNA, 16 nt, Human
caucucggucuucagc

SEQ ID NO: 357717 - RNA, 32 nt, Human
caucucggucuucagcucacaccagccuugag

SEQ ID NO: 357718 - RNA, 32 nt, Human
caucucguguugugugcacugugauauaaugg

SEQ ID NO: 357719 - RNA, 32 nt, Human
caucucguucacagcacccacccucuuaccug

SEQ ID NO: 357720 - RNA, 32 nt, Human
caucucuaauaaaaauacaaaacuuagcuggg

SEQ ID NO: 357721 - RNA, 32 nt, Human
caucucuacaaaaagcauaaaaauuagccaag

SEQ ID NO: 357722 - RNA, 32 nt, Human
caucucuacaaaaaguacaaaaauuagccggg

SEQ ID NO: 357723 - RNA, 32 nt, Human
caucucuacaaaauauacaaaaauuagccagg

SEQ ID NO: 357724 - RNA, 32 nt, Human
caucucuacaaaauauacaaaauauuagccag

SEQ ID NO: 357725 - RNA, 32 nt, Human
caucucuacagaaacuaccaaaauuagccagg

SEQ ID NO: 357726 - RNA, 32 nt, Human
caucucuaccaaaaauacaaaaauuaaccaug

SEQ ID NO: 357727 - RNA, 32 nt, Human
caucucuaccaaaaauacaaaaauuagccaga

SEQ ID NO: 357728 - RNA, 32 nt, Human
caucucuaccaaaaauacaaaaauuagcuggg

SEQ ID NO: 357729 - RNA, 32 nt, Human
caucucuaccaaaaauacaaaaauucaccagg

SEQ ID NO: 357730 - RNA, 32 nt, Human
caucucuaccucugacacagacugccugccuu

SEQ ID NO: 357731 - RNA, 32 nt, Human
caucucuacgaaaaauacaaaaauuaacuggg

SEQ ID NO: 357732 - RNA, 32 nt, Human
caucucuacgaaaaauacaaaaauuagccaag

SEQ ID NO: 357733 - RNA, 32 nt, Human
caucucuacgaaaaauacaaaaauuagcuggg

SEQ ID NO: 357734 - RNA, 32 nt, Human
caucucuacgaaaaauacaaaauuagccagau

SEQ ID NO: 357735 - RNA, 32 nt, Human
caucucuacgaaaaauacaaaauuuagccggg

SEQ ID NO: 357736 - RNA, 32 nt, Human
caucucuacgaaaauuacaaaaauuagcuggc

SEQ ID NO: 357737 - RNA, 32 nt, Human
caucucuacuaaaaacacaaaaauuagcuagg

SEQ ID NO: 357738 - RNA, 32 nt, Human
caucucuacuaaaaacacaaauuagccaggcg

SEQ ID NO: 357739 - RNA, 32 nt, Human
caucucuacuaaaaacgcaaaauuagccgggc

SEQ ID NO: 357740 - RNA, 32 nt, Human
caucucuacuaaaaaguacaaaaauuagcugg

SEQ ID NO: 357741 - RNA, 32 nt, Human
caucucuacuaaaaauaaaauuagccaggcgu

SEQ ID NO: 357742 - RNA, 32 nt, Human
caucucuacuaaaaauaaaauuagccaugcgu

SEQ ID NO: 357743 - RNA, 23 nt, Human
caucucuacuaaaaauacaaaaa

SEQ ID NO: 357744 - RNA, 32 nt, Human
caucucuacuaaaaauacaaaaacuagccagg

SEQ ID NO: 357745 - RNA, 32 nt, Human
caucucuacuaaaaauacaaaaacuagcgggc

SEQ ID NO: 357746 - RNA, 32 nt, Human
caucucuacuaaaaauacaaaaaguuagcugg

SEQ ID NO: 357747 - RNA, 32 nt, Human
caucucuacuaaaaauacaaaaaucagccggg

SEQ ID NO: 357748 - RNA, 32 nt, Human
caucucuacuaaaaauacaaaaaugagcuagg

SEQ ID NO: 357749 - RNA, 32 nt, Human
caucucuacuaaaaauacaaaaaugagcuggg

SEQ ID NO: 357750 - RNA, 32 nt, Human
caucucuacuaaaaauacaaaaauuaacagca

SEQ ID NO: 357751 - RNA, 32 nt, Human
caucucuacuaaaaauacaaaaauuaaccagg

SEQ ID NO: 357752 - RNA, 32 nt, Human
caucucuacuaaaaauacaaaaauuaacuggg

SEQ ID NO: 357753 - RNA, 32 nt, Human
caucucuacuaaaaauacaaaaauuaccuggg

SEQ ID NO: 357754 - RNA, 32 nt, Human
caucucuacuaaaaauacaaaaauuagcaggg

SEQ ID NO: 357755 - RNA, 32 nt, Human
caucucuacuaaaaauacaaaaauuagccaag

SEQ ID NO: 357756 - RNA, 32 nt, Human
caucucuacuaaaaauacaaaaauuagccagg

SEQ ID NO: 357757 - RNA, 32 nt, Human
caucucuacuaaaaauacaaaaauuagccaug

SEQ ID NO: 357758 - RNA, 32 nt, Human
caucucuacuaaaaauacaaaaauuagccgga

SEQ ID NO: 357759 - RNA, 32 nt, Human
caucucuacuaaaaauacaaaaauuagccggg

SEQ ID NO: 357760 - RNA, 32 nt, Human
caucucuacuaaaaauacaaaaauuagccggu

SEQ ID NO: 357761 - RNA, 32 nt, Human
caucucuacuaaaaauacaaaaauuagccgug

SEQ ID NO: 357762 - RNA, 32 nt, Human
caucucuacuaaaaauacaaaaauuagcuagg

SEQ ID NO: 357763 - RNA, 32 nt, Human
caucucuacuaaaaauacaaaaauuagcugag

SEQ ID NO: 357764 - RNA, 32 nt, Human
caucucuacuaaaaauacaaaaauuagcugga

SEQ ID NO: 357765 - RNA, 32 nt, Human
caucucuacuaaaaauacaaaaauuagcuggg

SEQ ID NO: 357766 - RNA, 32 nt, Human
caucucuacuaaaaauacaaaaauuagcugug

SEQ ID NO: 357767 - RNA, 32 nt, Human
caucucuacuaaaaauacaaaaauuagcuugg

SEQ ID NO: 357768 - RNA, 32 nt, Human
caucucuacuaaaaauacaaaaauuaggcaug

SEQ ID NO: 357769 - RNA, 32 nt, Human
caucucuacuaaaaauacaaaaauuaggccag

SEQ ID NO: 357770 - RNA, 32 nt, Human
caucucuacuaaaaauacaaaaauuaggccgg

SEQ ID NO: 357771 - RNA, 32 nt, Human
caucucuacuaaaaauacaaaaauuaguuggg

SEQ ID NO: 357772 - RNA, 32 nt, Human
caucucuacuaaaaauacaaaaauuaucuggg

SEQ ID NO: 357773 - RNA, 32 nt, Human
caucucuacuaaaaauacaaaaauucaccagg

SEQ ID NO: 357774 - RNA, 32 nt, Human
caucucuacuaaaaauacaaaaauuggcuggg

SEQ ID NO: 357775 - RNA, 32 nt, Human
caucucuacuaaaaauacaaaaauuugcuggg

SEQ ID NO: 357776 - RNA, 32 nt, Human
caucucuacuaaaaauacaaaacauuagccgg

SEQ ID NO: 357777 - RNA, 32 nt, Human
caucucuacuaaaaauacaaaacuagccaggc

SEQ ID NO: 357778 - RNA, 32 nt, Human
caucucuacuaaaaauacaaaacuagccgggu

SEQ ID NO: 357779 - RNA, 32 nt, Human
caucucuacuaaaaauacaaaacuuagccagg

SEQ ID NO: 357780 - RNA, 32 nt, Human
caucucuacuaaaaauacaaaaguuagcuggg

SEQ ID NO: 357781 - RNA, 32 nt, Human
caucucuacuaaaaauacaaaauccaggcgug

SEQ ID NO: 357782 - RNA, 32 nt, Human
caucucuacuaaaaauacaaaauuaccugggc

SEQ ID NO: 357783 - RNA, 32 nt, Human
caucucuacuaaaaauacaaaauuagcagggc

SEQ ID NO: 357784 - RNA, 32 nt, Human
caucucuacuaaaaauacaaaauuagccaggc

SEQ ID NO: 357785 - RNA, 32 nt, Human
caucucuacuaaaaauacaaaauuagccaggu

SEQ ID NO: 357786 - RNA, 32 nt, Human
caucucuacuaaaaauacaaaauuagccgggc

SEQ ID NO: 357787 - RNA, 32 nt, Human
caucucuacuaaaaauacaaaauuagccgggu

SEQ ID NO: 357788 - RNA, 32 nt, Human
caucucuacuaaaaauacaaaauuagccucgc

SEQ ID NO: 357789 - RNA, 32 nt, Human
caucucuacuaaaaauacaaaauuagcugggc

SEQ ID NO: 357790 - RNA, 32 nt, Human
caucucuacuaaaaauacaaaauuagcugggu

SEQ ID NO: 357791 - RNA, 32 nt, Human
caucucuacuaaaaauacaaaauuggccgggc

SEQ ID NO: 357792 - RNA, 32 nt, Human
caucucuacuaaaaauacaaacaauuaacuga

SEQ ID NO: 357793 - RNA, 32 nt, Human
caucucuacuaaaaauacaaacauuagccagg

SEQ ID NO: 357794 - RNA, 32 nt, Human
caucucuacuaaaaauacaaacuuggcugggc

SEQ ID NO: 357795 - RNA, 32 nt, Human
caucucuacuaaaaauacaaaguuaaccgggu

SEQ ID NO: 357796 - RNA, 32 nt, Human
caucucuacuaaaaauacaaauauuagcugga

SEQ ID NO: 357797 - RNA, 32 nt, Human
caucucuacuaaaaauacaacaaaguuagccg

SEQ ID NO: 357798 - RNA, 32 nt, Human
caucucuacuaaaaauacaagaauuagcuggg

SEQ ID NO: 357799 - RNA, 32 nt, Human
caucucuacuaaaaauacaaggauuagcuggg

SEQ ID NO: 357800 - RNA, 32 nt, Human
caucucuacuaaaaauacaauaaauuagcugg

SEQ ID NO: 357801 - RNA, 32 nt, Human
caucucuacuaaaaauacaauaauuagcuggg

SEQ ID NO: 357802 - RNA, 32 nt, Human
caucucuacuaaaaauacaauauuagccgggc

SEQ ID NO: 357803 - RNA, 32 nt, Human
caucucuacuaaaaauacacaaaauuagcugg

SEQ ID NO: 357804 - RNA, 32 nt, Human
caucucuacuaaaaauacacaaauuagcuagg

SEQ ID NO: 357805 - RNA, 32 nt, Human
caucucuacuaaaaauacagaaauuagccggg

SEQ ID NO: 357806 - RNA, 32 nt, Human
caucucuacuaaaaauacagaaauuagccggu

SEQ ID NO: 357807 - RNA, 32 nt, Human
caucucuacuaaaaauacagaaauuagcuggg

SEQ ID NO: 357808 - RNA, 32 nt, Human
caucucuacuaaaaauacagaaauuauccagg

SEQ ID NO: 357809 - RNA, 32 nt, Human
caucucuacuaaaaauacagaaauucacaggg

SEQ ID NO: 357810 - RNA, 32 nt, Human
caucucuacuaaaaauacagcaaauuagcugg

SEQ ID NO: 357811 - RNA, 32 nt, Human
caucucuacuaaaaauaccaaaaauuagccga

SEQ ID NO: 357812 - RNA, 32 nt, Human
caucucuacuaaaaauaccaaaaugagccagg

SEQ ID NO: 357813 - RNA, 32 nt, Human
caucucuacuaaaaauaccaaaauuagccagg

SEQ ID NO: 357814 - RNA, 32 nt, Human
caucucuacuaaaaauaccaaaauuagccggg

SEQ ID NO: 357815 - RNA, 32 nt, Human
caucucuacuaaaaauaccaaauuagccaggc

SEQ ID NO: 357816 - RNA, 32 nt, Human
caucucuacuaaaaauacgaaaauuagcuggg

SEQ ID NO: 357817 - RNA, 32 nt, Human
caucucuacuaaaaauacgaaacauuagccag

SEQ ID NO: 357818 - RNA, 32 nt, Human
caucucuacuaaaaauacgaaacuagccgggc

SEQ ID NO: 357819 - RNA, 32 nt, Human
caucucuacuaaaaauacgaaacuaggccggg

SEQ ID NO: 357820 - RNA, 32 nt, Human
caucucuacuaaaaauacgaaauuagccaggu

SEQ ID NO: 357821 - RNA, 32 nt, Human
caucucuacuaaaaauagaaaaaucagcuggg

SEQ ID NO: 357822 - RNA, 32 nt, Human
caucucuacuaaaaauagaaaaauuagccagg

SEQ ID NO: 357823 - RNA, 32 nt, Human
caucucuacuaaaaauagaaaaauuagcuggg

SEQ ID NO: 357824 - RNA, 32 nt, Human
caucucuacuaaaaauagaaaaauuggcuaga

SEQ ID NO: 357825 - RNA, 32 nt, Human
caucucuacuaaaaauagaaacaaauuuagcc

SEQ ID NO: 357826 - RNA, 32 nt, Human
caucucuacuaaaaauagaaaccuuagccagg

SEQ ID NO: 357827 - RNA, 32 nt, Human
caucucuacuaaaaauauaaaaaguagccagg

SEQ ID NO: 357828 - RNA, 32 nt, Human
caucucuacuaaaaauauaaaaaucagccggg

SEQ ID NO: 357829 - RNA, 32 nt, Human
caucucuacuaaaaauauaaaaauuagccagg

SEQ ID NO: 357830 - RNA, 32 nt, Human
caucucuacuaaaaauauaaaaauuagccggg

SEQ ID NO: 357831 - RNA, 32 nt, Human
caucucuacuaaaaauauaaaauuagccaggc

SEQ ID NO: 357832 - RNA, 32 nt, Human
caucucuacuaaaaauaucaaaauuagcuggg

SEQ ID NO: 357833 - RNA, 32 nt, Human
caucucuacuaaaaauaugaaaaucagcuggg

SEQ ID NO: 357834 - RNA, 32 nt, Human
caucucuacuaaaaaugcaaaaaguuagccag

SEQ ID NO: 357835 - RNA, 32 nt, Human
caucucuacuaaaaaugcaaaaauuagccggg

SEQ ID NO: 357836 - RNA, 32 nt, Human
caucucuacuaaaaaugcaaacauuagcuggg

SEQ ID NO: 357837 - RNA, 32 nt, Human
caucucuacuaaaaaugcggaagaguuagcca

SEQ ID NO: 357838 - RNA, 32 nt, Human
caucucuacuaaaacaaaaauuagccaggcau

SEQ ID NO: 357839 - RNA, 32 nt, Human
caucucuacuaaaacauacaaaaauuagccgg

SEQ ID NO: 357840 - RNA, 32 nt, Human
caucucuacuaaaacuacaaaacuuagccggg

SEQ ID NO: 357841 - RNA, 32 nt, Human
caucucuacuaaaaguacaaaaauuagccagg

SEQ ID NO: 357842 - RNA, 32 nt, Human
caucucuacuaaaaguacaaaaauuagcuggg

SEQ ID NO: 357843 - RNA, 32 nt, Human
caucucuacuaaaaguacaaauauuagccgac

SEQ ID NO: 357844 - RNA, 32 nt, Human
caucucuacuaaaauacaaaaaguuagcuggg

SEQ ID NO: 357845 - RNA, 32 nt, Human
caucucuacuaaaauacaaaaauuagccgggc

SEQ ID NO: 357846 - RNA, 32 nt, Human
caucucuacuaaaauacaaaaauuagcugggu

SEQ ID NO: 357847 - RNA, 32 nt, Human
caucucuacuaaaauacaaaauuagccaggcg

SEQ ID NO: 357848 - RNA, 32 nt, Human
caucucuacuaaaauauaaaaauuagccgggu

SEQ ID NO: 357849 - RNA, 32 nt, Human
caucucuacuaaaauuacaaaaauuagccggg

SEQ ID NO: 357850 - RNA, 32 nt, Human
caucucuacuaaacauacaaaauuagcugggc

SEQ ID NO: 357851 - RNA, 32 nt, Human
caucucuacuaaacaugcaaaaauuaccuggg

SEQ ID NO: 357852 - RNA, 32 nt, Human
caucucuacuaaagauacaaaaagauuagcug

SEQ ID NO: 357853 - RNA, 32 nt, Human
caucucuacuaaagauacaaaaauuugcugag

SEQ ID NO: 357854 - RNA, 32 nt, Human
caucucuacuaaagauauaaaaauuagccggg

SEQ ID NO: 357855 - RNA, 32 nt, Human
caucucuacuaaagaugcaaggauuggccggg

SEQ ID NO: 357856 - RNA, 32 nt, Human
caucucuacuaaauacaaaaauuagcugggcg

SEQ ID NO: 357857 - RNA, 32 nt, Human
caucucuacuaaauacagaaaauuagccaggc

SEQ ID NO: 357858 - RNA, 32 nt, Human
caucucuacuaagaauacaaaaauuagccggg

SEQ ID NO: 357859 - RNA, 32 nt, Human
caucucuacuaauaauacaaaaauuagccagg

SEQ ID NO: 357860 - RNA, 32 nt, Human
caucucuacuagaaauacaaaacaauuagcug

SEQ ID NO: 357861 - RNA, 32 nt, Human
caucucuacuauaaauacaaaaauuagccagg

SEQ ID NO: 357862 - RNA, 32 nt, Human
caucucuacugaaaauacaaaaaguuagccgg

SEQ ID NO: 357863 - RNA, 32 nt, Human
caucucuacugaaaauacaaaaauuagccagg

SEQ ID NO: 357864 - RNA, 32 nt, Human
caucucuacugaaaauacaaaaauuagcuggg

SEQ ID NO: 357865 - RNA, 32 nt, Human
caucucuacugaaaauacaaaaauuaggcaua

SEQ ID NO: 357866 - RNA, 32 nt, Human
caucucuacugaaaauacagaauuagccaggc

SEQ ID NO: 357867 - RNA, 32 nt, Human
caucucuacugaaaauacagaauuggccgggu

SEQ ID NO: 357868 - RNA, 32 nt, Human
caucucuacugaaaguacaaaaauuagcuggg

SEQ ID NO: 357869 - RNA, 32 nt, Human
caucucuacuucucugaggacaauuaggguau

SEQ ID NO: 357870 - RNA, 32 nt, Human
caucucuaggaccggaacuaccuucucuucug

SEQ ID NO: 357871 - RNA, 32 nt, Human
caucucuaggguagccaugcagaggagggcuu

SEQ ID NO: 357872 - RNA, 32 nt, Human
caucucuaguaaaaauacaaaaauuagcucag

SEQ ID NO: 357873 - RNA, 32 nt, Human
caucucuaguaaaaauacaaaaauuagcuggg

SEQ ID NO: 357874 - RNA, 32 nt, Human
caucucuauuaaaaauacaaaaauuagccagg

SEQ ID NO: 357875 - RNA, 32 nt, Human
caucucuauuaaaaauacaaaaauuagccgga

SEQ ID NO: 357876 - RNA, 32 nt, Human
caucucuauuaaaaauacaaaaauuagccggg

SEQ ID NO: 357877 - RNA, 32 nt, Human
caucucuauuaaaaauacaaaaauuagcuggg

SEQ ID NO: 357878 - RNA, 32 nt, Human
caucucuauuaaaaauuaaacagccaauuagu

SEQ ID NO: 357879 - RNA, 32 nt, Human
caucucuauuaaaaauuuuacaaaaauuagcu

SEQ ID NO: 357880 - RNA, 32 nt, Human
caucucuauuaaagauacaaaauuagccaggc

SEQ ID NO: 357881 - RNA, 32 nt, Human
caucucucagaguguugggauuacagccauga

SEQ ID NO: 357882 - RNA, 32 nt, Human
caucucucagggcccacccaggaaaauggauu

SEQ ID NO: 357883 - RNA, 32 nt, Human
caucucucauaggugcaaccugagaguggggg

SEQ ID NO: 357884 - RNA, 32 nt, Human
caucucuccaccuuguuuuucuucuauucuug

SEQ ID NO: 357885 - RNA, 32 nt, Human
caucucuccagccagccacugccuucuuugua

SEQ ID NO: 357886 - RNA, 32 nt, Human
caucucuccagcccaggccccugggcaucuca

SEQ ID NO: 357887 - RNA, 32 nt, Human
caucucuccaucuacaaaguugcaguauuaug

SEQ ID NO: 357888 - RNA, 32 nt, Human
caucucuccauucgugagcuccuugaaggcag

SEQ ID NO: 357889 - RNA, 32 nt, Human
caucucucccacaggacacuccuugcgaccuc

SEQ ID NO: 357890 - RNA, 32 nt, Human
caucucuccccucccuaugccuugcaggucgc

SEQ ID NO: 357891 - RNA, 32 nt, Human
caucucucccgaaaauacaaaauuagccaggc

SEQ ID NO: 357892 - RNA, 28 nt, Human
caucucucccuuccugccucauuucauc

SEQ ID NO: 357893 - RNA, 32 nt, Human
caucucucuccauaucaaucuggaccaucucu

SEQ ID NO: 357894 - RNA, 32 nt, Human
caucucucucuuugccucauagauuuagcuau

SEQ ID NO: 357895 - RNA, 32 nt, Human
caucucucugcagugcccuccucgccugugca

SEQ ID NO: 357896 - RNA, 23 nt, Human
caucucucuuaagccaggcaccu

SEQ ID NO: 357897 - RNA, 32 nt, Human
caucucucuuccagagagaggcagcauuggcc

SEQ ID NO: 357898 - RNA, 32 nt, Human
caucucugauccucuaaucugccucugaaccc

SEQ ID NO: 357899 - RNA, 32 nt, Human
caucucugcaacuccuuccucccugggccucc

SEQ ID NO: 357900 - RNA, 32 nt, Human
caucucugcacccacaggcucaacaucacaug

SEQ ID NO: 357901 - RNA, 32 nt, Human
caucucugcaccuuccaggcucugaacuuuga

SEQ ID NO: 357902 - RNA, 32 nt, Human
caucucugccaaaaauacaaaaguuagccggg

SEQ ID NO: 357903 - RNA, 32 nt, Human
caucucugccugccuucccucuugccuggaaa

SEQ ID NO: 357904 - RNA, 32 nt, Human
caucucugcuaaaaauacaaaaacuagccagg

SEQ ID NO: 357905 - RNA, 32 nt, Human
caucucugcuaaaaauacaaaaauuagccggg

SEQ ID NO: 357906 - RNA, 32 nt, Human
caucucugcuaaaaauacaaaaauuagcuggg

SEQ ID NO: 357907 - RNA, 32 nt, Human
caucucugcuaaaaauaccaaaauuacccggg

SEQ ID NO: 357908 - RNA, 32 nt, Human
caucucugcucccuguggcaucuugcuguguc

SEQ ID NO: 357909 - RNA, 23 nt, Human
caucucugcuucuccccagagga

SEQ ID NO: 357910 - RNA, 32 nt, Human
caucucuggagugugugggggucugggaggca

SEQ ID NO: 357911 - RNA, 19 nt, Human
caucucugggcaagcggcg

SEQ ID NO: 357912 - RNA, 32 nt, Human
caucucugggcucagcaccugaggcggguuuc

SEQ ID NO: 357913 - RNA, 32 nt, Human
caucucugggcugucuggggcgguggagcaag

SEQ ID NO: 357914 - RNA, 20 nt, Human
caucucugguuuuaaguagc

SEQ ID NO: 357915 - RNA, 32 nt, Human
caucucuguacugucugcccucuugggggaug

SEQ ID NO: 357916 - RNA, 21 nt, Human
caucucuguuggucccaggga

SEQ ID NO: 357917 - RNA, 32 nt, Human
caucucuuaaagaaaaaguuagccagguguga

SEQ ID NO: 357918 - RNA, 32 nt, Human
caucucuuauagauuaacuuccuuccaaaaug

SEQ ID NO: 357919 - RNA, 32 nt, Human
caucucuucacugggcuccaccugcucacccg

SEQ ID NO: 357920 - RNA, 32 nt, Human
caucucuucauacuagcucacacuaugcauug

SEQ ID NO: 357921 - RNA, 32 nt, Human
caucucuucccuccaucuccuuguacccucug

SEQ ID NO: 357922 - RNA, 32 nt, Human
caucucuuccuauauuuggugggguggguggg

SEQ ID NO: 357923 - RNA, 32 nt, Human
caucucuucuaaaaauacaaaaauuacccagg

SEQ ID NO: 357924 - RNA, 32 nt, Human
caucucuucuaaaaauacaaaaauuagcuggu

SEQ ID NO: 357925 - RNA, 32 nt, Human
caucucuucuaaaaauacaaacauuagccggg

SEQ ID NO: 357926 - RNA, 32 nt, Human
caucucuucucaugaaggcuacacucaaauua

SEQ ID NO: 357927 - RNA, 32 nt, Human
caucucuugaagccaaacuccaccuucugugc

SEQ ID NO: 357928 - RNA, 32 nt, Human
caucucuuggugguaccaucagaaaugucuuc

SEQ ID NO: 357929 - RNA, 32 nt, Human
caucucuuguuccccucaucccugccaccagu

SEQ ID NO: 357930 - RNA, 32 nt, Human
caucucuuuaguucuuccuccugguuccucuu

SEQ ID NO: 357931 - RNA, 32 nt, Human
caucucuuucucaauggaucuaauguuuuaau

SEQ ID NO: 357932 - RNA, 32 nt, Human
caucucuuugcugcuacuguuuugccauccuu

SEQ ID NO: 357933 - RNA, 32 nt, Human
caucucuuuucccagcuccgcaccuuuguccg

SEQ ID NO: 357934 - RNA, 32 nt, Human
caucucuuuucccuucuuuccuccugguuccg

SEQ ID NO: 357935 - RNA, 32 nt, Human
caucugaacccaggagacagguugcagugagc

SEQ ID NO: 357936 - RNA, 32 nt, Human
caucugaacugaucccaggugaacgguuuauu

SEQ ID NO: 357937 - RNA, 32 nt, Human
caucugaaggggccauuucuccugguuacccu

SEQ ID NO: 357938 - RNA, 32 nt, Human
caucugaagucaagauuuccagccuuuugaau

SEQ ID NO: 357939 - RNA, 32 nt, Human
caucugacauagccuucuguguuuccaaagaa

SEQ ID NO: 357940 - RNA, 32 nt, Human
caucugaccaaagagguguggucgaggcuccu

SEQ ID NO: 357941 - RNA, 32 nt, Human
caucugaccaaaggacgaaugagggagacguu

SEQ ID NO: 357942 - RNA, 32 nt, Human
caucugaccaucugugacuauaaagcuguuau

SEQ ID NO: 357943 - RNA, 32 nt, Human
caucugaccuggcagcccauguauuccgguca

SEQ ID NO: 357944 - RNA, 32 nt, Human
caucugacugguuuccccauguccucccauuc

SEQ ID NO: 357945 - RNA, 24 nt, Human
caucugacuucaauauuugccaaa

SEQ ID NO: 357946 - RNA, 32 nt, Human
caucugagaccaccucauccuggacuucauua

SEQ ID NO: 357947 - RNA, 32 nt, Human
caucugagaccagccaguagucacagaacugc

SEQ ID NO: 357948 - RNA, 32 nt, Human
caucugagaugggguccuguuguuuauuauca

SEQ ID NO: 357949 - RNA, 32 nt, Human
caucugagccagauguugagggcugaguggga

SEQ ID NO: 357950 - RNA, 32 nt, Human
caucugagccucaggagguugaggcugcagug

SEQ ID NO: 357951 - RNA, 32 nt, Human
caucugaggaaagcuggagggaagagaaaccc

SEQ ID NO: 357952 - RNA, 32 nt, Human
caucugaggaacuggaauaaagaugaggggcc

SEQ ID NO: 357953 - RNA, 32 nt, Human
caucugaggaagcagaacagggacagacuuga

SEQ ID NO: 357954 - RNA, 32 nt, Human
caucugaggcccuucccaggaagacauggccu

SEQ ID NO: 357955 - RNA, 32 nt, Human
caucugagggguccuugaggccaguggaucug

SEQ ID NO: 357956 - RNA, 19 nt, Human
caucugaguccuugucaga

SEQ ID NO: 357957 - RNA, 32 nt, Human
caucugaguguuggguacaaagcugcuccgua

SEQ ID NO: 357958 - RNA, 32 nt, Human
caucugauagaauccccugaaagcaguagcca

SEQ ID NO: 357959 - RNA, 32 nt, Human
caucugauagaggcuuguaagagcagauugac

SEQ ID NO: 357960 - RNA, 32 nt, Human
caucugaucaagaauggagaaucucaguccua

SEQ ID NO: 357961 - RNA, 32 nt, Human
caucugaugccaccacggucccuccuucccuu

SEQ ID NO: 357962 - RNA, 32 nt, Human
caucugcaaaacuguuacaaaggugagcuuga

SEQ ID NO: 357963 - RNA, 21 nt, Human
caucugcaaacgcuuugccaa

SEQ ID NO: 357964 - RNA, 32 nt, Human
caucugcaacuugcacagcucagcaccaggag

SEQ ID NO: 357965 - RNA, 32 nt, Human
caucugcaauaaacgacagccucggcugccuc

SEQ ID NO: 357966 - RNA, 32 nt, Human
caucugcacaacacaaaccaaagcccccuuuc

SEQ ID NO: 357967 - RNA, 32 nt, Human
caucugcacacaccuccgagacaguccagugu

SEQ ID NO: 357968 - RNA, 32 nt, Human
caucugcacagucagcuagaacaagaauuccu

SEQ ID NO: 357969 - RNA, 19 nt, Human
caucugcacccccucccca

SEQ ID NO: 357970 - RNA, 22 nt, Human
caucugcaccugcacucccaaa

SEQ ID NO: 357971 - RNA, 25 nt, Human
caucugcaccugcccuuuuuucaua

SEQ ID NO: 357972 - RNA, 32 nt, Human
caucugcagccucugccuccagcccggcagcu

SEQ ID NO: 357973 - RNA, 32 nt, Human
caucugcaggaaagagaugcagcaugcuccuc

SEQ ID NO: 357974 - RNA, 25 nt, Human
caucugcauaugcguauuugccaaa

SEQ ID NO: 357975 - RNA, 32 nt, Human
caucugcauccagggcuggaggaccgauguac

SEQ ID NO: 357976 - RNA, 32 nt, Human
caucugcaugucuacucagcauuugauuaaca

SEQ ID NO: 357977 - RNA, 32 nt, Human
caucugccagccugaacaugaacacaggcaaa

SEQ ID NO: 357978 - RNA, 32 nt, Human
caucugccaucuuucaugaguguuucccaugg

SEQ ID NO: 357979 - RNA, 32 nt, Human
caucugccaugcuggcaucucuauaagggcuc

SEQ ID NO: 357980 - RNA, 24 nt, Human
caucugccauuuuccucauuuaaa

SEQ ID NO: 357981 - RNA, 32 nt, Human
caucugcccacaccugucccccuuccccaacc

SEQ ID NO: 357982 - RNA, 32 nt, Human
caucugcccagccucugaguuuucuguucuau

SEQ ID NO: 357983 - RNA, 32 nt, Human
caucugcccaggggugcccccuccucucccau

SEQ ID NO: 357984 - RNA, 32 nt, Human
caucugccccaccauccauccuggugaaacca

SEQ ID NO: 357985 - RNA, 32 nt, Human
caucugccccacccugggccacugccugcucc

SEQ ID NO: 357986 - RNA, 32 nt, Human
caucugccccggaagagaccaaguaccaaacu

SEQ ID NO: 357987 - RNA, 32 nt, Human
caucugcccuccccaaacaucucccucccuac

SEQ ID NO: 357988 - RNA, 32 nt, Human
caucugcccugacugaauguguucugucacuc

SEQ ID NO: 357989 - RNA, 30 nt, Human
caucugcccuucuuguugcuccugucaugu

SEQ ID NO: 357990 - RNA, 32 nt, Human
caucugccucaguucugauuaacugguaauug

SEQ ID NO: 357991 - RNA, 32 nt, Human
caucugccuccaggaccauucaggcuguugac

SEQ ID NO: 357992 - RNA, 21 nt, Human
caucugccuccucuucucuaa

SEQ ID NO: 357993 - RNA, 32 nt, Human
caucugccucuuuucucuccccagccugcccu

SEQ ID NO: 357994 - RNA, 32 nt, Human
caucugccugcauugccaucuccuuggcuugu

SEQ ID NO: 357995 - RNA, 32 nt, Human
caucugccuggaagaccugggcuucucaggcu

SEQ ID NO: 357996 - RNA, 32 nt, Human
caucugccugggaguccuccugggccugccac

SEQ ID NO: 357997 - RNA, 32 nt, Human
caucugccugggaucaucaagcccuagaagcu

SEQ ID NO: 357998 - RNA, 32 nt, Human
caucugccuuaaauuuccucuguuuuucacau

SEQ ID NO: 357999 - RNA, 32 nt, Human
caucugccuugcccccagcaguacaguccuuc

SEQ ID NO: 358000 - RNA, 32 nt, Human
caucugccuuucuggacuuucugcuaugaacu

SEQ ID NO: 358001 - RNA, 32 nt, Human
caucugccuuucuuucccccagcccccacccg

SEQ ID NO: 358002 - RNA, 32 nt, Human
caucugcuaagugaucauuuucugccauacca

SEQ ID NO: 358003 - RNA, 32 nt, Human
caucugcuacauauauaaauagacuugcaguu

SEQ ID NO: 358004 - RNA, 32 nt, Human
caucugcucacugcccgcauucuccuggcaga

SEQ ID NO: 358005 - RNA, 32 nt, Human
caucugcuccuuuccuccccugccucaucagc

SEQ ID NO: 358006 - RNA, 21 nt, Human
caucugcucucuggccaacgg

SEQ ID NO: 358007 - RNA, 32 nt, Human
caucugcucugcagggucccucaggcucccua

SEQ ID NO: 358008 - RNA, 32 nt, Human
caucugcugcccauggaugcucuggcugagcu

SEQ ID NO: 358009 - RNA, 32 nt, Human
caucugcugcucccuuuuccacuuuucuaugu

SEQ ID NO: 358010 - RNA, 32 nt, Human
caucugcugcuggccucggugggcucugacug

SEQ ID NO: 358011 - RNA, 32 nt, Human
caucugcuggcacuccagccgcgugcaggugu

SEQ ID NO: 358012 - RNA, 32 nt, Human
caucugcuggguauccaauccuucccuuaucu

SEQ ID NO: 358013 - RNA, 32 nt, Human
caucugcuguauccucucccauggagacaaag

SEQ ID NO: 358014 - RNA, 32 nt, Human
caucugcuuccagaugagccagugccucgcau

SEQ ID NO: 358015 - RNA, 32 nt, Human
caucugcuugggaggcugagguugcaggaucg

SEQ ID NO: 358016 - RNA, 32 nt, Human
caucugcuuuggggaccuagaccucagguggu

SEQ ID NO: 358017 - RNA, 32 nt, Human
caucuggaagugaggguaggagcuggguugga

SEQ ID NO: 358018 - RNA, 32 nt, Human
caucuggacaaaugccaccacagcaggugggg

SEQ ID NO: 358019 - RNA, 32 nt, Human
caucuggacuuagaugggagggcauagcagau

SEQ ID NO: 358020 - RNA, 32 nt, Human
caucuggagagggagagggccuggguaggagc

SEQ ID NO: 358021 - RNA, 32 nt, Human
caucuggagcacggcuggccacggucagcccu

SEQ ID NO: 358022 - RNA, 32 nt, Human
caucuggaggagagagucggagagcagaaacc

SEQ ID NO: 358023 - RNA, 32 nt, Human
caucuggaggccugaguaaggaguggcucagc

SEQ ID NO: 358024 - RNA, 32 nt, Human
caucuggaggcuggagcagggucacccacgga

SEQ ID NO: 358025 - RNA, 32 nt, Human
caucuggaggguccaugagauggggcccucac

SEQ ID NO: 358026 - RNA, 32 nt, Human
caucuggaguagcugggacuacaggucagucc

SEQ ID NO: 358027 - RNA, 32 nt, Human
caucuggauaucaagguggaaauggcccauuu

SEQ ID NO: 358028 - RNA, 32 nt, Human
caucuggauaucuugaugcacugccuguuugu

SEQ ID NO: 358029 - RNA, 32 nt, Human
caucuggauggaggcagcaugcgccugggcug

SEQ ID NO: 358030 - RNA, 32 nt, Human
caucuggauuuucucagaugugagaagcuggu

SEQ ID NO: 358031 - RNA, 31 nt, Human
caucuggcacaauaaacauucucuguuuugu

SEQ ID NO: 358032 - RNA, 32 nt, Human
caucuggcagaagaaauuucuaagcagcaaag

SEQ ID NO: 358033 - RNA, 32 nt, Human
caucuggcagcacauugagaucggcuaugucc

SEQ ID NO: 358034 - RNA, 32 nt, Human
caucuggcaggcagcaagaccagcgccugcca

SEQ ID NO: 358035 - RNA, 32 nt, Human
caucuggcaggugcccuugaugcuauagcgcc

SEQ ID NO: 358036 - RNA, 32 nt, Human
caucuggcagugagacugaggaugaggacagc

SEQ ID NO: 358037 - RNA, 32 nt, Human
caucuggccccuggcccaucucuucugugccu

SEQ ID NO: 358038 - RNA, 32 nt, Human
caucuggccuggcugggaggcuugggggcagg

SEQ ID NO: 358039 - RNA, 32 nt, Human
caucuggccuucauccuucucccuuuauuguc

SEQ ID NO: 358040 - RNA, 32 nt, Human
caucuggcggacuccucuuccucucucuucuc

SEQ ID NO: 358041 - RNA, 32 nt, Human
caucugggaaaaggaaggaaauugcaggaggc

SEQ ID NO: 358042 - RNA, 32 nt, Human
caucugggaaggcacagcuggcugcagggaac

SEQ ID NO: 358043 - RNA, 32 nt, Human
caucugggaggaauucaccccagaggaaggga

SEQ ID NO: 358044 - RNA, 32 nt, Human
caucugggcauuguaggggugcagugguaugu

SEQ ID NO: 358045 - RNA, 32 nt, Human
caucugggccuuuguaugagcugcauugcccu

SEQ ID NO: 358046 - RNA, 32 nt, Human
caucugggcgccgggacgcugcagugaucccc

SEQ ID NO: 358047 - RNA, 32 nt, Human
caucugggcugugaugggcagcucccacucuu

SEQ ID NO: 358048 - RNA, 32 nt, Human
caucugggcuucagauccugacucccuucugu

SEQ ID NO: 358049 - RNA, 32 nt, Human
caucugggcuucucuuccccagcuuuuugccu

SEQ ID NO: 358050 - RNA, 32 nt, Human
caucugguagggagggagguauaguuggggga

SEQ ID NO: 358051 - RNA, 22 nt, Human
caucuggugacccuggcaggga

SEQ ID NO: 358052 - RNA, 32 nt, Human
caucuggugugggcgcacucuacagugacuuc

SEQ ID NO: 358053 - RNA, 32 nt, Human
caucugguugguggaaaacuaggugaagugcu

SEQ ID NO: 358054 - RNA, 32 nt, Human
caucugguuuggagcuagaguugcuuccuggu

SEQ ID NO: 358055 - RNA, 19 nt, Human
caucuguaaucccagcacu

SEQ ID NO: 358056 - RNA, 20 nt, Human
caucuguaaucccagcacuu

SEQ ID NO: 358057 - RNA, 22 nt, Human
caucuguaaucccagcuacuca

SEQ ID NO: 358058 - RNA, 32 nt, Human
caucuguaaugggggaauuaccuacacaccug

SEQ ID NO: 358059 - RNA, 32 nt, Human
caucuguaaugugccagcauugugcccaggcu

SEQ ID NO: 358060 - RNA, 24 nt, Human
caucuguacacacccccaucccca

SEQ ID NO: 358061 - RNA, 32 nt, Human
caucuguacuaaaaauacaaaaauuagccaga

SEQ ID NO: 358062 - RNA, 32 nt, Human
caucuguacuaaaaauacaaaaauuagcugag

SEQ ID NO: 358063 - RNA, 32 nt, Human
caucuguacuaaaaauacaaaaauuugccugg

SEQ ID NO: 358064 - RNA, 32 nt, Human
caucuguacuaaaaauacaaaauuagcugggu

SEQ ID NO: 358065 - RNA, 32 nt, Human
caucuguacuaaaaauacaagauuaccugggc

SEQ ID NO: 358066 - RNA, 32 nt, Human
caucuguacugaaaauacaaaaauuaggcaug

SEQ ID NO: 358067 - RNA, 32 nt, Human
caucuguacuguagcacuggccucugugccac

SEQ ID NO: 358068 - RNA, 32 nt, Human
caucuguagacaggcucacaugcaccaggaac

SEQ ID NO: 358069 - RNA, 32 nt, Human
caucuguagaggaagagcaguguuagaguuaa

SEQ ID NO: 358070 - RNA, 32 nt, Human
caucuguagaggaagagcaguguuaggaguua

SEQ ID NO: 358071 - RNA, 32 nt, Human
caucuguagcaagauggcugagaaauacagga

SEQ ID NO: 358072 - RNA, 32 nt, Human
caucuguauccuuguugaaauuauaugccucc

SEQ ID NO: 358073 - RNA, 32 nt, Human
caucugucaaaaguucacaaugccauacaggc

SEQ ID NO: 358074 - RNA, 32 nt, Human
caucugucacccaggcuggagugcaauggcau

SEQ ID NO: 358075 - RNA, 32 nt, Human
caucugucacccaggcuggagugcaguagugc

SEQ ID NO: 358076 - RNA, 32 nt, Human
caucugucacccaggcuggugugcaggggugc

SEQ ID NO: 358077 - RNA, 31 nt, Human
caucugucacugaaggagguggagcucccac

SEQ ID NO: 358078 - RNA, 32 nt, Human
caucugucauuuucauuucacaggguucacag

SEQ ID NO: 358079 - RNA, 32 nt, Human
caucuguccucaccaccuggcacagucucuca

SEQ ID NO: 358080 - RNA, 32 nt, Human
caucugucuacaacccuuaggauuaaguguuc

SEQ ID NO: 358081 - RNA, 32 nt, Human
caucugucucacccucuccuguuguauccagc

SEQ ID NO: 358082 - RNA, 32 nt, Human
caucugucuccuggcccuggcccaucugccuc

SEQ ID NO: 358083 - RNA, 32 nt, Human
caucugucuuaacuacuccuucccagguaaau

SEQ ID NO: 358084 - RNA, 32 nt, Human
caucugucuuggucacagagcugggugcugcc

SEQ ID NO: 358085 - RNA, 32 nt, Human
caucugugaacugcuuucugcuauauagaacu

SEQ ID NO: 358086 - RNA, 31 nt, Human
caucugugaagagucucagccaugacuuuga

SEQ ID NO: 358087 - RNA, 32 nt, Human
caucugugaaguuucugucauucguccagauc

SEQ ID NO: 358088 - RNA, 32 nt, Human
caucugugacuacuaaggaaaccuauuucuuu

SEQ ID NO: 358089 - RNA, 32 nt, Human
caucugugaggugacucgugaaaguaggugau

SEQ ID NO: 358090 - RNA, 32 nt, Human
caucugugauggcaaacaaaggcuccuugggc

SEQ ID NO: 358091 - RNA, 32 nt, Human
caucuguggaaauguguauccuucauggaauc

SEQ ID NO: 358092 - RNA, 32 nt, Human
caucugugggauaucucaucagccucgaugac

SEQ ID NO: 358093 - RNA, 18 nt, Human
caucugugggcuggccgg

SEQ ID NO: 358094 - RNA, 31 nt, Human
caucugugggugggccguggguagagggacc

SEQ ID NO: 358095 - RNA, 32 nt, Human
caucuguggucugcucugcucucacccuguuu

SEQ ID NO: 358096 - RNA, 32 nt, Human
caucugugguuucugcucaccagaccucucuu

SEQ ID NO: 358097 - RNA, 32 nt, Human
caucugugucugcuguauuauaaacagauaag

SEQ ID NO: 358098 - RNA, 32 nt, Human
caucuguuaccuccaacuugucagucaugauc

SEQ ID NO: 358099 - RNA, 32 nt, Human
caucuguugaugaacauauuucuaagagucau

SEQ ID NO: 358100 - RNA, 32 nt, Human
caucuguuucuucuccuccuuucucucccucu

SEQ ID NO: 358101 - RNA, 32 nt, Human
caucuguuuuccucuuuuccucuccucugacu

SEQ ID NO: 358102 - RNA, 32 nt, Human
caucuuaacaugguucgagccaucacuagaag

SEQ ID NO: 358103 - RNA, 32 nt, Human
caucuuaacugcacagauaccaucuucucggc

SEQ ID NO: 358104 - RNA, 32 nt, Human
caucuuaagcaacccccugccccaagagugag

SEQ ID NO: 358105 - RNA, 32 nt, Human
caucuuaauuaaccuuuuaauuuucacaauug

SEQ ID NO: 358106 - RNA, 32 nt, Human
caucuuaauuuccaaggaaacuauauuucuua

SEQ ID NO: 358107 - RNA, 32 nt, Human
caucuuacaauguuguugggaaggcuccaggg

SEQ ID NO: 358108 - RNA, 32 nt, Human
caucuuacacuauccauccucagagaagcugu

SEQ ID NO: 358109 - RNA, 32 nt, Human
caucuuacccuaccaucuccccaucuucaccc

SEQ ID NO: 358110 - RNA, 32 nt, Human
caucuuaccuguaauccuagcacuuugagacc

SEQ ID NO: 358111 - RNA, 32 nt, Human
caucuuagccuggcuccucuucugucucuagg

SEQ ID NO: 358112 - RNA, 23 nt, Human
caucuuagcuuagcaccaaccaa

SEQ ID NO: 358113 - RNA, 31 nt, Human
caucuuaggcacuuuuuaacauucucaauca

SEQ ID NO: 358114 - RNA, 32 nt, Human
caucuuagguauuccugcuccccugaagaaug

SEQ ID NO: 358115 - RNA, 32 nt, Human
caucuuauaguaaaccaaaagauuagcaauaa

SEQ ID NO: 358116 - RNA, 32 nt, Human
caucuuauccuauccucuaccacucucccaca

SEQ ID NO: 358117 - RNA, 32 nt, Human
caucuuaugugggacaggcuugggugugagac

SEQ ID NO: 358118 - RNA, 32 nt, Human
caucuucaaaaaggaaagauuuggaauuuuag

SEQ ID NO: 358119 - RNA, 32 nt, Human
caucuucaacucgucaguccagcaagaucauc

SEQ ID NO: 358120 - RNA, 32 nt, Human
caucuucaagcugggugcaguggcucacgccu

SEQ ID NO: 358121 - RNA, 32 nt, Human
caucuucaaggcaugaaauagcuuaaagagca

SEQ ID NO: 358122 - RNA, 32 nt, Human
caucuucaauaugccuggagucgucuguccaa

SEQ ID NO: 358123 - RNA, 32 nt, Human
caucuucacaccagcccauccugcccuuuaga

SEQ ID NO: 358124 - RNA, 32 nt, Human
caucuucacccacuucugggaggcuuucaggg

SEQ ID NO: 358125 - RNA, 32 nt, Human
caucuucacccagguguccaggcaauggagga

SEQ ID NO: 358126 - RNA, 32 nt, Human
caucuucacuaaaaauacaaaacuuagcuggu

SEQ ID NO: 358127 - RNA, 32 nt, Human
caucuucagccaaacaucuagucuuccauaga

SEQ ID NO: 358128 - RNA, 32 nt, Human
caucuucagcuuacaagaucuacaaugcagcu

SEQ ID NO: 358129 - RNA, 32 nt, Human
caucuucaggacucgugccuucugcuguucuc

SEQ ID NO: 358130 - RNA, 32 nt, Human
caucuucaggagacucaggaauggagcgguac

SEQ ID NO: 358131 - RNA, 32 nt, Human
caucuucaggcagagcuguggcacagaccccc

SEQ ID NO: 358132 - RNA, 32 nt, Human
caucuucaguuaggccugacaccaagaaacaa

SEQ ID NO: 358133 - RNA, 23 nt, Human
caucuucaucaccaccaucauca

SEQ ID NO: 358134 - RNA, 22 nt, Human
caucuucauccccuuccuuuaa

SEQ ID NO: 358135 - RNA, 32 nt, Human
caucuucaugguccuagaaggaucccaggagg

SEQ ID NO: 358136 - RNA, 25 nt, Human
caucuuccacgucaucuucacacca

SEQ ID NO: 358137 - RNA, 32 nt, Human
caucuuccagagccuuuaugagucacuucucu

SEQ ID NO: 358138 - RNA, 32 nt, Human
caucuuccagccuuggcacagaacugauggca

SEQ ID NO: 358139 - RNA, 32 nt, Human
caucuuccaggauggcagcaauggcgcugugc

SEQ ID NO: 358140 - RNA, 32 nt, Human
caucuuccccacacacaaucauucauaucuac

SEQ ID NO: 358141 - RNA, 32 nt, Human
caucuuccccacacauaaucauucauaucuac

SEQ ID NO: 358142 - RNA, 32 nt, Human
caucuucccccugggauauaagaugaucuagc

SEQ ID NO: 358143 - RNA, 32 nt, Human
caucuuccccuccaagggggcagaaauuccac

SEQ ID NO: 358144 - RNA, 32 nt, Human
caucuuccccugggaauccugagguuuaucug

SEQ ID NO: 358145 - RNA, 21 nt, Human
caucuucccugcgccaucuuu

SEQ ID NO: 358146 - RNA, 32 nt, Human
caucuucccugggaagucuuucuggccaaguc

SEQ ID NO: 358147 - RNA, 32 nt, Human
caucuuccggcccucugauuggccggcucgca

SEQ ID NO: 358148 - RNA, 32 nt, Human
caucuuccgggcugggagggaggcgggaccgg

SEQ ID NO: 358149 - RNA, 32 nt, Human
caucuuccucaaugccugugcuguauguauau

SEQ ID NO: 358150 - RNA, 32 nt, Human
caucuuccucccaacuggaggccucugagccu

SEQ ID NO: 358151 - RNA, 32 nt, Human
caucuuccuccccacaacugugcucaggcugg

SEQ ID NO: 358152 - RNA, 32 nt, Human
caucuuccuccucggcuguggucuggaugcug

SEQ ID NO: 358153 - RNA, 32 nt, Human
caucuuccugaccccuccuucucccucuccug

SEQ ID NO: 358154 - RNA, 32 nt, Human
caucuuccugcaggcccuuccucugccugcug

SEQ ID NO: 358155 - RNA, 32 nt, Human
caucuuccuggaggaaccuccuggggcucugg

SEQ ID NO: 358156 - RNA, 32 nt, Human
caucuuccuggcugcucagaaggaggcagauu

SEQ ID NO: 358157 - RNA, 32 nt, Human
caucuuccuuucucccucacccacacacuggg

SEQ ID NO: 358158 - RNA, 22 nt, Human
caucuucuacccugcuaccuca

SEQ ID NO: 358159 - RNA, 32 nt, Human
caucuucuagcagcuggcugugccucugggag

SEQ ID NO: 358160 - RNA, 32 nt, Human
caucuucucacagauuaagggcuaagggcaaa

SEQ ID NO: 358161 - RNA, 32 nt, Human
caucuucucacucccuucuccuugauaacagc

SEQ ID NO: 358162 - RNA, 32 nt, Human
caucuucucccaggauccauggguccagugcu

SEQ ID NO: 358163 - RNA, 32 nt, Human
caucuucucccuuuuugcacguuuugcuuggc

SEQ ID NO: 358164 - RNA, 32 nt, Human
caucuucuccuggccaaggcucugaccaugcu

SEQ ID NO: 358165 - RNA, 32 nt, Human
caucuucucgggcuucagcccagucccagcug

SEQ ID NO: 358166 - RNA, 32 nt, Human
caucuucucucaucugaucacuucauguuuug

SEQ ID NO: 358167 - RNA, 32 nt, Human
caucuucucuuccucuuccccaccguccucuc

SEQ ID NO: 358168 - RNA, 32 nt, Human
caucuucucuuuuuccagaauuuggaagcuag

SEQ ID NO: 358169 - RNA, 32 nt, Human
caucuucugccucccuuccuacuccuuuuggu

SEQ ID NO: 358170 - RNA, 32 nt, Human
caucuucugcuccuaccuucuccucugucuuc

SEQ ID NO: 358171 - RNA, 21 nt, Human
caucuucugcugggacugaag

SEQ ID NO: 358172 - RNA, 32 nt, Human
caucuucuguacgaccucacacagccucugca

SEQ ID NO: 358173 - RNA, 32 nt, Human
caucuucuguggaaggugggagccaacacccu

SEQ ID NO: 358174 - RNA, 32 nt, Human
caucuucuugugagcccugggcuuaggaguca

SEQ ID NO: 358175 - RNA, 32 nt, Human
caucuucuuucacuauagugggagagauuugg

SEQ ID NO: 358176 - RNA, 32 nt, Human
caucuucuuuuccaguagaaaauaguuuguga

SEQ ID NO: 358177 - RNA, 32 nt, Human
caucuugaaacccccauucuguuuccagccca

SEQ ID NO: 358178 - RNA, 32 nt, Human
caucuugacacauauauacacccaugaaauca

SEQ ID NO: 358179 - RNA, 32 nt, Human
caucuugacugaaaauuccaccccacacccac

SEQ ID NO: 358180 - RNA, 32 nt, Human
caucuugacuucugccccacaucugcuuuuug

SEQ ID NO: 358181 - RNA, 32 nt, Human
caucuugagaagcaggcggguugggugggagg

SEQ ID NO: 358182 - RNA, 32 nt, Human
caucuugagccccgccuuuuacuucggcccgc

SEQ ID NO: 358183 - RNA, 32 nt, Human
caucuugaugcaugaguucccagauacccucu

SEQ ID NO: 358184 - RNA, 32 nt, Human
caucuugcagaacuucugcuggagucgaaauc

SEQ ID NO: 358185 - RNA, 32 nt, Human
caucuugcagcagcaccgcacccucacuagcc

SEQ ID NO: 358186 - RNA, 32 nt, Human
caucuugcaguggcuuggcugacauugccucu

SEQ ID NO: 358187 - RNA, 16 nt, Human
caucuugccaccagaa

SEQ ID NO: 358188 - RNA, 32 nt, Human
caucuugcuaugucguccaggcuggucuugaa

SEQ ID NO: 358189 - RNA, 32 nt, Human
caucuugcucacugcuauauucucauugcuga

SEQ ID NO: 358190 - RNA, 32 nt, Human
caucuugcugagucaucaucaucaucaucauc

SEQ ID NO: 358191 - RNA, 32 nt, Human
caucuuggaaaagagaaaaacaauggaguuac

SEQ ID NO: 358192 - RNA, 31 nt, Human
caucuuggaaaaggaacucuugguucgauac

SEQ ID NO: 358193 - RNA, 32 nt, Human
caucuuggaaagcagaggugucccugcaggau

SEQ ID NO: 358194 - RNA, 32 nt, Human
caucuuggagcuuuuucaaaagcggggcuuca

SEQ ID NO: 358195 - RNA, 32 nt, Human
caucuuggauucaauccaaggugcuuuagcua

SEQ ID NO: 358196 - RNA, 32 nt, Human
caucuuggccaacauggugaaacccugucucu

SEQ ID NO: 358197 - RNA, 32 nt, Human
caucuuggccgcugccccagaaccuuggaaac

SEQ ID NO: 358198 - RNA, 32 nt, Human
caucuuggcuaaaucacuuggucuuucugcau

SEQ ID NO: 358199 - RNA, 32 nt, Human
caucuuggcuaacaaggugaaaccccgucucu

SEQ ID NO: 358200 - RNA, 32 nt, Human
caucuuggcuaacagggugaaaccccgucucu

SEQ ID NO: 358201 - RNA, 32 nt, Human
caucuuggcuaauauggugaaaccccaucucu

SEQ ID NO: 358202 - RNA, 23 nt, Human
caucuuggcucacaccuguaguc

SEQ ID NO: 358203 - RNA, 24 nt, Human
caucuuggcucacaccuguagucc

SEQ ID NO: 358204 - RNA, 32 nt, Human
caucuuggcucacaccuguagucccagcuacu

SEQ ID NO: 358205 - RNA, 32 nt, Human
caucuuggcucacugcaccuccaccuuccggg

SEQ ID NO: 358206 - RNA, 20 nt, Human
caucuuggcuggagugagug

SEQ ID NO: 358207 - RNA, 32 nt, Human
caucuugggaaaagaauggccacuucuugggg

SEQ ID NO: 358208 - RNA, 32 nt, Human
caucuugggccuggaggucagcuuuggagccc

SEQ ID NO: 358209 - RNA, 32 nt, Human
caucuuggggaccuacaagggccuggacucag

SEQ ID NO: 358210 - RNA, 21 nt, Human
caucuugguacccuugucaaa

SEQ ID NO: 358211 - RNA, 32 nt, Human
caucuugguagaaaaugggacuuauuccuuga

SEQ ID NO: 358212 - RNA, 32 nt, Human
caucuugguucugccauccucuugccuuccua

SEQ ID NO: 358213 - RNA, 32 nt, Human
caucuuguaagacacauaaugaggucccucua

SEQ ID NO: 358214 - RNA, 32 nt, Human
caucuugucaaucaguugcuucaugcccaggg

SEQ ID NO: 358215 - RNA, 32 nt, Human
caucuugucuuccuccccuuccuccuccagag

SEQ ID NO: 358216 - RNA, 32 nt, Human
caucuugugacccaguuaaguggauacauaag

SEQ ID NO: 358217 - RNA, 32 nt, Human
caucuuguuccugccuugagguuaccagguag

SEQ ID NO: 358218 - RNA, 31 nt, Human
caucuuguugucucugggguguggugucaca

SEQ ID NO: 358219 - RNA, 32 nt, Human
caucuuuaaacagcucaggaagaaauagcuua

SEQ ID NO: 358220 - RNA, 32 nt, Human
caucuuuaccaaaaauacaaaaauuagccagg

SEQ ID NO: 358221 - RNA, 32 nt, Human
caucuuuacuaaaaauacaaaaauuagccagg

SEQ ID NO: 358222 - RNA, 32 nt, Human
caucuuuacuaaaaauacaaaaauuagccggg

SEQ ID NO: 358223 - RNA, 32 nt, Human
caucuuuacugaaaauacaaaauaauuagccg

SEQ ID NO: 358224 - RNA, 32 nt, Human
caucuuuauauacuuuccuuacaaacccagug

SEQ ID NO: 358225 - RNA, 32 nt, Human
caucuuuauccaggucuuacccagucaggcua

SEQ ID NO: 358226 - RNA, 32 nt, Human
caucuuucacugggaggcaaauauguuuuuca

SEQ ID NO: 358227 - RNA, 32 nt, Human
caucuuucagccccacuggucuuuucaugcuc

SEQ ID NO: 358228 - RNA, 32 nt, Human
caucuuuccagccucagucggacgggcgcgga

SEQ ID NO: 358229 - RNA, 32 nt, Human
caucuuuccaggaagucaggauggagucagaa

SEQ ID NO: 358230 - RNA, 32 nt, Human
caucuuuccaguccuuggucaguuugguugug

SEQ ID NO: 358231 - RNA, 32 nt, Human
caucuuucccacccucuugguugccgcuggcc

SEQ ID NO: 358232 - RNA, 32 nt, Human
caucuuucccagagugccucagaccuuauugc

SEQ ID NO: 358233 - RNA, 32 nt, Human
caucuuucccucccaucucugccaucugucug

SEQ ID NO: 358234 - RNA, 17 nt, Human
caucuuuccuugucgaa

SEQ ID NO: 358235 - RNA, 20 nt, Human
caucuuucgggcugccgagg

SEQ ID NO: 358236 - RNA, 32 nt, Human
caucuuucucuugccgcgugcugguguuggag

SEQ ID NO: 358237 - RNA, 32 nt, Human
caucuuucuucuaugcagaacaaaaagcugca

SEQ ID NO: 358238 - RNA, 32 nt, Human
caucuuugaaagcaucuucuacaagcagaagu

SEQ ID NO: 358239 - RNA, 32 nt, Human
caucuuugaucaguggguguaucuguaaugaa

SEQ ID NO: 358240 - RNA, 32 nt, Human
caucuuugccaacauggugaaacuccaucucu

SEQ ID NO: 358241 - RNA, 32 nt, Human
caucuuugccuuucuugucguugauuuuugcc

SEQ ID NO: 358242 - RNA, 32 nt, Human
caucuuugcuggaggagccccaugacucccug

SEQ ID NO: 358243 - RNA, 32 nt, Human
caucuuuggaaaugaugagauuauuuccugug

SEQ ID NO: 358244 - RNA, 32 nt, Human
caucuuuggccugcuggugccagcaggggaca

SEQ ID NO: 358245 - RNA, 32 nt, Human
caucuuugggaaagcuuacuguuuuugauaaa

SEQ ID NO: 358246 - RNA, 32 nt, Human
caucuuugugcaaaugcacucauguuugugca

SEQ ID NO: 358247 - RNA, 32 nt, Human
caucuuugugccuguacuuaugcagcuuucua

SEQ ID NO: 358248 - RNA, 32 nt, Human
caucuuuguuggcgaucugagugcaguguggc

SEQ ID NO: 358249 - RNA, 32 nt, Human
caucuuuguuucugcugcaucuuugcaggaag

SEQ ID NO: 358250 - RNA, 32 nt, Human
caucuuuuccagguagaagguggagaaaucug

SEQ ID NO: 358251 - RNA, 32 nt, Human
caucuuuucccucccucucucuuucagcaggg

SEQ ID NO: 358252 - RNA, 32 nt, Human
caucuuuucucaugaaaguaaaaagaaccaag

SEQ ID NO: 358253 - RNA, 32 nt, Human
caucuuuucucccauuccuccuucuuuauaua

SEQ ID NO: 358254 - RNA, 32 nt, Human
caucuuuucucucucugacgcauacaauggaa

SEQ ID NO: 358255 - RNA, 32 nt, Human
caucuuuugaucuuuuaguuuuucccucagug

SEQ ID NO: 358256 - RNA, 32 nt, Human
caucuuuuuaaccucuguucaggaaguccuua

SEQ ID NO: 358257 - RNA, 19 nt, Human
caucuuuuucaauuucuga

SEQ ID NO: 358258 - RNA, 32 nt, Human
caucuuuuucaguaauuguaaagugauuuauu

SEQ ID NO: 358259 - RNA, 19 nt, Human
caucuuuuuccaagcagug

SEQ ID NO: 358260 - RNA, 32 nt, Human
caucuuuuucucuguaaugguggagaggcugc

SEQ ID NO: 358261 - RNA, 32 nt, Human
caucuuuuucugucuguuuugucugcuuucuu

SEQ ID NO: 358262 - RNA, 32 nt, Human
caucuuuuugcugagaguucugagcucuguac

SEQ ID NO: 358263 - RNA, 32 nt, Human
caugaaaaaucaugggccagagccucggcccu

SEQ ID NO: 358264 - RNA, 32 nt, Human
caugaaaacugcacuuuauugcaaguuagugu

SEQ ID NO: 358265 - RNA, 23 nt, Human
caugaaaaggaggccacaggaga

SEQ ID NO: 358266 - RNA, 32 nt, Human
caugaaaauuagaaaaugaauguaaugaaauu

SEQ ID NO: 358267 - RNA, 32 nt, Human
caugaaacacccuguugaucccuucccaggcu

SEQ ID NO: 358268 - RNA, 22 nt, Human
caugaaacaccuggcugugaaa

SEQ ID NO: 358269 - RNA, 32 nt, Human
caugaaacagcaggcuacaaaaccacugcaug

SEQ ID NO: 358270 - RNA, 24 nt, Human
caugaaaccacaacgaggauuucu

SEQ ID NO: 358271 - RNA, 23 nt, Human
caugaaaccaucaucagagucac

SEQ ID NO: 358272 - RNA, 32 nt, Human
caugaaacugagacucagucucccagggguaa

SEQ ID NO: 358273 - RNA, 32 nt, Human
caugaaacugauuguaaagcuuuuugacaacu

SEQ ID NO: 358274 - RNA, 32 nt, Human
caugaaacuguacauacugcagugugaauuuu

SEQ ID NO: 358275 - RNA, 32 nt, Human
caugaaacuuggguuaauuuugcucagaguau

SEQ ID NO: 358276 - RNA, 32 nt, Human
caugaaagaacuuuucaccuuccuucaugauu

SEQ ID NO: 358277 - RNA, 32 nt, Human
caugaaagaaugacccuggugagugcucuaag

SEQ ID NO: 358278 - RNA, 32 nt, Human
caugaaagagaauguucacaacacugaaaaua

SEQ ID NO: 358279 - RNA, 32 nt, Human
caugaaaggaggaagagagaaaaucggaucca

SEQ ID NO: 358280 - RNA, 32 nt, Human
caugaaagucacauccuucuccugccucuguc

SEQ ID NO: 358281 - RNA, 32 nt, Human
caugaaaguccuguuagguauccagaguucua

SEQ ID NO: 358282 - RNA, 32 nt, Human
caugaaauacugugccuggccuggggaccagg

SEQ ID NO: 358283 - RNA, 32 nt, Human
caugaaauaucacugacacuccagacuaaagc

SEQ ID NO: 358284 - RNA, 32 nt, Human
caugaaauggcuguuuuccaauggaggaacag

SEQ ID NO: 358285 - RNA, 32 nt, Human
caugaaauggguuucuggaggaaagaucagca

SEQ ID NO: 358286 - RNA, 32 nt, Human
caugaaauugcguucuuccugcauugaaauaa

SEQ ID NO: 358287 - RNA, 32 nt, Human
caugaacaaucuccccuaccuccugggacucu

SEQ ID NO: 358288 - RNA, 32 nt, Human
caugaacacagaauaguaccuuacauuugcua

SEQ ID NO: 358289 - RNA, 32 nt, Human
caugaacacagccugucugugcucagacauag

SEQ ID NO: 358290 - RNA, 32 nt, Human
caugaacacaugcacaugugcacacacaagua

SEQ ID NO: 358291 - RNA, 32 nt, Human
caugaacacccacuguaccgggccggacaccu

SEQ ID NO: 358292 - RNA, 32 nt, Human
caugaacagaacuuacgguaacaggcacggcu

SEQ ID NO: 358293 - RNA, 32 nt, Human
caugaacaguggccuggcuggcguggcagggc

SEQ ID NO: 358294 - RNA, 32 nt, Human
caugaacaugggggccagagagcagauggacu

SEQ ID NO: 358295 - RNA, 32 nt, Human
caugaacauguugagugagcaugcuggagaau

SEQ ID NO: 358296 - RNA, 32 nt, Human
caugaaccaggccaaagcggagcggagcgggg

SEQ ID NO: 358297 - RNA, 32 nt, Human
caugaacccaggaggcagagcuugcagugagc

SEQ ID NO: 358298 - RNA, 32 nt, Human
caugaacccaggaggcagagcuuguagugagc

SEQ ID NO: 358299 - RNA, 32 nt, Human
caugaacccaggaggcagagguugcagugagc

SEQ ID NO: 358300 - RNA, 32 nt, Human
caugaacccaggaggcggagcuugcagugagc

SEQ ID NO: 358301 - RNA, 32 nt, Human
caugaacccaggagguugaagcugcggugggc

SEQ ID NO: 358302 - RNA, 32 nt, Human
caugaacccaggaguuggagcuugcagugagc

SEQ ID NO: 358303 - RNA, 32 nt, Human
caugaacccaggaugcggagguugcagugagc

SEQ ID NO: 358304 - RNA, 32 nt, Human
caugaaccccaggcuggagugcaguggcucaa

SEQ ID NO: 358305 - RNA, 32 nt, Human
caugaaccccuuuucuccagaaaagcugcuuc

SEQ ID NO: 358306 - RNA, 32 nt, Human
caugaacccggaaggcagagcuugcagugagc

SEQ ID NO: 358307 - RNA, 32 nt, Human
caugaacccgggaggaggagcuugcagugagc

SEQ ID NO: 358308 - RNA, 32 nt, Human
caugaacccgggaggaggaggaggagguugca

SEQ ID NO: 358309 - RNA, 32 nt, Human
caugaacccgggaggcagagcuugcagugagc

SEQ ID NO: 358310 - RNA, 32 nt, Human
caugaacccgggaggcagagguugcagugagc

SEQ ID NO: 358311 - RNA, 32 nt, Human
caugaacccgggaggcggaacuugcggugagc

SEQ ID NO: 358312 - RNA, 32 nt, Human
caugaacccgggaggcggagcuugcagugagc

SEQ ID NO: 358313 - RNA, 32 nt, Human
caugaacccgggaggcggagguugcagucagc

SEQ ID NO: 358314 - RNA, 32 nt, Human
caugaacccgggaggcggaucuugcauugagc

SEQ ID NO: 358315 - RNA, 32 nt, Human
caugaacccgggagguagagcuugcagugaac

SEQ ID NO: 358316 - RNA, 32 nt, Human
caugaacccgggaggugcagguugcagugagc

SEQ ID NO: 358317 - RNA, 32 nt, Human
caugaacccgggagguggaacuugcagugagc

SEQ ID NO: 358318 - RNA, 32 nt, Human
caugaacccgggagguggagcuugcagugagc

SEQ ID NO: 358319 - RNA, 32 nt, Human
caugaacccgggagguggagcuugcagugggu

SEQ ID NO: 358320 - RNA, 32 nt, Human
caugaacccgggagguggagguugcagggagc

SEQ ID NO: 358321 - RNA, 32 nt, Human
caugaacccgguagguggagguugcagugagc

SEQ ID NO: 358322 - RNA, 32 nt, Human
caugaacccuggggacucacuccaacuuggua

SEQ ID NO: 358323 - RNA, 32 nt, Human
caugaaccuaaguggcagagguugcagugagc

SEQ ID NO: 358324 - RNA, 32 nt, Human
caugaaccuccagcaaauagcaaguccaggaa

SEQ ID NO: 358325 - RNA, 32 nt, Human
caugaaccuggaagguggagcuugcagugagc

SEQ ID NO: 358326 - RNA, 32 nt, Human
caugaaccugggaggcagagcuugcagugagc

SEQ ID NO: 358327 - RNA, 32 nt, Human
caugaaccugggaggcagagcuugcagugagu

SEQ ID NO: 358328 - RNA, 32 nt, Human
caugaaccugggaggcagagcuugcagugauu

SEQ ID NO: 358329 - RNA, 32 nt, Human
caugaaccugggaggcggagcuugcaguaagc

SEQ ID NO: 358330 - RNA, 32 nt, Human
caugaaccugggaggcggagcuugcagugagc

SEQ ID NO: 358331 - RNA, 32 nt, Human
caugaaccugggaggucaagauugcagugagc

SEQ ID NO: 358332 - RNA, 32 nt, Human
caugaaccugggagguggagcaugcagccagc

SEQ ID NO: 358333 - RNA, 32 nt, Human
caugaaccugggagguggagguugcagugagc

SEQ ID NO: 358334 - RNA, 22 nt, Human
caugaaccuugaacaucaaaua

SEQ ID NO: 358335 - RNA, 18 nt, Human
caugaacguaugauguuc

SEQ ID NO: 358336 - RNA, 32 nt, Human
caugaacuagcaaccccaccuuccaccauggu

SEQ ID NO: 358337 - RNA, 22 nt, Human
caugaacucaaguacccggaca

SEQ ID NO: 358338 - RNA, 32 nt, Human
caugaacugauaguuaggcaaacaaaugguug

SEQ ID NO: 358339 - RNA, 32 nt, Human
caugaacuucaaauaaauaaaaacuaugguau

SEQ ID NO: 358340 - RNA, 32 nt, Human
caugaacuugcaaucauggacagcaacaauuu

SEQ ID NO: 358341 - RNA, 20 nt, Human
caugaagaagaagggaccuc

SEQ ID NO: 358342 - RNA, 32 nt, Human
caugaagacaaucaccugccucaccuucuagg

SEQ ID NO: 358343 - RNA, 32 nt, Human
caugaagacgucacugaccaucuucucugguu

SEQ ID NO: 358344 - RNA, 32 nt, Human
caugaagagaagcaauuuuggggaaggguuug

SEQ ID NO: 358345 - RNA, 32 nt, Human
caugaagagcagaugaccaccaugcucugugu

SEQ ID NO: 358346 - RNA, 32 nt, Human
caugaagagcuacuccucugacaguuucaugu

SEQ ID NO: 358347 - RNA, 32 nt, Human
caugaagagcucuucaugcauucuuugcaaag

SEQ ID NO: 358348 - RNA, 32 nt, Human
caugaagcaaaucuuuuguugcuaccccauug

SEQ ID NO: 358349 - RNA, 32 nt, Human
caugaagcaagaaacagugcagggugcccagu

SEQ ID NO: 358350 - RNA, 32 nt, Human
caugaagcacacacagacuuuugaaagcaagg

SEQ ID NO: 358351 - RNA, 26 nt, Human
caugaagcagcuuggugagacugaga

SEQ ID NO: 358352 - RNA, 32 nt, Human
caugaagcauuggcucagaaguagagggagaa

SEQ ID NO: 358353 - RNA, 32 nt, Human
caugaagccagccccugcagugccguccaccc

SEQ ID NO: 358354 - RNA, 32 nt, Human
caugaagccaggaguucgagaccagccugacc

SEQ ID NO: 358355 - RNA, 32 nt, Human
caugaagccagugcacgccagccugggcgaca

SEQ ID NO: 358356 - RNA, 32 nt, Human
caugaagccccuggcauuugcuggggaaggga

SEQ ID NO: 358357 - RNA, 32 nt, Human
caugaagcgguucaccccacaguacaaaggua

SEQ ID NO: 358358 - RNA, 32 nt, Human
caugaagcuuucugaaugagaagucugauuuu

SEQ ID NO: 358359 - RNA, 32 nt, Human
caugaaggaauaggcaggacuuaacuuggggu

SEQ ID NO: 358360 - RNA, 32 nt, Human
caugaaggacagugauguggggaggccguggg

SEQ ID NO: 358361 - RNA, 26 nt, Human
caugaaggacuucucagaugucaucc

SEQ ID NO: 358362 - RNA, 32 nt, Human
caugaaggagaagggcaagagauccucugaac

SEQ ID NO: 358363 - RNA, 32 nt, Human
caugaaggagaagggcaagaggucuucugaac

SEQ ID NO: 358364 - RNA, 32 nt, Human
caugaaggaugcaggcuuccaggccuggcuuc

SEQ ID NO: 358365 - RNA, 26 nt, Human
caugaaggcaagggguugguggaucg

SEQ ID NO: 358366 - RNA, 32 nt, Human
caugaaggcagagucgagacuguggauucugg

SEQ ID NO: 358367 - RNA, 32 nt, Human
caugaaggcguguuugauuacuccaggcuucu

SEQ ID NO: 358368 - RNA, 32 nt, Human
caugaaggcuggcgcccguaaucccagcuacu

SEQ ID NO: 358369 - RNA, 32 nt, Human
caugaaggcugugugcagugcaaggcuguacc

SEQ ID NO: 358370 - RNA, 21 nt, Human
caugaaguaaaaggggccuca

SEQ ID NO: 358371 - RNA, 32 nt, Human
caugaaguaagauuacagcagagcagaaguug

SEQ ID NO: 358372 - RNA, 32 nt, Human
caugaagucucuuccuuucugggcuuuguuag

SEQ ID NO: 358373 - RNA, 32 nt, Human
caugaagucugaccaacauggagaaacccugu

SEQ ID NO: 358374 - RNA, 32 nt, Human
caugaaguuguugccaguuucuguauuacaac

SEQ ID NO: 358375 - RNA, 32 nt, Human
caugaaguuguugccaguuucuguauuauaac

SEQ ID NO: 358376 - RNA, 32 nt, Human
caugaaguuuagcuuagagaagaaaagaauaa

SEQ ID NO: 358377 - RNA, 32 nt, Human
caugaaguuucugcugaugggaggagucaguu

SEQ ID NO: 358378 - RNA, 20 nt, Human
caugaaguuugccuguucua

SEQ ID NO: 358379 - RNA, 32 nt, Human
caugaauacuccugaggguucacaaacgagcc

SEQ ID NO: 358380 - RNA, 32 nt, Human
caugaaucaagcaauccagccucaugggaagu

SEQ ID NO: 358381 - RNA, 32 nt, Human
caugaauccaggaggcagagcuugcagugagc

SEQ ID NO: 358382 - RNA, 32 nt, Human
caugaauccaggagguggagguugcagugagc

SEQ ID NO: 358383 - RNA, 32 nt, Human
caugaaucuuugcucccuuccacauuauggau

SEQ ID NO: 358384 - RNA, 32 nt, Human
caugaaugaaacugaugguucaauuucagaag

SEQ ID NO: 358385 - RNA, 32 nt, Human
caugaaugaagauagguuguaaacugaaugcu

SEQ ID NO: 358386 - RNA, 32 nt, Human
caugaaugcaaaccccuccagcccaucagacg

SEQ ID NO: 358387 - RNA, 32 nt, Human
caugaaugccccacugcacuccagccugggcg

SEQ ID NO: 358388 - RNA, 32 nt, Human
caugaauggagagagacagagaggaagugcag

SEQ ID NO: 358389 - RNA, 32 nt, Human
caugaaugggcaagaacuuauuugcaauguuu

SEQ ID NO: 358390 - RNA, 32 nt, Human
caugaaugguugaaugugaacaugacaguaaa

SEQ ID NO: 358391 - RNA, 32 nt, Human
caugaauguacaaguuuagcaaacuuccuccu

SEQ ID NO: 358392 - RNA, 32 nt, Human
caugaaugucagagacauugacuggaggccuu

SEQ ID NO: 358393 - RNA, 32 nt, Human
caugaaugugaggaggguggaaagcauuucgg

SEQ ID NO: 358394 - RNA, 32 nt, Human
caugaaugugagucauuauguagcugucguac

SEQ ID NO: 358395 - RNA, 24 nt, Human
caugacaaaaccccgucucuacua

SEQ ID NO: 358396 - RNA, 22 nt, Human
caugacaaaacccugucucuac

SEQ ID NO: 358397 - RNA, 32 nt, Human
caugacaaacccacacuggcauuggauaaauc

SEQ ID NO: 358398 - RNA, 20 nt, Human
caugacaaccacacuccacu

SEQ ID NO: 358399 - RNA, 32 nt, Human
caugacaaucaccuucagaaucaugucgaucc

SEQ ID NO: 358400 - RNA, 32 nt, Human
caugacaccaacaucugcucagcuucugguga

SEQ ID NO: 358401 - RNA, 32 nt, Human
caugacaccgacagcugcccagccuguucaca

SEQ ID NO: 358402 - RNA, 32 nt, Human
caugacacgggcugacacagucucauaucccc

SEQ ID NO: 358403 - RNA, 32 nt, Human
caugacacugcacuccagccugggcaacagag

SEQ ID NO: 358404 - RNA, 32 nt, Human
caugacacugcacuccagccugggugauagag

SEQ ID NO: 358405 - RNA, 32 nt, Human
caugacacugcacuccagccuuggcaacaaag

SEQ ID NO: 358406 - RNA, 32 nt, Human
caugacacugcacuccagccuuggcaacagag

SEQ ID NO: 358407 - RNA, 32 nt, Human
caugacacugcccuccagccuggacaacagau

SEQ ID NO: 358408 - RNA, 32 nt, Human
caugacacuuccuugcuuuggccagaagccau

SEQ ID NO: 358409 - RNA, 32 nt, Human
caugacagaacagcacauccuggccagcaccc

SEQ ID NO: 358410 - RNA, 24 nt, Human
caugacagcaugugccuguaauuc

SEQ ID NO: 358411 - RNA, 32 nt, Human
caugacagcccuggaucuauccaccuccccau

SEQ ID NO: 358412 - RNA, 32 nt, Human
caugacagccuccaccccacaacccaaaaggu

SEQ ID NO: 358413 - RNA, 32 nt, Human
caugacagcggcaaucuuuucuuuggucaaag

SEQ ID NO: 358414 - RNA, 32 nt, Human
caugacaguucccagauguauuucaagccuuu

SEQ ID NO: 358415 - RNA, 32 nt, Human
caugacauacugaagcuccagccagggggaug

SEQ ID NO: 358416 - RNA, 32 nt, Human
caugacaucaccgucacucugccuaaaagcac

SEQ ID NO: 358417 - RNA, 32 nt, Human
caugacaucacuggggaaggagugggacauca

SEQ ID NO: 358418 - RNA, 32 nt, Human
caugacaugcugucuguaagcccuuugucuug

SEQ ID NO: 358419 - RNA, 20 nt, Human
caugacauugaaucacauga

SEQ ID NO: 358420 - RNA, 32 nt, Human
caugacauuggagcaccuuccucuccagccag

SEQ ID NO: 358421 - RNA, 32 nt, Human
caugacauuuccaacacugugugaauuaucua

SEQ ID NO: 358422 - RNA, 32 nt, Human
caugaccaaaaaccaaaagugcauucaaccuu

SEQ ID NO: 358423 - RNA, 32 nt, Human
caugaccaaauuugaccugcccuuguuuaugg

SEQ ID NO: 358424 - RNA, 32 nt, Human
caugaccaggagaggguuaaugagagccaaga

SEQ ID NO: 358425 - RNA, 32 nt, Human
caugaccaggcucugggcaaggcuccucacag

SEQ ID NO: 358426 - RNA, 32 nt, Human
caugaccauuggggcaccuguugcccacaggg

SEQ ID NO: 358427 - RNA, 32 nt, Human
caugacccagccucacagacccucucaggccu

SEQ ID NO: 358428 - RNA, 18 nt, Human
caugacccaggcuggcca

SEQ ID NO: 358429 - RNA, 32 nt, Human
caugacccaucuucuaccaggcagaucuuuau

SEQ ID NO: 358430 - RNA, 32 nt, Human
caugaccccaaaccaccaucucuuuacuguac

SEQ ID NO: 358431 - RNA, 32 nt, Human
caugaccccucagauccacacaaagccuucug

SEQ ID NO: 358432 - RNA, 32 nt, Human
caugacccggguggcgggacaagacuugcuuc

SEQ ID NO: 358433 - RNA, 15 nt, Human
caugacccucaggug

SEQ ID NO: 358434 - RNA, 32 nt, Human
caugacccuccaccugcacccagaccucuggg

SEQ ID NO: 358435 - RNA, 32 nt, Human
caugacccucugcugucucucccuguucagcu

SEQ ID NO: 358436 - RNA, 32 nt, Human
caugacccuucuccaguugucuuguucccaua

SEQ ID NO: 358437 - RNA, 32 nt, Human
caugacccuuucuccuucaugccaggcuccua

SEQ ID NO: 358438 - RNA, 32 nt, Human
caugaccgcacggcggccuggccaacacugac

SEQ ID NO: 358439 - RNA, 32 nt, Human
caugaccuacuucaaaccccuacugaccuggc

SEQ ID NO: 358440 - RNA, 32 nt, Human
caugaccucuucaugaagaaccauaauugcuu

SEQ ID NO: 358441 - RNA, 32 nt, Human
caugaccugcaggcaucuuuacugcagcucug

SEQ ID NO: 358442 - RNA, 32 nt, Human
caugaccugccaccucugcuuccacaccggag

SEQ ID NO: 358443 - RNA, 32 nt, Human
caugaccugggcaaucugcaugugaugccaac

SEQ ID NO: 358444 - RNA, 32 nt, Human
caugaccuuauccuuccucuccuuccuuguua

SEQ ID NO: 358445 - RNA, 32 nt, Human
caugaccuucaccucuggagaguagggucuau

SEQ ID NO: 358446 - RNA, 32 nt, Human
caugaccuuccuccuccucuucacuuggccag

SEQ ID NO: 358447 - RNA, 32 nt, Human
caugaccuugggcacaugagaucauguccucc

SEQ ID NO: 358448 - RNA, 32 nt, Human
caugaccuugugggagaugccauacagaggcu

SEQ ID NO: 358449 - RNA, 22 nt, Human
caugacgaaaccccaucuccac

SEQ ID NO: 358450 - RNA, 24 nt, Human
caugacgaaaccccaucucuacua

SEQ ID NO: 358451 - RNA, 24 nt, Human
caugacgaaacccggucucuacua

SEQ ID NO: 358452 - RNA, 32 nt, Human
caugacgccuggcuaauuuuugcauuuuuagu

SEQ ID NO: 358453 - RNA, 32 nt, Human
caugacgcgugccauuuagagcucucagagca

SEQ ID NO: 358454 - RNA, 32 nt, Human
caugacggagcaugacacagcacuuuugggca

SEQ ID NO: 358455 - RNA, 32 nt, Human
caugacggaggccagagguaggaaaagcaaga

SEQ ID NO: 358456 - RNA, 24 nt, Human
caugacggcucaugccuguaaucc

SEQ ID NO: 358457 - RNA, 32 nt, Human
caugacggcucaugccuguaaucccagcacuu

SEQ ID NO: 358458 - RNA, 32 nt, Human
caugacggugccacugcacuccagcuugggug

SEQ ID NO: 358459 - RNA, 32 nt, Human
caugacuaaugagagacuugcagcuuggauac

SEQ ID NO: 358460 - RNA, 32 nt, Human
caugacuauuuaaagccaggggauuaucuuuc

SEQ ID NO: 358461 - RNA, 32 nt, Human
caugacucacugcagccucaaacuccuggguu

SEQ ID NO: 358462 - RNA, 32 nt, Human
caugacucagccuguuccaugaaggcagagcc

SEQ ID NO: 358463 - RNA, 32 nt, Human
caugacucaucacugcuuccaugcccugggcu

SEQ ID NO: 358464 - RNA, 32 nt, Human
caugacucauuucuguuucauuuuucagcgga

SEQ ID NO: 358465 - RNA, 32 nt, Human
caugacuccaggcugugccucucuccauguuu

SEQ ID NO: 358466 - RNA, 32 nt, Human
caugacucccacugcugccucuccugggcaug

SEQ ID NO: 358467 - RNA, 32 nt, Human
caugacucccuaaugccuucccaaccucgugg

SEQ ID NO: 358468 - RNA, 32 nt, Human
caugacuccuccugaagcuuauugaacaucuc

SEQ ID NO: 358469 - RNA, 32 nt, Human
caugacugaacauuaagguuagggacucugau

SEQ ID NO: 358470 - RNA, 26 nt, Human
caugacugacuggguguuccccaagc

SEQ ID NO: 358471 - RNA, 32 nt, Human
caugacugacuucacaugcucagcuuucucag

SEQ ID NO: 358472 - RNA, 32 nt, Human
caugacugagucaccuccaggagcucaccuga

SEQ ID NO: 358473 - RNA, 32 nt, Human
caugacugcaaguuuccugaggccuccccagc

SEQ ID NO: 358474 - RNA, 32 nt, Human
caugacugcagccuugaacuccugggcuuaag

SEQ ID NO: 358475 - RNA, 21 nt, Human
caugacugcccuugacaugau

SEQ ID NO: 358476 - RNA, 20 nt, Human
caugacugcuuccgcugcca

SEQ ID NO: 358477 - RNA, 32 nt, Human
caugacuguaaguuuccugaggccuccccagc

SEQ ID NO: 358478 - RNA, 32 nt, Human
caugacugugccacugcaccucuagucugggu

SEQ ID NO: 358479 - RNA, 32 nt, Human
caugacugugcugugaggaaggcguuccuguu

SEQ ID NO: 358480 - RNA, 32 nt, Human
caugacuguggccugaguuccccagccccucu

SEQ ID NO: 358481 - RNA, 32 nt, Human
caugacuucccuuguaaacagaagcaacagaa

SEQ ID NO: 358482 - RNA, 32 nt, Human
caugacuugcagcugucuccuggauuguguca

SEQ ID NO: 358483 - RNA, 21 nt, Human
caugacuuggaacugaacuaa

SEQ ID NO: 358484 - RNA, 32 nt, Human
caugacuuuuugacacacuugccaugacgugu

SEQ ID NO: 358485 - RNA, 32 nt, Human
caugagaaaccagcucgaccggagggccagaa

SEQ ID NO: 358486 - RNA, 19 nt, Human
caugagaaaccauagcaga

SEQ ID NO: 358487 - RNA, 32 nt, Human
caugagaagagcuuggauacagugaguuugca

SEQ ID NO: 358488 - RNA, 32 nt, Human
caugagaaggaacuuccagguguuacuguaau

SEQ ID NO: 358489 - RNA, 32 nt, Human
caugagaaucacuugaaccugggaagcagagg

SEQ ID NO: 358490 - RNA, 32 nt, Human
caugagaaucacuugaaccugggagacagagg

SEQ ID NO: 358491 - RNA, 32 nt, Human
caugagaaugaauguugucgggaccugcuugg

SEQ ID NO: 358492 - RNA, 32 nt, Human
caugagaaugcacacaaaacugaacauuuucu

SEQ ID NO: 358493 - RNA, 20 nt, Human
caugagaauugcuugaacca

SEQ ID NO: 358494 - RNA, 32 nt, Human
caugagacaacuggaaauauaacucugacugg

SEQ ID NO: 358495 - RNA, 32 nt, Human
caugagacaccaaagaaaagaggacucuauac

SEQ ID NO: 358496 - RNA, 32 nt, Human
caugagaccccaccucccucccugccugccag

SEQ ID NO: 358497 - RNA, 32 nt, Human
caugagacccuccugaccacguggaagauugu

SEQ ID NO: 358498 - RNA, 32 nt, Human
caugagaccgaggaucucguucguugaucgau

SEQ ID NO: 358499 - RNA, 22 nt, Human
caugagacuccuuguggccuca

SEQ ID NO: 358500 - RNA, 19 nt, Human
caugagacugcagagcaga

SEQ ID NO: 358501 - RNA, 32 nt, Human
caugagagacucuacaaaccugaaagauguga

SEQ ID NO: 358502 - RNA, 32 nt, Human
caugagagcugaugguuuaguuccagucugau

SEQ ID NO: 358503 - RNA, 32 nt, Human
caugagaggggaggcaaagaagaaaaggacac

SEQ ID NO: 358504 - RNA, 32 nt, Human
caugagaggugccaguuauagguggaugugcc

SEQ ID NO: 358505 - RNA, 24 nt, Human
caugagaguagagggcacuggguc

SEQ ID NO: 358506 - RNA, 32 nt, Human
caugagaguccaggcugucugagucagcacag

SEQ ID NO: 358507 - RNA, 32 nt, Human
caugagauagaggcacccacuaccugcggggc

SEQ ID NO: 358508 - RNA, 32 nt, Human
caugagaucuuuuugcuaagcuggcagaaaga

SEQ ID NO: 358509 - RNA, 32 nt, Human
caugagaugauggcuguauuuaucuguuuauu

SEQ ID NO: 358510 - RNA, 32 nt, Human
caugagauucugcuuugggcuucacuucuuug

SEQ ID NO: 358511 - RNA, 32 nt, Human
caugagauuuggaggaggucaaacaaacuaaa

SEQ ID NO: 358512 - RNA, 24 nt, Human
caugagcacugagcugacuauuga

SEQ ID NO: 358513 - RNA, 32 nt, Human
caugagcagaugaaauagaagcauuaaauauu

SEQ ID NO: 358514 - RNA, 32 nt, Human
caugagcaugaagcccaguggcaccaaauggc

SEQ ID NO: 358515 - RNA, 22 nt, Human
caugagcauguuaaauagagcu

SEQ ID NO: 358516 - RNA, 32 nt, Human
caugagccaauucugucacaguccgaaauaga

SEQ ID NO: 358517 - RNA, 32 nt, Human
caugagccaccacaucuggccuaggaccuuaa

SEQ ID NO: 358518 - RNA, 32 nt, Human
caugagccaccgcacccagccugguuauugga

SEQ ID NO: 358519 - RNA, 32 nt, Human
caugagccacgcgcccagccuagacuagcauu

SEQ ID NO: 358520 - RNA, 32 nt, Human
caugagccacugcaccagccccaggggucuaa

SEQ ID NO: 358521 - RNA, 32 nt, Human
caugagccacugcacccaaccccuggaaaacu

SEQ ID NO: 358522 - RNA, 32 nt, Human
caugagccacugcacccagccaagugaucauu

SEQ ID NO: 358523 - RNA, 32 nt, Human
caugagccacugcacccagccgauaggaaguu

SEQ ID NO: 358524 - RNA, 32 nt, Human
caugagccacugcacccagccuuggcgggcau

SEQ ID NO: 358525 - RNA, 32 nt, Human
caugagccacugcacccggcccugagaauaua

SEQ ID NO: 358526 - RNA, 32 nt, Human
caugagccacugcacccggccgguggaaagca

SEQ ID NO: 358527 - RNA, 32 nt, Human
caugagccacugcaccugaccugcugaauugu

SEQ ID NO: 358528 - RNA, 32 nt, Human
caugagccacugcaccuggccuaggacuggug

SEQ ID NO: 358529 - RNA, 32 nt, Human
caugagccacugcacucaaccuuaagaccuac

SEQ ID NO: 358530 - RNA, 32 nt, Human
caugagccacugcgccagccuaaaguguguuc

SEQ ID NO: 358531 - RNA, 32 nt, Human
caugagccacugcgcccggccccuggagcaag

SEQ ID NO: 358532 - RNA, 32 nt, Human
caugagccacugcgcccggccugggucuccgu

SEQ ID NO: 358533 - RNA, 32 nt, Human
caugagccacugcgccuggccggacaauaaug

SEQ ID NO: 358534 - RNA, 32 nt, Human
caugagccacugcgccuggccucagaaugcau

SEQ ID NO: 358535 - RNA, 32 nt, Human
caugagccacugugccuggccugagggcuggu

SEQ ID NO: 358536 - RNA, 32 nt, Human
caugagccagagggaggaaguugaaaggauac

SEQ ID NO: 358537 - RNA, 32 nt, Human
caugagccauugcaccuggccaagaagagaca

SEQ ID NO: 358538 - RNA, 32 nt, Human
caugagcccagccagagccuccacugggcacu

SEQ ID NO: 358539 - RNA, 32 nt, Human
caugagcccaggagcccuauagauaaguggca

SEQ ID NO: 358540 - RNA, 32 nt, Human
caugagcccaggagguugaggcugcagugagg

SEQ ID NO: 358541 - RNA, 32 nt, Human
caugagcccaggaguucaaguucagccagagc

SEQ ID NO: 358542 - RNA, 32 nt, Human
caugagcccaggaguucgagaccaacuugggc

SEQ ID NO: 358543 - RNA, 32 nt, Human
caugagcccgggaggcggagauugcggugagc

SEQ ID NO: 358544 - RNA, 32 nt, Human
caugagcccuuuuucuccaguaguacaggcuu

SEQ ID NO: 358545 - RNA, 32 nt, Human
caugagccuaucucaugacuggcccuuucuaa

SEQ ID NO: 358546 - RNA, 32 nt, Human
caugagccucugccuggccccugcugcugucc

SEQ ID NO: 358547 - RNA, 32 nt, Human
caugagcuagguggaguaacugguuuuucuug

SEQ ID NO: 358548 - RNA, 32 nt, Human
caugagcucugacuucuuggugccagguuggu

SEQ ID NO: 358549 - RNA, 32 nt, Human
caugagcugagucucugccucugccucucccu

SEQ ID NO: 358550 - RNA, 32 nt, Human
caugagcugcgccucugugcucgccugccccc

SEQ ID NO: 358551 - RNA, 32 nt, Human
caugagcugcucaucacaguucuuuccucuuu

SEQ ID NO: 358552 - RNA, 32 nt, Human
caugagcugcucauuacaguucuuuccucuuu

SEQ ID NO: 358553 - RNA, 32 nt, Human
caugagcugcugccacuccagcaagggaaaua

SEQ ID NO: 358554 - RNA, 32 nt, Human
caugagcuggaaaaucucucuuagagaguugg

SEQ ID NO: 358555 - RNA, 32 nt, Human
caugagcuucagagucaaacagauguuggaga

SEQ ID NO: 358556 - RNA, 19 nt, Human
caugagcuucuccuguucu

SEQ ID NO: 358557 - RNA, 32 nt, Human
caugaggaaauguugaaccuaaagaagcuucu

SEQ ID NO: 358558 - RNA, 32 nt, Human
caugaggaaauguuguguucagaaaugaauaa

SEQ ID NO: 358559 - RNA, 20 nt, Human
caugaggaagucacagcaga

SEQ ID NO: 358560 - RNA, 32 nt, Human
caugaggagagauucaacuuacauggugagga

SEQ ID NO: 358561 - RNA, 32 nt, Human
caugaggaguggguggccuccucuccaucccc

SEQ ID NO: 358562 - RNA, 32 nt, Human
caugaggcacagccaagccaagcgcucauguu

SEQ ID NO: 358563 - RNA, 32 nt, Human
caugaggcacagccaagccaagugcucaugag

SEQ ID NO: 358564 - RNA, 32 nt, Human
caugaggcaccaaccucuccccgcagggcaaa

SEQ ID NO: 358565 - RNA, 32 nt, Human
caugaggcaccacugcacucuagccugggcaa

SEQ ID NO: 358566 - RNA, 32 nt, Human
caugaggcacccuggggaggacucaggacgag

SEQ ID NO: 358567 - RNA, 32 nt, Human
caugaggcaccuuugcuuucugcccagagugg

SEQ ID NO: 358568 - RNA, 26 nt, Human
caugaggcagaggccaccaucuacca

SEQ ID NO: 358569 - RNA, 32 nt, Human
caugaggccaggaguucaagaccagccuggcc

SEQ ID NO: 358570 - RNA, 32 nt, Human
caugaggcccacgccacccaaaccuuucacuu

SEQ ID NO: 358571 - RNA, 32 nt, Human
caugaggcuaaauauuuugaugaccaaguuuu

SEQ ID NO: 358572 - RNA, 32 nt, Human
caugaggcucagaugcuguugaagaaauaaau

SEQ ID NO: 358573 - RNA, 32 nt, Human
caugaggcucuaaggggacaugaguaaagcau

SEQ ID NO: 358574 - RNA, 32 nt, Human
caugagggacacucagcauucuuuucauagau

SEQ ID NO: 358575 - RNA, 32 nt, Human
caugagggagagaaaagaaugaggcuuaggac

SEQ ID NO: 358576 - RNA, 32 nt, Human
caugagggaggaaauuuuggaggcagaagcuc

SEQ ID NO: 358577 - RNA, 32 nt, Human
caugagggagggagggaggagggagaaaaaca

SEQ ID NO: 358578 - RNA, 32 nt, Human
caugagggcucacaccuguagucccagagcuu

SEQ ID NO: 358579 - RNA, 32 nt, Human
caugaggggaaagggagaagggugguaaauau

SEQ ID NO: 358580 - RNA, 32 nt, Human
caugaggggaagguauuuaauguguauuuuaa

SEQ ID NO: 358581 - RNA, 32 nt, Human
caugaggggagaggagacggaggggaguagag

SEQ ID NO: 358582 - RNA, 32 nt, Human
caugaggggauucccuuccuucuguugcuggu

SEQ ID NO: 358583 - RNA, 32 nt, Human
caugaggggcacauagggauccccuacaccgc

SEQ ID NO: 358584 - RNA, 32 nt, Human
caugaggguacacaccuguagucccagcuacu

SEQ ID NO: 358585 - RNA, 32 nt, Human
caugaggguuccaagugugcugaagaggacag

SEQ ID NO: 358586 - RNA, 32 nt, Human
caugagguacccuuugugucaccagcucaagc

SEQ ID NO: 358587 - RNA, 32 nt, Human
caugagguagguaggggucaggauguggacag

SEQ ID NO: 358588 - RNA, 20 nt, Human
caugaggucaagacuggguc

SEQ ID NO: 358589 - RNA, 32 nt, Human
caugaggucagcaguugagaccagccugaaca

SEQ ID NO: 358590 - RNA, 32 nt, Human
caugagguggagcagugaccagguggagcagu

SEQ ID NO: 358591 - RNA, 32 nt, Human
caugaggugucuuugcagaacaauaaauggca

SEQ ID NO: 358592 - RNA, 32 nt, Human
caugagguuagguggagugugcagggagguag

SEQ ID NO: 358593 - RNA, 22 nt, Human
caugagguucuguauucaguca

SEQ ID NO: 358594 - RNA, 32 nt, Human
caugagguuucaucauguuggccaggccgguc

SEQ ID NO: 358595 - RNA, 32 nt, Human
caugaguaaagaaaauguggauugaaguauag

SEQ ID NO: 358596 - RNA, 32 nt, Human
caugaguaacgugucugcucagacucugcuga

SEQ ID NO: 358597 - RNA, 24 nt, Human
caugaguaccacccugccugccuc

SEQ ID NO: 358598 - RNA, 32 nt, Human
caugaguacucuccugagcuauccucagccag

SEQ ID NO: 358599 - RNA, 32 nt, Human
caugaguagcaucagccagaacaugagaggga

SEQ ID NO: 358600 - RNA, 26 nt, Human
caugaguagggaggagaaacagaagc

SEQ ID NO: 358601 - RNA, 32 nt, Human
caugaguaugccgcugcacuccagccuggggg

SEQ ID NO: 358602 - RNA, 32 nt, Human
caugagucaaugcagccuccagccucgaccuc

SEQ ID NO: 358603 - RNA, 32 nt, Human
caugagucacucugaagccacucugaaaucac

SEQ ID NO: 358604 - RNA, 32 nt, Human
caugagucagaggcaccaccccucaccccagc

SEQ ID NO: 358605 - RNA, 32 nt, Human
caugaguccaggaguucgagaccagccuaggc

SEQ ID NO: 358606 - RNA, 17 nt, Human
caugagucccugcacug

SEQ ID NO: 358607 - RNA, 32 nt, Human
caugaguccucucacuuaaucucuccaauuua

SEQ ID NO: 358608 - RNA, 19 nt, Human
caugaguccugcagugcua

SEQ ID NO: 358609 - RNA, 17 nt, Human
caugagucggcugucua

SEQ ID NO: 358610 - RNA, 18 nt, Human
caugagucuaagguucug

SEQ ID NO: 358611 - RNA, 19 nt, Human
caugagucucuccucccua

SEQ ID NO: 358612 - RNA, 17 nt, Human
caugagucugauguucu

SEQ ID NO: 358613 - RNA, 18 nt, Human
caugagucugcugugcua

SEQ ID NO: 358614 - RNA, 18 nt, Human
caugagucuuaauguucu

SEQ ID NO: 358615 - RNA, 32 nt, Human
caugagucuuccagagaacacuguuuuauauu

SEQ ID NO: 358616 - RNA, 32 nt, Human
caugagugagccaccagcucuccacguucccc

SEQ ID NO: 358617 - RNA, 19 nt, Human
caugagugaucuuguucua

SEQ ID NO: 358618 - RNA, 32 nt, Human
caugagugcaauauuucauucccggugguugu

SEQ ID NO: 358619 - RNA, 32 nt, Human
caugagugcacaaucccugaacucacugucuu

SEQ ID NO: 358620 - RNA, 32 nt, Human
caugaguguaaugaaaucucaccagaaguguc

SEQ ID NO: 358621 - RNA, 32 nt, Human
caugaguguguaugugcuaacauguaggcugg

SEQ ID NO: 358622 - RNA, 32 nt, Human
caugaguuaaggaaagucaaaaaugaaaauau

SEQ ID NO: 358623 - RNA, 32 nt, Human
caugaguuaaugagugauuagaguacuaugag

SEQ ID NO: 358624 - RNA, 32 nt, Human
caugaguucacugcauucucccuuccccgccc

SEQ ID NO: 358625 - RNA, 32 nt, Human
caugaguucccccaacuggagugcagacaaga

SEQ ID NO: 358626 - RNA, 32 nt, Human
caugaguucugccucugugcccuugcuggccg

SEQ ID NO: 358627 - RNA, 32 nt, Human
caugaguugggggucgggugggggagggaaag

SEQ ID NO: 358628 - RNA, 32 nt, Human
caugaguuuuucagauggccacggugagggcu

SEQ ID NO: 358629 - RNA, 24 nt, Human
caugauaaaacaccaucucuacua

SEQ ID NO: 358630 - RNA, 21 nt, Human
caugauaacaagcugacacau

SEQ ID NO: 358631 - RNA, 24 nt, Human
caugauaacacaucccuguagucc

SEQ ID NO: 358632 - RNA, 32 nt, Human
caugauaagaggaggaagacauaaaguugggg

SEQ ID NO: 358633 - RNA, 32 nt, Human
caugauaagcagauugaauacaacaccagcag

SEQ ID NO: 358634 - RNA, 32 nt, Human
caugauacaguaauuuguuuacagaauccaaa

SEQ ID NO: 358635 - RNA, 32 nt, Human
caugauacaucuuuucucagugaacauaaaac

SEQ ID NO: 358636 - RNA, 32 nt, Human
caugauaccaggcccaggagaucaguaauuac

SEQ ID NO: 358637 - RNA, 32 nt, Human
caugauaccugcccaauuaagcagaaacacgu

SEQ ID NO: 358638 - RNA, 32 nt, Human
caugauagcaccacugcacuccagccugggug

SEQ ID NO: 358639 - RNA, 32 nt, Human
caugauagcaccacugcaguccagccugggcg

SEQ ID NO: 358640 - RNA, 32 nt, Human
caugauaggaagcauagcaaucuacccaggaa

SEQ ID NO: 358641 - RNA, 32 nt, Human
caugauauuuugcuuugauguguuucuacaug

SEQ ID NO: 358642 - RNA, 32 nt, Human
caugaucaaagucacucaacagaaagagacca

SEQ ID NO: 358643 - RNA, 32 nt, Human
caugaucacaccaccucacuccagccugggca

SEQ ID NO: 358644 - RNA, 32 nt, Human
caugaucacaccacugcaccccagccugggug

SEQ ID NO: 358645 - RNA, 32 nt, Human
caugaucacaccacugcacucuagccugggca

SEQ ID NO: 358646 - RNA, 32 nt, Human
caugaucacgauccugcacuccagccugggca

SEQ ID NO: 358647 - RNA, 23 nt, Human
caugaucagccuccagccauaca

SEQ ID NO: 358648 - RNA, 32 nt, Human
caugaucaguguaugcgaaaagguuuuuagga

SEQ ID NO: 358649 - RNA, 32 nt, Human
caugaucauaccacugcacuccagccugggug

SEQ ID NO: 358650 - RNA, 32 nt, Human
caugaucaugccacugcacuccagccugggca

SEQ ID NO: 358651 - RNA, 32 nt, Human
caugaucaugccacugcacuccagucuggaug

SEQ ID NO: 358652 - RNA, 32 nt, Human
caugaucaugccacugcacuccauccugggug

SEQ ID NO: 358653 - RNA, 32 nt, Human
caugaucaugccacugcacuccuccgugggug

SEQ ID NO: 358654 - RNA, 32 nt, Human
caugaucaugccacugcacucugggcugggua

SEQ ID NO: 358655 - RNA, 32 nt, Human
caugaucaugccacugcauuccagccugggca

SEQ ID NO: 358656 - RNA, 32 nt, Human
caugaucaugccacuguacugcagacugagug

SEQ ID NO: 358657 - RNA, 32 nt, Human
caugauccagucugugacuaccagccaaccug

SEQ ID NO: 358658 - RNA, 32 nt, Human
caugaucccaggaguuuaagaccagccugggc

SEQ ID NO: 358659 - RNA, 32 nt, Human
caugaucccaggcuggaggaagcagcaggcua

SEQ ID NO: 358660 - RNA, 32 nt, Human
caugauccuaccacugcacuucagccuaggug

SEQ ID NO: 358661 - RNA, 32 nt, Human
caugauccuccccucccugagauguuccuccu

SEQ ID NO: 358662 - RNA, 32 nt, Human
caugauccuugcuucccuuuccagucacccuu

SEQ ID NO: 358663 - RNA, 32 nt, Human
caugaucgagccacugcacuccagccugggca

SEQ ID NO: 358664 - RNA, 32 nt, Human
caugaucgaguuacugcacuccagccugggug

SEQ ID NO: 358665 - RNA, 32 nt, Human
caugaucgcaccacugcacuccagccuaggcg

SEQ ID NO: 358666 - RNA, 32 nt, Human
caugaucgcaccacugcacucuagccugggug

SEQ ID NO: 358667 - RNA, 32 nt, Human
caugaucgcaccauugcacuccagccugagug

SEQ ID NO: 358668 - RNA, 32 nt, Human
caugaucgcgacacugcacuccagccugggug

SEQ ID NO: 358669 - RNA, 32 nt, Human
caugaucgcgccacugcacuccagcccgggug

SEQ ID NO: 358670 - RNA, 32 nt, Human
caugaucgugccacuacacuccagccugggug

SEQ ID NO: 358671 - RNA, 32 nt, Human
caugaucucaccaugcacuccagccuagacaa

SEQ ID NO: 358672 - RNA, 32 nt, Human
caugaucucaccgauggcucacugugaccucc

SEQ ID NO: 358673 - RNA, 32 nt, Human
caugaucucacugcaaccuccaucuccugucu

SEQ ID NO: 358674 - RNA, 32 nt, Human
caugaucucagcuccgccuccuggguucacgu

SEQ ID NO: 358675 - RNA, 19 nt, Human
caugaucucagcucgcugc

SEQ ID NO: 358676 - RNA, 23 nt, Human
caugaucucagugaaucucacca

SEQ ID NO: 358677 - RNA, 20 nt, Human
caugaucucggcucgcuaca

SEQ ID NO: 358678 - RNA, 19 nt, Human
caugaucucggcucgcugc

SEQ ID NO: 358679 - RNA, 32 nt, Human
caugaucugacuuuaauugugugucuucuauu

SEQ ID NO: 358680 - RNA, 32 nt, Human
caugaucugcaaucucugccucccagguucaa

SEQ ID NO: 358681 - RNA, 32 nt, Human
caugaucuguacuuccacgugacugggugcug

SEQ ID NO: 358682 - RNA, 32 nt, Human
caugaucuucaagcagggaagccccagugagu

SEQ ID NO: 358683 - RNA, 22 nt, Human
caugaucuucugggacucacca

SEQ ID NO: 358684 - RNA, 32 nt, Human
caugaucuuggcugacugcaaucugugccucc

SEQ ID NO: 358685 - RNA, 24 nt, Human
caugaugaaacccagucucuacua

SEQ ID NO: 358686 - RNA, 19 nt, Human
caugaugaaaccccaucuc

SEQ ID NO: 358687 - RNA, 24 nt, Human
caugaugaaaccccaucuccacug

SEQ ID NO: 358688 - RNA, 22 nt, Human
caugaugaaaccccgucucuac

SEQ ID NO: 358689 - RNA, 24 nt, Human
caugaugaaaccccgucucuacua

SEQ ID NO: 358690 - RNA, 24 nt, Human
caugaugaaaccccguuucuacua

SEQ ID NO: 358691 - RNA, 24 nt, Human
caugaugaaacccuaucucuacua

SEQ ID NO: 358692 - RNA, 22 nt, Human
caugaugaaacccugucuacua

SEQ ID NO: 358693 - RNA, 21 nt, Human
caugaugaaacccugucucua

SEQ ID NO: 358694 - RNA, 22 nt, Human
caugaugaaacccugucucuac

SEQ ID NO: 358695 - RNA, 24 nt, Human
caugaugaaacccugucucuacua

SEQ ID NO: 358696 - RNA, 22 nt, Human
caugaugaaacccuugucucua

SEQ ID NO: 358697 - RNA, 24 nt, Human
caugaugaaaccuugucucuacua

SEQ ID NO: 358698 - RNA, 24 nt, Human
caugaugaaacuccgucucuacua

SEQ ID NO: 358699 - RNA, 24 nt, Human
caugaugaaaugccaucuccacua

SEQ ID NO: 358700 - RNA, 32 nt, Human
caugaugaacccagcagcuucuaguucauccc

SEQ ID NO: 358701 - RNA, 32 nt, Human
caugaugacgggugccuguaaucccagcuacu

SEQ ID NO: 358702 - RNA, 32 nt, Human
caugaugagauggaaaccaaaagggagucucc

SEQ ID NO: 358703 - RNA, 32 nt, Human
caugaugaugggccccuguaaucccagcuacu

SEQ ID NO: 358704 - RNA, 32 nt, Human
caugaugcagugagucuccugccaucuaagcu

SEQ ID NO: 358705 - RNA, 32 nt, Human
caugaugccaggcuaauuuuuguauuuuuauu

SEQ ID NO: 358706 - RNA, 32 nt, Human
caugaugcgugcacacgcgcuuggggguuggc

SEQ ID NO: 358707 - RNA, 32 nt, Human
caugauggaaaaaucauaguagauggaaauau

SEQ ID NO: 358708 - RNA, 32 nt, Human
caugauggagaaauagcacucuagccuuaguc

SEQ ID NO: 358709 - RNA, 24 nt, Human
caugauggagggugccuuuagucc

SEQ ID NO: 358710 - RNA, 32 nt, Human
caugauggagugaugcccugcccugcuucccc

SEQ ID NO: 358711 - RNA, 32 nt, Human
caugauggauuuggaaacuuacuggcuagcua

SEQ ID NO: 358712 - RNA, 23 nt, Human
caugauggcacacaccuguaauc

SEQ ID NO: 358713 - RNA, 24 nt, Human
caugauggcacacaccuguaaucu

SEQ ID NO: 358714 - RNA, 32 nt, Human
caugauggcacacaccuguaaucucaguuacu

SEQ ID NO: 358715 - RNA, 24 nt, Human
caugauggcacacaccuguagucc

SEQ ID NO: 358716 - RNA, 32 nt, Human
caugauggcacacaccuguaguccgagccacu

SEQ ID NO: 358717 - RNA, 24 nt, Human
caugauggcacaugccuguaaucc

SEQ ID NO: 358718 - RNA, 32 nt, Human
caugauggcacaugccuguaaucccagauacu

SEQ ID NO: 358719 - RNA, 24 nt, Human
caugauggcacaugccuguaaucu

SEQ ID NO: 358720 - RNA, 32 nt, Human
caugauggcacaugccuguaaucucagcgacu

SEQ ID NO: 358721 - RNA, 32 nt, Human
caugauggcaccacugcacuccagccugggca

SEQ ID NO: 358722 - RNA, 24 nt, Human
caugauggcacgcaccugcagucc

SEQ ID NO: 358723 - RNA, 32 nt, Human
caugauggcaggcaccuguaaucccagcuacu

SEQ ID NO: 358724 - RNA, 24 nt, Human
caugauggcaggcgccuguagucc

SEQ ID NO: 358725 - RNA, 22 nt, Human
caugauggccacaggucagucc

SEQ ID NO: 358726 - RNA, 24 nt, Human
caugauggcccauacuuguaaucc

SEQ ID NO: 358727 - RNA, 32 nt, Human
caugauggcccauacuuguaaucccagcuauu

SEQ ID NO: 358728 - RNA, 32 nt, Human
caugauggccccagccuguaaucccagugauu

SEQ ID NO: 358729 - RNA, 24 nt, Human
caugauggccggugccuguaaucc

SEQ ID NO: 358730 - RNA, 24 nt, Human
caugauggcgagugucuguaaucc

SEQ ID NO: 358731 - RNA, 32 nt, Human
caugauggcgagugucuguaaucccagcuacu

SEQ ID NO: 358732 - RNA, 24 nt, Human
caugauggcgcaugccuauaaucc

SEQ ID NO: 358733 - RNA, 32 nt, Human
caugauggcgcaugccuauaaucccagcuacu

SEQ ID NO: 358734 - RNA, 32 nt, Human
caugauggcgcgugccuguaaucccagcuacu

SEQ ID NO: 358735 - RNA, 24 nt, Human
caugauggcgggugccuguaaucc

SEQ ID NO: 358736 - RNA, 32 nt, Human
caugauggcgggugccuguaaucccagcuacu

SEQ ID NO: 358737 - RNA, 24 nt, Human
caugauggcgugugccuguagucc

SEQ ID NO: 358738 - RNA, 23 nt, Human
caugauggcucacaccuguaauc

SEQ ID NO: 358739 - RNA, 24 nt, Human
caugauggcucacaccuguaaucc

SEQ ID NO: 358740 - RNA, 32 nt, Human
caugauggcucacaccuguaaucccagcuacu

SEQ ID NO: 358741 - RNA, 32 nt, Human
caugauggcucacuccuguaaucccaacacuu

SEQ ID NO: 358742 - RNA, 20 nt, Human
caugauggcucaugccugua

SEQ ID NO: 358743 - RNA, 32 nt, Human
caugauggcucaugccuguaaugccagcacuu

SEQ ID NO: 358744 - RNA, 32 nt, Human
caugaugggacuuauucuguagcuaaucugau

SEQ ID NO: 358745 - RNA, 32 nt, Human
caugaugggcaggugagggcaggauggagacc

SEQ ID NO: 358746 - RNA, 32 nt, Human
caugaugggcuaacacccaucucuacuaaaaa

SEQ ID NO: 358747 - RNA, 32 nt, Human
caugauggggagugagcagcaggaaggggcuc

SEQ ID NO: 358748 - RNA, 24 nt, Human
caugauggggugugccuguagucc

SEQ ID NO: 358749 - RNA, 24 nt, Human
caugauggugagcgccugcagucc

SEQ ID NO: 358750 - RNA, 23 nt, Human
caugauggugcacaccuguggcc

SEQ ID NO: 358751 - RNA, 32 nt, Human
caugauggugcacaccuguggccccagcuucu

SEQ ID NO: 358752 - RNA, 32 nt, Human
caugauggugcacgccuguaaucucagcuacu

SEQ ID NO: 358753 - RNA, 24 nt, Human
caugauggugcaugccuauaaucc

SEQ ID NO: 358754 - RNA, 24 nt, Human
caugauggugcaugccuauagucc

SEQ ID NO: 358755 - RNA, 24 nt, Human
caugauggugcaugccuguagucu

SEQ ID NO: 358756 - RNA, 32 nt, Human
caugauggugccacugcacuccagccuggggg

SEQ ID NO: 358757 - RNA, 24 nt, Human
caugauggugggcaccuguaaucc

SEQ ID NO: 358758 - RNA, 32 nt, Human
caugauggugggcaccuguaaucccagcuacu

SEQ ID NO: 358759 - RNA, 24 nt, Human
caugauggugguggccuguaaucc

SEQ ID NO: 358760 - RNA, 32 nt, Human
caugauggugguggccuguaaucccagcuacu

SEQ ID NO: 358761 - RNA, 24 nt, Human
caugauggugugcaccuguagucc

SEQ ID NO: 358762 - RNA, 32 nt, Human
caugauggugugcaccuguagucccagcuacu

SEQ ID NO: 358763 - RNA, 32 nt, Human
caugauggugugugcuuguaaucccagcuacu

SEQ ID NO: 358764 - RNA, 32 nt, Human
caugauguaaaaauuugcuuuaaaccauucau

SEQ ID NO: 358765 - RNA, 32 nt, Human
caugaugucagaggccagaguuuggugggggc

SEQ ID NO: 358766 - RNA, 19 nt, Human
caugaugucggcucacugc

SEQ ID NO: 358767 - RNA, 32 nt, Human
caugaugucugcccuccaccucucuggcaaug

SEQ ID NO: 358768 - RNA, 32 nt, Human
caugaugucuuuccuuucaccuccugcguugu

SEQ ID NO: 358769 - RNA, 31 nt, Human
caugaugugacaaucucgaucgaucauggac

SEQ ID NO: 358770 - RNA, 32 nt, Human
caugaugugagcaucuccuccuuaucccucga

SEQ ID NO: 358771 - RNA, 32 nt, Human
caugauguugugaccgcacagcacuuugcguc

SEQ ID NO: 358772 - RNA, 32 nt, Human
caugauguuugaagcuuacuuccaaaugguuc

SEQ ID NO: 358773 - RNA, 32 nt, Human
caugauuaaugccaccccugccucaaugaacc

SEQ ID NO: 358774 - RNA, 32 nt, Human
caugauuacgccacugcauuguagccugggca

SEQ ID NO: 358775 - RNA, 32 nt, Human
caugauuacuccacugcacuccagccugggca

SEQ ID NO: 358776 - RNA, 32 nt, Human
caugauuaugcugcugcacuccagccuggaca

SEQ ID NO: 358777 - RNA, 32 nt, Human
caugauucacauguggcaucagucccaucagc

SEQ ID NO: 358778 - RNA, 32 nt, Human
caugauuccuacauagaggcucugcuggucaa

SEQ ID NO: 358779 - RNA, 32 nt, Human
caugauuccucuggacugcacacagcacccac

SEQ ID NO: 358780 - RNA, 32 nt, Human
caugauuccuuuaacaacauguuuccagcauu

SEQ ID NO: 358781 - RNA, 32 nt, Human
caugauucuaaguuuccugaggccuccccaga

SEQ ID NO: 358782 - RNA, 32 nt, Human
caugauucucucuugaugaagaaaugacauau

SEQ ID NO: 358783 - RNA, 32 nt, Human
caugauugcaccacugcacuccagccuggaaa

SEQ ID NO: 358784 - RNA, 32 nt, Human
caugauugcaccacugcacuccagccugggca

SEQ ID NO: 358785 - RNA, 32 nt, Human
caugauugcaccacugcacuccagccugggug

SEQ ID NO: 358786 - RNA, 32 nt, Human
caugauugcaccacugcacuccagucugguug

SEQ ID NO: 358787 - RNA, 32 nt, Human
caugauugcaccacugcacucuaacuugggca

SEQ ID NO: 358788 - RNA, 32 nt, Human
caugauugcaccacuguacuccagccugggca

SEQ ID NO: 358789 - RNA, 32 nt, Human
caugauugcaccccugcacuccagccugggug

SEQ ID NO: 358790 - RNA, 32 nt, Human
caugauugcacuccaaccugggcgacagagac

SEQ ID NO: 358791 - RNA, 32 nt, Human
caugauugcacugucgcacuccagccuggaug

SEQ ID NO: 358792 - RNA, 32 nt, Human
caugauugccuccccuugcagcuuucccuacu

SEQ ID NO: 358793 - RNA, 24 nt, Human
caugauugcgcaugccuguaaucc

SEQ ID NO: 358794 - RNA, 32 nt, Human
caugauugcgccacugcacuccagccugggca

SEQ ID NO: 358795 - RNA, 32 nt, Human
caugauuggaaguuuccugaggccuccccagc

SEQ ID NO: 358796 - RNA, 32 nt, Human
caugauuguaaguguccugaggccucccagcc

SEQ ID NO: 358797 - RNA, 32 nt, Human
caugauuguaaguuuccugaggccucccaguc

SEQ ID NO: 358798 - RNA, 32 nt, Human
caugauuguaaguuuccugaggccuccccaga

SEQ ID NO: 358799 - RNA, 32 nt, Human
caugauuguaaguuuccugaggccuccccagc

SEQ ID NO: 358800 - RNA, 32 nt, Human
caugauuguaaguuuccugaggccuccccagu

SEQ ID NO: 358801 - RNA, 32 nt, Human
caugauuguaaguuuccugaggccucccccgc

SEQ ID NO: 358802 - RNA, 32 nt, Human
caugauuguaaguuuccugaggccuccccugc

SEQ ID NO: 358803 - RNA, 32 nt, Human
caugauuguaaguuuccugaggccucccuaga

SEQ ID NO: 358804 - RNA, 32 nt, Human
caugauuguaaguuuccugaggccucccuagc

SEQ ID NO: 358805 - RNA, 32 nt, Human
caugauuguaccugucucuuccuggguaaagg

SEQ ID NO: 358806 - RNA, 32 nt, Human
caugauuguaugacugcacuccagccugggug

SEQ ID NO: 358807 - RNA, 32 nt, Human
caugauugucaguuuccugaggccucccagcc

SEQ ID NO: 358808 - RNA, 32 nt, Human
caugauugucauuccacuccagguccuggcaa

SEQ ID NO: 358809 - RNA, 32 nt, Human
caugauugugccacugcacuccagccuuggca

SEQ ID NO: 358810 - RNA, 32 nt, Human
caugauugugccacugcacuccagcuugguga

SEQ ID NO: 358811 - RNA, 32 nt, Human
caugauugugccacugcacuccagucuggaca

SEQ ID NO: 358812 - RNA, 32 nt, Human
caugauugugcuacugcacuccaaucuggcaa

SEQ ID NO: 358813 - RNA, 18 nt, Human
caugauuuacagcuguga

SEQ ID NO: 358814 - RNA, 32 nt, Human
caugauuucccaccugcccuccaagaaaaugg

SEQ ID NO: 358815 - RNA, 32 nt, Human
caugauuucccacugcacuccagccugaguga

SEQ ID NO: 358816 - RNA, 32 nt, Human
caugauuucuuccuccucuucagugugguaga

SEQ ID NO: 358817 - RNA, 32 nt, Human
caugauuugccuuuuuguguuugcuuuuguuu

SEQ ID NO: 358818 - RNA, 32 nt, Human
caugauuuggggaaaggagcaagucagaauag

SEQ ID NO: 358819 - RNA, 32 nt, Human
caugauuugucuccagaacggcagcaggaaag

SEQ ID NO: 358820 - RNA, 32 nt, Human
caugauuuuaaguuuccugaggccuccccagc

SEQ ID NO: 358821 - RNA, 32 nt, Human
caugauuuuaaguuuccugaggccuccccagu

SEQ ID NO: 358822 - RNA, 32 nt, Human
caugauuuuggugucaucaccucccaagaccc

SEQ ID NO: 358823 - RNA, 32 nt, Human
caugcaaaaagucacacuagaggaaugccaua

SEQ ID NO: 358824 - RNA, 23 nt, Human
caugcaaaaccccgucuccacua

SEQ ID NO: 358825 - RNA, 32 nt, Human
caugcaaaauucuuuaucauacucaaucauuu

SEQ ID NO: 358826 - RNA, 32 nt, Human
caugcaaacuguuccuguuuacauaccuucuc

SEQ ID NO: 358827 - RNA, 32 nt, Human
caugcaaagauccuaggagacaguccccauag

SEQ ID NO: 358828 - RNA, 32 nt, Human
caugcaaaguuaaaagcacauugugccuccuu

SEQ ID NO: 358829 - RNA, 32 nt, Human
caugcaaauacugaagcacuaaacaaggaggg

SEQ ID NO: 358830 - RNA, 32 nt, Human
caugcaaaucacccccgggagugcagcugggc

SEQ ID NO: 358831 - RNA, 32 nt, Human
caugcaaauuugcuaaucagagcccagagcug

SEQ ID NO: 358832 - RNA, 32 nt, Human
caugcaacagccgcccccgcaggcagggggcu

SEQ ID NO: 358833 - RNA, 18 nt, Human
caugcaacaggcccagug

SEQ ID NO: 358834 - RNA, 19 nt, Human
caugcaacaggcccagugg

SEQ ID NO: 358835 - RNA, 32 nt, Human
caugcaaccauuccucacgccaccgccacauc

SEQ ID NO: 358836 - RNA, 32 nt, Human
caugcaacccccaagggcugcagguuggacaa

SEQ ID NO: 358837 - RNA, 20 nt, Human
caugcaagaaguacugccaa

SEQ ID NO: 358838 - RNA, 32 nt, Human
caugcaagacaacauagccacagguggggauu

SEQ ID NO: 358839 - RNA, 31 nt, Human
caugcaagacuucucugucaggguugcuccu

SEQ ID NO: 358840 - RNA, 32 nt, Human
caugcaagccucugccuuuccuucugcuccag

SEQ ID NO: 358841 - RNA, 32 nt, Human
caugcaagccugggcaauagagcgagacuccg

SEQ ID NO: 358842 - RNA, 32 nt, Human
caugcaaggccuucucugggugacagugacga

SEQ ID NO: 358843 - RNA, 32 nt, Human
caugcaagggucaggucuccagcagacccuga

SEQ ID NO: 358844 - RNA, 32 nt, Human
caugcaagucaugggucacaccugacaaaugg

SEQ ID NO: 358845 - RNA, 32 nt, Human
caugcaaguuaggaauaugaagaaccacaaag

SEQ ID NO: 358846 - RNA, 32 nt, Human
caugcaauagacuugcucggagcccagcacuc

SEQ ID NO: 358847 - RNA, 32 nt, Human
caugcaaucugggggagucaccucucagcucu

SEQ ID NO: 358848 - RNA, 32 nt, Human
caugcaaugugcugccuucuguuguggauuuc

SEQ ID NO: 358849 - RNA, 32 nt, Human
caugcaauugcacuccagccugggcaacaaga

SEQ ID NO: 358850 - RNA, 32 nt, Human
caugcacacaaaauuagcugggcaugguggcc

SEQ ID NO: 358851 - RNA, 32 nt, Human
caugcacacacaugcacacauacacgcacaug

SEQ ID NO: 358852 - RNA, 32 nt, Human
caugcacacacccuccuuccccuagcaaaacg

SEQ ID NO: 358853 - RNA, 32 nt, Human
caugcacacacgcacacaugcacacacacgca

SEQ ID NO: 358854 - RNA, 32 nt, Human
caugcacacacguguacaccacaaacgagcuc

SEQ ID NO: 358855 - RNA, 32 nt, Human
caugcacacacguguagcucacacacaguaua

SEQ ID NO: 358856 - RNA, 32 nt, Human
caugcacacagcacaauucagaaauacccagg

SEQ ID NO: 358857 - RNA, 32 nt, Human
caugcacacaugcaugcacacucacauacacu

SEQ ID NO: 358858 - RNA, 32 nt, Human
caugcacacaugcaugcacacucauacacuca

SEQ ID NO: 358859 - RNA, 20 nt, Human
caugcacacgcauguaugua

SEQ ID NO: 358860 - RNA, 32 nt, Human
caugcacacugacucugaacugggugaacucu

SEQ ID NO: 358861 - RNA, 20 nt, Human
caugcacagugccuggggcg

SEQ ID NO: 358862 - RNA, 32 nt, Human
caugcacagugcugcagaaacuggacaguucc

SEQ ID NO: 358863 - RNA, 32 nt, Human
caugcacauagacacacacaugaacacacuga

SEQ ID NO: 358864 - RNA, 32 nt, Human
caugcacauaugugccuuggguguauguaacu

SEQ ID NO: 358865 - RNA, 32 nt, Human
caugcacaucuguagccccagccauccuugug

SEQ ID NO: 358866 - RNA, 32 nt, Human
caugcacaugauuuuaaagguucugacaacug

SEQ ID NO: 358867 - RNA, 32 nt, Human
caugcacaugcugucuggcccuggggaucuuc

SEQ ID NO: 358868 - RNA, 32 nt, Human
caugcacccacugccagcugagagcugcuucc

SEQ ID NO: 358869 - RNA, 32 nt, Human
caugcacccccacaguacccaggcugggucug

SEQ ID NO: 358870 - RNA, 32 nt, Human
caugcacccugcucccuucugccagccugcau

SEQ ID NO: 358871 - RNA, 32 nt, Human
caugcaccuguaaucccagcuacuugggaggc

SEQ ID NO: 358872 - RNA, 32 nt, Human
caugcacgcacacacacauauggggaccugcg

SEQ ID NO: 358873 - RNA, 32 nt, Human
caugcacgcuugcacacaugcacacagaccac

SEQ ID NO: 358874 - RNA, 32 nt, Human
caugcacggcuccacagcaggugguggggagc

SEQ ID NO: 358875 - RNA, 32 nt, Human
caugcacgugcacacacauacacacacaucca

SEQ ID NO: 358876 - RNA, 22 nt, Human
caugcacguucccccugggcca

SEQ ID NO: 358877 - RNA, 32 nt, Human
caugcacucacacccacgcaggcacucacauu

SEQ ID NO: 358878 - RNA, 32 nt, Human
caugcacuccuucuccccaaggccagggcaga

SEQ ID NO: 358879 - RNA, 32 nt, Human
caugcacugugaacuucuguggcuucaguucu

SEQ ID NO: 358880 - RNA, 32 nt, Human
caugcacuuggguuuuaaucagcaguucccua

SEQ ID NO: 358881 - RNA, 32 nt, Human
caugcacuuuacuguuucuagucucaaaaugu

SEQ ID NO: 358882 - RNA, 32 nt, Human
caugcagaccucaaggaggcucccuagcaaca

SEQ ID NO: 358883 - RNA, 32 nt, Human
caugcagagaagcagagaagaagaaaggagcu

SEQ ID NO: 358884 - RNA, 32 nt, Human
caugcagagaggaggagguggagcaggagugg

SEQ ID NO: 358885 - RNA, 32 nt, Human
caugcagagaggaggaguuggaggaagauugu

SEQ ID NO: 358886 - RNA, 32 nt, Human
caugcagagaggaggggugagagggcacggcu

SEQ ID NO: 358887 - RNA, 32 nt, Human
caugcagagcgaagccaccaagacuuuaugcg

SEQ ID NO: 358888 - RNA, 32 nt, Human
caugcagaggugcucuccuccuuucucagcca

SEQ ID NO: 358889 - RNA, 32 nt, Human
caugcagagugacugaaacacaauucauuucu

SEQ ID NO: 358890 - RNA, 32 nt, Human
caugcagaguucagccuacauguucauugagg

SEQ ID NO: 358891 - RNA, 32 nt, Human
caugcagauguaggggcucugaugggggcugu

SEQ ID NO: 358892 - RNA, 32 nt, Human
caugcagcagacugggcucgccacuuucuugc

SEQ ID NO: 358893 - RNA, 26 nt, Human
caugcagcagcagccucugcccgggc

SEQ ID NO: 358894 - RNA, 32 nt, Human
caugcagcaguuagaguggggcugacucuuag

SEQ ID NO: 358895 - RNA, 26 nt, Human
caugcagcauuuuccaccugccccga

SEQ ID NO: 358896 - RNA, 32 nt, Human
caugcagccacuuaggacaaaucugcaaagca

SEQ ID NO: 358897 - RNA, 32 nt, Human
caugcagcccacagaagcagagcccauggagc

SEQ ID NO: 358898 - RNA, 32 nt, Human
caugcagccccuccucaacaagcagagugaug

SEQ ID NO: 358899 - RNA, 32 nt, Human
caugcagccccuucccuucccuucccuucccu

SEQ ID NO: 358900 - RNA, 32 nt, Human
caugcagcccucuccucgagcacgucacacac

SEQ ID NO: 358901 - RNA, 32 nt, Human
caugcagcuucaccccucacaaagccaugcac

SEQ ID NO: 358902 - RNA, 32 nt, Human
caugcagcuucccuacauuacacacacucagg

SEQ ID NO: 358903 - RNA, 32 nt, Human
caugcaggagguggaggaauuaagugaaacag

SEQ ID NO: 358904 - RNA, 32 nt, Human
caugcaggcagaagcaguugguggugucuggu

SEQ ID NO: 358905 - RNA, 32 nt, Human
caugcaggcccuuugaagccucagcuacccac

SEQ ID NO: 358906 - RNA, 26 nt, Human
caugcaggccgaaggccagggcacag

SEQ ID NO: 358907 - RNA, 32 nt, Human
caugcaggcucaacauaacauaagcuagaaaa

SEQ ID NO: 358908 - RNA, 32 nt, Human
caugcaggcugguggugauggguucugugugg

SEQ ID NO: 358909 - RNA, 32 nt, Human
caugcagggcacugucgugagcacaccagugg

SEQ ID NO: 358910 - RNA, 32 nt, Human
caugcagggcgcagacugccacucuguuccca

SEQ ID NO: 358911 - RNA, 32 nt, Human
caugcagggggaaaguugauuaauuuuugucc

SEQ ID NO: 358912 - RNA, 32 nt, Human
caugcagggggugggagcagggucacaaaagu

SEQ ID NO: 358913 - RNA, 32 nt, Human
caugcagggugagggaaaggguagaggucuuu

SEQ ID NO: 358914 - RNA, 32 nt, Human
caugcaggucauguuucaaaucaaggcugaaa

SEQ ID NO: 358915 - RNA, 19 nt, Human
caugcagucuccugucuca

SEQ ID NO: 358916 - RNA, 32 nt, Human
caugcagucuucccucagccuccugaguagcu

SEQ ID NO: 358917 - RNA, 20 nt, Human
caugcagugccggcugccaa

SEQ ID NO: 358918 - RNA, 32 nt, Human
caugcaguggcggcuacugggcccugcccagc

SEQ ID NO: 358919 - RNA, 17 nt, Human
caugcagugugcugcca

SEQ ID NO: 358920 - RNA, 32 nt, Human
caugcaguuaaaaagucaacaaaaugaauuuc

SEQ ID NO: 358921 - RNA, 32 nt, Human
caugcaguuaaacucauugucuguuuggaaga

SEQ ID NO: 358922 - RNA, 32 nt, Human
caugcauacacacagacauacacaugcacuca

SEQ ID NO: 358923 - RNA, 32 nt, Human
caugcauauagacagagcaugcagugaagagu

SEQ ID NO: 358924 - RNA, 32 nt, Human
caugcauauuuggaauuguuauacuuuguugc

SEQ ID NO: 358925 - RNA, 32 nt, Human
caugcauauuugugaagaaacacccuuguuug

SEQ ID NO: 358926 - RNA, 32 nt, Human
caugcaucacagacuguauuugauugauucga

SEQ ID NO: 358927 - RNA, 32 nt, Human
caugcaucacucucccuucugccuccuucaac

SEQ ID NO: 358928 - RNA, 32 nt, Human
caugcaucagcccaagauccuuuacuuagaag

SEQ ID NO: 358929 - RNA, 32 nt, Human
caugcaucagcucuuucaacauuuacagcauc

SEQ ID NO: 358930 - RNA, 32 nt, Human
caugcaucaugccucaccuaaggaaacauaaa

SEQ ID NO: 358931 - RNA, 32 nt, Human
caugcaucuagggcggagaggcugcacuugug

SEQ ID NO: 358932 - RNA, 32 nt, Human
caugcaucuguaacccagcuauucaagaggcu

SEQ ID NO: 358933 - RNA, 32 nt, Human
caugcaucuguaacuugcuuuucccguguaag

SEQ ID NO: 358934 - RNA, 32 nt, Human
caugcaugacaaacacagauugggggcgaagg

SEQ ID NO: 358935 - RNA, 28 nt, Human
caugcaugacagagugagacccugucuc

SEQ ID NO: 358936 - RNA, 32 nt, Human
caugcaugcaaauguccacugcagcacuauuc

SEQ ID NO: 358937 - RNA, 32 nt, Human
caugcaugcacacacaugcacacauacacgca

SEQ ID NO: 358938 - RNA, 32 nt, Human
caugcaugcacacauacauacauauguauaca

SEQ ID NO: 358939 - RNA, 32 nt, Human
caugcaugcacacucacauacacucacucgug

SEQ ID NO: 358940 - RNA, 32 nt, Human
caugcaugcaugcacacacgagcauacuugua

SEQ ID NO: 358941 - RNA, 32 nt, Human
caugcaugcaugcacacgugcgugcguguuug

SEQ ID NO: 358942 - RNA, 32 nt, Human
caugcaugcauucauccgugacacaugaguac

SEQ ID NO: 358943 - RNA, 32 nt, Human
caugcauguaguuccagcuacucaggaggcug

SEQ ID NO: 358944 - RNA, 29 nt, Human
caugcauguauguaggugccuggggagug

SEQ ID NO: 358945 - RNA, 32 nt, Human
caugcauguggauagacccccacgggccgugg

SEQ ID NO: 358946 - RNA, 32 nt, Human
caugcauguguguguacacguguauaggugua

SEQ ID NO: 358947 - RNA, 32 nt, Human
caugcauguugcuaucaggauguugauucauu

SEQ ID NO: 358948 - RNA, 32 nt, Human
caugcauuacacacaugcacacacauaugcac

SEQ ID NO: 358949 - RNA, 32 nt, Human
caugcauucacacacacauauguacaugcaca

SEQ ID NO: 358950 - RNA, 19 nt, Human
caugcauugcacgcugcca

SEQ ID NO: 358951 - RNA, 32 nt, Human
caugcauugcucaaagcuggcuuuucacauua

SEQ ID NO: 358952 - RNA, 20 nt, Human
caugcauuguuaaucaucca

SEQ ID NO: 358953 - RNA, 32 nt, Human
caugcauuugcuuaccuaaaauuuaaguuuca

SEQ ID NO: 358954 - RNA, 21 nt, Human
caugccaaacugacuguuuua

SEQ ID NO: 358955 - RNA, 32 nt, Human
caugccaaagaaugaggcuggagacagguagc

SEQ ID NO: 358956 - RNA, 32 nt, Human
caugccaaagugcugcuaugggcugcuuugug

SEQ ID NO: 358957 - RNA, 20 nt, Human
caugccaacugugcuguguc

SEQ ID NO: 358958 - RNA, 32 nt, Human
caugccaagcagagacugggauuagggguucu

SEQ ID NO: 358959 - RNA, 32 nt, Human
caugccaagcugagcaugcugcuccaaauaaa

SEQ ID NO: 358960 - RNA, 32 nt, Human
caugccaaggcgggaggugaggcugcacuucg

SEQ ID NO: 358961 - RNA, 32 nt, Human
caugccaagguaagagagagccuggaccacuc

SEQ ID NO: 358962 - RNA, 32 nt, Human
caugccaaugcacuccagucugggcaacagag

SEQ ID NO: 358963 - RNA, 32 nt, Human
caugccaauguauuccagucugggugacagag

SEQ ID NO: 358964 - RNA, 32 nt, Human
caugccaaugugccaggcaccauauuuauucu

SEQ ID NO: 358965 - RNA, 32 nt, Human
caugccacaacuccucaggacacaugugggcc

SEQ ID NO: 358966 - RNA, 32 nt, Human
caugccacaacuccucaggacacauguguggg

SEQ ID NO: 358967 - RNA, 32 nt, Human
caugccacaccguacuccagccugggcgacau

SEQ ID NO: 358968 - RNA, 32 nt, Human
caugccacaggguuuggcugggaccagugaaa

SEQ ID NO: 358969 - RNA, 32 nt, Human
caugccacaucacuccaaccugggcaacagaa

SEQ ID NO: 358970 - RNA, 32 nt, Human
caugccacaucacuccagccugggcaacagaa

SEQ ID NO: 358971 - RNA, 32 nt, Human
caugccacaucucaccuguccccaccagugcc

SEQ ID NO: 358972 - RNA, 32 nt, Human
caugccaccaugccuggcuaaucuuuugcagc

SEQ ID NO: 358973 - RNA, 32 nt, Human
caugccaccauggcuggcuaauuuuuguauuu

SEQ ID NO: 358974 - RNA, 32 nt, Human
caugccacccaccccagucgggucucacuuuc

SEQ ID NO: 358975 - RNA, 32 nt, Human
caugccaccgcacuccagccugggcaacagag

SEQ ID NO: 358976 - RNA, 32 nt, Human
caugccaccgcacuucagccugggugacagag

SEQ ID NO: 358977 - RNA, 32 nt, Human
caugccaccgcacuuccagccugggugacaga

SEQ ID NO: 358978 - RNA, 32 nt, Human
caugccaccgcccuggccacccugcggcagug

SEQ ID NO: 358979 - RNA, 32 nt, Human
caugccaccggcuucucugauucuccagcuug

SEQ ID NO: 358980 - RNA, 32 nt, Human
caugccacuacacuccagccuggcgacagagc

SEQ ID NO: 358981 - RNA, 32 nt, Human
caugccacuauacuccagccugggcaacaaag

SEQ ID NO: 358982 - RNA, 32 nt, Human
caugccacuccacuccagucugggcgacagag

SEQ ID NO: 358983 - RNA, 32 nt, Human
caugccacugaacuccagccugggcaacagag

SEQ ID NO: 358984 - RNA, 32 nt, Human
caugccacugaacuccagccugggcaacaggu

SEQ ID NO: 358985 - RNA, 32 nt, Human
caugccacugaacuccagccugggugacagag

SEQ ID NO: 358986 - RNA, 32 nt, Human
caugccacugcaaucuagccugggugacagag

SEQ ID NO: 358987 - RNA, 32 nt, Human
caugccacugcacccaucuugggcaacagaau

SEQ ID NO: 358988 - RNA, 32 nt, Human
caugccacugcaccccagccugggcaacagag

SEQ ID NO: 358989 - RNA, 32 nt, Human
caugccacugcacccuagcuuggguggcaaag

SEQ ID NO: 358990 - RNA, 32 nt, Human
caugccacugcacccuagcuuggguggcagag

SEQ ID NO: 358991 - RNA, 32 nt, Human
caugccacugcaccuggcuaauuuuuauauuu

SEQ ID NO: 358992 - RNA, 32 nt, Human
caugccacugcacuagagccugggcaacagac

SEQ ID NO: 358993 - RNA, 32 nt, Human
caugccacugcacucaaaccuggcggacagag

SEQ ID NO: 358994 - RNA, 32 nt, Human
caugccacugcacuccaaccugggcaacagaa

SEQ ID NO: 358995 - RNA, 32 nt, Human
caugccacugcacuccaaccugggcagcagag

SEQ ID NO: 358996 - RNA, 32 nt, Human
caugccacugcacuccaaccugggcgacagag

SEQ ID NO: 358997 - RNA, 32 nt, Human
caugccacugcacuccaaccugggugacagag

SEQ ID NO: 358998 - RNA, 32 nt, Human
caugccacugcacuccacucugggcaacagaa

SEQ ID NO: 358999 - RNA, 32 nt, Human
caugccacugcacuccagcaugcaugacagag

SEQ ID NO: 359000 - RNA, 32 nt, Human
caugccacugcacuccagcaugggugauggag

SEQ ID NO: 359001 - RNA, 32 nt, Human
caugccacugcacuccagcccaggugacagag

SEQ ID NO: 359002 - RNA, 32 nt, Human
caugccacugcacuccagccuaugugacuagu

SEQ ID NO: 359003 - RNA, 32 nt, Human
caugccacugcacuccagccugagugacagag

SEQ ID NO: 359004 - RNA, 32 nt, Human
caugccacugcacuccagccuggacaacagag

SEQ ID NO: 359005 - RNA, 32 nt, Human
caugccacugcacuccagccuggaugacagag

SEQ ID NO: 359006 - RNA, 32 nt, Human
caugccacugcacuccagccuggaugacagcg

SEQ ID NO: 359007 - RNA, 32 nt, Human
caugccacugcacuccagccuggccugggcaa

SEQ ID NO: 359008 - RNA, 32 nt, Human
caugccacugcacuccagccugggagacagag

SEQ ID NO: 359009 - RNA, 32 nt, Human
caugccacugcacuccagccugggcaacaaaa

SEQ ID NO: 359010 - RNA, 32 nt, Human
caugccacugcacuccagccugggcaacaaag

SEQ ID NO: 359011 - RNA, 32 nt, Human
caugccacugcacuccagccugggcaacaaga

SEQ ID NO: 359012 - RNA, 32 nt, Human
caugccacugcacuccagccugggcaacaagu

SEQ ID NO: 359013 - RNA, 32 nt, Human
caugccacugcacuccagccugggcaacacag

SEQ ID NO: 359014 - RNA, 32 nt, Human
caugccacugcacuccagccugggcaacagag

SEQ ID NO: 359015 - RNA, 32 nt, Human
caugccacugcacuccagccugggcaacagca

SEQ ID NO: 359016 - RNA, 32 nt, Human
caugccacugcacuccagccugggcaaccagg

SEQ ID NO: 359017 - RNA, 32 nt, Human
caugccacugcacuccagccugggcaauggag

SEQ ID NO: 359018 - RNA, 32 nt, Human
caugccacugcacuccagccugggcagcagag

SEQ ID NO: 359019 - RNA, 32 nt, Human
caugccacugcacuccagccugggcaugagac

SEQ ID NO: 359020 - RNA, 32 nt, Human
caugccacugcacuccagccugggccagaaug

SEQ ID NO: 359021 - RNA, 32 nt, Human
caugccacugcacuccagccugggcgacagag

SEQ ID NO: 359022 - RNA, 32 nt, Human
caugccacugcacuccagccugggcgacggag

SEQ ID NO: 359023 - RNA, 32 nt, Human
caugccacugcacuccagccugggcgauggag

SEQ ID NO: 359024 - RNA, 32 nt, Human
caugccacugcacuccagccugggcggcagag

SEQ ID NO: 359025 - RNA, 32 nt, Human
caugccacugcacuccagccuggggcugacag

SEQ ID NO: 359026 - RNA, 26 nt, Human
caugccacugcacuccagccugggug

SEQ ID NO: 359027 - RNA, 32 nt, Human
caugccacugcacuccagccugggugacagaa

SEQ ID NO: 359028 - RNA, 32 nt, Human
caugccacugcacuccagccugggugacagag

SEQ ID NO: 359029 - RNA, 32 nt, Human
caugccacugcacuccagcuugggcgacagag

SEQ ID NO: 359030 - RNA, 32 nt, Human
caugccacugcacuccagcuugggugagagug

SEQ ID NO: 359031 - RNA, 32 nt, Human
caugccacugcacuccagucuggaugacagag

SEQ ID NO: 359032 - RNA, 32 nt, Human
caugccacugcacuccagucugggugacagca

SEQ ID NO: 359033 - RNA, 32 nt, Human
caugccacugcacuccauccugggcaacaaga

SEQ ID NO: 359034 - RNA, 32 nt, Human
caugccacugcacuccauccugggugacagca

SEQ ID NO: 359035 - RNA, 32 nt, Human
caugccacugcacuccggccuaggugacagag

SEQ ID NO: 359036 - RNA, 32 nt, Human
caugccacugcacuccggccugggugacaaag

SEQ ID NO: 359037 - RNA, 32 nt, Human
caugccacugcacuccuccgugggugacagag

SEQ ID NO: 359038 - RNA, 32 nt, Human
caugccacugcacuccugccugggugacaaag

SEQ ID NO: 359039 - RNA, 32 nt, Human
caugccacugcacucuagccuaggcuacagag

SEQ ID NO: 359040 - RNA, 32 nt, Human
caugccacugcacucuagccugggugacagag

SEQ ID NO: 359041 - RNA, 32 nt, Human
caugccacugcacucugggcuggguaacagag

SEQ ID NO: 359042 - RNA, 32 nt, Human
caugccacugcacugcacuccagccuggguga

SEQ ID NO: 359043 - RNA, 32 nt, Human
caugccacugcacugcagcccgggcgacagag

SEQ ID NO: 359044 - RNA, 32 nt, Human
caugccacugcacugcagccugggcgacagag

SEQ ID NO: 359045 - RNA, 32 nt, Human
caugccacugcacugggcaacagagcaaaacu

SEQ ID NO: 359046 - RNA, 32 nt, Human
caugccacugcacuuccagccugggugacaca

SEQ ID NO: 359047 - RNA, 32 nt, Human
caugccacugcacuuccagccugggugacaga

SEQ ID NO: 359048 - RNA, 32 nt, Human
caugccacugcacuuuagccugggcaacagau

SEQ ID NO: 359049 - RNA, 32 nt, Human
caugccacugcacuuuagccugggugacagag

SEQ ID NO: 359050 - RNA, 32 nt, Human
caugccacugcaugccagccugggcaacagaa

SEQ ID NO: 359051 - RNA, 32 nt, Human
caugccacugcauuccagccugggcaacagag

SEQ ID NO: 359052 - RNA, 32 nt, Human
caugccacugcauuccagccugggcgacagag

SEQ ID NO: 359053 - RNA, 32 nt, Human
caugccacugcauuccagccugugugauggag

SEQ ID NO: 359054 - RNA, 32 nt, Human
caugccacugcauucuagccugggcaacagag

SEQ ID NO: 359055 - RNA, 32 nt, Human
caugccacugccuugcucugggccuguggugc

SEQ ID NO: 359056 - RNA, 32 nt, Human
caugccacuggaagggaaguggguguccaugg

SEQ ID NO: 359057 - RNA, 32 nt, Human
caugccacuggacuccagccugggugaaagag

SEQ ID NO: 359058 - RNA, 32 nt, Human
caugccacuguacuccagccuaggugacagag

SEQ ID NO: 359059 - RNA, 32 nt, Human
caugccacuguacuccagccugagcuacagag

SEQ ID NO: 359060 - RNA, 32 nt, Human
caugccacuguacuccagccugggcgacagca

SEQ ID NO: 359061 - RNA, 32 nt, Human
caugccacuguacuccagccugggugacagag

SEQ ID NO: 359062 - RNA, 32 nt, Human
caugccacuugcaugcuggagggagucuuuuu

SEQ ID NO: 359063 - RNA, 17 nt, Human
caugccacuuugcuguc

SEQ ID NO: 359064 - RNA, 32 nt, Human
caugccagaagaaauugaacaugugagccugg

SEQ ID NO: 359065 - RNA, 32 nt, Human
caugccagacuguaaucccagguauucacugc

SEQ ID NO: 359066 - RNA, 32 nt, Human
caugccagagccaaagcuggagcccagaccgu

SEQ ID NO: 359067 - RNA, 32 nt, Human
caugccagagggcucgaugacuugucucugca

SEQ ID NO: 359068 - RNA, 32 nt, Human
caugccagcccaugccagcuccuggguccugg

SEQ ID NO: 359069 - RNA, 32 nt, Human
caugccagccugggcaacagaacaggacucgg

SEQ ID NO: 359070 - RNA, 32 nt, Human
caugccagccugggugacaaagcgagacuccg

SEQ ID NO: 359071 - RNA, 32 nt, Human
caugccagcgccaacaggaggcugucuggaca

SEQ ID NO: 359072 - RNA, 32 nt, Human
caugccagcgucaacaggaggcugucuggaca

SEQ ID NO: 359073 - RNA, 32 nt, Human
caugccagcuacuuccuccuccccacuugucc

SEQ ID NO: 359074 - RNA, 23 nt, Human
caugccagcugggcaugacccca

SEQ ID NO: 359075 - RNA, 32 nt, Human
caugccaggacagcugugagaccaggaaucag

SEQ ID NO: 359076 - RNA, 32 nt, Human
caugccaggacuugugcacaucuuuuuggagc

SEQ ID NO: 359077 - RNA, 19 nt, Human
caugccaguaauuccagcu

SEQ ID NO: 359078 - RNA, 32 nt, Human
caugccagugcacuccagccugggcaacagag

SEQ ID NO: 359079 - RNA, 32 nt, Human
caugccauaaugaacagggaccaaggagaagg

SEQ ID NO: 359080 - RNA, 32 nt, Human
caugccauaccacuugucagggcacaggggac

SEQ ID NO: 359081 - RNA, 32 nt, Human
caugccauacccacugccccagaccagugcag

SEQ ID NO: 359082 - RNA, 32 nt, Human
caugccauagcuugugcuaucuguaaauauga

SEQ ID NO: 359083 - RNA, 20 nt, Human
caugccaucugccugccuua

SEQ ID NO: 359084 - RNA, 32 nt, Human
caugccaucugggacaggccaugugggagacc

SEQ ID NO: 359085 - RNA, 32 nt, Human
caugccauggcacuccauccugggugacaaag

SEQ ID NO: 359086 - RNA, 32 nt, Human
caugccauggcacuccguccugggugacaaag

SEQ ID NO: 359087 - RNA, 32 nt, Human
caugccauggcagucuagccugggcaacagag

SEQ ID NO: 359088 - RNA, 32 nt, Human
caugccauuacacuccagccugggcgacagaa

SEQ ID NO: 359089 - RNA, 32 nt, Human
caugccauuacuccagccugggugacauaggg

SEQ ID NO: 359090 - RNA, 32 nt, Human
caugccauuauacuccagccugggugacagaa

SEQ ID NO: 359091 - RNA, 32 nt, Human
caugccauucuccugccucacccucccgagua

SEQ ID NO: 359092 - RNA, 18 nt, Human
caugccauucuccugucu

SEQ ID NO: 359093 - RNA, 32 nt, Human
caugccauucugccucagccuccugaguagcu

SEQ ID NO: 359094 - RNA, 32 nt, Human
caugccauugcacagcagccugggugacagag

SEQ ID NO: 359095 - RNA, 32 nt, Human
caugccauugcacuccaaccugggugacagag

SEQ ID NO: 359096 - RNA, 32 nt, Human
caugccauugcacuccagcccagguaacagag

SEQ ID NO: 359097 - RNA, 32 nt, Human
caugccauugcacuccagcccggguuacagug

SEQ ID NO: 359098 - RNA, 32 nt, Human
caugccauugcacuccagccuaggcaacaaga

SEQ ID NO: 359099 - RNA, 32 nt, Human
caugccauugcacuccagccugagugacaaga

SEQ ID NO: 359100 - RNA, 32 nt, Human
caugccauugcacuccagccuggacaacagag

SEQ ID NO: 359101 - RNA, 32 nt, Human
caugccauugcacuccagccugggcaacaaga

SEQ ID NO: 359102 - RNA, 32 nt, Human
caugccauugcacuccagccugggcaacagag

SEQ ID NO: 359103 - RNA, 32 nt, Human
caugccauugcacuccagccugggcaacgaga

SEQ ID NO: 359104 - RNA, 32 nt, Human
caugccauugcacuccagccugggcgacaaga

SEQ ID NO: 359105 - RNA, 32 nt, Human
caugccauugcacuccagccugggcgacagag

SEQ ID NO: 359106 - RNA, 32 nt, Human
caugccauugcacuccagccugggugacaaga

SEQ ID NO: 359107 - RNA, 32 nt, Human
caugccauugcacuccagccugggugacaagg

SEQ ID NO: 359108 - RNA, 32 nt, Human
caugccauugcacuccagccugggugacagag

SEQ ID NO: 359109 - RNA, 32 nt, Human
caugccauugcacuccagccugggugauaaga

SEQ ID NO: 359110 - RNA, 32 nt, Human
caugccauugcacuccagcuugggugacagag

SEQ ID NO: 359111 - RNA, 32 nt, Human
caugccauugcacuccagucugggcgacagga

SEQ ID NO: 359112 - RNA, 32 nt, Human
caugccauugcacuccgacucugggcaacaga

SEQ ID NO: 359113 - RNA, 32 nt, Human
caugccauugcacucgagccugggcaacaaga

SEQ ID NO: 359114 - RNA, 32 nt, Human
caugccauugcacucuagccuagcaacaagag

SEQ ID NO: 359115 - RNA, 26 nt, Human
caugccauugcacucuagccugggug

SEQ ID NO: 359116 - RNA, 32 nt, Human
caugccauugcacugcaccugggcaacaagag

SEQ ID NO: 359117 - RNA, 32 nt, Human
caugccauugcauuccagccuaggcaacacga

SEQ ID NO: 359118 - RNA, 32 nt, Human
caugccauugcauuccagccuuggcgacagag

SEQ ID NO: 359119 - RNA, 32 nt, Human
caugccauugcccacagagcucggugacccua

SEQ ID NO: 359120 - RNA, 32 nt, Human
caugccauuggacuccagccugggcaaaaagg

SEQ ID NO: 359121 - RNA, 32 nt, Human
caugccauuguacuccagccugggcaacaaga

SEQ ID NO: 359122 - RNA, 26 nt, Human
caugcccaagagaaaggcugaagggg

SEQ ID NO: 359123 - RNA, 32 nt, Human
caugcccaagggaggaagcagagggaggcaga

SEQ ID NO: 359124 - RNA, 32 nt, Human
caugcccaaggugugcccuccgucuggaaugc

SEQ ID NO: 359125 - RNA, 21 nt, Human
caugcccaaguaccacgcagu

SEQ ID NO: 359126 - RNA, 20 nt, Human
caugcccacccccugaggaa

SEQ ID NO: 359127 - RNA, 32 nt, Human
caugcccacugcagcccuccagccucuggucc

SEQ ID NO: 359128 - RNA, 18 nt, Human
caugcccagccccuccca

SEQ ID NO: 359129 - RNA, 32 nt, Human
caugcccagcuucugucauaugaaugagauau

SEQ ID NO: 359130 - RNA, 23 nt, Human
caugcccaggagaccacauaguc

SEQ ID NO: 359131 - RNA, 32 nt, Human
caugcccaggagacugguuucccggugacaca

SEQ ID NO: 359132 - RNA, 32 nt, Human
caugcccaggcagaagguggggaggauucugu

SEQ ID NO: 359133 - RNA, 26 nt, Human
caugcccaggcagagugacaggagag

SEQ ID NO: 359134 - RNA, 32 nt, Human
caugcccaggguggccguggaagggacgguuu

SEQ ID NO: 359135 - RNA, 22 nt, Human
caugcccaggucuccugccuca

SEQ ID NO: 359136 - RNA, 32 nt, Human
caugcccaggugucugucucuggcugagguuu

SEQ ID NO: 359137 - RNA, 32 nt, Human
caugcccaugccaccuaugccacagugccuaa

SEQ ID NO: 359138 - RNA, 32 nt, Human
caugcccauuagcagaggcugcugcugaugug

SEQ ID NO: 359139 - RNA, 32 nt, Human
caugcccauucacuacagccuggaugacaagc

SEQ ID NO: 359140 - RNA, 32 nt, Human
caugccccaacaagaggaagacugucuggcuc

SEQ ID NO: 359141 - RNA, 32 nt, Human
caugccccaccuacucuuucauccccucugcc

SEQ ID NO: 359142 - RNA, 32 nt, Human
caugccccaccuuugcuuccucccucucuccu

SEQ ID NO: 359143 - RNA, 32 nt, Human
caugcccccucagugaggaucuucauguaccu

SEQ ID NO: 359144 - RNA, 32 nt, Human
caugcccccugccccucugcccagaugcuuca

SEQ ID NO: 359145 - RNA, 32 nt, Human
caugcccccugugccagugcucugccugugug

SEQ ID NO: 359146 - RNA, 32 nt, Human
caugccccggacugcauugaagccaggcugcc

SEQ ID NO: 359147 - RNA, 32 nt, Human
caugccccgggaaacagucuuucuucagaauu

SEQ ID NO: 359148 - RNA, 32 nt, Human
caugccccugcagggccccggccugucuauga

SEQ ID NO: 359149 - RNA, 32 nt, Human
caugccccugcauuccagccuaggcgacagag

SEQ ID NO: 359150 - RNA, 32 nt, Human
caugccccugcuagcguauuacuguucuguga

SEQ ID NO: 359151 - RNA, 32 nt, Human
caugccccuguacuccagccugggugacagag

SEQ ID NO: 359152 - RNA, 32 nt, Human
caugccccuugguggagaugaaugggagugga

SEQ ID NO: 359153 - RNA, 17 nt, Human
caugcccgccccuccca

SEQ ID NO: 359154 - RNA, 32 nt, Human
caugcccgcgcuccuccgcagccugggguacg

SEQ ID NO: 359155 - RNA, 32 nt, Human
caugcccggucaccaugggggucagguuauuu

SEQ ID NO: 359156 - RNA, 17 nt, Human
caugcccggugcugucu

SEQ ID NO: 359157 - RNA, 19 nt, Human
caugcccguccccuguucu

SEQ ID NO: 359158 - RNA, 32 nt, Human
caugcccuagccccaggucuagccgggcccau

SEQ ID NO: 359159 - RNA, 32 nt, Human
caugcccucaccccacuucuuugcuaccuagc

SEQ ID NO: 359160 - RNA, 32 nt, Human
caugcccucagccugccucacugcugggccag

SEQ ID NO: 359161 - RNA, 32 nt, Human
caugcccuccccagccucucccagcacaagug

SEQ ID NO: 359162 - RNA, 32 nt, Human
caugcccuccuaugagaaucuaaugccgccgc

SEQ ID NO: 359163 - RNA, 24 nt, Human
caugcccuccugcuccccccaccc

SEQ ID NO: 359164 - RNA, 32 nt, Human
caugcccucggucucuugccucggcaccuggg

SEQ ID NO: 359165 - RNA, 32 nt, Human
caugcccucuuccuccucuuuccuggaagaag

SEQ ID NO: 359166 - RNA, 32 nt, Human
caugcccuggaccagccgcccagaucaugccg

SEQ ID NO: 359167 - RNA, 32 nt, Human
caugcccuguaauccuagaacuuugggaggcu

SEQ ID NO: 359168 - RNA, 32 nt, Human
caugcccuguaauccuagcacuuugggagggu

SEQ ID NO: 359169 - RNA, 17 nt, Human
caugcccuuccuuucua

SEQ ID NO: 359170 - RNA, 32 nt, Human
caugccgagucgcggcccugcucagccggaag

SEQ ID NO: 359171 - RNA, 26 nt, Human
caugccgcugacugguguagagcccg

SEQ ID NO: 359172 - RNA, 32 nt, Human
caugccgcugcacuccagccugggagacugca

SEQ ID NO: 359173 - RNA, 26 nt, Human
caugccgcugcauuccagccugggug

SEQ ID NO: 359174 - RNA, 32 nt, Human
caugccggagaaagacgccgauccucagauga

SEQ ID NO: 359175 - RNA, 32 nt, Human
caugccguacaggguagcaccuccucaccugc

SEQ ID NO: 359176 - RNA, 32 nt, Human
caugccguuguacuccagcuugggcaacagag

SEQ ID NO: 359177 - RNA, 32 nt, Human
caugccuacugcacuccagccugggcaacaaa

SEQ ID NO: 359178 - RNA, 32 nt, Human
caugccuagguacacauguacaugcacuacag

SEQ ID NO: 359179 - RNA, 23 nt, Human
caugccuauaaucccaauacuuu

SEQ ID NO: 359180 - RNA, 19 nt, Human
caugccuauaaucccagca

SEQ ID NO: 359181 - RNA, 23 nt, Human
caugccuauaaucccagcacuuu

SEQ ID NO: 359182 - RNA, 32 nt, Human
caugccuauaaucccagcacuuuuggaggcug

SEQ ID NO: 359183 - RNA, 32 nt, Human
caugccuauaaucccagcuacuugggaggcua

SEQ ID NO: 359184 - RNA, 32 nt, Human
caugccuauaaucccagcuacuugggaggcug

SEQ ID NO: 359185 - RNA, 22 nt, Human
caugccuauaaucccggcuacu

SEQ ID NO: 359186 - RNA, 32 nt, Human
caugccuauaauuaaucccaguacuuugggag

SEQ ID NO: 359187 - RNA, 32 nt, Human
caugccuauaguaguucuagcacuuugagagg

SEQ ID NO: 359188 - RNA, 32 nt, Human
caugccuauagucccagcacuuugggaggcca

SEQ ID NO: 359189 - RNA, 32 nt, Human
caugccuauagucccagcuacuugggagguug

SEQ ID NO: 359190 - RNA, 32 nt, Human
caugccuauagucccagcuacuugggggccug

SEQ ID NO: 359191 - RNA, 22 nt, Human
caugccuaugcagccacacagu

SEQ ID NO: 359192 - RNA, 32 nt, Human
caugccuauugacagauaaacauguaucugua

SEQ ID NO: 359193 - RNA, 32 nt, Human
caugccucacugcagccucgaccucccugggc

SEQ ID NO: 359194 - RNA, 32 nt, Human
caugccucacugcagccucggcuuccugggcu

SEQ ID NO: 359195 - RNA, 32 nt, Human
caugccucagccacgccccuccggccucagcu

SEQ ID NO: 359196 - RNA, 32 nt, Human
caugccucauguccaaagaggucucagaccuu

SEQ ID NO: 359197 - RNA, 32 nt, Human
caugccucccagagugcugggauuacaggcgu

SEQ ID NO: 359198 - RNA, 32 nt, Human
caugccuccuaagagaggagugcauugcuuua

SEQ ID NO: 359199 - RNA, 32 nt, Human
caugccuccugccuccugggcuauuccucucc

SEQ ID NO: 359200 - RNA, 32 nt, Human
caugccucuaaucccagcuacucaggaggcua

SEQ ID NO: 359201 - RNA, 32 nt, Human
caugccucuaguccuagcuacucgggaggcug

SEQ ID NO: 359202 - RNA, 32 nt, Human
caugccucuaucucagaacccugcauccugcg

SEQ ID NO: 359203 - RNA, 26 nt, Human
caugccucuccuccucuugcugcucc

SEQ ID NO: 359204 - RNA, 32 nt, Human
caugccucucuacuccagccugggcaauaggg

SEQ ID NO: 359205 - RNA, 22 nt, Human
caugccucugaugagaacacuu

SEQ ID NO: 359206 - RNA, 32 nt, Human
caugccucugcagggaaucacacaccuuuuga

SEQ ID NO: 359207 - RNA, 32 nt, Human
caugccucugcauuccagccuuggugacagag

SEQ ID NO: 359208 - RNA, 32 nt, Human
caugccucuucuuccuccuuucuuuccccauc

SEQ ID NO: 359209 - RNA, 32 nt, Human
caugccucuugguggccuucucaggcccugcu

SEQ ID NO: 359210 - RNA, 21 nt, Human
caugccugacccacacacuuu

SEQ ID NO: 359211 - RNA, 32 nt, Human
caugccugcaaucccagcuacucagaggcuaa

SEQ ID NO: 359212 - RNA, 32 nt, Human
caugccugcaaucccagcuacuugagaggcug

SEQ ID NO: 359213 - RNA, 32 nt, Human
caugccugcaaucccagcuacuuggaaggcug

SEQ ID NO: 359214 - RNA, 32 nt, Human
caugccugcacucagacacauauccacacaga

SEQ ID NO: 359215 - RNA, 32 nt, Human
caugccugcagacuuuucccugggcuuguuuu

SEQ ID NO: 359216 - RNA, 32 nt, Human
caugccugcagucccagcuauucaggaggcug

SEQ ID NO: 359217 - RNA, 32 nt, Human
caugccugccuguaaucccagcacugugggag

SEQ ID NO: 359218 - RNA, 32 nt, Human
caugccugcggcucccccugugcugggcucug

SEQ ID NO: 359219 - RNA, 32 nt, Human
caugccugcugcaacggagacugggcccaacc

SEQ ID NO: 359220 - RNA, 32 nt, Human
caugccugcuuugguucccagugagcauugua

SEQ ID NO: 359221 - RNA, 32 nt, Human
caugccuggaaucccagcuacuugagaggcug

SEQ ID NO: 359222 - RNA, 32 nt, Human
caugccuggacaaggggaaugcaguggugccu

SEQ ID NO: 359223 - RNA, 32 nt, Human
caugccuggagucccagcuacucgggaggcug

SEQ ID NO: 359224 - RNA, 32 nt, Human
caugccugggaaaggccagcacuucauggacc

SEQ ID NO: 359225 - RNA, 32 nt, Human
caugccugggagggagaauaagaguaagugaa

SEQ ID NO: 359226 - RNA, 32 nt, Human
caugccugggcaacauaaugagacaggucucu

SEQ ID NO: 359227 - RNA, 32 nt, Human
caugccuggucucauggagauucaaagguguu

SEQ ID NO: 359228 - RNA, 32 nt, Human
caugccuguaaacccagcacuuugggaggcug

SEQ ID NO: 359229 - RNA, 32 nt, Human
caugccuguaaacccagcuauucaggaggcug

SEQ ID NO: 359230 - RNA, 32 nt, Human
caugccuguaaacccagggcuuuagaaggcug

SEQ ID NO: 359231 - RNA, 23 nt, Human
caugccuguaaauccagcacuuu

SEQ ID NO: 359232 - RNA, 32 nt, Human
caugccuguaaaucccagcacuuugguagccu

SEQ ID NO: 359233 - RNA, 32 nt, Human
caugccuguaaccccagcuacucgggaagcug

SEQ ID NO: 359234 - RNA, 32 nt, Human
caugccuguaagcccagcuauucgggaggcug

SEQ ID NO: 359235 - RNA, 32 nt, Human
caugccuguaaucaaucccagcacuuugggag

SEQ ID NO: 359236 - RNA, 23 nt, Human
caugccuguaaucccagaacuuu

SEQ ID NO: 359237 - RNA, 18 nt, Human
caugccuguaaucccagc

SEQ ID NO: 359238 - RNA, 23 nt, Human
caugccuguaaucccagcacuuu

SEQ ID NO: 359239 - RNA, 23 nt, Human
caugccuguaaucccagcauuuu

SEQ ID NO: 359240 - RNA, 19 nt, Human
caugccuguaaucccagcu

SEQ ID NO: 359241 - RNA, 32 nt, Human
caugccuguaaucccagcuacacuggaggcug

SEQ ID NO: 359242 - RNA, 32 nt, Human
caugccuguaaucccagcuacaugggaggcug

SEQ ID NO: 359243 - RNA, 32 nt, Human
caugccuguaaucccagcuacuagagaggcug

SEQ ID NO: 359244 - RNA, 32 nt, Human
caugccuguaaucccagcuacuagggaggcug

SEQ ID NO: 359245 - RNA, 32 nt, Human
caugccuguaaucccagcuacucggaaguuug

SEQ ID NO: 359246 - RNA, 32 nt, Human
caugccuguaaucccagcuacucgggaggcug

SEQ ID NO: 359247 - RNA, 32 nt, Human
caugccuguaaucccagcuacucgggaggcuu

SEQ ID NO: 359248 - RNA, 32 nt, Human
caugccuguaaucccagcuacucgggagguug

SEQ ID NO: 359249 - RNA, 32 nt, Human
caugccuguaaucccagcuacucuggaggcug

SEQ ID NO: 359250 - RNA, 32 nt, Human
caugccuguaaucccagcuacugggaaggcug

SEQ ID NO: 359251 - RNA, 32 nt, Human
caugccuguaaucccagcuacuuaggaggcug

SEQ ID NO: 359252 - RNA, 32 nt, Human
caugccuguaaucccagcuacuuggaaggcug

SEQ ID NO: 359253 - RNA, 32 nt, Human
caugccuguaaucccagcuacuugggagacug

SEQ ID NO: 359254 - RNA, 32 nt, Human
caugccuguaaucccagcuacuugggagccug

SEQ ID NO: 359255 - RNA, 32 nt, Human
caugccuguaaucccagcuacuugggaggccg

SEQ ID NO: 359256 - RNA, 32 nt, Human
caugccuguaaucccagcuacuugggaggcua

SEQ ID NO: 359257 - RNA, 32 nt, Human
caugccuguaaucccagcuacuugggaggcug

SEQ ID NO: 359258 - RNA, 32 nt, Human
caugccuguaaucccagcuauuagggaggcug

SEQ ID NO: 359259 - RNA, 32 nt, Human
caugccuguaaucccagcuauucggaaggcug

SEQ ID NO: 359260 - RNA, 32 nt, Human
caugccuguaaucccagcuauucgggaggcug

SEQ ID NO: 359261 - RNA, 32 nt, Human
caugccuguaaucccagcugcuggagaggcug

SEQ ID NO: 359262 - RNA, 32 nt, Human
caugccuguaaucccagcugcuugggaggcug

SEQ ID NO: 359263 - RNA, 32 nt, Human
caugccuguaaucccagcuucuugggaggcca

SEQ ID NO: 359264 - RNA, 21 nt, Human
caugccuguaaucucagcacu

SEQ ID NO: 359265 - RNA, 32 nt, Human
caugccuguaaucucggaaggcugaggcagga

SEQ ID NO: 359266 - RNA, 32 nt, Human
caugccuguaaugccagcacuuugccaaggug

SEQ ID NO: 359267 - RNA, 18 nt, Human
caugccuguaauuccagc

SEQ ID NO: 359268 - RNA, 19 nt, Human
caugccuguaauuccagcu

SEQ ID NO: 359269 - RNA, 32 nt, Human
caugccuguaguaaucccagcacuuuuggagg

SEQ ID NO: 359270 - RNA, 32 nt, Human
caugccuguagucccaccuacuugggaggcug

SEQ ID NO: 359271 - RNA, 32 nt, Human
caugccuguagucccacuuacuugggaggccg

SEQ ID NO: 359272 - RNA, 32 nt, Human
caugccuguagucccagauacuugggaguggg

SEQ ID NO: 359273 - RNA, 32 nt, Human
caugccuguagucccagcacucgggaaggccg

SEQ ID NO: 359274 - RNA, 32 nt, Human
caugccuguagucccagcacuuugggagacug

SEQ ID NO: 359275 - RNA, 32 nt, Human
caugccuguagucccagcacuuugggaggccg

SEQ ID NO: 359276 - RNA, 32 nt, Human
caugccuguagucccagcuaacugggaggcug

SEQ ID NO: 359277 - RNA, 32 nt, Human
caugccuguagucccagcuaccugggaggcug

SEQ ID NO: 359278 - RNA, 32 nt, Human
caugccuguagucccagcuacgugggaggcug

SEQ ID NO: 359279 - RNA, 32 nt, Human
caugccuguagucccagcuacucaggaggcuc

SEQ ID NO: 359280 - RNA, 32 nt, Human
caugccuguagucccagcuacucaggaggcug

SEQ ID NO: 359281 - RNA, 32 nt, Human
caugccuguagucccagcuacucgggaggccg

SEQ ID NO: 359282 - RNA, 32 nt, Human
caugccuguagucccagcuacucgggaggcug

SEQ ID NO: 359283 - RNA, 32 nt, Human
caugccuguagucccagcuacucuggaggcug

SEQ ID NO: 359284 - RNA, 32 nt, Human
caugccuguagucccagcuacuggggaggcug

SEQ ID NO: 359285 - RNA, 32 nt, Human
caugccuguagucccagcuacuugagaggcug

SEQ ID NO: 359286 - RNA, 32 nt, Human
caugccuguagucccagcuacuugggaagcug

SEQ ID NO: 359287 - RNA, 32 nt, Human
caugccuguagucccagcuacuugggaggaaa

SEQ ID NO: 359288 - RNA, 32 nt, Human
caugccuguagucccagcuacuugggaggcug

SEQ ID NO: 359289 - RNA, 32 nt, Human
caugccuguagucccagcuacuugggaugccg

SEQ ID NO: 359290 - RNA, 32 nt, Human
caugccuguagucccagcuauucaggaggcug

SEQ ID NO: 359291 - RNA, 32 nt, Human
caugccuguagucccagcuauucgggaggcug

SEQ ID NO: 359292 - RNA, 32 nt, Human
caugccuguagucccagcuauucuggaggcug

SEQ ID NO: 359293 - RNA, 32 nt, Human
caugccuguagucccagcugcucaggaggcug

SEQ ID NO: 359294 - RNA, 32 nt, Human
caugccuguagucccagcuucucaggaggcug

SEQ ID NO: 359295 - RNA, 32 nt, Human
caugccuguaguccuagcuauuugggaggcug

SEQ ID NO: 359296 - RNA, 19 nt, Human
caugccuguaguuccagcu

SEQ ID NO: 359297 - RNA, 32 nt, Human
caugccuguaguuccagcuacucaggaggcag

SEQ ID NO: 359298 - RNA, 32 nt, Human
caugccuguaguuccagcuacucaggaggcua

SEQ ID NO: 359299 - RNA, 32 nt, Human
caugccuguaguuccagcuacucaggaggcug

SEQ ID NO: 359300 - RNA, 32 nt, Human
caugccuguauaaucccagcacuuugggaggc

SEQ ID NO: 359301 - RNA, 32 nt, Human
caugccuguauucccagcugcuugggaggcug

SEQ ID NO: 359302 - RNA, 32 nt, Human
caugccugucaucccagcuacuugggaggcug

SEQ ID NO: 359303 - RNA, 32 nt, Human
caugccuguccucugccuuaucuugccccucu

SEQ ID NO: 359304 - RNA, 32 nt, Human
caugccugugaucccagcuacuugagaggcug

SEQ ID NO: 359305 - RNA, 32 nt, Human
caugccuguggccccagccacucugaacgcug

SEQ ID NO: 359306 - RNA, 32 nt, Human
caugccuguggucccagcacuuugggaggcca

SEQ ID NO: 359307 - RNA, 32 nt, Human
caugccuguggucccagcacuuugggaggcug

SEQ ID NO: 359308 - RNA, 32 nt, Human
caugccuguggucccagcgcuuugggaggccg

SEQ ID NO: 359309 - RNA, 32 nt, Human
caugccuguggucccagcuacucaggaggcug

SEQ ID NO: 359310 - RNA, 32 nt, Human
caugccuguggucccagcuacuugagaggcug

SEQ ID NO: 359311 - RNA, 32 nt, Human
caugccuguggucccagcuacuugggaggcua

SEQ ID NO: 359312 - RNA, 32 nt, Human
caugccuguggucccagcuucuugggaggcug

SEQ ID NO: 359313 - RNA, 32 nt, Human
caugccuguggucucagcuauucaggaggcug

SEQ ID NO: 359314 - RNA, 23 nt, Human
caugccuguguuacagcagcucc

SEQ ID NO: 359315 - RNA, 32 nt, Human
caugccuguguucccagcuacuugggaggcua

SEQ ID NO: 359316 - RNA, 32 nt, Human
caugccuguguucccagcuauucaggaggcug

SEQ ID NO: 359317 - RNA, 32 nt, Human
caugccuguguucucccccggggccacuuaga

SEQ ID NO: 359318 - RNA, 22 nt, Human
caugccuguuaucccagcacuu

SEQ ID NO: 359319 - RNA, 32 nt, Human
caugccuguugucccagcugcuugggaggcug

SEQ ID NO: 359320 - RNA, 31 nt, Human
caugccuuacuccaggugccuguguuuggcc

SEQ ID NO: 359321 - RNA, 32 nt, Human
caugccuuagaggauuguagcauuuuauuuuc

SEQ ID NO: 359322 - RNA, 32 nt, Human
caugccuucaagagaaggacugaagaucauug

SEQ ID NO: 359323 - RNA, 32 nt, Human
caugccuuccaaauuguggguggcucuguggg

SEQ ID NO: 359324 - RNA, 32 nt, Human
caugccuuccccaaagucccccaaacucuuau

SEQ ID NO: 359325 - RNA, 32 nt, Human
caugccuuccccacccuccagcuccucuugga

SEQ ID NO: 359326 - RNA, 32 nt, Human
caugccuuccuuucuccuugggugaugugcaa

SEQ ID NO: 359327 - RNA, 31 nt, Human
caugccuuccuuuucugacuuaguagauuga

SEQ ID NO: 359328 - RNA, 32 nt, Human
caugccuugcuguccccuccccugagccaggu

SEQ ID NO: 359329 - RNA, 32 nt, Human
caugccuuggaaagacuuaaguaaugcaaaag

SEQ ID NO: 359330 - RNA, 32 nt, Human
caugccuuggcacaucauggucaaacugcuaa

SEQ ID NO: 359331 - RNA, 32 nt, Human
caugccuuuaaucucagcuauucuggaggcuu

SEQ ID NO: 359332 - RNA, 32 nt, Human
caugccuuuagucccagcuacucuggaggcug

SEQ ID NO: 359333 - RNA, 19 nt, Human
caugccuuucaagcauuuu

SEQ ID NO: 359334 - RNA, 32 nt, Human
caugccuuucccccucuucauccugaucccgu

SEQ ID NO: 359335 - RNA, 32 nt, Human
caugccuuuuaaacccagcuacugaggaggcu

SEQ ID NO: 359336 - RNA, 32 nt, Human
caugcgaaggacagccugcagugaccagagag

SEQ ID NO: 359337 - RNA, 32 nt, Human
caugcgaccugcccaaucaagcagaaacacgu

SEQ ID NO: 359338 - RNA, 32 nt, Human
caugcgaccugcccagucaagcagaaacaggu

SEQ ID NO: 359339 - RNA, 32 nt, Human
caugcgacugcacuccagccugggugacugag

SEQ ID NO: 359340 - RNA, 32 nt, Human
caugcgaggccaccguggugaccucauucaug

SEQ ID NO: 359341 - RNA, 23 nt, Human
caugcgaguagcugggacuacag

SEQ ID NO: 359342 - RNA, 32 nt, Human
caugcgcacacacacuugcauucaugaaucug

SEQ ID NO: 359343 - RNA, 32 nt, Human
caugcgccggaaggagcuucaggugagcacug

SEQ ID NO: 359344 - RNA, 32 nt, Human
caugcgccuggaaggccacccugcugcacagc

SEQ ID NO: 359345 - RNA, 32 nt, Human
caugcgccuguaaucccagcuacuucggaggu

SEQ ID NO: 359346 - RNA, 32 nt, Human
caugcgccuguaauccuagcuauucuggaggc

SEQ ID NO: 359347 - RNA, 32 nt, Human
caugcgccuucauuucgucagcccgcuguugc

SEQ ID NO: 359348 - RNA, 32 nt, Human
caugcgcgcucucucaugcacacgcacgcaug

SEQ ID NO: 359349 - RNA, 32 nt, Human
caugcgcugcguuccuccuccagaucgacccc

SEQ ID NO: 359350 - RNA, 32 nt, Human
caugcgcugcuguccgcgccccucuguccugc

SEQ ID NO: 359351 - RNA, 32 nt, Human
caugcggcauggccccagccaugaaggaacuu

SEQ ID NO: 359352 - RNA, 32 nt, Human
caugcggccacuggucggugcugccugguccu

SEQ ID NO: 359353 - RNA, 26 nt, Human
caugcggcucuggaguugggugcugc

SEQ ID NO: 359354 - RNA, 32 nt, Human
caugcgggagagagaaugagccagagggacac

SEQ ID NO: 359355 - RNA, 32 nt, Human
caugcgggaggcggaggggugggaccgggugg

SEQ ID NO: 359356 - RNA, 32 nt, Human
caugcgggcugggaaccgccucaccuccaggg

SEQ ID NO: 359357 - RNA, 32 nt, Human
caugcgggcuuccuccugguguggaagagcuc

SEQ ID NO: 359358 - RNA, 32 nt, Human
caugcgguagaugcccaccuccuccaugccuc

SEQ ID NO: 359359 - RNA, 32 nt, Human
caugcguauagacauacauacauguacaccau

SEQ ID NO: 359360 - RNA, 32 nt, Human
caugcguccuaccugugaacucugggaagcag

SEQ ID NO: 359361 - RNA, 32 nt, Human
caugcgucuaauagugaggagaacaaaauaag

SEQ ID NO: 359362 - RNA, 32 nt, Human
caugcgucuguaacaucuuucuuaccaagugu

SEQ ID NO: 359363 - RNA, 32 nt, Human
caugcgugagccacugcgcccugccuguuugu

SEQ ID NO: 359364 - RNA, 32 nt, Human
caugcguggcaccauuuccugcgaacacccgu

SEQ ID NO: 359365 - RNA, 32 nt, Human
caugcguggccugcagaguccauuccaucaug

SEQ ID NO: 359366 - RNA, 26 nt, Human
caugcguuuaaauucuauuauauaaa

SEQ ID NO: 359367 - RNA, 24 nt, Human
caugcuaaaacccagucucuacua

SEQ ID NO: 359368 - RNA, 23 nt, Human
caugcuaaaagauggacucucca

SEQ ID NO: 359369 - RNA, 24 nt, Human
caugcuaaaauccccucucuacua

SEQ ID NO: 359370 - RNA, 32 nt, Human
caugcuaaacaagacaugaaauucagaaaggu

SEQ ID NO: 359371 - RNA, 32 nt, Human
caugcuaaaggcaggccaaggacuuacacauc

SEQ ID NO: 359372 - RNA, 32 nt, Human
caugcuaaauuguccugcuguagaguuacuau

SEQ ID NO: 359373 - RNA, 32 nt, Human
caugcuaaccuguaaucccagcuacuugggag

SEQ ID NO: 359374 - RNA, 21 nt, Human
caugcuaacuggacuauagca

SEQ ID NO: 359375 - RNA, 32 nt, Human
caugcuaaugaguuagucuggaaaaauaaagu

SEQ ID NO: 359376 - RNA, 32 nt, Human
caugcuaaugauguaacuccucucuuuaucau

SEQ ID NO: 359377 - RNA, 32 nt, Human
caugcuacagcaguuuacgagacccuggugca

SEQ ID NO: 359378 - RNA, 32 nt, Human
caugcuaccagcaucccagggucuccagccua

SEQ ID NO: 359379 - RNA, 32 nt, Human
caugcuaccuaaucucuuugugccucaauuuc

SEQ ID NO: 359380 - RNA, 32 nt, Human
caugcuacugcacuccagccuaggugacagag

SEQ ID NO: 359381 - RNA, 32 nt, Human
caugcuacugcacuccagccugggagacagag

SEQ ID NO: 359382 - RNA, 32 nt, Human
caugcuacugcacuccagccugggcgacagag

SEQ ID NO: 359383 - RNA, 32 nt, Human
caugcuacugcacuccagccugggugacagag

SEQ ID NO: 359384 - RNA, 32 nt, Human
caugcuacugcacuccagcuuagguggcaaag

SEQ ID NO: 359385 - RNA, 32 nt, Human
caugcuacugcacucuagccugagcgacagag

SEQ ID NO: 359386 - RNA, 32 nt, Human
caugcuacugcaugccagccugggugacaaag

SEQ ID NO: 359387 - RNA, 32 nt, Human
caugcuacuguuccacauuuguuuucacagca

SEQ ID NO: 359388 - RNA, 32 nt, Human
caugcuacuuaauaucucugugccucaguucc

SEQ ID NO: 359389 - RNA, 32 nt, Human
caugcuagugcgcuccagccugggcaacagag

SEQ ID NO: 359390 - RNA, 32 nt, Human
caugcuaguugagacuuuucaaauggauuuuu

SEQ ID NO: 359391 - RNA, 32 nt, Human
caugcuauugugauauuuuagcacuuugguag

SEQ ID NO: 359392 - RNA, 32 nt, Human
caugcucaaccuaggcagggcggggcaggagg

SEQ ID NO: 359393 - RNA, 32 nt, Human
caugcucacaccacugcacuccagccugggug

SEQ ID NO: 359394 - RNA, 32 nt, Human
caugcucaccaaggaacucuacuucagucaau

SEQ ID NO: 359395 - RNA, 32 nt, Human
caugcucacugccagcuccuguccugaguacu

SEQ ID NO: 359396 - RNA, 32 nt, Human
caugcucagaugucauaaguggcagcuaucuu

SEQ ID NO: 359397 - RNA, 32 nt, Human
caugcuccaaguccagcaaccugcacuccagc

SEQ ID NO: 359398 - RNA, 32 nt, Human
caugcuccagggucaggcggagcugcugagug

SEQ ID NO: 359399 - RNA, 32 nt, Human
caugcucccuccaggcuugcggggagaacuuc

SEQ ID NO: 359400 - RNA, 32 nt, Human
caugcucccugcccucuccacagugcugcucc

SEQ ID NO: 359401 - RNA, 32 nt, Human
caugcucccugcggcccugcccucccgcccag

SEQ ID NO: 359402 - RNA, 32 nt, Human
caugcuccucaccuguauuuuguaaucagaaa

SEQ ID NO: 359403 - RNA, 32 nt, Human
caugcuccuccuccauuuuacccccuacccau

SEQ ID NO: 359404 - RNA, 32 nt, Human
caugcuccuugccucugcucugugcacucacg

SEQ ID NO: 359405 - RNA, 32 nt, Human
caugcucuacaaaaauuaggucacuugcccag

SEQ ID NO: 359406 - RNA, 32 nt, Human
caugcucuagacaccaccucgcuggagaagcu

SEQ ID NO: 359407 - RNA, 32 nt, Human
caugcucuccccaggguggggcuauggaaucc

SEQ ID NO: 359408 - RNA, 26 nt, Human
caugcucuccucucuugacaaagaga

SEQ ID NO: 359409 - RNA, 32 nt, Human
caugcucucuauagaggaggauggucaucgug

SEQ ID NO: 359410 - RNA, 32 nt, Human
caugcucucucccaaacacugcuuucagugca

SEQ ID NO: 359411 - RNA, 32 nt, Human
caugcucucucccuuguuuccuuaagagcuca

SEQ ID NO: 359412 - RNA, 32 nt, Human
caugcucucuuucuuuucucugucuacuccuu

SEQ ID NO: 359413 - RNA, 32 nt, Human
caugcucugaaauccuauauaaaagaguuuaa

SEQ ID NO: 359414 - RNA, 32 nt, Human
caugcucugacuuucucucucuuucgauucuu

SEQ ID NO: 359415 - RNA, 32 nt, Human
caugcucugagaugcuauaaauggagcaaaca

SEQ ID NO: 359416 - RNA, 32 nt, Human
caugcucugcucucuucaaccagaccucuaca

SEQ ID NO: 359417 - RNA, 32 nt, Human
caugcucuggggacaggaggggaaggcaacau

SEQ ID NO: 359418 - RNA, 32 nt, Human
caugcucugucgcccaggcuggagugcagugg

SEQ ID NO: 359419 - RNA, 32 nt, Human
caugcucugugcaaugaagucugcaggccuga

SEQ ID NO: 359420 - RNA, 20 nt, Human
caugcucuucaccuguucua

SEQ ID NO: 359421 - RNA, 32 nt, Human
caugcucuucccacccuccacccaccagagug

SEQ ID NO: 359422 - RNA, 32 nt, Human
caugcugaaccccuucaucugcagccugagaa

SEQ ID NO: 359423 - RNA, 24 nt, Human
caugcugacauucaucaccgcaaa

SEQ ID NO: 359424 - RNA, 32 nt, Human
caugcugacugugaugagaaauugcagcaccu

SEQ ID NO: 359425 - RNA, 32 nt, Human
caugcugagcaugcucacaaagaaggcucguc

SEQ ID NO: 359426 - RNA, 32 nt, Human
caugcugagcccccuccuuggcugaagcccga

SEQ ID NO: 359427 - RNA, 32 nt, Human
caugcugagcgacagcccuggggucaugugcc

SEQ ID NO: 359428 - RNA, 32 nt, Human
caugcugauguucacaaggcacacagcauuuc

SEQ ID NO: 359429 - RNA, 32 nt, Human
caugcugcacagaaacugguauaacaugccuu

SEQ ID NO: 359430 - RNA, 21 nt, Human
caugcugcaccaggagcagag

SEQ ID NO: 359431 - RNA, 31 nt, Human
caugcugcacuucuccacugucggagcacgu

SEQ ID NO: 359432 - RNA, 32 nt, Human
caugcugcaugcucuggggucccuccagguga

SEQ ID NO: 359433 - RNA, 32 nt, Human
caugcugccagauagauagaaaaagaagcaug

SEQ ID NO: 359434 - RNA, 32 nt, Human
caugcugcccguaagagucacaaccugugugu

SEQ ID NO: 359435 - RNA, 31 nt, Human
caugcugccuucucugggcucacgacuguuc

SEQ ID NO: 359436 - RNA, 32 nt, Human
caugcugcuauugucaucuuccuugaauucuu

SEQ ID NO: 359437 - RNA, 32 nt, Human
caugcugcugcccaggcuggagugcaguggug

SEQ ID NO: 359438 - RNA, 32 nt, Human
caugcugcuguccagugagcagccgggccaga

SEQ ID NO: 359439 - RNA, 32 nt, Human
caugcugcuguuggcuccaucucuccacacug

SEQ ID NO: 359440 - RNA, 32 nt, Human
caugcugcuuccucucgaugccaagccagacc

SEQ ID NO: 359441 - RNA, 22 nt, Human
caugcugcuucugucugucuua

SEQ ID NO: 359442 - RNA, 32 nt, Human
caugcuggacccaagcucagcucagcguccgg

SEQ ID NO: 359443 - RNA, 18 nt, Human
caugcuggagagaaaccu

SEQ ID NO: 359444 - RNA, 32 nt, Human
caugcuggcauuacagguaugagccaccgcgc

SEQ ID NO: 359445 - RNA, 32 nt, Human
caugcuggccaacguggugaaaccccgucucu

SEQ ID NO: 359446 - RNA, 32 nt, Human
caugcuggcuaacauggugaaaccccaucucu

SEQ ID NO: 359447 - RNA, 32 nt, Human
caugcuggcuaacauggugaaaccccgucucu

SEQ ID NO: 359448 - RNA, 24 nt, Human
caugcuggcucaugccuguaaucc

SEQ ID NO: 359449 - RNA, 32 nt, Human
caugcuggcucaugccuguaaucccagcacuu

SEQ ID NO: 359450 - RNA, 18 nt, Human
caugcuggcucgcuccca

SEQ ID NO: 359451 - RNA, 32 nt, Human
caugcuggcuuaugacuguaaucccagcagga

SEQ ID NO: 359452 - RNA, 32 nt, Human
caugcugggagccacagauauccagagccagc

SEQ ID NO: 359453 - RNA, 32 nt, Human
caugcugggaugagcgacugccuagcaagcaa

SEQ ID NO: 359454 - RNA, 32 nt, Human
caugcugggauuauagacauuagccaccaugc

SEQ ID NO: 359455 - RNA, 32 nt, Human
caugcugggcaggcuugggggugacaugggcc

SEQ ID NO: 359456 - RNA, 26 nt, Human
caugcugggcucucccugccuucugu

SEQ ID NO: 359457 - RNA, 32 nt, Human
caugcugggucucuuccacagacuuuaagcuc

SEQ ID NO: 359458 - RNA, 32 nt, Human
caugcuggucauuuacccucagaaagacucuc

SEQ ID NO: 359459 - RNA, 32 nt, Human
caugcuggucucaaacuccugaccucguguga

SEQ ID NO: 359460 - RNA, 32 nt, Human
caugcuggucucaaacuccugggcucaagcaa

SEQ ID NO: 359461 - RNA, 32 nt, Human
caugcuggugauuuucuguaaucccaguaauc

SEQ ID NO: 359462 - RNA, 32 nt, Human
caugcuggugcacaccuguaaucccagcuacu

SEQ ID NO: 359463 - RNA, 18 nt, Human
caugcuggugugcugcac

SEQ ID NO: 359464 - RNA, 32 nt, Human
caugcuguaaaucuuuacaaaauaucauuuga

SEQ ID NO: 359465 - RNA, 21 nt, Human
caugcuguaaucccaucacuu

SEQ ID NO: 359466 - RNA, 32 nt, Human
caugcugucauuuaucugaagguuguggcuga

SEQ ID NO: 359467 - RNA, 32 nt, Human
caugcugucuucauguggagcccucaccacaa

SEQ ID NO: 359468 - RNA, 32 nt, Human
caugcugugacccguuucaggcugcccaggcu

SEQ ID NO: 359469 - RNA, 32 nt, Human
caugcugugccaucaugugugcagccugccag

SEQ ID NO: 359470 - RNA, 32 nt, Human
caugcuguggaagcucugccuuuuugacuuca

SEQ ID NO: 359471 - RNA, 32 nt, Human
caugcuguggaagcucugccuuuuugacuucc

SEQ ID NO: 359472 - RNA, 32 nt, Human
caugcuguguuggaggaggaaguggcucuccu

SEQ ID NO: 359473 - RNA, 32 nt, Human
caugcuguugcccaggcuggagugcaguggug

SEQ ID NO: 359474 - RNA, 32 nt, Human
caugcuguugcccaggcuggagugcagugucc

SEQ ID NO: 359475 - RNA, 24 nt, Human
caugcuguugcugcuacugucuua

SEQ ID NO: 359476 - RNA, 32 nt, Human
caugcuguugcugcuacugucuuacuauuaua

SEQ ID NO: 359477 - RNA, 32 nt, Human
caugcuguuucccuuaacccugccuacacuuu

SEQ ID NO: 359478 - RNA, 32 nt, Human
caugcuucagccccucuguaggaaugagacca

SEQ ID NO: 359479 - RNA, 32 nt, Human
caugcuucauggucacacauacaggcacaaaa

SEQ ID NO: 359480 - RNA, 32 nt, Human
caugcuucauuucuuccacuucuccagaaaau

SEQ ID NO: 359481 - RNA, 32 nt, Human
caugcuucauuuucacaucucucugcacaauu

SEQ ID NO: 359482 - RNA, 32 nt, Human
caugcuuccagggagaggcagggcagccaggg

SEQ ID NO: 359483 - RNA, 32 nt, Human
caugcuucccuccuggugggcccuaggaugga

SEQ ID NO: 359484 - RNA, 32 nt, Human
caugcuuccuuuagcugcugugagaauuuguc

SEQ ID NO: 359485 - RNA, 32 nt, Human
caugcuucguagagggccaggagcagcagguc

SEQ ID NO: 359486 - RNA, 19 nt, Human
caugcuucuaaauggagcu

SEQ ID NO: 359487 - RNA, 32 nt, Human
caugcuucucaccaaauuuuuguugucauuga

SEQ ID NO: 359488 - RNA, 32 nt, Human
caugcuucuccucccuauuauuucuggcuuga

SEQ ID NO: 359489 - RNA, 32 nt, Human
caugcuucugcaagcuuuacaggaagcauugc

SEQ ID NO: 359490 - RNA, 32 nt, Human
caugcuucuuuccaacacguguucacaaucuc

SEQ ID NO: 359491 - RNA, 32 nt, Human
caugcuucuuucuccaccugaggucuuggucu

SEQ ID NO: 359492 - RNA, 32 nt, Human
caugcuugagggcuggagccgccugccgucag

SEQ ID NO: 359493 - RNA, 32 nt, Human
caugcuugcccucccccuccccuacccccauc

SEQ ID NO: 359494 - RNA, 32 nt, Human
caugcuuggaagccacuagccagcaagcauua

SEQ ID NO: 359495 - RNA, 32 nt, Human
caugcuuggcccucucuccucaaaagggcaau

SEQ ID NO: 359496 - RNA, 32 nt, Human
caugcuuggguguaacaggucuccucuuaaaa

SEQ ID NO: 359497 - RNA, 32 nt, Human
caugcuuguaaucccagcuacuugggaggcug

SEQ ID NO: 359498 - RNA, 32 nt, Human
caugcuuguagucccagcuacuugggaggcug

SEQ ID NO: 359499 - RNA, 32 nt, Human
caugcuuguggucccagcuacuuugggagguu

SEQ ID NO: 359500 - RNA, 32 nt, Human
caugcuuucaaaagcuaaucugccuguugaug

SEQ ID NO: 359501 - RNA, 22 nt, Human
caugcuuucuuagccacgcagc

SEQ ID NO: 359502 - RNA, 32 nt, Human
caugcuuugagcucagcagcagucuucauaaa

SEQ ID NO: 359503 - RNA, 32 nt, Human
caugcuuugagguuuggggugcucaggcuggg

SEQ ID NO: 359504 - RNA, 32 nt, Human
caugcuuugcuuaauguacuccaggcuucuuc

SEQ ID NO: 359505 - RNA, 31 nt, Human
caugcuuuuaaaugucucaugccaaggcacu

SEQ ID NO: 359506 - RNA, 32 nt, Human
caugcuuuugcagcuuuucacaguuuauuugc

SEQ ID NO: 359507 - RNA, 24 nt, Human
cauggaaaaaccccaucucuacua

SEQ ID NO: 359508 - RNA, 32 nt, Human
cauggaaagccucuaauuuuguuuauuuggga

SEQ ID NO: 359509 - RNA, 32 nt, Human
cauggaaauagaaugaauagaggggcauucac

SEQ ID NO: 359510 - RNA, 32 nt, Human
cauggaacagcaucuccccugggcuugcuccu

SEQ ID NO: 359511 - RNA, 32 nt, Human
cauggaacaguguggcucuucugagcuuacgu

SEQ ID NO: 359512 - RNA, 32 nt, Human
cauggaacccuccaucagauuuggaagaaagu

SEQ ID NO: 359513 - RNA, 32 nt, Human
cauggaacccuuguuuaucgccaugcaaauua

SEQ ID NO: 359514 - RNA, 32 nt, Human
cauggaaccuaccacacccacuucuccaacuu

SEQ ID NO: 359515 - RNA, 32 nt, Human
cauggaacucacaccucuagccccagcuacuc

SEQ ID NO: 359516 - RNA, 32 nt, Human
cauggaacucagguuuccuauuuggaaacuag

SEQ ID NO: 359517 - RNA, 32 nt, Human
cauggaacuuacacaaaaggcuuuucaugugc

SEQ ID NO: 359518 - RNA, 32 nt, Human
cauggaagaagagggggagagaguuacagguu

SEQ ID NO: 359519 - RNA, 32 nt, Human
cauggaagacaggaagaaaggaagagagggaa

SEQ ID NO: 359520 - RNA, 32 nt, Human
cauggaagcacaguagaucugcagaguguuuu

SEQ ID NO: 359521 - RNA, 32 nt, Human
cauggaagcacaugccuauaaucccagcacuu

SEQ ID NO: 359522 - RNA, 32 nt, Human
cauggaagccacguuccagaaguuuccaugcu

SEQ ID NO: 359523 - RNA, 32 nt, Human
cauggaagccauccugaaacucuuuggagaau

SEQ ID NO: 359524 - RNA, 26 nt, Human
cauggaagccccggagggcggcggag

SEQ ID NO: 359525 - RNA, 32 nt, Human
cauggaagccugggucacagaggcagguacca

SEQ ID NO: 359526 - RNA, 32 nt, Human
cauggaaggagaagauaaugaagaggaaguug

SEQ ID NO: 359527 - RNA, 32 nt, Human
cauggaaggcuggcuggaauggcacugauaac

SEQ ID NO: 359528 - RNA, 32 nt, Human
cauggaagucuuaaacagaaacuguuacuguc

SEQ ID NO: 359529 - RNA, 31 nt, Human
cauggaagugagaggugaagccagcuggucu

SEQ ID NO: 359530 - RNA, 32 nt, Human
cauggaagugaguuauaaugaggcagaaacaa

SEQ ID NO: 359531 - RNA, 32 nt, Human
cauggaaguggaggggacagggugugagcugg

SEQ ID NO: 359532 - RNA, 32 nt, Human
cauggaauaagaaaguauacuuauggacaaaa

SEQ ID NO: 359533 - RNA, 32 nt, Human
cauggaaucacugcaaaucuaucugcucuuca

SEQ ID NO: 359534 - RNA, 22 nt, Human
cauggaaucaggccacagcagg

SEQ ID NO: 359535 - RNA, 32 nt, Human
cauggaauccauuuugucaugauguauuuuua

SEQ ID NO: 359536 - RNA, 32 nt, Human
cauggaaucuuugaacaucccaccucaaaacu

SEQ ID NO: 359537 - RNA, 32 nt, Human
cauggaaugccuagugcuaagugcaguguccu

SEQ ID NO: 359538 - RNA, 32 nt, Human
cauggaauuggaacuccuauuccuugcuuaga

SEQ ID NO: 359539 - RNA, 32 nt, Human
cauggacacagccccaggaugugcagggugag

SEQ ID NO: 359540 - RNA, 32 nt, Human
cauggacacaguuucucucagugggacuauuc

SEQ ID NO: 359541 - RNA, 32 nt, Human
cauggacacauccugaagucagcccaggcgcc

SEQ ID NO: 359542 - RNA, 32 nt, Human
cauggacaccgacacaggcacauguacaugca

SEQ ID NO: 359543 - RNA, 32 nt, Human
cauggacaccugcucaccccugccucaucugu

SEQ ID NO: 359544 - RNA, 21 nt, Human
cauggacacugcaugcaugua

SEQ ID NO: 359545 - RNA, 32 nt, Human
cauggacagcgugucugcuccgggucucuacc

SEQ ID NO: 359546 - RNA, 32 nt, Human
cauggacaucaucugugaggcucugucccaga

SEQ ID NO: 359547 - RNA, 21 nt, Human
cauggaccacagaacagcaga

SEQ ID NO: 359548 - RNA, 32 nt, Human
cauggaccacaguaacauggacugcuucaucu

SEQ ID NO: 359549 - RNA, 32 nt, Human
cauggaccacagugccagauccucaucacgcc

SEQ ID NO: 359550 - RNA, 32 nt, Human
cauggaccacaguggcaucacagcuggcaucu

SEQ ID NO: 359551 - RNA, 32 nt, Human
cauggaccaccugaagagcaaguacccacagc

SEQ ID NO: 359552 - RNA, 32 nt, Human
cauggaccauagauugcugucccccucgacgg

SEQ ID NO: 359553 - RNA, 32 nt, Human
cauggacccaacugggccccagaagagccaca

SEQ ID NO: 359554 - RNA, 32 nt, Human
cauggacccauccuggaaucagaaucaggccc

SEQ ID NO: 359555 - RNA, 18 nt, Human
cauggacccaucgcugcc

SEQ ID NO: 359556 - RNA, 17 nt, Human
cauggaccccgcuguca

SEQ ID NO: 359557 - RNA, 32 nt, Human
cauggacccgagagccaaauguaacagcagga

SEQ ID NO: 359558 - RNA, 32 nt, Human
cauggacccgagaggcgacgacacgagugaau

SEQ ID NO: 359559 - RNA, 19 nt, Human
cauggacccuccucugcca

SEQ ID NO: 359560 - RNA, 32 nt, Human
cauggacccuggagccagccacugaccccgcc

SEQ ID NO: 359561 - RNA, 32 nt, Human
cauggacccuuuucuucacugugugaucccaa

SEQ ID NO: 359562 - RNA, 32 nt, Human
cauggaccugcacuuggccucuucgggaagau

SEQ ID NO: 359563 - RNA, 32 nt, Human
cauggaccugggaggcggagcuugcagugagc

SEQ ID NO: 359564 - RNA, 32 nt, Human
cauggacuauggacucuuucaaagggaucuga

SEQ ID NO: 359565 - RNA, 32 nt, Human
cauggacucaggacucaggucucccauagcug

SEQ ID NO: 359566 - RNA, 32 nt, Human
cauggacuccauuugaacaagauacuuaauuc

SEQ ID NO: 359567 - RNA, 32 nt, Human
cauggacucccagacugcaggggagcacuugg

SEQ ID NO: 359568 - RNA, 32 nt, Human
cauggacucuuuucugucuccugggucccugc

SEQ ID NO: 359569 - RNA, 32 nt, Human
cauggacugaacacuugcugggcuccaacccu

SEQ ID NO: 359570 - RNA, 21 nt, Human
cauggacugagucacagcaga

SEQ ID NO: 359571 - RNA, 32 nt, Human
cauggacugaguguuugagaugugccaggcuc

SEQ ID NO: 359572 - RNA, 32 nt, Human
cauggacugugagacuacucccuccuguuccu

SEQ ID NO: 359573 - RNA, 32 nt, Human
cauggacuguugcugcucccuguuccauaugc

SEQ ID NO: 359574 - RNA, 32 nt, Human
cauggacuucaggcuguuaguggcaguacuga

SEQ ID NO: 359575 - RNA, 32 nt, Human
cauggagaaacacacccgcgcacacagcugcu

SEQ ID NO: 359576 - RNA, 24 nt, Human
cauggagaaacauuuccccccauu

SEQ ID NO: 359577 - RNA, 24 nt, Human
cauggagaaaccccaucucuacua

SEQ ID NO: 359578 - RNA, 24 nt, Human
cauggagaaacccugucuccacua

SEQ ID NO: 359579 - RNA, 23 nt, Human
cauggagaaccccaucucuacua

SEQ ID NO: 359580 - RNA, 32 nt, Human
cauggagagagcauguguucucugauugugag

SEQ ID NO: 359581 - RNA, 32 nt, Human
cauggagagggcugugugucugggacuucucg

SEQ ID NO: 359582 - RNA, 17 nt, Human
cauggagagugcugcca

SEQ ID NO: 359583 - RNA, 32 nt, Human
cauggagcacagccaggguggggaggggagca

SEQ ID NO: 359584 - RNA, 32 nt, Human
cauggagcagagccacagaagcucacauguaa

SEQ ID NO: 359585 - RNA, 32 nt, Human
cauggagcagaggagccucucaccuccugucc

SEQ ID NO: 359586 - RNA, 26 nt, Human
cauggagcagccgccggcgccuaaga

SEQ ID NO: 359587 - RNA, 32 nt, Human
cauggagcccugcgaccucccugcccugccgc

SEQ ID NO: 359588 - RNA, 18 nt, Human
cauggagccgccgcugcc

SEQ ID NO: 359589 - RNA, 32 nt, Human
cauggagccggggagagcggggaagucucugc

SEQ ID NO: 359590 - RNA, 32 nt, Human
cauggagccuccagucuagcugccucuugugc

SEQ ID NO: 359591 - RNA, 18 nt, Human
cauggagcgcggcccugg

SEQ ID NO: 359592 - RNA, 26 nt, Human
cauggagcuguuccucgcgggccgcc

SEQ ID NO: 359593 - RNA, 32 nt, Human
cauggaggaaaacuaguguuucugcuacugcu

SEQ ID NO: 359594 - RNA, 20 nt, Human
cauggaggaaacgcagcaga

SEQ ID NO: 359595 - RNA, 32 nt, Human
cauggaggaaggugagcucucugggccugaga

SEQ ID NO: 359596 - RNA, 32 nt, Human
cauggaggaggcggaggccgcggcgagccggg

SEQ ID NO: 359597 - RNA, 32 nt, Human
cauggaggcaguaggacaaggugcaggcaggc

SEQ ID NO: 359598 - RNA, 32 nt, Human
cauggaggccuuugcgcagagagcagagagga

SEQ ID NO: 359599 - RNA, 32 nt, Human
cauggaggcgaaucuguugugggugaagcaga

SEQ ID NO: 359600 - RNA, 32 nt, Human
cauggaggcucacaccuguaaucccaacacuu

SEQ ID NO: 359601 - RNA, 24 nt, Human
cauggaggcucaugccuguaaucc

SEQ ID NO: 359602 - RNA, 32 nt, Human
cauggaggcucaugccuguaauccuagcagcu

SEQ ID NO: 359603 - RNA, 32 nt, Human
cauggaggcugcagccuuaggagagcucugag

SEQ ID NO: 359604 - RNA, 32 nt, Human
cauggagggagcuggggagagugaaggaguca

SEQ ID NO: 359605 - RNA, 32 nt, Human
cauggagggaggcagaagagccagggugguua

SEQ ID NO: 359606 - RNA, 32 nt, Human
cauggagggaggcggcggcggcggcggcggcg

SEQ ID NO: 359607 - RNA, 32 nt, Human
cauggagggagggagagggggcguguugaaca

SEQ ID NO: 359608 - RNA, 32 nt, Human
cauggagggauuauggucugaaguaaccagca

SEQ ID NO: 359609 - RNA, 32 nt, Human
cauggagggauuuggagcaggagagugaaaug

SEQ ID NO: 359610 - RNA, 32 nt, Human
cauggagggcaggccaggauggagcccagggu

SEQ ID NO: 359611 - RNA, 32 nt, Human
cauggagggcaggguauccauucuuuaccaug

SEQ ID NO: 359612 - RNA, 32 nt, Human
cauggaggggaaggugccacccgccuuggcug

SEQ ID NO: 359613 - RNA, 32 nt, Human
cauggaggggguacaggaagagacugacacaa

SEQ ID NO: 359614 - RNA, 32 nt, Human
cauggagggguggucagaggcgggcgggacca

SEQ ID NO: 359615 - RNA, 32 nt, Human
cauggagggugaggcugggugucuggaagcau

SEQ ID NO: 359616 - RNA, 32 nt, Human
cauggagguuagauugggaggaaagcuuaaaa

SEQ ID NO: 359617 - RNA, 32 nt, Human
cauggaguagagcccgagauccuggccacuau

SEQ ID NO: 359618 - RNA, 32 nt, Human
cauggaguccaaguaaugaauuuauagaggaa

SEQ ID NO: 359619 - RNA, 32 nt, Human
cauggaguccacauggccugucuaggccugau

SEQ ID NO: 359620 - RNA, 32 nt, Human
cauggagucuggagcaggagcagcuguugugc

SEQ ID NO: 359621 - RNA, 32 nt, Human
cauggaguuuggggucaucagauguggcuuua

SEQ ID NO: 359622 - RNA, 32 nt, Human
cauggauaacuauccaauugggaccaaugcca

SEQ ID NO: 359623 - RNA, 18 nt, Human
cauggauaauagugcuaa

SEQ ID NO: 359624 - RNA, 32 nt, Human
cauggauacgcuugugaucaagggccuggucu

SEQ ID NO: 359625 - RNA, 32 nt, Human
cauggauacggggucccgggaggcagccuuca

SEQ ID NO: 359626 - RNA, 32 nt, Human
cauggauacucaggaaggaacacacacccauu

SEQ ID NO: 359627 - RNA, 32 nt, Human
cauggauagucuuuaaucucugaucuuuuugg

SEQ ID NO: 359628 - RNA, 32 nt, Human
cauggauauacaacagaaaacacuuugaguug

SEQ ID NO: 359629 - RNA, 20 nt, Human
cauggauauuucugcugcca

SEQ ID NO: 359630 - RNA, 32 nt, Human
cauggaucagggcucacaccuggcccaucugg

SEQ ID NO: 359631 - RNA, 32 nt, Human
cauggauccuuucucagaaaaauaacuguaaa

SEQ ID NO: 359632 - RNA, 32 nt, Human
cauggaugaaguuucgcugggugcucgugacu

SEQ ID NO: 359633 - RNA, 32 nt, Human
cauggaugcucucuuucuggaagcuguggccu

SEQ ID NO: 359634 - RNA, 32 nt, Human
cauggauggacaagggcuuuuggccacaggug

SEQ ID NO: 359635 - RNA, 30 nt, Human
cauggauggaggaggaagagauaaggacgu

SEQ ID NO: 359636 - RNA, 32 nt, Human
cauggauggcaggggcagagugcagguggaga

SEQ ID NO: 359637 - RNA, 32 nt, Human
cauggauggugggaaauuaaugagcacaugua

SEQ ID NO: 359638 - RNA, 32 nt, Human
cauggauguagugcuuuuuagaggagccacug

SEQ ID NO: 359639 - RNA, 32 nt, Human
cauggauguggacaccauggagggggaagugg

SEQ ID NO: 359640 - RNA, 32 nt, Human
cauggauuaggaguaaagaaagaggcaggcgc

SEQ ID NO: 359641 - RNA, 32 nt, Human
cauggauucccaagaugugagcuuuuuacaua

SEQ ID NO: 359642 - RNA, 32 nt, Human
cauggauuccugauaucugaugagagguucau

SEQ ID NO: 359643 - RNA, 32 nt, Human
cauggauuguguauuuugacuuuuauuuuaua

SEQ ID NO: 359644 - RNA, 32 nt, Human
cauggauuguuccuccacaugcugcaaacaca

SEQ ID NO: 359645 - RNA, 32 nt, Human
cauggauuugcggccagcucuccuggggguag

SEQ ID NO: 359646 - RNA, 24 nt, Human
cauggcaaaaccacaucucuacua

SEQ ID NO: 359647 - RNA, 32 nt, Human
cauggcaaaaccagcuuaggaccucugcugua

SEQ ID NO: 359648 - RNA, 22 nt, Human
cauggcaaaaccaucucuacua

SEQ ID NO: 359649 - RNA, 24 nt, Human
cauggcaaaaccccaacucuacua

SEQ ID NO: 359650 - RNA, 22 nt, Human
cauggcaaaaccccaucucuac

SEQ ID NO: 359651 - RNA, 24 nt, Human
cauggcaaaaccccaucucuacua

SEQ ID NO: 359652 - RNA, 24 nt, Human
cauggcaaaaccccaucucugcua

SEQ ID NO: 359653 - RNA, 24 nt, Human
cauggcaaaaccccaucuuuacua

SEQ ID NO: 359654 - RNA, 24 nt, Human
cauggcaaaaccccgucucuacua

SEQ ID NO: 359655 - RNA, 24 nt, Human
cauggcaaaaccccuucucuacua

SEQ ID NO: 359656 - RNA, 22 nt, Human
cauggcaaaacccuaucucuac

SEQ ID NO: 359657 - RNA, 24 nt, Human
cauggcaaaacccuaucucuacua

SEQ ID NO: 359658 - RNA, 22 nt, Human
cauggcaaaacccugucuacua

SEQ ID NO: 359659 - RNA, 21 nt, Human
cauggcaaaacccugucucua

SEQ ID NO: 359660 - RNA, 24 nt, Human
cauggcaaaacccugucucuacua

SEQ ID NO: 359661 - RNA, 24 nt, Human
cauggcaaaaccucgucucuacua

SEQ ID NO: 359662 - RNA, 24 nt, Human
cauggcaaaagcccaucucuacua

SEQ ID NO: 359663 - RNA, 24 nt, Human
cauggcaaaaucccaucucuacua

SEQ ID NO: 359664 - RNA, 32 nt, Human
cauggcaacuggagaaaaugggaggaaagaca

SEQ ID NO: 359665 - RNA, 24 nt, Human
cauggcaagaccccaucucuacua

SEQ ID NO: 359666 - RNA, 32 nt, Human
cauggcaagagagaaagaaagagaaaguacuc

SEQ ID NO: 359667 - RNA, 24 nt, Human
cauggcaauacccuaucucuacua

SEQ ID NO: 359668 - RNA, 32 nt, Human
cauggcacaggggacugcaguggugugcuuug

SEQ ID NO: 359669 - RNA, 32 nt, Human
cauggcacaucucagcuccucauugagggaua

SEQ ID NO: 359670 - RNA, 32 nt, Human
cauggcacccagcuaauuuuguauuuuuagua

SEQ ID NO: 359671 - RNA, 32 nt, Human
cauggcacucacuccagccugggcaacaagag

SEQ ID NO: 359672 - RNA, 32 nt, Human
cauggcacugacaaugggcacugauuugauac

SEQ ID NO: 359673 - RNA, 32 nt, Human
cauggcacugagacuuuggaaguggccuugcc

SEQ ID NO: 359674 - RNA, 32 nt, Human
cauggcacugcacuccagccugggcaacagag

SEQ ID NO: 359675 - RNA, 32 nt, Human
cauggcacuggcagggggcauggaggagaaag

SEQ ID NO: 359676 - RNA, 32 nt, Human
cauggcacuggguggggcugggggauauucuc

SEQ ID NO: 359677 - RNA, 32 nt, Human
cauggcacuuggaagaaaaagacccacugaau

SEQ ID NO: 359678 - RNA, 32 nt, Human
cauggcagacagcgggcuggugaacaggaaga

SEQ ID NO: 359679 - RNA, 22 nt, Human
cauggcagacuagggcugcacc

SEQ ID NO: 359680 - RNA, 32 nt, Human
cauggcagacuuugaaguugcguuucaucuua

SEQ ID NO: 359681 - RNA, 32 nt, Human
cauggcagaguuguuuugcccaccugugaaaa

SEQ ID NO: 359682 - RNA, 21 nt, Human
cauggcagaguuuugugggaa

SEQ ID NO: 359683 - RNA, 32 nt, Human
cauggcagauuuccagccuggugaugcuguac

SEQ ID NO: 359684 - RNA, 32 nt, Human
cauggcagccuacauggcauuacuugugacca

SEQ ID NO: 359685 - RNA, 32 nt, Human
cauggcagcugguugcuccauuugagagacac

SEQ ID NO: 359686 - RNA, 32 nt, Human
cauggcaggaaggaagaccagaucuguaugau

SEQ ID NO: 359687 - RNA, 32 nt, Human
cauggcaggauguucuggcacagcagacugga

SEQ ID NO: 359688 - RNA, 32 nt, Human
cauggcagucaccauugucuugacuugggaaa

SEQ ID NO: 359689 - RNA, 32 nt, Human
cauggcagucauuccuggaaggggcaggaccu

SEQ ID NO: 359690 - RNA, 32 nt, Human
cauggcagucguggcccggggaucauuccaag

SEQ ID NO: 359691 - RNA, 32 nt, Human
cauggcagugcaucugccacaguggcugggca

SEQ ID NO: 359692 - RNA, 17 nt, Human
cauggcaguuggcucca

SEQ ID NO: 359693 - RNA, 32 nt, Human
cauggcaucauugcauuccagccugggcaaca

SEQ ID NO: 359694 - RNA, 32 nt, Human
cauggcaucucuaaugaaaacagguucuagaa

SEQ ID NO: 359695 - RNA, 32 nt, Human
cauggcauguguggcccugucugcuuauccuu

SEQ ID NO: 359696 - RNA, 32 nt, Human
cauggcauguuuuguuacagguuguagaguau

SEQ ID NO: 359697 - RNA, 32 nt, Human
cauggcauuauagccuuugaagaaaggccagu

SEQ ID NO: 359698 - RNA, 16 nt, Human
cauggcauugcugcca

SEQ ID NO: 359699 - RNA, 32 nt, Human
cauggcauugggggacaacaggauucucuguc

SEQ ID NO: 359700 - RNA, 32 nt, Human
cauggcauugguaugaaggccauuuagcugcc

SEQ ID NO: 359701 - RNA, 17 nt, Human
cauggccaaaucgguca

SEQ ID NO: 359702 - RNA, 19 nt, Human
cauggccaaggcccugcca

SEQ ID NO: 359703 - RNA, 19 nt, Human
cauggccaagguccagcca

SEQ ID NO: 359704 - RNA, 32 nt, Human
cauggccaauccagugggugcaucccuggaca

SEQ ID NO: 359705 - RNA, 18 nt, Human
cauggccaauuuguuaca

SEQ ID NO: 359706 - RNA, 32 nt, Human
cauggccacaaaccauucagaucagccacuug

SEQ ID NO: 359707 - RNA, 19 nt, Human
cauggccacaagucugcua

SEQ ID NO: 359708 - RNA, 32 nt, Human
cauggccacagccaccuccacccccaagaaac

SEQ ID NO: 359709 - RNA, 32 nt, Human
cauggccacagcucaggcugggcuguggugcc

SEQ ID NO: 359710 - RNA, 32 nt, Human
cauggccacagcugagugccccagggagggca

SEQ ID NO: 359711 - RNA, 32 nt, Human
cauggccacauccugaauguugacaauacccu

SEQ ID NO: 359712 - RNA, 32 nt, Human
cauggccacaugggucacgccuggugccuuca

SEQ ID NO: 359713 - RNA, 18 nt, Human
cauggccaccccgugcca

SEQ ID NO: 359714 - RNA, 23 nt, Human
cauggccaccccucaccugugga

SEQ ID NO: 359715 - RNA, 32 nt, Human
cauggccacgcaccuucucucaggccuucggg

SEQ ID NO: 359716 - RNA, 20 nt, Human
cauggccacucaaccuguca

SEQ ID NO: 359717 - RNA, 17 nt, Human
cauggccacucccugcc

SEQ ID NO: 359718 - RNA, 32 nt, Human
cauggccacucccugcccccagccuggcugga

SEQ ID NO: 359719 - RNA, 32 nt, Human
cauggccacucccugcccccagccuggcuuga

SEQ ID NO: 359720 - RNA, 19 nt, Human
cauggccacugcuucacca

SEQ ID NO: 359721 - RNA, 17 nt, Human
cauggccacuggcucca

SEQ ID NO: 359722 - RNA, 18 nt, Human
cauggccagaaacgugcc

SEQ ID NO: 359723 - RNA, 18 nt, Human
cauggccagacugugcca

SEQ ID NO: 359724 - RNA, 32 nt, Human
cauggccagagaacaggagcggaacauugccu

SEQ ID NO: 359725 - RNA, 32 nt, Human
cauggccagagcuucucccaggcacagguguu

SEQ ID NO: 359726 - RNA, 17 nt, Human
cauggccagcacugccg

SEQ ID NO: 359727 - RNA, 16 nt, Human
cauggccagcccugcc

SEQ ID NO: 359728 - RNA, 16 nt, Human
cauggccagccgagcc

SEQ ID NO: 359729 - RNA, 26 nt, Human
cauggccagcguccacgagagccucu

SEQ ID NO: 359730 - RNA, 16 nt, Human
cauggccagcugacca

SEQ ID NO: 359731 - RNA, 17 nt, Human
cauggccagcuucaguc

SEQ ID NO: 359732 - RNA, 18 nt, Human
cauggccagcuuccuucc

SEQ ID NO: 359733 - RNA, 19 nt, Human
cauggccaggacacugcca

SEQ ID NO: 359734 - RNA, 19 nt, Human
cauggccaggagggcucca

SEQ ID NO: 359735 - RNA, 17 nt, Human
cauggccaggcuggcca

SEQ ID NO: 359736 - RNA, 19 nt, Human
cauggccaggggccuguca

SEQ ID NO: 359737 - RNA, 18 nt, Human
cauggccaggucugguca

SEQ ID NO: 359738 - RNA, 16 nt, Human
cauggccagguggcca

SEQ ID NO: 359739 - RNA, 16 nt, Human
cauggccagguggcua

SEQ ID NO: 359740 - RNA, 19 nt, Human
cauggccagguggcugcca

SEQ ID NO: 359741 - RNA, 16 nt, Human
cauggccagguuacca

SEQ ID NO: 359742 - RNA, 16 nt, Human
cauggccagguuggcc

SEQ ID NO: 359743 - RNA, 18 nt, Human
cauggccaguaguuggca

SEQ ID NO: 359744 - RNA, 18 nt, Human
cauggccagugcuuucca

SEQ ID NO: 359745 - RNA, 19 nt, Human
cauggccaguggccaugcc

SEQ ID NO: 359746 - RNA, 19 nt, Human
cauggccaguguguggcca

SEQ ID NO: 359747 - RNA, 16 nt, Human
cauggccaguguuuca

SEQ ID NO: 359748 - RNA, 18 nt, Human
cauggccaguugguguca

SEQ ID NO: 359749 - RNA, 17 nt, Human
cauggccaguuuuggcc

SEQ ID NO: 359750 - RNA, 32 nt, Human
cauggccaucgcugccccuuguugacaccucc

SEQ ID NO: 359751 - RNA, 17 nt, Human
cauggccaucguggcua

SEQ ID NO: 359752 - RNA, 18 nt, Human
cauggccaucuagcccca

SEQ ID NO: 359753 - RNA, 32 nt, Human
cauggccaucucccccucccuuuuuccuucuc

SEQ ID NO: 359754 - RNA, 32 nt, Human
cauggccauggagcuucaaggaaagaaacccc

SEQ ID NO: 359755 - RNA, 17 nt, Human
cauggccaugucuugcc

SEQ ID NO: 359756 - RNA, 17 nt, Human
cauggccauugucccca

SEQ ID NO: 359757 - RNA, 17 nt, Human
cauggccauuuccugcc

SEQ ID NO: 359758 - RNA, 32 nt, Human
cauggcccacccaggccuggagcugggaugca

SEQ ID NO: 359759 - RNA, 32 nt, Human
cauggcccagcaccugguguuugccaacugca

SEQ ID NO: 359760 - RNA, 22 nt, Human
cauggcccagcagcacacugug

SEQ ID NO: 359761 - RNA, 32 nt, Human
cauggccccagccaaugcauggaggcgaggca

SEQ ID NO: 359762 - RNA, 32 nt, Human
cauggccccagguggcgaguucagggaggccu

SEQ ID NO: 359763 - RNA, 32 nt, Human
cauggccccgccuaggccaucugggugcuggg

SEQ ID NO: 359764 - RNA, 32 nt, Human
cauggccccggagccccauccugggccugccc

SEQ ID NO: 359765 - RNA, 32 nt, Human
cauggccccugccucuucaggcucuccaggcu

SEQ ID NO: 359766 - RNA, 32 nt, Human
cauggccccugccuuaggccuaccugaucaaa

SEQ ID NO: 359767 - RNA, 32 nt, Human
cauggccccuucagacugcucccuucaccuuu

SEQ ID NO: 359768 - RNA, 32 nt, Human
cauggcccugaauccuccucugcuccagggcu

SEQ ID NO: 359769 - RNA, 28 nt, Human
cauggcccuggccauugauguguauggg

SEQ ID NO: 359770 - RNA, 32 nt, Human
cauggcccuguuuucugcuaaaaccagauuuu

SEQ ID NO: 359771 - RNA, 16 nt, Human
cauggccgaucuucca

SEQ ID NO: 359772 - RNA, 19 nt, Human
cauggccgcgcgcgcucca

SEQ ID NO: 359773 - RNA, 23 nt, Human
cauggccgcggcaugagcgugga

SEQ ID NO: 359774 - RNA, 16 nt, Human
cauggccgcugccgcc

SEQ ID NO: 359775 - RNA, 16 nt, Human
cauggccggucagcca

SEQ ID NO: 359776 - RNA, 18 nt, Human
cauggccgugaggcugcc

SEQ ID NO: 359777 - RNA, 21 nt, Human
cauggccgugcguccgcagga

SEQ ID NO: 359778 - RNA, 20 nt, Human
cauggccuaccuugcugcca

SEQ ID NO: 359779 - RNA, 32 nt, Human
cauggccucccaggggugcuggggaugcaucc

SEQ ID NO: 359780 - RNA, 31 nt, Human
cauggccuccucucugggcaguguugcugca

SEQ ID NO: 359781 - RNA, 21 nt, Human
cauggccugagugcgcagggg

SEQ ID NO: 359782 - RNA, 32 nt, Human
cauuucucacuggagcugcuucaaaaucagug

SEQ ID NO: 359783 - RNA, 32 nt, Human
cauuucucaguggcuucuccauccucauuugc

SEQ ID NO: 359784 - RNA, 32 nt, Human
cauuucuccacagggcagucugaagauggcca

SEQ ID NO: 359785 - RNA, 32 nt, Human
cauuucuccuuucacagaacugcccagguguu

SEQ ID NO: 359786 - RNA, 32 nt, Human
cauuucucuaagugggcugcugugaaguuuua

SEQ ID NO: 359787 - RNA, 32 nt, Human
cauuucucucaccucucaucuuuggaacggga

SEQ ID NO: 359788 - RNA, 32 nt, Human
cauuucucuccucuccuccuucugcuuaauuu

SEQ ID NO: 359789 - RNA, 32 nt, Human
cauuucucuccucucuaauuuuccugucaguu

SEQ ID NO: 359790 - RNA, 32 nt, Human
cauuucucuccucugccaaaucuacuuagccc

SEQ ID NO: 359791 - RNA, 32 nt, Human
cauuucucuggauggagacugugaacaucuga

SEQ ID NO: 359792 - RNA, 18 nt, Human
cauuucucuucugcccca

SEQ ID NO: 359793 - RNA, 32 nt, Human
cauuucucuuucuccagagcuccuauagggca

SEQ ID NO: 359794 - RNA, 32 nt, Human
cauuucugaccaggcugguggccugaguacau

SEQ ID NO: 359795 - RNA, 32 nt, Human
cauuucugaugauuugcuggagugcuggcucc

SEQ ID NO: 359796 - RNA, 19 nt, Human
cauuucugcaaguuaggua

SEQ ID NO: 359797 - RNA, 32 nt, Human
cauuucugcaccuuuggggucaugcuuuguag

SEQ ID NO: 359798 - RNA, 32 nt, Human
cauuucugcaccuuugggucaugcuuuguagc

SEQ ID NO: 359799 - RNA, 32 nt, Human
cauuucugcagccagugucuccugggugccuu

SEQ ID NO: 359800 - RNA, 32 nt, Human
cauuucugcccuuuagaauggcuugucccauc

SEQ ID NO: 359801 - RNA, 32 nt, Human
cauuucugccuuucuacacauuuacuucuugu

SEQ ID NO: 359802 - RNA, 32 nt, Human
cauuucugcucuuccaaagcuccugcgucugu

SEQ ID NO: 359803 - RNA, 21 nt, Human
cauuucugcugcaaaccuggu

SEQ ID NO: 359804 - RNA, 32 nt, Human
cauuucuggaaauggcuuuuauccaggaauua

SEQ ID NO: 359805 - RNA, 32 nt, Human
cauuucuggagcaggagguugucaggacaaca

SEQ ID NO: 359806 - RNA, 32 nt, Human
cauuucuggcugcuuuuuguuuuucauuuucu

SEQ ID NO: 359807 - RNA, 32 nt, Human
cauuucugggcccagccacaggacguccgaug

SEQ ID NO: 359808 - RNA, 32 nt, Human
cauuucugucuccuguuucuccacuuccuucu

SEQ ID NO: 359809 - RNA, 32 nt, Human
cauuucugugucagggcagggccaggaggaaa

SEQ ID NO: 359810 - RNA, 32 nt, Human
cauuucuguguuuauaaaugcauuaucucuga

SEQ ID NO: 359811 - RNA, 20 nt, Human
cauuucuguuuacuauggua

SEQ ID NO: 359812 - RNA, 32 nt, Human
cauuucuuacaguuauggaggcugagaagucc

SEQ ID NO: 359813 - RNA, 32 nt, Human
cauuucuuaccucccuccaggaacagugggca

SEQ ID NO: 359814 - RNA, 32 nt, Human
cauuucuucacucguuuagaguucggggcucu

SEQ ID NO: 359815 - RNA, 32 nt, Human
cauuucuucacugcaauugccauuugccuuuu

SEQ ID NO: 359816 - RNA, 20 nt, Human
cauuucuucagcagcccauu

SEQ ID NO: 359817 - RNA, 32 nt, Human
cauuucuucaguuaaagccuucagagacacac

SEQ ID NO: 359818 - RNA, 32 nt, Human
cauuucuuccauaugaagaaacaccaaacuau

SEQ ID NO: 359819 - RNA, 32 nt, Human
cauuucuucucucuggccucacguuguuucug

SEQ ID NO: 359820 - RNA, 32 nt, Human
cauuucuucugcggaaccuccaccccuccagu

SEQ ID NO: 359821 - RNA, 32 nt, Human
cauuucuucuggaagguggagcuuuacccaaa

SEQ ID NO: 359822 - RNA, 32 nt, Human
cauuucuuggacauauaccauuggacaugucu

SEQ ID NO: 359823 - RNA, 32 nt, Human
cauuucuugggagggcuuagagcuggauaaua

SEQ ID NO: 359824 - RNA, 32 nt, Human
cauuucuugguaucucucagcuuuuccucuug

SEQ ID NO: 359825 - RNA, 32 nt, Human
cauuugaaaggcugcugaaugugguaccagug

SEQ ID NO: 359826 - RNA, 32 nt, Human
cauuugaaaguagucagagagaaauggaagga

SEQ ID NO: 359827 - RNA, 32 nt, Human
cauuugaaggaguuaauuaaaagagagccaau

SEQ ID NO: 359828 - RNA, 22 nt, Human
cauuugaauaacccaguuuaaa

SEQ ID NO: 359829 - RNA, 32 nt, Human
cauuugaauauagguuguuuguuuuguuuugu

SEQ ID NO: 359830 - RNA, 32 nt, Human
cauuugaauggacaccucuaggaacaaugaua

SEQ ID NO: 359831 - RNA, 32 nt, Human
cauuugacacauaaaaguaauuaauugcugga

SEQ ID NO: 359832 - RNA, 32 nt, Human
cauuugaccccagaaggcuguugcagguccag

SEQ ID NO: 359833 - RNA, 32 nt, Human
cauuugagaagcuguggcugagcgcccacuag

SEQ ID NO: 359834 - RNA, 32 nt, Human
cauuugagaaguauuuccauccagugcuacuu

SEQ ID NO: 359835 - RNA, 32 nt, Human
cauuugagaugggguuuuaccauguuacccag

SEQ ID NO: 359836 - RNA, 32 nt, Human
cauuugagauguuugggauuaagccauacaau

SEQ ID NO: 359837 - RNA, 32 nt, Human
cauuugagccaggagguugagguugcagugag

SEQ ID NO: 359838 - RNA, 32 nt, Human
cauuugagcccagagguagaggcugcagugag

SEQ ID NO: 359839 - RNA, 32 nt, Human
cauuugagccugggaauuugagcccagcuuga

SEQ ID NO: 359840 - RNA, 32 nt, Human
cauuugaggaacaggacgucagcuuggcccuu

SEQ ID NO: 359841 - RNA, 32 nt, Human
cauuugaggauccuuccuaucucuccauggga

SEQ ID NO: 359842 - RNA, 32 nt, Human
cauuugauugcucugcaguugggaacggugau

SEQ ID NO: 359843 - RNA, 32 nt, Human
cauuugcaaagggagagaggggcaagcaugau

SEQ ID NO: 359844 - RNA, 32 nt, Human
cauuugcaaauacauuuaaaugaucucauggu

SEQ ID NO: 359845 - RNA, 32 nt, Human
cauuugcaagcuucaaucucuggaccaucugg

SEQ ID NO: 359846 - RNA, 32 nt, Human
cauuugcacagggggagaccuuacagccuacg

SEQ ID NO: 359847 - RNA, 32 nt, Human
cauuugcacugagaccccugccagagaggaga

SEQ ID NO: 359848 - RNA, 32 nt, Human
cauuugcagcagagggaggaagcagagaauga

SEQ ID NO: 359849 - RNA, 32 nt, Human
cauuugcaggaaaagugcagacucugaguguu

SEQ ID NO: 359850 - RNA, 32 nt, Human
cauuugcaguuaauuagcacaugugaggguua

SEQ ID NO: 359851 - RNA, 32 nt, Human
cauuugcauaagauuaggguaaggugaccagc

SEQ ID NO: 359852 - RNA, 32 nt, Human
cauuugcauaauccacacagucacccugguuu

SEQ ID NO: 359853 - RNA, 32 nt, Human
cauuugcaucugaauccugcugugucuucucu

SEQ ID NO: 359854 - RNA, 32 nt, Human
cauuugccaagucucccaauauccaauuuuaa

SEQ ID NO: 359855 - RNA, 16 nt, Human
cauuugccacccagga

SEQ ID NO: 359856 - RNA, 32 nt, Human
cauuugcccuggacaggagcaggaggaagucc

SEQ ID NO: 359857 - RNA, 32 nt, Human
cauuugccucaugccagcaccuuugaaccggu

SEQ ID NO: 359858 - RNA, 32 nt, Human
cauuugccucccccucuucagcccuggccuag

SEQ ID NO: 359859 - RNA, 32 nt, Human
cauuugccuugcuuuuuaaaugacuuuguuuu

SEQ ID NO: 359860 - RNA, 32 nt, Human
cauuugccuuucuccccagagagcuugaccaa

SEQ ID NO: 359861 - RNA, 32 nt, Human
cauuugcucucacagcagaugacagggugauu

SEQ ID NO: 359862 - RNA, 32 nt, Human
cauuugcugaagauggugucaagugaaccuag

SEQ ID NO: 359863 - RNA, 32 nt, Human
cauuugcugagucugcagaauggaaugcagcu

SEQ ID NO: 359864 - RNA, 32 nt, Human
cauuugcugccucuuggucaucaggagcugcc

SEQ ID NO: 359865 - RNA, 32 nt, Human
cauuugcugcgugagaaaaagcugggcucccu

SEQ ID NO: 359866 - RNA, 32 nt, Human
cauuugcugcuuccugucucugccauucuuuu

SEQ ID NO: 359867 - RNA, 32 nt, Human
cauuugcuguagaaagaugagaaaacuuaagc

SEQ ID NO: 359868 - RNA, 32 nt, Human
cauuugcuguguagcugggacaguuacauuuc

SEQ ID NO: 359869 - RNA, 31 nt, Human
cauuugcuuaguaaaugccuguugaugguuu

SEQ ID NO: 359870 - RNA, 32 nt, Human
cauuugcuucauuuauuuauugcuuuugccca

SEQ ID NO: 359871 - RNA, 32 nt, Human
cauuugcuucucugcugaccuugccaaguugu

SEQ ID NO: 359872 - RNA, 32 nt, Human
cauuugcuucucuguauaaucuugucaaugaa

SEQ ID NO: 359873 - RNA, 32 nt, Human
cauuugcuuggaaaaagaaaugcugaaagcca

SEQ ID NO: 359874 - RNA, 32 nt, Human
cauuugcuuuuguaauucuuaaugagcaauau

SEQ ID NO: 359875 - RNA, 32 nt, Human
cauuuggaaccagggggaaccaggaaggggcu

SEQ ID NO: 359876 - RNA, 22 nt, Human
cauuuggaaccucugacuccau

SEQ ID NO: 359877 - RNA, 32 nt, Human
cauuuggacaccgagacacagacaagaagacg

SEQ ID NO: 359878 - RNA, 32 nt, Human
cauuuggaccccugccuuuucauugcccgaaa

SEQ ID NO: 359879 - RNA, 32 nt, Human
cauuuggacuacaagaagagcuuccuuuaaag

SEQ ID NO: 359880 - RNA, 32 nt, Human
cauuuggacugauucccaguccaagugucuac

SEQ ID NO: 359881 - RNA, 32 nt, Human
cauuuggagguucuugcucaaguaccaacucu

SEQ ID NO: 359882 - RNA, 32 nt, Human
cauuuggauaaauaaaaacaaacaaaugcuuc

SEQ ID NO: 359883 - RNA, 23 nt, Human
cauuuggaugaccucaguuuaaa

SEQ ID NO: 359884 - RNA, 32 nt, Human
cauuuggauggguguggagccagucuccaaga

SEQ ID NO: 359885 - RNA, 32 nt, Human
cauuuggcaagcacuuaucauacacuguaaag

SEQ ID NO: 359886 - RNA, 32 nt, Human
cauuuggcacuagcuugagcccaacucuggcu

SEQ ID NO: 359887 - RNA, 32 nt, Human
cauuuggcauggccagacucugaccccacugc

SEQ ID NO: 359888 - RNA, 32 nt, Human
cauuuggcccugggcucaggggaccagguggg

SEQ ID NO: 359889 - RNA, 23 nt, Human
cauuuggccgggauuacaggugu

SEQ ID NO: 359890 - RNA, 32 nt, Human
cauuuggccucaaugugaaauuaaaguagaaa

SEQ ID NO: 359891 - RNA, 32 nt, Human
cauuuggcucuuccuguuucuagggguuaucu

SEQ ID NO: 359892 - RNA, 32 nt, Human
cauuuggcuggcucuuucuuuguucagaccuc

SEQ ID NO: 359893 - RNA, 32 nt, Human
cauuuggcuuucccaccuaaaccuucuugcuc

SEQ ID NO: 359894 - RNA, 32 nt, Human
cauuuggcuuuuaaaggggaacucagcucuga

SEQ ID NO: 359895 - RNA, 32 nt, Human
cauuugggaaauucagcuuuugcagaagcagu

SEQ ID NO: 359896 - RNA, 32 nt, Human
cauuugggaggguggagggaggcaguguccuu

SEQ ID NO: 359897 - RNA, 32 nt, Human
cauuugggcaaaaauugagccucacaauaaac

SEQ ID NO: 359898 - RNA, 32 nt, Human
cauuugggcugaugcagcagauccagggaaug

SEQ ID NO: 359899 - RNA, 32 nt, Human
cauuuggggaggaagcauguguucugugaggu

SEQ ID NO: 359900 - RNA, 32 nt, Human
cauuuggggaucuggugggcagucgaaccaug

SEQ ID NO: 359901 - RNA, 32 nt, Human
cauuugggggcuccaggacuacaguagaaaag

SEQ ID NO: 359902 - RNA, 32 nt, Human
cauuuggugaccuaccccauauccaauauuuc

SEQ ID NO: 359903 - RNA, 32 nt, Human
cauuuggugaucagucagucacacauaaguuc

SEQ ID NO: 359904 - RNA, 32 nt, Human
cauuugguucagaaucaguucccuuucucugg

SEQ ID NO: 359905 - RNA, 32 nt, Human
cauuuguaaucaaaugauggccauuuguucug

SEQ ID NO: 359906 - RNA, 32 nt, Human
cauuuguacacaaaugugacuaugucuuggca

SEQ ID NO: 359907 - RNA, 32 nt, Human
cauuuguaccugcuguuagugauguggauaau

SEQ ID NO: 359908 - RNA, 32 nt, Human
cauuuguagccauuuuuaaaaguuuuugucuu

SEQ ID NO: 359909 - RNA, 32 nt, Human
cauuuguaggcggugacccgccccuucucugg

SEQ ID NO: 359910 - RNA, 32 nt, Human
cauuuguauauucuaccuugcacuacagucau

SEQ ID NO: 359911 - RNA, 32 nt, Human
cauuuguaucagaaaaacauuacaaauuuacu

SEQ ID NO: 359912 - RNA, 32 nt, Human
cauuuguaugugcuggagugagacaggaguau

SEQ ID NO: 359913 - RNA, 32 nt, Human
cauuugucaaacccucuucaaaggaggaacag

SEQ ID NO: 359914 - RNA, 32 nt, Human
cauuugucacuuccaucucagcuaaugcaccc

SEQ ID NO: 359915 - RNA, 21 nt, Human
cauuugucagcccuugccaaa

SEQ ID NO: 359916 - RNA, 32 nt, Human
cauuugucaguuucaaagcugcuucacauuuu

SEQ ID NO: 359917 - RNA, 32 nt, Human
cauuugucaguuucaaaucugcuucacauuuu

SEQ ID NO: 359918 - RNA, 32 nt, Human
cauuugucaucgucuauugguaaagaagaaaa

SEQ ID NO: 359919 - RNA, 32 nt, Human
cauuugucaugaccacacauuguuuccaggac

SEQ ID NO: 359920 - RNA, 32 nt, Human
cauuugucauguucacuuaccugcugauggaa

SEQ ID NO: 359921 - RNA, 32 nt, Human
cauuuguccccaaauacgcuuagcugugugcc

SEQ ID NO: 359922 - RNA, 32 nt, Human
cauuuguccuggguucccuugugugaucuguu

SEQ ID NO: 359923 - RNA, 32 nt, Human
cauuugucgugguuaccagugcagccugucaa

SEQ ID NO: 359924 - RNA, 32 nt, Human
cauuugucucagaacauuuccuuggcuggaca

SEQ ID NO: 359925 - RNA, 32 nt, Human
cauuugucugugaggaaaggccagcacuaagc

SEQ ID NO: 359926 - RNA, 32 nt, Human
cauuugucuuccagaacaccgugccuuagaaa

SEQ ID NO: 359927 - RNA, 32 nt, Human
cauuugucuuuuucucaguggagggaguguau

SEQ ID NO: 359928 - RNA, 32 nt, Human
cauuugugaaaccagugagagaaggcuugaug

SEQ ID NO: 359929 - RNA, 32 nt, Human
cauuugugaacugucuucucauauuuuaaguc

SEQ ID NO: 359930 - RNA, 24 nt, Human
cauuugugaaggcucugccagaca

SEQ ID NO: 359931 - RNA, 32 nt, Human
cauuugugacccuucagccccugcugaacccu

SEQ ID NO: 359932 - RNA, 32 nt, Human
cauuugugaggguccagcugaaggugagggga

SEQ ID NO: 359933 - RNA, 32 nt, Human
cauuugugcaacuucaaacauauugggugcuu

SEQ ID NO: 359934 - RNA, 32 nt, Human
cauuugugcccagguugaggcuauagugagcc

SEQ ID NO: 359935 - RNA, 32 nt, Human
cauuuguggcuuuuuguaguuuacuuaagcca

SEQ ID NO: 359936 - RNA, 32 nt, Human
cauuugugucuucaaauuucucuccuuugguu

SEQ ID NO: 359937 - RNA, 32 nt, Human
cauuugugugugugcaaguguguaugugcgug

SEQ ID NO: 359938 - RNA, 32 nt, Human
cauuuguguguuggcuuugcagcugcugucug

SEQ ID NO: 359939 - RNA, 32 nt, Human
cauuuguucaaaggauagaaagcaucuaaaag

SEQ ID NO: 359940 - RNA, 31 nt, Human
cauuuguucacgugccucacagcaggccuuu

SEQ ID NO: 359941 - RNA, 32 nt, Human
cauuuguucucucaccaaaccccaugccaaau

SEQ ID NO: 359942 - RNA, 32 nt, Human
cauuuguucucucccugcuccaacccugcagu

SEQ ID NO: 359943 - RNA, 32 nt, Human
cauuuguucucuuggaucucacucucucuguc

SEQ ID NO: 359944 - RNA, 32 nt, Human
cauuuguucugcugucuuucuaauccagccaa

SEQ ID NO: 359945 - RNA, 32 nt, Human
cauuuguugcugcugcugcucauuccacacug

SEQ ID NO: 359946 - RNA, 32 nt, Human
cauuuguuuaaaacaguuuaaugaguaaguuu

SEQ ID NO: 359947 - RNA, 32 nt, Human
cauuuguuuguauucauguucaugugauuaac

SEQ ID NO: 359948 - RNA, 32 nt, Human
cauuuguuuuugcuuuuguugccuguacuuuu

SEQ ID NO: 359949 - RNA, 32 nt, Human
cauuuuaaaauggaugucucuuuaaaaauuuu

SEQ ID NO: 359950 - RNA, 32 nt, Human
cauuuuaaagaauaccagaaguagaaucacau

SEQ ID NO: 359951 - RNA, 32 nt, Human
cauuuuaaagagaccccacaggaguucuggcc

SEQ ID NO: 359952 - RNA, 32 nt, Human
cauuuuaaagugugaacacuccccuauguaaa

SEQ ID NO: 359953 - RNA, 32 nt, Human
cauuuuaacccccauuuuaucagcacccucuu

SEQ ID NO: 359954 - RNA, 32 nt, Human
cauuuuaacugaaugucuaaagugauuaucuu

SEQ ID NO: 359955 - RNA, 32 nt, Human
cauuuuaaggacauagccaggccaggugcagu

SEQ ID NO: 359956 - RNA, 32 nt, Human
cauuuuacaacugccuguucuuucuccagucc

SEQ ID NO: 359957 - RNA, 32 nt, Human
cauuuuacaauccauuauuuuugaccacugcu

SEQ ID NO: 359958 - RNA, 32 nt, Human
cauuuuacagaggaagagaccgagguauaaag

SEQ ID NO: 359959 - RNA, 32 nt, Human
cauuuuacagugguuugccauuaggguauuca

SEQ ID NO: 359960 - RNA, 32 nt, Human
cauuuuacccuucggcacuauuuucugcuauu

SEQ ID NO: 359961 - RNA, 21 nt, Human
cauuuuacuaacuaccuggac

SEQ ID NO: 359962 - RNA, 32 nt, Human
cauuuuacucaucccucugccuccaagaaggc

SEQ ID NO: 359963 - RNA, 32 nt, Human
cauuuuagccaggcaguauuuacucauuauua

SEQ ID NO: 359964 - RNA, 32 nt, Human
cauuuuagccaguguaccugggcacagacucg

SEQ ID NO: 359965 - RNA, 32 nt, Human
cauuuuagcuaauccuggaaaauugaucgaca

SEQ ID NO: 359966 - RNA, 32 nt, Human
cauuuuaggagcaaugauauauacaaaauaag

SEQ ID NO: 359967 - RNA, 32 nt, Human
cauuuuagggccugugaccaaaaugaagcuug

SEQ ID NO: 359968 - RNA, 32 nt, Human
cauuuuagguucaauagcugaaguuuuucaug

SEQ ID NO: 359969 - RNA, 32 nt, Human
cauuuuauaaaugauaucaaagaagagucaac

SEQ ID NO: 359970 - RNA, 32 nt, Human
cauuuuaugaaaaggcaucuucaugguccagg

SEQ ID NO: 359971 - RNA, 32 nt, Human
cauuuuauggcuccucccucccauguccucag

SEQ ID NO: 359972 - RNA, 32 nt, Human
cauuuuauuacauccaggcuacauucuugauu

SEQ ID NO: 359973 - RNA, 32 nt, Human
cauuuuauuuuauuaguuacuaauucaagcug

SEQ ID NO: 359974 - RNA, 32 nt, Human
cauuuucaaaggacagggagggagcauccccc

SEQ ID NO: 359975 - RNA, 32 nt, Human
cauuuucaaauguuuauguuguguauauagca

SEQ ID NO: 359976 - RNA, 32 nt, Human
cauuuucaacacuuaaaaguauggagacuauu

SEQ ID NO: 359977 - RNA, 32 nt, Human
cauuuucaagauacauuucaucugcugcugaa

SEQ ID NO: 359978 - RNA, 32 nt, Human
cauuuucacaacauaucagacuucaccaaaua

SEQ ID NO: 359979 - RNA, 19 nt, Human
cauuuucacaccagcccac

SEQ ID NO: 359980 - RNA, 32 nt, Human
cauuuucacagaaaucaagauguuauuuuugu

SEQ ID NO: 359981 - RNA, 32 nt, Human
cauuuucacagaauucuggcuucauuaagauc

SEQ ID NO: 359982 - RNA, 32 nt, Human
cauuuucaccccacccuuccccuccuucuccc

SEQ ID NO: 359983 - RNA, 23 nt, Human
cauuuucaccuuuugacauuucu

SEQ ID NO: 359984 - RNA, 32 nt, Human
cauuuucagaagauaaugacucacaugggaau

SEQ ID NO: 359985 - RNA, 32 nt, Human
cauuuucagagccucaucugucagccuuaaug

SEQ ID NO: 359986 - RNA, 32 nt, Human
cauuuucagcacucagcacagugccuugugua

SEQ ID NO: 359987 - RNA, 32 nt, Human
cauuuucaggaaaugccuggagcugcuggucc

SEQ ID NO: 359988 - RNA, 32 nt, Human
cauuuucauagccuccuacagugagaaacgcc

SEQ ID NO: 359989 - RNA, 32 nt, Human
cauuuucaucuucuuccaugguuccacagaag

SEQ ID NO: 359990 - RNA, 32 nt, Human
cauuuucaugauauuguucacugccucuacca

SEQ ID NO: 359991 - RNA, 32 nt, Human
cauuuuccaaacagagguuaaauaugagcuga

SEQ ID NO: 359992 - RNA, 30 nt, Human
cauuuuccaaguccaagggcacaauuguug

SEQ ID NO: 359993 - RNA, 22 nt, Human
cauuuuccacaccuguccacuc

SEQ ID NO: 359994 - RNA, 32 nt, Human
cauuuuccacuuuguuuuccccaaaacauauc

SEQ ID NO: 359995 - RNA, 32 nt, Human
cauuuuccauaaagguaacaaagggcagcuca

SEQ ID NO: 359996 - RNA, 32 nt, Human
cauuuuccaugcaaccuccuucugccagcagc

SEQ ID NO: 359997 - RNA, 32 nt, Human
cauuuucccaacgucaggugugcauuucaugu

SEQ ID NO: 359998 - RNA, 32 nt, Human
cauuuucccagaacagaagcaccaagaaaauu

SEQ ID NO: 359999 - RNA, 21 nt, Human
cauuuucccauugagagccuu

SEQ ID NO: 360000 - RNA, 32 nt, Human
cauuuuccccucuccuccucccugcuaccauu

SEQ ID NO: 360001 - RNA, 32 nt, Human
cauuuucccuccaggaccaccuugguuucuag

SEQ ID NO: 360002 - RNA, 20 nt, Human
cauuuucccucuuugaaccu

SEQ ID NO: 360003 - RNA, 24 nt, Human
cauuuucccugccagguguccuuu

SEQ ID NO: 360004 - RNA, 32 nt, Human
cauuuuccuaguuucauuucaauaacauuuua

SEQ ID NO: 360005 - RNA, 32 nt, Human
cauuuuccuauguaacaaauuugcaaauugug

SEQ ID NO: 360006 - RNA, 32 nt, Human
cauuuuccucauucacaaaaugggccaauagu

SEQ ID NO: 360007 - RNA, 32 nt, Human
cauuuuccucuuguccuggcccuucagucugc

SEQ ID NO: 360008 - RNA, 32 nt, Human
cauuuuccugcaacucugccuucuugagucca

SEQ ID NO: 360009 - RNA, 32 nt, Human
cauuuuccuguaagucauuaugaauuuuucug

SEQ ID NO: 360010 - RNA, 32 nt, Human
cauuuuccuguccuuacaucucagcuuaaaug

SEQ ID NO: 360011 - RNA, 32 nt, Human
cauuuuccuucccuucuccaucucucuggccc

SEQ ID NO: 360012 - RNA, 23 nt, Human
cauuuuccuuuuguaguaccuuu

SEQ ID NO: 360013 - RNA, 32 nt, Human
cauuuucgccgccagucuuuugcuccuguuuc

SEQ ID NO: 360014 - RNA, 32 nt, Human
cauuuucgcuucucccuggacugggcccugau

SEQ ID NO: 360015 - RNA, 32 nt, Human
cauuuucucaaagggcauaccuugugcauugu

SEQ ID NO: 360016 - RNA, 32 nt, Human
cauuuucucaaaguaaugggcauucuaugauu

SEQ ID NO: 360017 - RNA, 32 nt, Human
cauuuucucaacaaaaauuaauagcugguucu

SEQ ID NO: 360018 - RNA, 32 nt, Human
cauuuucucccauggaaucacgaagagcaaga

SEQ ID NO: 360019 - RNA, 32 nt, Human
cauuuucucccgggagagguuggaguguccaa

SEQ ID NO: 360020 - RNA, 32 nt, Human
cauuuucucccuuuuaaagaucaucucuucag

SEQ ID NO: 360021 - RNA, 32 nt, Human
cauuuucuccucccagcccccugcugccuucu

SEQ ID NO: 360022 - RNA, 32 nt, Human
cauuuucuccuuccucccuucccuuauuuucu

SEQ ID NO: 360023 - RNA, 24 nt, Human
cauuuucuccuucucuucacacuc

SEQ ID NO: 360024 - RNA, 32 nt, Human
cauuuucucuacuguuuucuucauacugaaga

SEQ ID NO: 360025 - RNA, 32 nt, Human
cauuuucucuagaauuuuaauuacaaacaaaa

SEQ ID NO: 360026 - RNA, 32 nt, Human
cauuuucucuggcccucuaccuugcuuccugg

SEQ ID NO: 360027 - RNA, 32 nt, Human
cauuuucucuggguaaagggaaaggcaaugaa

SEQ ID NO: 360028 - RNA, 32 nt, Human
cauuuucugaggugcuuggcucugauucaggg

SEQ ID NO: 360029 - RNA, 32 nt, Human
cauuuucugaguaaaaguuauuuucauauaug

SEQ ID NO: 360030 - RNA, 32 nt, Human
cauuuucugcagccccuuccucucagugagcu

SEQ ID NO: 360031 - RNA, 32 nt, Human
cauuuucugcugcugcugacagauuaacccaa

SEQ ID NO: 360032 - RNA, 32 nt, Human
cauuuucugcuguagucucggugcaggguauu

SEQ ID NO: 360033 - RNA, 32 nt, Human
cauuuucuggggaaggcaggaggcagaaagac

SEQ ID NO: 360034 - RNA, 32 nt, Human
cauuuucuuagaccucuucagcugauuguuua

SEQ ID NO: 360035 - RNA, 32 nt, Human
cauuuucuuagcagugucucucacagagaaaa

SEQ ID NO: 360036 - RNA, 32 nt, Human
cauuuucuucaaccaggaggugaggagguuuc

SEQ ID NO: 360037 - RNA, 32 nt, Human
cauuuucuuccaggaucaucaccuuuguucua

SEQ ID NO: 360038 - RNA, 24 nt, Human
cauuuucuucuaccucaguuuaaa

SEQ ID NO: 360039 - RNA, 32 nt, Human
cauuuucuucuucucucucuuaacuucacaau

SEQ ID NO: 360040 - RNA, 32 nt, Human
cauuuucuugccugucacaaucaugccacaca

SEQ ID NO: 360041 - RNA, 32 nt, Human
cauuuucuuuaccaguauccuuaaucaaguag

SEQ ID NO: 360042 - RNA, 32 nt, Human
cauuuugaaaagagcagcugcugcuuagggcc

SEQ ID NO: 360043 - RNA, 27 nt, Human
cauuuugaaaguauuuugacaacuccu

SEQ ID NO: 360044 - RNA, 32 nt, Human
cauuuugacagugucuugguuggagaugaaca

SEQ ID NO: 360045 - RNA, 32 nt, Human
cauuuugagaggcugaggcggguggaucaccu

SEQ ID NO: 360046 - RNA, 32 nt, Human
cauuuugagaggcugaggcggguggaucacuu

SEQ ID NO: 360047 - RNA, 32 nt, Human
cauuuugaggaaauauguugucgaugcuuuug

SEQ ID NO: 360048 - RNA, 22 nt, Human
cauuuugaggcugggugcagug

SEQ ID NO: 360049 - RNA, 32 nt, Human
cauuuugaggcugggugcaguggcucacgcuu

SEQ ID NO: 360050 - RNA, 32 nt, Human
cauuuugagggagucacuacaguuccugacua

SEQ ID NO: 360051 - RNA, 32 nt, Human
cauuuugaggggaggaguuccacagauuguuu

SEQ ID NO: 360052 - RNA, 32 nt, Human
cauuuugauacuugucuauccuucauagugcc

SEQ ID NO: 360053 - RNA, 32 nt, Human
cauuuugcacuagauauuuaccucucacuguu

SEQ ID NO: 360054 - RNA, 32 nt, Human
cauuuugcagaaucugcaccuacagcucaaua

SEQ ID NO: 360055 - RNA, 32 nt, Human
cauuuugcagggacucugaagugaccuuuagu

SEQ ID NO: 360056 - RNA, 32 nt, Human
cauuuugcaucagccuggagugaaccaugaac

SEQ ID NO: 360057 - RNA, 20 nt, Human
cauuuugccuucuuguuucc

SEQ ID NO: 360058 - RNA, 22 nt, Human
cauuuugccuugcaucguuucc

SEQ ID NO: 360059 - RNA, 24 nt, Human
cauuuugccuuucugacauuuccu

SEQ ID NO: 360060 - RNA, 32 nt, Human
cauuuugcggaggggcggccugggaggggagg

SEQ ID NO: 360061 - RNA, 32 nt, Human
cauuuugcuaagggaaagaagccagacccaau

SEQ ID NO: 360062 - RNA, 32 nt, Human
cauuuugcucacucucaaccuuccucgcccac

SEQ ID NO: 360063 - RNA, 32 nt, Human
cauuuuggaaacaaaaaggcagcagugaucug

SEQ ID NO: 360064 - RNA, 32 nt, Human
cauuuuggaagagacgaaagaaaggaaaauaa

SEQ ID NO: 360065 - RNA, 32 nt, Human
cauuuuggaaggccaaggcgggcagauuaccu

SEQ ID NO: 360066 - RNA, 32 nt, Human
cauuuuggagggagcuuccuuccuuccuuccu

SEQ ID NO: 360067 - RNA, 32 nt, Human
cauuuuggcacugaugcuguuuucucuugucu

SEQ ID NO: 360068 - RNA, 23 nt, Human
cauuuuggccugcaaaccuucaa

SEQ ID NO: 360069 - RNA, 32 nt, Human
cauuuugggaaagaguggaauucuggguguua

SEQ ID NO: 360070 - RNA, 31 nt, Human
cauuuugggaagcuaagauggguggaucacu

SEQ ID NO: 360071 - RNA, 32 nt, Human
cauuuugggacuccgaggugggcagaucacuu

SEQ ID NO: 360072 - RNA, 32 nt, Human
cauuuugggagaccaaggugggcagauugccu

SEQ ID NO: 360073 - RNA, 32 nt, Human
cauuuugggaggacgaggcggguggaucacuc

SEQ ID NO: 360074 - RNA, 32 nt, Human
cauuuugggaggcagaggcaggaggauugcuu

SEQ ID NO: 360075 - RNA, 32 nt, Human
cauuuugggaggcagaggcgggcggaucaucu

SEQ ID NO: 360076 - RNA, 32 nt, Human
cauuuugggaggccaagaugggcagaucagga

SEQ ID NO: 360077 - RNA, 32 nt, Human
cauuuugggaggccaaggagggcagaucaccu

SEQ ID NO: 360078 - RNA, 32 nt, Human
cauuuugggaggccaaggugggaggauugcuu

SEQ ID NO: 360079 - RNA, 32 nt, Human
cauuuugggaggccaaggugggcagaucaccu

SEQ ID NO: 360080 - RNA, 32 nt, Human
cauuuugggaggccaaggugggcagauugccu

SEQ ID NO: 360081 - RNA, 32 nt, Human
cauuuugggaggccacagugggcagauugcuu

SEQ ID NO: 360082 - RNA, 32 nt, Human
cauuuugggaggccgagauagguggaucaccu

SEQ ID NO: 360083 - RNA, 32 nt, Human
cauuuugggaggccgaggcagguggaucaccu

SEQ ID NO: 360084 - RNA, 32 nt, Human
cauuuugggaggccgaggcgggcggaucacuu

SEQ ID NO: 360085 - RNA, 32 nt, Human
cauuuugggaggccgaggcggguggaucacaa

SEQ ID NO: 360086 - RNA, 32 nt, Human
cauuuugggaggccgaggcggguggaucacca

SEQ ID NO: 360087 - RNA, 32 nt, Human
cauuuugggaggccgaggcggguggaucauga

SEQ ID NO: 360088 - RNA, 32 nt, Human
cauuuugggaggccgggguuggaggaucauuu

SEQ ID NO: 360089 - RNA, 32 nt, Human
cauuuugggaggcugaggcaaguggauaacuu

SEQ ID NO: 360090 - RNA, 32 nt, Human
cauuuugggaggcugaggcaggaggaucacuu

SEQ ID NO: 360091 - RNA, 32 nt, Human
cauuuugggaggcugaggcagguggaucaccu

SEQ ID NO: 360092 - RNA, 32 nt, Human
cauuuugggaggcugaggcagguggaucacuu

SEQ ID NO: 360093 - RNA, 32 nt, Human
cauuuugggaggcugaggugggcagaucacuu

SEQ ID NO: 360094 - RNA, 32 nt, Human
cauuuugggugacugaggcggguggauugcuu

SEQ ID NO: 360095 - RNA, 32 nt, Human
cauuuugguaggccgaggagggcagaucacuu

SEQ ID NO: 360096 - RNA, 32 nt, Human
cauuuugguuaacccaguccuucaccugcccu

SEQ ID NO: 360097 - RNA, 32 nt, Human
cauuuuguaccaucugcuccccaauggccaaa

SEQ ID NO: 360098 - RNA, 32 nt, Human
cauuuuguagcuuguuagauuuucugccagag

SEQ ID NO: 360099 - RNA, 32 nt, Human
cauuuugucacaucuguuggagagauaaucac

SEQ ID NO: 360100 - RNA, 32 nt, Human
cauuuugucacuuaaugccaguacaaucugug

SEQ ID NO: 360101 - RNA, 32 nt, Human
cauuuugucagcagcagugaccacagccuuac

SEQ ID NO: 360102 - RNA, 32 nt, Human
cauuuuguccccaguggcuaagaaacuaaagg

SEQ ID NO: 360103 - RNA, 32 nt, Human
cauuuugucugugggcccugggccagacucua

SEQ ID NO: 360104 - RNA, 32 nt, Human
cauuuugugccacccauuuagguaucacuacc

SEQ ID NO: 360105 - RNA, 32 nt, Human
cauuuugugguuucucugaugguucugggcag

SEQ ID NO: 360106 - RNA, 32 nt, Human
cauuuugugucuuuacuccacccuucacccua

SEQ ID NO: 360107 - RNA, 32 nt, Human
cauuuuguugacugucagguuaggugucccuu

SEQ ID NO: 360108 - RNA, 32 nt, Human
cauuuuguugcccaggcuggucuccaauuucu

SEQ ID NO: 360109 - RNA, 32 nt, Human
cauuuuguuuuugaaagaggugggauccaaaa

SEQ ID NO: 360110 - RNA, 32 nt, Human
cauuuuuaaaaagaaggacuuaggggucguuu

SEQ ID NO: 360111 - RNA, 32 nt, Human
cauuuuuaaaggcuucauuccuacaacaacca

SEQ ID NO: 360112 - RNA, 20 nt, Human
cauuuuuaaauccuuacuca

SEQ ID NO: 360113 - RNA, 32 nt, Human
cauuuuuacugaugcugggauuauagguguga

SEQ ID NO: 360114 - RNA, 32 nt, Human
cauuuuuaggccgggugcaguggcucaugccu

SEQ ID NO: 360115 - RNA, 32 nt, Human
cauuuuuaggguuucuccaucccugggguuug

SEQ ID NO: 360116 - RNA, 32 nt, Human
cauuuuuaguauuuagauugugccucaaaguu

SEQ ID NO: 360117 - RNA, 32 nt, Human
cauuuuuaucuauuuuucccuuucucuuacau

SEQ ID NO: 360118 - RNA, 31 nt, Human
cauuuuucaauaaaacuacugaaaauuugaa

SEQ ID NO: 360119 - RNA, 32 nt, Human
cauuuuucacaucuucauucacugggauucug

SEQ ID NO: 360120 - RNA, 32 nt, Human
cauuuuucagacuuuuaugcucugcuucucuu

SEQ ID NO: 360121 - RNA, 32 nt, Human
cauuuuucagagguggaaaugguucagaaagg

SEQ ID NO: 360122 - RNA, 32 nt, Human
cauuuuucaugcagucauuugcagugaauuau

SEQ ID NO: 360123 - RNA, 32 nt, Human
cauuuuucauggcugcauaguauuccauggug

SEQ ID NO: 360124 - RNA, 32 nt, Human
cauuuuucccggcacuuaccugccuuucucuc

SEQ ID NO: 360125 - RNA, 32 nt, Human
cauuuuuccguguccuccuuuauuuaacucca

SEQ ID NO: 360126 - RNA, 32 nt, Human
cauuuuuccuuccucccuuccuucccuucccu

SEQ ID NO: 360127 - RNA, 32 nt, Human
cauuuuuccuucucccuucccuuuggacagug

SEQ ID NO: 360128 - RNA, 32 nt, Human
cauuuuucuacuuugcuuuucucuccauacuu

SEQ ID NO: 360129 - RNA, 32 nt, Human
cauuuuucuagcauuuucagaaacucaucgga

SEQ ID NO: 360130 - RNA, 32 nt, Human
cauuuuucuccucaucuuaagcauuuugaaac

SEQ ID NO: 360131 - RNA, 32 nt, Human
cauuuuucuccucucucuuucauuguuugacu

SEQ ID NO: 360132 - RNA, 32 nt, Human
cauuuuucucucauuccauuucugccuuaacu

SEQ ID NO: 360133 - RNA, 32 nt, Human
cauuuuucuuccaggaugguguuacugcaguu

SEQ ID NO: 360134 - RNA, 32 nt, Human
cauuuuugaacagugacugagauucuagaaaa

SEQ ID NO: 360135 - RNA, 32 nt, Human
cauuuuugaagacaucaaagacucagguuaaa

SEQ ID NO: 360136 - RNA, 32 nt, Human
cauuuuugagaacaggcuuuugauaaacucac

SEQ ID NO: 360137 - RNA, 32 nt, Human
cauuuuugagugguccaagccugcuguuuuga

SEQ ID NO: 360138 - RNA, 32 nt, Human
cauuuuugcaauuggagauguuugugaggaaa

SEQ ID NO: 360139 - RNA, 32 nt, Human
cauuuuugucauuuccauuaccacagauguaa

SEQ ID NO: 360140 - RNA, 32 nt, Human
cauuuuuguccacaucuccuaggacccauaag

SEQ ID NO: 360141 - RNA, 21 nt, Human
cauuuuuuggcaguguucaua

SEQ ID NO: 360142 - RNA, 22 nt, Human
ccaaaaaacuguagucuacuca

SEQ ID NO: 360143 - RNA, 24 nt, Human
ccaaaaaaggcugggauuacaggc

SEQ ID NO: 360144 - RNA, 32 nt, Human
ccaaaaacaaagugcaaagcugcuugaaucag

SEQ ID NO: 360145 - RNA, 32 nt, Human
ccaaaaaccaaaacagugauauuuccagaacu

SEQ ID NO: 360146 - RNA, 32 nt, Human
ccaaaaaccauucuguccuccuggaccucuua

SEQ ID NO: 360147 - RNA, 32 nt, Human
ccaaaaagaaaaucagcuuuucuaagaucaag

SEQ ID NO: 360148 - RNA, 22 nt, Human
ccaaaaagagggaagagucaca

SEQ ID NO: 360149 - RNA, 32 nt, Human
ccaaaaagcaaacagaaagaaggaaggauggu

SEQ ID NO: 360150 - RNA, 22 nt, Human
ccaaaaagccuacaacauagau

SEQ ID NO: 360151 - RNA, 31 nt, Human
ccaaaaagcuaguuuugucuaccucaguucu

SEQ ID NO: 360152 - RNA, 23 nt, Human
ccaaaaaggggucaauuguccag

SEQ ID NO: 360153 - RNA, 32 nt, Human
ccaaaaagguaggagguaucaccaucuggaau

SEQ ID NO: 360154 - RNA, 24 nt, Human
ccaaaaaguuccaguugcaaagau

SEQ ID NO: 360155 - RNA, 22 nt, Human
ccaaaaaguugcaaucaaagau

SEQ ID NO: 360156 - RNA, 32 nt, Human
ccaaaaauacaaaaaguuagcugggcauggug

SEQ ID NO: 360157 - RNA, 32 nt, Human
ccaaaaauacaaaaauuagcuagacauagugg

SEQ ID NO: 360158 - RNA, 32 nt, Human
ccaaaaauacaaaaauuagcugggcguggugg

SEQ ID NO: 360159 - RNA, 32 nt, Human
ccaaaaauacaaaaauuagcugggcuucgugg

SEQ ID NO: 360160 - RNA, 32 nt, Human
ccaaaaauacaaaaauuagcugggcuuggugg

SEQ ID NO: 360161 - RNA, 32 nt, Human
ccaaaaauacaaaaauuagcugggugcgaugg

SEQ ID NO: 360162 - RNA, 32 nt, Human
ccaaaaaucaaccuaucaaagcuucaaaaacu

SEQ ID NO: 360163 - RNA, 32 nt, Human
ccaaaaaucucaucuuggguguuuucagggcu

SEQ ID NO: 360164 - RNA, 32 nt, Human
ccaaaaauuaacccaaacuugcauuauuuguc

SEQ ID NO: 360165 - RNA, 32 nt, Human
ccaaaaauuagcccagcuaauuuuuguauuuu

SEQ ID NO: 360166 - RNA, 32 nt, Human
ccaaaaauucacugaccaaccaaccaaacucc

SEQ ID NO: 360167 - RNA, 32 nt, Human
ccaaaaauuccucugcgcugggguccgacugc

SEQ ID NO: 360168 - RNA, 20 nt, Human
ccaaaacaaaagaaccaaga

SEQ ID NO: 360169 - RNA, 32 nt, Human
ccaaaacaacccagcuucaccccaugucccuu

SEQ ID NO: 360170 - RNA, 32 nt, Human
ccaaaacacacguuucuuuguuacagucauuu

SEQ ID NO: 360171 - RNA, 32 nt, Human
ccaaaacaccacugcuuccuacccagguggcg

SEQ ID NO: 360172 - RNA, 32 nt, Human
ccaaaacagccuguucucuccucucuccuccc

SEQ ID NO: 360173 - RNA, 32 nt, Human
ccaaaacaucauuauguggcacaugauuauaa

SEQ ID NO: 360174 - RNA, 32 nt, Human
ccaaaacauuuccaacacagaacuuccauuca

SEQ ID NO: 360175 - RNA, 23 nt, Human
ccaaaaccaaaggacaacugagg

SEQ ID NO: 360176 - RNA, 32 nt, Human
ccaaaaccaacaccaacucugccaacggagcc

SEQ ID NO: 360177 - RNA, 32 nt, Human
ccaaaaccaaguuucaggaaaauaacucuaug

SEQ ID NO: 360178 - RNA, 32 nt, Human
ccaaaaccaccaugacacaguuuuuauagugu

SEQ ID NO: 360179 - RNA, 31 nt, Human
ccaaaaccaguggaaagauggguagagucau

SEQ ID NO: 360180 - RNA, 32 nt, Human
ccaaaacccagccaucggggaagggucagggc

SEQ ID NO: 360181 - RNA, 32 nt, Human
ccaaaacccagcugcaccccuuccugggcaca

SEQ ID NO: 360182 - RNA, 21 nt, Human
ccaaaaccccaccucccuuua

SEQ ID NO: 360183 - RNA, 32 nt, Human
ccaaaacccccagcuacugcagacugucuggc

SEQ ID NO: 360184 - RNA, 32 nt, Human
ccaaaacccuaccccucucucucccucucuca

SEQ ID NO: 360185 - RNA, 32 nt, Human
ccaaaacccuccuucacagggcccagaggcuu

SEQ ID NO: 360186 - RNA, 32 nt, Human
ccaaaacccuucuugcaugcaggauguaauga

SEQ ID NO: 360187 - RNA, 32 nt, Human
ccaaaaccuagagugguaguuuuauguaaaug

SEQ ID NO: 360188 - RNA, 32 nt, Human
ccaaaaccuggcacccagaacaguuggaagug

SEQ ID NO: 360189 - RNA, 24 nt, Human
ccaaaacgaggggaagaggaugau

SEQ ID NO: 360190 - RNA, 32 nt, Human
ccaaaacggcuuuucugacacuccagguagcg

SEQ ID NO: 360191 - RNA, 21 nt, Human
ccaaaacgguaauacgugaaa

SEQ ID NO: 360192 - RNA, 32 nt, Human
ccaaaacuagaaagaaggaagcagggagcggu

SEQ ID NO: 360193 - RNA, 32 nt, Human
ccaaaacucuagacauaacaggcuauguuuuu

SEQ ID NO: 360194 - RNA, 32 nt, Human
ccaaaacugucuucaaccacaugacucaacag

SEQ ID NO: 360195 - RNA, 22 nt, Human
ccaaaacuuuuauuaaaaccaa

SEQ ID NO: 360196 - RNA, 32 nt, Human
ccaaaagaccacagcauaaagagcuucugaaa

SEQ ID NO: 360197 - RNA, 32 nt, Human
ccaaaagagaagcaauccaugcagugauggau

SEQ ID NO: 360198 - RNA, 32 nt, Human
ccaaaagagagaggagaaaauacagcucugau

SEQ ID NO: 360199 - RNA, 32 nt, Human
ccaaaagagaucugcugaucugcugagaauuu

SEQ ID NO: 360200 - RNA, 32 nt, Human
ccaaaagagaugacccugccccuugcccaggg

SEQ ID NO: 360201 - RNA, 25 nt, Human
ccaaaagagcugggauuacaagugu

SEQ ID NO: 360202 - RNA, 32 nt, Human
ccaaaagaucacauuuauacccaaagcuuucu

SEQ ID NO: 360203 - RNA, 32 nt, Human
ccaaaagaucacugcaaaccugccucaagaag

SEQ ID NO: 360204 - RNA, 32 nt, Human
ccaaaagcacacaagcacauacagacauaugc

SEQ ID NO: 360205 - RNA, 32 nt, Human
ccaaaagcagaggcucgcucuuuccuugccua

SEQ ID NO: 360206 - RNA, 32 nt, Human
ccaaaagccaaggggaauuuugcagugauagg

SEQ ID NO: 360207 - RNA, 32 nt, Human
ccaaaagcccagggcuccaggcugccaucagg

SEQ ID NO: 360208 - RNA, 32 nt, Human
ccaaaagccugggaagaauuuucccuauccag

SEQ ID NO: 360209 - RNA, 32 nt, Human
ccaaaagcuggagugugaggcaggaggcugga

SEQ ID NO: 360210 - RNA, 23 nt, Human
ccaaaagcugggauuacaggcgu

SEQ ID NO: 360211 - RNA, 32 nt, Human
ccaaaagcuggguuccaggaacuggaucauau

SEQ ID NO: 360212 - RNA, 32 nt, Human
ccaaaagcugugccuuugccugacccggcgua

SEQ ID NO: 360213 - RNA, 32 nt, Human
ccaaaagcuuuccagaugaucugccucggaug

SEQ ID NO: 360214 - RNA, 32 nt, Human
ccaaaagcuuugccacauucuucacauuugua

SEQ ID NO: 360215 - RNA, 32 nt, Human
ccaaaaggaaaucaacugaguggguguuugga

SEQ ID NO: 360216 - RNA, 32 nt, Human
ccaaaaggaacgugucucucuccaagucugug

SEQ ID NO: 360217 - RNA, 32 nt, Human
ccaaaaggagggaaagugugaagaauaaagua

SEQ ID NO: 360218 - RNA, 32 nt, Human
ccaaaaggauuuuagcauauguuaagaggaau

SEQ ID NO: 360219 - RNA, 24 nt, Human
ccaaaaggcagacauugcagugag

SEQ ID NO: 360220 - RNA, 24 nt, Human
ccaaaaggcggagguugcagugag

SEQ ID NO: 360221 - RNA, 32 nt, Human
ccaaaagggaaagagaaagugaaaagaaacug

SEQ ID NO: 360222 - RNA, 32 nt, Human
ccaaaagggaaagagaaaguggaagaaacuga

SEQ ID NO: 360223 - RNA, 32 nt, Human
ccaaaaggggcugcugccugagggcuaacuag

SEQ ID NO: 360224 - RNA, 32 nt, Human
ccaaaagggggaggcgagaggagccagaagca

SEQ ID NO: 360225 - RNA, 32 nt, Human
ccaaaagguaccccgauggccaagcaauuccu

SEQ ID NO: 360226 - RNA, 32 nt, Human
ccaaaagguagaagcagcccaagugucauccc

SEQ ID NO: 360227 - RNA, 24 nt, Human
ccaaaagguggaggcugcagugag

SEQ ID NO: 360228 - RNA, 32 nt, Human
ccaaaaguagcuuuguuuuccuuuguauuuug

SEQ ID NO: 360229 - RNA, 32 nt, Human
ccaaaagucugcuucacugagaugcuaccuug

SEQ ID NO: 360230 - RNA, 18 nt, Human
ccaaaagugagaucgcca

SEQ ID NO: 360231 - RNA, 32 nt, Human
ccaaaagugccacccuggcuucaugucuugaa

SEQ ID NO: 360232 - RNA, 25 nt, Human
ccaaaagugcuggaauuacaggcgu

SEQ ID NO: 360233 - RNA, 21 nt, Human
ccaaaagugcuggauuacagg

SEQ ID NO: 360234 - RNA, 22 nt, Human
ccaaaagugcugggauuacagg

SEQ ID NO: 360235 - RNA, 23 nt, Human
ccaaaagugcugggauuacaggc

SEQ ID NO: 360236 - RNA, 24 nt, Human
ccaaaagugcugggauuacaggca

SEQ ID NO: 360237 - RNA, 25 nt, Human
ccaaaagugcugggauuacaggcgu

SEQ ID NO: 360238 - RNA, 23 nt, Human
ccaaaagugcugggauuacuagc

SEQ ID NO: 360239 - RNA, 23 nt, Human
ccaaaagugcuggguuuacaggc

SEQ ID NO: 360240 - RNA, 32 nt, Human
ccaaaagugcuugagaaucugccugagggcuu

SEQ ID NO: 360241 - RNA, 25 nt, Human
ccaaaaguguugggauuacaggugu

SEQ ID NO: 360242 - RNA, 32 nt, Human
ccaaaaguuugagaccagccugggcaacauag

SEQ ID NO: 360243 - RNA, 32 nt, Human
ccaaaaguuuuuaaaauaugcuacucugaaaa

SEQ ID NO: 360244 - RNA, 32 nt, Human
ccaaaauaauguccacuucucccuuucaugcu

SEQ ID NO: 360245 - RNA, 23 nt, Human
ccaaaauacuaugccccuuaaua

SEQ ID NO: 360246 - RNA, 32 nt, Human
ccaaaauaguacagccuugaaucuauaaaacu

SEQ ID NO: 360247 - RNA, 32 nt, Human
ccaaaauaguggaaccccgucgcuacuaaaaa

SEQ ID NO: 360248 - RNA, 25 nt, Human
ccaaaauauuaacuggggagcugcu

SEQ ID NO: 360249 - RNA, 32 nt, Human
ccaaaaucacuugaggccaggaguucaagaaa

SEQ ID NO: 360250 - RNA, 32 nt, Human
ccaaaaucacuugaggccaggaguucaagacc

SEQ ID NO: 360251 - RNA, 32 nt, Human
ccaaaaucagauuguuuucacaguuaugauuc

SEQ ID NO: 360252 - RNA, 32 nt, Human
ccaaaaucccagacacucccauggacaccgaa

SEQ ID NO: 360253 - RNA, 17 nt, Human
ccaaaaucccucgggug

SEQ ID NO: 360254 - RNA, 23 nt, Human
ccaaaauccugggauuacaggcg

SEQ ID NO: 360255 - RNA, 32 nt, Human
ccaaaaugaaaaaccagaaggccauuuggugu

SEQ ID NO: 360256 - RNA, 19 nt, Human
ccaaaaugaaccagauacc

SEQ ID NO: 360257 - RNA, 32 nt, Human
ccaaaaugaauaguuacucaccauggaaaaga

SEQ ID NO: 360258 - RNA, 32 nt, Human
ccaaaaugaauccauuucccaguuugacaaau

SEQ ID NO: 360259 - RNA, 32 nt, Human
ccaaaaugaauuccaagacaaugaaggaguga

SEQ ID NO: 360260 - RNA, 32 nt, Human
ccaaaaugaccuucaggaccggccuguuuccc

SEQ ID NO: 360261 - RNA, 32 nt, Human
ccaaaaugagccaagcaugguggcgggagccu

SEQ ID NO: 360262 - RNA, 24 nt, Human
ccaaaaugaugaaaccccaucucu

SEQ ID NO: 360263 - RNA, 30 nt, Human
ccaaaaugauuucuucaaagcccagacuug

SEQ ID NO: 360264 - RNA, 32 nt, Human
ccaaaaugccugcuuaguuuuuaaagauggaa

SEQ ID NO: 360265 - RNA, 32 nt, Human
ccaaaaugccugucccagccuccuggccccau

SEQ ID NO: 360266 - RNA, 24 nt, Human
ccaaaaugcugagauuacaggugu

SEQ ID NO: 360267 - RNA, 26 nt, Human
ccaaaaugcugcgauuauauaggcgu

SEQ ID NO: 360268 - RNA, 22 nt, Human
ccaaaaugcugggacuaugggc

SEQ ID NO: 360269 - RNA, 24 nt, Human
ccaaaaugcugggauuacaagcgu

SEQ ID NO: 360270 - RNA, 24 nt, Human
ccaaaaugcugggauuacagaugu

SEQ ID NO: 360271 - RNA, 21 nt, Human
ccaaaaugcugggauuacagg

SEQ ID NO: 360272 - RNA, 24 nt, Human
ccaaaaugcugggauuacaggagu

SEQ ID NO: 360273 - RNA, 22 nt, Human
ccaaaaugcugggauuacaggc

SEQ ID NO: 360274 - RNA, 24 nt, Human
ccaaaaugcugggauuacaggcgu

SEQ ID NO: 360275 - RNA, 24 nt, Human
ccaaaaugcugggauuacaggggu

SEQ ID NO: 360276 - RNA, 22 nt, Human
ccaaaaugcugggauuacaugc

SEQ ID NO: 360277 - RNA, 24 nt, Human
ccaaaaugcugggauuagaggugu

SEQ ID NO: 360278 - RNA, 22 nt, Human
ccaaaaugcuucgauugcaggc

SEQ ID NO: 360279 - RNA, 22 nt, Human
ccaaaaugcuuggauuacaggc

SEQ ID NO: 360280 - RNA, 32 nt, Human
ccaaaauggagauggcaucaaacuagugguca

SEQ ID NO: 360281 - RNA, 32 nt, Human
ccaaaaugggaaaggaaaagacucauaccaac

SEQ ID NO: 360282 - RNA, 30 nt, Human
ccaaaaugggaaaggaaaagacucauauca

SEQ ID NO: 360283 - RNA, 32 nt, Human
ccaaaaugggaaaggaaaagacucauaucaac

SEQ ID NO: 360284 - RNA, 24 nt, Human
ccaaaauggugggauuacaggugu

SEQ ID NO: 360285 - RNA, 19 nt, Human
ccaaaauguccucccacaa

SEQ ID NO: 360286 - RNA, 32 nt, Human
ccaaaaugugaagcggggagggcggagacgca

SEQ ID NO: 360287 - RNA, 22 nt, Human
ccaaaauguugagauugcaggc

SEQ ID NO: 360288 - RNA, 22 nt, Human
ccaaaauguugcaauuacaggc

SEQ ID NO: 360289 - RNA, 32 nt, Human
ccaaaauuagcugggugugguggugcacgcau

SEQ ID NO: 360290 - RNA, 22 nt, Human
ccaaaauucugggauuacaggc

SEQ ID NO: 360291 - RNA, 32 nt, Human
ccaaaauuuucuucccugacaaugucuccuac

SEQ ID NO: 360292 - RNA, 32 nt, Human
ccaaacaaaaagcaggaaaaacaaaugggaaa

SEQ ID NO: 360293 - RNA, 21 nt, Human
ccaaacaaauggauuuuccca

SEQ ID NO: 360294 - RNA, 32 nt, Human
ccaaacacacaaaagcccaugguugcgguugc

SEQ ID NO: 360295 - RNA, 18 nt, Human
ccaaacacauucuccuuu

SEQ ID NO: 360296 - RNA, 19 nt, Human
ccaaacaccaagcgcucca

SEQ ID NO: 360297 - RNA, 32 nt, Human
ccaaacaccacagccuucuccagagccggcac

SEQ ID NO: 360298 - RNA, 20 nt, Human
ccaaacaccacauguucuca

SEQ ID NO: 360299 - RNA, 20 nt, Human
ccaaacaccaccuuuuugcc

SEQ ID NO: 360300 - RNA, 32 nt, Human
ccaaacaccagaccacacaguccuccaaaaau

SEQ ID NO: 360301 - RNA, 20 nt, Human
ccaaacacccagcauagcca

SEQ ID NO: 360302 - RNA, 20 nt, Human
ccaaacacccgugcccgcca

SEQ ID NO: 360303 - RNA, 18 nt, Human
ccaaacaccuccuuccca

SEQ ID NO: 360304 - RNA, 18 nt, Human
ccaaacaccucuuuccca

SEQ ID NO: 360305 - RNA, 32 nt, Human
ccaaacaccugacucuuauuacuggaccuaaa

SEQ ID NO: 360306 - RNA, 32 nt, Human
ccaaacaccuucagugcugguggcccucaggc

SEQ ID NO: 360307 - RNA, 19 nt, Human
ccaaacaccuugcugacca

SEQ ID NO: 360308 - RNA, 23 nt, Human
ccaaacacgcggcaccaggagau

SEQ ID NO: 360309 - RNA, 32 nt, Human
ccaaacacuaaccccgcucaggagacucgcac

SEQ ID NO: 360310 - RNA, 32 nt, Human
ccaaacacuagcucuguauuaauccccaucau

SEQ ID NO: 360311 - RNA, 32 nt, Human
ccaaacacugcauauucucacgcacagguggg

SEQ ID NO: 360312 - RNA, 32 nt, Human
ccaaacacugugccuacagccucccaggggug

SEQ ID NO: 360313 - RNA, 19 nt, Human
ccaaacacuuugccagcca

SEQ ID NO: 360314 - RNA, 32 nt, Human
ccaaacagaaagcaguggagguggggguugcu

SEQ ID NO: 360315 - RNA, 21 nt, Human
ccaaacagagacagcuuccag

SEQ ID NO: 360316 - RNA, 32 nt, Human
ccaaacagaguccugguuuccucagccucacc

SEQ ID NO: 360317 - RNA, 21 nt, Human
ccaaacagauggcuuuccagg

SEQ ID NO: 360318 - RNA, 18 nt, Human
ccaaacagcaaaccaaga

SEQ ID NO: 360319 - RNA, 21 nt, Human
ccaaacagcauauuggccagg

SEQ ID NO: 360320 - RNA, 32 nt, Human
ccaaacagccuacucgggguucuuggguagcc

SEQ ID NO: 360321 - RNA, 32 nt, Human
ccaaacagcugcagcuuugggcauuuuucuuu

SEQ ID NO: 360322 - RNA, 23 nt, Human
ccaaacaggcccuccucccuccc

SEQ ID NO: 360323 - RNA, 32 nt, Human
ccaaacaggcugguguacagggagcaacaccg

SEQ ID NO: 360324 - RNA, 22 nt, Human
ccaaacaggguggcuccccagg

SEQ ID NO: 360325 - RNA, 18 nt, Human
ccaaacauccauccaucc

SEQ ID NO: 360326 - RNA, 32 nt, Human
ccaaacaucuuauugauacuuacuucaagaag

SEQ ID NO: 360327 - RNA, 32 nt, Human
ccaaacaugcaaaguagaaggggccuggccac

SEQ ID NO: 360328 - RNA, 32 nt, Human
ccaaacaugggaauuuccuaguuauauuuuug

SEQ ID NO: 360329 - RNA, 21 nt, Human
ccaaacauggugaaacccugu

SEQ ID NO: 360330 - RNA, 19 nt, Human
ccaaacauuacaccuccca

SEQ ID NO: 360331 - RNA, 32 nt, Human
ccaaaccaaaaauaaagaguuuaguugaggag

SEQ ID NO: 360332 - RNA, 20 nt, Human
ccaaaccaaacugcacgaca

SEQ ID NO: 360333 - RNA, 32 nt, Human
ccaaaccaagacaacauguacauaaagauuuc

SEQ ID NO: 360334 - RNA, 18 nt, Human
ccaaaccaagugcuucca

SEQ ID NO: 360335 - RNA, 32 nt, Human
ccaaaccaaucucgguggaaacuccuauccua

SEQ ID NO: 360336 - RNA, 32 nt, Human
ccaaaccacagccucugcaucaaccagcccca

SEQ ID NO: 360337 - RNA, 32 nt, Human
ccaaaccacaucuuuucaugcuuugagacuuc

SEQ ID NO: 360338 - RNA, 32 nt, Human
ccaaaccagaaaccuccaauucucauguggaa

SEQ ID NO: 360339 - RNA, 32 nt, Human
ccaaaccagagguggaggaagaacgguaggaa

SEQ ID NO: 360340 - RNA, 32 nt, Human
ccaaacccaagaaggucuggcaaagucaggcu

SEQ ID NO: 360341 - RNA, 32 nt, Human
ccaaacccaaguguccaaggcuccaguccuag

SEQ ID NO: 360342 - RNA, 32 nt, Human
ccaaacccacacaccagccuccucagacaaaa

SEQ ID NO: 360343 - RNA, 32 nt, Human
ccaaacccagccaccccacuacccgcuacccg

SEQ ID NO: 360344 - RNA, 32 nt, Human
ccaaacccagcccagaaguuguauuuuaugug

SEQ ID NO: 360345 - RNA, 32 nt, Human
ccaaacccagucccucuacucucccaucucac

SEQ ID NO: 360346 - RNA, 22 nt, Human
ccaaacccauaggucugaaacu

SEQ ID NO: 360347 - RNA, 32 nt, Human
ccaaaccccagccugcaagucugucccaggcu

SEQ ID NO: 360348 - RNA, 32 nt, Human
ccaaaccccucucggccgggugcaguggcuua

SEQ ID NO: 360349 - RNA, 32 nt, Human
ccaaacccuacuccaagucugaaccuccaagg

SEQ ID NO: 360350 - RNA, 32 nt, Human
ccaaacccugaggagcucugcaggccccacau

SEQ ID NO: 360351 - RNA, 23 nt, Human
ccaaacccuuccccaggccagcu

SEQ ID NO: 360352 - RNA, 32 nt, Human
ccaaacccuuucucuuucucccaggcagggcu

SEQ ID NO: 360353 - RNA, 32 nt, Human
ccaaaccgcacacccagacgcacacgcauacc

SEQ ID NO: 360354 - RNA, 18 nt, Human
ccaaaccgcgggcgcacg

SEQ ID NO: 360355 - RNA, 23 nt, Human
ccaaaccuaauaaaguuuuccca

SEQ ID NO: 360356 - RNA, 32 nt, Human
ccaaaccuccacugcugcucccggguccugcu

SEQ ID NO: 360357 - RNA, 32 nt, Human
ccaaaccucuacuguuugggacaguaagccaa

SEQ ID NO: 360358 - RNA, 32 nt, Human
ccaaaccugccugacuuccugcuccuggccac

SEQ ID NO: 360359 - RNA, 21 nt, Human
ccaaaccugcugcagcugcca

SEQ ID NO: 360360 - RNA, 20 nt, Human
ccaaaccugcugucaccuug

SEQ ID NO: 360361 - RNA, 23 nt, Human
ccaaaccugcuuccgcaaugggu

SEQ ID NO: 360362 - RNA, 18 nt, Human
ccaaaccugcuuuuccca

SEQ ID NO: 360363 - RNA, 22 nt, Human
ccaaaccuggaagcagcagcag

SEQ ID NO: 360364 - RNA, 32 nt, Human
ccaaaccugugauuccagaaaaguagauccua

SEQ ID NO: 360365 - RNA, 32 nt, Human
ccaaaccuguuccccucugcuacuagccacug

SEQ ID NO: 360366 - RNA, 32 nt, Human
ccaaaccuguucugucccacuggccagccauc

SEQ ID NO: 360367 - RNA, 32 nt, Human
ccaaaccuguucuucuguuucuguggcaccua

SEQ ID NO: 360368 - RNA, 32 nt, Human
ccaaaccuuaaaacgaaggcaaaccuuccuuc

SEQ ID NO: 360369 - RNA, 32 nt, Human
ccaaaccuugcuguucacagucuccaauucuu

SEQ ID NO: 360370 - RNA, 32 nt, Human
ccaaacgaggaaggacacagacccaaaagcca

SEQ ID NO: 360371 - RNA, 32 nt, Human
ccaaacgcccuuuccuccucaggcacacagcu

SEQ ID NO: 360372 - RNA, 32 nt, Human
ccaaacggauuugcgugaaaccagcccaaggu

SEQ ID NO: 360373 - RNA, 32 nt, Human
ccaaacggcuggggaagaagagauuuggacau

SEQ ID NO: 360374 - RNA, 19 nt, Human
ccaaacguccuggacugca

SEQ ID NO: 360375 - RNA, 32 nt, Human
ccaaacguucagagucacagacuguagaaaau

SEQ ID NO: 360376 - RNA, 32 nt, Human
ccaaacuaaaccaaaagaagaaguaaaacagc

SEQ ID NO: 360377 - RNA, 31 nt, Human
ccaaacuaccucucugauagcugguguucau

SEQ ID NO: 360378 - RNA, 32 nt, Human
ccaaacucacuguccccacuguggcaugaggg

SEQ ID NO: 360379 - RNA, 32 nt, Human
ccaaacucagauuuuaagguuuggacaagaag

SEQ ID NO: 360380 - RNA, 32 nt, Human
ccaaacucagcaugacuccuguccucuucaau

SEQ ID NO: 360381 - RNA, 32 nt, Human
ccaaacucagcccuucuuggaauacagccuuu

SEQ ID NO: 360382 - RNA, 32 nt, Human
ccaaacucaggcugccccgagugggcuucagc

SEQ ID NO: 360383 - RNA, 32 nt, Human
ccaaacuccacaaguaugggacccuggagggg

SEQ ID NO: 360384 - RNA, 32 nt, Human
ccaaacuccaccaccuauccccaaaccuguaa

SEQ ID NO: 360385 - RNA, 32 nt, Human
ccaaacuccaccuucugugcuuuuugcuuggg

SEQ ID NO: 360386 - RNA, 24 nt, Human
ccaaacuccagagguggaccuggg

SEQ ID NO: 360387 - RNA, 25 nt, Human
ccaaacuccaggcucagaugucaca

SEQ ID NO: 360388 - RNA, 32 nt, Human
ccaaacuccgccccaaaaaggagaguaacaaa

SEQ ID NO: 360389 - RNA, 32 nt, Human
ccaaacuccuuaucuuuugcagucucucuggg

SEQ ID NO: 360390 - RNA, 32 nt, Human
ccaaacucucaggcacaaagucaaauggcuaa

SEQ ID NO: 360391 - RNA, 32 nt, Human
ccaaacucuccagccacucucuucuacgcugc

SEQ ID NO: 360392 - RNA, 32 nt, Human
ccaaacucucccuuucuccauccaaucggucc

SEQ ID NO: 360393 - RNA, 32 nt, Human
ccaaacucugcaggagaaaggcagcaugguac

SEQ ID NO: 360394 - RNA, 32 nt, Human
ccaaacucugccagggcucccagugagggucc

SEQ ID NO: 360395 - RNA, 32 nt, Human
ccaaacucugugucagcaucuuugcccuucug

SEQ ID NO: 360396 - RNA, 32 nt, Human
ccaaacucuucccauaaauuaucuuuucuucu

SEQ ID NO: 360397 - RNA, 32 nt, Human
ccaaacucuucugucacuaucaguguccaucu

SEQ ID NO: 360398 - RNA, 22 nt, Human
ccaaacucuugccuuucuugua

SEQ ID NO: 360399 - RNA, 32 nt, Human
ccaaacucuuucuccugucuuggguuggcugg

SEQ ID NO: 360400 - RNA, 32 nt, Human
ccaaacugaaaauacagauagcuguuccguca

SEQ ID NO: 360401 - RNA, 32 nt, Human
ccaaacugacagguaaauguagcccucagagc

SEQ ID NO: 360402 - RNA, 19 nt, Human
ccaaacugcagugcugcca

SEQ ID NO: 360403 - RNA, 32 nt, Human
ccaaacugccacuccacuccaggugggccacu

SEQ ID NO: 360404 - RNA, 24 nt, Human
ccaaacugcugggauuacaggcgu

SEQ ID NO: 360405 - RNA, 24 nt, Human
ccaaacugcugggauuacaggugu

SEQ ID NO: 360406 - RNA, 21 nt, Human
ccaaacugcugggauuauagg

SEQ ID NO: 360407 - RNA, 24 nt, Human
ccaaacugcugggauuauaggcgu

SEQ ID NO: 360408 - RNA, 32 nt, Human
ccaaacuggagauucuucaccuucgcucuaug

SEQ ID NO: 360409 - RNA, 23 nt, Human
ccaaacuggagcugucccuggcc

SEQ ID NO: 360410 - RNA, 32 nt, Human
ccaaacuggaucggucaacauggucuuccccc

SEQ ID NO: 360411 - RNA, 22 nt, Human
ccaaacuggggccaccucugua

SEQ ID NO: 360412 - RNA, 32 nt, Human
ccaaacugggguccaccaagugggggaagggg

SEQ ID NO: 360413 - RNA, 22 nt, Human
ccaaacuggugagauuacaggc

SEQ ID NO: 360414 - RNA, 18 nt, Human
ccaaacugugacaggaga

SEQ ID NO: 360415 - RNA, 32 nt, Human
ccaaacugugacugguauuuauuggacccaga

SEQ ID NO: 360416 - RNA, 32 nt, Human
ccaaacuuaggaucccucccagccccagcccu

SEQ ID NO: 360417 - RNA, 20 nt, Human
ccaaacuuaguggacaaugg

SEQ ID NO: 360418 - RNA, 32 nt, Human
ccaaacuucaaaaaguuaauuauugucauaau

SEQ ID NO: 360419 - RNA, 32 nt, Human
ccaaacuucagcaacuguuaauacucagauca

SEQ ID NO: 360420 - RNA, 32 nt, Human
ccaaacuuccugcuuaguguucugaaaucugu

SEQ ID NO: 360421 - RNA, 32 nt, Human
ccaaacuucucccuguucccaaacccugccua

SEQ ID NO: 360422 - RNA, 32 nt, Human
ccaaacuucuggcaaauuuaccugugaauuuc

SEQ ID NO: 360423 - RNA, 24 nt, Human
ccaaacuucugggauuacaggcgu

SEQ ID NO: 360424 - RNA, 31 nt, Human
ccaaacuucuuucauuuaaagaaccaaacuu

SEQ ID NO: 360425 - RNA, 20 nt, Human
ccaaacuuggcuuccuagcc

SEQ ID NO: 360426 - RNA, 32 nt, Human
ccaaacuuguucuccccguccugguccagggc

SEQ ID NO: 360427 - RNA, 32 nt, Human
ccaaacuuugcuuaaggaugagaaaugagaug

SEQ ID NO: 360428 - RNA, 32 nt, Human
ccaaacuuuuccuggugauugaauucuuacca

SEQ ID NO: 360429 - RNA, 32 nt, Human
ccaaacuuuucugccaaccucuuacucugaau

SEQ ID NO: 360430 - RNA, 32 nt, Human
ccaaagaaaaggcccugccagguccaauguug

SEQ ID NO: 360431 - RNA, 32 nt, Human
ccaaagaaacaaagauccacacacauccucac

SEQ ID NO: 360432 - RNA, 32 nt, Human
ccaaagaaacauagacaacuguagaggcaaug

SEQ ID NO: 360433 - RNA, 25 nt, Human
ccaaagaaagugcugggauuacagg

SEQ ID NO: 360434 - RNA, 32 nt, Human
ccaaagaacagauccuggaauugcuggugcug

SEQ ID NO: 360435 - RNA, 32 nt, Human
ccaaagaacaucugcacuccugaacacacccu

SEQ ID NO: 360436 - RNA, 32 nt, Human
ccaaagaaccacggcccucucccuuuacuguu

SEQ ID NO: 360437 - RNA, 22 nt, Human
ccaaagaacugggauuacaggc

SEQ ID NO: 360438 - RNA, 32 nt, Human
ccaaagaagaggagggaucaaguuaugaaggc

SEQ ID NO: 360439 - RNA, 32 nt, Human
ccaaagaagccuugccaucuggcgcucccaug

SEQ ID NO: 360440 - RNA, 32 nt, Human
ccaaagaagguguuuuccugaagaacugucua

SEQ ID NO: 360441 - RNA, 32 nt, Human
ccaaagaauucucauguacucuaccuucaaga

SEQ ID NO: 360442 - RNA, 32 nt, Human
ccaaagacauacaguguuuuacauucucuccu

SEQ ID NO: 360443 - RNA, 18 nt, Human
ccaaagacaucagucucc

SEQ ID NO: 360444 - RNA, 32 nt, Human
ccaaagaccccuagcgcggccuggugagcggg

SEQ ID NO: 360445 - RNA, 32 nt, Human
ccaaagacccuccucccugcaggcacuguggg

SEQ ID NO: 360446 - RNA, 32 nt, Human
ccaaagacccugggaaccuccucuggucuucc

SEQ ID NO: 360447 - RNA, 32 nt, Human
ccaaagacucagagaacuagaguuuaagcuga

SEQ ID NO: 360448 - RNA, 32 nt, Human
ccaaagacuguacuggccagugucauuuuauu

SEQ ID NO: 360449 - RNA, 32 nt, Human
ccaaagagaagaucuggucagcagagccgccc

SEQ ID NO: 360450 - RNA, 22 nt, Human
ccaaagagacaagcacuugaaa

SEQ ID NO: 360451 - RNA, 32 nt, Human
ccaaagagagcgcugaaaauggacucacuguc

SEQ ID NO: 360452 - RNA, 32 nt, Human
ccaaagagagugagaguagaagcugaaagacu

SEQ ID NO: 360453 - RNA, 19 nt, Human
ccaaagagaugugcugcag

SEQ ID NO: 360454 - RNA, 32 nt, Human
ccaaagagcagcuucucagaucuucaguguuc

SEQ ID NO: 360455 - RNA, 32 nt, Human
ccaaagagcagggcagaggguggcaguggcac

SEQ ID NO: 360456 - RNA, 32 nt, Human
ccaaagagccaugugucauguaauacugaacc

SEQ ID NO: 360457 - RNA, 32 nt, Human
ccaaagagcgaaggaagguucaguucagagga

SEQ ID NO: 360458 - RNA, 24 nt, Human
ccaaagagcugagauuacaggcgu

SEQ ID NO: 360459 - RNA, 24 nt, Human
ccaaagagcugggauuacaggcgu

SEQ ID NO: 360460 - RNA, 24 nt, Human
ccaaagagcugggauuacaggugu

SEQ ID NO: 360461 - RNA, 32 nt, Human
ccaaagaggaagccaaaggggaagaaacagaa

SEQ ID NO: 360462 - RNA, 32 nt, Human
ccaaagaggaguauggugggagagggagugga

SEQ ID NO: 360463 - RNA, 32 nt, Human
ccaaagaggcagcagcgaggguaggaaguucu

SEQ ID NO: 360464 - RNA, 32 nt, Human
ccaaagaguccugagagaacagaagguguaac

SEQ ID NO: 360465 - RNA, 32 nt, Human
ccaaagaguguguccaccacuccacugugcuc

SEQ ID NO: 360466 - RNA, 32 nt, Human
ccaaagauccuuugcugaguguucuguuuuug

SEQ ID NO: 360467 - RNA, 24 nt, Human
ccaaagaugcuggaccugugcuaa

SEQ ID NO: 360468 - RNA, 32 nt, Human
ccaaagauggccaugauuucuguaugugagac

SEQ ID NO: 360469 - RNA, 32 nt, Human
ccaaagauugggccggguucaaagggagccca

SEQ ID NO: 360470 - RNA, 32 nt, Human
ccaaagauugugaggaaggaaaaucagaggac

SEQ ID NO: 360471 - RNA, 32 nt, Human
ccaaagcaaaccuggugugcagaagcaaguca

SEQ ID NO: 360472 - RNA, 32 nt, Human
ccaaagcaaauucagcuuuccacagcagcacc

SEQ ID NO: 360473 - RNA, 32 nt, Human
ccaaagcaacaccagaaccaagaaggagcucc

SEQ ID NO: 360474 - RNA, 32 nt, Human
ccaaagcaacugugggcaucaggcuguggggc

SEQ ID NO: 360475 - RNA, 32 nt, Human
ccaaagcaagagccuugcuuguuucacccugg

SEQ ID NO: 360476 - RNA, 31 nt, Human
ccaaagcacagcuagcaaaucaaaacaaacu

SEQ ID NO: 360477 - RNA, 22 nt, Human
ccaaagcacugggauuacaagc

SEQ ID NO: 360478 - RNA, 22 nt, Human
ccaaagcacugggauuacaggc

SEQ ID NO: 360479 - RNA, 23 nt, Human
ccaaagcacugggauuacaggca

SEQ ID NO: 360480 - RNA, 24 nt, Human
ccaaagcacugggauuacaggcgu

SEQ ID NO: 360481 - RNA, 24 nt, Human
ccaaagcacuuggauuacagaugu

SEQ ID NO: 360482 - RNA, 32 nt, Human
ccaaagcagccuguugagcugguucuccaggg

SEQ ID NO: 360483 - RNA, 20 nt, Human
ccaaagcaggaagcugcaca

SEQ ID NO: 360484 - RNA, 23 nt, Human
ccaaagcaggaggaucacuugag

SEQ ID NO: 360485 - RNA, 32 nt, Human
ccaaagcaggcggaucaccugaggucaggagu

SEQ ID NO: 360486 - RNA, 32 nt, Human
ccaaagcaggugaaucaccugaggucaggagu

SEQ ID NO: 360487 - RNA, 32 nt, Human
ccaaagcaguaaaauaugauuaauuuucauaa

SEQ ID NO: 360488 - RNA, 32 nt, Human
ccaaagcaucagcuaggcuggagugauuuguu

SEQ ID NO: 360489 - RNA, 32 nt, Human
ccaaagcauguggcauuuggauggccagagug

SEQ ID NO: 360490 - RNA, 22 nt, Human
ccaaagcauugggauuacaggc

SEQ ID NO: 360491 - RNA, 32 nt, Human
ccaaagccacaccacagucgguggugaugcaa

SEQ ID NO: 360492 - RNA, 32 nt, Human
ccaaagccagccccaauuggcacaaggguuca

SEQ ID NO: 360493 - RNA, 32 nt, Human
ccaaagccagccugggcaacauggugaaaccc

SEQ ID NO: 360494 - RNA, 32 nt, Human
ccaaagccauucucccccucuuugggcagugc

SEQ ID NO: 360495 - RNA, 32 nt, Human
ccaaagcccagaaugcagccccgacccaaguu

SEQ ID NO: 360496 - RNA, 21 nt, Human
ccaaagccccagggggugcag

SEQ ID NO: 360497 - RNA, 22 nt, Human
ccaaagccccuaccugcugcug

SEQ ID NO: 360498 - RNA, 19 nt, Human
ccaaagcccugcugagcag

SEQ ID NO: 360499 - RNA, 32 nt, Human
ccaaagccguggacacagcauucgaguguugg

SEQ ID NO: 360500 - RNA, 32 nt, Human
ccaaagccuauuucuucuguaguauuucaagu

SEQ ID NO: 360501 - RNA, 32 nt, Human
ccaaagccuccaccccuuccugaagacccagc

SEQ ID NO: 360502 - RNA, 32 nt, Human
ccaaagccucuuccuccacggccuuugcuccu

SEQ ID NO: 360503 - RNA, 32 nt, Human
ccaaagccugcucucuccuaaggcucucauuc

SEQ ID NO: 360504 - RNA, 32 nt, Human
ccaaagccuucaugccuguaauccgagugcuu

SEQ ID NO: 360505 - RNA, 32 nt, Human
ccaaagccuuucucccuucuugccagaucgau

SEQ ID NO: 360506 - RNA, 32 nt, Human
ccaaagccuuuugucacccaggcuggagugcc

SEQ ID NO: 360507 - RNA, 22 nt, Human
ccaaagcgaagccugugcuacu

SEQ ID NO: 360508 - RNA, 26 nt, Human
ccaaagcgagccuccaggcccagcaa

SEQ ID NO: 360509 - RNA, 24 nt, Human
ccaaagcgauaggauuacaggcgu

SEQ ID NO: 360510 - RNA, 32 nt, Human
ccaaagcgccgagacgagggugcugugucccu

SEQ ID NO: 360511 - RNA, 22 nt, Human
ccaaagcgcuaggauuacaagc

SEQ ID NO: 360512 - RNA, 22 nt, Human
ccaaagcgcugagauuguaggc

SEQ ID NO: 360513 - RNA, 24 nt, Human
ccaaagcgcugggauuacaggcgu

SEQ ID NO: 360514 - RNA, 24 nt, Human
ccaaagcgcugggauuacaggugu

SEQ ID NO: 360515 - RNA, 22 nt, Human
ccaaagcgcugggauuauaggu

SEQ ID NO: 360516 - RNA, 32 nt, Human
ccaaagcggacuaucuggaggcugggcgcaug

SEQ ID NO: 360517 - RNA, 24 nt, Human
ccaaagcggguggguuacuugagg

SEQ ID NO: 360518 - RNA, 22 nt, Human
ccaaagcguugggauuauaggc

SEQ ID NO: 360519 - RNA, 32 nt, Human
ccaaagcuagaaaaggaggaggaagaaacuga

SEQ ID NO: 360520 - RNA, 32 nt, Human
ccaaagcuagaaagggguggacccuggccccg

SEQ ID NO: 360521 - RNA, 32 nt, Human
ccaaagcuagcccaaggcuggggaaggggagg

SEQ ID NO: 360522 - RNA, 32 nt, Human
ccaaagcucacaccuucagccuccaacaugaa

SEQ ID NO: 360523 - RNA, 32 nt, Human
ccaaagcuccccaccccagccugguggcagag

SEQ ID NO: 360524 - RNA, 32 nt, Human
ccaaagcucguguuaagcugugagccccagug

SEQ ID NO: 360525 - RNA, 32 nt, Human
ccaaagcucucauuguacaaaaagccaagccc

SEQ ID NO: 360526 - RNA, 32 nt, Human
ccaaagcucucuccccacccuaccugcccacc

SEQ ID NO: 360527 - RNA, 32 nt, Human
ccaaagcucugcuccugcuccuuaggguggga

SEQ ID NO: 360528 - RNA, 32 nt, Human
ccaaagcugcagccauggaagcagccagggcc

SEQ ID NO: 360529 - RNA, 19 nt, Human
ccaaagcugcugggugcag

SEQ ID NO: 360530 - RNA, 32 nt, Human
ccaaagcugcuuucuucucugccuccuccuca

SEQ ID NO: 360531 - RNA, 32 nt, Human
ccaaagcuggccuccagucccucggcagcgcu

SEQ ID NO: 360532 - RNA, 32 nt, Human
ccaaagcugguuacacaugaccugcaaagucu

SEQ ID NO: 360533 - RNA, 32 nt, Human
ccaaagcuugaagaaagauuguaauagcauuu

SEQ ID NO: 360534 - RNA, 32 nt, Human
ccaaagcuuguugauagagugcaucagaauuu

SEQ ID NO: 360535 - RNA, 32 nt, Human
ccaaagcuuugaagacuuuuaaauccaacccu

SEQ ID NO: 360536 - RNA, 32 nt, Human
ccaaagcuuuggaguggcugcagccaucugga

SEQ ID NO: 360537 - RNA, 32 nt, Human
ccaaaggaaagcuugaaaaaugaagacauuag

SEQ ID NO: 360538 - RNA, 32 nt, Human
ccaaaggaacuggaugggcugcagugaggugg

SEQ ID NO: 360539 - RNA, 32 nt, Human
ccaaaggaagcuaaacaccaccucacacuuga

SEQ ID NO: 360540 - RNA, 32 nt, Human
ccaaaggagaugugcuuccaucagggaauaca

SEQ ID NO: 360541 - RNA, 32 nt, Human
ccaaaggagcagucagggaggggcggugagcc

SEQ ID NO: 360542 - RNA, 21 nt, Human
ccaaaggagguacuuccuccu

SEQ ID NO: 360543 - RNA, 32 nt, Human
ccaaaggauagcuucuuuuucaugaugccagg

SEQ ID NO: 360544 - RNA, 32 nt, Human
ccaaaggauguuuucuuugugaccagaacaca

SEQ ID NO: 360545 - RNA, 32 nt, Human
ccaaaggcacacaaucacagagcauuccuuuu

SEQ ID NO: 360546 - RNA, 32 nt, Human
ccaaaggcaggcaugguggggcuggcaugagu

SEQ ID NO: 360547 - RNA, 32 nt, Human
ccaaaggccacauacaugacaaaaagacugaa

SEQ ID NO: 360548 - RNA, 18 nt, Human
ccaaaggccacauggcca

SEQ ID NO: 360549 - RNA, 32 nt, Human
ccaaaggccaggaguuugaggcugcagugagc

SEQ ID NO: 360550 - RNA, 32 nt, Human
ccaaaggccauggagagcuggagccuggugcc

SEQ ID NO: 360551 - RNA, 32 nt, Human
ccaaaggccccgcaguuuuugcacuugagcug

SEQ ID NO: 360552 - RNA, 32 nt, Human
ccaaaggcccggcgcccuacugugcugccuga

SEQ ID NO: 360553 - RNA, 18 nt, Human
ccaaaggccgcgggcggg

SEQ ID NO: 360554 - RNA, 32 nt, Human
ccaaaggccguucaguucuccugggcuccagc

SEQ ID NO: 360555 - RNA, 32 nt, Human
ccaaaggccuggggcuuccuuggcucuucucc

SEQ ID NO: 360556 - RNA, 18 nt, Human
ccaaaggcuaugcuugcc

SEQ ID NO: 360557 - RNA, 32 nt, Human
ccaaaggcugagggccccaaagccacuugucu

SEQ ID NO: 360558 - RNA, 32 nt, Human
ccaaaggcuugucccuggaauuauuuggcaug

SEQ ID NO: 360559 - RNA, 32 nt, Human
ccaaagggaauagagauucuccaggaauuucc

SEQ ID NO: 360560 - RNA, 32 nt, Human
ccaaagggagagaaacagagacucagggagag

SEQ ID NO: 360561 - RNA, 32 nt, Human
ccaaagggagcacagucugcacccagcucuaa

SEQ ID NO: 360562 - RNA, 32 nt, Human
ccaaagggagcacagucugcacccagcucuca

SEQ ID NO: 360563 - RNA, 23 nt, Human
ccaaagggagggauuacuggcgu

SEQ ID NO: 360564 - RNA, 18 nt, Human
ccaaagggaggggggcgg

SEQ ID NO: 360565 - RNA, 32 nt, Human
ccaaagggauuccaaggcuaaaucuuuguaac

SEQ ID NO: 360566 - RNA, 24 nt, Human
ccaaagggcuagaauuacaggugu

SEQ ID NO: 360567 - RNA, 32 nt, Human
ccaaagggcugaggcagggaggccgugggcca

SEQ ID NO: 360568 - RNA, 24 nt, Human
ccaaagggcugggauuacaggugu

SEQ ID NO: 360569 - RNA, 32 nt, Human
ccaaaggggaaagacuugaugguacguggagc

SEQ ID NO: 360570 - RNA, 32 nt, Human
ccaaaggggcagagggugguggagaggagagg

SEQ ID NO: 360571 - RNA, 21 nt, Human
ccaaaggggccauggaagguu

SEQ ID NO: 360572 - RNA, 32 nt, Human
ccaaaggguaauccccaagacaauggguaaaa

SEQ ID NO: 360573 - RNA, 24 nt, Human
ccaaaggguugggauuacaggugu

SEQ ID NO: 360574 - RNA, 22 nt, Human
ccaaaggguugggauuaccggc

SEQ ID NO: 360575 - RNA, 32 nt, Human
ccaaagguaaagcccaucacuucuagagggag

SEQ ID NO: 360576 - RNA, 32 nt, Human
ccaaagguagguguccaugcagauuuuauugg

SEQ ID NO: 360577 - RNA, 20 nt, Human
ccaaagguggagguugcagu

SEQ ID NO: 360578 - RNA, 32 nt, Human
ccaaagguuuggaagauggaaaaaggaaucca

SEQ ID NO: 360579 - RNA, 32 nt, Human
ccaaagguuuugggcaguggcagcagcaggag

SEQ ID NO: 360580 - RNA, 32 nt, Human
ccaaaguaaaacauuaggucaggcaugguggc

SEQ ID NO: 360581 - RNA, 32 nt, Human
ccaaaguaaauucagggccccauugcuacuua

SEQ ID NO: 360582 - RNA, 24 nt, Human
ccaaaguacugggacuacaggcgu

SEQ ID NO: 360583 - RNA, 22 nt, Human
ccaaaguacugggauuacaggc

SEQ ID NO: 360584 - RNA, 24 nt, Human
ccaaaguacugggauuacaggcgu

SEQ ID NO: 360585 - RNA, 23 nt, Human
ccaaaguacugggauuacaggug

SEQ ID NO: 360586 - RNA, 22 nt, Human
ccaaaguacugggauuauaggc

SEQ ID NO: 360587 - RNA, 24 nt, Human
ccaaaguacugggauuauaggugu

SEQ ID NO: 360588 - RNA, 23 nt, Human
ccaaaguagcugggauuacaggc

SEQ ID NO: 360589 - RNA, 32 nt, Human
ccaaaguauacagccuggagugaauguuaaua

SEQ ID NO: 360590 - RNA, 24 nt, Human
ccaaaguauugggacuacaggcgu

SEQ ID NO: 360591 - RNA, 32 nt, Human
ccaaagucacagguuuuucacgacugaaaaca

SEQ ID NO: 360592 - RNA, 32 nt, Human
ccaaagucaccaguucagaagugcuaagcuaa

SEQ ID NO: 360593 - RNA, 32 nt, Human
ccaaagucacccagcugaacagugguagaguu

SEQ ID NO: 360594 - RNA, 32 nt, Human
ccaaagucacuuccccaagaucugccagaccu

SEQ ID NO: 360595 - RNA, 32 nt, Human
ccaaagucagcugucuccugcuuucuugcccu

SEQ ID NO: 360596 - RNA, 32 nt, Human
ccaaagucaugucugcuuccucugccuccagc

SEQ ID NO: 360597 - RNA, 32 nt, Human
ccaaaguccaaucaagugauccugggaaacaa

SEQ ID NO: 360598 - RNA, 32 nt, Human
ccaaaguccacauucuuuguuauguguguuuu

SEQ ID NO: 360599 - RNA, 22 nt, Human
ccaaaguccugggauuacaggc

SEQ ID NO: 360600 - RNA, 24 nt, Human
ccaaaguccugggauuacaggugu

SEQ ID NO: 360601 - RNA, 32 nt, Human
ccaaagucuaaaagacuucuggucccaagcau

SEQ ID NO: 360602 - RNA, 32 nt, Human
ccaaagucuaccucaguggauggcagugugga

SEQ ID NO: 360603 - RNA, 32 nt, Human
ccaaagucugagccaccagccacaccugacag

SEQ ID NO: 360604 - RNA, 32 nt, Human
ccaaagucugcaaccuugauguucaggucaag

SEQ ID NO: 360605 - RNA, 32 nt, Human
ccaaagugaauccauuuuccaguucaaaaagu

SEQ ID NO: 360606 - RNA, 28 nt, Human
ccaaagugaccuggacaagauucauaga

SEQ ID NO: 360607 - RNA, 24 nt, Human
ccaaagugauggaauuacaggugu

SEQ ID NO: 360608 - RNA, 24 nt, Human
ccaaagugaugggauuacagaugu

SEQ ID NO: 360609 - RNA, 22 nt, Human
ccaaagugaugggauuacaggc

SEQ ID NO: 360610 - RNA, 24 nt, Human
ccaaagugaugggauuauaggcgu

SEQ ID NO: 360611 - RNA, 22 nt, Human
ccaaagugcagggauuacaggc

SEQ ID NO: 360612 - RNA, 32 nt, Human
ccaaagugccagccuucucuucugccuuaccu

SEQ ID NO: 360613 - RNA, 22 nt, Human
ccaaagugccaggauuacaggc

SEQ ID NO: 360614 - RNA, 32 nt, Human
ccaaagugcccggacccaaaacaggaaagugu

SEQ ID NO: 360615 - RNA, 22 nt, Human
ccaaagugccgagauuacagcg

SEQ ID NO: 360616 - RNA, 24 nt, Human
ccaaagugccgagauuacaggugu

SEQ ID NO: 360617 - RNA, 27 nt, Human
ccaaagugccgccgggauuacaggcgu

SEQ ID NO: 360618 - RNA, 32 nt, Human
ccaaagugccgccgggauuacaggcgugagcc

SEQ ID NO: 360619 - RNA, 22 nt, Human
ccaaagugccgggaugacaggc

SEQ ID NO: 360620 - RNA, 22 nt, Human
ccaaagugccgggauuacaggc

SEQ ID NO: 360621 - RNA, 24 nt, Human
ccaaagugccgggauuacaggcgu

SEQ ID NO: 360622 - RNA, 19 nt, Human
ccaaagugccucauaggca

SEQ ID NO: 360623 - RNA, 23 nt, Human
ccaaagugcgggauuacaagcgu

SEQ ID NO: 360624 - RNA, 22 nt, Human
ccaaagugcgguccacauacgu

SEQ ID NO: 360625 - RNA, 24 nt, Human
ccaaagugcuaggauaacaggugu

SEQ ID NO: 360626 - RNA, 23 nt, Human
ccaaagugcuaggauuacacagc

SEQ ID NO: 360627 - RNA, 20 nt, Human
ccaaagugcuaggauuacag

SEQ ID NO: 360628 - RNA, 23 nt, Human
ccaaagugcuaggauuacagaug

SEQ ID NO: 360629 - RNA, 23 nt, Human
ccaaagugcuaggauuacagcgu

SEQ ID NO: 360630 - RNA, 21 nt, Human
ccaaagugcuaggauuacagg

SEQ ID NO: 360631 - RNA, 22 nt, Human
ccaaagugcuaggauuacaggc

SEQ ID NO: 360632 - RNA, 24 nt, Human
ccaaagugcuaggauuacaggcgu

SEQ ID NO: 360633 - RNA, 22 nt, Human
ccaaagugcuaggauuacaggu

SEQ ID NO: 360634 - RNA, 24 nt, Human
ccaaagugcuaggauuacaggugu

SEQ ID NO: 360635 - RNA, 24 nt, Human
ccaaagugcuaggauuacgggugu

SEQ ID NO: 360636 - RNA, 24 nt, Human
ccaaagugcuaggauuauaggagu

SEQ ID NO: 360637 - RNA, 22 nt, Human
ccaaagugcuaggauuauaggc

SEQ ID NO: 360638 - RNA, 24 nt, Human
ccaaagugcuaggauuauaggcgu

SEQ ID NO: 360639 - RNA, 24 nt, Human
ccaaagugcuaggauuccaggcgu

SEQ ID NO: 360640 - RNA, 24 nt, Human
ccaaagugcuaggauuccaggugu

SEQ ID NO: 360641 - RNA, 20 nt, Human
ccaaagugcuaggguuacag

SEQ ID NO: 360642 - RNA, 22 nt, Human
ccaaagugcuaggguuacaggc

SEQ ID NO: 360643 - RNA, 22 nt, Human
ccaaagugcuagguuuacaggc

SEQ ID NO: 360644 - RNA, 24 nt, Human
ccaaagugcuaugauuacagacgu

SEQ ID NO: 360645 - RNA, 25 nt, Human
ccaaagugcucaggauuacaggcgu

SEQ ID NO: 360646 - RNA, 20 nt, Human
ccaaagugcucggauuacag

SEQ ID NO: 360647 - RNA, 24 nt, Human
ccaaagugcucggauuacaggugu

SEQ ID NO: 360648 - RNA, 22 nt, Human
ccaaagugcugaaauuacaggc

SEQ ID NO: 360649 - RNA, 19 nt, Human
ccaaagugcugacauaggc

SEQ ID NO: 360650 - RNA, 22 nt, Human
ccaaagugcugacauuacaggc

SEQ ID NO: 360651 - RNA, 24 nt, Human
ccaaagugcugagauuacaagcgu

SEQ ID NO: 360652 - RNA, 20 nt, Human
ccaaagugcugagauuacag

SEQ ID NO: 360653 - RNA, 24 nt, Human
ccaaagugcugagauuacagacgu

SEQ ID NO: 360654 - RNA, 24 nt, Human
ccaaagugcugagauuacagaugu

SEQ ID NO: 360655 - RNA, 24 nt, Human
ccaaagugcugagauuacaggagu

SEQ ID NO: 360656 - RNA, 22 nt, Human
ccaaagugcugagauuacaggc

SEQ ID NO: 360657 - RNA, 24 nt, Human
ccaaagugcugagauuacaggcgu

SEQ ID NO: 360658 - RNA, 32 nt, Human
ccaaagugcugagauuacaggcguggccacca

SEQ ID NO: 360659 - RNA, 24 nt, Human
ccaaagugcugagauuacaggugu

SEQ ID NO: 360660 - RNA, 22 nt, Human
ccaaagugcugagauuacuggc

SEQ ID NO: 360661 - RNA, 21 nt, Human
ccaaagugcugagauuauagg

SEQ ID NO: 360662 - RNA, 22 nt, Human
ccaaagugcugagauuauaggc

SEQ ID NO: 360663 - RNA, 24 nt, Human
ccaaagugcugagauuauaggcgu

SEQ ID NO: 360664 - RNA, 24 nt, Human
ccaaagugcugagauugcagaugu

SEQ ID NO: 360665 - RNA, 22 nt, Human
ccaaagugcugauauuacaggc

SEQ ID NO: 360666 - RNA, 24 nt, Human
ccaaagugcugcaguuacaggcgu

SEQ ID NO: 360667 - RNA, 24 nt, Human
ccaaagugcugccauuacaggcgu

SEQ ID NO: 360668 - RNA, 20 nt, Human
ccaaagugcugcgauuacag

SEQ ID NO: 360669 - RNA, 22 nt, Human
ccaaagugcugcgauuacaggc

SEQ ID NO: 360670 - RNA, 24 nt, Human
ccaaagugcugcgauuacaggcgu

SEQ ID NO: 360671 - RNA, 32 nt, Human
ccaaagugcugcugggauuacaggcgugagcc

SEQ ID NO: 360672 - RNA, 22 nt, Human
ccaaagugcuggaaccacaggc

SEQ ID NO: 360673 - RNA, 24 nt, Human
ccaaagugcuggaauaacaggugu

SEQ ID NO: 360674 - RNA, 24 nt, Human
ccaaagugcuggaaucacaggggu

SEQ ID NO: 360675 - RNA, 20 nt, Human
ccaaagugcuggaauuacag

SEQ ID NO: 360676 - RNA, 22 nt, Human
ccaaagugcuggaauuacaggc

SEQ ID NO: 360677 - RNA, 23 nt, Human
ccaaagugcuggaauuacaggcg

SEQ ID NO: 360678 - RNA, 24 nt, Human
ccaaagugcuggaauuacaggcgu

SEQ ID NO: 360679 - RNA, 24 nt, Human
ccaaagugcuggaauuacaggugu

SEQ ID NO: 360680 - RNA, 24 nt, Human
ccaaagugcuggaauuacaugggu

SEQ ID NO: 360681 - RNA, 32 nt, Human
ccaaagugcuggaauuacaugggugagcuacc

SEQ ID NO: 360682 - RNA, 22 nt, Human
ccaaagugcuggaauuacuggc

SEQ ID NO: 360683 - RNA, 22 nt, Human
ccaaagugcuggaauuagaggc

SEQ ID NO: 360684 - RNA, 22 nt, Human
ccaaagugcuggaauuauaggc

SEQ ID NO: 360685 - RNA, 24 nt, Human
ccaaagugcuggaauuauaggcgu

SEQ ID NO: 360686 - RNA, 24 nt, Human
ccaaagugcuggaauugcagacgu

SEQ ID NO: 360687 - RNA, 21 nt, Human
ccaaagugcuggaauugcagg

SEQ ID NO: 360688 - RNA, 22 nt, Human
ccaaagugcuggaauugcaggc

SEQ ID NO: 360689 - RNA, 22 nt, Human
ccaaagugcuggaauuuacagg

SEQ ID NO: 360690 - RNA, 23 nt, Human
ccaaagugcuggaauuuacaggu

SEQ ID NO: 360691 - RNA, 21 nt, Human
ccaaagugcuggauuacaggc

SEQ ID NO: 360692 - RNA, 23 nt, Human
ccaaagugcuggauuacaggcgu

SEQ ID NO: 360693 - RNA, 23 nt, Human
ccaaagugcuggauuacaggugu

SEQ ID NO: 360694 - RNA, 22 nt, Human
ccaaagugcuggcacuacaggc

SEQ ID NO: 360695 - RNA, 24 nt, Human
ccaaagugcuggcauuacaggcgu

SEQ ID NO: 360696 - RNA, 24 nt, Human
ccaaagugcuggcauuacaggugu

SEQ ID NO: 360697 - RNA, 24 nt, Human
ccaaagugcuggcauuucaggcgu

SEQ ID NO: 360698 - RNA, 22 nt, Human
ccaaagugcugggaauacaggc

SEQ ID NO: 360699 - RNA, 24 nt, Human
ccaaagugcugggaauacaggugu

SEQ ID NO: 360700 - RNA, 25 nt, Human
ccaaagugcugggaauuacaggcgu

SEQ ID NO: 360701 - RNA, 22 nt, Human
ccaaagugcugggacgugacag

SEQ ID NO: 360702 - RNA, 22 nt, Human
ccaaagugcugggacuacaggc

SEQ ID NO: 360703 - RNA, 24 nt, Human
ccaaagugcugggacuauaagugu

SEQ ID NO: 360704 - RNA, 22 nt, Human
ccaaagugcugggagccacugc

SEQ ID NO: 360705 - RNA, 24 nt, Human
ccaaagugcugggauaauaggugu

SEQ ID NO: 360706 - RNA, 24 nt, Human
ccaaagugcugggaucacagacgu

SEQ ID NO: 360707 - RNA, 22 nt, Human
ccaaagugcugggaucacaggc

SEQ ID NO: 360708 - RNA, 23 nt, Human
ccaaagugcugggaucacaggcg

SEQ ID NO: 360709 - RNA, 24 nt, Human
ccaaagugcugggaucacaggcgu

SEQ ID NO: 360710 - RNA, 23 nt, Human
ccaaagugcugggaugacagcgu

SEQ ID NO: 360711 - RNA, 21 nt, Human
ccaaagugcugggaugacagg

SEQ ID NO: 360712 - RNA, 22 nt, Human
ccaaagugcugggaugacaggc

SEQ ID NO: 360713 - RNA, 24 nt, Human
ccaaagugcugggaugacaggcgu

SEQ ID NO: 360714 - RNA, 24 nt, Human
ccaaagugcugggaugacaggugu

SEQ ID NO: 360715 - RNA, 22 nt, Human
ccaaagugcugggaugaccagc

SEQ ID NO: 360716 - RNA, 24 nt, Human
ccaaagugcugggaugauaggcgu

SEQ ID NO: 360717 - RNA, 24 nt, Human
ccaaagugcugggaugccaggcgu

SEQ ID NO: 360718 - RNA, 21 nt, Human
ccaaagugcugggauuaaagc

SEQ ID NO: 360719 - RNA, 24 nt, Human
ccaaagugcugggauuaaaggcgu

SEQ ID NO: 360720 - RNA, 24 nt, Human
ccaaagugcugggauuaaaggugu

SEQ ID NO: 360721 - RNA, 23 nt, Human
ccaaagugcugggauuaacaggu

SEQ ID NO: 360722 - RNA, 25 nt, Human
ccaaagugcugggauuaacgggugu

SEQ ID NO: 360723 - RNA, 23 nt, Human
ccaaagugcugggauuaaggcgu

SEQ ID NO: 360724 - RNA, 24 nt, Human
ccaaagugcugggauuaauggcgu

SEQ ID NO: 360725 - RNA, 19 nt, Human
ccaaagugcugggauuaca

SEQ ID NO: 360726 - RNA, 22 nt, Human
ccaaagugcugggauuacaagc

SEQ ID NO: 360727 - RNA, 24 nt, Human
ccaaagugcugggauuacaagcgu

SEQ ID NO: 360728 - RNA, 24 nt, Human
ccaaagugcugggauuacaagggu

SEQ ID NO: 360729 - RNA, 22 nt, Human
ccaaagugcugggauuacaagu

SEQ ID NO: 360730 - RNA, 24 nt, Human
ccaaagugcugggauuacaagugu

SEQ ID NO: 360731 - RNA, 20 nt, Human
ccaaagugcugggauuacag

SEQ ID NO: 360732 - RNA, 24 nt, Human
ccaaagugcugggauuacagacgu

SEQ ID NO: 360733 - RNA, 24 nt, Human
ccaaagugcugggauuacagaugu

SEQ ID NO: 360734 - RNA, 21 nt, Human
ccaaagugcugggauuacagc

SEQ ID NO: 360735 - RNA, 24 nt, Human
ccaaagugcugggauuacagccgu

SEQ ID NO: 360736 - RNA, 22 nt, Human
ccaaagugcugggauuacagcg

SEQ ID NO: 360737 - RNA, 23 nt, Human
ccaaagugcugggauuacagcgu

SEQ ID NO: 360738 - RNA, 24 nt, Human
ccaaagugcugggauuacagcugu

SEQ ID NO: 360739 - RNA, 21 nt, Human
ccaaagugcugggauuacagg

SEQ ID NO: 360740 - RNA, 24 nt, Human
ccaaagugcugggauuacaggagu

SEQ ID NO: 360741 - RNA, 22 nt, Human
ccaaagugcugggauuacaggc

SEQ ID NO: 360742 - RNA, 23 nt, Human
ccaaagugcugggauuacaggca

SEQ ID NO: 360743 - RNA, 32 nt, Human
ccaaagugcugggauuacaggcauggccacca

SEQ ID NO: 360744 - RNA, 23 nt, Human
ccaaagugcugggauuacaggcg

SEQ ID NO: 360745 - RNA, 24 nt, Human
ccaaagugcugggauuacaggcgu

SEQ ID NO: 360746 - RNA, 23 nt, Human
ccaaagugcugggauuacagggc

SEQ ID NO: 360747 - RNA, 24 nt, Human
ccaaagugcugggauuacaggggu

SEQ ID NO: 360748 - RNA, 22 nt, Human
ccaaagugcugggauuacaggu

SEQ ID NO: 360749 - RNA, 23 nt, Human
ccaaagugcugggauuacaggug

SEQ ID NO: 360750 - RNA, 24 nt, Human
ccaaagugcugggauuacaggugu

SEQ ID NO: 360751 - RNA, 32 nt, Human
ccaaagugcugggauuacagguguggccaccg

SEQ ID NO: 360752 - RNA, 24 nt, Human
ccaaagugcugggauuacagucgu

SEQ ID NO: 360753 - RNA, 24 nt, Human
ccaaagugcugggauuacaguugu

SEQ ID NO: 360754 - RNA, 24 nt, Human
ccaaagugcugggauuacaugcgu

SEQ ID NO: 360755 - RNA, 22 nt, Human
ccaaagugcugggauuaccagc

SEQ ID NO: 360756 - RNA, 22 nt, Human
ccaaagugcugggauuaccggc

SEQ ID NO: 360757 - RNA, 22 nt, Human
ccaaagugcugggauuaccggu

SEQ ID NO: 360758 - RNA, 24 nt, Human
ccaaagugcugggauuacgagcgu

SEQ ID NO: 360759 - RNA, 24 nt, Human
ccaaagugcugggauuacggacgu

SEQ ID NO: 360760 - RNA, 22 nt, Human
ccaaagugcugggauuacgggc

SEQ ID NO: 360761 - RNA, 24 nt, Human
ccaaagugcugggauuacgggcgu

SEQ ID NO: 360762 - RNA, 24 nt, Human
ccaaagugcugggauuacuagacg

SEQ ID NO: 360763 - RNA, 22 nt, Human
ccaaagugcugggauuacuggc

SEQ ID NO: 360764 - RNA, 24 nt, Human
ccaaagugcugggauuacuggcgu

SEQ ID NO: 360765 - RNA, 24 nt, Human
ccaaagugcugggauuagaagcgu

SEQ ID NO: 360766 - RNA, 22 nt, Human
ccaaagugcugggauuagaggc

SEQ ID NO: 360767 - RNA, 24 nt, Human
ccaaagugcugggauuagaggcgu

SEQ ID NO: 360768 - RNA, 22 nt, Human
ccaaagugcugggauuaggugu

SEQ ID NO: 360769 - RNA, 22 nt, Human
ccaaagugcugggauuauacgu

SEQ ID NO: 360770 - RNA, 20 nt, Human
ccaaagugcugggauuauag

SEQ ID NO: 360771 - RNA, 24 nt, Human
ccaaagugcugggauuauagaugu

SEQ ID NO: 360772 - RNA, 22 nt, Human
ccaaagugcugggauuauaggc

SEQ ID NO: 360773 - RNA, 24 nt, Human
ccaaagugcugggauuauaggcgu

SEQ ID NO: 360774 - RNA, 24 nt, Human
ccaaagugcugggauuauaggugu

SEQ ID NO: 360775 - RNA, 23 nt, Human
ccaaagugcugggauuaugggcg

SEQ ID NO: 360776 - RNA, 24 nt, Human
ccaaagugcugggauuaugggcgu

SEQ ID NO: 360777 - RNA, 20 nt, Human
ccaaagugcugggauuccag

SEQ ID NO: 360778 - RNA, 24 nt, Human
ccaaagugcugggauuccaggugu

SEQ ID NO: 360779 - RNA, 24 nt, Human
ccaaagugcugggauucugggugu

SEQ ID NO: 360780 - RNA, 23 nt, Human
ccaaagugcugggauugcagcgu

SEQ ID NO: 360781 - RNA, 22 nt, Human
ccaaagugcugggauugcaggc

SEQ ID NO: 360782 - RNA, 24 nt, Human
ccaaagugcugggauugcaggcgu

SEQ ID NO: 360783 - RNA, 24 nt, Human
ccaaagugcugggauugcaggggu

SEQ ID NO: 360784 - RNA, 23 nt, Human
ccaaagugcugggauugcaggug

SEQ ID NO: 360785 - RNA, 24 nt, Human
ccaaagugcugggauugcaggugu

SEQ ID NO: 360786 - RNA, 20 nt, Human
ccaaagugcugggauuguag

SEQ ID NO: 360787 - RNA, 22 nt, Human
ccaaagugcugggauugugggc

SEQ ID NO: 360788 - RNA, 22 nt, Human
ccaaagugcugggcuuacaggc

SEQ ID NO: 360789 - RNA, 25 nt, Human
ccaaagugcugggggcuacaggugu

SEQ ID NO: 360790 - RNA, 20 nt, Human
ccaaagugcugggguuacag

SEQ ID NO: 360791 - RNA, 24 nt, Human
ccaaagugcugggguuacaggugu

SEQ ID NO: 360792 - RNA, 22 nt, Human
ccaaagugcuggguuaacaggc

SEQ ID NO: 360793 - RNA, 24 nt, Human
ccaaagugcuggguuuaccagcgu

SEQ ID NO: 360794 - RNA, 20 nt, Human
ccaaagugcugguauuacag

SEQ ID NO: 360795 - RNA, 24 nt, Human
ccaaagugcugguauuacagaugu

SEQ ID NO: 360796 - RNA, 24 nt, Human
ccaaagugcugguauuacaggcgu

SEQ ID NO: 360797 - RNA, 22 nt, Human
ccaaagugcuguaauuacaggc

SEQ ID NO: 360798 - RNA, 22 nt, Human
ccaaagugcugugauuacaggc

SEQ ID NO: 360799 - RNA, 24 nt, Human
ccaaagugcugugauuacaggugu

SEQ ID NO: 360800 - RNA, 22 nt, Human
ccaaagugcugugcauacaggc

SEQ ID NO: 360801 - RNA, 22 nt, Human
ccaaagugcuguuacuacaggu

SEQ ID NO: 360802 - RNA, 18 nt, Human
ccaaagugcuuccaaggc

SEQ ID NO: 360803 - RNA, 22 nt, Human
ccaaagugcuuggauuacaggc

SEQ ID NO: 360804 - RNA, 24 nt, Human
ccaaagugcuuggauuacaggugu

SEQ ID NO: 360805 - RNA, 32 nt, Human
ccaaagugggccgaucaccugagcucaggaau

SEQ ID NO: 360806 - RNA, 32 nt, Human
ccaaagugggcggaucaccugaggccaggagu

SEQ ID NO: 360807 - RNA, 32 nt, Human
ccaaaguggguaguauaguccucaaauaucgg

SEQ ID NO: 360808 - RNA, 32 nt, Human
ccaaaguggguggaucaccugaggucaggagu

SEQ ID NO: 360809 - RNA, 23 nt, Human
ccaaaguggguggauugcuugag

SEQ ID NO: 360810 - RNA, 22 nt, Human
ccaaaguggguggcuuaccaga

SEQ ID NO: 360811 - RNA, 32 nt, Human
ccaaaguggguuauuucaaggcauuuuugaag

SEQ ID NO: 360812 - RNA, 20 nt, Human
ccaaaguggugaaacccugu

SEQ ID NO: 360813 - RNA, 24 nt, Human
ccaaaguggugggaucacaggcgu

SEQ ID NO: 360814 - RNA, 24 nt, Human
ccaaaguggugggauuacaggugu

SEQ ID NO: 360815 - RNA, 32 nt, Human
ccaaagugucugcaauggacaacaauugaagg

SEQ ID NO: 360816 - RNA, 23 nt, Human
ccaaaguguggggauuacaggug

SEQ ID NO: 360817 - RNA, 32 nt, Human
ccaaagugugugacuagucaaugaagugcgac

SEQ ID NO: 360818 - RNA, 22 nt, Human
ccaaaguguuaggauuacaggc

SEQ ID NO: 360819 - RNA, 24 nt, Human
ccaaaguguuaggauuacaggcgu

SEQ ID NO: 360820 - RNA, 24 nt, Human
ccaaaguguuaggauuauaggcgu

SEQ ID NO: 360821 - RNA, 32 nt, Human
ccaaaguguucaauuauccuugcaaguucaaa

SEQ ID NO: 360822 - RNA, 24 nt, Human
ccaaaguguucagauuacaggugu

SEQ ID NO: 360823 - RNA, 24 nt, Human
ccaaaguguucggauuacaaacgu

SEQ ID NO: 360824 - RNA, 22 nt, Human
ccaaaguguugagauuacaggc

SEQ ID NO: 360825 - RNA, 24 nt, Human
ccaaaguguuggaauuacaggcgu

SEQ ID NO: 360826 - RNA, 20 nt, Human
ccaaaguguugggauuacag

SEQ ID NO: 360827 - RNA, 21 nt, Human
ccaaaguguugggauuacagg

SEQ ID NO: 360828 - RNA, 22 nt, Human
ccaaaguguugggauuacaggc

SEQ ID NO: 360829 - RNA, 24 nt, Human
ccaaaguguugggauuacaggcgu

SEQ ID NO: 360830 - RNA, 24 nt, Human
ccaaaguguugggauuacaggugu

SEQ ID NO: 360831 - RNA, 24 nt, Human
ccaaaguguugggauuauaagcgu

SEQ ID NO: 360832 - RNA, 22 nt, Human
ccaaaguguugggauuauaggc

SEQ ID NO: 360833 - RNA, 24 nt, Human
ccaaaguguugggauuauaggcgu

SEQ ID NO: 360834 - RNA, 22 nt, Human
ccaaaguguugggauugcaggc

SEQ ID NO: 360835 - RNA, 32 nt, Human
ccaaaguuaagcaaaugacaccauuuucuucc

SEQ ID NO: 360836 - RNA, 32 nt, Human
ccaaaguuagaggugugucuucaugguuccca

SEQ ID NO: 360837 - RNA, 32 nt, Human
ccaaaguuaucagcuacccauaccucauguuu

SEQ ID NO: 360838 - RNA, 22 nt, Human
ccaaaguucagggauuacaggc

SEQ ID NO: 360839 - RNA, 24 nt, Human
ccaaaguucuaggauuacaggugu

SEQ ID NO: 360840 - RNA, 24 nt, Human
ccaaaguucugggauuacaagugu

SEQ ID NO: 360841 - RNA, 22 nt, Human
ccaaaguucugggauuacaggc

SEQ ID NO: 360842 - RNA, 24 nt, Human
ccaaaguucugggauuacaggcgu

SEQ ID NO: 360843 - RNA, 24 nt, Human
ccaaaguucugggauuacaggggu

SEQ ID NO: 360844 - RNA, 23 nt, Human
ccaaaguucugggauuacagggu

SEQ ID NO: 360845 - RNA, 24 nt, Human
ccaaaguucugggauuacaggugu

SEQ ID NO: 360846 - RNA, 32 nt, Human
ccaaaguucuuccaguccuccuaggcaucuua

SEQ ID NO: 360847 - RNA, 32 nt, Human
ccaaaguuggagccuggcaugggcagggagcc

SEQ ID NO: 360848 - RNA, 21 nt, Human
ccaaaguugugggacauguug

SEQ ID NO: 360849 - RNA, 32 nt, Human
ccaaaguuucucuuugucauaacccuggucug

SEQ ID NO: 360850 - RNA, 32 nt, Human
ccaaaguuuucugaagcacagaguccaucuca

SEQ ID NO: 360851 - RNA, 24 nt, Human
ccaaaguuuugggauuacaagugu

SEQ ID NO: 360852 - RNA, 32 nt, Human
ccaaauaaaaaggcaaacaacaugacauuucu

SEQ ID NO: 360853 - RNA, 32 nt, Human
ccaaauaaacagccuuuucccuaacaaaguaa

SEQ ID NO: 360854 - RNA, 32 nt, Human
ccaaauaaacauccuuuucccuaacaaaguaa

SEQ ID NO: 360855 - RNA, 19 nt, Human
ccaaauaaauaccuugcca

SEQ ID NO: 360856 - RNA, 32 nt, Human
ccaaauaagaaggcaggagcugcuugcugagg

SEQ ID NO: 360857 - RNA, 32 nt, Human
ccaaauaaguacagucaucuucucuaguucuc

SEQ ID NO: 360858 - RNA, 32 nt, Human
ccaaauaauguaaaaccucaaaagcaagggcu

SEQ ID NO: 360859 - RNA, 19 nt, Human
ccaaauacccacccugcca

SEQ ID NO: 360860 - RNA, 32 nt, Human
ccaaauaccugaggaagccacaguccauggca

SEQ ID NO: 360861 - RNA, 32 nt, Human
ccaaauacucaaaguuuacguaaugaaaauua

SEQ ID NO: 360862 - RNA, 32 nt, Human
ccaaauacucaccuauucucucucacaugaug

SEQ ID NO: 360863 - RNA, 32 nt, Human
ccaaauacuugcagggaguaguuuuccgcugu

SEQ ID NO: 360864 - RNA, 31 nt, Human
ccaaauacuuuuuaugaacauuuaaaacaag

SEQ ID NO: 360865 - RNA, 32 nt, Human
ccaaauagaccagaauuggcccauaccauaga

SEQ ID NO: 360866 - RNA, 32 nt, Human
ccaaauagacuugccugaugccaggcugcuac

SEQ ID NO: 360867 - RNA, 22 nt, Human
ccaaauagccacacuguguccu

SEQ ID NO: 360868 - RNA, 24 nt, Human
ccaaauagcuaggacuacaggcgu

SEQ ID NO: 360869 - RNA, 24 nt, Human
ccaaauagcugggaccacaggugu

SEQ ID NO: 360870 - RNA, 23 nt, Human
ccaaauagcugggauuacaggug

SEQ ID NO: 360871 - RNA, 24 nt, Human
ccaaauagcugugauuacaggcgu

SEQ ID NO: 360872 - RNA, 32 nt, Human
ccaaauagcuuuuauaguaaaccauguaauga

SEQ ID NO: 360873 - RNA, 22 nt, Human
ccaaauaguugggauuacaggc

SEQ ID NO: 360874 - RNA, 19 nt, Human
ccaaauaugacacuggcca

SEQ ID NO: 360875 - RNA, 32 nt, Human
ccaaauauggaacuaacuggagaaggugcacg

SEQ ID NO: 360876 - RNA, 19 nt, Human
ccaaauauguauuuuccua

SEQ ID NO: 360877 - RNA, 32 nt, Human
ccaaauauucccagcaguugcugacagugaga

SEQ ID NO: 360878 - RNA, 32 nt, Human
ccaaauauuuaaaagaaguuauuccuugagaa

SEQ ID NO: 360879 - RNA, 32 nt, Human
ccaaaucaacagaauauacauucuucucagca

SEQ ID NO: 360880 - RNA, 32 nt, Human
ccaaaucaaucaggcccauccaucccaugccu

SEQ ID NO: 360881 - RNA, 32 nt, Human
ccaaaucacagccccguuuugucacaggggaa

SEQ ID NO: 360882 - RNA, 32 nt, Human
ccaaaucacaucucaccuccgaacuguucaag

SEQ ID NO: 360883 - RNA, 22 nt, Human
ccaaaucacugggauuauaggc

SEQ ID NO: 360884 - RNA, 19 nt, Human
ccaaaucaugauacaagaa

SEQ ID NO: 360885 - RNA, 32 nt, Human
ccaaauccagugagcuccagauucuuccaagg

SEQ ID NO: 360886 - RNA, 32 nt, Human
ccaaaucccccugggcaggaggcaguggagaa

SEQ ID NO: 360887 - RNA, 32 nt, Human
ccaaauccccgcgccaucagccuggaugggca

SEQ ID NO: 360888 - RNA, 32 nt, Human
ccaaaucgccuaauaaacuuuccucuugcaaa

SEQ ID NO: 360889 - RNA, 32 nt, Human
ccaaaucucaaagcaaugagaagcauuccuaa

SEQ ID NO: 360890 - RNA, 32 nt, Human
ccaaaucucacuggcugaccugguggccgugg

SEQ ID NO: 360891 - RNA, 32 nt, Human
ccaaaucugaaaucugaaauguucaugagcau

SEQ ID NO: 360892 - RNA, 32 nt, Human
ccaaaucugcaagcuccuguuuuacuguagaa

SEQ ID NO: 360893 - RNA, 32 nt, Human
ccaaaucugcacguaccagcagucagccgccc

SEQ ID NO: 360894 - RNA, 32 nt, Human
ccaaaucugcauugcaaugagacccccaggga

SEQ ID NO: 360895 - RNA, 32 nt, Human
ccaaaucugccuggcccucggaccccucugcc

SEQ ID NO: 360896 - RNA, 32 nt, Human
ccaaaucugucccaccaccuguuuucauaugg

SEQ ID NO: 360897 - RNA, 32 nt, Human
ccaaaucuuaacucauuuuagcauuaacucaa

SEQ ID NO: 360898 - RNA, 32 nt, Human
ccaaaucuucccgacagccaacagguuuccag

SEQ ID NO: 360899 - RNA, 32 nt, Human
ccaaaucuuccucuggagcuuugcagccaagg

SEQ ID NO: 360900 - RNA, 32 nt, Human
ccaaaucuugguggaagagcccaggggcuggu

SEQ ID NO: 360901 - RNA, 32 nt, Human
ccaaaugaacuccacuuacuugcucagucuuc

SEQ ID NO: 360902 - RNA, 32 nt, Human
ccaaaugacauggcacaugugugcccagacca

SEQ ID NO: 360903 - RNA, 25 nt, Human
ccaaaugagagagaaacuaugggaa

SEQ ID NO: 360904 - RNA, 32 nt, Human
ccaaaugagccacaacacccagccagucacau

SEQ ID NO: 360905 - RNA, 32 nt, Human
ccaaaugauacaggcaagguuucugcagaucu

SEQ ID NO: 360906 - RNA, 32 nt, Human
ccaaaugaucagucucugucuccugggcccug

SEQ ID NO: 360907 - RNA, 32 nt, Human
ccaaaugauucaguccuugaaaacaagucucu

SEQ ID NO: 360908 - RNA, 20 nt, Human
ccaaaugauucauuuuccua

SEQ ID NO: 360909 - RNA, 32 nt, Human
ccaaaugcacugccuuucucuguccccaugac

SEQ ID NO: 360910 - RNA, 32 nt, Human
ccaaaugcagggaggggaggcagauggagccc

SEQ ID NO: 360911 - RNA, 31 nt, Human
ccaaaugccaaugguacccuguugagaaagg

SEQ ID NO: 360912 - RNA, 32 nt, Human
ccaaaugccauccagaugugugcaauguggca

SEQ ID NO: 360913 - RNA, 32 nt, Human
ccaaaugccugggcacccuguucccuccugau

SEQ ID NO: 360914 - RNA, 32 nt, Human
ccaaaugcuaugaacggcccuuucuuaaagac

SEQ ID NO: 360915 - RNA, 32 nt, Human
ccaaaugcugagugagugccagaaacacaaug

SEQ ID NO: 360916 - RNA, 27 nt, Human
ccaaaugcugauucugucaggcacuga

SEQ ID NO: 360917 - RNA, 19 nt, Human
ccaaaugcugggauuacag

SEQ ID NO: 360918 - RNA, 29 nt, Human
ccaaaugcugggcucaggccugggugcug

SEQ ID NO: 360919 - RNA, 27 nt, Human
ccaaaugcuguccuuucccuuacagag

SEQ ID NO: 360920 - RNA, 32 nt, Human
ccaaauggagaguguagccuggggcugguguu

SEQ ID NO: 360921 - RNA, 32 nt, Human
ccaaauggcagaggcagggucgcugguccucc

SEQ ID NO: 360922 - RNA, 32 nt, Human
ccaaauggcuaacauucaugaccucaguaucc

SEQ ID NO: 360923 - RNA, 32 nt, Human
ccaaaugggauaugcaggguugcacugugcag

SEQ ID NO: 360924 - RNA, 32 nt, Human
ccaaauggggaaagaggaagggaacugucuaa

SEQ ID NO: 360925 - RNA, 32 nt, Human
ccaaaugguccauuugaaugcaucccuaauau

SEQ ID NO: 360926 - RNA, 20 nt, Human
ccaaauggugaaaccccauc

SEQ ID NO: 360927 - RNA, 19 nt, Human
ccaaauggugaaacccugu

SEQ ID NO: 360928 - RNA, 32 nt, Human
ccaaauguccacgcccagaacaacaguuggca

SEQ ID NO: 360929 - RNA, 32 nt, Human
ccaaaugugccauuaagauuuggaugggaagu

SEQ ID NO: 360930 - RNA, 32 nt, Human
ccaaauguggucucuuaagggaagaugagggu

SEQ ID NO: 360931 - RNA, 32 nt, Human
ccaaauguuagaaaaauagcugugaacagaga

SEQ ID NO: 360932 - RNA, 20 nt, Human
ccaaauguucucuacaugaa

SEQ ID NO: 360933 - RNA, 32 nt, Human
ccaaauguugggguagggaagggaggggaagc

SEQ ID NO: 360934 - RNA, 32 nt, Human
ccaaauguuuccagugauauguuuuccuggga

SEQ ID NO: 360935 - RNA, 23 nt, Human
ccaaauuaaaauccugauguuca

SEQ ID NO: 360936 - RNA, 23 nt, Human
ccaaauuaacaagacacaggcac

SEQ ID NO: 360937 - RNA, 32 nt, Human
ccaaauuacacaauuuuacuuuugaaaauauu

SEQ ID NO: 360938 - RNA, 31 nt, Human
ccaaauuacacugaaucuaggaggggaguug

SEQ ID NO: 360939 - RNA, 32 nt, Human
ccaaauuacagauucagauuugcccaguuccu

SEQ ID NO: 360940 - RNA, 32 nt, Human
ccaaauuagcaacuaccagaccucacguguug

SEQ ID NO: 360941 - RNA, 32 nt, Human
ccaaauuagcuccacuaagaugaagaagaggg

SEQ ID NO: 360942 - RNA, 32 nt, Human
ccaaauucaaagaaaacccuaaguguggaugu

SEQ ID NO: 360943 - RNA, 32 nt, Human
ccaaauucaagcauuucaucucaagaguugua

SEQ ID NO: 360944 - RNA, 32 nt, Human
ccaaauucagaaagauuuccaucauuauccag

SEQ ID NO: 360945 - RNA, 32 nt, Human
ccaaauucaguuaaccuauuuugugucuguag

SEQ ID NO: 360946 - RNA, 32 nt, Human
ccaaauuccagcugccgcucuaguugcuucug

SEQ ID NO: 360947 - RNA, 32 nt, Human
ccaaauucccccaaagacaggagguguggcug

SEQ ID NO: 360948 - RNA, 32 nt, Human
ccaaauucuggcuucacauuuguauuuagggc

SEQ ID NO: 360949 - RNA, 32 nt, Human
ccaaauucuuuuggugcaauugaggagauaug

SEQ ID NO: 360950 - RNA, 32 nt, Human
ccaaauugcccuuguguuucucuccacccaaa

SEQ ID NO: 360951 - RNA, 22 nt, Human
ccaaauugccgggauuacaggc

SEQ ID NO: 360952 - RNA, 32 nt, Human
ccaaauugcuccccaccucccaucccuguuuu

SEQ ID NO: 360953 - RNA, 22 nt, Human
ccaaauugcugggauuacaggc

SEQ ID NO: 360954 - RNA, 24 nt, Human
ccaaauugcugggauuacaggugu

SEQ ID NO: 360955 - RNA, 22 nt, Human
ccaaauugcugggauuccaggc

SEQ ID NO: 360956 - RNA, 23 nt, Human
ccaaauugcugggauuuacaggc

SEQ ID NO: 360957 - RNA, 32 nt, Human
ccaaauuguauggaugggagggagaggugucu

SEQ ID NO: 360958 - RNA, 24 nt, Human
ccaaauuguugggauuauaggcgu

SEQ ID NO: 360959 - RNA, 25 nt, Human
ccaaauuucaaaggaacuuuuugug

SEQ ID NO: 360960 - RNA, 32 nt, Human
ccaaauuucucacaguaaaaucaaggcaguaa

SEQ ID NO: 360961 - RNA, 32 nt, Human
ccaaauuucucauucuucaggccaggaaaccg

SEQ ID NO: 360962 - RNA, 32 nt, Human
ccaaauuucugaagaaacuaaucucagauugg

SEQ ID NO: 360963 - RNA, 32 nt, Human
ccaaauuugcccaccaccuguaucuguaaaua

SEQ ID NO: 360964 - RNA, 32 nt, Human
ccaaauuugccucaccccaggcaguaauuuuu

SEQ ID NO: 360965 - RNA, 18 nt, Human
ccaaauuugcuauuccca

SEQ ID NO: 360966 - RNA, 31 nt, Human
ccaaauuuggaguaaagaugggagaaaauaa

SEQ ID NO: 360967 - RNA, 32 nt, Human
ccaaauuugucguagacuugugcaauauauac

SEQ ID NO: 360968 - RNA, 32 nt, Human
ccaaauuuuauggucuuccaggaaaaguuauu

SEQ ID NO: 360969 - RNA, 32 nt, Human
ccaaauuuucaucacgaaguggagauuuggac

SEQ ID NO: 360970 - RNA, 32 nt, Human
ccaacaaaacucaaggguagaggcuagaacag

SEQ ID NO: 360971 - RNA, 31 nt, Human
ccaacaaacaagggaacuaggaccgacagug

SEQ ID NO: 360972 - RNA, 32 nt, Human
ccaacaaagauggcugggcaugguggcucaga

SEQ ID NO: 360973 - RNA, 32 nt, Human
ccaacaaaggucacuaaggaaaccuguugacu

SEQ ID NO: 360974 - RNA, 23 nt, Human
ccaacaaauuguacagcugcaca

SEQ ID NO: 360975 - RNA, 32 nt, Human
ccaacaacacccugguuuggagcugggaggaa

SEQ ID NO: 360976 - RNA, 22 nt, Human
ccaacaacaguuaaaacuuuga

SEQ ID NO: 360977 - RNA, 19 nt, Human
ccaacaacauccucugcca

SEQ ID NO: 360978 - RNA, 32 nt, Human
ccaacaacccagagcagguguugcagacagga

SEQ ID NO: 360979 - RNA, 32 nt, Human
ccaacaacgcuuguagagcucagucugggcug

SEQ ID NO: 360980 - RNA, 32 nt, Human
ccaacaacugcacuuuagaauaccagcaguga

SEQ ID NO: 360981 - RNA, 32 nt, Human
ccaacaacugucccuccuugagcaccagcccc

SEQ ID NO: 360982 - RNA, 32 nt, Human
ccaacaagacaacauggcucccaagaagccug

SEQ ID NO: 360983 - RNA, 19 nt, Human
ccaacaagagcacauuuua

SEQ ID NO: 360984 - RNA, 15 nt, Human
ccaacaagagcacug

SEQ ID NO: 360985 - RNA, 32 nt, Human
ccaacaaggcagcugauuccaggccugcucag

SEQ ID NO: 360986 - RNA, 32 nt, Human
ccaacaauauccaccucaccaaauucuaguuc

SEQ ID NO: 360987 - RNA, 22 nt, Human
ccaacaaugacuuucagucaaa

SEQ ID NO: 360988 - RNA, 22 nt, Human
ccaacaauggaaaaaugucaaa

SEQ ID NO: 360989 - RNA, 32 nt, Human
ccaacaaugggaugagacuugacaucuggaau

SEQ ID NO: 360990 - RNA, 32 nt, Human
ccaacaauuuccucuucugccaauuaaccacu

SEQ ID NO: 360991 - RNA, 18 nt, Human
ccaacacacacaugcaca

SEQ ID NO: 360992 - RNA, 18 nt, Human
ccaacacacauacucaca

SEQ ID NO: 360993 - RNA, 18 nt, Human
ccaacacacauaugcaca

SEQ ID NO: 360994 - RNA, 18 nt, Human
ccaacacaccucuccaca

SEQ ID NO: 360995 - RNA, 32 nt, Human
ccaacacacgaguguucacccgccuggaugag

SEQ ID NO: 360996 - RNA, 32 nt, Human
ccaacacacgguuuaauuuucauggggcucug

SEQ ID NO: 360997 - RNA, 18 nt, Human
ccaacacacuccugcaca

SEQ ID NO: 360998 - RNA, 18 nt, Human
ccaacacacugcaccaca

SEQ ID NO: 360999 - RNA, 32 nt, Human
ccaacacacuggaucauccuucaaaagcuucu

SEQ ID NO: 361000 - RNA, 22 nt, Human
ccaacacagacagauugcuccu

SEQ ID NO: 361001 - RNA, 17 nt, Human
ccaacacagagcucaca

SEQ ID NO: 361002 - RNA, 32 nt, Human
ccaacacagcaugguacugguaccaacacaga

SEQ ID NO: 361003 - RNA, 32 nt, Human
ccaacacagccaaccuagccugugcagccucc

SEQ ID NO: 361004 - RNA, 24 nt, Human
ccaacacaggaggaucacuugaga

SEQ ID NO: 361005 - RNA, 26 nt, Human
ccaacacaguaaacccugucuccaca

SEQ ID NO: 361006 - RNA, 21 nt, Human
ccaacacaguucuccaagcuc

SEQ ID NO: 361007 - RNA, 32 nt, Human
ccaacacauacagcugauacacgcagaccaga

SEQ ID NO: 361008 - RNA, 31 nt, Human
ccaacacauacuucuacuuuuaaauaaacaa

SEQ ID NO: 361009 - RNA, 17 nt, Human
ccaacacauagggccac

SEQ ID NO: 361010 - RNA, 22 nt, Human
ccaacacaugagaccccaccuc

SEQ ID NO: 361011 - RNA, 18 nt, Human
ccaacacaugcgaguaca

SEQ ID NO: 361012 - RNA, 20 nt, Human
ccaacacaugcucacugcca

SEQ ID NO: 361013 - RNA, 32 nt, Human
ccaacacauuuauuuuccuugaccuacaaagg

SEQ ID NO: 361014 - RNA, 17 nt, Human
ccaacaccaggguugua

SEQ ID NO: 361015 - RNA, 32 nt, Human
ccaacaccauuucugggcuccuggggcucagc

SEQ ID NO: 361016 - RNA, 32 nt, Human
ccaacacccacugaucuuuaacucucacaugu

SEQ ID NO: 361017 - RNA, 32 nt, Human
ccaacacccagaugcaugcacacgcacacaca

SEQ ID NO: 361018 - RNA, 32 nt, Human
ccaacaccccauugaugcuguuccuucuaccu

SEQ ID NO: 361019 - RNA, 32 nt, Human
ccaacacccugcacuccugcuugcgccggcag

SEQ ID NO: 361020 - RNA, 32 nt, Human
ccaacacccuucucggaggcucaggucaagug

SEQ ID NO: 361021 - RNA, 32 nt, Human
ccaacaccugcucuugccugguaggaacaggc

SEQ ID NO: 361022 - RNA, 32 nt, Human
ccaacaccugugcuccugacagcuccaugcac

SEQ ID NO: 361023 - RNA, 32 nt, Human
ccaacaccuugaucuuggacuuccagccucca

SEQ ID NO: 361024 - RNA, 32 nt, Human
ccaacaccuugauguuggaugugaacugugag

SEQ ID NO: 361025 - RNA, 32 nt, Human
ccaacacgacgcauccuugggccccgccgugc

SEQ ID NO: 361026 - RNA, 32 nt, Human
ccaacacggguccauucuuccuggugauggca

SEQ ID NO: 361027 - RNA, 32 nt, Human
ccaacacguaaggaccuaauuaaaccaaacca

SEQ ID NO: 361028 - RNA, 32 nt, Human
ccaacacuaagcugucucgagccaagcuguga

SEQ ID NO: 361029 - RNA, 23 nt, Human
ccaacacuacccuucccugcacu

SEQ ID NO: 361030 - RNA, 32 nt, Human
ccaacacuccaccgcgaucugccugcggggga

SEQ ID NO: 361031 - RNA, 32 nt, Human
ccaacacucccucuuggagcuguucccugggu

SEQ ID NO: 361032 - RNA, 19 nt, Human
ccaacacucccuucuccca

SEQ ID NO: 361033 - RNA, 32 nt, Human
ccaacacuccugucugugggacuugaucugaa

SEQ ID NO: 361034 - RNA, 32 nt, Human
ccaacacugagcaaguaugcuguggaguccca

SEQ ID NO: 361035 - RNA, 32 nt, Human
ccaacacugcuggaggccuccauucucuguuc

SEQ ID NO: 361036 - RNA, 32 nt, Human
ccaacacuuacuuccuguuccuccucauucug

SEQ ID NO: 361037 - RNA, 32 nt, Human
ccaacacuugcagccccuccagagaaaaagcc

SEQ ID NO: 361038 - RNA, 32 nt, Human
ccaacagaaaugcagcauuuguggugugugaa

SEQ ID NO: 361039 - RNA, 32 nt, Human
ccaacagacacagcaggaggagagggaggugg

SEQ ID NO: 361040 - RNA, 24 nt, Human
ccaacagaccucugcuggcaucug

SEQ ID NO: 361041 - RNA, 32 nt, Human
ccaacagagaagggaaagcagucuguucugaa

SEQ ID NO: 361042 - RNA, 32 nt, Human
ccaacagagucguggugcuggaugcugugucg

SEQ ID NO: 361043 - RNA, 32 nt, Human
ccaacagauccucaucagcaaagcauuuggcu

SEQ ID NO: 361044 - RNA, 32 nt, Human
ccaacagaugcuuuucugucucugccucccuc

SEQ ID NO: 361045 - RNA, 32 nt, Human
ccaacagaugugagccacuuuucucagccugu

SEQ ID NO: 361046 - RNA, 32 nt, Human
ccaacagauuccuauggaguucuugaauucca

SEQ ID NO: 361047 - RNA, 19 nt, Human
ccaacagcagccccugcca

SEQ ID NO: 361048 - RNA, 32 nt, Human
ccaacagccacaccucuuccucgacaaucaca

SEQ ID NO: 361049 - RNA, 21 nt, Human
ccaacagccaccaagccugac

SEQ ID NO: 361050 - RNA, 32 nt, Human
ccaacagccaccagcagccaggagacaggccu

SEQ ID NO: 361051 - RNA, 32 nt, Human
ccaacagccacuuccagaaaaaucuuccaguu

SEQ ID NO: 361052 - RNA, 32 nt, Human
ccaacagccagccugcagccagcuggauggag

SEQ ID NO: 361053 - RNA, 32 nt, Human
ccaacagcccagcuggacauucugagacacuc

SEQ ID NO: 361054 - RNA, 32 nt, Human
ccaacagccuggccuugaauccaccucuuguu

SEQ ID NO: 361055 - RNA, 32 nt, Human
ccaacagccugggagaugagacaggguuagag

SEQ ID NO: 361056 - RNA, 32 nt, Human
ccaacagccuucagccucagaaacgcaugggg

SEQ ID NO: 361057 - RNA, 20 nt, Human
ccaacagccuuggaacucca

SEQ ID NO: 361058 - RNA, 32 nt, Human
ccaacagcuucgcccaaguuuggggacaggcu

SEQ ID NO: 361059 - RNA, 32 nt, Human
ccaacaggaagccacacagagggaagcagaaa

SEQ ID NO: 361060 - RNA, 32 nt, Human
ccaacaggagcagguuugaggggccaggccuc

SEQ ID NO: 361061 - RNA, 32 nt, Human
ccaacaggcugguaccaccacacucagcuaag

SEQ ID NO: 361062 - RNA, 32 nt, Human
ccaacaggggcagaggagggagcgugucuggu

SEQ ID NO: 361063 - RNA, 20 nt, Human
ccaacagggugaaaccccgu

SEQ ID NO: 361064 - RNA, 20 nt, Human
ccaacagggugaaacccugu

SEQ ID NO: 361065 - RNA, 32 nt, Human
ccaacaggguucaccaggaugagagaggagag

SEQ ID NO: 361066 - RNA, 32 nt, Human
ccaacaggucacuccuauucuuagagaaugug

SEQ ID NO: 361067 - RNA, 20 nt, Human
ccaacaggugaaaccccauc

SEQ ID NO: 361068 - RNA, 32 nt, Human
ccaacagucaucucuuccucuucaggccgcca

SEQ ID NO: 361069 - RNA, 32 nt, Human
ccaacagucguauccuggugaaugucuguuca

SEQ ID NO: 361070 - RNA, 32 nt, Human
ccaacagucugucaguguacagcagcaguacu

SEQ ID NO: 361071 - RNA, 32 nt, Human
ccaacagugaagauuaguguauuagugaaugc

SEQ ID NO: 361072 - RNA, 32 nt, Human
ccaacaguuuagcaagagucacucugagauug

SEQ ID NO: 361073 - RNA, 32 nt, Human
ccaacauaaagacaaaaggaagaaaaggagga

SEQ ID NO: 361074 - RNA, 32 nt, Human
ccaacauaaaguggagguuucaacacaggaga

SEQ ID NO: 361075 - RNA, 24 nt, Human
ccaacauaaugaaaccccaucccu

SEQ ID NO: 361076 - RNA, 24 nt, Human
ccaacauaaugaaaccccaucucu

SEQ ID NO: 361077 - RNA, 32 nt, Human
ccaacauacagcugugaugucauuucuguauu

SEQ ID NO: 361078 - RNA, 20 nt, Human
ccaacauacugaaaccccgu

SEQ ID NO: 361079 - RNA, 32 nt, Human
ccaacauaguggaccacauucuuuuugaaaua

SEQ ID NO: 361080 - RNA, 27 nt, Human
ccaacauaguuucaccccaucucuacu

SEQ ID NO: 361081 - RNA, 32 nt, Human
ccaacauauagugaaacccagucucuacuaaa

SEQ ID NO: 361082 - RNA, 32 nt, Human
ccaacauauagugaaacccugucucuacuaaa

SEQ ID NO: 361083 - RNA, 32 nt, Human
ccaacauauccauuucuuuuccuaguuacgga

SEQ ID NO: 361084 - RNA, 32 nt, Human
ccaacaucaaagcaucucacuccagccucugc

SEQ ID NO: 361085 - RNA, 32 nt, Human
ccaacaucaccacuacuuaccucaagucgugc

SEQ ID NO: 361086 - RNA, 32 nt, Human
ccaacaucagaccaagucccauggacaugcug

SEQ ID NO: 361087 - RNA, 19 nt, Human
ccaacaucaguggcagcag

SEQ ID NO: 361088 - RNA, 20 nt, Human
ccaacaucaugaaaccccgu

SEQ ID NO: 361089 - RNA, 32 nt, Human
ccaacaucaugguagcagcacacacuuccaaa

SEQ ID NO: 361090 - RNA, 19 nt, Human
ccaacauccauccguccuu

SEQ ID NO: 361091 - RNA, 22 nt, Human
ccaacauccuagagcacaggga

SEQ ID NO: 361092 - RNA, 32 nt, Human
ccaacauccucucaucccaggacauuuggggc

SEQ ID NO: 361093 - RNA, 20 nt, Human
ccaacauccuggucucuagg

SEQ ID NO: 361094 - RNA, 32 nt, Human
ccaacaucgcggaccccugugccuugucacag

SEQ ID NO: 361095 - RNA, 32 nt, Human
ccaacaucuauggugucccaggcacagugcca

SEQ ID NO: 361096 - RNA, 32 nt, Human
ccaacaucugaucugcugagauaugucugauc

SEQ ID NO: 361097 - RNA, 18 nt, Human
ccaacaucugccaccucu

SEQ ID NO: 361098 - RNA, 32 nt, Human
ccaacaucuuaguguuugcucucuccgggaag

SEQ ID NO: 361099 - RNA, 18 nt, Human
ccaacaucuuccauggac

SEQ ID NO: 361100 - RNA, 18 nt, Human
ccaacaugacacuaccau

SEQ ID NO: 361101 - RNA, 24 nt, Human
ccaacaugacgaaaccccaucucu

SEQ ID NO: 361102 - RNA, 32 nt, Human
ccaacaugccacaguguguugugcacagacac

SEQ ID NO: 361103 - RNA, 20 nt, Human
ccaacauggagaaaccccgu

SEQ ID NO: 361104 - RNA, 32 nt, Human
ccaacauggagaaacccugucucuauuaaaaa

SEQ ID NO: 361105 - RNA, 21 nt, Human
ccaacauggcaaaaacccauc

SEQ ID NO: 361106 - RNA, 32 nt, Human
ccaacauggcaaaaccccaucuguacuaaaaa

SEQ ID NO: 361107 - RNA, 32 nt, Human
ccaacauggccaaaaacugucucuacuaaaaa

SEQ ID NO: 361108 - RNA, 21 nt, Human
ccaacauggcgaaaacccauc

SEQ ID NO: 361109 - RNA, 32 nt, Human
ccaacauggcgaaaccccaucgcuacuaaaaa

SEQ ID NO: 361110 - RNA, 20 nt, Human
ccaacauggcgaaaucccgu

SEQ ID NO: 361111 - RNA, 32 nt, Human
ccaacaugggcaacauggugaaacacugucuc

SEQ ID NO: 361112 - RNA, 20 nt, Human
ccaacauggggaaaccccgu

SEQ ID NO: 361113 - RNA, 21 nt, Human
ccaacaugggucacuacucgu

SEQ ID NO: 361114 - RNA, 20 nt, Human
ccaacaugguaaaaucccgu

SEQ ID NO: 361115 - RNA, 18 nt, Human
ccaacaugguacagcaca

SEQ ID NO: 361116 - RNA, 32 nt, Human
ccaacauggugaaaacccaucuguacuaaaaa

SEQ ID NO: 361117 - RNA, 32 nt, Human
ccaacauggugaaacacuaucucuacuaaaaa

SEQ ID NO: 361118 - RNA, 18 nt, Human
ccaacauggugaaacccc

SEQ ID NO: 361119 - RNA, 32 nt, Human
ccaacauggugaaaccccaugucuacuaaaaa

SEQ ID NO: 361120 - RNA, 20 nt, Human
ccaacauggugaaaccccgu

SEQ ID NO: 361121 - RNA, 20 nt, Human
ccaacauggugaaacccugu

SEQ ID NO: 361122 - RNA, 19 nt, Human
ccaacauggugaaaccucg

SEQ ID NO: 361123 - RNA, 20 nt, Human
ccaacauggugaaaccucgu

SEQ ID NO: 361124 - RNA, 20 nt, Human
ccaacauggugacaccccgu

SEQ ID NO: 361125 - RNA, 20 nt, Human
ccaacauggugauaccccgu

SEQ ID NO: 361126 - RNA, 20 nt, Human
ccaacaugguuaaaccccgu

SEQ ID NO: 361127 - RNA, 19 nt, Human
ccaacaugugaaaccccgu

SEQ ID NO: 361128 - RNA, 32 nt, Human
ccaacaugugccagucucgggggcgagguaca

SEQ ID NO: 361129 - RNA, 32 nt, Human
ccaacauuccucacuacuacuuuuucuucccu

SEQ ID NO: 361130 - RNA, 32 nt, Human
ccaacauucucccaaucucucucuguuaaccc

SEQ ID NO: 361131 - RNA, 17 nt, Human
ccaacauugugcugcac

SEQ ID NO: 361132 - RNA, 17 nt, Human
ccaacauuuccagcucu

SEQ ID NO: 361133 - RNA, 32 nt, Human
ccaacauuuguaggggcacuaauccagcccuu

SEQ ID NO: 361134 - RNA, 18 nt, Human
ccaaccaaaaugcugcac

SEQ ID NO: 361135 - RNA, 23 nt, Human
ccaaccaaacccugaacagagga

SEQ ID NO: 361136 - RNA, 21 nt, Human
ccaaccaaagagccagccaga

SEQ ID NO: 361137 - RNA, 23 nt, Human
ccaaccaaaugacuucaggaaga

SEQ ID NO: 361138 - RNA, 32 nt, Human
ccaaccaacauggugaaaccccgucucuccua

SEQ ID NO: 361139 - RNA, 24 nt, Human
ccaaccaacauggugaaaccucgu

SEQ ID NO: 361140 - RNA, 32 nt, Human
ccaaccaacauggugaaaccucgugucuacua

SEQ ID NO: 361141 - RNA, 22 nt, Human
ccaaccaagcccuccagcaagg

SEQ ID NO: 361142 - RNA, 32 nt, Human
ccaaccaagcugccauggccaagggccgaacc

SEQ ID NO: 361143 - RNA, 32 nt, Human
ccaaccaaggggacaugauacagggaacaggu

SEQ ID NO: 361144 - RNA, 32 nt, Human
ccaaccaaggggauucuucgaucgugcaaguc

SEQ ID NO: 361145 - RNA, 32 nt, Human
ccaaccaauggcaggcugaaacuagcagauaa

SEQ ID NO: 361146 - RNA, 32 nt, Human
ccaaccacaaaaccacacacauagaccaucuc

SEQ ID NO: 361147 - RNA, 32 nt, Human
ccaaccacaagcaccaaagcagaggggcaggc

SEQ ID NO: 361148 - RNA, 32 nt, Human
ccaaccacaagucgcccuugacugcggcggcc

SEQ ID NO: 361149 - RNA, 32 nt, Human
ccaaccacacucuuggaccacagugccauaaa

SEQ ID NO: 361150 - RNA, 24 nt, Human
ccaaccacaucccaaguguccccu

SEQ ID NO: 361151 - RNA, 32 nt, Human
ccaaccaccagcgcauccacacgggcgagaag

SEQ ID NO: 361152 - RNA, 23 nt, Human
ccaaccacccaguccaggcuucc

SEQ ID NO: 361153 - RNA, 32 nt, Human
ccaaccacccaugcucuaaccuggagacagcc

SEQ ID NO: 361154 - RNA, 26 nt, Human
ccaaccaccccgacccagggcugccu

SEQ ID NO: 361155 - RNA, 32 nt, Human
ccaaccaccccugggauggcacuggcaggaca

SEQ ID NO: 361156 - RNA, 20 nt, Human
ccaaccaccugggcgagcca

SEQ ID NO: 361157 - RNA, 32 nt, Human
ccaaccaccuuuccauccccagccccucucau

SEQ ID NO: 361158 - RNA, 21 nt, Human
ccaaccacggcaauacugaaa

SEQ ID NO: 361159 - RNA, 21 nt, Human
ccaaccacguggaaagcuccu

SEQ ID NO: 361160 - RNA, 32 nt, Human
ccaaccagacacgggaaggagcagggcugccu

SEQ ID NO: 361161 - RNA, 32 nt, Human
ccaaccagagugagagggcagauaggcaggau

SEQ ID NO: 361162 - RNA, 32 nt, Human
ccaaccagaguugugucuaacuuuaggcaucu

SEQ ID NO: 361163 - RNA, 32 nt, Human
ccaaccagauaacauuuacucuaaguacccag

SEQ ID NO: 361164 - RNA, 32 nt, Human
ccaaccagcaggaugcggcuguggaaggcggu

SEQ ID NO: 361165 - RNA, 32 nt, Human
ccaaccagccugggugacagagggagacccug

SEQ ID NO: 361166 - RNA, 32 nt, Human
ccaaccagcgggccucauccuacacccucacc

SEQ ID NO: 361167 - RNA, 32 nt, Human
ccaaccaggccaggcugcgcucagaacacacc

SEQ ID NO: 361168 - RNA, 32 nt, Human
ccaaccauacaaaaauuccuuuucccgaagga

SEQ ID NO: 361169 - RNA, 32 nt, Human
ccaaccauagucagagguggcacaucugcuca

SEQ ID NO: 361170 - RNA, 32 nt, Human
ccaaccaucacagaggacagaugaguauuguc

SEQ ID NO: 361171 - RNA, 32 nt, Human
ccaaccaugcagccaccaaccccagccagugu

SEQ ID NO: 361172 - RNA, 21 nt, Human
ccaaccaugccaagccugccu

SEQ ID NO: 361173 - RNA, 32 nt, Human
ccaaccaugcuuuaaagaaccugcucuuuacg

SEQ ID NO: 361174 - RNA, 32 nt, Human
ccaaccauggccugugguggcuucacgggcua

SEQ ID NO: 361175 - RNA, 32 nt, Human
ccaaccaugguggcucacaccuguaaucccaa

SEQ ID NO: 361176 - RNA, 32 nt, Human
ccaaccauuaucccuuugaauauugcuucugc

SEQ ID NO: 361177 - RNA, 31 nt, Human
ccaacccaaauguccaucaaugauagacugg

SEQ ID NO: 361178 - RNA, 31 nt, Human
ccaacccaaauguccauccacaguugaagcu

SEQ ID NO: 361179 - RNA, 32 nt, Human
ccaacccaagccagguaggcaauacuuucccu

SEQ ID NO: 361180 - RNA, 32 nt, Human
ccaacccaagcccccagaccaucuguggaggu

SEQ ID NO: 361181 - RNA, 32 nt, Human
ccaacccagagcuccccacagaccugguguaa

SEQ ID NO: 361182 - RNA, 21 nt, Human
ccaacccagcggacccuccca

SEQ ID NO: 361183 - RNA, 32 nt, Human
ccaacccagcuccacccagcaguguccugggg

SEQ ID NO: 361184 - RNA, 32 nt, Human
ccaacccaggaucaggcaggacggcuggggcu

SEQ ID NO: 361185 - RNA, 20 nt, Human
ccaacccaucccuuaagggc

SEQ ID NO: 361186 - RNA, 32 nt, Human
ccaacccaucuauuuccagaucuacacaguca

SEQ ID NO: 361187 - RNA, 32 nt, Human
ccaaccccaaccccaaugagcaguacaguauu

SEQ ID NO: 361188 - RNA, 23 nt, Human
ccaaccccaagcucugggcacau

SEQ ID NO: 361189 - RNA, 28 nt, Human
ccaaccccaagugccuucaugcccuagg

SEQ ID NO: 361190 - RNA, 32 nt, Human
ccaaccccacucuuguaacacugcacaugcaa

SEQ ID NO: 361191 - RNA, 32 nt, Human
ccaaccccagcccuggguagccugcagcaugg

SEQ ID NO: 361192 - RNA, 32 nt, Human
ccaaccccagcuggaugugccucccaggccug

SEQ ID NO: 361193 - RNA, 32 nt, Human
ccaacccccaaaccagguggaaaaaggaaggg

SEQ ID NO: 361194 - RNA, 21 nt, Human
ccaacccccaaacugcugcug

SEQ ID NO: 361195 - RNA, 32 nt, Human
ccaacccccagcacccgggcucagggaccaca

SEQ ID NO: 361196 - RNA, 32 nt, Human
ccaacccccuacugcuguucccagucagucug

SEQ ID NO: 361197 - RNA, 32 nt, Human
ccaacccccucagcgaccacagugccucgccc

SEQ ID NO: 361198 - RNA, 22 nt, Human
ccaacccccugcucugcugcaa

SEQ ID NO: 361199 - RNA, 18 nt, Human
ccaaccccgcuucugcca

SEQ ID NO: 361200 - RNA, 32 nt, Human
ccaaccccggaaaauccucugucuccagucuc

SEQ ID NO: 361201 - RNA, 32 nt, Human
ccaaccccgucucucccucccuugccacccaa

SEQ ID NO: 361202 - RNA, 32 nt, Human
ccaaccccuaggcuugaggguggagagccagg

SEQ ID NO: 361203 - RNA, 32 nt, Human
ccaaccccucccccacgucucucugccugcug

SEQ ID NO: 361204 - RNA, 21 nt, Human
ccaaccccucccucccaccac

SEQ ID NO: 361205 - RNA, 21 nt, Human
ccaaccccucucagagccuca

SEQ ID NO: 361206 - RNA, 32 nt, Human
ccaaccccugcucccacacagugcagaccgga

SEQ ID NO: 361207 - RNA, 32 nt, Human
ccaaccccugcucugcaccaucugggcccucg

SEQ ID NO: 361208 - RNA, 32 nt, Human
ccaaccccugcucugucauucgugaccugcuc

SEQ ID NO: 361209 - RNA, 32 nt, Human
ccaaccccugcucuuccaggucgggccccggg

SEQ ID NO: 361210 - RNA, 32 nt, Human
ccaaccccugcucuugccagcuggccccugcu

SEQ ID NO: 361211 - RNA, 32 nt, Human
ccaaccccugggauggcucacagccugcuccc

SEQ ID NO: 361212 - RNA, 32 nt, Human
ccaaccccuguacuccccuuugcuccaucagu

SEQ ID NO: 361213 - RNA, 32 nt, Human
ccaaccccuguggagcccgcacccccacccuu

SEQ ID NO: 361214 - RNA, 32 nt, Human
ccaacccgauauaccaggugcucugggggaug

SEQ ID NO: 361215 - RNA, 32 nt, Human
ccaacccgcuuccugacugaccugagcaaggu

SEQ ID NO: 361216 - RNA, 32 nt, Human
ccaacccgggcagaggaggaggugcggcggcg

SEQ ID NO: 361217 - RNA, 24 nt, Human
ccaacccuaccccugggcccugcc

SEQ ID NO: 361218 - RNA, 32 nt, Human
ccaacccuaggcuguuuccccaaaaagaaaaa

SEQ ID NO: 361219 - RNA, 32 nt, Human
ccaacccucucugaaguggaaguggacugaca

SEQ ID NO: 361220 - RNA, 32 nt, Human
ccaacccucugcucccguuucucccucugguu

SEQ ID NO: 361221 - RNA, 32 nt, Human
ccaacccugcauggucaaguggugcuaaccca

SEQ ID NO: 361222 - RNA, 32 nt, Human
ccaacccugccugccgcugcaccugccugccg

SEQ ID NO: 361223 - RNA, 32 nt, Human
ccaacccugccuggaucucccugcuucacccc

SEQ ID NO: 361224 - RNA, 32 nt, Human
ccaacccugcgagaggcagccuccucuugcaa

SEQ ID NO: 361225 - RNA, 32 nt, Human
ccaacccuguccacccuugaccaccucugggg

SEQ ID NO: 361226 - RNA, 32 nt, Human
ccaacccuguggccuucagggcucagagcagc

SEQ ID NO: 361227 - RNA, 32 nt, Human
ccaacccuucccucccuuuccccaccucuuac

SEQ ID NO: 361228 - RNA, 22 nt, Human
ccaacccuugggccaggcugcc

SEQ ID NO: 361229 - RNA, 32 nt, Human
ccaaccgaagucacuccaggcugggaucaaau

SEQ ID NO: 361230 - RNA, 32 nt, Human
ccaaccgacauggcugccccaggugggaaggg

SEQ ID NO: 361231 - RNA, 32 nt, Human
ccaaccgaccaacauggugaaaccccaucuuu

SEQ ID NO: 361232 - RNA, 32 nt, Human
ccaaccgaccagcaaccccaauuuuccagccc

SEQ ID NO: 361233 - RNA, 32 nt, Human
ccaaccgcaaccugccuugaccaggaaggagc

SEQ ID NO: 361234 - RNA, 32 nt, Human
ccaaccgcauccucuuccaggaguuccggcag

SEQ ID NO: 361235 - RNA, 32 nt, Human
ccaaccgcuccgcugcgcgcaggcugggcugc

SEQ ID NO: 361236 - RNA, 32 nt, Human
ccaaccuacaacuugaaguacaauucaccugg

SEQ ID NO: 361237 - RNA, 32 nt, Human
ccaaccuagagauucacuccuuaucuaugaag

SEQ ID NO: 361238 - RNA, 32 nt, Human
ccaaccuagcuagcaacauuuguuuuagucug

SEQ ID NO: 361239 - RNA, 32 nt, Human
ccaaccuaucgcugcuggcagcacuuuuugag

SEQ ID NO: 361240 - RNA, 32 nt, Human
ccaaccucaagcaauccuccugccucagccuc

SEQ ID NO: 361241 - RNA, 32 nt, Human
ccaaccucacacugcuaugauugccaacucca

SEQ ID NO: 361242 - RNA, 32 nt, Human
ccaaccucacauccuacuagucuuccaagagg

SEQ ID NO: 361243 - RNA, 32 nt, Human
ccaaccucaggugauccgcccaccucggccuc

SEQ ID NO: 361244 - RNA, 32 nt, Human
ccaaccucauuuccuguuucaccuugauuuuc

SEQ ID NO: 361245 - RNA, 32 nt, Human
ccaaccuccaccuccuccuuccauuuugacca

SEQ ID NO: 361246 - RNA, 32 nt, Human
ccaaccucccaaaucgcugagcugcuuguuua

SEQ ID NO: 361247 - RNA, 32 nt, Human
ccaaccuccuccuggguuccagcgauucuccu

SEQ ID NO: 361248 - RNA, 32 nt, Human
ccaaccuccugcagguggacagugaguucaca

SEQ ID NO: 361249 - RNA, 26 nt, Human
ccaaccuccuuccccaccuccuuccc

SEQ ID NO: 361250 - RNA, 18 nt, Human
ccaaccucuaacugcaga

SEQ ID NO: 361251 - RNA, 22 nt, Human
ccaaccucuauacaccauaaag

SEQ ID NO: 361252 - RNA, 32 nt, Human
ccaaccucugggcaaaugcucaucugacuucc

SEQ ID NO: 361253 - RNA, 32 nt, Human
ccaaccucuuacucugaauucagugcugcuuu

SEQ ID NO: 361254 - RNA, 32 nt, Human
ccaaccucuugggcaccccauggcuggcugcu

SEQ ID NO: 361255 - RNA, 32 nt, Human
ccaaccucuuuuuccuccuggacacauuggaa

SEQ ID NO: 361256 - RNA, 32 nt, Human
ccaaccugagccaccucuuccuccacgggaac

SEQ ID NO: 361257 - RNA, 32 nt, Human
ccaaccugaggcugccccggccgccugcgcac

SEQ ID NO: 361258 - RNA, 32 nt, Human
ccaaccugcucacccuguggcucuucuccaac

SEQ ID NO: 361259 - RNA, 19 nt, Human
ccaaccuggaaucccugca

SEQ ID NO: 361260 - RNA, 24 nt, Human
ccaaccuggacaacaagagcgaaa

SEQ ID NO: 361261 - RNA, 23 nt, Human
ccaaccuggacaacagagcgaga

SEQ ID NO: 361262 - RNA, 32 nt, Human
ccaaccuggaucacucuuccacccaaccgagg

SEQ ID NO: 361263 - RNA, 32 nt, Human
ccaaccuggccaacauggugaaaccuugucuc

SEQ ID NO: 361264 - RNA, 32 nt, Human
ccaaccuggccaacauguugaaaccucgucug

SEQ ID NO: 361265 - RNA, 32 nt, Human
ccaaccuggcugcugcaguacuugcucuaacu

SEQ ID NO: 361266 - RNA, 32 nt, Human
ccaaccugggcaaaauagugagagacccugua

SEQ ID NO: 361267 - RNA, 32 nt, Human
ccaaccugggcaacaagagcgaaacuccaucu

SEQ ID NO: 361268 - RNA, 24 nt, Human
ccaaccugggcaacaagagugaaa

SEQ ID NO: 361269 - RNA, 32 nt, Human
ccaaccugggcaacaagagugaaacuccaucu

SEQ ID NO: 361270 - RNA, 32 nt, Human
ccaaccugggcaacaccgugagaccccaucuc

SEQ ID NO: 361271 - RNA, 32 nt, Human
ccaaccugggcaacagaacaagaacccaucuc

SEQ ID NO: 361272 - RNA, 32 nt, Human
ccaaccugggcaacagaaugagacccugucuc

SEQ ID NO: 361273 - RNA, 23 nt, Human
ccaaccugggcaacagagggaga

SEQ ID NO: 361274 - RNA, 32 nt, Human
ccaaccugggcaacagaguaagaccuugucuu

SEQ ID NO: 361275 - RNA, 32 nt, Human
ccaaccugggcaacagaguaagacuccuucuc

SEQ ID NO: 361276 - RNA, 32 nt, Human
ccaaccugggcaacagagugagacccugucuc

SEQ ID NO: 361277 - RNA, 23 nt, Human
ccaaccugggcaacauagugaga

SEQ ID NO: 361278 - RNA, 32 nt, Human
ccaaccugggcaacauagugagacccccaucu

SEQ ID NO: 361279 - RNA, 32 nt, Human
ccaaccugggcaacauagugagaccuccaucu

SEQ ID NO: 361280 - RNA, 32 nt, Human
ccaaccugggcaacauagugagauucuguuaa

SEQ ID NO: 361281 - RNA, 32 nt, Human
ccaaccugggcaacauagugggacuucaucuc

SEQ ID NO: 361282 - RNA, 32 nt, Human
ccaaccugggcaacaugaugaaacucuagcuc

SEQ ID NO: 361283 - RNA, 32 nt, Human
ccaaccugggcaacauggugaaaccccugucu

SEQ ID NO: 361284 - RNA, 23 nt, Human
ccaaccugggcaauagagcgaga

SEQ ID NO: 361285 - RNA, 32 nt, Human
ccaaccugggcaauagaggaagacuccggucu

SEQ ID NO: 361286 - RNA, 32 nt, Human
ccaaccugggcaauauagcaagaucccaucuc

SEQ ID NO: 361287 - RNA, 32 nt, Human
ccaaccugggcaauauagugagacccuauuuc

SEQ ID NO: 361288 - RNA, 17 nt, Human
ccaaccugggcugcaga

SEQ ID NO: 361289 - RNA, 32 nt, Human
ccaaccuggggucccuggaggccagaaaagug

SEQ ID NO: 361290 - RNA, 23 nt, Human
ccaaccuggguaacaaagugaga

SEQ ID NO: 361291 - RNA, 24 nt, Human
ccaaccugggugacaagagugaaa

SEQ ID NO: 361292 - RNA, 32 nt, Human
ccaaccugggugacagacucugucuccaaaac

SEQ ID NO: 361293 - RNA, 23 nt, Human
ccaaccugggugacagagcgaaa

SEQ ID NO: 361294 - RNA, 23 nt, Human
ccaaccugggugacagagcgaga

SEQ ID NO: 361295 - RNA, 20 nt, Human
ccaaccuggugaaaccccgu

SEQ ID NO: 361296 - RNA, 20 nt, Human
ccaaccuggugaaacccugu

SEQ ID NO: 361297 - RNA, 32 nt, Human
ccaaccuguaguucagccaccuucaacacuug

SEQ ID NO: 361298 - RNA, 32 nt, Human
ccaaccugucuccagccaccuucuguggaguc

SEQ ID NO: 361299 - RNA, 18 nt, Human
ccaaccuguguacugaca

SEQ ID NO: 361300 - RNA, 32 nt, Human
ccaaccuuacuuccagcuugcacaucagaauu

SEQ ID NO: 361301 - RNA, 32 nt, Human
ccaaccuuauuuccagcuugcacaucagaauu

SEQ ID NO: 361302 - RNA, 32 nt, Human
ccaaccuucccaaacgccuccccugccccaau

SEQ ID NO: 361303 - RNA, 32 nt, Human
ccaaccuugcauucugagauaaaccccacuug

SEQ ID NO: 361304 - RNA, 32 nt, Human
ccaaccuugccagcuggcccagcuucaccucu

SEQ ID NO: 361305 - RNA, 32 nt, Human
ccaaccuuuccaggccuucucuacgucugcuu

SEQ ID NO: 361306 - RNA, 32 nt, Human
ccaaccuuuuucuguggcuuuagcaguggggc

SEQ ID NO: 361307 - RNA, 32 nt, Human
ccaacgaccuaaugauguucagcucuuuuaug

SEQ ID NO: 361308 - RNA, 32 nt, Human
ccaacgacucaaaucacaucaagcagaaccag

SEQ ID NO: 361309 - RNA, 32 nt, Human
ccaacgacuguaggaggaaaaauuaaggggag

SEQ ID NO: 361310 - RNA, 32 nt, Human
ccaacgagccaccacagccaccagucccagaa

SEQ ID NO: 361311 - RNA, 32 nt, Human
ccaacgagguacugagugucggcaucagcacu

SEQ ID NO: 361312 - RNA, 23 nt, Human
ccaacgaugccccccaggccccu

SEQ ID NO: 361313 - RNA, 32 nt, Human
ccaacgccaacuggcaaccucuuuacucuuag

SEQ ID NO: 361314 - RNA, 32 nt, Human
ccaacgccacucggugcauuuccccaggcgcu

SEQ ID NO: 361315 - RNA, 32 nt, Human
ccaacgcccaaagcccugaugaccugguucuu

SEQ ID NO: 361316 - RNA, 32 nt, Human
ccaacgcccagccuggcaagggugagcccaga

SEQ ID NO: 361317 - RNA, 32 nt, Human
ccaacgccccacccacugccucccucuggccu

SEQ ID NO: 361318 - RNA, 21 nt, Human
ccaacgcccccuuucccucuc

SEQ ID NO: 361319 - RNA, 32 nt, Human
ccaacgcccugagacaccagcccugcuuuaag

SEQ ID NO: 361320 - RNA, 22 nt, Human
ccaacgccuccucccugagcca

SEQ ID NO: 361321 - RNA, 32 nt, Human
ccaacgccuucugggcuuucuucagaggucac

SEQ ID NO: 361322 - RNA, 32 nt, Human
ccaacgcgcuugaggaccagcccagccggggc

SEQ ID NO: 361323 - RNA, 32 nt, Human
ccaacgcggucugguuuuccagccugggagug

SEQ ID NO: 361324 - RNA, 32 nt, Human
ccaacgcugccaacaccuugaucucugacuuc

SEQ ID NO: 361325 - RNA, 32 nt, Human
ccaacggccagagcuacaggacugccugggac

SEQ ID NO: 361326 - RNA, 32 nt, Human
ccaacggccccagcuucucagcucgcuggaug

SEQ ID NO: 361327 - RNA, 32 nt, Human
ccaacggcggagggggcggggaagggagauuc

SEQ ID NO: 361328 - RNA, 32 nt, Human
ccaacggcucugcuaucauuuguacucgggaa

SEQ ID NO: 361329 - RNA, 32 nt, Human
ccaacgggaccuaccuccucccggcuaccuaa

SEQ ID NO: 361330 - RNA, 32 nt, Human
ccaacgggaggauggcuucacagcagagccag

SEQ ID NO: 361331 - RNA, 21 nt, Human
ccaacgggcacaagcauucua

SEQ ID NO: 361332 - RNA, 32 nt, Human
ccaacggggcuuucauacccaaggaucuguuu

SEQ ID NO: 361333 - RNA, 24 nt, Human
ccaacgggggcggaucacuugagg

SEQ ID NO: 361334 - RNA, 32 nt, Human
ccaacgggggcggaucacuugaggucagaagu

SEQ ID NO: 361335 - RNA, 32 nt, Human
ccaacggugaaugucuacuaugugccacacgu

SEQ ID NO: 361336 - RNA, 32 nt, Human
ccaacgucuauagcugcuccaucccagccacc

SEQ ID NO: 361337 - RNA, 32 nt, Human
ccaacgugagagagacaggcagacagacagaa

SEQ ID NO: 361338 - RNA, 32 nt, Human
ccaacgugcagcaggugcagauccaccagauc

SEQ ID NO: 361339 - RNA, 22 nt, Human
ccaacgugcugggauuacaggc

SEQ ID NO: 361340 - RNA, 24 nt, Human
ccaacgugcugggauuacaggugu

SEQ ID NO: 361341 - RNA, 24 nt, Human
ccaacgugcugggauuauaggcgu

SEQ ID NO: 361342 - RNA, 32 nt, Human
ccaacguggagaaacacuaucucuacuaaaaa

SEQ ID NO: 361343 - RNA, 32 nt, Human
ccaacguggagaaaccccgucucuauuaaaaa

SEQ ID NO: 361344 - RNA, 24 nt, Human
ccaacguggauggaucaccugagg

SEQ ID NO: 361345 - RNA, 32 nt, Human
ccaacguggauggaucaccugaggucaggagu

SEQ ID NO: 361346 - RNA, 20 nt, Human
ccaacguggugaaacaccgu

SEQ ID NO: 361347 - RNA, 20 nt, Human
ccaacguggugaaaccccgu

SEQ ID NO: 361348 - RNA, 20 nt, Human
ccaacguggugaaacccugu

SEQ ID NO: 361349 - RNA, 20 nt, Human
ccaacguggugaaaccucgu

SEQ ID NO: 361350 - RNA, 20 nt, Human
ccaacguggugaaaucccgu

SEQ ID NO: 361351 - RNA, 20 nt, Human
ccaacguguugaaaccccgu

SEQ ID NO: 361352 - RNA, 32 nt, Human
ccaacuaaaccucaaaugaaccagccccuaac

SEQ ID NO: 361353 - RNA, 32 nt, Human
ccaacuaagcaagauugugaucccagaaauug

SEQ ID NO: 361354 - RNA, 22 nt, Human
ccaacuaccuccgucagcaaga

SEQ ID NO: 361355 - RNA, 32 nt, Human
ccaacuacucaaucauacaaaaagaagaguau

SEQ ID NO: 361356 - RNA, 20 nt, Human
ccaacuacucaggaggcuga

SEQ ID NO: 361357 - RNA, 20 nt, Human
ccaacuacucgggaggccga

SEQ ID NO: 361358 - RNA, 23 nt, Human
ccaacuagcugggacuacaggug

SEQ ID NO: 361359 - RNA, 32 nt, Human
ccaacuaguuauugaauguaaaccagauggca

SEQ ID NO: 361360 - RNA, 32 nt, Human
ccaacuaguuucuuccuggggccaguuuuggg

SEQ ID NO: 361361 - RNA, 32 nt, Human
ccaacuauaauuauaaucaaaaucaaugcagg

SEQ ID NO: 361362 - RNA, 32 nt, Human
ccaacuauggaagggagcugagcuccaguauu

SEQ ID NO: 361363 - RNA, 32 nt, Human
ccaacuauguggagcugcggcaguaggccccc

SEQ ID NO: 361364 - RNA, 25 nt, Human
ccaacucaagugucaccuccuuccc

SEQ ID NO: 361365 - RNA, 32 nt, Human
ccaacucagccgcagcguuccccagcuccccu

SEQ ID NO: 361366 - RNA, 32 nt, Human
ccaacucagcuccaaaaccacacacaaugucu

SEQ ID NO: 361367 - RNA, 19 nt, Human
ccaacucaucauuuuccua

SEQ ID NO: 361368 - RNA, 32 nt, Human
ccaacucauucuaugaggccaacaucaucuug

SEQ ID NO: 361369 - RNA, 32 nt, Human
ccaacuccagcagcuggacucugggcccacaa

SEQ ID NO: 361370 - RNA, 32 nt, Human
ccaacuccagcggucccaugucagccuucuga

SEQ ID NO: 361371 - RNA, 32 nt, Human
ccaacucccaaaagcuagaacacugccaacug

SEQ ID NO: 361372 - RNA, 32 nt, Human
ccaacucccacaccccuggaucuaggcagcca

SEQ ID NO: 361373 - RNA, 32 nt, Human
ccaacucccagccuagggcagcagggagucuu

SEQ ID NO: 361374 - RNA, 32 nt, Human
ccaacucccccaggcucccuguccacugcccu

SEQ ID NO: 361375 - RNA, 17 nt, Human
ccaacuccgagggccca

SEQ ID NO: 361376 - RNA, 32 nt, Human
ccaacuccguggaagcucugcugagaugcaga

SEQ ID NO: 361377 - RNA, 32 nt, Human
ccaacuccguugugguccagccccaggccucc

SEQ ID NO: 361378 - RNA, 32 nt, Human
ccaacuccuacaaaugagaauucuugcacaaa

SEQ ID NO: 361379 - RNA, 32 nt, Human
ccaacuccuccaauggcugaagcuacuuccuc

SEQ ID NO: 361380 - RNA, 32 nt, Human
ccaacuccucuauccaagacugugcccacauc

SEQ ID NO: 361381 - RNA, 24 nt, Human
ccaacuccucuggcccuccuuccc

SEQ ID NO: 361382 - RNA, 32 nt, Human
ccaacuccuuucucccgagccugcuggcagau

SEQ ID NO: 361383 - RNA, 32 nt, Human
ccaacucucacacccagcccaggcugcagucu

SEQ ID NO: 361384 - RNA, 32 nt, Human
ccaacucucacccugugaauccacugacuggg

SEQ ID NO: 361385 - RNA, 32 nt, Human
ccaacucucauggaugacuuugagggguucaa

SEQ ID NO: 361386 - RNA, 32 nt, Human
ccaacucuccccugaccugugagcccagcugg

SEQ ID NO: 361387 - RNA, 32 nt, Human
ccaacucugaaagagagugaaaaugcagacaa

SEQ ID NO: 361388 - RNA, 32 nt, Human
ccaacucuggcagucucuccuggcagaucucc

SEQ ID NO: 361389 - RNA, 32 nt, Human
ccaacucuggcuuaaagaucuugcuguggcuc

SEQ ID NO: 361390 - RNA, 32 nt, Human
ccaacucuguucccuucuccuuucaucccaga

SEQ ID NO: 361391 - RNA, 32 nt, Human
ccaacucuguucuauuucuuugcaggagccug

SEQ ID NO: 361392 - RNA, 32 nt, Human
ccaacucuguuuccucauugcccccugagaug

SEQ ID NO: 361393 - RNA, 32 nt, Human
ccaacucuucccccucucccaguugucccgau

SEQ ID NO: 361394 - RNA, 32 nt, Human
ccaacucuuccucuuucuucuucuugagagag

SEQ ID NO: 361395 - RNA, 32 nt, Human
ccaacucuucuuccuuccccugaccuaggugu

SEQ ID NO: 361396 - RNA, 32 nt, Human
ccaacucuucuuuuuaaagauucuuguggcug

SEQ ID NO: 361397 - RNA, 18 nt, Human
ccaacugacacuggcaca

SEQ ID NO: 361398 - RNA, 32 nt, Human
ccaacugaccaccuuuguuucucccccauguu
